United States Patent Application Publication US 2020/0216857 A1 - sequence listing, part 3

SEQ ID NO: 22709 - DNA, 20 bp, Artificial Sequence
  Description of Artificial Sequence: Synthetic oligonucleotide
  Target: ATXN2; (-) strand; PAM type: NRG; PAM sequence: TGG
ttagcatagtgcctagcaca

SEQ ID NO: 22710 - DNA, 20 bp, Artificial Sequence
  Description of Artificial Sequence: Synthetic oligonucleotide
  Target: ATXN2; (-) strand; PAM type: NRG; PAM sequence: TAG
aaagtgtttagcatagtgcc

SEQ ID NO: 22711 - DNA, 20 bp, Artificial Sequence
  Description of Artificial Sequence: Synthetic oligonucleotide
  Target: ATXN2; (-) strand; PAM type: NRG; PAM sequence: TAG
tgcctataaagtgtttagca

SEQ ID NO: 22712 - DNA, 20 bp, Artificial Sequence
  Description of Artificial Sequence: Synthetic oligonucleotide
  Target: ATXN2; (-) strand; PAM type: NRG; PAM sequence: TAG
gatattgcctataaagtgtt

SEQ ID NO: 22713 - DNA, 20 bp, Artificial Sequence
  Description of Artificial Sequence: Synthetic oligonucleotide
  Target: ATXN2; (-) strand; PAM type: NRG; PAM sequence: AAG
tcgatgagatattgcctata

SEQ ID NO: 22714 - DNA, 20 bp, Artificial Sequence
  Description of Artificial Sequence: Synthetic oligonucleotide
  Target: ATXN2; (-) strand; PAM type: NRG; PAM sequence: GAG
tgttcctgtgagagctcgat

SEQ ID NO: 22715 - DNA, 20 bp, Artificial Sequence
  Description of Artificial Sequence: Synthetic oligonucleotide
  Target: ATXN2; (-) strand; PAM type: NRG; PAM sequence: GAG
gcttcatagtgttcctgtga

SEQ ID NO: 22716 - DNA, 20 bp, Artificial Sequence
  Description of Artificial Sequence: Synthetic oligonucleotide
  Target: ATXN2; (-) strand; PAM type: NRG; PAM sequence: GAG
ctgcttcatagtgttcctgt

SEQ ID NO: 22717 - DNA, 20 bp, Artificial Sequence
  Description of Artificial Sequence: Synthetic oligonucleotide
  Target: ATXN2; (-) strand; PAM type: NRG; PAM sequence: TAG
taattttagaacctgcttca

SEQ ID NO: 22718 - DNA, 20 bp, Artificial Sequence
  Description of Artificial Sequence: Synthetic oligonucleotide
  Target: ATXN2; (-) strand; PAM type: NRG; PAM sequence: TAG
aagccaaaatgggttaattt

SEQ ID NO: 22719 - DNA, 20 bp, Artificial Sequence
  Description of Artificial Sequence: Synthetic oligonucleotide
  Target: ATXN2; (-) strand; PAM type: NRG; PAM sequence: GGG
tacttcccccaagccaaaat

SEQ ID NO: 22720 - DNA, 20 bp, Artificial Sequence
  Description of Artificial Sequence: Synthetic oligonucleotide
  Target: ATXN2; (-) strand; PAM type: NRG; PAM sequence: TGG
ctacttcccccaagccaaaa

SEQ ID NO: 22721 - DNA, 20 bp, Artificial Sequence
  Description of Artificial Sequence: Synthetic oligonucleotide
  Target: ATXN2; (-) strand; PAM type: NRG; PAM sequence: AAG
gcatgctatctacttccccc

SEQ ID NO: 22722 - DNA, 20 bp, Artificial Sequence
  Description of Artificial Sequence: Synthetic oligonucleotide
  Target: ATXN2; (-) strand; PAM type: NRG; PAM sequence: TGG
acatcatgtgcgtaacattg

SEQ ID NO: 22723 - DNA, 20 bp, Artificial Sequence
  Description of Artificial Sequence: Synthetic oligonucleotide
  Target: ATXN2; (-) strand; PAM type: NRG; PAM sequence: TGG
atggacctaggtttgaatgt

SEQ ID NO: 22724 - DNA, 20 bp, Artificial Sequence
  Description of Artificial Sequence: Synthetic oligonucleotide
  Target: ATXN2; (-) strand; PAM type: NRG; PAM sequence: AGG
ttttagaggtaaatggacct

SEQ ID NO: 22725 - DNA, 20 bp, Artificial Sequence
  Description of Artificial Sequence: Synthetic oligonucleotide
  Target: ATXN2; (-) strand; PAM type: NRG; PAM sequence: TAG
gttttagaggtaaatggacc

SEQ ID NO: 22726 - DNA, 20 bp, Artificial Sequence
  Description of Artificial Sequence: Synthetic oligonucleotide
  Target: ATXN2; (-) strand; PAM type: NRG; PAM sequence: TGG
atgtgggttttagaggtaaa

SEQ ID NO: 22727 - DNA, 20 bp, Artificial Sequence
  Description of Artificial Sequence: Synthetic oligonucleotide
  Target: ATXN2; (-) strand; PAM type: NRG; PAM sequence: AGG
gttaataatgtgggttttag

SEQ ID NO: 22728 - DNA, 20 bp, Artificial Sequence
  Description of Artificial Sequence: Synthetic oligonucleotide
  Target: ATXN2; (-) strand; PAM type: NRG; PAM sequence: GAG
ggttaataatgtgggtttta

SEQ ID NO: 22729 - DNA, 20 bp, Artificial Sequence
  Description of Artificial Sequence: Synthetic oligonucleotide
  Target: ATXN2; (-) strand; PAM type: NRG; PAM sequence: TAG
tgggttaataatgtgggttt

SEQ ID NO: 22730 - DNA, 20 bp, Artificial Sequence
  Description of Artificial Sequence: Synthetic oligonucleotide
  Target: ATXN2; (-) strand; PAM type: NRG; PAM sequence: GGG
ctgttttgggttaataatgt

SEQ ID NO: 22731 - DNA, 20 bp, Artificial Sequence
  Description of Artificial Sequence: Synthetic oligonucleotide
  Target: ATXN2; (-) strand; PAM type: NRG; PAM sequence: TGG
tctgttttgggttaataatg

SEQ ID NO: 22732 - DNA, 20 bp, Artificial Sequence
  Description of Artificial Sequence: Synthetic oligonucleotide
  Target: ATXN2; (-) strand; PAM type: NRG; PAM sequence: GGG
ctagtaatttgatctgtttt

SEQ ID NO: 22733 - DNA, 20 bp, Artificial Sequence
  Description of Artificial Sequence: Synthetic oligonucleotide
  Target: ATXN2; (-) strand; PAM type: NRG; PAM sequence: TGG
gctagtaatttgatctgttt

SEQ ID NO: 22734 - DNA, 20 bp, Artificial Sequence
  Description of Artificial Sequence: Synthetic oligonucleotide
  Target: ATXN2; (-) strand; PAM type: NRG; PAM sequence: TAG
tttatttgtgtaagaattgc

SEQ ID NO: 22735 - DNA, 20 bp, Artificial Sequence
  Description of Artificial Sequence: Synthetic oligonucleotide
  Target: ATXN2; (-) strand; PAM type: NRG; PAM sequence: AAG
gctgatagctttatttgtgt

SEQ ID NO: 22736 - DNA, 20 bp, Artificial Sequence
  Description of Artificial Sequence: Synthetic oligonucleotide
  Target: ATXN2; (-) strand; PAM type: NRG; PAM sequence: TAG
agccatatgcagagtgctga

SEQ ID NO: 22737 - DNA, 20 bp, Artificial Sequence
  Description of Artificial Sequence: Synthetic oligonucleotide
  Target: ATXN2; (-) strand; PAM type: NRG; PAM sequence: GAG
tcccttttgagccatatgca

SEQ ID NO: 22738 - DNA, 20 bp, Artificial Sequence
  Description of Artificial Sequence: Synthetic oligonucleotide
  Target: ATXN2; (-) strand; PAM type: NRG; PAM sequence: CAG
cttcccttttgagccatatg

SEQ ID NO: 22739 - DNA, 20 bp, Artificial Sequence
  Description of Artificial Sequence: Synthetic oligonucleotide
  Target: ATXN2; (-) strand; PAM type: NRG; PAM sequence: GAG
tttgttgttccttccctttt

SEQ ID NO: 22740 - DNA, 20 bp, Artificial Sequence
  Description of Artificial Sequence: Synthetic oligonucleotide
  Target: ATXN2; (-) strand; PAM type: NRG; PAM sequence: TAG
gtccttcatttaggcagaaa

SEQ ID NO: 22741 - DNA, 20 bp, Artificial Sequence
  Description of Artificial Sequence: Synthetic oligonucleotide
  Target: ATXN2; (-) strand; PAM type: NRG; PAM sequence: CAG
tctgtagtccttcatttagg

SEQ ID NO: 22742 - DNA, 20 bp, Artificial Sequence
  Description of Artificial Sequence: Synthetic oligonucleotide
  Target: ATXN2; (-) strand; PAM type: NRG; PAM sequence: AGG
atatctgtagtccttcattt

SEQ ID NO: 22743 - DNA, 20 bp, Artificial Sequence
  Description of Artificial Sequence: Synthetic oligonucleotide
  Target: ATXN2; (-) strand; PAM type: NRG; PAM sequence: TAG
aatatctgtagtccttcatt

SEQ ID NO: 22744 - DNA, 20 bp, Artificial Sequence
  Description of Artificial Sequence: Synthetic oligonucleotide
  Target: ATXN2; (-) strand; PAM type: NRG; PAM sequence: TAG
catttgttcacaaatatctg

SEQ ID NO: 22745 - DNA, 20 bp, Artificial Sequence
  Description of Artificial Sequence: Synthetic oligonucleotide
  Target: ATXN2; (-) strand; PAM type: NRG; PAM sequence: TAG
ctaacttcatgacatgctca

SEQ ID NO: 22746 - DNA, 20 bp, Artificial Sequence
  Description of Artificial Sequence: Synthetic oligonucleotide
  Target: ATXN2; (-) strand; PAM type: NRG; PAM sequence: GAG
tgtcagtcagtgattcatta

SEQ ID NO: 22747 - DNA, 20 bp, Artificial Sequence
  Description of Artificial Sequence: Synthetic oligonucleotide
  Target: ATXN2; (-) strand; PAM type: NRG; PAM sequence: TAG
actgtcagtcagtgattcat

SEQ ID NO: 22748 - DNA, 20 bp, Artificial Sequence
  Description of Artificial Sequence: Synthetic oligonucleotide
  Target: ATXN2; (-) strand; PAM type: NRG; PAM sequence: CAG
gtgcatgctgcactgtcagt

SEQ ID NO: 22749 - DNA, 20 bp, Artificial Sequence
  Description of Artificial Sequence: Synthetic oligonucleotide
  Target: ATXN2; (-) strand; PAM type: NRG; PAM sequence: CAG
catagtgcatgctgcactgt

SEQ ID NO: 22750 - DNA, 20 bp, Artificial Sequence
  Description of Artificial Sequence: Synthetic oligonucleotide
  Target: ATXN2; (-) strand; PAM type: NRG; PAM sequence: TAG
tttgaatagtaactaatgca

SEQ ID NO: 22751 - DNA, 20 bp, Artificial Sequence
  Description of Artificial Sequence: Synthetic oligonucleotide
  Target: ATXN2; (-) strand; PAM type: NRG; PAM sequence: TAG
gcttctagcagtgctttgaa

SEQ ID NO: 22752 - DNA, 20 bp, Artificial Sequence
  Description of Artificial Sequence: Synthetic oligonucleotide
  Target: ATXN2; (-) strand; PAM type: NRG; PAM sequence: CAG
tctggtgtttaagcttctag

SEQ ID NO: 22753 - DNA, 20 bp, Artificial Sequence
  Description of Artificial Sequence: Synthetic oligonucleotide
  Target: ATXN2; (-) strand; PAM type: NRG; PAM sequence: TAG
ccatctggtgtttaagcttc

SEQ ID NO: 22754 - DNA, 20 bp, Artificial Sequence
  Description of Artificial Sequence: Synthetic oligonucleotide
  Target: ATXN2; (-) strand; PAM type: NRG; PAM sequence: AAG
gggctgaccatctggtgttt

SEQ ID NO: 22755 - DNA, 20 bp, Artificial Sequence
  Description of Artificial Sequence: Synthetic oligonucleotide
  Target: ATXN2; (-) strand; PAM type: NRG; PAM sequence: TGG
aagtaagagggctgaccatc

SEQ ID NO: 22756 - DNA, 20 bp, Artificial Sequence
  Description of Artificial Sequence: Synthetic oligonucleotide
  Target: ATXN2; (-) strand; PAM type: NRG; PAM sequence: GGG
cacatggctagtaagtaaga

SEQ ID NO: 22757 - DNA, 20 bp, Artificial Sequence
  Description of Artificial Sequence: Synthetic oligonucleotide
  Target: ATXN2; (-) strand; PAM type: NRG; PAM sequence: AGG
tcacatggctagtaagtaag

SEQ ID NO: 22758 - DNA, 20 bp, Artificial Sequence
  Description of Artificial Sequence: Synthetic oligonucleotide
  Target: ATXN2; (-) strand; PAM type: NRG; PAM sequence: GAG
ctcacatggctagtaagtaa

SEQ ID NO: 22759 - DNA, 20 bp, Artificial Sequence
  Description of Artificial Sequence: Synthetic oligonucleotide
  Target: ATXN2; (-) strand; PAM type: NRG; PAM sequence: AAG
aactcacatggctagtaagt

SEQ ID NO: 22760 - DNA, 20 bp, Artificial Sequence
  Description of Artificial Sequence: Synthetic oligonucleotide
  Target: ATXN2; (-) strand; PAM type: NRG; PAM sequence: AAG
cccaaactcacatggctagt

SEQ ID NO: 22761 - DNA, 20 bp, Artificial Sequence
  Description of Artificial Sequence: Synthetic oligonucleotide
  Target: ATXN2; (-) strand; PAM type: NRG; PAM sequence: TAG
tctgcccaaactcacatggc

SEQ ID NO: 22762 - DNA, 20 bp, Artificial Sequence
  Description of Artificial Sequence: Synthetic oligonucleotide
  Target: ATXN2; (-) strand; PAM type: NRG; PAM sequence: TGG
gtaatctgcccaaactcaca

SEQ ID NO: 22763 - DNA, 20 bp, Artificial Sequence
  Description of Artificial Sequence: Synthetic oligonucleotide
  Target: ATXN2; (-) strand; PAM type: NRG; PAM sequence: AAG
agcttgggcaaagagaagtt

SEQ ID NO: 22764 - DNA, 20 bp, Artificial Sequence
  Description of Artificial Sequence: Synthetic oligonucleotide
  Target: ATXN2; (-) strand; PAM type: NRG; PAM sequence: AAG
taggcagcttgggcaaagag

SEQ ID NO: 22765 - DNA, 20 bp, Artificial Sequence
  Description of Artificial Sequence: Synthetic oligonucleotide
  Target: ATXN2; (-) strand; PAM type: NRG; PAM sequence: GAG
tattaggcagcttgggcaaa

SEQ ID NO: 22766 - DNA, 20 bp, Artificial Sequence
  Description of Artificial Sequence: Synthetic oligonucleotide
  Target: ATXN2; (-) strand; PAM type: NRG; PAM sequence: AAG
tatattaggcagcttgggca

SEQ ID NO: 22767 - DNA, 20 bp, Artificial Sequence
  Description of Artificial Sequence: Synthetic oligonucleotide
  Target: ATXN2; (-) strand; PAM type: NRG; PAM sequence: GGG
ctgtgtatattaggcagctt

SEQ ID NO: 22768 - DNA, 20 bp, Artificial Sequence
  Description of Artificial Sequence: Synthetic oligonucleotide
  Target: ATXN2; (-) strand; PAM type: NRG; PAM sequence: TGG
actgtgtatattaggcagct

SEQ ID NO: 22769 - DNA, 20 bp, Artificial Sequence
  Description of Artificial Sequence: Synthetic oligonucleotide
  Target: ATXN2; (-) strand; PAM type: NRG; PAM sequence: CAG
tctgcactgtgtatattagg

SEQ ID NO: 22770 - DNA, 20 bp, Artificial Sequence
  Description of Artificial Sequence: Synthetic oligonucleotide
  Target: ATXN2; (-) strand; PAM type: NRG; PAM sequence: AGG
gtatctgcactgtgtatatt

SEQ ID NO: 22771 - DNA, 20 bp, Artificial Sequence
  Description of Artificial Sequence: Synthetic oligonucleotide
  Target: ATXN2; (-) strand; PAM type: NRG; PAM sequence: TAG
tgtatctgcactgtgtatat

SEQ ID NO: 22772 - DNA, 20 bp, Artificial Sequence
  Description of Artificial Sequence: Synthetic oligonucleotide
  Target: ATXN2; (-) strand; PAM type: NRG; PAM sequence: AAG
gtctaacatctctgtcaagc

SEQ ID NO: 22773 - DNA, 20 bp, Artificial Sequence
  Description of Artificial Sequence: Synthetic oligonucleotide
  Target: ATXN2; (-) strand; PAM type: NRG; PAM sequence: AAG
tcttgtctaacatctctgtc

SEQ ID NO: 22774 - DNA, 20 bp, Artificial Sequence
  Description of Artificial Sequence: Synthetic oligonucleotide
  Target: ATXN2; (-) strand; PAM type: NRG; PAM sequence: CAG
attgcgtatttcctgtgtac

SEQ ID NO: 22775 - DNA, 20 bp, Artificial Sequence
  Description of Artificial Sequence: Synthetic oligonucleotide
  Target: ATXN2; (-) strand; PAM type: NRG; PAM sequence: CAG
aactttctaattgttctctt

SEQ ID NO: 22776 - DNA, 20 bp, Artificial Sequence
  Description of Artificial Sequence: Synthetic oligonucleotide
  Target: ATXN2; (-) strand; PAM type: NRG; PAM sequence: GAG
ttaattaaaaaaaaataaaa

SEQ ID NO: 22777 - DNA, 20 bp, Artificial Sequence
  Description of Artificial Sequence: Synthetic oligonucleotide
  Target: ATXN2; (-) strand; PAM type: NRG; PAM sequence: AAG
ttttaattaaaaaaaaataa

SEQ ID NO: 22778 - DNA, 20 bp, Artificial Sequence
  Description of Artificial Sequence: Synthetic oligonucleotide
  Target: ATXN2; (-) strand; PAM type: NRG; PAM sequence: CAG
gaaaaaaaaaatatgtgtcc

SEQ ID NO: 22779 - DNA, 20 bp, Artificial Sequence
  Description of Artificial Sequence: Synthetic oligonucleotide
  Target: ATXN2; (-) strand; PAM type: NRG; PAM sequence: TGG
tcaaagaaaaaaaaagagag

SEQ ID NO: 22780 - DNA, 20 bp, Artificial Sequence
  Description of Artificial Sequence: Synthetic oligonucleotide
  Target: ATXN2; (-) strand; PAM type: NRG; PAM sequence: GAG
gtctcaaagaaaaaaaaaga

SEQ ID NO: 22781 - DNA, 20 bp, Artificial Sequence
  Description of Artificial Sequence: Synthetic oligonucleotide
  Target: ATXN2; (-) strand; PAM type: NRG; PAM sequence: GAG
ctgtctcaaagaaaaaaaaa

SEQ ID NO: 22782 - DNA, 20 bp, Artificial Sequence
  Description of Artificial Sequence: Synthetic oligonucleotide
  Target: ATXN2; (-) strand; PAM type: NRG; PAM sequence: AAG
atctgtctcaaagaaaaaaa

SEQ ID NO: 22783 - DNA, 20 bp, Artificial Sequence
  Description of Artificial Sequence: Synthetic oligonucleotide
  Target: ATXN2; (-) strand; PAM type: NRG; PAM sequence: AAG
cagagcgagaatctgtctca

SEQ ID NO: 22784 - DNA, 20 bp, Artificial Sequence
  Description of Artificial Sequence: Synthetic oligonucleotide
  Target: ATXN2; (-) strand; PAM type: NRG; PAM sequence: GAG
gcatcagtgggcgacagagc

SEQ ID NO: 22785 - DNA, 20 bp, Artificial Sequence
  Description of Artificial Sequence: Synthetic oligonucleotide
  Target: ATXN2; (-) strand; PAM type: NRG; PAM sequence: GAG
gattgcatcagtgggcgaca

SEQ ID NO: 22786 - DNA, 20 bp, Artificial Sequence
  Description of Artificial Sequence: Synthetic oligonucleotide
  Target: ATXN2; (-) strand; PAM type: NRG; PAM sequence: CAG
gagattgcatcagtgggcga

SEQ ID NO: 22787 - DNA, 20 bp, Artificial Sequence
  Description of Artificial Sequence: Synthetic oligonucleotide
  Target: ATXN2; (-) strand; PAM type: NRG; PAM sequence: GGG
tgatccgagattgcatcagt

SEQ ID NO: 22788 - DNA, 20 bp, Artificial Sequence
  Description of Artificial Sequence: Synthetic oligonucleotide
  Target: ATXN2; (-) strand; PAM type: NRG; PAM sequence: TGG
gtgatccgagattgcatcag

SEQ ID NO: 22789 - DNA, 20 bp, Artificial Sequence
  Description of Artificial Sequence: Synthetic oligonucleotide
  Target: ATXN2; (-) strand; PAM type: NRG; PAM sequence: CAG
gcagtgatccgagattgcat

SEQ ID NO: 22790 - DNA, 20 bp, Artificial Sequence
  Description of Artificial Sequence: Synthetic oligonucleotide
  Target: ATXN2; (-) strand; PAM type: NRG; PAM sequence: GAG
ggtggaggttgcagtgatcc

SEQ ID NO: 22791 - DNA, 20 bp, Artificial Sequence
  Description of Artificial Sequence: Synthetic oligonucleotide
  Target: ATXN2; (-) strand; PAM type: NRG; PAM sequence: CAG
aatccaggaggtggaggttg

SEQ ID NO: 22792 - DNA, 20 bp, Artificial Sequence
  Description of Artificial Sequence: Synthetic oligonucleotide
  Target: ATXN2; (-) strand; PAM type: NRG; PAM sequence: AGG
cacttgaatccaggaggtgg

SEQ ID NO: 22793 - DNA, 20 bp, Artificial Sequence
  Description of Artificial Sequence: Synthetic oligonucleotide
  Target: ATXN2; (-) strand; PAM type: NRG; PAM sequence: GAG
tcacttgaatccaggaggtg

SEQ ID NO: 22794 - DNA, 20 bp, Artificial Sequence
  Description of Artificial Sequence: Synthetic oligonucleotide
  Target: ATXN2; (-) strand; PAM type: NRG; PAM sequence: TGG
aatcacttgaatccaggagg

SEQ ID NO: 22795 - DNA, 20 bp, Artificial Sequence
  Description of Artificial Sequence: Synthetic oligonucleotide
  Target: ATXN2; (-) strand; PAM type: NRG; PAM sequence: AGG
gagaatcacttgaatccagg

SEQ ID NO: 22796 - DNA, 20 bp, Artificial Sequence
  Description of Artificial Sequence: Synthetic oligonucleotide
  Target: ATXN2; (-) strand; PAM type: NRG; PAM sequence: GAG
ggagaatcacttgaatccag

SEQ ID NO: 22797 - DNA, 20 bp, Artificial Sequence
  Description of Artificial Sequence: Synthetic oligonucleotide
  Target: ATXN2; (-) strand; PAM type: NRG; PAM sequence: AGG
caggagaatcacttgaatcc

SEQ ID NO: 22798 - DNA, 20 bp, Artificial Sequence
  Description of Artificial Sequence: Synthetic oligonucleotide
  Target: ATXN2; (-) strand; PAM type: NRG; PAM sequence: CAG
gcaggagaatcacttgaatc

SEQ ID NO: 22799 - DNA, 20 bp, Artificial Sequence
  Description of Artificial Sequence: Synthetic oligonucleotide
  Target: ATXN2; (-) strand; PAM type: NRG; PAM sequence: GAG
tactcaggaggctgaggcag

SEQ ID NO: 22800 - DNA, 20 bp, Artificial Sequence
  Description of Artificial Sequence: Synthetic oligonucleotide
  Target: ATXN2; (-) strand; PAM type: NRG; PAM sequence: AGG
gctactcaggaggctgaggc

SEQ ID NO: 22801 - DNA, 20 bp, Artificial Sequence
  Description of Artificial Sequence: Synthetic oligonucleotide
  Target: ATXN2; (-) strand; PAM type: NRG; PAM sequence: CAG
agctactcaggaggctgagg

SEQ ID NO: 22802 - DNA, 20 bp, Artificial Sequence
  Description of Artificial Sequence: Synthetic oligonucleotide
  Target: ATXN2; (-) strand; PAM type: NRG; PAM sequence: AGG
cccagctactcaggaggctg

SEQ ID NO: 22803 - DNA, 20 bp, Artificial Sequence
  Description of Artificial Sequence: Synthetic oligonucleotide
  Target: ATXN2; (-) strand; PAM type: NRG; PAM sequence: GAG
tcccagctactcaggaggct

SEQ ID NO: 22804 - DNA, 20 bp, Artificial Sequence
  Description of Artificial Sequence: Synthetic oligonucleotide
  Target: ATXN2; (-) strand; PAM type: NRG; PAM sequence: AGG
tgtaatcccagctactcagg

SEQ ID NO: 22805 - DNA, 20 bp, Artificial Sequence
  Description of Artificial Sequence: Synthetic oligonucleotide
  Target: ATXN2; (-) strand; PAM type: NRG; PAM sequence: GAG
ctgtaatcccagctactcag

SEQ ID NO: 22806 - DNA, 20 bp, Artificial Sequence
  Description of Artificial Sequence: Synthetic oligonucleotide
  Target: ATXN2; (-) strand; PAM type: NRG; PAM sequence: AGG
gcctgtaatcccagctactc

SEQ ID NO: 22807 - DNA, 20 bp, Artificial Sequence
  Description of Artificial Sequence: Synthetic oligonucleotide
  Target: ATXN2; (-) strand; PAM type: NRG; PAM sequence: CAG
tgcctgtaatcccagctact

SEQ ID NO: 22808 - DNA, 20 bp, Artificial Sequence
  Description of Artificial Sequence: Synthetic oligonucleotide
  Target: ATXN2; (-) strand; PAM type: NRG; PAM sequence: CAG
gtggcacatgcctgtaatcc

SEQ ID NO: 22809 - DNA, 20 bp, Artificial Sequence
  Description of Artificial Sequence: Synthetic oligonucleotide
  Target: ATXN2; (-) strand; PAM type: NRG; PAM sequence: TGG
tataaattagccgggcatgg

SEQ ID NO: 22810 - DNA, 20 bp, Artificial Sequence
  Description of Artificial Sequence: Synthetic oligonucleotide
  Target: ATXN2; (-) strand; PAM type: NRG; PAM sequence: TGG
atatataaattagccgggca

SEQ ID NO: 22811 - DNA, 20 bp, Artificial Sequence
  Description of Artificial Sequence: Synthetic oligonucleotide
  Target: ATXN2; (-) strand; PAM type: NRG; PAM sequence: GGG
taaaaatatataaattagcc

SEQ ID NO: 22812 - DNA, 20 bp, Artificial Sequence
  Description of Artificial Sequence: Synthetic oligonucleotide
  Target: ATXN2; (-) strand; PAM type: NRG; PAM sequence: CGG
ttaaaaatatataaattagc

SEQ ID NO: 22813 - DNA, 20 bp, Artificial Sequence
  Description of Artificial Sequence: Synthetic oligonucleotide
  Target: ATXN2; (-) strand; PAM type: NRG; PAM sequence: TAG
tttattaaaaatatataaat

SEQ ID NO: 22814 - DNA, 20 bp, Artificial Sequence
  Description of Artificial Sequence: Synthetic oligonucleotide
  Target: ATXN2; (-) strand; PAM type: NRG; PAM sequence: TGG
tgagaccagcctggataaca

SEQ ID NO: 22815 - DNA, 20 bp, Artificial Sequence
  Description of Artificial Sequence: Synthetic oligonucleotide
  Target: ATXN2; (-) strand; PAM type: NRG; PAM sequence: TGG
tcaggagtttgagaccagcc

SEQ ID NO: 22816 - DNA, 20 bp, Artificial Sequence
  Description of Artificial Sequence: Synthetic oligonucleotide
  Target: ATXN2; (-) strand; PAM type: NRG; PAM sequence: CAG
tgaggtcaggagtttgagac

SEQ ID NO: 22817 - DNA, 20 bp, Artificial Sequence
  Description of Artificial Sequence: Synthetic oligonucleotide
  Target: ATXN2; (-) strand; PAM type: NRG; PAM sequence: GAG
tcacttgaggtcaggagttt

SEQ ID NO: 22818 - DNA, 20 bp, Artificial Sequence
  Description of Artificial Sequence: Synthetic oligonucleotide
  Target: ATXN2; (-) strand; PAM type: NRG; PAM sequence: GAG
ggtggatcacttgaggtcag

SEQ ID NO: 22819 - DNA, 20 bp, Artificial Sequence
  Description of Artificial Sequence: Synthetic oligonucleotide
  Target: ATXN2; (-) strand; PAM type: NRG; PAM sequence: AGG
cgggtggatcacttgaggtc

SEQ ID NO: 22820 - DNA, 20 bp, Artificial Sequence
  Description of Artificial Sequence: Synthetic oligonucleotide
  Target: ATXN2; (-) strand; PAM type: NRG; PAM sequence: CAG
gcgggtggatcacttgaggt

SEQ ID NO: 22821 - DNA, 20 bp, Artificial Sequence
  Description of Artificial Sequence: Synthetic oligonucleotide
  Target: ATXN2; (-) strand; PAM type: NRG; PAM sequence: AGG
tgaggcgggtggatcacttg

SEQ ID NO: 22822 - DNA, 20 bp, Artificial Sequence
  Description of Artificial Sequence: Synthetic oligonucleotide
  Target: ATXN2; (-) strand; PAM type: NRG; PAM sequence: GAG
ctgaggcgggtggatcactt

SEQ ID NO: 22823 - DNA, 20 bp, Artificial Sequence
  Description of Artificial Sequence: Synthetic oligonucleotide
  Target: ATXN2; (-) strand; PAM type: NRG; PAM sequence: TGG
ctttgggaggctgaggcggg

SEQ ID NO: 22824 - DNA, 20 bp, Artificial Sequence
  Description of Artificial Sequence: Synthetic oligonucleotide
  Target: ATXN2; (-) strand; PAM type: NRG; PAM sequence: GGG
acactttgggaggctgaggc

SEQ ID NO: 22825 - DNA, 20 bp, Artificial Sequence
  Description of Artificial Sequence: Synthetic oligonucleotide
  Target: ATXN2; (-) strand; PAM type: NRG; PAM sequence: CGG
aacactttgggaggctgagg

SEQ ID NO: 22826 - DNA, 20 bp, Artificial Sequence
  Description of Artificial Sequence: Synthetic oligonucleotide
  Target: ATXN2; (-) strand; PAM type: NRG; PAM sequence: AGG
cctaacactttgggaggctg

SEQ ID NO: 22827 - DNA, 20 bp, Artificial Sequence
  Description of Artificial Sequence: Synthetic oligonucleotide
  Target: ATXN2; (-) strand; PAM type: NRG; PAM sequence: GAG
tcctaacactttgggaggct

SEQ ID NO: 22828 - DNA, 20 bp, Artificial Sequence
  Description of Artificial Sequence: Synthetic oligonucleotide
  Target: ATXN2; (-) strand; PAM type: NRG; PAM sequence: AGG
tataatcctaacactttggg

SEQ ID NO: 22829 - DNA, 20 bp, Artificial Sequence
  Description of Artificial Sequence: Synthetic oligonucleotide
  Target: ATXN2; (-) strand; PAM type: NRG; PAM sequence: GAG
ctataatcctaacactttgg

SEQ ID NO: 22830 - DNA, 20 bp, Artificial Sequence
  Description of Artificial Sequence: Synthetic oligonucleotide
  Target: ATXN2; (-) strand; PAM type: NRG; PAM sequence: GGG
acctataatcctaacacttt

SEQ ID NO: 22831 - DNA, 20 bp, Artificial Sequence
  Description of Artificial Sequence: Synthetic oligonucleotide
  Target: ATXN2; (-) strand; PAM type: NRG; PAM sequence: TGG
tacctataatcctaacactt

SEQ ID NO: 22832 - DNA, 20 bp, Artificial Sequence
  Description of Artificial Sequence: Synthetic oligonucleotide
  Target: ATXN2; (-) strand; PAM type: NRG; PAM sequence: TGG
tgagagtgggccgggcacgg

SEQ ID NO: 22833 - DNA, 20 bp, Artificial Sequence
  Description of Artificial Sequence: Synthetic oligonucleotide
  Target: ATXN2; (-) strand; PAM type: NRG; PAM sequence: CGG
aaatgagagtgggccgggca

SEQ ID NO: 22834 - DNA, 20 bp, Artificial Sequence
  Description of Artificial Sequence: Synthetic oligonucleotide
  Target: ATXN2; (-) strand; PAM type: NRG; PAM sequence: GGG
ttaaaaaatgagagtgggcc

SEQ ID NO: 22835 - DNA, 20 bp, Artificial Sequence
  Description of Artificial Sequence: Synthetic oligonucleotide
  Target: ATXN2; (-) strand; PAM type: NRG; PAM sequence: CGG
tttaaaaaatgagagtgggc

SEQ ID NO: 22836 - DNA, 20 bp, Artificial Sequence
  Description of Artificial Sequence: Synthetic oligonucleotide
  Target: ATXN2; (-) strand; PAM type: NRG; PAM sequence: GGG
ggtttttaaaaaatgagagt

SEQ ID NO: 22837 - DNA, 20 bp, Artificial Sequence
  Description of Artificial Sequence: Synthetic oligonucleotide
  Target: ATXN2; (-) strand; PAM type: NRG; PAM sequence: TGG
tggtttttaaaaaatgagag

SEQ ID NO: 22838 - DNA, 20 bp, Artificial Sequence
  Description of Artificial Sequence: Synthetic oligonucleotide
  Target: ATXN2; (-) strand; PAM type: NRG; PAM sequence: GAG
aagtggtttttaaaaaatga

SEQ ID NO: 22839 - DNA, 20 bp, Artificial Sequence
  Description of Artificial Sequence: Synthetic oligonucleotide
  Target: ATXN2; (-) strand; PAM type: NRG; PAM sequence: GAG
agaagtggtttttaaaaaat

SEQ ID NO: 22840 - DNA, 20 bp, Artificial Sequence
  Description of Artificial Sequence: Synthetic oligonucleotide
  Target: ATXN2; (-) strand; PAM type: NRG; PAM sequence: TGG
cataccaggaagaaaagaag

SEQ ID NO: 22841 - DNA, 20 bp, Artificial Sequence
  Description of Artificial Sequence: Synthetic oligonucleotide
  Target: ATXN2; (-) strand; PAM type: NRG; PAM sequence: AAG
gggcataccaggaagaaaag

SEQ ID NO: 22842 - DNA, 20 bp, Artificial Sequence
  Description of Artificial Sequence: Synthetic oligonucleotide
  Target: ATXN2; (-) strand; PAM type: NRG; PAM sequence: AAG
taggggcataccaggaagaa

SEQ ID NO: 22843 - DNA, 20 bp, Artificial Sequence
  Description of Artificial Sequence: Synthetic oligonucleotide
  Target: ATXN2; (-) strand; PAM type: NRG; PAM sequence: AAG
atccataggggcataccagg

SEQ ID NO: 22844 - DNA, 20 bp, Artificial Sequence
  Description of Artificial Sequence: Synthetic oligonucleotide
  Target: ATXN2; (-) strand; PAM type: NRG; PAM sequence: AGG
ttgatccataggggcatacc

SEQ ID NO: 22845 - DNA, 20 bp, Artificial Sequence
  Description of Artificial Sequence: Synthetic oligonucleotide
  Target: ATXN2; (-) strand; PAM type: NRG; PAM sequence: CAG
cttgatccataggggcatac

SEQ ID NO: 22846 - DNA, 20 bp, Artificial Sequence
  Description of Artificial Sequence: Synthetic oligonucleotide
  Target: ATXN2; (-) strand; PAM type: NRG; PAM sequence: GGG
aataactccttgatccatag

SEQ ID NO: 22847 - DNA, 20 bp, Artificial Sequence
  Description of Artificial Sequence: Synthetic oligonucleotide
  Target: ATXN2; (-) strand; PAM type: NRG; PAM sequence: GGG
taataactccttgatccata

SEQ ID NO: 22848 - DNA, 20 bp, Artificial Sequence
  Description of Artificial Sequence: Synthetic oligonucleotide
  Target: ATXN2; (-) strand; PAM type: NRG; PAM sequence: AGG
ctaataactccttgatccat

SEQ ID NO: 22849 - DNA, 20 bp, Artificial Sequence
  Description of Artificial Sequence: Synthetic oligonucleotide
  Target: ATXN2; (-) strand; PAM type: NRG; PAM sequence: TAG
actaataactccttgatcca

SEQ ID NO: 22850 - DNA, 20 bp, Artificial Sequence
  Description of Artificial Sequence: Synthetic oligonucleotide
  Target: ATXN2; (-) strand; PAM type: NRG; PAM sequence: TAG
gaataaccaaatgtattatt

SEQ ID NO: 22851 - DNA, 20 bp, Artificial Sequence
  Description of Artificial Sequence: Synthetic oligonucleotide
  Target: ATXN2; (-) strand; PAM type: NRG; PAM sequence: AGG
gttttagtcttactactttt

SEQ ID NO: 22852 - DNA, 20 bp, Artificial Sequence
  Description of Artificial Sequence: Synthetic oligonucleotide
  Target: ATXN2; (-) strand; PAM type: NRG; PAM sequence: TAG
agttttagtcttactacttt

SEQ ID NO: 22853 - DNA, 20 bp, Artificial Sequence
  Description of Artificial Sequence: Synthetic oligonucleotide
  Target: ATXN2; (-) strand; PAM type: NRG; PAM sequence: TAG
tcttatctctttaggagttt

SEQ ID NO: 22854 - DNA, 20 bp, Artificial Sequence
  Description of Artificial Sequence: Synthetic oligonucleotide
  Target: ATXN2; (-) strand; PAM type: NRG; PAM sequence: GAG
aaaaagtcttatctctttag

SEQ ID NO: 22855 - DNA, 20 bp, Artificial Sequence
  Description of Artificial Sequence: Synthetic oligonucleotide
  Target: ATXN2; (-) strand; PAM type: NRG; PAM sequence: AGG
ataaaaagtcttatctcttt

SEQ ID NO: 22856 - DNA, 20 bp, Artificial Sequence
  Description of Artificial Sequence: Synthetic oligonucleotide
  Target: ATXN2; (-) strand; PAM type: NRG; PAM sequence: TAG
cataaaaagtcttatctctt

SEQ ID NO: 22857 - DNA, 20 bp, Artificial Sequence
  Description of Artificial Sequence: Synthetic oligonucleotide
  Target: ATXN2; (-) strand; PAM type: NRG; PAM sequence: AAG
ccaagaaggagcaacataaa

SEQ ID NO: 22858 - DNA, 20 bp, Artificial Sequence
  Description of Artificial Sequence: Synthetic oligonucleotide
  Target: ATXN2; (-) strand; PAM type: NRG; PAM sequence: GAG
ttgacttaaattccaagaag

SEQ ID NO: 22859 - DNA, 20 bp, Artificial Sequence
  Description of Artificial Sequence: Synthetic oligonucleotide
  Target: ATXN2; (-) strand; PAM type: NRG; PAM sequence: AGG
gcttgacttaaattccaaga

SEQ ID NO: 22860 - DNA, 20 bp, Artificial Sequence
  Description of Artificial Sequence: Synthetic oligonucleotide
  Target: ATXN2; (-) strand; PAM type: NRG; PAM sequence: AAG
tgcttgacttaaattccaag

SEQ ID NO: 22861 - DNA, 20 bp, Artificial Sequence
  Description of Artificial Sequence: Synthetic oligonucleotide
  Target: ATXN2; (-) strand; PAM type: NRG; PAM sequence: AAG
taatgcttgacttaaattcc

SEQ ID NO: 22862 - DNA, 20 bp, Artificial Sequence
  Description of Artificial Sequence: Synthetic oligonucleotide
  Target: ATXN2; (-) strand; PAM type: NRG; PAM sequence: CAG
gcagaaaacattttagctat

SEQ ID NO: 22863 - DNA, 20 bp, Artificial Sequence
  Description of Artificial Sequence: Synthetic oligonucleotide
  Target: ATXN2; (-) strand; PAM type: NRG; PAM sequence: TAG
tcagttagcagaaaacattt

SEQ ID NO: 22864 - DNA, 20 bp, Artificial Sequence
  Description of Artificial Sequence: Synthetic oligonucleotide
  Target: ATXN2; (-) strand; PAM type: NRG; PAM sequence: CAG
ggctgtactttttcagttag

SEQ ID NO: 22865 - DNA, 20 bp, Artificial Sequence
  Description of Artificial Sequence: Synthetic oligonucleotide
  Target: ATXN2; (-) strand; PAM type: NRG; PAM sequence: TAG
aaaggctgtactttttcagt

SEQ ID NO: 22866 - DNA, 20 bp, Artificial Sequence
  Description of Artificial Sequence: Synthetic oligonucleotide
  Target: ATXN2; (-) strand; PAM type: NRG; PAM sequence: CAG
tttaaaaggctgtacttttt

SEQ ID NO: 22867 - DNA, 20 bp, Artificial Sequence
  Description of Artificial Sequence: Synthetic oligonucleotide
  Target: ATXN2; (-) strand; PAM type: NRG; PAM sequence: AGG
tagagttactgtattttaaa

SEQ ID NO: 22868 - DNA, 20 bp, Artificial Sequence
  Description of Artificial Sequence: Synthetic oligonucleotide
  Target: ATXN2; (-) strand; PAM type: NRG; PAM sequence: AAG
ttagagttactgtattttaa

SEQ ID NO: 22869 - DNA, 20 bp, Artificial Sequence
  Description of Artificial Sequence: Synthetic oligonucleotide
  Target: ATXN2; (-) strand; PAM type: NRG; PAM sequence: GAG
gtaccatactgtcttgatta

SEQ ID NO: 22870 - DNA, 20 bp, Artificial Sequence
  Description of Artificial Sequence: Synthetic oligonucleotide
  Target: ATXN2; (-) strand; PAM type: NRG; PAM sequence: TAG
cagtaccatactgtcttgat

SEQ ID NO: 22871 - DNA, 20 bp, Artificial Sequence
  Description of Artificial Sequence: Synthetic oligonucleotide
  Target: ATXN2; (-) strand; PAM type: NRG; PAM sequence: CAG
tctatgtcttatccttatgg

SEQ ID NO: 22872 - DNA, 20 bp, Artificial Sequence
  Description of Artificial Sequence: Synthetic oligonucleotide
  Target: ATXN2; (-) strand; PAM type: NRG; PAM sequence: TGG
atctctatgtcttatcctta

SEQ ID NO: 22873 - DNA, 20 bp, Artificial Sequence
  Description of Artificial Sequence: Synthetic oligonucleotide
  Target: ATXN2; (-) strand; PAM type: NRG; PAM sequence: TGG
caaatgtgaaagtttattac

SEQ ID NO: 22874 - DNA, 20 bp, Artificial Sequence
  Description of Artificial Sequence: Synthetic oligonucleotide
  Target: ATXN2; (-) strand; PAM type: NRG; PAM sequence: AAG
tctgttgactacaaatgtga

SEQ ID NO: 22875 - DNA, 20 bp, Artificial Sequence
  Description of Artificial Sequence: Synthetic oligonucleotide
  Target: ATXN2; (-) strand; PAM type: NRG; PAM sequence: AAG
tatcttcacatgcttgttgg

SEQ ID NO: 22876 - DNA, 20 bp, Artificial Sequence
  Description of Artificial Sequence: Synthetic oligonucleotide
  Target: ATXN2; (-) strand; PAM type: NRG; PAM sequence: TGG
aattatcttcacatgcttgt

SEQ ID NO: 22877 - DNA, 20 bp, Artificial Sequence
  Description of Artificial Sequence: Synthetic oligonucleotide
  Target: ATXN2; (-) strand; PAM type: NRG; PAM sequence: AAG
tgagactccatctcaaaaaa

SEQ ID NO: 22878 - DNA, 20 bp, Artificial Sequence
  Description of Artificial Sequence: Synthetic oligonucleotide
  Target: ATXN2; (-) strand; PAM type: NRG; PAM sequence: GAG
tccagtgtgggcgacagagt

SEQ ID NO: 22879 - DNA, 20 bp, Artificial Sequence
  Description of Artificial Sequence: Synthetic oligonucleotide
  Target: ATXN2; (-) strand; PAM type: NRG; PAM sequence: GAG
gcactccagtgtgggcgaca

SEQ ID NO: 22880 - DNA, 20 bp, Artificial Sequence
  Description of Artificial Sequence: Synthetic oligonucleotide
  Target: ATXN2; (-) strand; PAM type: NRG; PAM sequence: CAG
atgcactccagtgtgggcga

SEQ ID NO: 22881 - DNA, 20 bp, Artificial Sequence
  Description of Artificial Sequence: Synthetic oligonucleotide
  Target: ATXN2; (-) strand; PAM type: NRG; PAM sequence: GGG
gagatcatgcactccagtgt

SEQ ID NO: 22882 - DNA, 20 bp, Artificial Sequence
  Description of Artificial Sequence: Synthetic oligonucleotide
  Target: ATXN2; (-) strand; PAM type: NRG; PAM sequence: TGG
tgagatcatgcactccagtg

SEQ ID NO: 22883 - DNA, 20 bp, Artificial Sequence
  Description of Artificial Sequence: Synthetic oligonucleotide
  Target: ATXN2; (-) strand; PAM type: NRG; PAM sequence: CAG
tgagctgagatcatgcactc

SEQ ID NO: 22884 - DNA, 20 bp, Artificial Sequence
  Description of Artificial Sequence: Synthetic oligonucleotide
  Target: ATXN2; (-) strand; PAM type: NRG; PAM sequence: GAG
ggtagaggttgcagtgagct

SEQ ID NO: 22885 - DNA, 20 bp, Artificial Sequence
  Description of Artificial Sequence: Synthetic oligonucleotide
  Target: ATXN2; (-) strand; PAM type: NRG; PAM sequence: GAG
caggaggtagaggttgcagt

SEQ ID NO: 22886 - DNA, 20 bp, Artificial Sequence
  Description of Artificial Sequence: Synthetic oligonucleotide
  Target: ATXN2; (-) strand; PAM type: NRG; PAM sequence: CAG
aacccaggaggtagaggttg

SEQ ID NO: 22887 - DNA, 20 bp, Artificial Sequence
  Description of Artificial Sequence: Synthetic oligonucleotide
  Target: ATXN2; (-) strand; PAM type: NRG; PAM sequence: AGG
cgcttgaacccaggaggtag

SEQ ID NO: 22888 - DNA, 20 bp, Artificial Sequence
  Description of Artificial Sequence: Synthetic oligonucleotide
  Target: ATXN2; (-) strand; PAM type: NRG; PAM sequence: GAG
tcgcttgaacccaggaggta

SEQ ID NO: 22889 - DNA, 20 bp, Artificial Sequence
  Description of Artificial Sequence: Synthetic oligonucleotide
  Target: ATXN2; (-) strand; PAM type: NRG; PAM sequence: TAG
attcgcttgaacccaggagg

SEQ ID NO: 22890 - DNA, 20 bp, Artificial Sequence
  Description of Artificial Sequence: Synthetic oligonucleotide
  Target: ATXN2; (-) strand; PAM type: NRG; PAM sequence: AGG
gagattcgcttgaacccagg

SEQ ID NO: 22891 - DNA, 20 bp, Artificial Sequence
  Description of Artificial Sequence: Synthetic oligonucleotide
  Target: ATXN2; (-) strand; PAM type: NRG; PAM sequence: GAG
ggagattcgcttgaacccag

SEQ ID NO: 22892 - DNA, 20 bp, Artificial Sequence
  Description of Artificial Sequence: Synthetic oligonucleotide
  Target: ATXN2; (-) strand; PAM type: NRG; PAM sequence: AGG
caggagattcgcttgaaccc

SEQ ID NO: 22893 - DNA, 20 bp, Artificial Sequence
  Description of Artificial Sequence: Synthetic oligonucleotide
  Target: ATXN2; (-) strand; PAM type: NRG; PAM sequence: CAG
gcaggagattcgcttgaacc

SEQ ID NO: 22894 - DNA, 20 bp, Artificial Sequence
  Description of Artificial Sequence: Synthetic oligonucleotide
  Target: ATXN2; (-) strand; PAM type: NRG; PAM sequence: GAG
tactgtagtggctgaggcag

SEQ ID NO: 22895 - DNA, 20 bp, Artificial Sequence
  Description of Artificial Sequence: Synthetic oligonucleotide
  Target: ATXN2; (-) strand; PAM type: NRG; PAM sequence: AGG
actactgtagtggctgaggc

SEQ ID NO: 22896 - DNA, 20 bp, Artificial Sequence
  Description of Artificial Sequence: Synthetic oligonucleotide
  Target: ATXN2; (-) strand; PAM type: NRG; PAM sequence: CAG
cactactgtagtggctgagg

SEQ ID NO: 22897 - DNA, 20 bp, Artificial Sequence
  Description of Artificial Sequence: Synthetic oligonucleotide
  Target: ATXN2; (-) strand; PAM type: NRG; PAM sequence: AGG
tcccactactgtagtggctg

SEQ ID NO: 22898 - DNA, 20 bp, Artificial Sequence
  Description of Artificial Sequence: Synthetic oligonucleotide
  Target: ATXN2; (-) strand; PAM type: NRG; PAM sequence: GAG
gtcccactactgtagtggct

SEQ ID NO: 22899 - DNA, 20 bp, Artificial Sequence
  Description of Artificial Sequence: Synthetic oligonucleotide
  Target: ATXN2; (-) strand; PAM type: NRG; PAM sequence: TGG
gtctagtcccactactgtag

SEQ ID NO: 22900 - DNA, 20 bp, Artificial Sequence
  Description of Artificial Sequence: Synthetic oligonucleotide
  Target: ATXN2; (-) strand; PAM type: NRG; PAM sequence: TAG
gtagtctagtcccactactg

SEQ ID NO: 22901 - DNA, 20 bp, Artificial Sequence
  Description of Artificial Sequence: Synthetic oligonucleotide
  Target: ATXN2; (-) strand; PAM type: NRG; PAM sequence: TAG
ggtggcgcacacctgtagtc

SEQ ID NO: 22902 - DNA, 20 bp, Artificial Sequence
  Description of Artificial Sequence: Synthetic oligonucleotide
  Target: ATXN2; (-) strand; PAM type: NRG; PAM sequence: TAG
ggtgtggtggcgcacacctg

SEQ ID NO: 22903 - DNA, 20 bp, Artificial Sequence
  Description of Artificial Sequence: Synthetic oligonucleotide
  Target: ATXN2; (-) strand; PAM type: NRG; PAM sequence: TGG
caaaaattacctgggtgtgg

SEQ ID NO: 22904 - DNA, 20 bp, Artificial Sequence
  Description of Artificial Sequence: Synthetic oligonucleotide
  Target: ATXN2; (-) strand; PAM type: NRG; PAM sequence: TGG
atacaaaaattacctgggtg

SEQ ID NO: 22905 - DNA, 20 bp, Artificial Sequence
  Description of Artificial Sequence: Synthetic oligonucleotide
  Target: ATXN2; (-) strand; PAM type: NRG; PAM sequence: GGG
taaaaatacaaaaattacct

SEQ ID NO: 22906 - DNA, 20 bp, Artificial Sequence
  Description of Artificial Sequence: Synthetic oligonucleotide
  Target: ATXN2; (-) strand; PAM type: NRG; PAM sequence: TGG
ctaaaaatacaaaaattacc

SEQ ID NO: 22907 - DNA, 20 bp, Artificial Sequence
  Description of Artificial Sequence: Synthetic oligonucleotide
  Target: ATXN2; (-) strand; PAM type: NRG; PAM sequence: TGG
tcgaaaccagtctgaccaaa

SEQ ID NO: 22908 - DNA, 20 bp, Artificial Sequence
  Description of Artificial Sequence: Synthetic oligonucleotide
  Target: ATXN2; (-) strand; PAM type: NRG; PAM sequence: CAG
tgaggtcaggagttcgaaac

SEQ ID NO: 22909 - DNA, 20 bp, Artificial Sequence
  Description of Artificial Sequence: Synthetic oligonucleotide
  Target: ATXN2; (-) strand; PAM type: NRG; PAM sequence: GAG
ggcagatcacatgaggtcag

SEQ ID NO: 22910 - DNA, 20 bp, Artificial Sequence
  Description of Artificial Sequence: Synthetic oligonucleotide
  Target: ATXN2; (-) strand; PAM type: NRG; PAM sequence: AGG
caggcagatcacatgaggtc

SEQ ID NO: 22911 - DNA, 20 bp, Artificial Sequence
  Description of Artificial Sequence: Synthetic oligonucleotide
  Target: ATXN2; (-) strand; PAM type: NRG; PAM sequence: CAG
gcaggcagatcacatgaggt

SEQ ID NO: 22912 - DNA, 20 bp, Artificial Sequence
  Description of Artificial Sequence: Synthetic oligonucleotide
  Target: ATXN2; (-) strand; PAM type: NRG; PAM sequence: AGG
ccaagcaggcagatcacatg

SEQ ID NO: 22913 - DNA, 20 bp, Artificial Sequence
  Description of Artificial Sequence: Synthetic oligonucleotide
  Target: ATXN2; (-) strand; PAM type: NRG; PAM sequence: GAG
cccaagcaggcagatcacat

SEQ ID NO: 22914 - DNA, 20 bp, Artificial Sequence
  Description of Artificial Sequence: Synthetic oligonucleotide
  Target: ATXN2; (-) strand; PAM type: NRG; PAM sequence: CAG
ctttgggagtcccaagcagg

SEQ ID NO: 22915 - DNA, 20 bp, Artificial Sequence
  Description of Artificial Sequence: Synthetic oligonucleotide
  Target: ATXN2; (-) strand; PAM type: NRG; PAM sequence: AGG
gcactttgggagtcccaagc

SEQ ID NO: 22916 - DNA, 20 bp, Artificial Sequence
  Description of Artificial Sequence: Synthetic oligonucleotide
  Target: ATXN2; (-) strand; PAM type: NRG; PAM sequence: CAG
agcactttgggagtcccaag

SEQ ID NO: 22917 - DNA, 20 bp, Artificial Sequence
  Description of Artificial Sequence: Synthetic oligonucleotide
  Target: ATXN2; (-) strand; PAM type: NRG; PAM sequence: AAG
cccagcactttgggagtccc

SEQ ID NO: 22918 - DNA, 20 bp, Artificial Sequence
  Description of Artificial Sequence: Synthetic oligonucleotide
  Target: ATXN2; (-) strand; PAM type: NRG; PAM sequence: GAG
ctgtaatcccagcactttgg

SEQ ID NO: 22919 - DNA, 20 bp, Artificial Sequence
  Description of Artificial Sequence: Synthetic oligonucleotide
  Target: ATXN2; (-) strand; PAM type: NRG; PAM sequence: GGG
gcctgtaatcccagcacttt

SEQ ID NO: 22920 - DNA, 20 bp, Artificial Sequence
  Description of Artificial Sequence: Synthetic oligonucleotide
  Target: ATXN2; (-) strand; PAM type: NRG; PAM sequence: TGG
cgcctgtaatcccagcactt

SEQ ID NO: 22921 - DNA, 20 bp, Artificial Sequence
  Description of Artificial Sequence: Synthetic oligonucleotide
  Target: ATXN2; (-) strand; PAM type: NRG; PAM sequence: CAG
gctctcaacgcctgtaatcc

SEQ ID NO: 22922 - DNA, 20 bp, Artificial Sequence
  Description of Artificial Sequence: Synthetic oligonucleotide
  Target: ATXN2; (-) strand; PAM type: NRG; PAM sequence: TGG
ctattcttggccaggcacag

SEQ ID NO: 22923 - DNA, 20 bp, Artificial Sequence
  Description of Artificial Sequence: Synthetic oligonucleotide
  Target: ATXN2; (-) strand; PAM type: NRG; PAM sequence: CAG
agactattcttggccaggca

SEQ ID NO: 22924 - DNA, 20 bp, Artificial Sequence
  Description of Artificial Sequence: Synthetic oligonucleotide
  Target: ATXN2; (-) strand; PAM type: NRG; PAM sequence: AGG
taaaaagactattcttggcc

SEQ ID NO: 22925 - DNA, 20 bp, Artificial Sequence
  Description of Artificial Sequence: Synthetic oligonucleotide
  Target: ATXN2; (-) strand; PAM type: NRG; PAM sequence: CAG
ttaaaaagactattcttggc

SEQ ID NO: 22926 - DNA, 20 bp, Artificial Sequence
  Description of Artificial Sequence: Synthetic oligonucleotide
  Target: ATXN2; (-) strand; PAM type: NRG; PAM sequence: TGG
tctgttaaaaagactattct

SEQ ID NO: 22927 - DNA, 20 bp, Artificial Sequence
  Description of Artificial Sequence: Synthetic oligonucleotide
  Target: ATXN2; (-) strand; PAM type: NRG; PAM sequence: AAG
tcccagcaccatctgttaaa

SEQ ID NO: 22928 - DNA, 20 bp, Artificial Sequence
  Description of Artificial Sequence: Synthetic oligonucleotide
  Target: ATXN2; (-) strand; PAM type: NRG; PAM sequence: CAG
tatgtaggtattagttgtcc

SEQ ID NO: 22929 - DNA, 20 bp, Artificial Sequence
  Description of Artificial Sequence: Synthetic oligonucleotide
  Target: ATXN2; (-) strand; PAM type: NRG; PAM sequence: TAG
attcttccgtatgtaggtat

SEQ ID NO: 22930 - DNA, 20 bp, Artificial Sequence
  Description of Artificial Sequence: Synthetic oligonucleotide
  Target: ATXN2; (-) strand; PAM type: NRG; PAM sequence: AGG
agattcattcttccgtatgt

SEQ ID NO: 22931 - DNA, 20 bp, Artificial Sequence
  Description of Artificial Sequence: Synthetic oligonucleotide
  Target: ATXN2; (-) strand; PAM type: NRG; PAM sequence: TAG
cagattcattcttccgtatg

SEQ ID NO: 22932 - DNA, 20 bp, Artificial Sequence
  Description of Artificial Sequence: Synthetic oligonucleotide
  Target: ATXN2; (-) strand; PAM type: NRG; PAM sequence: CAG
ccatttttactgtgtaagtt

SEQ ID NO: 22933 - DNA, 20 bp, Artificial Sequence
  Description of Artificial Sequence: Synthetic oligonucleotide
  Target: ATXN2; (-) strand; PAM type: NRG; PAM sequence: AAG
tataaccatttttactgtgt

SEQ ID NO: 22934 - DNA, 20 bp, Artificial Sequence
  Description of Artificial Sequence: Synthetic oligonucleotide
  Target: ATXN2; (-) strand; PAM type: NRG; PAM sequence: GGG
atttaatatagcataaggtg

SEQ ID NO: 22935 - DNA, 20 bp, Artificial Sequence
  Description of Artificial Sequence: Synthetic oligonucleotide
  Target: ATXN2; (-) strand; PAM type: NRG; PAM sequence: GGG
tatttaatatagcataaggt

SEQ ID NO: 22936 - DNA, 20 bp, Artificial Sequence
  Description of Artificial Sequence: Synthetic oligonucleotide
  Target: ATXN2; (-) strand; PAM type: NRG; PAM sequence: TGG
ttatttaatatagcataagg

SEQ ID NO: 22937 - DNA, 20 bp, Artificial Sequence
  Description of Artificial Sequence: Synthetic oligonucleotide
  Target: ATXN2; (-) strand; PAM type: NRG; PAM sequence: AGG
cagttatttaatatagcata

SEQ ID NO: 22938 - DNA, 20 bp, Artificial Sequence
  Description of Artificial Sequence: Synthetic oligonucleotide
  Target: ATXN2; (-) strand; PAM type: NRG; PAM sequence: AAG
gcagttatttaatatagcat

SEQ ID NO: 22939 - DNA, 20 bp, Artificial Sequence
  Description of Artificial Sequence: Synthetic oligonucleotide
  Target: ATXN2; (-) strand; PAM type: NRG; PAM sequence: TAG
ttttgagcagttatttaata

SEQ ID NO: 22940 - DNA, 20 bp, Artificial Sequence
  Description of Artificial Sequence: Synthetic oligonucleotide
  Target: ATXN2; (-) strand; PAM type: NRG; PAM sequence: CAG
ggtgctcagcccattttgag

SEQ ID NO: 22941 - DNA, 20 bp, Artificial Sequence
  Description of Artificial Sequence: Synthetic oligonucleotide
  Target: ATXN2; (-) strand; PAM type: NRG; PAM sequence: GAG
cttggtgctcagcccatttt

SEQ ID NO: 22942 - DNA, 20 bp, Artificial Sequence
  Description of Artificial Sequence: Synthetic oligonucleotide
  Target: ATXN2; (-) strand; PAM type: NRG; PAM sequence: CAG
taggagagtgacttggtgct

SEQ ID NO: 22943 - DNA, 20 bp, Artificial Sequence
  Description of Artificial Sequence: Synthetic oligonucleotide
  Target: ATXN2; (-) strand; PAM type: NRG; PAM sequence: TGG
aaggtcataggagagtgact

SEQ ID NO: 22944 - DNA, 20 bp, Artificial Sequence
  Description of Artificial Sequence: Synthetic oligonucleotide
  Target: ATXN2; (-) strand; PAM type: NRG; PAM sequence: GAG
aattaaaaaaggtcatagga

SEQ ID NO: 22945 - DNA, 20 bp, Artificial Sequence
  Description of Artificial Sequence: Synthetic oligonucleotide
  Target: ATXN2; (-) strand; PAM type: NRG; PAM sequence: GAG
aaaattaaaaaaggtcatag

SEQ ID NO: 22946 - DNA, 20 bp, Artificial Sequence
  Description of Artificial Sequence: Synthetic oligonucleotide
  Target: ATXN2; (-) strand; PAM type: NRG; PAM sequence: AGG
aaaaaattaaaaaaggtcat

SEQ ID NO: 22947 - DNA, 20 bp, Artificial Sequence
  Description of Artificial Sequence: Synthetic oligonucleotide
  Target: ATXN2; (-) strand; PAM type: NRG; PAM sequence: TAG
taaaaaattaaaaaaggtca

SEQ ID NO: 22948 - DNA, 20 bp, Artificial Sequence
  Description of Artificial Sequence: Synthetic oligonucleotide
  Target: ATXN2; (-) strand; PAM type: NRG; PAM sequence: AGG
tgttattaaaaaattaaaaa

SEQ ID NO: 22949 - DNA, 20 bp, Artificial Sequence
  Description of Artificial Sequence: Synthetic oligonucleotide
  Target: ATXN2; (-) strand; PAM type: NRG; PAM sequence: AAG
ttgttattaaaaaattaaaa

SEQ ID NO: 22950 - DNA, 20 bp, Artificial Sequence
  Description of Artificial Sequence: Synthetic oligonucleotide
  Target: ATXN2; (-) strand; PAM type: NRG; PAM sequence: AAG
aataacatttgatttttttt

SEQ ID NO: 22951 - DNA, 20 bp, Artificial Sequence
  Description of Artificial Sequence: Synthetic oligonucleotide
  Target: ATXN2; (-) strand; PAM type: NRG; PAM sequence: GAG
ctttcctataacaatattat

SEQ ID NO: 22952 - DNA, 20 bp, Artificial Sequence
  Description of Artificial Sequence: Synthetic oligonucleotide
  Target: ATXN2; (-) strand; PAM type: NRG; PAM sequence: GGG
cctctctgggggtctggatc

SEQ ID NO: 22953 - DNA, 20 bp, Artificial Sequence
  Description of Artificial Sequence: Synthetic oligonucleotide
  Target: ATXN2; (-) strand; PAM type: NRG; PAM sequence: CGG
ccctctctgggggtctggat

SEQ ID NO: 22954 - DNA, 20 bp, Artificial Sequence
  Description of Artificial Sequence: Synthetic oligonucleotide
  Target: ATXN2; (-) strand; PAM type: NRG; PAM sequence: TGG
aagagccctctctgggggtc

SEQ ID NO: 22955 - DNA, 20 bp, Artificial Sequence
  Description of Artificial Sequence: Synthetic oligonucleotide
  Target: ATXN2; (-) strand; PAM type: NRG; PAM sequence: GGG
gatccaagagccctctctgg

SEQ ID NO: 22956 - DNA, 20 bp, Artificial Sequence
  Description of Artificial Sequence: Synthetic oligonucleotide
  Target: ATXN2; (-) strand; PAM type: NRG; PAM sequence: GGG
agatccaagagccctctctg

SEQ ID NO: 22957 - DNA, 20 bp, Artificial Sequence
  Description of Artificial Sequence: Synthetic oligonucleotide
  Target: ATXN2; (-) strand; PAM type: NRG; PAM sequence: GGG
aagatccaagagccctctct

SEQ ID NO: 22958 - DNA, 20 bp, Artificial Sequence
  Description of Artificial Sequence: Synthetic oligonucleotide
  Target: ATXN2; (-) strand; PAM type: NRG; PAM sequence: TGG
caagatccaagagccctctc

SEQ ID NO: 22959 - DNA, 20 bp, Artificial Sequence
  Description of Artificial Sequence: Synthetic oligonucleotide
  Target: ATXN2; (-) strand; PAM type: NRG; PAM sequence: GAG
ctttcttgtgcaagatccaa

SEQ ID NO: 22960 - DNA, 20 bp, Artificial Sequence
  Description of Artificial Sequence: Synthetic oligonucleotide
  Target: ATXN2; (-) strand; PAM type: NRG; PAM sequence: AAG
ttctttcttgtgcaagatcc

SEQ ID NO: 22961 - DNA, 20 bp, Artificial Sequence
  Description of Artificial Sequence: Synthetic oligonucleotide
  Target: ATXN2; (-) strand; PAM type: NRG; PAM sequence: AAG
ccctgaattctttcttgtgc

SEQ ID NO: 22962 - DNA, 20 bp, Artificial Sequence
  Description of Artificial Sequence: Synthetic oligonucleotide
  Target: ATXN2; (-) strand; PAM type: NRG; PAM sequence: CGG
attgctttcaccttgcactg

SEQ ID NO: 22963 - DNA, 20 bp, Artificial Sequence
  Description of Artificial Sequence: Synthetic oligonucleotide
  Target: ATXN2; (-) strand; PAM type: NRG; PAM sequence: AAG
acgcccacctcagcctccca

SEQ ID NO: 22964 - DNA, 20 bp, Artificial Sequence
  Description of Artificial Sequence: Synthetic oligonucleotide
  Target: ATXN2; (-) strand; PAM type: NRG; PAM sequence: CAG
ctcaagtgacacgcccacct

SEQ ID NO: 22965 - DNA, 20 bp, Artificial Sequence
  Description of Artificial Sequence: Synthetic oligonucleotide
  Target: ATXN2; (-) strand; PAM type: NRG; PAM sequence: AAG
ggtctcaaacacttggactc

SEQ ID NO: 22966 - DNA, 20 bp, Artificial Sequence
  Description of Artificial Sequence: Synthetic oligonucleotide
  Target: ATXN2; (-) strand; PAM type: NRG; PAM sequence: TGG
ccaggctggtctcaaacact

SEQ ID NO: 22967 - DNA, 20 bp, Artificial Sequence
  Description of Artificial Sequence: Synthetic oligonucleotide
  Target: ATXN2; (-) strand; PAM type: NRG; PAM sequence: TGG
tttcgccatgttgcccaggc

SEQ ID NO: 22968 - DNA, 20 bp, Artificial Sequence
  Description of Artificial Sequence: Synthetic oligonucleotide
  Target: ATXN2; (-) strand; PAM type: NRG; PAM sequence: AGG
agaatttcgccatgttgccc

SEQ ID NO: 22969 - DNA, 20 bp, Artificial Sequence
  Description of Artificial Sequence: Synthetic oligonucleotide
  Target: ATXN2; (-) strand; PAM type: NRG; PAM sequence: CAG
cagaatttcgccatgttgcc

SEQ ID NO: 22970 - DNA, 20 bp, Artificial Sequence
  Description of Artificial Sequence: Synthetic oligonucleotide
  Target: ATXN2; (-) strand; PAM type: NRG; PAM sequence: CAG
tttgtatttttttgtagaga

SEQ ID NO: 22971 - DNA, 20 bp, Artificial Sequence
  Description of Artificial Sequence: Synthetic oligonucleotide
  Target: ATXN2; (-) strand; PAM type: NRG; PAM sequence: GAG
aacttttgtatttttttgta

SEQ ID NO: 22972 - DNA, 20 bp, Artificial Sequence
  Description of Artificial Sequence: Synthetic oligonucleotide
  Target: ATXN2; (-) strand; PAM type: NRG; PAM sequence: TAG
ataacttttgtatttttttg

SEQ ID NO: 22973 - DNA, 20 bp, Artificial Sequence
  Description of Artificial Sequence: Synthetic oligonucleotide
  Target: ATXN2; (-) strand; PAM type: NRG; PAM sequence: AGG
aaatgagtagctggtactac

SEQ ID NO: 22974 - DNA, 20 bp, Artificial Sequence
  Description of Artificial Sequence: Synthetic oligonucleotide
  Target: ATXN2; (-) strand; PAM type: NRG; PAM sequence: CAG
caaatgagtagctggtacta

SEQ ID NO: 22975 - DNA, 20 bp, Artificial Sequence
  Description of Artificial Sequence: Synthetic oligonucleotide
  Target: ATXN2; (-) strand; PAM type: NRG; PAM sequence: TGG
cctgggctcaaatgagtagc

SEQ ID NO: 22976 - DNA, 20 bp, Artificial Sequence
  Description of Artificial Sequence: Synthetic oligonucleotide
  Target: ATXN2; (-) strand; PAM type: NRG; PAM sequence: TAG
gcctcctgggctcaaatgag

SEQ ID NO: 22977 - DNA, 20 bp, Artificial Sequence
  Description of Artificial Sequence: Synthetic oligonucleotide
  Target: ATXN2; (-) strand; PAM type: NRG; PAM sequence: GAG
tcagcctcctgggctcaaat

SEQ ID NO: 22978 - DNA, 20 bp, Artificial Sequence
  Description of Artificial Sequence: Synthetic oligonucleotide
  Target: ATXN2; (-) strand; PAM type: NRG; PAM sequence: GGG
cacagcagcctcagcctcct

SEQ ID NO: 22979 - DNA, 20 bp, Artificial Sequence
  Description of Artificial Sequence: Synthetic oligonucleotide
  Target: ATXN2; (-) strand; PAM type: NRG; PAM sequence: TGG
tcacagcagcctcagcctcc

SEQ ID NO: 22980 - DNA, 20 bp, Artificial Sequence
  Description of Artificial Sequence: Synthetic oligonucleotide
  Target: ATXN2; (-) strand; PAM type: NRG; PAM sequence: CAG
atcttggctcacagcagcct

SEQ ID NO: 22981 - DNA, 20 bp, Artificial Sequence
  Description of Artificial Sequence: Synthetic oligonucleotide
  Target: ATXN2; (-) strand; PAM type: NRG; PAM sequence: CAG
ggtgcaatcttggctcacag

SEQ ID NO: 22982 - DNA, 20 bp, Artificial Sequence
  Description of Artificial Sequence: Synthetic oligonucleotide
  Target: ATXN2; (-) strand; PAM type: NRG; PAM sequence: CAG
agtggtgcaatcttggctca

SEQ ID NO: 22983 - DNA, 20 bp, Artificial Sequence
  Description of Artificial Sequence: Synthetic oligonucleotide
  Target: ATXN2; (-) strand; PAM type: NRG; PAM sequence: TGG
ggagggcagtggtgcaatct

SEQ ID NO: 22984 - DNA, 20 bp, Artificial Sequence
  Description of Artificial Sequence: Synthetic oligonucleotide
  Target: ATXN2; (-) strand; PAM type: NRG; PAM sequence: TGG
ttgcttaggctggagggcag

SEQ ID NO: 22985 - DNA, 20 bp, Artificial Sequence
  Description of Artificial Sequence: Synthetic oligonucleotide
  Target: ATXN2; (-) strand; PAM type: NRG; PAM sequence: CAG
cttttgcttaggctggaggg

SEQ ID NO: 22986 - DNA, 20 bp, Artificial Sequence
  Description of Artificial Sequence: Synthetic oligonucleotide
  Target: ATXN2; (-) strand; PAM type: NRG; PAM sequence: GGG
gctcttttgcttaggctgga

SEQ ID NO: 22987 - DNA, 20 bp, Artificial Sequence
  Description of Artificial Sequence: Synthetic oligonucleotide
  Target: ATXN2; (-) strand; PAM type: NRG; PAM sequence: AGG
cgctcttttgcttaggctgg

SEQ ID NO: 22988 - DNA, 20 bp, Artificial Sequence
  Description of Artificial Sequence: Synthetic oligonucleotide
  Target: ATXN2; (-) strand; PAM type: NRG; PAM sequence: GAG
tcgctcttttgcttaggctg

SEQ ID NO: 22989 - DNA, 20 bp, Artificial Sequence
  Description of Artificial Sequence: Synthetic oligonucleotide
  Target: ATXN2; (-) strand; PAM type: NRG; PAM sequence: TGG
tctcgctcttttgcttaggc

SEQ ID NO: 22990 - DNA, 20 bp, Artificial Sequence
  Description of Artificial Sequence: Synthetic oligonucleotide
  Target: ATXN2; (-) strand; PAM type: NRG; PAM sequence: AGG
agaatctcgctcttttgctt

SEQ ID NO: 22991 - DNA, 20 bp, Artificial Sequence
  Description of Artificial Sequence: Synthetic oligonucleotide
  Target: ATXN2; (-) strand; PAM type: NRG; PAM sequence: TAG
cagaatctcgctcttttgct

SEQ ID NO: 22992 - DNA, 20 bp, Artificial Sequence
  Description of Artificial Sequence: Synthetic oligonucleotide
  Target: ATXN2; (-) strand; PAM type: NRG; PAM sequence: CAG
actttttttttcttttgaca

SEQ ID NO: 22993 - DNA, 20 bp, Artificial Sequence
  Description of Artificial Sequence: Synthetic oligonucleotide
  Target: ATXN2; (-) strand; PAM type: NRG; PAM sequence: GAG
ttagaggtgtgatccatttg

SEQ ID NO: 22994 - DNA, 20 bp, Artificial Sequence
  Description of Artificial Sequence: Synthetic oligonucleotide
  Target: ATXN2; (-) strand; PAM type: NRG; PAM sequence: TGG
atttagaggtgtgatccatt

SEQ ID NO: 22995 - DNA, 20 bp, Artificial Sequence
  Description of Artificial Sequence: Synthetic oligonucleotide
  Target: ATXN2; (-) strand; PAM type: NRG; PAM sequence: AGG
tttttaagaattacatttag

SEQ ID NO: 22996 - DNA, 20 bp, Artificial Sequence
  Description of Artificial Sequence: Synthetic oligonucleotide
  Target: ATXN2; (-) strand; PAM type: NRG; PAM sequence: GAG
ttttttaagaattacattta

SEQ ID NO: 22997 - DNA, 20 bp, Artificial Sequence
  Description of Artificial Sequence: Synthetic oligonucleotide
  Target: ATXN2; (-) strand; PAM type: NRG; PAM sequence: TAG
gtttttttaagaattacatt

SEQ ID NO: 22998 - DNA, 20 bp, Artificial Sequence
  Description of Artificial Sequence: Synthetic oligonucleotide
  Target: ATXN2; (-) strand; PAM type: NRG; PAM sequence: AAG
ttactcttctgggttttttt

SEQ ID NO: 22999 - DNA, 20 bp, Artificial Sequence
  Description of Artificial Sequence: Synthetic oligonucleotide
  Target: ATXN2; (-) strand; PAM type: NRG; PAM sequence: GGG
ttaaggtttattactcttct

SEQ ID NO: 23000 - DNA, 20 bp, Artificial Sequence
  Description of Artificial Sequence: Synthetic oligonucleotide
  Target: ATXN2; (-) strand; PAM type: NRG; PAM sequence: TGG
attaaggtttattactcttc

SEQ ID NO: 23001 - DNA, 20 bp, Artificial Sequence
  Description of Artificial Sequence: Synthetic oligonucleotide
  Target: ATXN2; (-) strand; PAM type: NRG; PAM sequence: AGG
tactgtttcatcaatcatta

SEQ ID NO: 23002 - DNA, 20 bp, Artificial Sequence
  Description of Artificial Sequence: Synthetic oligonucleotide
  Target: ATXN2; (-) strand; PAM type: NRG; PAM sequence: AAG
atactgtttcatcaatcatt

SEQ ID NO: 23003 - DNA, 20 bp, Artificial Sequence
  Description of Artificial Sequence: Synthetic oligonucleotide
  Target: ATXN2; (-) strand; PAM type: NRG; PAM sequence: AAG
aagcttttggtgtcgtatct

SEQ ID NO: 23004 - DNA, 20 bp, Artificial Sequence
  Description of Artificial Sequence: Synthetic oligonucleotide
  Target: ATXN2; (-) strand; PAM type: NRG; PAM sequence: TGG
ctgattttgaagtaagcttt

SEQ ID NO: 23005 - DNA, 20 bp, Artificial Sequence
  Description of Artificial Sequence: Synthetic oligonucleotide
  Target: ATXN2; (-) strand; PAM type: NRG; PAM sequence: AAG
aatttatctgattttgaagt

SEQ ID NO: 23006 - DNA, 20 bp, Artificial Sequence
  Description of Artificial Sequence: Synthetic oligonucleotide
  Target: ATXN2; (-) strand; PAM type: NRG; PAM sequence: AAG
gtccaatttatctgattttg

SEQ ID NO: 23007 - DNA, 20 bp, Artificial Sequence
  Description of Artificial Sequence: Synthetic oligonucleotide
  Target: ATXN2; (-) strand; PAM type: NRG; PAM sequence: AAG
aaaaatttttaattttgatg

SEQ ID NO: 23008 - DNA, 20 bp, Artificial Sequence
  Description of Artificial Sequence: Synthetic oligonucleotide
  Target: ATXN2; (-) strand; PAM type: NRG; PAM sequence: AAG
ttttactttttcatcccttg

SEQ ID NO: 23009 - DNA, 20 bp, Artificial Sequence
  Description of Artificial Sequence: Synthetic oligonucleotide
  Target: ATXN2; (-) strand; PAM type: NRG; PAM sequence: TGG
aatgttttctcctgttctgt

SEQ ID NO: 23010 - DNA, 20 bp, Artificial Sequence
  Description of Artificial Sequence: Synthetic oligonucleotide
  Target: ATXN2; (-) strand; PAM type: NRG; PAM sequence: TGG
acaagtccctgttagataca

SEQ ID NO: 23011 - DNA, 20 bp, Artificial Sequence
  Description of Artificial Sequence: Synthetic oligonucleotide
  Target: ATXN2; (-) strand; PAM type: NRG; PAM sequence: TAG
ttgtgtgtacaagtccctgt

SEQ ID NO: 23012 - DNA, 20 bp, Artificial Sequence
  Description of Artificial Sequence: Synthetic oligonucleotide
  Target: ATXN2; (-) strand; PAM type: NRG; PAM sequence: AAG
tctttatatattgtgtgtac

SEQ ID NO: 23013 - DNA, 20 bp, Artificial Sequence
  Description of Artificial Sequence: Synthetic oligonucleotide
  Target: ATXN2; (-) strand; PAM type: NRG; PAM sequence: GAG
tttttattattgggttgtgg

SEQ ID NO: 23014 - DNA, 20 bp, Artificial Sequence
  Description of Artificial Sequence: Synthetic oligonucleotide
  Target: ATXN2; (-) strand; PAM type: NRG; PAM sequence: GGG
tctttttattattgggttgt

SEQ ID NO: 23015 - DNA, 20 bp, Artificial Sequence
  Description of Artificial Sequence: Synthetic oligonucleotide
  Target: ATXN2; (-) strand; PAM type: NRG; PAM sequence: TGG
gtctttttattattgggttg

SEQ ID NO: 23016 - DNA, 20 bp, Artificial Sequence
  Description of Artificial Sequence: Synthetic oligonucleotide
  Target: ATXN2; (-) strand; PAM type: NRG; PAM sequence: GGG
tgagttgtctttttattatt

SEQ ID NO: 23017 - DNA, 20 bp, Artificial Sequence
  Description of Artificial Sequence: Synthetic oligonucleotide
  Target: ATXN2; (-) strand; PAM type: NRG; PAM sequence: TGG
ttgagttgtctttttattat

SEQ ID NO: 23018 - DNA, 20 bp, Artificial Sequence
  Description of Artificial Sequence: Synthetic oligonucleotide
  Target: ATXN2; (-) strand; PAM type: NRG; PAM sequence: GAG
ctttacccattttaaaaatt

SEQ ID NO: 23019 - DNA, 20 bp, Artificial Sequence
  Description of Artificial Sequence: Synthetic oligonucleotide
  Target: ATXN2; (-) strand; PAM type: NRG; PAM sequence: TGG
ggccatttatatatcttctt

SEQ ID NO: 23020 - DNA, 20 bp, Artificial Sequence
  Description of Artificial Sequence: Synthetic oligonucleotide
  Target: ATXN2; (-) strand; PAM type: NRG; PAM sequence: TGG
tgaacatcttttgtgtttat

SEQ ID NO: 23021 - DNA, 20 bp, Artificial Sequence
  Description of Artificial Sequence: Synthetic oligonucleotide
  Target: ATXN2; (-) strand; PAM type: NRG; PAM sequence: TGG
tttaatgtgcagttctttca

SEQ ID NO: 23022 - DNA, 20 bp, Artificial Sequence
  Description of Artificial Sequence: Synthetic oligonucleotide
  Target: ATXN2; (-) strand; PAM type: NRG; PAM sequence: CAG
ctcattgtggctttaatgtg

SEQ ID NO: 23023 - DNA, 20 bp, Artificial Sequence
  Description of Artificial Sequence: Synthetic oligonucleotide
  Target: ATXN2; (-) strand; PAM type: NRG; PAM sequence: TGG
gtgaagtgttaacctcattg

SEQ ID NO: 23024 - DNA, 20 bp, Artificial Sequence
  Description of Artificial Sequence: Synthetic oligonucleotide
  Target: ATXN2; (-) strand; PAM type: NRG; PAM sequence: AAG
tagtcatccttgtgggtgtg

SEQ ID NO: 23025 - DNA, 20 bp, Artificial Sequence
  Description of Artificial Sequence: Synthetic oligonucleotide
  Target: ATXN2; (-) strand; PAM type: NRG; PAM sequence: GGG
ttgattatagtcatccttgt

SEQ ID NO: 23026 - DNA, 20 bp, Artificial Sequence
  Description of Artificial Sequence: Synthetic oligonucleotide
  Target: ATXN2; (-) strand; PAM type: NRG; PAM sequence: TGG
tttgattatagtcatccttg

SEQ ID NO: 23027 - DNA, 20 bp, Artificial Sequence
  Description of Artificial Sequence: Synthetic oligonucleotide
  Target: ATXN2; (-) strand; PAM type: NRG; PAM sequence: TAG
tgtcttgtcttttttgatta

SEQ ID NO: 23028 - DNA, 20 bp, Artificial Sequence
  Description of Artificial Sequence: Synthetic oligonucleotide
  Target: ATXN2; (-) strand; PAM type: NRG; PAM sequence: GGG
ttcccaccagcagggtatga

SEQ ID NO: 23029 - DNA, 20 bp, Artificial Sequence
  Description of Artificial Sequence: Synthetic oligonucleotide
  Target: ATXN2; (-) strand; PAM type: NRG; PAM sequence: AGG
attcccaccagcagggtatg

SEQ ID NO: 23030 - DNA, 20 bp, Artificial Sequence
  Description of Artificial Sequence: Synthetic oligonucleotide
  Target: ATXN2; (-) strand; PAM type: NRG; PAM sequence: GAG
cattcccaccagcagggtat

SEQ ID NO: 23031 - DNA, 20 bp, Artificial Sequence
  Description of Artificial Sequence: Synthetic oligonucleotide
  Target: ATXN2; (-) strand; PAM type: NRG; PAM sequence: GGG
attttacattcccaccagca

SEQ ID NO: 23032 - DNA, 20 bp, Artificial Sequence
  Description of Artificial Sequence: Synthetic oligonucleotide
  Target: ATXN2; (-) strand; PAM type: NRG; PAM sequence: AGG
tattttacattcccaccagc

SEQ ID NO: 23033 - DNA, 20 bp, Artificial Sequence
  Description of Artificial Sequence: Synthetic oligonucleotide
  Target: ATXN2; (-) strand; PAM type: NRG; PAM sequence: CAG
ctattttacattcccaccag

SEQ ID NO: 23034 - DNA, 20 bp, Artificial Sequence
  Description of Artificial Sequence: Synthetic oligonucleotide
  Target: ATXN2; (-) strand; PAM type: NRG; PAM sequence: CAG
acactattttacattcccac

SEQ ID NO: 23035 - DNA, 20 bp, Artificial Sequence
  Description of Artificial Sequence: Synthetic oligonucleotide
  Target: ATXN2; (-) strand; PAM type: NRG; PAM sequence: AAG
gaactaccaagctatttgcc

SEQ ID NO: 23036 - DNA, 20 bp, Artificial Sequence
  Description of Artificial Sequence: Synthetic oligonucleotide
  Target: ATXN2; (-) strand; PAM type: NRG; PAM sequence: AAG
taaccttttgaggaactacc

SEQ ID NO: 23037 - DNA, 20 bp, Artificial Sequence
  Description of Artificial Sequence: Synthetic oligonucleotide
  Target: ATXN2; (-) strand; PAM type: NRG; PAM sequence: AGG
caactgtgtttaaccttttg

SEQ ID NO: 23038 - DNA, 20 bp, Artificial Sequence
  Description of Artificial Sequence: Synthetic oligonucleotide
  Target: ATXN2; (-) strand; PAM type: NRG; PAM sequence: GAG
gcaactgtgtttaacctttt

SEQ ID NO: 23039 - DNA, 20 bp, Artificial Sequence
  Description of Artificial Sequence: Synthetic oligonucleotide
  Target: ATXN2; (-) strand; PAM type: NRG; PAM sequence: TGG
agttgaattgctgggtcata

SEQ ID NO: 23040 - DNA, 20 bp, Artificial Sequence
  Description of Artificial Sequence: Synthetic oligonucleotide
  Target: ATXN2; (-) strand; PAM type: NRG; PAM sequence: GGG
tacctaggagttgaattgct

SEQ ID NO: 23041 - DNA, 20 bp, Artificial Sequence
  Description of Artificial Sequence: Synthetic oligonucleotide
  Target: ATXN2; (-) strand; PAM type: NRG; PAM sequence: TGG
ctacctaggagttgaattgc

SEQ ID NO: 23042 - DNA, 20 bp, Artificial Sequence
  Description of Artificial Sequence: Synthetic oligonucleotide
  Target: ATXN2; (-) strand; PAM type: NRG; PAM sequence: GAG
tcttttgtgtacctacctag

SEQ ID NO: 23043 - DNA, 20 bp, Artificial Sequence
  Description of Artificial Sequence: Synthetic oligonucleotide
  Target: ATXN2; (-) strand; PAM type: NRG; PAM sequence: AGG
tttcttttgtgtacctacct

SEQ ID NO: 23044 - DNA, 20 bp, Artificial Sequence
  Description of Artificial Sequence: Synthetic oligonucleotide
  Target: ATXN2; (-) strand; PAM type: NRG; PAM sequence: TAG
atttcttttgtgtacctacc

SEQ ID NO: 23045 - DNA, 20 bp, Artificial Sequence
  Description of Artificial Sequence: Synthetic oligonucleotide
  Target: ATXN2; (-) strand; PAM type: NRG; PAM sequence: CAG
ctgccacaaacatgagtgtg

SEQ ID NO: 23046 - DNA, 20 bp, Artificial Sequence
  Description of Artificial Sequence: Synthetic oligonucleotide
  Target: ATXN2; (-) strand; PAM type: NRG; PAM sequence: GAG
aataacactgccacaaacat

SEQ ID NO: 23047 - DNA, 20 bp, Artificial Sequence
  Description of Artificial Sequence: Synthetic oligonucleotide
  Target: ATXN2; (-) strand; PAM type: NRG; PAM sequence: TGG
aatcagtttgtagctatttg

SEQ ID NO: 23048 - DNA, 20 bp, Artificial Sequence
  Description of Artificial Sequence: Synthetic oligonucleotide
  Target: ATXN2; (-) strand; PAM type: NRG; PAM sequence: TAG
tttatccattaatcagtttg

SEQ ID NO: 23049 - DNA, 20 bp, Artificial Sequence
  Description of Artificial Sequence: Synthetic oligonucleotide
  Target: ATXN2; (-) strand; PAM type: NRG; PAM sequence: CAG
cattttgtttatccattaat

SEQ ID NO: 23050 - DNA, 20 bp, Artificial Sequence
  Description of Artificial Sequence: Synthetic oligonucleotide
  Target: ATXN2; (-) strand; PAM type: NRG; PAM sequence: TGG
ctgactaatattccttgatg

SEQ ID NO: 23051 - DNA, 20 bp, Artificial Sequence
  Description of Artificial Sequence: Synthetic oligonucleotide
  Target: ATXN2; (-) strand; PAM type: NRG; PAM sequence: CAG
atccatgttggagcatgttt

SEQ ID NO: 23052 - DNA, 20 bp, Artificial Sequence
  Description of Artificial Sequence: Synthetic oligonucleotide
  Target: ATXN2; (-) strand; PAM type: NRG; PAM sequence: GAG
ataaaagttcatccatgttg

SEQ ID NO: 23053 - DNA, 20 bp, Artificial Sequence
  Description of Artificial Sequence: Synthetic oligonucleotide
  Target: ATXN2; (-) strand; PAM type: NRG; PAM sequence: TGG
ttataaaagttcatccatgt

SEQ ID NO: 23054 - DNA, 20 bp, Artificial Sequence
  Description of Artificial Sequence: Synthetic oligonucleotide
  Target: ATXN2; (-) strand; PAM type: NRG; PAM sequence: AAG
cactcagagtagtgttataa

SEQ ID NO: 23055 - DNA, 20 bp, Artificial Sequence
  Description of Artificial Sequence: Synthetic oligonucleotide
  Target: ATXN2; (-) strand; PAM type: NRG; PAM sequence: TAG
ctggcttctttcactcagag

SEQ ID NO: 23056 - DNA, 20 bp, Artificial Sequence
  Description of Artificial Sequence: Synthetic oligonucleotide
  Target: ATXN2; (-) strand; PAM type: NRG; PAM sequence: GAG
tgactggcttctttcactca

SEQ ID NO: 23057 - DNA, 20 bp, Artificial Sequence
  Description of Artificial Sequence: Synthetic oligonucleotide
  Target: ATXN2; (-) strand; PAM type: NRG; PAM sequence: CAG
tatgactggcttctttcact

SEQ ID NO: 23058 - DNA, 20 bp, Artificial Sequence
  Description of Artificial Sequence: Synthetic oligonucleotide
  Target: ATXN2; (-) strand; PAM type: NRG; PAM sequence: TGG
aaatatgtggcttttatgac

SEQ ID NO: 23059 - DNA, 20 bp, Artificial Sequence
  Description of Artificial Sequence: Synthetic oligonucleotide
  Target: ATXN2; (-) strand; PAM type: NRG; PAM sequence: TGG
aaatggaataataaaatatg

SEQ ID NO: 23060 - DNA, 20 bp, Artificial Sequence
  Description of Artificial Sequence: Synthetic oligonucleotide
  Target: ATXN2; (-) strand; PAM type: NRG; PAM sequence: TGG
caaattccatttcatacaaa

SEQ ID NO: 23061 - DNA, 20 bp, Artificial Sequence
  Description of Artificial Sequence: Synthetic oligonucleotide
  Target: ATXN2; (-) strand; PAM type: NRG; PAM sequence: GGG
tctatggatgggcttatttg

SEQ ID NO: 23062 - DNA, 20 bp, Artificial Sequence
  Description of Artificial Sequence: Synthetic oligonucleotide
  Target: ATXN2; (-) strand; PAM type: NRG; PAM sequence: GGG
ctctatggatgggcttattt

SEQ ID NO: 23063 - DNA, 20 bp, Artificial Sequence
  Description of Artificial Sequence: Synthetic oligonucleotide
  Target: ATXN2; (-) strand; PAM type: NRG; PAM sequence: TGG
tctctatggatgggcttatt

SEQ ID NO: 23064 - DNA, 20 bp, Artificial Sequence
  Description of Artificial Sequence: Synthetic oligonucleotide
  Target: ATXN2; (-) strand; PAM type: NRG; PAM sequence: GGG
tactttctgtctctatggat

SEQ ID NO: 23065 - DNA, 20 bp, Artificial Sequence
  Description of Artificial Sequence: Synthetic oligonucleotide
  Target: ATXN2; (-) strand; PAM type: NRG; PAM sequence: TGG
ctactttctgtctctatgga

SEQ ID NO: 23066 - DNA, 20 bp, Artificial Sequence
  Description of Artificial Sequence: Synthetic oligonucleotide
  Target: ATXN2; (-) strand; PAM type: NRG; PAM sequence: TGG
taatctactttctgtctcta

SEQ ID NO: 23067 - DNA, 20 bp, Artificial Sequence
  Description of Artificial Sequence: Synthetic oligonucleotide
  Target: ATXN2; (-) strand; PAM type: NRG; PAM sequence: AAG
tttcccctactcccaaccct

SEQ ID NO: 23068 - DNA, 20 bp, Artificial Sequence
  Description of Artificial Sequence: Synthetic oligonucleotide
  Target: ATXN2; (-) strand; PAM type: NRG; PAM sequence: CAG
agtcgttccacatttgcctc

SEQ ID NO: 23069 - DNA, 20 bp, Artificial Sequence
  Description of Artificial Sequence: Synthetic oligonucleotide
  Target: ATXN2; (-) strand; PAM type: NRG; PAM sequence: CAG
aaaccccgtgcccagtttag

SEQ ID NO: 23070 - DNA, 20 bp, Artificial Sequence
  Description of Artificial Sequence: Synthetic oligonucleotide
  Target: ATXN2; (-) strand; PAM type: NRG; PAM sequence: TAG
aagaaaccccgtgcccagtt

SEQ ID NO: 23071 - DNA, 20 bp, Artificial Sequence
  Description of Artificial Sequence: Synthetic oligonucleotide
  Target: ATXN2; (-) strand; PAM type: NRG; PAM sequence: CAG
cccaaaagaaaccccgtgcc

SEQ ID NO: 23072 - DNA, 20 bp, Artificial Sequence
  Description of Artificial Sequence: Synthetic oligonucleotide
  Target: ATXN2; (-) strand; PAM type: NRG; PAM sequence: AAG
aacatactcttcacccccaa

SEQ ID NO: 23073 - DNA, 20 bp, Artificial Sequence
  Description of Artificial Sequence: Synthetic oligonucleotide
  Target: ATXN2; (-) strand; PAM type: NRG; PAM sequence: CAG
atgttgtacaaccgtcttct

SEQ ID NO: 23074 - DNA, 20 bp, Artificial Sequence
  Description of Artificial Sequence: Synthetic oligonucleotide
  Target: ATXN2; (-) strand; PAM type: NRG; PAM sequence: TGG
atttaaagtgtataaatcag

SEQ ID NO: 23075 - DNA, 20 bp, Artificial Sequence
  Description of Artificial Sequence: Synthetic oligonucleotide
  Target: ATXN2; (-) strand; PAM type: NRG; PAM sequence: CAG
accatttaaagtgtataaat

SEQ ID NO: 23076 - DNA, 20 bp, Artificial Sequence
  Description of Artificial Sequence: Synthetic oligonucleotide
  Target: ATXN2; (-) strand; PAM type: NRG; PAM sequence: AAG
atatataaatcaaccattta

SEQ ID NO: 23077 - DNA, 20 bp, Artificial Sequence
  Description of Artificial Sequence: Synthetic oligonucleotide
  Target: ATXN2; (-) strand; PAM type: NRG; PAM sequence: GAG
ataaatcagtggtttttaat

SEQ ID NO: 23078 - DNA, 20 bp, Artificial Sequence
  Description of Artificial Sequence: Synthetic oligonucleotide
  Target: ATXN2; (-) strand; PAM type: NRG; PAM sequence: TGG
gtttaaagtgtataaatcag

SEQ ID NO: 23079 - DNA, 20 bp, Artificial Sequence
  Description of Artificial Sequence: Synthetic oligonucleotide
  Target: ATXN2; (-) strand; PAM type: NRG; PAM sequence: CAG
accgtttaaagtgtataaat

SEQ ID NO: 23080 - DNA, 20 bp, Artificial Sequence
  Description of Artificial Sequence: Synthetic oligonucleotide
  Target: ATXN2; (-) strand; PAM type: NRG; PAM sequence: AAG
atatataaataaaccgttta

SEQ ID NO: 23081 - DNA, 20 bp, Artificial Sequence
  Description of Artificial Sequence: Synthetic oligonucleotide
  Target: ATXN2; (-) strand; PAM type: NRG; PAM sequence: GAG
gtttttataacagctttatt

SEQ ID NO: 23082 - DNA, 20 bp, Artificial Sequence
  Description of Artificial Sequence: Synthetic oligonucleotide
  Target: ATXN2; (-) strand; PAM type: NRG; PAM sequence: CAG
gaattagcatgtttttataa

SEQ ID NO: 23083 - DNA, 20 bp, Artificial Sequence
  Description of Artificial Sequence: Synthetic oligonucleotide
  Target: ATXN2; (-) strand; PAM type: NRG; PAM sequence: TAG
ctactttgaagcatgtgaat

SEQ ID NO: 23084 - DNA, 20 bp, Artificial Sequence
  Description of Artificial Sequence: Synthetic oligonucleotide
  Target: ATXN2; (-) strand; PAM type: NRG; PAM sequence: AAG
gaaaaaacatttctactttg

SEQ ID NO: 23085 - DNA, 20 bp, Artificial Sequence
  Description of Artificial Sequence: Synthetic oligonucleotide
  Target: ATXN2; (-) strand; PAM type: NRG; PAM sequence: AAG
attgaatttaatatctcatg

SEQ ID NO: 23086 - DNA, 20 bp, Artificial Sequence
  Description of Artificial Sequence: Synthetic oligonucleotide
  Target: ATXN2; (-) strand; PAM type: NRG; PAM sequence: TGG
gtctcctcttatactacact

SEQ ID NO: 23087 - DNA, 20 bp, Artificial Sequence
  Description of Artificial Sequence: Synthetic oligonucleotide
  Target: ATXN2; (-) strand; PAM type: NRG; PAM sequence: CAG
ttattttttttaacatcatt

SEQ ID NO: 23088 - DNA, 20 bp, Artificial Sequence
  Description of Artificial Sequence: Synthetic oligonucleotide
  Target: ATXN2; (-) strand; PAM type: NRG; PAM sequence: CAG
ccccatttgaattttttcct

SEQ ID NO: 23089 - DNA, 20 bp, Artificial Sequence
  Description of Artificial Sequence: Synthetic oligonucleotide
  Target: ATXN2; (-) strand; PAM type: NRG; PAM sequence: AGG
ggacaatgatgtcttgctgt

SEQ ID NO: 23090 - DNA, 20 bp, Artificial Sequence
  Description of Artificial Sequence: Synthetic oligonucleotide
  Target: ATXN2; (-) strand; PAM type: NRG; PAM sequence: TAG
gggacaatgatgtcttgctg

SEQ ID NO: 23091 - DNA, 20 bp, Artificial Sequence
  Description of Artificial Sequence: Synthetic oligonucleotide
  Target: ATXN2; (-) strand; PAM type: NRG; PAM sequence: GGG
gggagggggggagagggaga

SEQ ID NO: 23092 - DNA, 20 bp, Artificial Sequence
  Description of Artificial Sequence: Synthetic oligonucleotide
  Target: ATXN2; (-) strand; PAM type: NRG; PAM sequence: AGG
ggggagggggggagagggag

SEQ ID NO: 23093 - DNA, 20 bp, Artificial Sequence
  Description of Artificial Sequence: Synthetic oligonucleotide
  Target: ATXN2; (-) strand; PAM type: NRG; PAM sequence: GAG
gggggagggggggagaggga

SEQ ID NO: 23094 - DNA, 20 bp, Artificial Sequence
  Description of Artificial Sequence: Synthetic oligonucleotide
  Target: ATXN2; (-) strand; PAM type: NRG; PAM sequence: GAG
gagggggagggggggagagg

SEQ ID NO: 23095 - DNA, 20 bp, Artificial Sequence
  Description of Artificial Sequence: Synthetic oligonucleotide
  Target: ATXN2; (-) strand; PAM type: NRG; PAM sequence: GGG
gggagggggagggggggaga

SEQ ID NO: 23096 - DNA, 20 bp, Artificial Sequence
  Description of Artificial Sequence: Synthetic oligonucleotide
  Target: ATXN2; (-) strand; PAM type: NRG; PAM sequence: AGG
ggggagggggagggggggag

SEQ ID NO: 23097 - DNA, 20 bp, Artificial Sequence
  Description of Artificial Sequence: Synthetic oligonucleotide
  Target: ATXN2; (-) strand; PAM type: NRG; PAM sequence: GAG
gggggagggggaggggggga

SEQ ID NO: 23098 - DNA, 20 bp, Artificial Sequence
  Description of Artificial Sequence: Synthetic oligonucleotide
  Target: ATXN2; (-) strand; PAM type: NRG; PAM sequence: GAG
gagggggagggggagggggg

SEQ ID NO: 23099 - DNA, 20 bp, Artificial Sequence
  Description of Artificial Sequence: Synthetic oligonucleotide
  Target: ATXN2; (-) strand; PAM type: NRG; PAM sequence: GGG
aggagggggagggggagggg

SEQ ID NO: 23100 - DNA, 20 bp, Artificial Sequence
  Description of Artificial Sequence: Synthetic oligonucleotide
  Target: ATXN2; (-) strand; PAM type: NRG; PAM sequence: GGG
aaggagggggagggggaggg

SEQ ID NO: 23101 - DNA, 20 bp, Artificial Sequence
  Description of Artificial Sequence: Synthetic oligonucleotide
  Target: ATXN2; (-) strand; PAM type: NRG; PAM sequence: GGG
gaaggagggggagggggagg

SEQ ID NO: 23102 - DNA, 20 bp, Artificial Sequence
  Description of Artificial Sequence: Synthetic oligonucleotide
  Target: ATXN2; (-) strand; PAM type: NRG; PAM sequence: GGG
agaaggagggggagggggag

SEQ ID NO: 23103 - DNA, 20 bp, Artificial Sequence
  Description of Artificial Sequence: Synthetic oligonucleotide
  Target: ATXN2; (-) strand; PAM type: NRG; PAM sequence: GGG
gagaaggagggggaggggga

SEQ ID NO: 23104 - DNA, 20 bp, Artificial Sequence
  Description of Artificial Sequence: Synthetic oligonucleotide
  Target: ATXN2; (-) strand; PAM type: NRG; PAM sequence: AGG
ggagaaggagggggaggggg

SEQ ID NO: 23105 - DNA, 20 bp, Artificial Sequence
  Description of Artificial Sequence: Synthetic oligonucleotide
  Target: ATXN2; (-) strand; PAM type: NRG; PAM sequence: GAG
aggagaaggagggggagggg

SEQ ID NO: 23106 - DNA, 20 bp, Artificial Sequence
  Description of Artificial Sequence: Synthetic oligonucleotide
  Target: ATXN2; (-) strand; PAM type: NRG; PAM sequence: GGG
gaaggagaaggagggggagg

SEQ ID NO: 23107 - DNA, 20 bp, Artificial Sequence
  Description of Artificial Sequence: Synthetic oligonucleotide
  Target: ATXN2; (-) strand; PAM type: NRG; PAM sequence: GGG
agaaggagaaggagggggag

SEQ ID NO: 23108 - DNA, 20 bp, Artificial Sequence
  Description of Artificial Sequence: Synthetic oligonucleotide
  Target: ATXN2; (-) strand; PAM type: NRG; PAM sequence: GGG
gagaaggagaaggaggggga

SEQ ID NO: 23109 - DNA, 20 bp, Artificial Sequence
  Description of Artificial Sequence: Synthetic oligonucleotide
  Target: ATXN2; (-) strand; PAM type: NRG; PAM sequence: AGG
ggagaaggagaaggaggggg

SEQ ID NO: 23110 - DNA, 20 bp, Artificial Sequence
  Description of Artificial Sequence: Synthetic oligonucleotide
  Target: ATXN2; (-) strand; PAM type: NRG; PAM sequence: GAG
gggagaaggagaaggagggg

SEQ ID NO: 23111 - DNA, 20 bp, Artificial Sequence
  Description of Artificial Sequence: Synthetic oligonucleotide
  Target: ATXN2; (-) strand; PAM type: NRG; PAM sequence: GGG
tggggagaaggagaaggagg

SEQ ID NO: 23112 - DNA, 20 bp, Artificial Sequence
  Description of Artificial Sequence: Synthetic oligonucleotide
  Target: ATXN2; (-) strand; PAM type: NRG; PAM sequence: GGG
gtggggagaaggagaaggag

SEQ ID NO: 23113 - DNA, 20 bp, Artificial Sequence
  Description of Artificial Sequence: Synthetic oligonucleotide
  Target: ATXN2; (-) strand; PAM type: NRG; PAM sequence: GGG
cgtggggagaaggagaagga

SEQ ID NO: 23114 - DNA, 20 bp, Artificial Sequence
  Description of Artificial Sequence: Synthetic oligonucleotide
  Target: ATXN2; (-) strand; PAM type: NRG; PAM sequence: AGG
ccgtggggagaaggagaagg

SEQ ID NO: 23115 - DNA, 20 bp, Artificial Sequence
  Description of Artificial Sequence: Synthetic oligonucleotide
  Target: ATXN2; (-) strand; PAM type: NRG; PAM sequence: GAG
accgtggggagaaggagaag

SEQ ID NO: 23116 - DNA, 20 bp, Artificial Sequence
  Description of Artificial Sequence: Synthetic oligonucleotide
  Target: ATXN2; (-) strand; PAM type: NRG; PAM sequence: AGG
agaccgtggggagaaggaga

SEQ ID NO: 23117 - DNA, 20 bp, Artificial Sequence
  Description of Artificial Sequence: Synthetic oligonucleotide
  Target: ATXN2; (-) strand; PAM type: NRG; PAM sequence: AAG
gagaccgtggggagaaggag

SEQ ID NO: 23118 - DNA, 20 bp, Artificial Sequence
  Description of Artificial Sequence: Synthetic oligonucleotide
  Target: ATXN2; (-) strand; PAM type: NRG; PAM sequence: GAG
agggagaccgtggggagaag

SEQ ID NO: 23119 - DNA, 20 bp, Artificial Sequence
  Description of Artificial Sequence: Synthetic oligonucleotide
  Target: ATXN2; (-) strand; PAM type: NRG; PAM sequence: AGG
agagggagaccgtggggaga

SEQ ID NO: 23120 - DNA, 20 bp, Artificial Sequence
  Description of Artificial Sequence: Synthetic oligonucleotide
  Target: ATXN2; (-) strand; PAM type: NRG; PAM sequence: AAG
gagagggagaccgtggggag

SEQ ID NO: 23121 - DNA, 20 bp, Artificial Sequence
  Description of Artificial Sequence: Synthetic oligonucleotide
  Target: ATXN2; (-) strand; PAM type: NRG; PAM sequence: GAG
agggagagggagaccgtggg

SEQ ID NO: 23122 - DNA, 20 bp, Artificial Sequence
  Description of Artificial Sequence: Synthetic oligonucleotide
  Target: ATXN2; (-) strand; PAM type: NRG; PAM sequence: GGG
agagggagagggagaccgtg

SEQ ID NO: 23123 - DNA, 20 bp, Artificial Sequence
  Description of Artificial Sequence: Synthetic oligonucleotide
  Target: ATXN2; (-) strand; PAM type: NRG; PAM sequence: GGG
gagagggagagggagaccgt

SEQ ID NO: 23124 - DNA, 20 bp, Artificial Sequence
  Description of Artificial Sequence: Synthetic oligonucleotide
  Target: ATXN2; (-) strand; PAM type: NRG; PAM sequence: TGG
agagagggagagggagaccg

SEQ ID NO: 23125 - DNA, 20 bp, Artificial Sequence
  Description of Artificial Sequence: Synthetic oligonucleotide
  Target: ATXN2; (-) strand; PAM type: NRG; PAM sequence: GAG
cgtggaaagagagggagagg

SEQ ID NO: 23126 - DNA, 20 bp, Artificial Sequence
  Description of Artificial Sequence: Synthetic oligonucleotide
  Target: ATXN2; (-) strand; PAM type: NRG; PAM sequence: GGG
accgtggaaagagagggaga

SEQ ID NO: 23127 - DNA, 20 bp, Artificial Sequence
  Description of Artificial Sequence: Synthetic oligonucleotide
  Target: ATXN2; (-) strand; PAM type: NRG; PAM sequence: AGG
gaccgtggaaagagagggag

SEQ ID NO: 23128 - DNA, 20 bp, Artificial Sequence
  Description of Artificial Sequence: Synthetic oligonucleotide
  Target: ATXN2; (-) strand; PAM type: NRG; PAM sequence: GAG
agaccgtggaaagagaggga

SEQ ID NO: 23129 - DNA, 20 bp, Artificial Sequence
  Description of Artificial Sequence: Synthetic oligonucleotide
  Target: ATXN2; (-) strand; PAM type: NRG; PAM sequence: GAG
ggagaccgtggaaagagagg

SEQ ID NO: 23130 - DNA, 20 bp, Artificial Sequence
  Description of Artificial Sequence: Synthetic oligonucleotide
  Target: ATXN2; (-) strand; PAM type: NRG; PAM sequence: GGG
agggagaccgtggaaagaga

SEQ ID NO: 23131 - DNA, 20 bp, Artificial Sequence
  Description of Artificial Sequence: Synthetic oligonucleotide
  Target: ATXN2; (-) strand; PAM type: NRG; PAM sequence: AGG
gagggagaccgtggaaagag

SEQ ID NO: 23132 - DNA, 20 bp, Artificial Sequence
  Description of Artificial Sequence: Synthetic oligonucleotide
  Target: ATXN2; (-) strand; PAM type: NRG; PAM sequence: GAG
agagggagaccgtggaaaga

SEQ ID NO: 23133 - DNA, 20 bp, Artificial Sequence
  Description of Artificial Sequence: Synthetic oligonucleotide
  Target: ATXN2; (-) strand; PAM type: NRG; PAM sequence: GAG
tcagagggagaccgtggaaa

SEQ ID NO: 23134 - DNA, 20 bp, Artificial Sequence
  Description of Artificial Sequence: Synthetic oligonucleotide
  Target: ATXN2; (-) strand; PAM type: NRG; PAM sequence: AAG
catcagagggagaccgtgga

SEQ ID NO: 23135 - DNA, 20 bp, Artificial Sequence
  Description of Artificial Sequence: Synthetic oligonucleotide
  Target: ATXN2; (-) strand; PAM type: NRG; PAM sequence: TGG
tcggcatcagagggagaccg

SEQ ID NO: 23136 - DNA, 20 bp, Artificial Sequence
  Description of Artificial Sequence: Synthetic oligonucleotide
  Target: ATXN2; (-) strand; PAM type: NRG; PAM sequence: GAG
cttcggctcggcatcagagg

SEQ ID NO: 23137 - DNA, 20 bp, Artificial Sequence
  Description of Artificial Sequence: Synthetic oligonucleotide
  Target: ATXN2; (-) strand; PAM type: NRG; PAM sequence: GGG
agcttcggctcggcatcaga

SEQ ID NO: 23138 - DNA, 20 bp, Artificial Sequence
  Description of Artificial Sequence: Synthetic oligonucleotide
  Target: ATXN2; (-) strand; PAM type: NRG; PAM sequence: AGG
tagcttcggctcggcatcag

SEQ ID NO: 23139 - DNA, 20 bp, Artificial Sequence
  Description of Artificial Sequence: Synthetic oligonucleotide
  Target: ATXN2; (-) strand; PAM type: NRG; PAM sequence: GAG
ctagcttcggctcggcatca

SEQ ID NO: 23140 - DNA, 20 bp, Artificial Sequence
  Description of Artificial Sequence: Synthetic oligonucleotide
  Target: ATXN2; (-) strand; PAM type: NRG; PAM sequence: CAG
gtctagcttcggctcggcat

SEQ ID NO: 23141 - DNA, 20 bp, Artificial Sequence
  Description of Artificial Sequence: Synthetic oligonucleotide
  Target: ATXN2; (-) strand; PAM type: NRG; PAM sequence: CGG
agtacagtctagcttcggct

SEQ ID NO: 23142 - DNA, 20 bp, Artificial Sequence
  Description of Artificial Sequence: Synthetic oligonucleotide
  Target: ATXN2; (-) strand; PAM type: NRG; PAM sequence: CGG
gcagcagtacagtctagctt

SEQ ID NO: 23143 - DNA, 20 bp, Artificial Sequence
  Description of Artificial Sequence: Synthetic oligonucleotide
  Target: ATXN2; (-) strand; PAM type: NRG; PAM sequence: TAG
gagatggcagcagtacagtc

SEQ ID NO: 23144 - DNA, 20 bp, Artificial Sequence
  Description of Artificial Sequence: Synthetic oligonucleotide
  Target: ATXN2; (-) strand; PAM type: NRG; PAM sequence: CAG
gagccgagatggcagcagta

SEQ ID NO: 23145 - DNA, 20 bp, Artificial Sequence
  Description of Artificial Sequence: Synthetic oligonucleotide
  Target: ATXN2; (-) strand; PAM type: NRG; PAM sequence: CAG
gcagtgagccgagatggcag

SEQ ID NO: 23146 - DNA, 20 bp, Artificial Sequence
  Description of Artificial Sequence: Synthetic oligonucleotide
  Target: ATXN2; (-) strand; PAM type: NRG; PAM sequence: CAG
gttgcagtgagccgagatgg

SEQ ID NO: 23147 - DNA, 20 bp, Artificial Sequence
  Description of Artificial Sequence: Synthetic oligonucleotide
  Target: ATXN2; (-) strand; PAM type: NRG; PAM sequence: TGG
gaggttgcagtgagccgaga

SEQ ID NO: 23148 - DNA, 20 bp, Artificial Sequence
  Description of Artificial Sequence: Synthetic oligonucleotide
  Target: ATXN2; (-) strand; PAM type: NRG; PAM sequence: GAG
cagggaggttgcagtgagcc

SEQ ID NO: 23149 - DNA, 20 bp, Artificial Sequence
  Description of Artificial Sequence: Synthetic oligonucleotide
  Target: ATXN2; (-) strand; PAM type: NRG; PAM sequence: GAG
tcaggcagggaggttgcagt

SEQ ID NO: 23150 - DNA, 20 bp, Artificial Sequence
  Description of Artificial Sequence: Synthetic oligonucleotide
  Target: ATXN2; (-) strand; PAM type: NRG; PAM sequence: CAG
agaatcaggcagggaggttg

SEQ ID NO: 23151 - DNA, 20 bp, Artificial Sequence
  Description of Artificial Sequence: Synthetic oligonucleotide
  Target: ATXN2; (-) strand; PAM type: NRG; PAM sequence: AGG
ggcaggagaatcaggcaggg

SEQ ID NO: 23152 - DNA, 20 bp, Artificial Sequence
  Description of Artificial Sequence: Synthetic oligonucleotide
  Target: ATXN2; (-) strand; PAM type: NRG; PAM sequence: GAG
aggcaggagaatcaggcagg

SEQ ID NO: 23153 - DNA, 20 bp, Artificial Sequence
  Description of Artificial Sequence: Synthetic oligonucleotide
  Target: ATXN2; (-) strand; PAM type: NRG; PAM sequence: GGG
tgaggcaggagaatcaggca

SEQ ID NO: 23154 - DNA, 20 bp, Artificial Sequence
  Description of Artificial Sequence: Synthetic oligonucleotide
  Target: ATXN2; (-) strand; PAM type: NRG; PAM sequence: AGG
ctgaggcaggagaatcaggc

SEQ ID NO: 23155 - DNA, 20 bp, Artificial Sequence
  Description of Artificial Sequence: Synthetic oligonucleotide
  Target: ATXN2; (-) strand; PAM type: NRG; PAM sequence: CAG
gctgaggcaggagaatcagg

SEQ ID NO: 23156 - DNA, 20 bp, Artificial Sequence
  Description of Artificial Sequence: Synthetic oligonucleotide
  Target: ATXN2; (-) strand; PAM type: NRG; PAM sequence: AGG
caggctgaggcaggagaatc

SEQ ID NO: 23157 - DNA, 20 bp, Artificial Sequence
  Description of Artificial Sequence: Synthetic oligonucleotide
  Target: ATXN2; (-) strand; PAM type: NRG; PAM sequence: CAG
gcaggctgaggcaggagaat

SEQ ID NO: 23158 - DNA, 20 bp, Artificial Sequence
  Description of Artificial Sequence: Synthetic oligonucleotide
  Target: ATXN2; (-) strand; PAM type: NRG; PAM sequence: GAG
cactaggcaggctgaggcag

SEQ ID NO: 23159 - DNA, 20 bp, Artificial Sequence
  Description of Artificial Sequence: Synthetic oligonucleotide
  Target: ATXN2; (-) strand; PAM type: NRG; PAM sequence: AGG
ggcactaggcaggctgaggc

SEQ ID NO: 23160 - DNA, 20 bp, Artificial Sequence
  Description of Artificial Sequence: Synthetic oligonucleotide
  Target: ATXN2; (-) strand; PAM type: NRG; PAM sequence: CAG
aggcactaggcaggctgagg

SEQ ID NO: 23161 - DNA, 20 bp, Artificial Sequence
  Description of Artificial Sequence: Synthetic oligonucleotide
  Target: ATXN2; (-) strand; PAM type: NRG; PAM sequence: AGG
cacaggcactaggcaggctg

SEQ ID NO: 23162 - DNA, 20 bp, Artificial Sequence
  Description of Artificial Sequence: Synthetic oligonucleotide
  Target: ATXN2; (-) strand; PAM type: NRG; PAM sequence: GAG
tcacaggcactaggcaggct

SEQ ID NO: 23163 - DNA, 20 bp, Artificial Sequence
  Description of Artificial Sequence: Synthetic oligonucleotide
  Target: ATXN2; (-) strand; PAM type: NRG; PAM sequence: AGG
tgcaatcacaggcactaggc

SEQ ID NO: 23164 - DNA, 20 bp, Artificial Sequence
  Description of Artificial Sequence: Synthetic oligonucleotide
  Target: ATXN2; (-) strand; PAM type: NRG; PAM sequence: CAG
ctgcaatcacaggcactagg

SEQ ID NO: 23165 - DNA, 20 bp, Artificial Sequence
  Description of Artificial Sequence: Synthetic oligonucleotide
  Target: ATXN2; (-) strand; PAM type: NRG; PAM sequence: AGG
ggcctgcaatcacaggcact

SEQ ID NO: 23166 - DNA, 20 bp, Artificial Sequence
  Description of Artificial Sequence: Synthetic oligonucleotide
  Target: ATXN2; (-) strand; PAM type: NRG; PAM sequence: TAG
gggcctgcaatcacaggcac

SEQ ID NO: 23167 - DNA, 20 bp, Artificial Sequence
  Description of Artificial Sequence: Synthetic oligonucleotide
  Target: ATXN2; (-) strand; PAM type: NRG; PAM sequence: AGG
cggcgcgggcctgcaatcac

SEQ ID NO: 23168 - DNA, 20 bp, Artificial Sequence
  Description of Artificial Sequence: Synthetic oligonucleotide
  Target: ATXN2; (-) strand; PAM type: NRG; PAM sequence: CAG
gcggcgcgggcctgcaatca

SEQ ID NO: 23169 - DNA, 20 bp, Artificial Sequence
  Description of Artificial Sequence: Synthetic oligonucleotide
  Target: ATXN2; (-) strand; PAM type: NRG; PAM sequence: GGG
ccagtcaggcgtggcggcgc

SEQ ID NO: 23170 - DNA, 20 bp, Artificial Sequence
  Description of Artificial Sequence: Synthetic oligonucleotide
  Target: ATXN2; (-) strand; PAM type: NRG; PAM sequence: CGG
accagtcaggcgtggcggcg

SEQ ID NO: 23171 - DNA, 20 bp, Artificial Sequence
  Description of Artificial Sequence: Synthetic oligonucleotide
  Target: ATXN2; (-) strand; PAM type: NRG; PAM sequence: CGG
cgaaaaccagtcaggcgtgg

SEQ ID NO: 23172 - DNA, 20 bp, Artificial Sequence
  Description of Artificial Sequence: Synthetic oligonucleotide
  Target: ATXN2; (-) strand; PAM type: NRG; PAM sequence: TGG
atacgaaaaccagtcaggcg

SEQ ID NO: 23173 - DNA, 20 bp, Artificial Sequence
  Description of Artificial Sequence: Synthetic oligonucleotide
  Target: ATXN2; (-) strand; PAM type: NRG; PAM sequence: AGG
aaaaaatacgaaaaccagtc

SEQ ID NO: 23174 - DNA, 20 bp, Artificial Sequence
  Description of Artificial Sequence: Synthetic oligonucleotide
  Target: ATXN2; (-) strand; PAM type: NRG; PAM sequence: CAG
aaaaaaatacgaaaaccagt

SEQ ID NO: 23175 - DNA, 20 bp, Artificial Sequence
  Description of Artificial Sequence: Synthetic oligonucleotide
  Target: ATXN2; (-) strand; PAM type: NRG; PAM sequence: CAG
caccaaaaaaatacgaaaac

SEQ ID NO: 23176 - DNA, 20 bp, Artificial Sequence
  Description of Artificial Sequence: Synthetic oligonucleotide
  Target: ATXN2; (-) strand; PAM type: NRG; PAM sequence: CAG
ggagaccagcccggccaaca

SEQ ID NO: 23177 - DNA, 20 bp, Artificial Sequence
  Description of Artificial Sequence: Synthetic oligonucleotide
  Target: ATXN2; (-) strand; PAM type: NRG; PAM sequence: CGG
ttaggagctggagaccagcc

SEQ ID NO: 23178 - DNA, 20 bp, Artificial Sequence
  Description of Artificial Sequence: Synthetic oligonucleotide
  Target: ATXN2; (-) strand; PAM type: NRG; PAM sequence: CAG
cgcggttaggagctggagac

SEQ ID NO: 23179 - DNA, 20 bp, Artificial Sequence
  Description of Artificial Sequence: Synthetic oligonucleotide
  Target: ATXN2; (-) strand; PAM type: NRG; PAM sequence: GAG
tcactcgcggttaggagctg

SEQ ID NO: 23180 - DNA, 20 bp, Artificial Sequence
  Description of Artificial Sequence: Synthetic oligonucleotide
  Target: ATXN2; (-) strand; PAM type: NRG; PAM sequence: TGG
gatcactcgcggttaggagc

SEQ ID NO: 23181 - DNA, 20 bp, Artificial Sequence
  Description of Artificial Sequence: Synthetic oligonucleotide
  Target: ATXN2; (-) strand; PAM type: NRG; PAM sequence: GAG
ggcagatcactcgcggttag

SEQ ID NO: 23182 - DNA, 20 bp, Artificial Sequence
  Description of Artificial Sequence: Synthetic oligonucleotide
  Target: ATXN2; (-) strand; PAM type: NRG; PAM sequence: AGG
ctggcagatcactcgcggtt

SEQ ID NO: 23183 - DNA, 20 bp, Artificial Sequence
  Description of Artificial Sequence: Synthetic oligonucleotide
  Target: ATXN2; (-) strand; PAM type: NRG; PAM sequence: TAG
gctggcagatcactcgcggt

SEQ ID NO: 23184 - DNA, 20 bp, Artificial Sequence
  Description of Artificial Sequence: Synthetic oligonucleotide
  Target: ATXN2; (-) strand; PAM type: NRG; PAM sequence: CGG
cgaggctggcagatcactcg

SEQ ID NO: 23185 - DNA, 20 bp, Artificial Sequence
  Description of Artificial Sequence: Synthetic oligonucleotide
  Target: ATXN2; (-) strand; PAM type: NRG; PAM sequence: CAG
cctcgggaggccgaggctgg

SEQ ID NO: 23186 - DNA, 20 bp, Artificial Sequence
  Description of Artificial Sequence: Synthetic oligonucleotide
  Target: ATXN2; (-) strand; PAM type: NRG; PAM sequence: TGG
gcacctcgggaggccgaggc

SEQ ID NO: 23187 - DNA, 20 bp, Artificial Sequence
  Description of Artificial Sequence: Synthetic oligonucleotide
  Target: ATXN2; (-) strand; PAM type: NRG; PAM sequence: AGG
cccggcacctcgggaggccg

SEQ ID NO: 23188 - DNA, 20 bp, Artificial Sequence
  Description of Artificial Sequence: Synthetic oligonucleotide
  Target: ATXN2; (-) strand; PAM type: NRG; PAM sequence: GAG
tcccggcacctcgggaggcc

SEQ ID NO: 23189 - DNA, 20 bp, Artificial Sequence
  Description of Artificial Sequence: Synthetic oligonucleotide
  Target: ATXN2; (-) strand; PAM type: NRG; PAM sequence: AGG
tgcaatcccggcacctcggg

SEQ ID NO: 23190 - DNA, 20 bp, Artificial Sequence
  Description of Artificial Sequence: Synthetic oligonucleotide
  Target: ATXN2; (-) strand; PAM type: NRG; PAM sequence: GAG
ctgcaatcccggcacctcgg

SEQ ID NO: 23191 - DNA, 20 bp, Artificial Sequence
  Description of Artificial Sequence: Synthetic oligonucleotide
  Target: ATXN2; (-) strand; PAM type: NRG; PAM sequence: GGG
gtctgcaatcccggcacctc

SEQ ID NO: 23192 - DNA, 20 bp, Artificial Sequence
  Description of Artificial Sequence: Synthetic oligonucleotide
  Target: ATXN2; (-) strand; PAM type: NRG; PAM sequence: CGG
cgtctgcaatcccggcacct

SEQ ID NO: 23193 - DNA, 20 bp, Artificial Sequence
  Description of Artificial Sequence: Synthetic oligonucleotide
  Target: ATXN2; (-) strand; PAM type: NRG; PAM sequence: CGG
cgagactccgtctgcaatcc

SEQ ID NO: 23194 - DNA, 20 bp, Artificial Sequence
  Description of Artificial Sequence: Synthetic oligonucleotide
  Target: ATXN2; (-) strand; PAM type: NRG; PAM sequence: GAG
ccattgagcactgagtgaac

SEQ ID NO: 23195 - DNA, 20 bp, Artificial Sequence
  Description of Artificial Sequence: Synthetic oligonucleotide
  Target: ATXN2; (-) strand; PAM type: NRG; PAM sequence: GAG
cctgggcaccattgagcact

SEQ ID NO: 23196 - DNA, 20 bp, Artificial Sequence
  Description of Artificial Sequence: Synthetic oligonucleotide
  Target: ATXN2; (-) strand; PAM type: NRG; PAM sequence: GAG
actccagcctgggcaccatt

SEQ ID NO: 23197 - DNA, 20 bp, Artificial Sequence
  Description of Artificial Sequence: Synthetic oligonucleotide
  Target: ATXN2; (-) strand; PAM type: NRG; PAM sequence: GGG
acgccactgcactccagcct

SEQ ID NO: 23198 - DNA, 20 bp, Artificial Sequence
  Description of Artificial Sequence: Synthetic oligonucleotide
  Target: ATXN2; (-) strand; PAM type: NRG; PAM sequence: TGG
cacgccactgcactccagcc

SEQ ID NO: 23199 - DNA, 20 bp, Artificial Sequence
  Description of Artificial Sequence: Synthetic oligonucleotide
  Target: ATXN2; (-) strand; PAM type: NRG; PAM sequence: CAG
gagatcacgccactgcactc

SEQ ID NO: 23200 - DNA, 20 bp, Artificial Sequence
  Description of Artificial Sequence: Synthetic oligonucleotide
  Target: ATXN2; (-) strand; PAM type: NRG; PAM sequence: GAG
ggtggaggttgtagcgagcc

SEQ ID NO: 23201 - DNA, 20 bp, Artificial Sequence
  Description of Artificial Sequence: Synthetic oligonucleotide
  Target: ATXN2; (-) strand; PAM type: NRG; PAM sequence: GAG
tgggaggtggaggttgtagc

SEQ ID NO: 23202 - DNA, 20 bp, Artificial Sequence
  Description of Artificial Sequence: Synthetic oligonucleotide
  Target: ATXN2; (-) strand; PAM type: NRG; PAM sequence: TAG
tggctgggaggtggaggttg

SEQ ID NO: 23203 - DNA, 20 bp, Artificial Sequence
  Description of Artificial Sequence: Synthetic oligonucleotide
  Target: ATXN2; (-) strand; PAM type: NRG; PAM sequence: AGG
ggcaggtggctgggaggtgg

SEQ ID NO: 23204 - DNA, 20 bp, Artificial Sequence
  Description of Artificial Sequence: Synthetic oligonucleotide
  Target: ATXN2; (-) strand; PAM type: NRG; PAM sequence: GAG
aggcaggtggctgggaggtg

SEQ ID NO: 23205 - DNA, 20 bp, Artificial Sequence
  Description of Artificial Sequence: Synthetic oligonucleotide
  Target: ATXN2; (-) strand; PAM type: NRG; PAM sequence: TGG
caaggcaggtggctgggagg

SEQ ID NO: 23206 - DNA, 20 bp, Artificial Sequence
  Description of Artificial Sequence: Synthetic oligonucleotide
  Target: ATXN2; (-) strand; PAM type: NRG; PAM sequence: AGG
ggccaaggcaggtggctggg

SEQ ID NO: 23207 - DNA, 20 bp, Artificial Sequence
  Description of Artificial Sequence: Synthetic oligonucleotide
  Target: ATXN2; (-) strand; PAM type: NRG; PAM sequence: GAG
aggccaaggcaggtggctgg

SEQ ID NO: 23208 - DNA, 20 bp, Artificial Sequence
  Description of Artificial Sequence: Synthetic oligonucleotide
  Target: ATXN2; (-) strand; PAM type: NRG; PAM sequence: GGG
ggaggccaaggcaggtggct

SEQ ID NO: 23209 - DNA, 20 bp, Artificial Sequence
  Description of Artificial Sequence: Synthetic oligonucleotide
  Target: ATXN2; (-) strand; PAM type: NRG; PAM sequence: TGG
gggaggccaaggcaggtggc

SEQ ID NO: 23210 - DNA, 20 bp, Artificial Sequence
  Description of Artificial Sequence: Synthetic oligonucleotide
  Target: ATXN2; (-) strand; PAM type: NRG; PAM sequence: TGG
ctttgggaggccaaggcagg

SEQ ID NO: 23211 - DNA, 20 bp, Artificial Sequence
  Description of Artificial Sequence: Synthetic oligonucleotide
  Target: ATXN2; (-) strand; PAM type: NRG; PAM sequence: AGG
gcactttgggaggccaaggc

SEQ ID NO: 23212 - DNA, 20 bp, Artificial Sequence
  Description of Artificial Sequence: Synthetic oligonucleotide
  Target: ATXN2; (-) strand; PAM type: NRG; PAM sequence: CAG
ggcactttgggaggccaagg

SEQ ID NO: 23213 - DNA, 20 bp, Artificial Sequence
  Description of Artificial Sequence: Synthetic oligonucleotide
  Target: ATXN2; (-) strand; PAM type: NRG; PAM sequence: AGG
ctcggcactttgggaggcca

SEQ ID NO: 23214 - DNA, 20 bp, Artificial Sequence
  Description of Artificial Sequence: Synthetic oligonucleotide
  Target: ATXN2; (-) strand; PAM type: NRG; PAM sequence: AAG
tctcggcactttgggaggcc

SEQ ID NO: 23215 - DNA, 20 bp, Artificial Sequence
  Description of Artificial Sequence: Synthetic oligonucleotide
  Target: ATXN2; (-) strand; PAM type: NRG; PAM sequence: AGG
tgcaatctcggcactttggg

SEQ ID NO: 23216 - DNA, 20 bp, Artificial Sequence
  Description of Artificial Sequence: Synthetic oligonucleotide
  Target: ATXN2; (-) strand; PAM type: NRG; PAM sequence: GAG
ctgcaatctcggcactttgg

SEQ ID NO: 23217 - DNA, 20 bp, Artificial Sequence
  Description of Artificial Sequence: Synthetic oligonucleotide
  Target: ATXN2; (-) strand; PAM type: NRG; PAM sequence: GGG
ggctgcaatctcggcacttt

SEQ ID NO: 23218 - DNA, 20 bp, Artificial Sequence
  Description of Artificial Sequence: Synthetic oligonucleotide
  Target: ATXN2; (-) strand; PAM type: NRG; PAM sequence: TGG
aggctgcaatctcggcactt

SEQ ID NO: 23219 - DNA, 20 bp, Artificial Sequence
  Description of Artificial Sequence: Synthetic oligonucleotide
  Target: ATXN2; (-) strand; PAM type: NRG; PAM sequence: CGG
ccgggcagaggctgcaatct

SEQ ID NO: 23220 - DNA, 20 bp, Artificial Sequence
  Description of Artificial Sequence: Synthetic oligonucleotide
  Target: ATXN2; (-) strand; PAM type: NRG; PAM sequence: AGG
acggggtggcggccgggcag

SEQ ID NO: 23221 - DNA, 20 bp, Artificial Sequence
  Description of Artificial Sequence: Synthetic oligonucleotide
  Target: ATXN2; (-) strand; PAM type: NRG; PAM sequence: GAG
gacggggtggcggccgggca

SEQ ID NO: 23222 - DNA, 20 bp, Artificial Sequence
  Description of Artificial Sequence: Synthetic oligonucleotide
  Target: ATXN2; (-) strand; PAM type: NRG; PAM sequence: CAG
cagacggggtggcggccggg

SEQ ID NO: 23223 - DNA, 20 bp, Artificial Sequence
  Description of Artificial Sequence: Synthetic oligonucleotide
  Target: ATXN2; (-) strand; PAM type: NRG; PAM sequence: GGG
tcccagacggggtggcggcc

SEQ ID NO: 23224 - DNA, 20 bp, Artificial Sequence
  Description of Artificial Sequence: Synthetic oligonucleotide
  Target: ATXN2; (-) strand; PAM type: NRG; PAM sequence: CGG
ttcccagacggggtggcggc

SEQ ID NO: 23225 - DNA, 20 bp, Artificial Sequence
  Description of Artificial Sequence: Synthetic oligonucleotide
  Target: ATXN2; (-) strand; PAM type: NRG; PAM sequence: CGG
tcacttcccagacggggtgg

SEQ ID NO: 23226 - DNA, 20 bp, Artificial Sequence
  Description of Artificial Sequence: Synthetic oligonucleotide
  Target: ATXN2; (-) strand; PAM type: NRG; PAM sequence: TGG
tcctcacttcccagacgggg

SEQ ID NO: 23227 - DNA, 20 bp, Artificial Sequence
  Description of Artificial Sequence: Synthetic oligonucleotide
  Target: ATXN2; (-) strand; PAM type: NRG; PAM sequence: GGG
cgctcctcacttcccagacg

SEQ ID NO: 23228 - DNA, 20 bp, Artificial Sequence
  Description of Artificial Sequence: Synthetic oligonucleotide
  Target: ATXN2; (-) strand; PAM type: NRG; PAM sequence: GGG
acgctcctcacttcccagac

SEQ ID NO: 23229 - DNA, 20 bp, Artificial Sequence
  Description of Artificial Sequence: Synthetic oligonucleotide
  Target: ATXN2; (-) strand; PAM type: NRG; PAM sequence: CGG
gacgctcctcacttcccaga

SEQ ID NO: 23230 - DNA, 20 bp, Artificial Sequence
  Description of Artificial Sequence: Synthetic oligonucleotide
  Target: ATXN2; (-) strand; PAM type: NRG; PAM sequence: CAG
cagagacgctcctcacttcc

SEQ ID NO: 23231 - DNA, 20 bp, Artificial Sequence
  Description of Artificial Sequence: Synthetic oligonucleotide
  Target: ATXN2; (-) strand; PAM type: NRG; PAM sequence: GAG
agacgatgggtggccaggca

SEQ ID NO: 23232 - DNA, 20 bp, Artificial Sequence
  Description of Artificial Sequence: Synthetic oligonucleotide
  Target: ATXN2; (-) strand; PAM type: NRG; PAM sequence: CAG
ccagacgatgggtggccagg

SEQ ID NO: 23233 - DNA, 20 bp, Artificial Sequence
  Description of Artificial Sequence: Synthetic oligonucleotide
  Target: ATXN2; (-) strand; PAM type: NRG; PAM sequence: AGG
atcccagacgatgggtggcc

SEQ ID NO: 23234 - DNA, 20 bp, Artificial Sequence
  Description of Artificial Sequence: Synthetic oligonucleotide
  Target: ATXN2; (-) strand; PAM type: NRG; PAM sequence: CAG
catcccagacgatgggtggc

SEQ ID NO: 23235 - DNA, 20 bp, Artificial Sequence
  Description of Artificial Sequence: Synthetic oligonucleotide
  Target: ATXN2; (-) strand; PAM type: NRG; PAM sequence: TGG
ctcacatcccagacgatggg

SEQ ID NO: 23236 - DNA, 20 bp, Artificial Sequence
  Description of Artificial Sequence: Synthetic oligonucleotide
  Target: ATXN2; (-) strand; PAM type: NRG; PAM sequence: GGG
ctcctcacatcccagacgat

SEQ ID NO: 23237 - DNA, 20 bp, Artificial Sequence
  Description of Artificial Sequence: Synthetic oligonucleotide
  Target: ATXN2; (-) strand; PAM type: NRG; PAM sequence: TGG
gctcctcacatcccagacga

SEQ ID NO: 23238 - DNA, 20 bp, Artificial Sequence
  Description of Artificial Sequence: Synthetic oligonucleotide
  Target: ATXN2; (-) strand; PAM type: NRG; PAM sequence: CAG
cagaggggctcctcacatcc

SEQ ID NO: 23239 - DNA, 20 bp, Artificial Sequence
  Description of Artificial Sequence: Synthetic oligonucleotide
  Target: ATXN2; (-) strand; PAM type: NRG; PAM sequence: GGG
gactgggcagccgggcagag

SEQ ID NO: 23240 - DNA, 20 bp, Artificial Sequence
  Description of Artificial Sequence: Synthetic oligonucleotide
  Target: ATXN2; (-) strand; PAM type: NRG; PAM sequence: GGG
agactgggcagccgggcaga

SEQ ID NO: 23241 - DNA, 20 bp, Artificial Sequence
  Description of Artificial Sequence: Synthetic oligonucleotide
  Target: ATXN2; (-) strand; PAM type: NRG; PAM sequence: AGG
cagactgggcagccgggcag

SEQ ID NO: 23242 - DNA, 20 bp, Artificial Sequence
  Description of Artificial Sequence: Synthetic oligonucleotide
  Target: ATXN2; (-) strand; PAM type: NRG; PAM sequence: GAG
ccagactgggcagccgggca

SEQ ID NO: 23243 - DNA, 20 bp, Artificial Sequence
  Description of Artificial Sequence: Synthetic oligonucleotide
  Target: ATXN2; (-) strand; PAM type: NRG; PAM sequence: CAG
tcccagactgggcagccggg

SEQ ID NO: 23244 - DNA, 20 bp, Artificial Sequence
  Description of Artificial Sequence: Synthetic oligonucleotide
  Target: ATXN2; (-) strand; PAM type: NRG; PAM sequence: GGG
acttcccagactgggcagcc

SEQ ID NO: 23245 - DNA, 20 bp, Artificial Sequence
  Description of Artificial Sequence: Synthetic oligonucleotide
  Target: ATXN2; (-) strand; PAM type: NRG; PAM sequence: CGG
cacttcccagactgggcagc

SEQ ID NO: 23246 - DNA, 20 bp, Artificial Sequence
  Description of Artificial Sequence: Synthetic oligonucleotide
  Target: ATXN2; (-) strand; PAM type: NRG; PAM sequence: CAG
tcctcacttcccagactggg

SEQ ID NO: 23247 - DNA, 20 bp, Artificial Sequence
  Description of Artificial Sequence: Synthetic oligonucleotide
  Target: ATXN2; (-) strand; PAM type: NRG; PAM sequence: GGG
tgctcctcacttcccagact

SEQ ID NO: 23248 - DNA, 20 bp, Artificial Sequence
  Description of Artificial Sequence: Synthetic oligonucleotide
  Target: ATXN2; (-) strand; PAM type: NRG; PAM sequence: TGG
gtgctcctcacttcccagac

SEQ ID NO: 23249 - DNA, 20 bp, Artificial Sequence
  Description of Artificial Sequence: Synthetic oligonucleotide
  Target: ATXN2; (-) strand; PAM type: NRG; PAM sequence: CAG
aagaggtgctcctcacttcc

SEQ ID NO: 23250 - DNA, 20 bp, Artificial Sequence
  Description of Artificial Sequence: Synthetic oligonucleotide
  Target: ATXN2; (-) strand; PAM type: NRG; PAM sequence: AGG
acgggatggcggccgggaag

SEQ ID NO: 23251 - DNA, 20 bp, Artificial Sequence
  Description of Artificial Sequence: Synthetic oligonucleotide
  Target: ATXN2; (-) strand; PAM type: NRG; PAM sequence: GAG
gacgggatggcggccgggaa

SEQ ID NO: 23252 - DNA, 20 bp, Artificial Sequence
  Description of Artificial Sequence: Synthetic oligonucleotide
  Target: ATXN2; (-) strand; PAM type: NRG; PAM sequence: AAG
tagacgggatggcggccggg

SEQ ID NO: 23253 - DNA, 20 bp, Artificial Sequence
  Description of Artificial Sequence: Synthetic oligonucleotide
  Target: ATXN2; (-) strand; PAM type: NRG; PAM sequence: GGG
tcctagacgggatggcggcc

SEQ ID NO: 23254 - DNA, 20 bp, Artificial Sequence
  Description of Artificial Sequence: Synthetic oligonucleotide
  Target: ATXN2; (-) strand; PAM type: NRG; PAM sequence: CGG
ttcctagacgggatggcggc

SEQ ID NO: 23255 - DNA, 20 bp, Artificial Sequence
  Description of Artificial Sequence: Synthetic oligonucleotide
  Target: ATXN2; (-) strand; PAM type: NRG; PAM sequence: CGG
tcacttcctagacgggatgg

SEQ ID NO: 23256 - DNA, 20 bp, Artificial Sequence
  Description of Artificial Sequence: Synthetic oligonucleotide
  Target: ATXN2; (-) strand; PAM type: NRG; PAM sequence: TGG
tcctcacttcctagacggga

SEQ ID NO: 23257 - DNA, 20 bp, Artificial Sequence
  Description of Artificial Sequence: Synthetic oligonucleotide
  Target: ATXN2; (-) strand; PAM type: NRG; PAM sequence: GGG
acgctcctcacttcctagac

SEQ ID NO: 23258 - DNA, 20 bp, Artificial Sequence
  Description of Artificial Sequence: Synthetic oligonucleotide
  Target: ATXN2; (-) strand; PAM type: NRG; PAM sequence: CGG
gacgctcctcacttcctaga

SEQ ID NO: 23259 - DNA, 20 bp, Artificial Sequence
  Description of Artificial Sequence: Synthetic oligonucleotide
  Target: ATXN2; (-) strand; PAM type: NRG; PAM sequence: TAG
cagagacgctcctcacttcc

SEQ ID NO: 23260 - DNA, 20 bp, Artificial Sequence
  Description of Artificial Sequence: Synthetic oligonucleotide
  Target: ATXN2; (-) strand; PAM type: NRG; PAM sequence: GAG
agacgacgggtggccgggca

SEQ ID NO: 23261 - DNA, 20 bp, Artificial Sequence
  Description of Artificial Sequence: Synthetic oligonucleotide
  Target: ATXN2; (-) strand; PAM type: NRG; PAM sequence: CAG
tcagacgacgggtggccggg

SEQ ID NO: 23262 - DNA, 20 bp, Artificial Sequence
  Description of Artificial Sequence: Synthetic oligonucleotide
  Target: ATXN2; (-) strand; PAM type: NRG; PAM sequence: GGG
atctcagacgacgggtggcc

SEQ ID NO: 23263 - DNA, 20 bp, Artificial Sequence
  Description of Artificial Sequence: Synthetic oligonucleotide
  Target: ATXN2; (-) strand; PAM type: NRG; PAM sequence: CGG
catctcagacgacgggtggc

SEQ ID NO: 23264 - DNA, 20 bp, Artificial Sequence
  Description of Artificial Sequence: Synthetic oligonucleotide
  Target: ATXN2; (-) strand; PAM type: NRG; PAM sequence: TGG
cccacatctcagacgacggg

SEQ ID NO: 23265 - DNA, 20 bp, Artificial Sequence
  Description of Artificial Sequence: Synthetic oligonucleotide
  Target: ATXN2; (-) strand; PAM type: NRG; PAM sequence: GGG
ctccccacatctcagacgac

SEQ ID NO: 23266 - DNA, 20 bp, Artificial Sequence
  Description of Artificial Sequence: Synthetic oligonucleotide
  Target: ATXN2; (-) strand; PAM type: NRG; PAM sequence: CGG
gctccccacatctcagacga

SEQ ID NO: 23267 - DNA, 20 bp, Artificial Sequence
  Description of Artificial Sequence: Synthetic oligonucleotide
  Target: ATXN2; (-) strand; PAM type: NRG; PAM sequence: CAG
cagaggcgctccccacatct

SEQ ID NO: 23268 - DNA, 20 bp, Artificial Sequence
  Description of Artificial Sequence: Synthetic oligonucleotide
  Target: ATXN2; (-) strand; PAM type: NRG; PAM sequence: AGG
cagacggggcagcggggcag

SEQ ID NO: 23269 - DNA, 20 bp, Artificial Sequence
  Description of Artificial Sequence: Synthetic oligonucleotide
  Target: ATXN2; (-) strand; PAM type: NRG; PAM sequence: GAG
ccagacggggcagcggggca

SEQ ID NO: 23270 - DNA, 20 bp, Artificial Sequence
  Description of Artificial Sequence: Synthetic oligonucleotide
  Target: ATXN2; (-) strand; PAM type: NRG; PAM sequence: CAG
tcccagacggggcagcgggg

SEQ ID NO: 23271 - DNA, 20 bp, Artificial Sequence
  Description of Artificial Sequence: Synthetic oligonucleotide
  Target: ATXN2; (-) strand; PAM type: NRG; PAM sequence: GGG
acatcccagacggggcagcg

SEQ ID NO: 23272 - DNA, 20 bp, Artificial Sequence
  Description of Artificial Sequence: Synthetic oligonucleotide
  Target: ATXN2; (-) strand; PAM type: NRG; PAM sequence: GGG
cacatcccagacggggcagc

SEQ ID NO: 23273 - DNA, 20 bp, Artificial Sequence
  Description of Artificial Sequence: Synthetic oligonucleotide
  Target: ATXN2; (-) strand; PAM type: NRG; PAM sequence: CGG
tcacatcccagacggggcag

SEQ ID NO: 23274 - DNA, 20 bp, Artificial Sequence
  Description of Artificial Sequence: Synthetic oligonucleotide
  Target: ATXN2; (-) strand; PAM type: NRG; PAM sequence: CAG
tcctcacatcccagacgggg

SEQ ID NO: 23275 - DNA, 20 bp, Artificial Sequence
  Description of Artificial Sequence: Synthetic oligonucleotide
  Target: ATXN2; (-) strand; PAM type: NRG; PAM sequence: GGG
cgctcctcacatcccagacg

SEQ ID NO: 23276 - DNA, 20 bp, Artificial Sequence
  Description of Artificial Sequence: Synthetic oligonucleotide
  Target: ATXN2; (-) strand; PAM type: NRG; PAM sequence: GGG
gcgctcctcacatcccagac

SEQ ID NO: 23277 - DNA, 20 bp, Artificial Sequence
  Description of Artificial Sequence: Synthetic oligonucleotide
  Target: ATXN2; (-) strand; PAM type: NRG; PAM sequence: CGG
ggcgctcctcacatcccaga

SEQ ID NO: 23278 - DNA, 20 bp, Artificial Sequence
  Description of Artificial Sequence: Synthetic oligonucleotide
  Target: ATXN2; (-) strand; PAM type: NRG; PAM sequence: CAG
cagaggcgctcctcacatcc

SEQ ID NO: 23279 - DNA, 20 bp, Artificial Sequence
  Description of Artificial Sequence: Synthetic oligonucleotide
  Target: ATXN2; (-) strand; PAM type: NRG; PAM sequence: AGG
acggggtcgcggccgggcag

SEQ ID NO: 23280 - DNA, 20 bp, Artificial Sequence
  Description of Artificial Sequence: Synthetic oligonucleotide
  Target: ATXN2; (-) strand; PAM type: NRG; PAM sequence: GAG
gacggggtcgcggccgggca

SEQ ID NO: 23281 - DNA, 20 bp, Artificial Sequence
  Description of Artificial Sequence: Synthetic oligonucleotide
  Target: ATXN2; (-) strand; PAM type: NRG; PAM sequence: CAG
cagacggggtcgcggccggg

SEQ ID NO: 23282 - DNA, 20 bp, Artificial Sequence
  Description of Artificial Sequence: Synthetic oligonucleotide
  Target: ATXN2; (-) strand; PAM type: NRG; PAM sequence: GGG
tcccagacggggtcgcggcc

SEQ ID NO: 23283 - DNA, 20 bp, Artificial Sequence
  Description of Artificial Sequence: Synthetic oligonucleotide
  Target: ATXN2; (-) strand; PAM type: NRG; PAM sequence: CGG
ctcccagacggggtcgcggc

SEQ ID NO: 23284 - DNA, 20 bp, Artificial Sequence
  Description of Artificial Sequence: Synthetic oligonucleotide
  Target: ATXN2; (-) strand; PAM type: NRG; PAM sequence: CGG
tcacctcccagacggggtcg

SEQ ID NO: 23285 - DNA, 20 bp, Artificial Sequence
  Description of Artificial Sequence: Synthetic oligonucleotide
  Target: ATXN2; (-) strand; PAM type: NRG; PAM sequence: GGG
cgctcctcacctcccagacg

SEQ ID NO: 23286 - DNA, 20 bp, Artificial Sequence
  Description of Artificial Sequence: Synthetic oligonucleotide
  Target: ATXN2; (-) strand; PAM type: NRG; PAM sequence: GGG
acgctcctcacctcccagac

SEQ ID NO: 23287 - DNA, 20 bp, Artificial Sequence
  Description of Artificial Sequence: Synthetic oligonucleotide
  Target: ATXN2; (-) strand; PAM type: NRG; PAM sequence: CGG
gacgctcctcacctcccaga

SEQ ID NO: 23288 - DNA, 20 bp, Artificial Sequence
  Description of Artificial Sequence: Synthetic oligonucleotide
  Target: ATXN2; (-) strand; PAM type: NRG; PAM sequence: CAG
cagagacgctcctcacctcc

SEQ ID NO: 23289 - DNA, 20 bp, Artificial Sequence
  Description of Artificial Sequence: Synthetic oligonucleotide
  Target: ATXN2; (-) strand; PAM type: NRG; PAM sequence: GAG
tcagacggggcggccaggca

SEQ ID NO: 23290 - DNA, 20 bp, Artificial Sequence
  Description of Artificial Sequence: Synthetic oligonucleotide
  Target: ATXN2; (-) strand; PAM type: NRG; PAM sequence: CAG
tctcagacggggcggccagg

SEQ ID NO: 23291 - DNA, 20 bp, Artificial Sequence
  Description of Artificial Sequence: Synthetic oligonucleotide
  Target: ATXN2; (-) strand; PAM type: NRG; PAM sequence: AGG
acttctcagacggggcggcc

SEQ ID NO: 23292 - DNA, 20 bp, Artificial Sequence
  Description of Artificial Sequence: Synthetic oligonucleotide
  Target: ATXN2; (-) strand; PAM type: NRG; PAM sequence: CAG
cacttctcagacggggcggc

SEQ ID NO: 23293 - DNA, 20 bp, Artificial Sequence
  Description of Artificial Sequence: Synthetic oligonucleotide
  Target: ATXN2; (-) strand; PAM type: NRG; PAM sequence: CGG
tcctcacttctcagacgggg

SEQ ID NO: 23294 - DNA, 20 bp, Artificial Sequence
  Description of Artificial Sequence: Synthetic oligonucleotide
  Target: ATXN2; (-) strand; PAM type: NRG; PAM sequence: GGG
ggctcctcacttctcagacg

SEQ ID NO: 23295 - DNA, 20 bp, Artificial Sequence
  Description of Artificial Sequence: Synthetic oligonucleotide
  Target: ATXN2; (-) strand; PAM type: NRG; PAM sequence: GGG
gggctcctcacttctcagac

SEQ ID NO: 23296 - DNA, 20 bp, Artificial Sequence
  Description of Artificial Sequence: Synthetic oligonucleotide
  Target: ATXN2; (-) strand; PAM type: NRG; PAM sequence: CGG
ggggctcctcacttctcaga

SEQ ID NO: 23297 - DNA, 20 bp, Artificial Sequence
  Description of Artificial Sequence: Synthetic oligonucleotide
  Target: ATXN2; (-) strand; PAM type: NRG; PAM sequence: CAG
cagaggggctcctcacttct

SEQ ID NO: 23298 - DNA, 20 bp, Artificial Sequence
  Description of Artificial Sequence: Synthetic oligonucleotide
  Target: ATXN2; (-) strand; PAM type: NRG; PAM sequence: GGG
ggggcggctgccgggcagag

SEQ ID NO: 23299 - DNA, 20 bp, Artificial Sequence
  Description of Artificial Sequence: Synthetic oligonucleotide
  Target: ATXN2; (-) strand; PAM type: NRG; PAM sequence: GGG
cggggcggctgccgggcaga

SEQ ID NO: 23300 - DNA, 20 bp, Artificial Sequence
  Description of Artificial Sequence: Synthetic oligonucleotide
  Target: ATXN2; (-) strand; PAM type: NRG; PAM sequence: AGG
acggggcggctgccgggcag

SEQ ID NO: 23301 - DNA, 20 bp, Artificial Sequence
  Description of Artificial Sequence: Synthetic oligonucleotide
  Target: ATXN2; (-) strand; PAM type: NRG; PAM sequence: GAG
gacggggcggctgccgggca

SEQ ID NO: 23302 - DNA, 20 bp, Artificial Sequence
  Description of Artificial Sequence: Synthetic oligonucleotide
  Target: ATXN2; (-) strand; PAM type: NRG; PAM sequence: CAG
cagacggggcggctgccggg

SEQ ID NO: 23303 - DNA, 20 bp, Artificial Sequence
  Description of Artificial Sequence: Synthetic oligonucleotide
  Target: ATXN2; (-) strand; PAM type: NRG; PAM sequence: GGG
tctcagacggggcggctgcc

SEQ ID NO: 23304 - DNA, 20 bp, Artificial Sequence
  Description of Artificial Sequence: Synthetic oligonucleotide
  Target: ATXN2; (-) strand; PAM type: NRG; PAM sequence: CGG
ttctcagacggggcggctgc

SEQ ID NO: 23305 - DNA, 20 bp, Artificial Sequence
  Description of Artificial Sequence: Synthetic oligonucleotide
  Target: ATXN2; (-) strand; PAM type: NRG; PAM sequence: CGG
ttctcacttctcagacgggg

SEQ ID NO: 23306 - DNA, 20 bp, Artificial Sequence
  Description of Artificial Sequence: Synthetic oligonucleotide
  Target: ATXN2; (-) strand; PAM type: NRG; PAM sequence: GGG
ggcttctcacttctcagacg

SEQ ID NO: 23307 - DNA, 20 bp, Artificial Sequence
  Description of Artificial Sequence: Synthetic oligonucleotide
  Target: ATXN2; (-) strand; PAM type: NRG; PAM sequence: GGG
gggcttctcacttctcagac

SEQ ID NO: 23308 - DNA, 20 bp, Artificial Sequence
  Description of Artificial Sequence: Synthetic oligonucleotide
  Target: ATXN2; (-) strand; PAM type: NRG; PAM sequence: CGG
ggggcttctcacttctcaga

SEQ ID NO: 23309 - DNA, 20 bp, Artificial Sequence
  Description of Artificial Sequence: Synthetic oligonucleotide
  Target: ATXN2; (-) strand; PAM type: NRG; PAM sequence: CAG
cggaggggcttctcacttct

SEQ ID NO: 23310 - DNA, 20 bp, Artificial Sequence
  Description of Artificial Sequence: Synthetic oligonucleotide
  Target: ATXN2; (-) strand; PAM type: NRG; PAM sequence: GGG
ggggtggctgccaggcggag

SEQ ID NO: 23311 - DNA, 20 bp, Artificial Sequence
  Description of Artificial Sequence: Synthetic oligonucleotide
  Target: ATXN2; (-) strand; PAM type: NRG; PAM sequence: GGG
cggggtggctgccaggcgga

SEQ ID NO: 23312 - DNA, 20 bp, Artificial Sequence
  Description of Artificial Sequence: Synthetic oligonucleotide
  Target: ATXN2; (-) strand; PAM type: NRG; PAM sequence: AGG
acggggtggctgccaggcgg

SEQ ID NO: 23313 - DNA, 20 bp, Artificial Sequence
  Description of Artificial Sequence: Synthetic oligonucleotide
  Target: ATXN2; (-) strand; PAM type: NRG; PAM sequence: GAG
gacggggtggctgccaggcg

SEQ ID NO: 23314 - DNA, 20 bp, Artificial Sequence
  Description of Artificial Sequence: Synthetic oligonucleotide
  Target: ATXN2; (-) strand; PAM type: NRG; PAM sequence: CGG
cagacggggtggctgccagg

SEQ ID NO: 23315 - DNA, 20 bp, Artificial Sequence
  Description of Artificial Sequence: Synthetic oligonucleotide
  Target: ATXN2; (-) strand; PAM type: NRG; PAM sequence: AGG
tcccagacggggtggctgcc

SEQ ID NO: 23316 - DNA, 20 bp, Artificial Sequence
  Description of Artificial Sequence: Synthetic oligonucleotide
  Target: ATXN2; (-) strand; PAM type: NRG; PAM sequence: CAG
ttcccagacggggtggctgc

SEQ ID NO: 23317 - DNA, 20 bp, Artificial Sequence
  Description of Artificial Sequence: Synthetic oligonucleotide
  Target: ATXN2; (-) strand; PAM type: NRG; PAM sequence: TGG
tcctcacttcccagacgggg

SEQ ID NO: 23318 - DNA, 20 bp, Artificial Sequence
  Description of Artificial Sequence: Synthetic oligonucleotide
  Target: ATXN2; (-) strand; PAM type: NRG; PAM sequence: GGG
tgctcctcacttcccagacg

SEQ ID NO: 23319 - DNA, 20 bp, Artificial Sequence
  Description of Artificial Sequence: Synthetic oligonucleotide
  Target: ATXN2; (-) strand; PAM type: NRG; PAM sequence: GGG
atgctcctcacttcccagac

SEQ ID NO: 23320 - DNA, 20 bp, Artificial Sequence
  Description of Artificial Sequence: Synthetic oligonucleotide
  Target: ATXN2; (-) strand; PAM type: NRG; PAM sequence: CGG
gatgctcctcacttcccaga

SEQ ID NO: 23321 - DNA, 20 bp, Artificial Sequence
  Description of Artificial Sequence: Synthetic oligonucleotide
  Target: ATXN2; (-) strand; PAM type: NRG; PAM sequence: CAG
tggagatgctcctcacttcc

SEQ ID NO: 23322 - DNA, 20 bp, Artificial Sequence
  Description of Artificial Sequence: Synthetic oligonucleotide
  Target: ATXN2; (-) strand; PAM type: NRG; PAM sequence: GAG
gacgggttggctgccgggtg

SEQ ID NO: 23323 - DNA, 20 bp, Artificial Sequence
  Description of Artificial Sequence: Synthetic oligonucleotide
  Target: ATXN2; (-) strand; PAM type: NRG; PAM sequence: TGG
cggacgggttggctgccggg

SEQ ID NO: 23324 - DNA, 20 bp, Artificial Sequence
  Description of Artificial Sequence: Synthetic oligonucleotide
  Target: ATXN2; (-) strand; PAM type: NRG; PAM sequence: GGG
tcccggacgggttggctgcc

SEQ ID NO: 23325 - DNA, 20 bp, Artificial Sequence
  Description of Artificial Sequence: Synthetic oligonucleotide
  Target: ATXN2; (-) strand; PAM type: NRG; PAM sequence: CGG
ctcccggacgggttggctgc

SEQ ID NO: 23326 - DNA, 20 bp, Artificial Sequence
  Description of Artificial Sequence: Synthetic oligonucleotide
  Target: ATXN2; (-) strand; PAM type: NRG; PAM sequence: TGG
cacctccctcccggacgggt

SEQ ID NO: 23327 - DNA, 20 bp, Artificial Sequence
  Description of Artificial Sequence: Synthetic oligonucleotide
  Target: ATXN2; (-) strand; PAM type: NRG; PAM sequence: GGG
cccccacctccctcccggac

SEQ ID NO: 23328 - DNA, 20 bp, Artificial Sequence
  Description of Artificial Sequence: Synthetic oligonucleotide
  Target: ATXN2; (-) strand; PAM type: NRG; PAM sequence: CGG
acccccacctccctcccgga

SEQ ID NO: 23329 - DNA, 20 bp, Artificial Sequence
  Description of Artificial Sequence: Synthetic oligonucleotide
  Target: ATXN2; (-) strand; PAM type: NRG; PAM sequence: CGG
gctgacccccacctccctcc

SEQ ID NO: 23330 - DNA, 20 bp, Artificial Sequence
  Description of Artificial Sequence: Synthetic oligonucleotide
  Target: ATXN2; (-) strand; PAM type: NRG; PAM sequence: GGG
tggggcggctggccgggcgg

SEQ ID NO: 23331 - DNA, 20 bp, Artificial Sequence
  Description of Artificial Sequence: Synthetic oligonucleotide
  Target: ATXN2; (-) strand; PAM type: NRG; PAM sequence: GGG
atggggcggctggccgggcg

SEQ ID NO: 23332 - DNA, 20 bp, Artificial Sequence
  Description of Artificial Sequence: Synthetic oligonucleotide
  Target: ATXN2; (-) strand; PAM type: NRG; PAM sequence: GGG
gatggggcggctggccgggc

SEQ ID NO: 23333 - DNA, 20 bp, Artificial Sequence
  Description of Artificial Sequence: Synthetic oligonucleotide
  Target: ATXN2; (-) strand; PAM type: NRG; PAM sequence: CGG
ggatggggcggctggccggg

SEQ ID NO: 23334 - DNA, 20 bp, Artificial Sequence
  Description of Artificial Sequence: Synthetic oligonucleotide
  Target: ATXN2; (-) strand; PAM type: NRG; PAM sequence: GGG
cccggatggggcggctggcc

SEQ ID NO: 23335 - DNA, 20 bp, Artificial Sequence
  Description of Artificial Sequence: Synthetic oligonucleotide
  Target: ATXN2; (-) strand; PAM type: NRG; PAM sequence: CGG
tcccggatggggcggctggc

SEQ ID NO: 23336 - DNA, 20 bp, Artificial Sequence
  Description of Artificial Sequence: Synthetic oligonucleotide
  Target: ATXN2; (-) strand; PAM type: NRG; PAM sequence: TGG
tccctcccggatggggcggc

SEQ ID NO: 23337 - DNA, 20 bp, Artificial Sequence
  Description of Artificial Sequence: Synthetic oligonucleotide
  Target: ATXN2; (-) strand; PAM type: NRG; PAM sequence: CGG
cacctccctcccggatgggg

SEQ ID NO: 23338 - DNA, 20 bp, Artificial Sequence
  Description of Artificial Sequence: Synthetic oligonucleotide
  Target: ATXN2; (-) strand; PAM type: NRG; PAM sequence: GGG
ccccacctccctcccggatg

SEQ ID NO: 23339 - DNA, 20 bp, Artificial Sequence
  Description of Artificial Sequence: Synthetic oligonucleotide
  Target: ATXN2; (-) strand; PAM type: NRG; PAM sequence: GGG
cccccacctccctcccggat

SEQ ID NO: 23340 - DNA, 20 bp, Artificial Sequence
  Description of Artificial Sequence: Synthetic oligonucleotide
  Target: ATXN2; (-) strand; PAM type: NRG; PAM sequence: TGG
ccccccacctccctcccgga

SEQ ID NO: 23341 - DNA, 20 bp, Artificial Sequence
  Description of Artificial Sequence: Synthetic oligonucleotide
  Target: ATXN2; (-) strand; PAM type: NRG; PAM sequence: CGG
ctgaccccccacctccctcc

SEQ ID NO: 23342 - DNA, 20 bp, Artificial Sequence
  Description of Artificial Sequence: Synthetic oligonucleotide
  Target: ATXN2; (-) strand; PAM type: NRG; PAM sequence: GGG
cggggcggctggctgggcgg

SEQ ID NO: 23343 - DNA, 20 bp, Artificial Sequence
  Description of Artificial Sequence: Synthetic oligonucleotide
  Target: ATXN2; (-) strand; PAM type: NRG; PAM sequence: GGG
acggggcggctggctgggcg

SEQ ID NO: 23344 - DNA, 20 bp, Artificial Sequence
  Description of Artificial Sequence: Synthetic oligonucleotide
  Target: ATXN2; (-) strand; PAM type: NRG; PAM sequence: GGG
gacggggcggctggctgggc

SEQ ID NO: 23345 - DNA, 20 bp, Artificial Sequence
  Description of Artificial Sequence: Synthetic oligonucleotide
  Target: ATXN2; (-) strand; PAM type: NRG; PAM sequence: CGG
ggacggggcggctggctggg

SEQ ID NO: 23346 - DNA, 20 bp, Artificial Sequence
  Description of Artificial Sequence: Synthetic oligonucleotide
  Target: ATXN2; (-) strand; PAM type: NRG; PAM sequence: GGG
cccggacggggcggctggct

SEQ ID NO: 23347 - DNA, 20 bp, Artificial Sequence
  Description of Artificial Sequence: Synthetic oligonucleotide
  Target: ATXN2; (-) strand; PAM type: NRG; PAM sequence: TGG
tcccggacggggcggctggc

SEQ ID NO: 23348 - DNA, 20 bp, Artificial Sequence
  Description of Artificial Sequence: Synthetic oligonucleotide
  Target: ATXN2; (-) strand; PAM type: NRG; PAM sequence: TGG
cacctcccggacggggcggc

SEQ ID NO: 23349 - DNA, 20 bp, Artificial Sequence
  Description of Artificial Sequence: Synthetic oligonucleotide
  Target: ATXN2; (-) strand; PAM type: NRG; PAM sequence: CGG
cccccacctcccggacgggg

SEQ ID NO: 23350 - DNA, 20 bp, Artificial Sequence
  Description of Artificial Sequence: Synthetic oligonucleotide
  Target: ATXN2; (-) strand; PAM type: NRG; PAM sequence: GGG
tgccccccacctcccggacg

SEQ ID NO: 23351 - DNA, 20 bp, Artificial Sequence
  Description of Artificial Sequence: Synthetic oligonucleotide
  Target: ATXN2; (-) strand; PAM type: NRG; PAM sequence: GGG
gtgccccccacctcccggac

SEQ ID NO: 23352 - DNA, 20 bp, Artificial Sequence
  Description of Artificial Sequence: Synthetic oligonucleotide
  Target: ATXN2; (-) strand; PAM type: NRG; PAM sequence: CGG
ggtgccccccacctcccgga

SEQ ID NO: 23353 - DNA, 20 bp, Artificial Sequence
  Description of Artificial Sequence: Synthetic oligonucleotide
  Target: ATXN2; (-) strand; PAM type: NRG; PAM sequence: CGG
cagaggtgccccccacctcc

SEQ ID NO: 23354 - DNA, 20 bp, Artificial Sequence
  Description of Artificial Sequence: Synthetic oligonucleotide
  Target: ATXN2; (-) strand; PAM type: NRG; PAM sequence: AGG
cagaaggggcggccgggcag

SEQ ID NO: 23355 - DNA, 20 bp, Artificial Sequence
  Description of Artificial Sequence: Synthetic oligonucleotide
  Target: ATXN2; (-) strand; PAM type: NRG; PAM sequence: GAG
ccagaaggggcggccgggca

SEQ ID NO: 23356 - DNA, 20 bp, Artificial Sequence
  Description of Artificial Sequence: Synthetic oligonucleotide
  Target: ATXN2; (-) strand; PAM type: NRG; PAM sequence: CAG
tcccagaaggggcggccggg

SEQ ID NO: 23357 - DNA, 20 bp, Artificial Sequence
  Description of Artificial Sequence: Synthetic oligonucleotide
  Target: ATXN2; (-) strand; PAM type: NRG; PAM sequence: GGG
acttcccagaaggggcggcc

SEQ ID NO: 23358 - DNA, 20 bp, Artificial Sequence
  Description of Artificial Sequence: Synthetic oligonucleotide
  Target: ATXN2; (-) strand; PAM type: NRG; PAM sequence: CGG
cacttcccagaaggggcggc

SEQ ID NO: 23359 - DNA, 20 bp, Artificial Sequence
  Description of Artificial Sequence: Synthetic oligonucleotide
  Target: ATXN2; (-) strand; PAM type: NRG; PAM sequence: CGG
tcctcacttcccagaagggg

SEQ ID NO: 23360 - DNA, 20 bp, Artificial Sequence
  Description of Artificial Sequence: Synthetic oligonucleotide
  Target: ATXN2; (-) strand; PAM type: NRG; PAM sequence: GGG
ggctcctcacttcccagaag

SEQ ID NO: 23361 - DNA, 20 bp, Artificial Sequence
  Description of Artificial Sequence: Synthetic oligonucleotide
  Target: ATXN2; (-) strand; PAM type: NRG; PAM sequence: GGG
gggctcctcacttcccagaa

SEQ ID NO: 23362 - DNA, 20 bp, Artificial Sequence
  Description of Artificial Sequence: Synthetic oligonucleotide
  Target: ATXN2; (-) strand; PAM type: NRG; PAM sequence: AGG
ggggctcctcacttcccaga

SEQ ID NO: 23363 - DNA, 20 bp, Artificial Sequence
  Description of Artificial Sequence: Synthetic oligonucleotide
  Target: ATXN2; (-) strand; PAM type: NRG; PAM sequence: AAG
aggggctcctcacttcccag

SEQ ID NO: 23364 - DNA, 20 bp, Artificial Sequence
  Description of Artificial Sequence: Synthetic oligonucleotide
  Target: ATXN2; (-) strand; PAM type: NRG; PAM sequence: CAG
cagaggggctcctcacttcc

SEQ ID NO: 23365 - DNA, 20 bp, Artificial Sequence
  Description of Artificial Sequence: Synthetic oligonucleotide
  Target: ATXN2; (-) strand; PAM type: NRG; PAM sequence: GGG
ggggtggtggccgggcagag

SEQ ID NO: 23366 - DNA, 20 bp, Artificial Sequence
  Description of Artificial Sequence: Synthetic oligonucleotide
  Target: ATXN2; (-) strand; PAM type: NRG; PAM sequence: GGG
cggggtggtggccgggcaga

SEQ ID NO: 23367 - DNA, 20 bp, Artificial Sequence
  Description of Artificial Sequence: Synthetic oligonucleotide
  Target: ATXN2; (-) strand; PAM type: NRG; PAM sequence: AGG
acggggtggtggccgggcag

SEQ ID NO: 23368 - DNA, 20 bp, Artificial Sequence
  Description of Artificial Sequence: Synthetic oligonucleotide
  Target: ATXN2; (-) strand; PAM type: NRG; PAM sequence: GAG
gacggggtggtggccgggca

SEQ ID NO: 23369 - DNA, 20 bp, Artificial Sequence
  Description of Artificial Sequence: Synthetic oligonucleotide
  Target: ATXN2; (-) strand; PAM type: NRG; PAM sequence: CAG
cagacggggtggtggccggg

SEQ ID NO: 23370 - DNA, 20 bp, Artificial Sequence
  Description of Artificial Sequence: Synthetic oligonucleotide
  Target: ATXN2; (-) strand; PAM type: NRG; PAM sequence: GGG
tcccagacggggtggtggcc

SEQ ID NO: 23371 - DNA, 20 bp, Artificial Sequence
  Description of Artificial Sequence: Synthetic oligonucleotide
  Target: ATXN2; (-) strand; PAM type: NRG; PAM sequence: CGG
ctcccagacggggtggtggc

SEQ ID NO: 23372 - DNA, 20 bp, Artificial Sequence
  Description of Artificial Sequence: Synthetic oligonucleotide
  Target: ATXN2; (-) strand; PAM type: NRG; PAM sequence: TGG
acacctcccagacggggtgg

SEQ ID NO: 23373 - DNA, 20 bp, Artificial Sequence
  Description of Artificial Sequence: Synthetic oligonucleotide
  Target: ATXN2; (-) strand; PAM type: NRG; PAM sequence: TGG
ggtacacctcccagacgggg

SEQ ID NO: 23374 - DNA, 20 bp, Artificial Sequence
  Description of Artificial Sequence: Synthetic oligonucleotide
  Target: ATXN2; (-) strand; PAM type: NRG; PAM sequence: GGG
ttgggtacacctcccagacg

SEQ ID NO: 23375 - DNA, 20 bp, Artificial Sequence
  Description of Artificial Sequence: Synthetic oligonucleotide
  Target: ATXN2; (-) strand; PAM type: NRG; PAM sequence: GGG
gttgggtacacctcccagac

SEQ ID NO: 23376 - DNA, 20 bp, Artificial Sequence
  Description of Artificial Sequence: Synthetic oligonucleotide
  Target: ATXN2; (-) strand; PAM type: NRG; PAM sequence: CGG
tgttgggtacacctcccaga

SEQ ID NO: 23377 - DNA, 20 bp, Artificial Sequence
  Description of Artificial Sequence: Synthetic oligonucleotide
  Target: ATXN2; (-) strand; PAM type: NRG; PAM sequence: CAG
aagctgttgggtacacctcc

SEQ ID NO: 23378 - DNA, 20 bp, Artificial Sequence
  Description of Artificial Sequence: Synthetic oligonucleotide
  Target: ATXN2; (-) strand; PAM type: NRG; PAM sequence: GGG
cccgttctcaataagctgtt

SEQ ID NO: 23379 - DNA, 20 bp, Artificial Sequence
  Description of Artificial Sequence: Synthetic oligonucleotide
  Target: ATXN2; (-) strand; PAM type: NRG; PAM sequence: TGG
gcccgttctcaataagctgt

SEQ ID NO: 23380 - DNA, 20 bp, Artificial Sequence
  Description of Artificial Sequence: Synthetic oligonucleotide
  Target: ATXN2; (-) strand; PAM type: NRG; PAM sequence: AAG
catcatggcccgttctcaat

SEQ ID NO: 23381 - DNA, 20 bp, Artificial Sequence
  Description of Artificial Sequence: Synthetic oligonucleotide
  Target: ATXN2; (-) strand; PAM type: NRG; PAM sequence: TGG
caaagccgccattgtcatca

SEQ ID NO: 23382 - DNA, 20 bp, Artificial Sequence
  Description of Artificial Sequence: Synthetic oligonucleotide
  Target: ATXN2; (-) strand; PAM type: NRG; PAM sequence: AAG
tcccccttttctattccaca

SEQ ID NO: 23383 - DNA, 20 bp, Artificial Sequence
  Description of Artificial Sequence: Synthetic oligonucleotide
  Target: ATXN2; (-) strand; PAM type: NRG; PAM sequence: CAG
tacttctttctccacagacg

SEQ ID NO: 23384 - DNA, 20 bp, Artificial Sequence
  Description of Artificial Sequence: Synthetic oligonucleotide
  Target: ATXN2; (-) strand; PAM type: NRG; PAM sequence: CAG
catgtctacttctttctcca

SEQ ID NO: 23385 - DNA, 20 bp, Artificial Sequence
  Description of Artificial Sequence: Synthetic oligonucleotide
  Target: ATXN2; (-) strand; PAM type: NRG; PAM sequence: AAG
ttagtacagaacaaaatgaa

SEQ ID NO: 23386 - DNA, 20 bp, Artificial Sequence
  Description of Artificial Sequence: Synthetic oligonucleotide
  Target: ATXN2; (-) strand; PAM type: NRG; PAM sequence: CAG
cagaagaatctttcttagta

SEQ ID NO: 23387 - DNA, 20 bp, Artificial Sequence
  Description of Artificial Sequence: Synthetic oligonucleotide
  Target: ATXN2; (-) strand; PAM type: NRG; PAM sequence: TAG
caaggcagaagaatctttct

SEQ ID NO: 23388 - DNA, 20 bp, Artificial Sequence
  Description of Artificial Sequence: Synthetic oligonucleotide
  Target: ATXN2; (-) strand; PAM type: NRG; PAM sequence: AAG
tcaacaggatcccaaggcag

SEQ ID NO: 23389 - DNA, 20 bp, Artificial Sequence
  Description of Artificial Sequence: Synthetic oligonucleotide
  Target: ATXN2; (-) strand; PAM type: NRG; PAM sequence: CAG
agatcaacaggatcccaagg

SEQ ID NO: 23390 - DNA, 20 bp, Artificial Sequence
  Description of Artificial Sequence: Synthetic oligonucleotide
  Target: ATXN2; (-) strand; PAM type: NRG; PAM sequence: AGG
catagatcaacaggatccca

SEQ ID NO: 23391 - DNA, 20 bp, Artificial Sequence
  Description of Artificial Sequence: Synthetic oligonucleotide
  Target: ATXN2; (-) strand; PAM type: NRG; PAM sequence: AAG
tcatagatcaacaggatccc

SEQ ID NO: 23392 - DNA, 20 bp, Artificial Sequence
  Description of Artificial Sequence: Synthetic oligonucleotide
  Target: ATXN2; (-) strand; PAM type: NRG; PAM sequence: AGG
gggtaaggtcatagatcaac

SEQ ID NO: 23393 - DNA, 20 bp, Artificial Sequence
  Description of Artificial Sequence: Synthetic oligonucleotide
  Target: ATXN2; (-) strand; PAM type: NRG; PAM sequence: CAG
ggggtaaggtcatagatcaa

SEQ ID NO: 23394 - DNA, 20 bp, Artificial Sequence
  Description of Artificial Sequence: Synthetic oligonucleotide
  Target: ATXN2; (-) strand; PAM type: NRG; PAM sequence: TAG
cagggttgggggtaaggtca

SEQ ID NO: 23395 - DNA, 20 bp, Artificial Sequence
  Description of Artificial Sequence: Synthetic oligonucleotide
  Target: ATXN2; (-) strand; PAM type: NRG; PAM sequence: AGG
agagcacagggttgggggta

SEQ ID NO: 23396 - DNA, 20 bp, Artificial Sequence
  Description of Artificial Sequence: Synthetic oligonucleotide
  Target: ATXN2; (-) strand; PAM type: NRG; PAM sequence: AAG
gagagcacagggttgggggt

SEQ ID NO: 23397 - DNA, 20 bp, Artificial Sequence
  Description of Artificial Sequence: Synthetic oligonucleotide
  Target: ATXN2; (-) strand; PAM type: NRG; PAM sequence: GGG
ttcagagagcacagggttgg

SEQ ID NO: 23398 - DNA, 20 bp, Artificial Sequence
  Description of Artificial Sequence: Synthetic oligonucleotide
  Target: ATXN2; (-) strand; PAM type: NRG; PAM sequence: GGG
tttcagagagcacagggttg

SEQ ID NO: 23399 - DNA, 20 bp, Artificial Sequence
  Description of Artificial Sequence: Synthetic oligonucleotide
  Target: ATXN2; (-) strand; PAM type: NRG; PAM sequence: GGG
gtttcagagagcacagggtt

SEQ ID NO: 23400 - DNA, 20 bp, Artificial Sequence
  Description of Artificial Sequence: Synthetic oligonucleotide
  Target: ATXN2; (-) strand; PAM type: NRG; PAM sequence: TGG
tgtttcagagagcacagggt

SEQ ID NO: 23401 - DNA, 20 bp, Artificial Sequence
  Description of Artificial Sequence: Synthetic oligonucleotide
  Target: ATXN2; (-) strand; PAM type: NRG; PAM sequence: GGG
cacatgtttcagagagcaca

SEQ ID NO: 23402 - DNA, 20 bp, Artificial Sequence
  Description of Artificial Sequence: Synthetic oligonucleotide
  Target: ATXN2; (-) strand; PAM type: NRG; PAM sequence: AGG
gcacatgtttcagagagcac

SEQ ID NO: 23403 - DNA, 20 bp, Artificial Sequence
  Description of Artificial Sequence: Synthetic oligonucleotide
  Target: ATXN2; (-) strand; PAM type: NRG; PAM sequence: CAG
agcacatgtttcagagagca

SEQ ID NO: 23404 - DNA, 20 bp, Artificial Sequence
  Description of Artificial Sequence: Synthetic oligonucleotide
  Target: ATXN2; (-) strand; PAM type: NRG; PAM sequence: GAG
gacacagcacatgtttcaga

SEQ ID NO: 23405 - DNA, 20 bp, Artificial Sequence
  Description of Artificial Sequence: Synthetic oligonucleotide
  Target: ATXN2; (-) strand; PAM type: NRG; PAM sequence: GAG
gtgacacagcacatgtttca

SEQ ID NO: 23406 - DNA, 20 bp, Artificial Sequence
  Description of Artificial Sequence: Synthetic oligonucleotide
  Target: ATXN2; (-) strand; PAM type: NRG; PAM sequence: CAG
gagtgacacagcacatgttt

SEQ ID NO: 23407 - DNA, 20 bp, Artificial Sequence
  Description of Artificial Sequence: Synthetic oligonucleotide
  Target: ATXN2; (-) strand; PAM type: NRG; PAM sequence: CAG
ccatttaaccctgagtgaca

SEQ ID NO: 23408 - DNA, 20 bp, Artificial Sequence
  Description of Artificial Sequence: Synthetic oligonucleotide
  Target: ATXN2; (-) strand; PAM type: NRG; PAM sequence: GAG
cccttaatccatttaaccct

SEQ ID NO: 23409 - DNA, 20 bp, Artificial Sequence
  Description of Artificial Sequence: Synthetic oligonucleotide
  Target: ATXN2; (-) strand; PAM type: NRG; PAM sequence: AAG
cttcaagcatctgtttaaca

SEQ ID NO: 23410 - DNA, 20 bp, Artificial Sequence
  Description of Artificial Sequence: Synthetic oligonucleotide
  Target: ATXN2; (-) strand; PAM type: NRG; PAM sequence: AAG
ttaacgagcatgctgccttc

SEQ ID NO: 23411 - DNA, 20 bp, Artificial Sequence
  Description of Artificial Sequence: Synthetic oligonucleotide
  Target: ATXN2; (-) strand; PAM type: NRG; PAM sequence: GAG
gagtggtgatgactcttaac

SEQ ID NO: 23412 - DNA, 20 bp, Artificial Sequence
  Description of Artificial Sequence: Synthetic oligonucleotide
  Target: ATXN2; (-) strand; PAM type: NRG; PAM sequence: TGG
gggtacttgagattagggag

SEQ ID NO: 23413 - DNA, 20 bp, Artificial Sequence
  Description of Artificial Sequence: Synthetic oligonucleotide
  Target: ATXN2; (-) strand; PAM type: NRG; PAM sequence: GAG
cctgggtacttgagattagg

SEQ ID NO: 23414 - DNA, 20 bp, Artificial Sequence
  Description of Artificial Sequence: Synthetic oligonucleotide
  Target: ATXN2; (-) strand; PAM type: NRG; PAM sequence: GGG
tccctgggtacttgagatta

SEQ ID NO: 23415 - DNA, 20 bp, Artificial Sequence
  Description of Artificial Sequence: Synthetic oligonucleotide
  Target: ATXN2; (-) strand; PAM type: NRG; PAM sequence: AGG
gtccctgggtacttgagatt

SEQ ID NO: 23416 - DNA, 20 bp, Artificial Sequence
  Description of Artificial Sequence: Synthetic oligonucleotide
  Target: ATXN2; (-) strand; PAM type: NRG; PAM sequence: TAG
tgtccctgggtacttgagat

SEQ ID NO: 23417 - DNA, 20 bp, Artificial Sequence
  Description of Artificial Sequence: Synthetic oligonucleotide
  Target: ATXN2; (-) strand; PAM type: NRG; PAM sequence: GAG
gtttgtgtccctgggtactt

SEQ ID NO: 23418 - DNA, 20 bp, Artificial Sequence
  Description of Artificial Sequence: Synthetic oligonucleotide
  Target: ATXN2; (-) strand; PAM type: NRG; PAM sequence: GGG
tccgcagtgtttgtgtccct

SEQ ID NO: 23419 - DNA, 20 bp, Artificial Sequence
  Description of Artificial Sequence: Synthetic oligonucleotide
  Target: ATXN2; (-) strand; PAM type: NRG; PAM sequence: TGG
ttccgcagtgtttgtgtccc

SEQ ID NO: 23420 - DNA, 20 bp, Artificial Sequence
  Description of Artificial Sequence: Synthetic oligonucleotide
  Target: ATXN2; (-) strand; PAM type: NRG; PAM sequence: CAG
gaggaccctgcggccttccg

SEQ ID NO: 23421 - DNA, 20 bp, Artificial Sequence
  Description of Artificial Sequence: Synthetic oligonucleotide
  Target: ATXN2; (-) strand; PAM type: NRG; PAM sequence: CGG
ttcctaggcagaggaccctg

SEQ ID NO: 23422 - DNA, 20 bp, Artificial Sequence
  Description of Artificial Sequence: Synthetic oligonucleotide
  Target: ATXN2; (-) strand; PAM type: NRG; PAM sequence: AGG
tctctggttttcctaggcag

SEQ ID NO: 23423 - DNA, 20 bp, Artificial Sequence
  Description of Artificial Sequence: Synthetic oligonucleotide
  Target: ATXN2; (-) strand; PAM type: NRG; PAM sequence: GAG
gtctctggttttcctaggca

SEQ ID NO: 23424 - DNA, 20 bp, Artificial Sequence
  Description of Artificial Sequence: Synthetic oligonucleotide
  Target: ATXN2; (-) strand; PAM type: NRG; PAM sequence: CAG
aggtctctggttttcctagg

SEQ ID NO: 23425 - DNA, 20 bp, Artificial Sequence
  Description of Artificial Sequence: Synthetic oligonucleotide
  Target: ATXN2; (-) strand; PAM type: NRG; PAM sequence: AGG
caaaggtctctggttttcct

SEQ ID NO: 23426 - DNA, 20 bp, Artificial Sequence
  Description of Artificial Sequence: Synthetic oligonucleotide
  Target: ATXN2; (-) strand; PAM type: NRG; PAM sequence: TAG
acaaaggtctctggttttcc

SEQ ID NO: 23427 - DNA, 20 bp, Artificial Sequence
  Description of Artificial Sequence: Synthetic oligonucleotide
  Target: ATXN2; (-) strand; PAM type: NRG; PAM sequence: TGG
aaaaagtgaacaaaggtctc

SEQ ID NO: 23428 - DNA, 20 bp, Artificial Sequence
  Description of Artificial Sequence: Synthetic oligonucleotide
  Target: ATXN2; (-) strand; PAM type: NRG; PAM sequence: AGG
agcagataaaaagtgaacaa

SEQ ID NO: 23429 - DNA, 20 bp, Artificial Sequence
  Description of Artificial Sequence: Synthetic oligonucleotide
  Target: ATXN2; (-) strand; PAM type: NRG; PAM sequence: AAG
cagcagataaaaagtgaaca

SEQ ID NO: 23430 - DNA, 20 bp, Artificial Sequence
  Description of Artificial Sequence: Synthetic oligonucleotide
  Target: ATXN2; (-) strand; PAM type: NRG; PAM sequence: AAG
agggaaggtcagcagataaa

SEQ ID NO: 23431 - DNA, 20 bp, Artificial Sequence
  Description of Artificial Sequence: Synthetic oligonucleotide
  Target: ATXN2; (-) strand; PAM type: NRG; PAM sequence: CAG
aatagtggagggaaggtcag

SEQ ID NO: 23432 - DNA, 20 bp, Artificial Sequence
  Description of Artificial Sequence: Synthetic oligonucleotide
  Target: ATXN2; (-) strand; PAM type: NRG; PAM sequence: CAG
gacaatagtggagggaaggt

SEQ ID NO: 23433 - DNA, 20 bp, Artificial Sequence
  Description of Artificial Sequence: Synthetic oligonucleotide
  Target: ATXN2; (-) strand; PAM type: NRG; PAM sequence: AGG
ataggacaatagtggaggga

SEQ ID NO: 23434 - DNA, 20 bp, Artificial Sequence
  Description of Artificial Sequence: Synthetic oligonucleotide
  Target: ATXN2; (-) strand; PAM type: NRG; PAM sequence: AAG
cataggacaatagtggaggg

SEQ ID NO: 23435 - DNA, 20 bp, Artificial Sequence
  Description of Artificial Sequence: Synthetic oligonucleotide
  Target: ATXN2; (-) strand; PAM type: NRG; PAM sequence: GGG
ggtcataggacaatagtgga

SEQ ID NO: 23436 - DNA, 20 bp, Artificial Sequence
  Description of Artificial Sequence: Synthetic oligonucleotide
  Target: ATXN2; (-) strand; PAM type: NRG; PAM sequence: AGG
gggtcataggacaatagtgg

SEQ ID NO: 23437 - DNA, 20 bp, Artificial Sequence
  Description of Artificial Sequence: Synthetic oligonucleotide
  Target: ATXN2; (-) strand; PAM type: NRG; PAM sequence: GAG
agggtcataggacaatagtg

SEQ ID NO: 23438 - DNA, 20 bp, Artificial Sequence
  Description of Artificial Sequence: Synthetic oligonucleotide
  Target: ATXN2; (-) strand; PAM type: NRG; PAM sequence: TGG
gcagggtcataggacaatag

SEQ ID NO: 23439 - DNA, 20 bp, Artificial Sequence
  Description of Artificial Sequence: Synthetic oligonucleotide
  Target: ATXN2; (-) strand; PAM type: NRG; PAM sequence: TAG
ttggcagggtcataggacaa

SEQ ID NO: 23440 - DNA, 20 bp, Artificial Sequence
  Description of Artificial Sequence: Synthetic oligonucleotide
  Target: ATXN2; (-) strand; PAM type: NRG; PAM sequence: AGG
gggggatttggcagggtcat

SEQ ID NO: 23441 - DNA, 20 bp, Artificial Sequence
  Description of Artificial Sequence: Synthetic oligonucleotide
  Target: ATXN2; (-) strand; PAM type: NRG; PAM sequence: TAG
agggggatttggcagggtca

SEQ ID NO: 23442 - DNA, 20 bp, Artificial Sequence
  Description of Artificial Sequence: Synthetic oligonucleotide
  Target: ATXN2; (-) strand; PAM type: NRG; PAM sequence: GGG
tcgcagagggggatttggca

SEQ ID NO: 23443 - DNA, 20 bp, Artificial Sequence
  Description of Artificial Sequence: Synthetic oligonucleotide
  Target: ATXN2; (-) strand; PAM type: NRG; PAM sequence: AGG
ctcgcagagggggatttggc

SEQ ID NO: 23444 - DNA, 20 bp, Artificial Sequence
  Description of Artificial Sequence: Synthetic oligonucleotide
  Target: ATXN2; (-) strand; PAM type: NRG; PAM sequence: CAG
tctcgcagagggggatttgg

SEQ ID NO: 23445 - DNA, 20 bp, Artificial Sequence
  Description of Artificial Sequence: Synthetic oligonucleotide
  Target: ATXN2; (-) strand; PAM type: NRG; PAM sequence: TGG
gtttctcgcagagggggatt

SEQ ID NO: 23446 - DNA, 20 bp, Artificial Sequence
  Description of Artificial Sequence: Synthetic oligonucleotide
  Target: ATXN2; (-) strand; PAM type: NRG; PAM sequence: GGG
ttgggtgtttctcgcagagg

SEQ ID NO: 23447 - DNA, 20 bp, Artificial Sequence
  Description of Artificial Sequence: Synthetic oligonucleotide
  Target: ATXN2; (-) strand; PAM type: NRG; PAM sequence: GGG
cttgggtgtttctcgcagag

SEQ ID NO: 23448 - DNA, 20 bp, Artificial Sequence
  Description of Artificial Sequence: Synthetic oligonucleotide
  Target: ATXN2; (-) strand; PAM type: NRG; PAM sequence: GGG
tcttgggtgtttctcgcaga

SEQ ID NO: 23449 - DNA, 20 bp, Artificial Sequence
  Description of Artificial Sequence: Synthetic oligonucleotide
  Target: ATXN2; (-) strand; PAM type: NRG; PAM sequence: AGG
ttcttgggtgtttctcgcag

SEQ ID NO: 23450 - DNA, 20 bp, Artificial Sequence
  Description of Artificial Sequence: Synthetic oligonucleotide
  Target: ATXN2; (-) strand; PAM type: NRG; PAM sequence: GAG
attcttgggtgtttctcgca

SEQ ID NO: 23451 - DNA, 20 bp, Artificial Sequence
  Description of Artificial Sequence: Synthetic oligonucleotide
  Target: ATXN2; (-) strand; PAM type: NRG; PAM sequence: CAG
tcattcttgggtgtttctcg

SEQ ID NO: 23452 - DNA, 20 bp, Artificial Sequence
  Description of Artificial Sequence: Synthetic oligonucleotide
  Target: ATXN2; (-) strand; PAM type: NRG; PAM sequence: GGG
ttttttaattgatcattctt

SEQ ID NO: 23453 - DNA, 20 bp, Artificial Sequence
  Description of Artificial Sequence: Synthetic oligonucleotide
  Target: ATXN2; (-) strand; PAM type: NRG; PAM sequence: TGG
tttttttaattgatcattct

SEQ ID NO: 23454 - DNA, 20 bp, Artificial Sequence
  Description of Artificial Sequence: Synthetic oligonucleotide
  Target: ATXN2; (-) strand; PAM type: NRG; PAM sequence: AAG
ataatcttaaatttgctata

SEQ ID NO: 23455 - DNA, 20 bp, Artificial Sequence
  Description of Artificial Sequence: Synthetic oligonucleotide
  Target: ATXN2; (-) strand; PAM type: NRG; PAM sequence: TAG
atgaatatatctgtgagcaa

SEQ ID NO: 23456 - DNA, 20 bp, Artificial Sequence
  Description of Artificial Sequence: Synthetic oligonucleotide
  Target: ATXN2; (-) strand; PAM type: NRG; PAM sequence: GAG
ctgcatatgaatatatctgt

SEQ ID NO: 23457 - DNA, 20 bp, Artificial Sequence
  Description of Artificial Sequence: Synthetic oligonucleotide
  Target: ATXN2; (-) strand; PAM type: NRG; PAM sequence: CAG
ggaagggtttcttttctgtg

SEQ ID NO: 23458 - DNA, 20 bp, Artificial Sequence
  Description of Artificial Sequence: Synthetic oligonucleotide
  Target: ATXN2; (-) strand; PAM type: NRG; PAM sequence: GGG
ctgtttccttccaaaaggaa

SEQ ID NO: 23459 - DNA, 20 bp, Artificial Sequence
  Description of Artificial Sequence: Synthetic oligonucleotide
  Target: ATXN2; (-) strand; PAM type: NRG; PAM sequence: AGG
cctgtttccttccaaaagga

SEQ ID NO: 23460 - DNA, 20 bp, Artificial Sequence
  Description of Artificial Sequence: Synthetic oligonucleotide
  Target: ATXN2; (-) strand; PAM type: NRG; PAM sequence: AAG
ccctgtttccttccaaaagg

SEQ ID NO: 23461 - DNA, 20 bp, Artificial Sequence
  Description of Artificial Sequence: Synthetic oligonucleotide
  Target: ATXN2; (-) strand; PAM type: NRG; PAM sequence: AGG
tccccctgtttccttccaaa

SEQ ID NO: 23462 - DNA, 20 bp, Artificial Sequence
  Description of Artificial Sequence: Synthetic oligonucleotide
  Target: ATXN2; (-) strand; PAM type: NRG; PAM sequence: AAG
ttccccctgtttccttccaa

SEQ ID NO: 23463 - DNA, 20 bp, Artificial Sequence
  Description of Artificial Sequence: Synthetic oligonucleotide
  Target: ATXN2; (-) strand; PAM type: NRG; PAM sequence: CAG
cttatgtatctgcccctcct

SEQ ID NO: 23464 - DNA, 20 bp, Artificial Sequence
  Description of Artificial Sequence: Synthetic oligonucleotide
  Target: ATXN2; (-) strand; PAM type: NRG; PAM sequence: CAG
gtaaataaagcattctaaca

SEQ ID NO: 23465 - DNA, 20 bp, Artificial Sequence
  Description of Artificial Sequence: Synthetic oligonucleotide
  Target: ATXN2; (-) strand; PAM type: NRG; PAM sequence: AAG
actacccagcttagtaaata

SEQ ID NO: 23466 - DNA, 20 bp, Artificial Sequence
  Description of Artificial Sequence: Synthetic oligonucleotide
  Target: ATXN2; (-) strand; PAM type: NRG; PAM sequence: TAG
catgtgcccactacccagct

SEQ ID NO: 23467 - DNA, 20 bp, Artificial Sequence
  Description of Artificial Sequence: Synthetic oligonucleotide
  Target: ATXN2; (-) strand; PAM type: NRG; PAM sequence: CAG
atgatcatgtgcccactacc

SEQ ID NO: 23468 - DNA, 20 bp, Artificial Sequence
  Description of Artificial Sequence: Synthetic oligonucleotide
  Target: ATXN2; (-) strand; PAM type: NRG; PAM sequence: AAG
taacacatacaaatgataca

SEQ ID NO: 23469 - DNA, 20 bp, Artificial Sequence
  Description of Artificial Sequence: Synthetic oligonucleotide
  Target: ATXN2; (-) strand; PAM type: NRG; PAM sequence: TAG
tttttcaatttgttaaacaa

SEQ ID NO: 23470 - DNA, 20 bp, Artificial Sequence
  Description of Artificial Sequence: Synthetic oligonucleotide
  Target: ATXN2; (-) strand; PAM type: NRG; PAM sequence: AAG
aaaaaaaaaaaaaaaaaaaa

SEQ ID NO: 23471 - DNA, 20 bp, Artificial Sequence
  Description of Artificial Sequence: Synthetic oligonucleotide
  Target: ATXN2; (-) strand; PAM type: NRG; PAM sequence: AAG
tccatcctgggcgacagagc

SEQ ID NO: 23472 - DNA, 20 bp, Artificial Sequence
  Description of Artificial Sequence: Synthetic oligonucleotide
  Target: ATXN2; (-) strand; PAM type: NRG; PAM sequence: GAG
ccactccatcctgggcgaca

SEQ ID NO: 23473 - DNA, 20 bp, Artificial Sequence
  Description of Artificial Sequence: Synthetic oligonucleotide
  Target: ATXN2; (-) strand; PAM type: NRG; PAM sequence: CAG
ctccactccatcctgggcga

SEQ ID NO: 23474 - DNA, 20 bp, Artificial Sequence
  Description of Artificial Sequence: Synthetic oligonucleotide
  Target: ATXN2; (-) strand; PAM type: NRG; PAM sequence: GGG
acaccactccactccatcct

SEQ ID NO: 23475 - DNA, 20 bp, Artificial Sequence
  Description of Artificial Sequence: Synthetic oligonucleotide
  Target: ATXN2; (-) strand; PAM type: NRG; PAM sequence: TGG
cacaccactccactccatcc

SEQ ID NO: 23476 - DNA, 20 bp, Artificial Sequence
  Description of Artificial Sequence: Synthetic oligonucleotide
  Target: ATXN2; (-) strand; PAM type: NRG; PAM sequence: GAG
gacagaggttgcagtgagcc

SEQ ID NO: 23477 - DNA, 20 bp, Artificial Sequence
  Description of Artificial Sequence: Synthetic oligonucleotide
  Target: ATXN2; (-) strand; PAM type: NRG; PAM sequence: GAG
caggagacagaggttgcagt

SEQ ID NO: 23478 - DNA, 20 bp, Artificial Sequence
  Description of Artificial Sequence: Synthetic oligonucleotide
  Target: ATXN2; (-) strand; PAM type: NRG; PAM sequence: CAG
aacccaggagacagaggttg

SEQ ID NO: 23479 - DNA, 20 bp, Artificial Sequence
  Description of Artificial Sequence: Synthetic oligonucleotide
  Target: ATXN2; (-) strand; PAM type: NRG; PAM sequence: AGG
cgcttgaacccaggagacag

SEQ ID NO: 23480 - DNA, 20 bp, Artificial Sequence
  Description of Artificial Sequence: Synthetic oligonucleotide
  Target: ATXN2; (-) strand; PAM type: NRG; PAM sequence: GAG
tcgcttgaacccaggagaca

SEQ ID NO: 23481 - DNA, 20 bp, Artificial Sequence
  Description of Artificial Sequence: Synthetic oligonucleotide
  Target: ATXN2; (-) strand; PAM type: NRG; PAM sequence: CAG
aatcgcttgaacccaggaga

SEQ ID NO: 23482 - DNA, 20 bp, Artificial Sequence
  Description of Artificial Sequence: Synthetic oligonucleotide
  Target: ATXN2; (-) strand; PAM type: NRG; PAM sequence: GAG
ggataatcgcttgaacccag

SEQ ID NO: 23483 - DNA, 20 bp, Artificial Sequence
  Description of Artificial Sequence: Synthetic oligonucleotide
  Target: ATXN2; (-) strand; PAM type: NRG; PAM sequence: AGG
caggataatcgcttgaaccc

SEQ ID NO: 23484 - DNA, 20 bp, Artificial Sequence
  Description of Artificial Sequence: Synthetic oligonucleotide
  Target: ATXN2; (-) strand; PAM type: NRG; PAM sequence: CAG
gcaggataatcgcttgaacc

SEQ ID NO: 23485 - DNA, 20 bp, Artificial Sequence
  Description of Artificial Sequence: Synthetic oligonucleotide
  Target: ATXN2; (-) strand; PAM type: NRG; PAM sequence: AGG
gctacttggcaggctgaggc

SEQ ID NO: 23486 - DNA, 20 bp, Artificial Sequence
  Description of Artificial Sequence: Synthetic oligonucleotide
  Target: ATXN2; (-) strand; PAM type: NRG; PAM sequence: CAG
agctacttggcaggctgagg

SEQ ID NO: 23487 - DNA, 20 bp, Artificial Sequence
  Description of Artificial Sequence: Synthetic oligonucleotide
  Target: ATXN2; (-) strand; PAM type: NRG; PAM sequence: AGG
cccagctacttggcaggctg

SEQ ID NO: 23488 - DNA, 20 bp, Artificial Sequence
  Description of Artificial Sequence: Synthetic oligonucleotide
  Target: ATXN2; (-) strand; PAM type: NRG; PAM sequence: GAG
tcccagctacttggcaggct

SEQ ID NO: 23489 - DNA, 20 bp, Artificial Sequence
  Description of Artificial Sequence: Synthetic oligonucleotide
  Target: ATXN2; (-) strand; PAM type: NRG; PAM sequence: AGG
tgtaatcccagctacttggc

SEQ ID NO: 23490 - DNA, 20 bp, Artificial Sequence
  Description of Artificial Sequence: Synthetic oligonucleotide
  Target: ATXN2; (-) strand; PAM type: NRG; PAM sequence: CAG
ttgtaatcccagctacttgg

SEQ ID NO: 23491 - DNA, 20 bp, Artificial Sequence
  Description of Artificial Sequence: Synthetic oligonucleotide
  Target: ATXN2; (-) strand; PAM type: NRG; PAM sequence: TGG
cacttgtaatcccagctact

SEQ ID NO: 23492 - DNA, 20 bp, Artificial Sequence
  Description of Artificial Sequence: Synthetic oligonucleotide
  Target: ATXN2; (-) strand; PAM type: NRG; PAM sequence: CAG
gtggcgcacacttgtaatcc

SEQ ID NO: 23493 - DNA, 20 bp, Artificial Sequence
  Description of Artificial Sequence: Synthetic oligonucleotide
  Target: ATXN2; (-) strand; PAM type: NRG; PAM sequence: TGG
gaaaaattagctaggcatgg

SEQ ID NO: 23494 - DNA, 20 bp, Artificial Sequence
  Description of Artificial Sequence: Synthetic oligonucleotide
  Target: ATXN2; (-) strand; PAM type: NRG; PAM sequence: TGG
atagaaaaattagctaggca

SEQ ID NO: 23495 - DNA, 20 bp, Artificial Sequence
  Description of Artificial Sequence: Synthetic oligonucleotide
  Target: ATXN2; (-) strand; PAM type: NRG; PAM sequence: AGG
caaaaatagaaaaattagct

SEQ ID NO: 23496 - DNA, 20 bp, Artificial Sequence
  Description of Artificial Sequence: Synthetic oligonucleotide
  Target: ATXN2; (-) strand; PAM type: NRG; PAM sequence: TAG
ccaaaaatagaaaaattagc

SEQ ID NO: 23497 - DNA, 20 bp, Artificial Sequence
  Description of Artificial Sequence: Synthetic oligonucleotide
  Target: ATXN2; (-) strand; PAM type: NRG; PAM sequence: TAG
ttgaccaaaaatagaaaaat

SEQ ID NO: 23498 - DNA, 20 bp, Artificial Sequence
  Description of Artificial Sequence: Synthetic oligonucleotide
  Target: ATXN2; (-) strand; PAM type: NRG; PAM sequence: TAG
aaccctgtcttgaccaaaaa

SEQ ID NO: 23499 - DNA, 20 bp, Artificial Sequence
  Description of Artificial Sequence: Synthetic oligonucleotide
  Target: ATXN2; (-) strand; PAM type: NRG; PAM sequence: TGG
cgagaccagcctggtcaaca

SEQ ID NO: 23500 - DNA, 20 bp, Artificial Sequence
  Description of Artificial Sequence: Synthetic oligonucleotide
  Target: ATXN2; (-) strand; PAM type: NRG; PAM sequence: TGG
tcaggagttcgagaccagcc

SEQ ID NO: 23501 - DNA, 20 bp, Artificial Sequence
  Description of Artificial Sequence: Synthetic oligonucleotide
  Target: ATXN2; (-) strand; PAM type: NRG; PAM sequence: CAG
taaggtcaggagttcgagac

SEQ ID NO: 23502 - DNA, 20 bp, Artificial Sequence
  Description of Artificial Sequence: Synthetic oligonucleotide
  Target: ATXN2; (-) strand; PAM type: NRG; PAM sequence: GAG
tcacctaaggtcaggagttc

SEQ ID NO: 23503 - DNA, 20 bp, Artificial Sequence
  Description of Artificial Sequence: Synthetic oligonucleotide
  Target: ATXN2; (-) strand; PAM type: NRG; PAM sequence: GAG
ggcagatcacctaaggtcag

SEQ ID NO: 23504 - DNA, 20 bp, Artificial Sequence
  Description of Artificial Sequence: Synthetic oligonucleotide
  Target: ATXN2; (-) strand; PAM type: NRG; PAM sequence: AGG
tgggcagatcacctaaggtc

SEQ ID NO: 23505 - DNA, 20 bp, Artificial Sequence
  Description of Artificial Sequence: Synthetic oligonucleotide
  Target: ATXN2; (-) strand; PAM type: NRG; PAM sequence: CAG
gtgggcagatcacctaaggt

SEQ ID NO: 23506 - DNA, 20 bp, Artificial Sequence
  Description of Artificial Sequence: Synthetic oligonucleotide
  Target: ATXN2; (-) strand; PAM type: NRG; PAM sequence: AGG
cgaggtgggcagatcaccta

SEQ ID NO: 23507 - DNA, 20 bp, Artificial Sequence
  Description of Artificial Sequence: Synthetic oligonucleotide
  Target: ATXN2; (-) strand; PAM type: NRG; PAM sequence: AAG
ccgaggtgggcagatcacct

SEQ ID NO: 23508 - DNA, 20 bp, Artificial Sequence
  Description of Artificial Sequence: Synthetic oligonucleotide
  Target: ATXN2; (-) strand; PAM type: NRG; PAM sequence: CAG
ctttgggaggccgaggtggg

SEQ ID NO: 23509 - DNA, 20 bp, Artificial Sequence
  Description of Artificial Sequence: Synthetic oligonucleotide
  Target: ATXN2; (-) strand; PAM type: NRG; PAM sequence: GGG
gcactttgggaggccgaggt

SEQ ID NO: 23510 - DNA, 20 bp, Artificial Sequence
  Description of Artificial Sequence: Synthetic oligonucleotide
  Target: ATXN2; (-) strand; PAM type: NRG; PAM sequence: TGG
agcactttgggaggccgagg

SEQ ID NO: 23511 - DNA, 20 bp, Artificial Sequence
  Description of Artificial Sequence: Synthetic oligonucleotide
  Target: ATXN2; (-) strand; PAM type: NRG; PAM sequence: AGG
cctagcactttgggaggccg

SEQ ID NO: 23512 - DNA, 20 bp, Artificial Sequence
  Description of Artificial Sequence: Synthetic oligonucleotide
  Target: ATXN2; (-) strand; PAM type: NRG; PAM sequence: GAG
tcctagcactttgggaggcc

SEQ ID NO: 23513 - DNA, 20 bp, Artificial Sequence
  Description of Artificial Sequence: Synthetic oligonucleotide
  Target: ATXN2; (-) strand; PAM type: NRG; PAM sequence: AGG
tgtaatcctagcactttggg

SEQ ID NO: 23514 - DNA, 20 bp, Artificial Sequence
  Description of Artificial Sequence: Synthetic oligonucleotide
  Target: ATXN2; (-) strand; PAM type: NRG; PAM sequence: GAG
ctgtaatcctagcactttgg

SEQ ID NO: 23515 - DNA, 20 bp, Artificial Sequence
  Description of Artificial Sequence: Synthetic oligonucleotide
  Target: ATXN2; (-) strand; PAM type: NRG; PAM sequence: GGG
acctgtaatcctagcacttt

SEQ ID NO: 23516 - DNA, 20 bp, Artificial Sequence
  Description of Artificial Sequence: Synthetic oligonucleotide
  Target: ATXN2; (-) strand; PAM type: NRG; PAM sequence: TGG
cacctgtaatcctagcactt

SEQ ID NO: 23517 - DNA, 20 bp, Artificial Sequence
  Description of Artificial Sequence: Synthetic oligonucleotide
  Target: ATXN2; (-) strand; PAM type: NRG; PAM sequence: TAG
gtggctcacacctgtaatcc

SEQ ID NO: 23518 - DNA, 20 bp, Artificial Sequence
  Description of Artificial Sequence: Synthetic oligonucleotide
  Target: ATXN2; (-) strand; PAM type: NRG; PAM sequence: TGG
tcatttgttggcgggcacgg

SEQ ID NO: 23519 - DNA, 20 bp, Artificial Sequence
  Description of Artificial Sequence: Synthetic oligonucleotide
  Target: ATXN2; (-) strand; PAM type: NRG; PAM sequence: CGG
ttttcatttgttggcgggca

SEQ ID NO: 23520 - DNA, 20 bp, Artificial Sequence
  Description of Artificial Sequence: Synthetic oligonucleotide
  Target: ATXN2; (-) strand; PAM type: NRG; PAM sequence: GGG
ctaagttttcatttgttggc

SEQ ID NO: 23521 - DNA, 20 bp, Artificial Sequence
  Description of Artificial Sequence: Synthetic oligonucleotide
  Target: ATXN2; (-) strand; PAM type: NRG; PAM sequence: CGG
cctaagttttcatttgttgg

SEQ ID NO: 23522 - DNA, 20 bp, Artificial Sequence
  Description of Artificial Sequence: Synthetic oligonucleotide
  Target: ATXN2; (-) strand; PAM type: NRG; PAM sequence: TGG
taacctaagttttcatttgt

SEQ ID NO: 23523 - DNA, 20 bp, Artificial Sequence
  Description of Artificial Sequence: Synthetic oligonucleotide
  Target: ATXN2; (-) strand; PAM type: NRG; PAM sequence: AAG
ctattaacagttgttaacct

SEQ ID NO: 23524 - DNA, 20 bp, Artificial Sequence
  Description of Artificial Sequence: Synthetic oligonucleotide
  Target: ATXN2; (-) strand; PAM type: NRG; PAM sequence: CAG
ttcagctttaatgctattaa

SEQ ID NO: 23525 - DNA, 20 bp, Artificial Sequence
  Description of Artificial Sequence: Synthetic oligonucleotide
  Target: ATXN2; (-) strand; PAM type: NRG; PAM sequence: CAG
ctttagcacatgtatctatt

SEQ ID NO: 23526 - DNA, 20 bp, Artificial Sequence
  Description of Artificial Sequence: Synthetic oligonucleotide
  Target: ATXN2; (-) strand; PAM type: NRG; PAM sequence: TAG
ctacttattatttcatactt

SEQ ID NO: 23527 - DNA, 20 bp, Artificial Sequence
  Description of Artificial Sequence: Synthetic oligonucleotide
  Target: ATXN2; (-) strand; PAM type: NRG; PAM sequence: TGG
tagcttcattcttgacttat

SEQ ID NO: 23528 - DNA, 20 bp, Artificial Sequence
  Description of Artificial Sequence: Synthetic oligonucleotide
  Target: ATXN2; (-) strand; PAM type: NRG; PAM sequence: TAG
agctttctaaatgttaacaa

SEQ ID NO: 23529 - DNA, 20 bp, Artificial Sequence
  Description of Artificial Sequence: Synthetic oligonucleotide
  Target: ATXN2; (-) strand; PAM type: NRG; PAM sequence: TAG
cctttcctcagcctgtgttt

SEQ ID NO: 23530 - DNA, 20 bp, Artificial Sequence
  Description of Artificial Sequence: Synthetic oligonucleotide
  Target: ATXN2; (-) strand; PAM type: NRG; PAM sequence: CAG
aggcaaaggtagcctttcct

SEQ ID NO: 23531 - DNA, 20 bp, Artificial Sequence
  Description of Artificial Sequence: Synthetic oligonucleotide
  Target: ATXN2; (-) strand; PAM type: NRG; PAM sequence: TAG
gagtgaaccaaaggcaaagg

SEQ ID NO: 23532 - DNA, 20 bp, Artificial Sequence
  Description of Artificial Sequence: Synthetic oligonucleotide
  Target: ATXN2; (-) strand; PAM type: NRG; PAM sequence: AGG
gatgagtgaaccaaaggcaa

SEQ ID NO: 23533 - DNA, 20 bp, Artificial Sequence
  Description of Artificial Sequence: Synthetic oligonucleotide
  Target: ATXN2; (-) strand; PAM type: NRG; PAM sequence: AAG
ggatgagtgaaccaaaggca

SEQ ID NO: 23534 - DNA, 20 bp, Artificial Sequence
  Description of Artificial Sequence: Synthetic oligonucleotide
  Target: ATXN2; (-) strand; PAM type: NRG; PAM sequence: AGG
ttaaaggatgagtgaaccaa

SEQ ID NO: 23535 - DNA, 20 bp, Artificial Sequence
  Description of Artificial Sequence: Synthetic oligonucleotide
  Target: ATXN2; (-) strand; PAM type: NRG; PAM sequence: AAG
attaaaggatgagtgaacca

SEQ ID NO: 23536 - DNA, 20 bp, Artificial Sequence
  Description of Artificial Sequence: Synthetic oligonucleotide
  Target: ATXN2; (-) strand; PAM type: NRG; PAM sequence: GAG
aagtagctgaattaaaggat

SEQ ID NO: 23537 - DNA, 20 bp, Artificial Sequence
  Description of Artificial Sequence: Synthetic oligonucleotide
  Target: ATXN2; (-) strand; PAM type: NRG; PAM sequence: AGG
aaaaaaagtagctgaattaa

SEQ ID NO: 23538 - DNA, 20 bp, Artificial Sequence
  Description of Artificial Sequence: Synthetic oligonucleotide
  Target: ATXN2; (-) strand; PAM type: NRG; PAM sequence: AAG
taaaaaaagtagctgaatta

SEQ ID NO: 23539 - DNA, 20 bp, Artificial Sequence
  Description of Artificial Sequence: Synthetic oligonucleotide
  Target: ATXN2; (-) strand; PAM type: NRG; PAM sequence: TAG
taccagccttttaaaaaaag

SEQ ID NO: 23540 - DNA, 20 bp, Artificial Sequence
  Description of Artificial Sequence: Synthetic oligonucleotide
  Target: ATXN2; (-) strand; PAM type: NRG; PAM sequence: AAG
aaataccagccttttaaaaa

SEQ ID NO: 23541 - DNA, 20 bp, Artificial Sequence
  Description of Artificial Sequence: Synthetic oligonucleotide
  Target: ATXN2; (-) strand; PAM type: NRG; PAM sequence: CAG
agaaaggaaaatctaaatac

SEQ ID NO: 23542 - DNA, 20 bp, Artificial Sequence
  Description of Artificial Sequence: Synthetic oligonucleotide
  Target: ATXN2; (-) strand; PAM type: NRG; PAM sequence: AGG
tgaaacttagcttcttagaa

SEQ ID NO: 23543 - DNA, 20 bp, Artificial Sequence
  Description of Artificial Sequence: Synthetic oligonucleotide
  Target: ATXN2; (-) strand; PAM type: NRG; PAM sequence: AAG
ttgaaacttagcttcttaga

SEQ ID NO: 23544 - DNA, 20 bp, Artificial Sequence
  Description of Artificial Sequence: Synthetic oligonucleotide
  Target: ATXN2; (-) strand; PAM type: NRG; PAM sequence: TAG
cttcttgaaacttagcttct

SEQ ID NO: 23545 - DNA, 20 bp, Artificial Sequence
  Description of Artificial Sequence: Synthetic oligonucleotide
  Target: ATXN2; (-) strand; PAM type: NRG; PAM sequence: TAG
caataaatcttcttgaaact

SEQ ID NO: 23546 - DNA, 20 bp, Artificial Sequence
  Description of Artificial Sequence: Synthetic oligonucleotide
  Target: ATXN2; (-) strand; PAM type: NRG; PAM sequence: GAG
taggtatcgaggtagatttt

SEQ ID NO: 23547 - DNA, 20 bp, Artificial Sequence
  Description of Artificial Sequence: Synthetic oligonucleotide
  Target: ATXN2; (-) strand; PAM type: NRG; PAM sequence: TAG
atttactataggtatcgagg

SEQ ID NO: 23548 - DNA, 20 bp, Artificial Sequence
  Description of Artificial Sequence: Synthetic oligonucleotide
  Target: ATXN2; (-) strand; PAM type: NRG; PAM sequence: AGG
gttatttactataggtatcg

SEQ ID NO: 23549 - DNA, 20 bp, Artificial Sequence
  Description of Artificial Sequence: Synthetic oligonucleotide
  Target: ATXN2; (-) strand; PAM type: NRG; PAM sequence: GAG
tgttatttactataggtatc

SEQ ID NO: 23550 - DNA, 20 bp, Artificial Sequence
  Description of Artificial Sequence: Synthetic oligonucleotide
  Target: ATXN2; (-) strand; PAM type: NRG; PAM sequence: AGG
ttttgcatgttatttactat

SEQ ID NO: 23551 - DNA, 20 bp, Artificial Sequence
  Description of Artificial Sequence: Synthetic oligonucleotide
  Target: ATXN2; (-) strand; PAM type: NRG; PAM sequence: TAG
cttttgcatgttatttacta

SEQ ID NO: 23552 - DNA, 20 bp, Artificial Sequence
  Description of Artificial Sequence: Synthetic oligonucleotide
  Target: ATXN2; (-) strand; PAM type: NRG; PAM sequence: AGG
ttatttctctgtcttagcac

SEQ ID NO: 23553 - DNA, 20 bp, Artificial Sequence
  Description of Artificial Sequence: Synthetic oligonucleotide
  Target: ATXN2; (-) strand; PAM type: NRG; PAM sequence: CAG
attatttctctgtcttagca

SEQ ID NO: 23554 - DNA, 20 bp, Artificial Sequence
  Description of Artificial Sequence: Synthetic oligonucleotide
  Target: ATXN2; (-) strand; PAM type: NRG; PAM sequence: TAG
gtaacattatttctctgtct

SEQ ID NO: 23555 - DNA, 20 bp, Artificial Sequence
  Description of Artificial Sequence: Synthetic oligonucleotide
  Target: ATXN2; (-) strand; PAM type: NRG; PAM sequence: TGG
ctttgtacacaaatatattg

SEQ ID NO: 23556 - DNA, 20 bp, Artificial Sequence
  Description of Artificial Sequence: Synthetic oligonucleotide
  Target: ATXN2; (-) strand; PAM type: NRG; PAM sequence: GAG
ctggtgttctgaggtagttg

SEQ ID NO: 23557 - DNA, 20 bp, Artificial Sequence
  Description of Artificial Sequence: Synthetic oligonucleotide
  Target: ATXN2; (-) strand; PAM type: NRG; PAM sequence: TGG
ctctggtgttctgaggtagt

SEQ ID NO: 23558 - DNA, 20 bp, Artificial Sequence
  Description of Artificial Sequence: Synthetic oligonucleotide
  Target: ATXN2; (-) strand; PAM type: NRG; PAM sequence: TAG
tggactctggtgttctgagg

SEQ ID NO: 23559 - DNA, 20 bp, Artificial Sequence
  Description of Artificial Sequence: Synthetic oligonucleotide
  Target: ATXN2; (-) strand; PAM type: NRG; PAM sequence: AGG
tactggactctggtgttctg

SEQ ID NO: 23560 - DNA, 20 bp, Artificial Sequence
  Description of Artificial Sequence: Synthetic oligonucleotide
  Target: ATXN2; (-) strand; PAM type: NRG; PAM sequence: GAG
gtactggactctggtgttct

SEQ ID NO: 23561 - DNA, 20 bp, Artificial Sequence
  Description of Artificial Sequence: Synthetic oligonucleotide
  Target: ATXN2; (-) strand; PAM type: NRG; PAM sequence: TGG
atggaagatgtactggactc

SEQ ID NO: 23562 - DNA, 20 bp, Artificial Sequence
  Description of Artificial Sequence: Synthetic oligonucleotide
  Target: ATXN2; (-) strand; PAM type: NRG; PAM sequence: TGG
gtggcaaatggaagatgtac

SEQ ID NO: 23563 - DNA, 20 bp, Artificial Sequence
  Description of Artificial Sequence: Synthetic oligonucleotide
  Target: ATXN2; (-) strand; PAM type: NRG; PAM sequence: AAG
taatctagtgtggcaaatgg

SEQ ID NO: 23564 - DNA, 20 bp, Artificial Sequence
  Description of Artificial Sequence: Synthetic oligonucleotide
  Target: ATXN2; (-) strand; PAM type: NRG; PAM sequence: TGG
taataatctagtgtggcaaa

SEQ ID NO: 23565 - DNA, 20 bp, Artificial Sequence
  Description of Artificial Sequence: Synthetic oligonucleotide
  Target: ATXN2; (-) strand; PAM type: NRG; PAM sequence: TGG
aagtcattaataatctagtg

SEQ ID NO: 23566 - DNA, 20 bp, Artificial Sequence
  Description of Artificial Sequence: Synthetic oligonucleotide
  Target: ATXN2; (-) strand; PAM type: NRG; PAM sequence: TAG
aggccaagtcattaataatc

SEQ ID NO: 23567 - DNA, 20 bp, Artificial Sequence
  Description of Artificial Sequence: Synthetic oligonucleotide
  Target: ATXN2; (-) strand; PAM type: NRG; PAM sequence: AAG
gatattagtagagcaaggcc

SEQ ID NO: 23568 - DNA, 20 bp, Artificial Sequence
  Description of Artificial Sequence: Synthetic oligonucleotide
  Target: ATXN2; (-) strand; PAM type: NRG; PAM sequence: AGG
agctagatattagtagagca

SEQ ID NO: 23569 - DNA, 20 bp, Artificial Sequence
  Description of Artificial Sequence: Synthetic oligonucleotide
  Target: ATXN2; (-) strand; PAM type: NRG; PAM sequence: AAG
aagctagatattagtagagc

SEQ ID NO: 23570 - DNA, 20 bp, Artificial Sequence
  Description of Artificial Sequence: Synthetic oligonucleotide
  Target: ATXN2; (-) strand; PAM type: NRG; PAM sequence: GAG
agtgaagctagatattagta

SEQ ID NO: 23571 - DNA, 20 bp, Artificial Sequence
  Description of Artificial Sequence: Synthetic oligonucleotide
  Target: ATXN2; (-) strand; PAM type: NRG; PAM sequence: TAG
tcagtgaagctagatattag

SEQ ID NO: 23572 - DNA, 20 bp, Artificial Sequence
  Description of Artificial Sequence: Synthetic oligonucleotide
  Target: ATXN2; (-) strand; PAM type: NRG; PAM sequence: TAG
tgttcagtgaagctagatat

SEQ ID NO: 23573 - DNA, 20 bp, Artificial Sequence
  Description of Artificial Sequence: Synthetic oligonucleotide
  Target: ATXN2; (-) strand; PAM type: NRG; PAM sequence: TAG
tgtactttgttcagtgaagc

SEQ ID NO: 23574 - DNA, 20 bp, Artificial Sequence
  Description of Artificial Sequence: Synthetic oligonucleotide
  Target: ATXN2; (-) strand; PAM type: NRG; PAM sequence: AAG
catttgtactttgttcagtg

SEQ ID NO: 23575 - DNA, 20 bp, Artificial Sequence
  Description of Artificial Sequence: Synthetic oligonucleotide
  Target: ATXN2; (-) strand; PAM type: NRG; PAM sequence: CAG
atggtcatttgtactttgtt

SEQ ID NO: 23576 - DNA, 20 bp, Artificial Sequence
  Description of Artificial Sequence: Synthetic oligonucleotide
  Target: ATXN2; (-) strand; PAM type: NRG; PAM sequence: TGG
tagcacagcttactatttga

SEQ ID NO: 23577 - DNA, 20 bp, Artificial Sequence
  Description of Artificial Sequence: Synthetic oligonucleotide
  Target: ATXN2; (-) strand; PAM type: NRG; PAM sequence: CAG
catttgaaaccaccatagca

SEQ ID NO: 23578 - DNA, 20 bp, Artificial Sequence
  Description of Artificial Sequence: Synthetic oligonucleotide
  Target: ATXN2; (-) strand; PAM type: NRG; PAM sequence: TAG
cctgacatttgaaaccacca

SEQ ID NO: 23579 - DNA, 20 bp, Artificial Sequence
  Description of Artificial Sequence: Synthetic oligonucleotide
  Target: ATXN2; (-) strand; PAM type: NRG; PAM sequence: TAG
gtaggtatcaaatgagagta

SEQ ID NO: 23580 - DNA, 20 bp, Artificial Sequence
  Description of Artificial Sequence: Synthetic oligonucleotide
  Target: ATXN2; (-) strand; PAM type: NRG; PAM sequence: GAG
aatatgtaggtatcaaatga

SEQ ID NO: 23581 - DNA, 20 bp, Artificial Sequence
  Description of Artificial Sequence: Synthetic oligonucleotide
  Target: ATXN2; (-) strand; PAM type: NRG; PAM sequence: GAG
acaatatgtaggtatcaaat

SEQ ID NO: 23582 - DNA, 20 bp, Artificial Sequence
  Description of Artificial Sequence: Synthetic oligonucleotide
  Target: ATXN2; (-) strand; PAM type: NRG; PAM sequence: AGG
atttggtaacaacaatatgt

SEQ ID NO: 23583 - DNA, 20 bp, Artificial Sequence
  Description of Artificial Sequence: Synthetic oligonucleotide
  Target: ATXN2; (-) strand; PAM type: NRG; PAM sequence: TAG
gatttggtaacaacaatatg

SEQ ID NO: 23584 - DNA, 20 bp, Artificial Sequence
  Description of Artificial Sequence: Synthetic oligonucleotide
  Target: ATXN2; (-) strand; PAM type: NRG; PAM sequence: TGG
ataactaaaatcatgagatt

SEQ ID NO: 23585 - DNA, 20 bp, Artificial Sequence
  Description of Artificial Sequence: Synthetic oligonucleotide
  Target: ATXN2; (-) strand; PAM type: NRG; PAM sequence: GAG
agtgggataactaaaatcat

SEQ ID NO: 23586 - DNA, 20 bp, Artificial Sequence
  Description of Artificial Sequence: Synthetic oligonucleotide
  Target: ATXN2; (-) strand; PAM type: NRG; PAM sequence: GGG
tctttgcctatcctttaagt

SEQ ID NO: 23587 - DNA, 20 bp, Artificial Sequence
  Description of Artificial Sequence: Synthetic oligonucleotide
  Target: ATXN2; (-) strand; PAM type: NRG; PAM sequence: TGG
gtctttgcctatcctttaag

SEQ ID NO: 23588 - DNA, 20 bp, Artificial Sequence
  Description of Artificial Sequence: Synthetic oligonucleotide
  Target: ATXN2; (-) strand; PAM type: NRG; PAM sequence: AAG
gtggtctttgcctatccttt

SEQ ID NO: 23589 - DNA, 20 bp, Artificial Sequence
  Description of Artificial Sequence: Synthetic oligonucleotide
  Target: ATXN2; (-) strand; PAM type: NRG; PAM sequence: TGG
aaagcagaacatttttaaag

SEQ ID NO: 23590 - DNA, 20 bp, Artificial Sequence
  Description of Artificial Sequence: Synthetic oligonucleotide
  Target: ATXN2; (-) strand; PAM type: NRG; PAM sequence: AAG
tagaaagcagaacattttta

SEQ ID NO: 23591 - DNA, 20 bp, Artificial Sequence
  Description of Artificial Sequence: Synthetic oligonucleotide
  Target: ATXN2; (-) strand; PAM type: NRG; PAM sequence: CAG
caaaccatatatgtagaaag

SEQ ID NO: 23592 - DNA, 20 bp, Artificial Sequence
  Description of Artificial Sequence: Synthetic oligonucleotide
  Target: ATXN2; (-) strand; PAM type: NRG; PAM sequence: AAG
catcaaaccatatatgtaga

SEQ ID NO: 23593 - DNA, 20 bp, Artificial Sequence
  Description of Artificial Sequence: Synthetic oligonucleotide
  Target: ATXN2; (-) strand; PAM type: NRG; PAM sequence: TAG
gaaacatcaaaccatatatg

SEQ ID NO: 23594 - DNA, 20 bp, Artificial Sequence
  Description of Artificial Sequence: Synthetic oligonucleotide
  Target: ATXN2; (-) strand; PAM type: NRG; PAM sequence: CAG
aaatgcgttatgtatacagt

SEQ ID NO: 23595 - DNA, 20 bp, Artificial Sequence
  Description of Artificial Sequence: Synthetic oligonucleotide
  Target: ATXN2; (-) strand; PAM type: NRG; PAM sequence: CAG
ataaaaatgcgttatgtata

SEQ ID NO: 23596 - DNA, 20 bp, Artificial Sequence
  Description of Artificial Sequence: Synthetic oligonucleotide
  Target: ATXN2; (-) strand; PAM type: NRG; PAM sequence: AAG
ttagaaaataagcattacta

SEQ ID NO: 23597 - DNA, 20 bp, Artificial Sequence
  Description of Artificial Sequence: Synthetic oligonucleotide
  Target: ATXN2; (-) strand; PAM type: NRG; PAM sequence: AAG
gaatttgagttttagaaaat

SEQ ID NO: 23598 - DNA, 20 bp, Artificial Sequence
  Description of Artificial Sequence: Synthetic oligonucleotide
  Target: ATXN2; (-) strand; PAM type: NRG; PAM sequence: TAG
taactgatgaatttgagttt

SEQ ID NO: 23599 - DNA, 20 bp, Artificial Sequence
  Description of Artificial Sequence: Synthetic oligonucleotide
  Target: ATXN2; (-) strand; PAM type: NRG; PAM sequence: GAG
ttgtactaactgatgaattt

SEQ ID NO: 23600 - DNA, 20 bp, Artificial Sequence
  Description of Artificial Sequence: Synthetic oligonucleotide
  Target: ATXN2; (-) strand; PAM type: NRG; PAM sequence: AAG
tttaagaatgattttagggt

SEQ ID NO: 23601 - DNA, 20 bp, Artificial Sequence
  Description of Artificial Sequence: Synthetic oligonucleotide
  Target: ATXN2; (-) strand; PAM type: NRG; PAM sequence: GGG
gaaatttaagaatgatttta

SEQ ID NO: 23602 - DNA, 20 bp, Artificial Sequence
  Description of Artificial Sequence: Synthetic oligonucleotide
  Target: ATXN2; (-) strand; PAM type: NRG; PAM sequence: AGG
agaaatttaagaatgatttt

SEQ ID NO: 23603 - DNA, 20 bp, Artificial Sequence
  Description of Artificial Sequence: Synthetic oligonucleotide
  Target: ATXN2; (-) strand; PAM type: NRG; PAM sequence: TAG
aagaaatttaagaatgattt

SEQ ID NO: 23604 - DNA, 20 bp, Artificial Sequence
  Description of Artificial Sequence: Synthetic oligonucleotide
  Target: ATXN2; (-) strand; PAM type: NRG; PAM sequence: AAG
ttgatgatttaaagaaattt

SEQ ID NO: 23605 - DNA, 20 bp, Artificial Sequence
  Description of Artificial Sequence: Synthetic oligonucleotide
  Target: ATXN2; (-) strand; PAM type: NRG; PAM sequence: AAG
gaaaacagattgatgattta

SEQ ID NO: 23606 - DNA, 20 bp, Artificial Sequence
  Description of Artificial Sequence: Synthetic oligonucleotide
  Target: ATXN2; (-) strand; PAM type: NRG; PAM sequence: CAG
ttgtttctgaacatagaaaa

SEQ ID NO: 23607 - DNA, 20 bp, Artificial Sequence
  Description of Artificial Sequence: Synthetic oligonucleotide
  Target: ATXN2; (-) strand; PAM type: NRG; PAM sequence: TAG
tcaccagttgtttctgaaca

SEQ ID NO: 23608 - DNA, 20 bp, Artificial Sequence
  Description of Artificial Sequence: Synthetic oligonucleotide
  Target: ATXN2; (-) strand; PAM type: NRG; PAM sequence: CAG
taattttacaggtatatcac

SEQ ID NO: 23609 - DNA, 20 bp, Artificial Sequence
  Description of Artificial Sequence: Synthetic oligonucleotide
  Target: ATXN2; (-) strand; PAM type: NRG; PAM sequence: AGG
ttaacagttcttaattttac

SEQ ID NO: 23610 - DNA, 20 bp, Artificial Sequence
  Description of Artificial Sequence: Synthetic oligonucleotide
  Target: ATXN2; (-) strand; PAM type: NRG; PAM sequence: CAG
cttaacagttcttaatttta

SEQ ID NO: 23611 - DNA, 20 bp, Artificial Sequence
  Description of Artificial Sequence: Synthetic oligonucleotide
  Target: ATXN2; (-) strand; PAM type: NRG; PAM sequence: CAG
aaaataaacctgtgtcttaa

SEQ ID NO: 23612 - DNA, 20 bp, Artificial Sequence
  Description of Artificial Sequence: Synthetic oligonucleotide
  Target: ATXN2; (-) strand; PAM type: NRG; PAM sequence: AAG
ctaaaaagaatgtgatgtta

SEQ ID NO: 23613 - DNA, 20 bp, Artificial Sequence
  Description of Artificial Sequence: Synthetic oligonucleotide
  Target: ATXN2; (-) strand; PAM type: NRG; PAM sequence: AAG
ttctatcatctcatactaaa

SEQ ID NO: 23614 - DNA, 20 bp, Artificial Sequence
  Description of Artificial Sequence: Synthetic oligonucleotide
  Target: ATXN2; (-) strand; PAM type: NRG; PAM sequence: TAG
atttcttcttactattgtga

SEQ ID NO: 23615 - DNA, 20 bp, Artificial Sequence
  Description of Artificial Sequence: Synthetic oligonucleotide
  Target: ATXN2; (-) strand; PAM type: NRG; PAM sequence: CAG
tgtctaatttcatgcccata

SEQ ID NO: 23616 - DNA, 20 bp, Artificial Sequence
  Description of Artificial Sequence: Synthetic oligonucleotide
  Target: ATXN2; (-) strand; PAM type: NRG; PAM sequence: AAG
ttaactgtaggaataggaag

SEQ ID NO: 23617 - DNA, 20 bp, Artificial Sequence
  Description of Artificial Sequence: Synthetic oligonucleotide
  Target: ATXN2; (-) strand; PAM type: NRG; PAM sequence: AAG
agcttaactgtaggaatagg

SEQ ID NO: 23618 - DNA, 20 bp, Artificial Sequence
  Description of Artificial Sequence: Synthetic oligonucleotide
  Target: ATXN2; (-) strand; PAM type: NRG; PAM sequence: AGG
ttaagcttaactgtaggaat

SEQ ID NO: 23619 - DNA, 20 bp, Artificial Sequence
  Description of Artificial Sequence: Synthetic oligonucleotide
  Target: ATXN2; (-) strand; PAM type: NRG; PAM sequence: TAG
attaagcttaactgtaggaa

SEQ ID NO: 23620 - DNA, 20 bp, Artificial Sequence
  Description of Artificial Sequence: Synthetic oligonucleotide
  Target: ATXN2; (-) strand; PAM type: NRG; PAM sequence: AGG
gagtcattaagcttaactgt

SEQ ID NO: 23621 - DNA, 20 bp, Artificial Sequence
  Description of Artificial Sequence: Synthetic oligonucleotide
  Target: ATXN2; (-) strand; PAM type: NRG; PAM sequence: TAG
agagtcattaagcttaactg

SEQ ID NO: 23622 - DNA, 20 bp, Artificial Sequence
  Description of Artificial Sequence: Synthetic oligonucleotide
  Target: ATXN2; (-) strand; PAM type: NRG; PAM sequence: AAG
ttagagtttaaagagtcatt

SEQ ID NO: 23623 - DNA, 20 bp, Artificial Sequence
  Description of Artificial Sequence: Synthetic oligonucleotide
  Target: ATXN2; (-) strand; PAM type: NRG; PAM sequence: GAG
aacaaaggttagagtttaaa

SEQ ID NO: 23624 - DNA, 20 bp, Artificial Sequence
  Description of Artificial Sequence: Synthetic oligonucleotide
  Target: ATXN2; (-) strand; PAM type: NRG; PAM sequence: AAG
aaaacaaaggttagagttta

SEQ ID NO: 23625 - DNA, 20 bp, Artificial Sequence
  Description of Artificial Sequence: Synthetic oligonucleotide
  Target: ATXN2; (-) strand; PAM type: NRG; PAM sequence: GAG
aaagctgaaaacaaaggtta

SEQ ID NO: 23626 - DNA, 20 bp, Artificial Sequence
  Description of Artificial Sequence: Synthetic oligonucleotide
  Target: ATXN2; (-) strand; PAM type: NRG; PAM sequence: TAG
caaaagctgaaaacaaaggt

SEQ ID NO: 23627 - DNA, 20 bp, Artificial Sequence
  Description of Artificial Sequence: Synthetic oligonucleotide
  Target: ATXN2; (-) strand; PAM type: NRG; PAM sequence: AGG
ttctcaaaagctgaaaacaa

SEQ ID NO: 23628 - DNA, 20 bp, Artificial Sequence
  Description of Artificial Sequence: Synthetic oligonucleotide
  Target: ATXN2; (-) strand; PAM type: NRG; PAM sequence: AAG
cttctcaaaagctgaaaaca

SEQ ID NO: 23629 - DNA, 20 bp, Artificial Sequence
  Description of Artificial Sequence: Synthetic oligonucleotide
  Target: ATXN2; (-) strand; PAM type: NRG; PAM sequence: AAG
aacatcacctagcttctcaa

SEQ ID NO: 23630 - DNA, 20 bp, Artificial Sequence
  Description of Artificial Sequence: Synthetic oligonucleotide
  Target: ATXN2; (-) strand; PAM type: NRG; PAM sequence: TAG
aaacccaatgaaacatcacc

SEQ ID NO: 23631 - DNA, 20 bp, Artificial Sequence
  Description of Artificial Sequence: Synthetic oligonucleotide
  Target: ATXN2; (-) strand; PAM type: NRG; PAM sequence: AAG
gaactctcctgcagggaata

SEQ ID NO: 23632 - DNA, 20 bp, Artificial Sequence
  Description of Artificial Sequence: Synthetic oligonucleotide
  Target: ATXN2; (-) strand; PAM type: NRG; PAM sequence: GGG
agaggcagaactctcctgca

SEQ ID NO: 23633 - DNA, 20 bp, Artificial Sequence
  Description of Artificial Sequence: Synthetic oligonucleotide
  Target: ATXN2; (-) strand; PAM type: NRG; PAM sequence: AGG
cagaggcagaactctcctgc

SEQ ID NO: 23634 - DNA, 20 bp, Artificial Sequence
  Description of Artificial Sequence: Synthetic oligonucleotide
  Target: ATXN2; (-) strand; PAM type: NRG; PAM sequence: CAG
tcagaggcagaactctcctg

SEQ ID NO: 23635 - DNA, 20 bp, Artificial Sequence
  Description of Artificial Sequence: Synthetic oligonucleotide
  Target: ATXN2; (-) strand; PAM type: NRG; PAM sequence: CAG
ccaggcttcaagatcagagg

SEQ ID NO: 23636 - DNA, 20 bp, Artificial Sequence
  Description of Artificial Sequence: Synthetic oligonucleotide
  Target: ATXN2; (-) strand; PAM type: NRG; PAM sequence: AGG
attccaggcttcaagatcag

SEQ ID NO: 23637 - DNA, 20 bp, Artificial Sequence
  Description of Artificial Sequence: Synthetic oligonucleotide
  Target: ATXN2; (-) strand; PAM type: NRG; PAM sequence: GAG
gattccaggcttcaagatca

SEQ ID NO: 23638 - DNA, 20 bp, Artificial Sequence
  Description of Artificial Sequence: Synthetic oligonucleotide
  Target: ATXN2; (-) strand; PAM type: NRG; PAM sequence: CAG
aagattccaggcttcaagat

SEQ ID NO: 23639 - DNA, 20 bp, Artificial Sequence
  Description of Artificial Sequence: Synthetic oligonucleotide
  Target: ATXN2; (-) strand; PAM type: NRG; PAM sequence: AAG
agctaaagattccaggcttc

SEQ ID NO: 23640 - DNA, 20 bp, Artificial Sequence
  Description of Artificial Sequence: Synthetic oligonucleotide
  Target: ATXN2; (-) strand; PAM type: NRG; PAM sequence: AGG
gttttctagctaaagattcc

SEQ ID NO: 23641 - DNA, 20 bp, Artificial Sequence
  Description of Artificial Sequence: Synthetic oligonucleotide
  Target: ATXN2; (-) strand; PAM type: NRG; PAM sequence: CAG
tgttttctagctaaagattc

SEQ ID NO: 23642 - DNA, 20 bp, Artificial Sequence
  Description of Artificial Sequence: Synthetic oligonucleotide
  Target: ATXN2; (-) strand; PAM type: NRG; PAM sequence: AAG
aaaaaattgttttctagcta

SEQ ID NO: 23643 - DNA, 20 bp, Artificial Sequence
  Description of Artificial Sequence: Synthetic oligonucleotide
  Target: ATXN2; (-) strand; PAM type: NRG; PAM sequence: TAG
ttttttaaaaaattgttttc

SEQ ID NO: 23644 - DNA, 20 bp, Artificial Sequence
  Description of Artificial Sequence: Synthetic oligonucleotide
  Target: ATXN2; (-) strand; PAM type: NRG; PAM sequence: CAG
aggaaatcaaaattattgtt

SEQ ID NO: 23645 - DNA, 20 bp, Artificial Sequence
  Description of Artificial Sequence: Synthetic oligonucleotide
  Target: ATXN2; (-) strand; PAM type: NRG; PAM sequence: AGG
gcattattttccaaaaacat

SEQ ID NO: 23646 - DNA, 20 bp, Artificial Sequence
  Description of Artificial Sequence: Synthetic oligonucleotide
  Target: ATXN2; (-) strand; PAM type: NRG; PAM sequence: TAG
agcattattttccaaaaaca

SEQ ID NO: 23647 - DNA, 20 bp, Artificial Sequence
  Description of Artificial Sequence: Synthetic oligonucleotide
  Target: ATXN2; (-) strand; PAM type: NRG; PAM sequence: AAG
aaaagcctctgtttaaatga

SEQ ID NO: 23648 - DNA, 20 bp, Artificial Sequence
  Description of Artificial Sequence: Synthetic oligonucleotide
  Target: ATXN2; (-) strand; PAM type: NRG; PAM sequence: AAG
tgacatctgcaaaggaaaaa

SEQ ID NO: 23649 - DNA, 20 bp, Artificial Sequence
  Description of Artificial Sequence: Synthetic oligonucleotide
  Target: ATXN2; (-) strand; PAM type: NRG; PAM sequence: AGG
gtttcatatgacatctgcaa

SEQ ID NO: 23650 - DNA, 20 bp, Artificial Sequence
  Description of Artificial Sequence: Synthetic oligonucleotide
  Target: ATXN2; (-) strand; PAM type: NRG; PAM sequence: AAG
tgtttcatatgacatctgca

SEQ ID NO: 23651 - DNA, 20 bp, Artificial Sequence
  Description of Artificial Sequence: Synthetic oligonucleotide
  Target: ATXN2; (-) strand; PAM type: NRG; PAM sequence: TGG
acctacataaataaaattat

SEQ ID NO: 23652 - DNA, 20 bp, Artificial Sequence
  Description of Artificial Sequence: Synthetic oligonucleotide
  Target: ATXN2; (-) strand; PAM type: NRG; PAM sequence: GGG
ttacaaaggttaacattcct

SEQ ID NO: 23653 - DNA, 20 bp, Artificial Sequence
  Description of Artificial Sequence: Synthetic oligonucleotide
  Target: ATXN2; (-) strand; PAM type: NRG; PAM sequence: TGG
gttacaaaggttaacattcc

SEQ ID NO: 23654 - DNA, 20 bp, Artificial Sequence
  Description of Artificial Sequence: Synthetic oligonucleotide
  Target: ATXN2; (-) strand; PAM type: NRG; PAM sequence: AGG
atatagtgtctgtgttacaa

SEQ ID NO: 23655 - DNA, 20 bp, Artificial Sequence
  Description of Artificial Sequence: Synthetic oligonucleotide
  Target: ATXN2; (-) strand; PAM type: NRG; PAM sequence: AAG
aatatagtgtctgtgttaca

SEQ ID NO: 23656 - DNA, 20 bp, Artificial Sequence
  Description of Artificial Sequence: Synthetic oligonucleotide
  Target: ATXN2; (-) strand; PAM type: NRG; PAM sequence: TAG
ttaatactactaatttaata

SEQ ID NO: 23657 - DNA, 20 bp, Artificial Sequence
  Description of Artificial Sequence: Synthetic oligonucleotide
  Target: ATXN2; (-) strand; PAM type: NRG; PAM sequence: AAG
tatttttagtgcacatttaa

SEQ ID NO: 23658 - DNA, 20 bp, Artificial Sequence
  Description of Artificial Sequence: Synthetic oligonucleotide
  Target: ATXN2; (-) strand; PAM type: NRG; PAM sequence: TAG
tattcatagacaagtatttt

SEQ ID NO: 23659 - DNA, 20 bp, Artificial Sequence
  Description of Artificial Sequence: Synthetic oligonucleotide
  Target: ATXN2; (-) strand; PAM type: NRG; PAM sequence: AAG
ggttatttttattcatagac

SEQ ID NO: 23660 - DNA, 20 bp, Artificial Sequence
  Description of Artificial Sequence: Synthetic oligonucleotide
  Target: ATXN2; (-) strand; PAM type: NRG; PAM sequence: TAG
ttctaggttatttttattca

SEQ ID NO: 23661 - DNA, 20 bp, Artificial Sequence
  Description of Artificial Sequence: Synthetic oligonucleotide
  Target: ATXN2; (-) strand; PAM type: NRG; PAM sequence: AGG
atattatatgaaaaaattct

SEQ ID NO: 23662 - DNA, 20 bp, Artificial Sequence
  Description of Artificial Sequence: Synthetic oligonucleotide
  Target: ATXN2; (-) strand; PAM type: NRG; PAM sequence: TAG
gatattatatgaaaaaattc

SEQ ID NO: 23663 - DNA, 20 bp, Artificial Sequence
  Description of Artificial Sequence: Synthetic oligonucleotide
  Target: ATXN2; (-) strand; PAM type: NRG; PAM sequence: GGG
ctgtgaaattgaatgttaga

SEQ ID NO: 23664 - DNA, 20 bp, Artificial Sequence
  Description of Artificial Sequence: Synthetic oligonucleotide
  Target: ATXN2; (-) strand; PAM type: NRG; PAM sequence: AGG
gctgtgaaattgaatgttag

SEQ ID NO: 23665 - DNA, 20 bp, Artificial Sequence
  Description of Artificial Sequence: Synthetic oligonucleotide
  Target: ATXN2; (-) strand; PAM type: NRG; PAM sequence: GAG
agctgtgaaattgaatgtta

SEQ ID NO: 23666 - DNA, 20 bp, Artificial Sequence
  Description of Artificial Sequence: Synthetic oligonucleotide
  Target: ATXN2; (-) strand; PAM type: NRG; PAM sequence: TAG
tcagctgtgaaattgaatgt

SEQ ID NO: 23667 - DNA, 20 bp, Artificial Sequence
  Description of Artificial Sequence: Synthetic oligonucleotide
  Target: ATXN2; (-) strand; PAM type: NRG; PAM sequence: CAG
ggcttctggatccataatct

SEQ ID NO: 23668 - DNA, 20 bp, Artificial Sequence
  Description of Artificial Sequence: Synthetic oligonucleotide
  Target: ATXN2; (-) strand; PAM type: NRG; PAM sequence: TGG
ggtatgtaacaaagggcttc

SEQ ID NO: 23669 - DNA, 20 bp, Artificial Sequence
  Description of Artificial Sequence: Synthetic oligonucleotide
  Target: ATXN2; (-) strand; PAM type: NRG; PAM sequence: GGG
tagtgagggtatgtaacaaa

SEQ ID NO: 23670 - DNA, 20 bp, Artificial Sequence
  Description of Artificial Sequence: Synthetic oligonucleotide
  Target: ATXN2; (-) strand; PAM type: NRG; PAM sequence: AGG
ctagtgagggtatgtaacaa

SEQ ID NO: 23671 - DNA, 20 bp, Artificial Sequence
  Description of Artificial Sequence: Synthetic oligonucleotide
  Target: ATXN2; (-) strand; PAM type: NRG; PAM sequence: AAG
tctagtgagggtatgtaaca

SEQ ID NO: 23672 - DNA, 20 bp, Artificial Sequence
  Description of Artificial Sequence: Synthetic oligonucleotide
  Target: ATXN2; (-) strand; PAM type: NRG; PAM sequence: GGG
gctgttaccccttctagtga

SEQ ID NO: 23673 - DNA, 20 bp, Artificial Sequence
  Description of Artificial Sequence: Synthetic oligonucleotide
  Target: ATXN2; (-) strand; PAM type: NRG; PAM sequence: AGG
agctgttaccccttctagtg

SEQ ID NO: 23674 - DNA, 20 bp, Artificial Sequence
  Description of Artificial Sequence: Synthetic oligonucleotide
  Target: ATXN2; (-) strand; PAM type: NRG; PAM sequence: GAG
gagctgttaccccttctagt

SEQ ID NO: 23675 - DNA, 20 bp, Artificial Sequence
  Description of Artificial Sequence: Synthetic oligonucleotide
  Target: ATXN2; (-) strand; PAM type: NRG; PAM sequence: TAG
aacagagctgttaccccttc

SEQ ID NO: 23676 - DNA, 20 bp, Artificial Sequence
  Description of Artificial Sequence: Synthetic oligonucleotide
  Target: ATXN2; (-) strand; PAM type: NRG; PAM sequence: GAG
tgctagtcctgcatcgaaca

SEQ ID NO: 23677 - DNA, 20 bp, Artificial Sequence
  Description of Artificial Sequence: Synthetic oligonucleotide
  Target: ATXN2; (-) strand; PAM type: NRG; PAM sequence: CAG
cctgctagtcctgcatcgaa

SEQ ID NO: 23678 - DNA, 20 bp, Artificial Sequence
  Description of Artificial Sequence: Synthetic oligonucleotide
  Target: ATXN2; (-) strand; PAM type: NRG; PAM sequence: TAG
gctgcatctcctacgcctgc

SEQ ID NO: 23679 - DNA, 20 bp, Artificial Sequence
  Description of Artificial Sequence: Synthetic oligonucleotide
  Target: ATXN2; (-) strand; PAM type: NRG; PAM sequence: CAG
agctgttgccatgcctattc

SEQ ID NO: 23680 - DNA, 20 bp, Artificial Sequence
  Description of Artificial Sequence: Synthetic oligonucleotide
  Target: ATXN2; (-) strand; PAM type: NRG; PAM sequence: AAG
agctggtattattccaactg

SEQ ID NO: 23681 - DNA, 20 bp, Artificial Sequence
  Description of Artificial Sequence: Synthetic oligonucleotide
  Target: ATXN2; (-) strand; PAM type: NRG; PAM sequence: TGG
gttcttgcttctccccaagc

SEQ ID NO: 23682 - DNA, 20 bp, Artificial Sequence
  Description of Artificial Sequence: Synthetic oligonucleotide
  Target: ATXN2; (-) strand; PAM type: NRG; PAM sequence: AAG
gccagttcttgcttctcccc

SEQ ID NO: 23683 - DNA, 20 bp, Artificial Sequence
  Description of Artificial Sequence: Synthetic oligonucleotide
  Target: ATXN2; (-) strand; PAM type: NRG; PAM sequence: CAG
tggaaatacccccagtgggc

SEQ ID NO: 23684 - DNA, 20 bp, Artificial Sequence
  Description of Artificial Sequence: Synthetic oligonucleotide
  Target: ATXN2; (-) strand; PAM type: NRG; PAM sequence: GGG
gtattggaaatacccccagt

SEQ ID NO: 23685 - DNA, 20 bp, Artificial Sequence
  Description of Artificial Sequence: Synthetic oligonucleotide
  Target: ATXN2; (-) strand; PAM type: NRG; PAM sequence: TGG
agtattggaaatacccccag

SEQ ID NO: 23686 - DNA, 20 bp, Artificial Sequence
  Description of Artificial Sequence: Synthetic oligonucleotide
  Target: ATXN2; (-) strand; PAM type: NRG; PAM sequence: CAG
aacagtattggaaatacccc

SEQ ID NO: 23687 - DNA, 20 bp, Artificial Sequence
  Description of Artificial Sequence: Synthetic oligonucleotide
  Target: ATXN2; (-) strand; PAM type: NRG; PAM sequence: TGG
tctcccagacagaacagtat

SEQ ID NO: 23688 - DNA, 20 bp, Artificial Sequence
  Description of Artificial Sequence: Synthetic oligonucleotide
  Target: ATXN2; (-) strand; PAM type: NRG; PAM sequence: CAG
cccaggtctcccagacagaa

SEQ ID NO: 23689 - DNA, 20 bp, Artificial Sequence
  Description of Artificial Sequence: Synthetic oligonucleotide
  Target: ATXN2; (-) strand; PAM type: NRG; PAM sequence: CAG
atagacccaggtctcccaga

SEQ ID NO: 23690 - DNA, 20 bp, Artificial Sequence
  Description of Artificial Sequence: Synthetic oligonucleotide
  Target: ATXN2; (-) strand; PAM type: NRG; PAM sequence: CAG
actcatagacccaggtctcc

SEQ ID NO: 23691 - DNA, 20 bp, Artificial Sequence
  Description of Artificial Sequence: Synthetic oligonucleotide
  Target: ATXN2; (-) strand; PAM type: NRG; PAM sequence: AGG
cccctaaaactcatagaccc

SEQ ID NO: 23692 - DNA, 20 bp, Artificial Sequence
  Description of Artificial Sequence: Synthetic oligonucleotide
  Target: ATXN2; (-) strand; PAM type: NRG; PAM sequence: CAG
tcccctaaaactcatagacc

SEQ ID NO: 23693 - DNA, 20 bp, Artificial Sequence
  Description of Artificial Sequence: Synthetic oligonucleotide
  Target: ATXN2; (-) strand; PAM type: NRG; PAM sequence: TAG
agattatcccctaaaactca

SEQ ID NO: 23694 - DNA, 20 bp, Artificial Sequence
  Description of Artificial Sequence: Synthetic oligonucleotide
  Target: ATXN2; (-) strand; PAM type: NRG; PAM sequence: AAG
tttccctttcttctagttcc

SEQ ID NO: 23695 - DNA, 20 bp, Artificial Sequence
  Description of Artificial Sequence: Synthetic oligonucleotide
  Target: ATXN2; (-) strand; PAM type: NRG; PAM sequence: TAG
aatacattttccctttcttc

SEQ ID NO: 23696 - DNA, 20 bp, Artificial Sequence
  Description of Artificial Sequence: Synthetic oligonucleotide
  Target: ATXN2; (-) strand; PAM type: NRG; PAM sequence: GAG
taggaagtaacatttgaact

SEQ ID NO: 23697 - DNA, 20 bp, Artificial Sequence
  Description of Artificial Sequence: Synthetic oligonucleotide
  Target: ATXN2; (-) strand; PAM type: NRG; PAM sequence: AAG
agcctgaagcctcttttagg

SEQ ID NO: 23698 - DNA, 20 bp, Artificial Sequence
  Description of Artificial Sequence: Synthetic oligonucleotide
  Target: ATXN2; (-) strand; PAM type: NRG; PAM sequence: AGG
agaagcctgaagcctctttt

SEQ ID NO: 23699 - DNA, 20 bp, Artificial Sequence
  Description of Artificial Sequence: Synthetic oligonucleotide
  Target: ATXN2; (-) strand; PAM type: NRG; PAM sequence: TAG
gagaagcctgaagcctcttt

SEQ ID NO: 23700 - DNA, 20 bp, Artificial Sequence
  Description of Artificial Sequence: Synthetic oligonucleotide
  Target: ATXN2; (-) strand; PAM type: NRG; PAM sequence: AAG
tagatcttcagagaagcctg

SEQ ID NO: 23701 - DNA, 20 bp, Artificial Sequence
  Description of Artificial Sequence: Synthetic oligonucleotide
  Target: ATXN2; (-) strand; PAM type: NRG; PAM sequence: AAG
atttacctagatcttcagag

SEQ ID NO: 23702 - DNA, 20 bp, Artificial Sequence
  Description of Artificial Sequence: Synthetic oligonucleotide
  Target: ATXN2; (-) strand; PAM type: NRG; PAM sequence: GAG
tttatttacctagatcttca

SEQ ID NO: 23703 - DNA, 20 bp, Artificial Sequence
  Description of Artificial Sequence: Synthetic oligonucleotide
  Target: ATXN2; (-) strand; PAM type: NRG; PAM sequence: CAG
gttttatttacctagatctt

SEQ ID NO: 23704 - DNA, 20 bp, Artificial Sequence
  Description of Artificial Sequence: Synthetic oligonucleotide
  Target: ATXN2; (-) strand; PAM type: NRG; PAM sequence: TAG
agaggacagttttatttacc

SEQ ID NO: 23705 - DNA, 20 bp, Artificial Sequence
  Description of Artificial Sequence: Synthetic oligonucleotide
  Target: ATXN2; (-) strand; PAM type: NRG; PAM sequence: CAG
agggtaagggctagagagga

SEQ ID NO: 23706 - DNA, 20 bp, Artificial Sequence
  Description of Artificial Sequence: Synthetic oligonucleotide
  Target: ATXN2; (-) strand; PAM type: NRG; PAM sequence: AGG
ataaagggtaagggctagag

SEQ ID NO: 23707 - DNA, 20 bp, Artificial Sequence
  Description of Artificial Sequence: Synthetic oligonucleotide
  Target: ATXN2; (-) strand; PAM type: NRG; PAM sequence: GAG
gataaagggtaagggctaga

SEQ ID NO: 23708 - DNA, 20 bp, Artificial Sequence
  Description of Artificial Sequence: Synthetic oligonucleotide
  Target: ATXN2; (-) strand; PAM type: NRG; PAM sequence: GAG
gggataaagggtaagggcta

SEQ ID NO: 23709 - DNA, 20 bp, Artificial Sequence
  Description of Artificial Sequence: Synthetic oligonucleotide
  Target: ATXN2; (-) strand; PAM type: NRG; PAM sequence: TAG
atgggataaagggtaagggc

SEQ ID NO: 23710 - DNA, 20 bp, Artificial Sequence
  Description of Artificial Sequence: Synthetic oligonucleotide
  Target: ATXN2; (-) strand; PAM type: NRG; PAM sequence: GGG
agtaatgggataaagggtaa

SEQ ID NO: 23711 - DNA, 20 bp, Artificial Sequence
  Description of Artificial Sequence: Synthetic oligonucleotide
  Target: ATXN2; (-) strand; PAM type: NRG; PAM sequence: AGG
cagtaatgggataaagggta

SEQ ID NO: 23712 - DNA, 20 bp, Artificial Sequence
  Description of Artificial Sequence: Synthetic oligonucleotide
  Target: ATXN2; (-) strand; PAM type: NRG; PAM sequence: AAG
acagtaatgggataaagggt

SEQ ID NO: 23713 - DNA, 20 bp, Artificial Sequence
  Description of Artificial Sequence: Synthetic oligonucleotide
  Target: ATXN2; (-) strand; PAM type: NRG; PAM sequence: GGG
gaaaacagtaatgggataaa

SEQ ID NO: 23714 - DNA, 20 bp, Artificial Sequence
  Description of Artificial Sequence: Synthetic oligonucleotide
  Target: ATXN2; (-) strand; PAM type: NRG; PAM sequence: AGG
agaaaacagtaatgggataa

SEQ ID NO: 23715 - DNA, 20 bp, Artificial Sequence
  Description of Artificial Sequence: Synthetic oligonucleotide
  Target: ATXN2; (-) strand; PAM type: NRG; PAM sequence: AAG
aagaaaacagtaatgggata

SEQ ID NO: 23716 - DNA, 20 bp, Artificial Sequence
  Description of Artificial Sequence: Synthetic oligonucleotide
  Target: ATXN2; (-) strand; PAM type: NRG; PAM sequence: GGG
ttggaaaagaaaacagtaat

SEQ ID NO: 23717 - DNA, 20 bp, Artificial Sequence
  Description of Artificial Sequence: Synthetic oligonucleotide
  Target: ATXN2; (-) strand; PAM type: NRG; PAM sequence: TGG
tttggaaaagaaaacagtaa

SEQ ID NO: 23718 - DNA, 20 bp, Artificial Sequence
  Description of Artificial Sequence: Synthetic oligonucleotide
  Target: ATXN2; (-) strand; PAM type: NRG; PAM sequence: CAG
taacattttggaaaagaaaa

SEQ ID NO: 23719 - DNA, 20 bp, Artificial Sequence
  Description of Artificial Sequence: Synthetic oligonucleotide
  Target: ATXN2; (-) strand; PAM type: NRG; PAM sequence: AAG
aaattcctaacattttggaa

SEQ ID NO: 23720 - DNA, 20 bp, Artificial Sequence
  Description of Artificial Sequence: Synthetic oligonucleotide
  Target: ATXN2; (-) strand; PAM type: NRG; PAM sequence: TGG
ccagcaaattcctaacattt

SEQ ID NO: 23721 - DNA, 20 bp, Artificial Sequence
  Description of Artificial Sequence: Synthetic oligonucleotide
  Target: ATXN2; (-) strand; PAM type: NRG; PAM sequence: CAG
atacttgtggttttgattgc

SEQ ID NO: 23722 - DNA, 20 bp, Artificial Sequence
  Description of Artificial Sequence: Synthetic oligonucleotide
  Target: ATXN2; (-) strand; PAM type: NRG; PAM sequence: TGG
tgctgttcttcatatacttg

SEQ ID NO: 23723 - DNA, 20 bp, Artificial Sequence
  Description of Artificial Sequence: Synthetic oligonucleotide
  Target: ATXN2; (-) strand; PAM type: NRG; PAM sequence: TAG
agagaaaatcatacttatgt

SEQ ID NO: 23724 - DNA, 20 bp, Artificial Sequence
  Description of Artificial Sequence: Synthetic oligonucleotide
  Target: ATXN2; (-) strand; PAM type: NRG; PAM sequence: GAG
cttgatacatttagttagga

SEQ ID NO: 23725 - DNA, 20 bp, Artificial Sequence
  Description of Artificial Sequence: Synthetic oligonucleotide
  Target: ATXN2; (-) strand; PAM type: NRG; PAM sequence: GAG
cacttgatacatttagttag

SEQ ID NO: 23726 - DNA, 20 bp, Artificial Sequence
  Description of Artificial Sequence: Synthetic oligonucleotide
  Target: ATXN2; (-) strand; PAM type: NRG; PAM sequence: AGG
atcacttgatacatttagtt

SEQ ID NO: 23727 - DNA, 20 bp, Artificial Sequence
  Description of Artificial Sequence: Synthetic oligonucleotide
  Target: ATXN2; (-) strand; PAM type: NRG; PAM sequence: TAG
aatcacttgatacatttagt

SEQ ID NO: 23728 - DNA, 20 bp, Artificial Sequence
  Description of Artificial Sequence: Synthetic oligonucleotide
  Target: ATXN2; (-) strand; PAM type: NRG; PAM sequence: TAG
ggagaatcacttgatacatt

SEQ ID NO: 23729 - DNA, 20 bp, Artificial Sequence
  Description of Artificial Sequence: Synthetic oligonucleotide
  Target: ATXN2; (-) strand; PAM type: NRG; PAM sequence: GAG
tactccagaggctgaggcag

SEQ ID NO: 23730 - DNA, 20 bp, Artificial Sequence
  Description of Artificial Sequence: Synthetic oligonucleotide
  Target: ATXN2; (-) strand; PAM type: NRG; PAM sequence: AGG
gctactccagaggctgaggc

SEQ ID NO: 23731 - DNA, 20 bp, Artificial Sequence
  Description of Artificial Sequence: Synthetic oligonucleotide
  Target: ATXN2; (-) strand; PAM type: NRG; PAM sequence: CAG
agctactccagaggctgagg

SEQ ID NO: 23732 - DNA, 20 bp, Artificial Sequence
  Description of Artificial Sequence: Synthetic oligonucleotide
  Target: ATXN2; (-) strand; PAM type: NRG; PAM sequence: AGG
cccagctactccagaggctg

SEQ ID NO: 23733 - DNA, 20 bp, Artificial Sequence
  Description of Artificial Sequence: Synthetic oligonucleotide
  Target: ATXN2; (-) strand; PAM type: NRG; PAM sequence: GAG
tcccagctactccagaggct

SEQ ID NO: 23734 - DNA, 20 bp, Artificial Sequence
  Description of Artificial Sequence: Synthetic oligonucleotide
  Target: ATXN2; (-) strand; PAM type: NRG; PAM sequence: AGG
tttaatcccagctactccag

SEQ ID NO: 23735 - DNA, 20 bp, Artificial Sequence
  Description of Artificial Sequence: Synthetic oligonucleotide
  Target: ATXN2; (-) strand; PAM type: NRG; PAM sequence: GAG
ctttaatcccagctactcca

SEQ ID NO: 23736 - DNA, 20 bp, Artificial Sequence
  Description of Artificial Sequence: Synthetic oligonucleotide
  Target: ATXN2; (-) strand; PAM type: NRG; PAM sequence: CAG
gcctttaatcccagctactc

SEQ ID NO: 23737 - DNA, 20 bp, Artificial Sequence
  Description of Artificial Sequence: Synthetic oligonucleotide
  Target: ATXN2; (-) strand; PAM type: NRG; PAM sequence: CAG
gtggcgagtgcctttaatcc

SEQ ID NO: 23738 - DNA, 20 bp, Artificial Sequence
  Description of Artificial Sequence: Synthetic oligonucleotide
  Target: ATXN2; (-) strand; PAM type: NRG; PAM sequence: GAG
aattagctggttgtggtggc

SEQ ID NO: 23739 - DNA, 20 bp, Artificial Sequence
  Description of Artificial Sequence: Synthetic oligonucleotide
  Target: ATXN2; (-) strand; PAM type: NRG; PAM sequence: TGG
aaaaaattagctggttgtgg

SEQ ID NO: 23740 - DNA, 20 bp, Artificial Sequence
  Description of Artificial Sequence: Synthetic oligonucleotide
  Target: ATXN2; (-) strand; PAM type: NRG; PAM sequence: TGG
acaaaaaaattagctggttg

SEQ ID NO: 23741 - DNA, 20 bp, Artificial Sequence
  Description of Artificial Sequence: Synthetic oligonucleotide
  Target: ATXN2; (-) strand; PAM type: NRG; PAM sequence: TGG
aaaaatacaaaaaaattagc

SEQ ID NO: 23742 - DNA, 20 bp, Artificial Sequence
  Description of Artificial Sequence: Synthetic oligonucleotide
  Target: ATXN2; (-) strand; PAM type: NRG; PAM sequence: TAG
tactaaaaatacaaaaaaat

SEQ ID NO: 23743 - DNA, 20 bp, Artificial Sequence
  Description of Artificial Sequence: Synthetic oligonucleotide
  Target: ATXN2; (-) strand; PAM type: NRG; PAM sequence: TGG
tgagaccagcctggccagca

SEQ ID NO: 23744 - DNA, 20 bp, Artificial Sequence
  Description of Artificial Sequence: Synthetic oligonucleotide
  Target: ATXN2; (-) strand; PAM type: NRG; PAM sequence: CAG
gagtttgagaccagcctggc

SEQ ID NO: 23745 - DNA, 20 bp, Artificial Sequence
  Description of Artificial Sequence: Synthetic oligonucleotide
  Target: ATXN2; (-) strand; PAM type: NRG; PAM sequence: TGG
tcaggagtttgagaccagcc

SEQ ID NO: 23746 - DNA, 20 bp, Artificial Sequence
  Description of Artificial Sequence: Synthetic oligonucleotide
  Target: ATXN2; (-) strand; PAM type: NRG; PAM sequence: CAG
tgaggtcaggagtttgagac

SEQ ID NO: 23747 - DNA, 20 bp, Artificial Sequence
  Description of Artificial Sequence: Synthetic oligonucleotide
  Target: ATXN2; (-) strand; PAM type: NRG; PAM sequence: GAG
tcacctgaggtcaggagttt

SEQ ID NO: 23748 - DNA, 20 bp, Artificial Sequence
  Description of Artificial Sequence: Synthetic oligonucleotide
  Target: ATXN2; (-) strand; PAM type: NRG; PAM sequence: GAG
ggcagatcacctgaggtcag

SEQ ID NO: 23749 - DNA, 20 bp, Artificial Sequence
  Description of Artificial Sequence: Synthetic oligonucleotide
  Target: ATXN2; (-) strand; PAM type: NRG; PAM sequence: AGG
taggcagatcacctgaggtc

SEQ ID NO: 23750 - DNA, 20 bp, Artificial Sequence
  Description of Artificial Sequence: Synthetic oligonucleotide
  Target: ATXN2; (-) strand; PAM type: NRG; PAM sequence: CAG
gtaggcagatcacctgaggt

SEQ ID NO: 23751 - DNA, 20 bp, Artificial Sequence
  Description of Artificial Sequence: Synthetic oligonucleotide
  Target: ATXN2; (-) strand; PAM type: NRG; PAM sequence: AGG
caaggtaggcagatcacctg

SEQ ID NO: 23752 - DNA, 20 bp, Artificial Sequence
  Description of Artificial Sequence: Synthetic oligonucleotide
  Target: ATXN2; (-) strand; PAM type: NRG; PAM sequence: GAG
ccaaggtaggcagatcacct

SEQ ID NO: 23753 - DNA, 20 bp, Artificial Sequence
  Description of Artificial Sequence: Synthetic oligonucleotide
  Target: ATXN2; (-) strand; PAM type: NRG; PAM sequence: CAG
ctttgggaggccaaggtagg

SEQ ID NO: 23754 - DNA, 20 bp, Artificial Sequence
  Description of Artificial Sequence: Synthetic oligonucleotide
  Target: ATXN2; (-) strand; PAM type: NRG; PAM sequence: AGG
gcactttgggaggccaaggt

SEQ ID NO: 23755 - DNA, 20 bp, Artificial Sequence
  Description of Artificial Sequence: Synthetic oligonucleotide
  Target: ATXN2; (-) strand; PAM type: NRG; PAM sequence: TAG
agcactttgggaggccaagg

SEQ ID NO: 23756 - DNA, 20 bp, Artificial Sequence
  Description of Artificial Sequence: Synthetic oligonucleotide
  Target: ATXN2; (-) strand; PAM type: NRG; PAM sequence: AGG
cccagcactttgggaggcca

SEQ ID NO: 23757 - DNA, 20 bp, Artificial Sequence
  Description of Artificial Sequence: Synthetic oligonucleotide
  Target: ATXN2; (-) strand; PAM type: NRG; PAM sequence: AAG
tcccagcactttgggaggcc

SEQ ID NO: 23758 - DNA, 20 bp, Artificial Sequence
  Description of Artificial Sequence: Synthetic oligonucleotide
  Target: ATXN2; (-) strand; PAM type: NRG; PAM sequence: AGG
tgtaatcccagcactttggg

SEQ ID NO: 23759 - DNA, 20 bp, Artificial Sequence
  Description of Artificial Sequence: Synthetic oligonucleotide
  Target: ATXN2; (-) strand; PAM type: NRG; PAM sequence: GAG
ctgtaatcccagcactttgg

SEQ ID NO: 23760 - DNA, 20 bp, Artificial Sequence
  Description of Artificial Sequence: Synthetic oligonucleotide
  Target: ATXN2; (-) strand; PAM type: NRG; PAM sequence: GGG
gcctgtaatcccagcacttt

SEQ ID NO: 23761 - DNA, 20 bp, Artificial Sequence
  Description of Artificial Sequence: Synthetic oligonucleotide
  Target: ATXN2; (-) strand; PAM type: NRG; PAM sequence: TGG
tgcctgtaatcccagcactt

SEQ ID NO: 23762 - DNA, 20 bp, Artificial Sequence
  Description of Artificial Sequence: Synthetic oligonucleotide
  Target: ATXN2; (-) strand; PAM type: NRG; PAM sequence: CAG
gtggctcatgcctgtaatcc

SEQ ID NO: 23763 - DNA, 20 bp, Artificial Sequence
  Description of Artificial Sequence: Synthetic oligonucleotide
  Target: ATXN2; (-) strand; PAM type: NRG; PAM sequence: TGG
atgtgtagggctgggcatgg

SEQ ID NO: 23764 - DNA, 20 bp, Artificial Sequence
  Description of Artificial Sequence: Synthetic oligonucleotide
  Target: ATXN2; (-) strand; PAM type: NRG; PAM sequence: TGG
agaatgtgtagggctgggca

SEQ ID NO: 23765 - DNA, 20 bp, Artificial Sequence
  Description of Artificial Sequence: Synthetic oligonucleotide
  Target: ATXN2; (-) strand; PAM type: NRG; PAM sequence: GGG
tataaagaatgtgtagggct

SEQ ID NO: 23766 - DNA, 20 bp, Artificial Sequence
  Description of Artificial Sequence: Synthetic oligonucleotide
  Target: ATXN2; (-) strand; PAM type: NRG; PAM sequence: TGG
ctataaagaatgtgtagggc

SEQ ID NO: 23767 - DNA, 20 bp, Artificial Sequence
  Description of Artificial Sequence: Synthetic oligonucleotide
  Target: ATXN2; (-) strand; PAM type: NRG; PAM sequence: GGG
gttgctataaagaatgtgta

SEQ ID NO: 23768 - DNA, 20 bp, Artificial Sequence
  Description of Artificial Sequence: Synthetic oligonucleotide
  Target: ATXN2; (-) strand; PAM type: NRG; PAM sequence: AGG
tgttgctataaagaatgtgt

SEQ ID NO: 23769 - DNA, 20 bp, Artificial Sequence
  Description of Artificial Sequence: Synthetic oligonucleotide
  Target: ATXN2; (-) strand; PAM type: NRG; PAM sequence: TAG
atgttgctataaagaatgtg

SEQ ID NO: 23770 - DNA, 20 bp, Artificial Sequence
  Description of Artificial Sequence: Synthetic oligonucleotide
  Target: ATXN2; (-) strand; PAM type: NRG; PAM sequence: AAG
tggaccttgatgttgctata

SEQ ID NO: 23771 - DNA, 20 bp, Artificial Sequence
  Description of Artificial Sequence: Synthetic oligonucleotide
  Target: ATXN2; (-) strand; PAM type: NRG; PAM sequence: TGG
tttccttaattactgcacag

SEQ ID NO: 23772 - DNA, 20 bp, Artificial Sequence
  Description of Artificial Sequence: Synthetic oligonucleotide
  Target: ATXN2; (-) strand; PAM type: NRG; PAM sequence: CAG
aagtttccttaattactgca

SEQ ID NO: 23773 - DNA, 20 bp, Artificial Sequence
  Description of Artificial Sequence: Synthetic oligonucleotide
  Target: ATXN2; (-) strand; PAM type: NRG; PAM sequence: AAG
ttttgactaacttgggtctc

SEQ ID NO: 23774 - DNA, 20 bp, Artificial Sequence
  Description of Artificial Sequence: Synthetic oligonucleotide
  Target: ATXN2; (-) strand; PAM type: NRG; PAM sequence: GGG
cttccccttttgactaactt

SEQ ID NO: 23775 - DNA, 20 bp, Artificial Sequence
  Description of Artificial Sequence: Synthetic oligonucleotide
  Target: ATXN2; (-) strand; PAM type: NRG; PAM sequence: TGG
tcttccccttttgactaact

SEQ ID NO: 23776 - DNA, 20 bp, Artificial Sequence
  Description of Artificial Sequence: Synthetic oligonucleotide
  Target: ATXN2; (-) strand; PAM type: NRG; PAM sequence: GGG
tatatacttggaagtcatat

SEQ ID NO: 23777 - DNA, 20 bp, Artificial Sequence
  Description of Artificial Sequence: Synthetic oligonucleotide
  Target: ATXN2; (-) strand; PAM type: NRG; PAM sequence: TGG
atatatacttggaagtcata

SEQ ID NO: 23778 - DNA, 20 bp, Artificial Sequence
  Description of Artificial Sequence: Synthetic oligonucleotide
  Target: ATXN2; (-) strand; PAM type: NRG; PAM sequence: AAG
cctattagatatatacttgg

SEQ ID NO: 23779 - DNA, 20 bp, Artificial Sequence
  Description of Artificial Sequence: Synthetic oligonucleotide
  Target: ATXN2; (-) strand; PAM type: NRG; PAM sequence: TGG
aaacctattagatatatact

SEQ ID NO: 23780 - DNA, 20 bp, Artificial Sequence
  Description of Artificial Sequence: Synthetic oligonucleotide
  Target: ATXN2; (-) strand; PAM type: NRG; PAM sequence: TAG
taatggtatatgaaacctat

SEQ ID NO: 23781 - DNA, 20 bp, Artificial Sequence
  Description of Artificial Sequence: Synthetic oligonucleotide
  Target: ATXN2; (-) strand; PAM type: NRG; PAM sequence: TGG
ctctgcagttaggtttataa

SEQ ID NO: 23782 - DNA, 20 bp, Artificial Sequence
  Description of Artificial Sequence: Synthetic oligonucleotide
  Target: ATXN2; (-) strand; PAM type: NRG; PAM sequence: AGG
tgaatctgagctctgcagtt

SEQ ID NO: 23783 - DNA, 20 bp, Artificial Sequence
  Description of Artificial Sequence: Synthetic oligonucleotide
  Target: ATXN2; (-) strand; PAM type: NRG; PAM sequence: TAG
ttgaatctgagctctgcagt

SEQ ID NO: 23784 - DNA, 20 bp, Artificial Sequence
  Description of Artificial Sequence: Synthetic oligonucleotide
  Target: ATXN2; (-) strand; PAM type: NRG; PAM sequence: CAG
acctttgaatctgagctctg

SEQ ID NO: 23785 - DNA, 20 bp, Artificial Sequence
  Description of Artificial Sequence: Synthetic oligonucleotide
  Target: ATXN2; (-) strand; PAM type: NRG; PAM sequence: GAG
ttctctaaacctttgaatct

SEQ ID NO: 23786 - DNA, 20 bp, Artificial Sequence
  Description of Artificial Sequence: Synthetic oligonucleotide
  Target: ATXN2; (-) strand; PAM type: NRG; PAM sequence: TAG
aaatggcagttgttgaataa

SEQ ID NO: 23787 - DNA, 20 bp, Artificial Sequence
  Description of Artificial Sequence: Synthetic oligonucleotide
  Target: ATXN2; (-) strand; PAM type: NRG; PAM sequence: CAG
tttactaattggaaaaatgg

SEQ ID NO: 23788 - DNA, 20 bp, Artificial Sequence
  Description of Artificial Sequence: Synthetic oligonucleotide
  Target: ATXN2; (-) strand; PAM type: NRG; PAM sequence: TGG
ctttttactaattggaaaaa

SEQ ID NO: 23789 - DNA, 20 bp, Artificial Sequence
  Description of Artificial Sequence: Synthetic oligonucleotide
  Target: ATXN2; (-) strand; PAM type: NRG; PAM sequence: TGG
gattttctctttttactaat

SEQ ID NO: 23790 - DNA, 20 bp, Artificial Sequence
  Description of Artificial Sequence: Synthetic oligonucleotide
  Target: ATXN2; (-) strand; PAM type: NRG; PAM sequence: TAG
atacactcagaatagcatta

SEQ ID NO: 23791 - DNA, 20 bp, Artificial Sequence
  Description of Artificial Sequence: Synthetic oligonucleotide
  Target: ATXN2; (-) strand; PAM type: NRG; PAM sequence: TAG
ttttggagatacactcagaa

SEQ ID NO: 23792 - DNA, 20 bp, Artificial Sequence
  Description of Artificial Sequence: Synthetic oligonucleotide
  Target: ATXN2; (-) strand; PAM type: NRG; PAM sequence: CAG
catagttttggagatacact

SEQ ID NO: 23793 - DNA, 20 bp, Artificial Sequence
  Description of Artificial Sequence: Synthetic oligonucleotide
  Target: ATXN2; (-) strand; PAM type: NRG; PAM sequence: GAG
agagtataagcatagttttg

SEQ ID NO: 23794 - DNA, 20 bp, Artificial Sequence
  Description of Artificial Sequence: Synthetic oligonucleotide
  Target: ATXN2; (-) strand; PAM type: NRG; PAM sequence: TGG
agagagtataagcatagttt

SEQ ID NO: 23795 - DNA, 20 bp, Artificial Sequence
  Description of Artificial Sequence: Synthetic oligonucleotide
  Target: ATXN2; (-) strand; PAM type: NRG; PAM sequence: TAG
gaagtgagagagtataagca

SEQ ID NO: 23796 - DNA, 20 bp, Artificial Sequence
  Description of Artificial Sequence: Synthetic oligonucleotide
  Target: ATXN2; (-) strand; PAM type: NRG; PAM sequence: AAG
gattagaagtgagagagtat

SEQ ID NO: 23797 - DNA, 20 bp, Artificial Sequence
  Description of Artificial Sequence: Synthetic oligonucleotide
  Target: ATXN2; (-) strand; PAM type: NRG; PAM sequence: GAG
taacatgattagaagtgaga

SEQ ID NO: 23798 - DNA, 20 bp, Artificial Sequence
  Description of Artificial Sequence: Synthetic oligonucleotide
  Target: ATXN2; (-) strand; PAM type: NRG; PAM sequence: GAG
aataacatgattagaagtga

SEQ ID NO: 23799 - DNA, 20 bp, Artificial Sequence
  Description of Artificial Sequence: Synthetic oligonucleotide
  Target: ATXN2; (-) strand; PAM type: NRG; PAM sequence: GAG
agaataacatgattagaagt

SEQ ID NO: 23800 - DNA, 20 bp, Artificial Sequence
  Description of Artificial Sequence: Synthetic oligonucleotide
  Target: ATXN2; (-) strand; PAM type: NRG; PAM sequence: AAG
tttgagaataacatgattag

SEQ ID NO: 23801 - DNA, 20 bp, Artificial Sequence
  Description of Artificial Sequence: Synthetic oligonucleotide
  Target: ATXN2; (-) strand; PAM type: NRG; PAM sequence: TAG
aattttgagaataacatgat

SEQ ID NO: 23802 - DNA, 20 bp, Artificial Sequence
  Description of Artificial Sequence: Synthetic oligonucleotide
  Target: ATXN2; (-) strand; PAM type: NRG; PAM sequence: GAG
atggtctggaaataaatttt

SEQ ID NO: 23803 - DNA, 20 bp, Artificial Sequence
  Description of Artificial Sequence: Synthetic oligonucleotide
  Target: ATXN2; (-) strand; PAM type: NRG; PAM sequence: TGG
ttgacattacttagatggtc

SEQ ID NO: 23804 - DNA, 20 bp, Artificial Sequence
  Description of Artificial Sequence: Synthetic oligonucleotide
  Target: ATXN2; (-) strand; PAM type: NRG; PAM sequence: TGG
atcttttgacattacttaga

SEQ ID NO: 23805 - DNA, 20 bp, Artificial Sequence
  Description of Artificial Sequence: Synthetic oligonucleotide
  Target: ATXN2; (-) strand; PAM type: NRG; PAM sequence: TAG
gttaatcttttgacattact

SEQ ID NO: 23806 - DNA, 20 bp, Artificial Sequence
  Description of Artificial Sequence: Synthetic oligonucleotide
  Target: ATXN2; (-) strand; PAM type: NRG; PAM sequence: CAG
aaaaaaaaaaaaatctgctt

SEQ ID NO: 23807 - DNA, 20 bp, Artificial Sequence
  Description of Artificial Sequence: Synthetic oligonucleotide
  Target: ATXN2; (-) strand; PAM type: NRG; PAM sequence: GAG
tccagcctgggctatagagt

SEQ ID NO: 23808 - DNA, 20 bp, Artificial Sequence
  Description of Artificial Sequence: Synthetic oligonucleotide
  Target: ATXN2; (-) strand; PAM type: NRG; PAM sequence: GAG
gcactccagcctgggctata

SEQ ID NO: 23809 - DNA, 20 bp, Artificial Sequence
  Description of Artificial Sequence: Synthetic oligonucleotide
  Target: ATXN2; (-) strand; PAM type: NRG; PAM sequence: TAG
ctgcactccagcctgggcta

SEQ ID NO: 23810 - DNA, 20 bp, Artificial Sequence
  Description of Artificial Sequence: Synthetic oligonucleotide
  Target: ATXN2; (-) strand; PAM type: NRG; PAM sequence: GGG
gcgccactgcactccagcct

SEQ ID NO: 23811 - DNA, 20 bp, Artificial Sequence
  Description of Artificial Sequence: Synthetic oligonucleotide
  Target: ATXN2; (-) strand; PAM type: NRG; PAM sequence: TGG
cgcgccactgcactccagcc

SEQ ID NO: 23812 - DNA, 20 bp, Artificial Sequence
  Description of Artificial Sequence: Synthetic oligonucleotide
  Target: ATXN2; (-) strand; PAM type: NRG; PAM sequence: CAG
gagatcgcgccactgcactc

SEQ ID NO: 23813 - DNA, 20 bp, Artificial Sequence
  Description of Artificial Sequence: Synthetic oligonucleotide
  Target: ATXN2; (-) strand; PAM type: NRG; PAM sequence: GAG
ggtgtaggttgcggtgagcg

SEQ ID NO: 23814 - DNA, 20 bp, Artificial Sequence
  Description of Artificial Sequence: Synthetic oligonucleotide
  Target: ATXN2; (-) strand; PAM type: NRG; PAM sequence: CGG
gaggtgtaggttgcggtgag

SEQ ID NO: 23815 - DNA, 20 bp, Artificial Sequence
  Description of Artificial Sequence: Synthetic oligonucleotide
  Target: ATXN2; (-) strand; PAM type: NRG; PAM sequence: GAG
cgggaggtgtaggttgcggt

SEQ ID NO: 23816 - DNA, 20 bp, Artificial Sequence
  Description of Artificial Sequence: Synthetic oligonucleotide
  Target: ATXN2; (-) strand; PAM type: NRG; PAM sequence: CGG
gacccgggaggtgtaggttg

SEQ ID NO: 23817 - DNA, 20 bp, Artificial Sequence
  Description of Artificial Sequence: Synthetic oligonucleotide
  Target: ATXN2; (-) strand; PAM type: NRG; PAM sequence: AGG
aaccaggacccgggaggtgt

SEQ ID NO: 23818 - DNA, 20 bp, Artificial Sequence
  Description of Artificial Sequence: Synthetic oligonucleotide
  Target: ATXN2; (-) strand; PAM type: NRG; PAM sequence: TAG
gaaccaggacccgggaggtg

SEQ ID NO: 23819 - DNA, 20 bp, Artificial Sequence
  Description of Artificial Sequence: Synthetic oligonucleotide
  Target: ATXN2; (-) strand; PAM type: NRG; PAM sequence: AGG
tgcttgaaccaggacccggg

SEQ ID NO: 23820 - DNA, 20 bp, Artificial Sequence
  Description of Artificial Sequence: Synthetic oligonucleotide
  Target: ATXN2; (-) strand; PAM type: NRG; PAM sequence: GAG
ttgcttgaaccaggacccgg

SEQ ID NO: 23821 - DNA, 20 bp, Artificial Sequence
  Description of Artificial Sequence: Synthetic oligonucleotide
  Target: ATXN2; (-) strand; PAM type: NRG; PAM sequence: GGG
aattgcttgaaccaggaccc

SEQ ID NO: 23822 - DNA, 20 bp, Artificial Sequence
  Description of Artificial Sequence: Synthetic oligonucleotide
  Target: ATXN2; (-) strand; PAM type: NRG; PAM sequence: CGG
gaattgcttgaaccaggacc

SEQ ID NO: 23823 - DNA, 20 bp, Artificial Sequence
  Description of Artificial Sequence: Synthetic oligonucleotide
  Target: ATXN2; (-) strand; PAM type: NRG; PAM sequence: AGG
gcaggagaattgcttgaacc

SEQ ID NO: 23824 - DNA, 20 bp, Artificial Sequence
  Description of Artificial Sequence: Synthetic oligonucleotide
  Target: ATXN2; (-) strand; PAM type: NRG; PAM sequence: CAG
ggcaggagaattgcttgaac

SEQ ID NO: 23825 - DNA, 20 bp, Artificial Sequence
  Description of Artificial Sequence: Synthetic oligonucleotide
  Target: ATXN2; (-) strand; PAM type: NRG; PAM sequence: GAG
tgctcaggaggctgaggcag

SEQ ID NO: 23826 - DNA, 20 bp, Artificial Sequence
  Description of Artificial Sequence: Synthetic oligonucleotide
  Target: ATXN2; (-) strand; PAM type: NRG; PAM sequence: AGG
gctgctcaggaggctgaggc

SEQ ID NO: 23827 - DNA, 20 bp, Artificial Sequence
  Description of Artificial Sequence: Synthetic oligonucleotide
  Target: ATXN2; (-) strand; PAM type: NRG; PAM sequence: CAG
agctgctcaggaggctgagg

SEQ ID NO: 23828 - DNA, 20 bp, Artificial Sequence
  Description of Artificial Sequence: Synthetic oligonucleotide
  Target: ATXN2; (-) strand; PAM type: NRG; PAM sequence: AGG
cccagctgctcaggaggctg

SEQ ID NO: 23829 - DNA, 20 bp, Artificial Sequence
  Description of Artificial Sequence: Synthetic oligonucleotide
  Target: ATXN2; (-) strand; PAM type: NRG; PAM sequence: GAG
tcccagctgctcaggaggct

SEQ ID NO: 23830 - DNA, 20 bp, Artificial Sequence
  Description of Artificial Sequence: Synthetic oligonucleotide
  Target: ATXN2; (-) strand; PAM type: NRG; PAM sequence: AGG
tgtaatcccagctgctcagg

SEQ ID NO: 23831 - DNA, 20 bp, Artificial Sequence
  Description of Artificial Sequence: Synthetic oligonucleotide
  Target: ATXN2; (-) strand; PAM type: NRG; PAM sequence: GAG
ttgtaatcccagctgctcag

SEQ ID NO: 23832 - DNA, 20 bp, Artificial Sequence
  Description of Artificial Sequence: Synthetic oligonucleotide
  Target: ATXN2; (-) strand; PAM type: NRG; PAM sequence: AGG
tcttgtaatcccagctgctc

SEQ ID NO: 23833 - DNA, 20 bp, Artificial Sequence
  Description of Artificial Sequence: Synthetic oligonucleotide
  Target: ATXN2; (-) strand; PAM type: NRG; PAM sequence: CAG
ttcttgtaatcccagctgct

SEQ ID NO: 23834 - DNA, 20 bp, Artificial Sequence
  Description of Artificial Sequence: Synthetic oligonucleotide
  Target: ATXN2; (-) strand; PAM type: NRG; PAM sequence: CAG
gtggcgcgttcttgtaatcc

SEQ ID NO: 23835 - DNA, 20 bp, Artificial Sequence
  Description of Artificial Sequence: Synthetic oligonucleotide
  Target: ATXN2; (-) strand; PAM type: NRG; PAM sequence: TGG
caaaaattagctgggcattg

SEQ ID NO: 23836 - DNA, 20 bp, Artificial Sequence
  Description of Artificial Sequence: Synthetic oligonucleotide
  Target: ATXN2; (-) strand; PAM type: NRG; PAM sequence: GGG
taaaaatacaaaaattagct

SEQ ID NO: 23837 - DNA, 20 bp, Artificial Sequence
  Description of Artificial Sequence: Synthetic oligonucleotide
  Target: ATXN2; (-) strand; PAM type: NRG; PAM sequence: TGG
ctaaaaatacaaaaattagc

SEQ ID NO: 23838 - DNA, 20 bp, Artificial Sequence
  Description of Artificial Sequence: Synthetic oligonucleotide
  Target: ATXN2; (-) strand; PAM type: NRG; PAM sequence: TAG
tctactaaaaatacaaaaat

SEQ ID NO: 23839 - DNA, 20 bp, Artificial Sequence
  Description of Artificial Sequence: Synthetic oligonucleotide
  Target: ATXN2; (-) strand; PAM type: NRG; PAM sequence: TGG
caacaccagcctggccaaca

SEQ ID NO: 23840 - DNA, 20 bp, Artificial Sequence
  Description of Artificial Sequence: Synthetic oligonucleotide
  Target: ATXN2; (-) strand; PAM type: NRG; PAM sequence: TGG
tcaggagttcaacaccagcc

SEQ ID NO: 23841 - DNA, 20 bp, Artificial Sequence
  Description of Artificial Sequence: Synthetic oligonucleotide
  Target: ATXN2; (-) strand; PAM type: NRG; PAM sequence: CAG
cgaggtcaggagttcaacac

SEQ ID NO: 23842 - DNA, 20 bp, Artificial Sequence
  Description of Artificial Sequence: Synthetic oligonucleotide
  Target: ATXN2; (-) strand; PAM type: NRG; PAM sequence: GAG
cgggtggatcacgaggtcag

SEQ ID NO: 23843 - DNA, 20 bp, Artificial Sequence
  Description of Artificial Sequence: Synthetic oligonucleotide
  Target: ATXN2; (-) strand; PAM type: NRG; PAM sequence: AGG
ggcgggtggatcacgaggtc

SEQ ID NO: 23844 - DNA, 20 bp, Artificial Sequence
  Description of Artificial Sequence: Synthetic oligonucleotide
  Target: ATXN2; (-) strand; PAM type: NRG; PAM sequence: CAG
aggcgggtggatcacgaggt

SEQ ID NO: 23845 - DNA, 20 bp, Artificial Sequence
  Description of Artificial Sequence: Synthetic oligonucleotide
  Target: ATXN2; (-) strand; PAM type: NRG; PAM sequence: AGG
gctgaggcgggtggatcacg

SEQ ID NO: 23846 - DNA, 20 bp, Artificial Sequence
  Description of Artificial Sequence: Synthetic oligonucleotide
  Target: ATXN2; (-) strand; PAM type: NRG; PAM sequence: GAG
ggctgaggcgggtggatcac

SEQ ID NO: 23847 - DNA, 20 bp, Artificial Sequence
  Description of Artificial Sequence: Synthetic oligonucleotide
  Target: ATXN2; (-) strand; PAM type: NRG; PAM sequence: TGG
cttggggaggctgaggcggg

SEQ ID NO: 23848 - DNA, 20 bp, Artificial Sequence
  Description of Artificial Sequence: Synthetic oligonucleotide
  Target: ATXN2; (-) strand; PAM type: NRG; PAM sequence: GGG
gcacttggggaggctgaggc

SEQ ID NO: 23849 - DNA, 20 bp, Artificial Sequence
  Description of Artificial Sequence: Synthetic oligonucleotide
  Target: ATXN2; (-) strand; PAM type: NRG; PAM sequence: CGG
agcacttggggaggctgagg

SEQ ID NO: 23850 - DNA, 20 bp, Artificial Sequence
  Description of Artificial Sequence: Synthetic oligonucleotide
  Target: ATXN2; (-) strand; PAM type: NRG; PAM sequence: AGG
cccagcacttggggaggctg

SEQ ID NO: 23851 - DNA, 20 bp, Artificial Sequence
  Description of Artificial Sequence: Synthetic oligonucleotide
  Target: ATXN2; (-) strand; PAM type: NRG; PAM sequence: GAG
tcccagcacttggggaggct

SEQ ID NO: 23852 - DNA, 20 bp, Artificial Sequence
  Description of Artificial Sequence: Synthetic oligonucleotide
  Target: ATXN2; (-) strand; PAM type: NRG; PAM sequence: AGG
tgtaatcccagcacttgggg

SEQ ID NO: 23853 - DNA, 20 bp, Artificial Sequence
  Description of Artificial Sequence: Synthetic oligonucleotide
  Target: ATXN2; (-) strand; PAM type: NRG; PAM sequence: GAG
ctgtaatcccagcacttggg

SEQ ID NO: 23854 - DNA, 20 bp, Artificial Sequence
  Description of Artificial Sequence: Synthetic oligonucleotide
  Target: ATXN2; (-) strand; PAM type: NRG; PAM sequence: GGG
ggctgtaatcccagcacttg

SEQ ID NO: 23855 - DNA, 20 bp, Artificial Sequence
  Description of Artificial Sequence: Synthetic oligonucleotide
  Target: ATXN2; (-) strand; PAM type: NRG; PAM sequence: GGG
cggctgtaatcccagcactt

SEQ ID NO: 23856 - DNA, 20 bp, Artificial Sequence
  Description of Artificial Sequence: Synthetic oligonucleotide
  Target: ATXN2; (-) strand; PAM type: NRG; PAM sequence: TGG
acggctgtaatcccagcact

SEQ ID NO: 23857 - DNA, 20 bp, Artificial Sequence
  Description of Artificial Sequence: Synthetic oligonucleotide
  Target: ATXN2; (-) strand; PAM type: NRG; PAM sequence: CAG
gtggctcacggctgtaatcc

SEQ ID NO: 23858 - DNA, 20 bp, Artificial Sequence
  Description of Artificial Sequence: Synthetic oligonucleotide
  Target: ATXN2; (-) strand; PAM type: NRG; PAM sequence: CGG
cggtcaggcgcagtggctca

SEQ ID NO: 23859 - DNA, 20 bp, Artificial Sequence
  Description of Artificial Sequence: Synthetic oligonucleotide
  Target: ATXN2; (-) strand; PAM type: NRG; PAM sequence: TGG
cttcagccggtcaggcgcag

SEQ ID NO: 23860 - DNA, 20 bp, Artificial Sequence
  Description of Artificial Sequence: Synthetic oligonucleotide
  Target: ATXN2; (-) strand; PAM type: NRG; PAM sequence: CAG
cttcttcagccggtcaggcg

SEQ ID NO: 23861 - DNA, 20 bp, Artificial Sequence
  Description of Artificial Sequence: Synthetic oligonucleotide
  Target: ATXN2; (-) strand; PAM type: NRG; PAM sequence: AGG
aaaatcttcttcagccggtc

SEQ ID NO: 23862 - DNA, 20 bp, Artificial Sequence
  Description of Artificial Sequence: Synthetic oligonucleotide
  Target: ATXN2; (-) strand; PAM type: NRG; PAM sequence: CAG
aaaaatcttcttcagccggt

SEQ ID NO: 23863 - DNA, 20 bp, Artificial Sequence
  Description of Artificial Sequence: Synthetic oligonucleotide
  Target: ATXN2; (-) strand; PAM type: NRG; PAM sequence: CGG
ttttaaaaatcttcttcagc

SEQ ID NO: 23864 - DNA, 20 bp, Artificial Sequence
  Description of Artificial Sequence: Synthetic oligonucleotide
  Target: ATXN2; (-) strand; PAM type: NRG; PAM sequence: CAG
aaaattttaaaaatcttctt

SEQ ID NO: 23865 - DNA, 20 bp, Artificial Sequence
  Description of Artificial Sequence: Synthetic oligonucleotide
  Target: ATXN2; (-) strand; PAM type: NRG; PAM sequence: AAG
tcaattatcttaagactacc

SEQ ID NO: 23866 - DNA, 20 bp, Artificial Sequence
  Description of Artificial Sequence: Synthetic oligonucleotide
  Target: ATXN2; (-) strand; PAM type: NRG; PAM sequence: AAG
ccttggtcttcaattatctt

SEQ ID NO: 23867 - DNA, 20 bp, Artificial Sequence
  Description of Artificial Sequence: Synthetic oligonucleotide
  Target: ATXN2; (-) strand; PAM type: NRG; PAM sequence: TGG
gtactttttattttcttcct

SEQ ID NO: 23868 - DNA, 20 bp, Artificial Sequence
  Description of Artificial Sequence: Synthetic oligonucleotide
  Target: ATXN2; (-) strand; PAM type: NRG; PAM sequence: CAG
agttgctatacatttctgct

SEQ ID NO: 23869 - DNA, 20 bp, Artificial Sequence
  Description of Artificial Sequence: Synthetic oligonucleotide
  Target: ATXN2; (-) strand; PAM type: NRG; PAM sequence: TAG
agctgtgttaaatctgtttt

SEQ ID NO: 23870 - DNA, 20 bp, Artificial Sequence
  Description of Artificial Sequence: Synthetic oligonucleotide
  Target: ATXN2; (-) strand; PAM type: NRG; PAM sequence: CAG
aaggaaacaaaaacaaaact

SEQ ID NO: 23871 - DNA, 20 bp, Artificial Sequence
  Description of Artificial Sequence: Synthetic oligonucleotide
  Target: ATXN2; (-) strand; PAM type: NRG; PAM sequence: AGG
aaacaagatcttcaagctta

SEQ ID NO: 23872 - DNA, 20 bp, Artificial Sequence
  Description of Artificial Sequence: Synthetic oligonucleotide
  Target: ATXN2; (-) strand; PAM type: NRG; PAM sequence: AAG
gaaacaagatcttcaagctt

SEQ ID NO: 23873 - DNA, 20 bp, Artificial Sequence
  Description of Artificial Sequence: Synthetic oligonucleotide
  Target: ATXN2; (-) strand; PAM type: NRG; PAM sequence: AAG
aaaaaagaaacaagatcttc

SEQ ID NO: 23874 - DNA, 20 bp, Artificial Sequence
  Description of Artificial Sequence: Synthetic oligonucleotide
  Target: ATXN2; (-) strand; PAM type: NRG; PAM sequence: AAG
aaaaaaaagaaaaaagaaac

SEQ ID NO: 23875 - DNA, 20 bp, Artificial Sequence
  Description of Artificial Sequence: Synthetic oligonucleotide
  Target: ATXN2; (-) strand; PAM type: NRG; PAM sequence: AAG
ctatctcaaaaaaaagaaaa

SEQ ID NO: 23876 - DNA, 20 bp, Artificial Sequence
  Description of Artificial Sequence: Synthetic oligonucleotide
  Target: ATXN2; (-) strand; PAM type: NRG; PAM sequence: AAG
cgaaactctatctcaaaaaa

SEQ ID NO: 23877 - DNA, 20 bp, Artificial Sequence
  Description of Artificial Sequence: Synthetic oligonucleotide
  Target: ATXN2; (-) strand; PAM type: NRG; PAM sequence: GAG
cactccagtctgggtgacaa

SEQ ID NO: 23878 - DNA, 20 bp, Artificial Sequence
  Description of Artificial Sequence: Synthetic oligonucleotide
  Target: ATXN2; (-) strand; PAM type: NRG; PAM sequence: AAG
tgcactccagtctgggtgac

SEQ ID NO: 23879 - DNA, 20 bp, Artificial Sequence
  Description of Artificial Sequence: Synthetic oligonucleotide
  Target: ATXN2; (-) strand; PAM type: NRG; PAM sequence: GGG
acaccattgcactccagtct

SEQ ID NO: 23880 - DNA, 20 bp, Artificial Sequence
  Description of Artificial Sequence: Synthetic oligonucleotide
  Target: ATXN2; (-) strand; PAM type: NRG; PAM sequence: TGG
cacaccattgcactccagtc

SEQ ID NO: 23881 - DNA, 20 bp, Artificial Sequence
  Description of Artificial Sequence: Synthetic oligonucleotide
  Target: ATXN2; (-) strand; PAM type: NRG; PAM sequence: CAG
aagatcacaccattgcactc

SEQ ID NO: 23882 - DNA, 20 bp, Artificial Sequence
  Description of Artificial Sequence: Synthetic oligonucleotide
  Target: ATXN2; (-) strand; PAM type: NRG; PAM sequence: AAG
ggtgaaggttgcagtgagcc

SEQ ID NO: 23883 - DNA, 20 bp, Artificial Sequence
  Description of Artificial Sequence: Synthetic oligonucleotide
  Target: ATXN2; (-) strand; PAM type: NRG; PAM sequence: GAG
caggaggtgaaggttgcagt

SEQ ID NO: 23884 - DNA, 20 bp, Artificial Sequence
  Description of Artificial Sequence: Synthetic oligonucleotide
  Target: ATXN2; (-) strand; PAM type: NRG; PAM sequence: CAG
aacccaggaggtgaaggttg

SEQ ID NO: 23885 - DNA, 20 bp, Artificial Sequence
  Description of Artificial Sequence: Synthetic oligonucleotide
  Target: ATXN2; (-) strand; PAM type: NRG; PAM sequence: AGG
catttgaacccaggaggtga

SEQ ID NO: 23886 - DNA, 20 bp, Artificial Sequence
  Description of Artificial Sequence: Synthetic oligonucleotide
  Target: ATXN2; (-) strand; PAM type: NRG; PAM sequence: AAG
tcatttgaacccaggaggtg

SEQ ID NO: 23887 - DNA, 20 bp, Artificial Sequence
  Description of Artificial Sequence: Synthetic oligonucleotide
  Target: ATXN2; (-) strand; PAM type: NRG; PAM sequence: AGG
gagaatcatttgaacccagg

SEQ ID NO: 23888 - DNA, 20 bp, Artificial Sequence
  Description of Artificial Sequence: Synthetic oligonucleotide
  Target: ATXN2; (-) strand; PAM type: NRG; PAM sequence: GAG
ggagaatcatttgaacccag

SEQ ID NO: 23889 - DNA, 20 bp, Artificial Sequence
  Description of Artificial Sequence: Synthetic oligonucleotide
  Target: ATXN2; (-) strand; PAM type: NRG; PAM sequence: AGG
caggagaatcatttgaaccc

SEQ ID NO: 23890 - DNA, 20 bp, Artificial Sequence
  Description of Artificial Sequence: Synthetic oligonucleotide
  Target: ATXN2; (-) strand; PAM type: NRG; PAM sequence: CAG
gcaggagaatcatttgaacc

SEQ ID NO: 23891 - DNA, 20 bp, Artificial Sequence
  Description of Artificial Sequence: Synthetic oligonucleotide
  Target: ATXN2; (-) strand; PAM type: NRG; PAM sequence: GAG
tatttgagaggctgaggcag

SEQ ID NO: 23892 - DNA, 20 bp, Artificial Sequence
  Description of Artificial Sequence: Synthetic oligonucleotide
  Target: ATXN2; (-) strand; PAM type: NRG; PAM sequence: AGG
gctatttgagaggctgaggc

SEQ ID NO: 23893 - DNA, 20 bp, Artificial Sequence
  Description of Artificial Sequence: Synthetic oligonucleotide
  Target: ATXN2; (-) strand; PAM type: NRG; PAM sequence: CAG
ggctatttgagaggctgagg

SEQ ID NO: 23894 - DNA, 20 bp, Artificial Sequence
  Description of Artificial Sequence: Synthetic oligonucleotide
  Target: ATXN2; (-) strand; PAM type: NRG; PAM sequence: AGG
ggtggctatttgagaggctg

SEQ ID NO: 23895 - DNA, 20 bp, Artificial Sequence
  Description of Artificial Sequence: Synthetic oligonucleotide
  Target: ATXN2; (-) strand; PAM type: NRG; PAM sequence: GAG
tggtggctatttgagaggct

SEQ ID NO: 23896 - DNA, 20 bp, Artificial Sequence
  Description of Artificial Sequence: Synthetic oligonucleotide
  Target: ATXN2; (-) strand; PAM type: NRG; PAM sequence: AGG
gagtgtggtggctatttgag

SEQ ID NO: 23897 - DNA, 20 bp, Artificial Sequence
  Description of Artificial Sequence: Synthetic oligonucleotide
  Target: ATXN2; (-) strand; PAM type: NRG; PAM sequence: GAG
tgagtgtggtggctatttga

SEQ ID NO: 23898 - DNA, 20 bp, Artificial Sequence
  Description of Artificial Sequence: Synthetic oligonucleotide
  Target: ATXN2; (-) strand; PAM type: NRG; PAM sequence: GAG
gctgagtgtggtggctattt

SEQ ID NO: 23899 - DNA, 20 bp, Artificial Sequence
  Description of Artificial Sequence: Synthetic oligonucleotide
  Target: ATXN2; (-) strand; PAM type: NRG; PAM sequence: TGG
acaaaattagctgagtgtgg

SEQ ID NO: 23900 - DNA, 20 bp, Artificial Sequence
  Description of Artificial Sequence: Synthetic oligonucleotide
  Target: ATXN2; (-) strand; PAM type: NRG; PAM sequence: TGG
aatacaaaattagctgagtg

SEQ ID NO: 23901 - DNA, 20 bp, Artificial Sequence
  Description of Artificial Sequence: Synthetic oligonucleotide
  Target: ATXN2; (-) strand; PAM type: NRG; PAM sequence: GAG
ctaaaaatacaaaattagct

SEQ ID NO: 23902 - DNA, 20 bp, Artificial Sequence
  Description of Artificial Sequence: Synthetic oligonucleotide
  Target: ATXN2; (-) strand; PAM type: NRG; PAM sequence: TAG
ctctactaaaaatacaaaat

SEQ ID NO: 23903 - DNA, 20 bp, Artificial Sequence
  Description of Artificial Sequence: Synthetic oligonucleotide
  Target: ATXN2; (-) strand; PAM type: NRG; PAM sequence: TGG
tgaggtcaggagttcaagac

SEQ ID NO: 23904 - DNA, 20 bp, Artificial Sequence
  Description of Artificial Sequence: Synthetic oligonucleotide
  Target: ATXN2; (-) strand; PAM type: NRG; PAM sequence: AAG
tcacttgaggtcaggagttc

SEQ ID NO: 23905 - DNA, 20 bp, Artificial Sequence
  Description of Artificial Sequence: Synthetic oligonucleotide
  Target: ATXN2; (-) strand; PAM type: NRG; PAM sequence: GAG
ggtggatcacttgaggtcag

SEQ ID NO: 23906 - DNA, 20 bp, Artificial Sequence
  Description of Artificial Sequence: Synthetic oligonucleotide
  Target: ATXN2; (-) strand; PAM type: NRG; PAM sequence: AGG
tgggtggatcacttgaggtc

SEQ ID NO: 23907 - DNA, 20 bp, Artificial Sequence
  Description of Artificial Sequence: Synthetic oligonucleotide
  Target: ATXN2; (-) strand; PAM type: NRG; PAM sequence: CAG
gtgggtggatcacttgaggt

SEQ ID NO: 23908 - DNA, 20 bp, Artificial Sequence
  Description of Artificial Sequence: Synthetic oligonucleotide
  Target: ATXN2; (-) strand; PAM type: NRG; PAM sequence: AGG
tgaggtgggtggatcacttg

SEQ ID NO: 23909 - DNA, 20 bp, Artificial Sequence
  Description of Artificial Sequence: Synthetic oligonucleotide
  Target: ATXN2; (-) strand; PAM type: NRG; PAM sequence: GAG
ctgaggtgggtggatcactt

SEQ ID NO: 23910 - DNA, 20 bp, Artificial Sequence
  Description of Artificial Sequence: Synthetic oligonucleotide
  Target: ATXN2; (-) strand; PAM type: NRG; PAM sequence: TGG
ctttgggaggctgaggtggg

SEQ ID NO: 23911 - DNA, 20 bp, Artificial Sequence
  Description of Artificial Sequence: Synthetic oligonucleotide
  Target: ATXN2; (-) strand; PAM type: NRG; PAM sequence: GGG
gcactttgggaggctgaggt

SEQ ID NO: 23912 - DNA, 20 bp, Artificial Sequence
  Description of Artificial Sequence: Synthetic oligonucleotide
  Target: ATXN2; (-) strand; PAM type: NRG; PAM sequence: TGG
agcactttgggaggctgagg

SEQ ID NO: 23913 - DNA, 20 bp, Artificial Sequence
  Description of Artificial Sequence: Synthetic oligonucleotide
  Target: ATXN2; (-) strand; PAM type: NRG; PAM sequence: AGG
cccagcactttgggaggctg

SEQ ID NO: 23914 - DNA, 20 bp, Artificial Sequence
  Description of Artificial Sequence: Synthetic oligonucleotide
  Target: ATXN2; (-) strand; PAM type: NRG; PAM sequence: GAG
tcccagcactttgggaggct

SEQ ID NO: 23915 - DNA, 20 bp, Artificial Sequence
  Description of Artificial Sequence: Synthetic oligonucleotide
  Target: ATXN2; (-) strand; PAM type: NRG; PAM sequence: AGG
tgtaatcccagcactttggg

SEQ ID NO: 23916 - DNA, 20 bp, Artificial Sequence
  Description of Artificial Sequence: Synthetic oligonucleotide
  Target: ATXN2; (-) strand; PAM type: NRG; PAM sequence: GAG
ctgtaatcccagcactttgg

SEQ ID NO: 23917 - DNA, 20 bp, Artificial Sequence
  Description of Artificial Sequence: Synthetic oligonucleotide
  Target: ATXN2; (-) strand; PAM type: NRG; PAM sequence: GGG
gcctgtaatcccagcacttt

SEQ ID NO: 23918 - DNA, 20 bp, Artificial Sequence
  Description of Artificial Sequence: Synthetic oligonucleotide
  Target: ATXN2; (-) strand; PAM type: NRG; PAM sequence: TGG
tgcctgtaatcccagcactt

SEQ ID NO: 23919 - DNA, 20 bp, Artificial Sequence
  Description of Artificial Sequence: Synthetic oligonucleotide
  Target: ATXN2; (-) strand; PAM type: NRG; PAM sequence: CAG
gtggctcatgcctgtaatcc

SEQ ID NO: 23920 - DNA, 20 bp, Artificial Sequence
  Description of Artificial Sequence: Synthetic oligonucleotide
  Target: ATXN2; (-) strand; PAM type: NRG; PAM sequence: TGG
acaagatcggccagttgctg

SEQ ID NO: 23921 - DNA, 20 bp, Artificial Sequence
  Description of Artificial Sequence: Synthetic oligonucleotide
  Target: ATXN2; (-) strand; PAM type: NRG; PAM sequence: CAG
ttaaaagaaacaagatcggc

SEQ ID NO: 23922 - DNA, 20 bp, Artificial Sequence
  Description of Artificial Sequence: Synthetic oligonucleotide
  Target: ATXN2; (-) strand; PAM type: NRG; PAM sequence: CGG
acctttaaaagaaacaagat

SEQ ID NO: 23923 - DNA, 20 bp, Artificial Sequence
  Description of Artificial Sequence: Synthetic oligonucleotide
  Target: ATXN2; (-) strand; PAM type: NRG; PAM sequence: AAG
agagaacctttaaaagaaac

SEQ ID NO: 23924 - DNA, 20 bp, Artificial Sequence
  Description of Artificial Sequence: Synthetic oligonucleotide
  Target: ATXN2; (-) strand; PAM type: NRG; PAM sequence: AAG
tcagtccagagaacctttaa

SEQ ID NO: 23925 - DNA, 20 bp, Artificial Sequence
  Description of Artificial Sequence: Synthetic oligonucleotide
  Target: ATXN2; (-) strand; PAM type: NRG; PAM sequence: GAG
tttctcttttaatcagtcca

SEQ ID NO: 23926 - DNA, 20 bp, Artificial Sequence
  Description of Artificial Sequence: Synthetic oligonucleotide
  Target: ATXN2; (-) strand; PAM type: NRG; PAM sequence: CAG
tttttctcttttaatcagtc

SEQ ID NO: 23927 - DNA, 20 bp, Artificial Sequence
  Description of Artificial Sequence: Synthetic oligonucleotide
  Target: ATXN2; (-) strand; PAM type: NRG; PAM sequence: CAG
aacactttttctcttttaat

SEQ ID NO: 23928 - DNA, 20 bp, Artificial Sequence
  Description of Artificial Sequence: Synthetic oligonucleotide
  Target: ATXN2; (-) strand; PAM type: NRG; PAM sequence: AAG
gtggtaagcaagagcttaca

SEQ ID NO: 23929 - DNA, 20 bp, Artificial Sequence
  Description of Artificial Sequence: Synthetic oligonucleotide
  Target: ATXN2; (-) strand; PAM type: NRG; PAM sequence: GAG
cccataactgtggtaagcaa

SEQ ID NO: 23930 - DNA, 20 bp, Artificial Sequence
  Description of Artificial Sequence: Synthetic oligonucleotide
  Target: ATXN2; (-) strand; PAM type: NRG; PAM sequence: AAG
ttcccataactgtggtaagc

SEQ ID NO: 23931 - DNA, 20 bp, Artificial Sequence
  Description of Artificial Sequence: Synthetic oligonucleotide
  Target: ATXN2; (-) strand; PAM type: NRG; PAM sequence: AAG
tttgttcccataactgtggt

SEQ ID NO: 23932 - DNA, 20 bp, Artificial Sequence
  Description of Artificial Sequence: Synthetic oligonucleotide
  Target: ATXN2; (-) strand; PAM type: NRG; PAM sequence: TGG
gtgctttgttcccataactg

SEQ ID NO: 23933 - DNA, 20 bp, Artificial Sequence
  Description of Artificial Sequence: Synthetic oligonucleotide
  Target: ATXN2; (-) strand; PAM type: NRG; PAM sequence: TAG
ctactttgccaatcagtcct

SEQ ID NO: 23934 - DNA, 20 bp, Artificial Sequence
  Description of Artificial Sequence: Synthetic oligonucleotide
  Target: ATXN2; (-) strand; PAM type: NRG; PAM sequence: CAG
gcttttgctactttgccaat

SEQ ID NO: 23935 - DNA, 20 bp, Artificial Sequence
  Description of Artificial Sequence: Synthetic oligonucleotide
  Target: ATXN2; (-) strand; PAM type: NRG; PAM sequence: AGG
gttgacatgattttacaata

SEQ ID NO: 23936 - DNA, 20 bp, Artificial Sequence
  Description of Artificial Sequence: Synthetic oligonucleotide
  Target: ATXN2; (-) strand; PAM type: NRG; PAM sequence: AAG
cgttgacatgattttacaat

SEQ ID NO: 23937 - DNA, 20 bp, Artificial Sequence
  Description of Artificial Sequence: Synthetic oligonucleotide
  Target: ATXN2; (-) strand; PAM type: NRG; PAM sequence: TAG
aaaaaaaaaagtttaaaaac

SEQ ID NO: 23938 - DNA, 20 bp, Artificial Sequence
  Description of Artificial Sequence: Synthetic oligonucleotide
  Target: ATXN2; (-) strand; PAM type: NRG; PAM sequence: AAG
caaaaaaaaaaaaaaaaaaa

SEQ ID NO: 23939 - DNA, 20 bp, Artificial Sequence
  Description of Artificial Sequence: Synthetic oligonucleotide
  Target: ATXN2; (-) strand; PAM type: NRG; PAM sequence: AAG
tccagcatgggcaacagagc

SEQ ID NO: 23940 - DNA, 20 bp, Artificial Sequence
  Description of Artificial Sequence: Synthetic oligonucleotide
  Target: ATXN2; (-) strand; PAM type: NRG; PAM sequence: GAG
gcactccagcatgggcaaca

SEQ ID NO: 23941 - DNA, 20 bp, Artificial Sequence
  Description of Artificial Sequence: Synthetic oligonucleotide
  Target: ATXN2; (-) strand; PAM type: NRG; PAM sequence: CAG
ttgcactccagcatgggcaa

SEQ ID NO: 23942 - DNA, 20 bp, Artificial Sequence
  Description of Artificial Sequence: Synthetic oligonucleotide
  Target: ATXN2; (-) strand; PAM type: NRG; PAM sequence: GGG
acgccattgcactccagcat

SEQ ID NO: 23943 - DNA, 20 bp, Artificial Sequence
  Description of Artificial Sequence: Synthetic oligonucleotide
  Target: ATXN2; (-) strand; PAM type: NRG; PAM sequence: TGG
cacgccattgcactccagca

SEQ ID NO: 23944 - DNA, 20 bp, Artificial Sequence
  Description of Artificial Sequence: Synthetic oligonucleotide
  Target: ATXN2; (-) strand; PAM type: NRG; PAM sequence: CAG
gagatcacgccattgcactc

SEQ ID NO: 23945 - DNA, 20 bp, Artificial Sequence
  Description of Artificial Sequence: Synthetic oligonucleotide
  Target: ATXN2; (-) strand; PAM type: NRG; PAM sequence: GAG
agcggagcttgcagttagct

SEQ ID NO: 23946 - DNA, 20 bp, Artificial Sequence
  Description of Artificial Sequence: Synthetic oligonucleotide
  Target: ATXN2; (-) strand; PAM type: NRG; PAM sequence: TAG
cgggaagcggagcttgcagt

SEQ ID NO: 23947 - DNA, 20 bp, Artificial Sequence
  Description of Artificial Sequence: Synthetic oligonucleotide
  Target: ATXN2; (-) strand; PAM type: NRG; PAM sequence: CAG
aactcgggaagcggagcttg

SEQ ID NO: 23948 - DNA, 20 bp, Artificial Sequence
  Description of Artificial Sequence: Synthetic oligonucleotide
  Target: ATXN2; (-) strand; PAM type: NRG; PAM sequence: GAG
tggcatgaactcgggaagcg

SEQ ID NO: 23949 - DNA, 20 bp, Artificial Sequence
  Description of Artificial Sequence: Synthetic oligonucleotide
  Target: ATXN2; (-) strand; PAM type: NRG; PAM sequence: CGG
aatggcatgaactcgggaag

SEQ ID NO: 23950 - DNA, 20 bp, Artificial Sequence
  Description of Artificial Sequence: Synthetic oligonucleotide
  Target: ATXN2; (-) strand; PAM type: NRG; PAM sequence: AAG
gagaatggcatgaactcggg

SEQ ID NO: 23951 - DNA, 20 bp, Artificial Sequence
  Description of Artificial Sequence: Synthetic oligonucleotide
  Target: ATXN2; (-) strand; PAM type: NRG; PAM sequence: GGG
caggagaatggcatgaactc

SEQ ID NO: 23952 - DNA, 20 bp, Artificial Sequence
  Description of Artificial Sequence: Synthetic oligonucleotide
  Target: ATXN2; (-) strand; PAM type: NRG; PAM sequence: CGG
gcaggagaatggcatgaact

SEQ ID NO: 23953 - DNA, 20 bp, Artificial Sequence
  Description of Artificial Sequence: Synthetic oligonucleotide
  Target: ATXN2; (-) strand; PAM type: NRG; PAM sequence: TGG
gggaggctgaggcaggagaa

SEQ ID NO: 23954 - DNA, 20 bp, Artificial Sequence
  Description of Artificial Sequence: Synthetic oligonucleotide
  Target: ATXN2; (-) strand; PAM type: NRG; PAM sequence: GAG
tacttgggaggctgaggcag

SEQ ID NO: 23955 - DNA, 20 bp, Artificial Sequence
  Description of Artificial Sequence: Synthetic oligonucleotide
  Target: ATXN2; (-) strand; PAM type: NRG; PAM sequence: AGG
gctacttgggaggctgaggc

SEQ ID NO: 23956 - DNA, 20 bp, Artificial Sequence
  Description of Artificial Sequence: Synthetic oligonucleotide
  Target: ATXN2; (-) strand; PAM type: NRG; PAM sequence: CAG
agctacttgggaggctgagg

SEQ ID NO: 23957 - DNA, 20 bp, Artificial Sequence
  Description of Artificial Sequence: Synthetic oligonucleotide
  Target: ATXN2; (-) strand; PAM type: NRG; PAM sequence: AGG
cccagctacttgggaggctg

SEQ ID NO: 23958 - DNA, 20 bp, Artificial Sequence
  Description of Artificial Sequence: Synthetic oligonucleotide
  Target: ATXN2; (-) strand; PAM type: NRG; PAM sequence: GAG
tcccagctacttgggaggct

SEQ ID NO: 23959 - DNA, 20 bp, Artificial Sequence
  Description of Artificial Sequence: Synthetic oligonucleotide
  Target: ATXN2; (-) strand; PAM type: NRG; PAM sequence: AGG
tgtagtcccagctacttggg

SEQ ID NO: 23960 - DNA, 20 bp, Artificial Sequence
  Description of Artificial Sequence: Synthetic oligonucleotide
  Target: ATXN2; (-) strand; PAM type: NRG; PAM sequence: GAG
ctgtagtcccagctacttgg

SEQ ID NO: 23961 - DNA, 20 bp, Artificial Sequence
  Description of Artificial Sequence: Synthetic oligonucleotide
  Target: ATXN2; (-) strand; PAM type: NRG; PAM sequence: GGG
gcctgtagtcccagctactt

SEQ ID NO: 23962 - DNA, 20 bp, Artificial Sequence
  Description of Artificial Sequence: Synthetic oligonucleotide
  Target: ATXN2; (-) strand; PAM type: NRG; PAM sequence: TGG
tgcctgtagtcccagctact

SEQ ID NO: 23963 - DNA, 20 bp, Artificial Sequence
  Description of Artificial Sequence: Synthetic oligonucleotide
  Target: ATXN2; (-) strand; PAM type: NRG; PAM sequence: CAG
gtggcgggtgcctgtagtcc

SEQ ID NO: 23964 - DNA, 20 bp, Artificial Sequence
  Description of Artificial Sequence: Synthetic oligonucleotide
  Target: ATXN2; (-) strand; PAM type: NRG; PAM sequence: TAG
ggcatggtggcgggtgcctg

SEQ ID NO: 23965 - DNA, 20 bp, Artificial Sequence
  Description of Artificial Sequence: Synthetic oligonucleotide
  Target: ATXN2; (-) strand; PAM type: NRG; PAM sequence: GGG
aattagccgggcatggtggc

SEQ ID NO: 23966 - DNA, 20 bp, Artificial Sequence
  Description of Artificial Sequence: Synthetic oligonucleotide
  Target: ATXN2; (-) strand; PAM type: NRG; PAM sequence: CGG
aaattagccgggcatggtgg

SEQ ID NO: 23967 - DNA, 20 bp, Artificial Sequence
  Description of Artificial Sequence: Synthetic oligonucleotide
  Target: ATXN2; (-) strand; PAM type: NRG; PAM sequence: TGG
aaaaaattagccgggcatgg

SEQ ID NO: 23968 - DNA, 20 bp, Artificial Sequence
  Description of Artificial Sequence: Synthetic oligonucleotide
  Target: ATXN2; (-) strand; PAM type: NRG; PAM sequence: TGG
caaaaaaaattagccgggca

SEQ ID NO: 23969 - DNA, 20 bp, Artificial Sequence
  Description of Artificial Sequence: Synthetic oligonucleotide
  Target: ATXN2; (-) strand; PAM type: NRG; PAM sequence: GGG
aagtacaaaaaaaattagcc

SEQ ID NO: 23970 - DNA, 20 bp, Artificial Sequence
  Description of Artificial Sequence: Synthetic oligonucleotide
  Target: ATXN2; (-) strand; PAM type: NRG; PAM sequence: CGG
aaagtacaaaaaaaattagc

SEQ ID NO: 23971 - DNA, 20 bp, Artificial Sequence
  Description of Artificial Sequence: Synthetic oligonucleotide
  Target: ATXN2; (-) strand; PAM type: NRG; PAM sequence: TAG
actaaaagtacaaaaaaaat

SEQ ID NO: 23972 - DNA, 20 bp, Artificial Sequence
  Description of Artificial Sequence: Synthetic oligonucleotide
  Target: ATXN2; (-) strand; PAM type: NRG; PAM sequence: AAG
tgaaaccccgtccctactaa

SEQ ID NO: 23973 - DNA, 20 bp, Artificial Sequence
  Description of Artificial Sequence: Synthetic oligonucleotide
  Target: ATXN2; (-) strand; PAM type: NRG; PAM sequence: CGG
cgagaccatcctggctaaca

SEQ ID NO: 23974 - DNA, 20 bp, Artificial Sequence
  Description of Artificial Sequence: Synthetic oligonucleotide
  Target: ATXN2; (-) strand; PAM type: NRG; PAM sequence: TGG
tcaggagatcgagaccatcc

SEQ ID NO: 23975 - DNA, 20 bp, Artificial Sequence
  Description of Artificial Sequence: Synthetic oligonucleotide
  Target: ATXN2; (-) strand; PAM type: NRG; PAM sequence: GAG
gatcacaaggtcaggagatc

SEQ ID NO: 23976 - DNA, 20 bp, Artificial Sequence
  Description of Artificial Sequence: Synthetic oligonucleotide
  Target: ATXN2; (-) strand; PAM type: NRG; PAM sequence: GAG
tgggcggatcacaaggtcag

SEQ ID NO: 23977 - DNA, 20 bp, Artificial Sequence
  Description of Artificial Sequence: Synthetic oligonucleotide
  Target: ATXN2; (-) strand; PAM type: NRG; PAM sequence: AGG
ggtgggcggatcacaaggtc

SEQ ID NO: 23978 - DNA, 20 bp, Artificial Sequence
  Description of Artificial Sequence: Synthetic oligonucleotide
  Target: ATXN2; (-) strand; PAM type: NRG; PAM sequence: CAG
aggtgggcggatcacaaggt

SEQ ID NO: 23979 - DNA, 20 bp, Artificial Sequence
  Description of Artificial Sequence: Synthetic oligonucleotide
  Target: ATXN2; (-) strand; PAM type: NRG; PAM sequence: AGG
gctgaggtgggcggatcaca

SEQ ID NO: 23980 - DNA, 20 bp, Artificial Sequence
  Description of Artificial Sequence: Synthetic oligonucleotide
  Target: ATXN2; (-) strand; PAM type: NRG; PAM sequence: AAG
ggctgaggtgggcggatcac

SEQ ID NO: 23981 - DNA, 20 bp, Artificial Sequence
  Description of Artificial Sequence: Synthetic oligonucleotide
  Target: ATXN2; (-) strand; PAM type: NRG; PAM sequence: CGG
ctttgggaggctgaggtggg

SEQ ID NO: 23982 - DNA, 20 bp, Artificial Sequence
  Description of Artificial Sequence: Synthetic oligonucleotide
  Target: ATXN2; (-) strand; PAM type: NRG; PAM sequence: GGG
gcactttgggaggctgaggt

SEQ ID NO: 23983 - DNA, 20 bp, Artificial Sequence
  Description of Artificial Sequence: Synthetic oligonucleotide
  Target: ATXN2; (-) strand; PAM type: NRG; PAM sequence: TGG
agcactttgggaggctgagg

SEQ ID NO: 23984 - DNA, 20 bp, Artificial Sequence
  Description of Artificial Sequence: Synthetic oligonucleotide
  Target: ATXN2; (-) strand; PAM type: NRG; PAM sequence: AGG
cccagcactttgggaggctg

SEQ ID NO: 23985 - DNA, 20 bp, Artificial Sequence
  Description of Artificial Sequence: Synthetic oligonucleotide
  Target: ATXN2; (-) strand; PAM type: NRG; PAM sequence: GAG
tcccagcactttgggaggct

SEQ ID NO: 23986 - DNA, 20 bp, Artificial Sequence
  Description of Artificial Sequence: Synthetic oligonucleotide
  Target: ATXN2; (-) strand; PAM type: NRG; PAM sequence: AGG
tgtaatcccagcactttggg

SEQ ID NO: 23987 - DNA, 20 bp, Artificial Sequence
  Description of Artificial Sequence: Synthetic oligonucleotide
  Target: ATXN2; (-) strand; PAM type: NRG; PAM sequence: GAG
ctgtaatcccagcactttgg

SEQ ID NO: 23988 - DNA, 20 bp, Artificial Sequence
  Description of Artificial Sequence: Synthetic oligonucleotide
  Target: ATXN2; (-) strand; PAM type: NRG; PAM sequence: GGG
gcctgtaatcccagcacttt

SEQ ID NO: 23989 - DNA, 20 bp, Artificial Sequence
  Description of Artificial Sequence: Synthetic oligonucleotide
  Target: ATXN2; (-) strand; PAM type: NRG; PAM sequence: TGG
cgcctgtaatcccagcactt

SEQ ID NO: 23990 - DNA, 20 bp, Artificial Sequence
  Description of Artificial Sequence: Synthetic oligonucleotide
  Target: ATXN2; (-) strand; PAM type: NRG; PAM sequence: CAG
gtggctcacgcctgtaatcc

SEQ ID NO: 23991 - DNA, 20 bp, Artificial Sequence
  Description of Artificial Sequence: Synthetic oligonucleotide
  Target: ATXN2; (-) strand; PAM type: NRG; PAM sequence: TGG
aaaaattaggctgggtgtgg

SEQ ID NO: 23992 - DNA, 20 bp, Artificial Sequence
  Description of Artificial Sequence: Synthetic oligonucleotide
  Target: ATXN2; (-) strand; PAM type: NRG; PAM sequence: TGG
tataaaaattaggctgggtg

SEQ ID NO: 23993 - DNA, 20 bp, Artificial Sequence
  Description of Artificial Sequence: Synthetic oligonucleotide
  Target: ATXN2; (-) strand; PAM type: NRG; PAM sequence: GGG
aaaagtataaaaattaggct

SEQ ID NO: 23994 - DNA, 20 bp, Artificial Sequence
  Description of Artificial Sequence: Synthetic oligonucleotide
  Target: ATXN2; (-) strand; PAM type: NRG; PAM sequence: TGG
taaaagtataaaaattaggc

SEQ ID NO: 23995 - DNA, 20 bp, Artificial Sequence
  Description of Artificial Sequence: Synthetic oligonucleotide
  Target: ATXN2; (-) strand; PAM type: NRG; PAM sequence: AGG
gctataaaagtataaaaatt

SEQ ID NO: 23996 - DNA, 20 bp, Artificial Sequence
  Description of Artificial Sequence: Synthetic oligonucleotide
  Target: ATXN2; (-) strand; PAM type: NRG; PAM sequence: TAG
agctataaaagtataaaaat

SEQ ID NO: 23997 - DNA, 20 bp, Artificial Sequence
  Description of Artificial Sequence: Synthetic oligonucleotide
  Target: ATXN2; (-) strand; PAM type: NRG; PAM sequence: AAG
tatgctgacagcagctataa

SEQ ID NO: 23998 - DNA, 20 bp, Artificial Sequence
  Description of Artificial Sequence: Synthetic oligonucleotide
  Target: ATXN2; (-) strand; PAM type: NRG; PAM sequence: CAG
cataaggaatatgctgacag

SEQ ID NO: 23999 - DNA, 20 bp, Artificial Sequence
  Description of Artificial Sequence: Synthetic oligonucleotide
  Target: ATXN2; (-) strand; PAM type: NRG; PAM sequence: CAG
tagcataaggaatatgctga

SEQ ID NO: 24000 - DNA, 20 bp, Artificial Sequence
  Description of Artificial Sequence: Synthetic oligonucleotide
  Target: ATXN2; (-) strand; PAM type: NRG; PAM sequence: AGG
ttttatttgtgattagcata

SEQ ID NO: 24001 - DNA, 20 bp, Artificial Sequence
  Description of Artificial Sequence: Synthetic oligonucleotide
  Target: ATXN2; (-) strand; PAM type: NRG; PAM sequence: AAG
gttttatttgtgattagcat

SEQ ID NO: 24002 - DNA, 20 bp, Artificial Sequence
  Description of Artificial Sequence: Synthetic oligonucleotide
  Target: ATXN2; (-) strand; PAM type: NRG; PAM sequence: TAG
gtccaagttttatttgtgat

SEQ ID NO: 24003 - DNA, 20 bp, Artificial Sequence
  Description of Artificial Sequence: Synthetic oligonucleotide
  Target: ATXN2; (-) strand; PAM type: NRG; PAM sequence: AAG
caaatacaaataaagggtcc

SEQ ID NO: 24004 - DNA, 20 bp, Artificial Sequence
  Description of Artificial Sequence: Synthetic oligonucleotide
  Target: ATXN2; (-) strand; PAM type: NRG; PAM sequence: GGG
gaatatcaaatacaaataaa

SEQ ID NO: 24005 - DNA, 20 bp, Artificial Sequence
  Description of Artificial Sequence: Synthetic oligonucleotide
  Target: ATXN2; (-) strand; PAM type: NRG; PAM sequence: AGG
ggaatatcaaatacaaataa

SEQ ID NO: 24006 - DNA, 20 bp, Artificial Sequence
  Description of Artificial Sequence: Synthetic oligonucleotide
  Target: ATXN2; (-) strand; PAM type: NRG; PAM sequence: AAG
aggaatatcaaatacaaata

SEQ ID NO: 24007 - DNA, 20 bp, Artificial Sequence
  Description of Artificial Sequence: Synthetic oligonucleotide
  Target: ATXN2; (-) strand; PAM type: NRG; PAM sequence: AGG
ccaactatatttccataata

SEQ ID NO: 24008 - DNA, 20 bp, Artificial Sequence
  Description of Artificial Sequence: Synthetic oligonucleotide
  Target: ATXN2; (-) strand; PAM type: NRG; PAM sequence: AAG
cccaactatatttccataat

SEQ ID NO: 24009 - DNA, 20 bp, Artificial Sequence
  Description of Artificial Sequence: Synthetic oligonucleotide
  Target: ATXN2; (-) strand; PAM type: NRG; PAM sequence: TGG
gtttctatagcatctgtata

SEQ ID NO: 24010 - DNA, 20 bp, Artificial Sequence
  Description of Artificial Sequence: Synthetic oligonucleotide
  Target: ATXN2; (-) strand; PAM type: NRG; PAM sequence: TAG
tacattgtagtgtgtttcta

SEQ ID NO: 24011 - DNA, 20 bp, Artificial Sequence
  Description of Artificial Sequence: Synthetic oligonucleotide
  Target: ATXN2; (-) strand; PAM type: NRG; PAM sequence: TAG
tttatttttggcttacattg

SEQ ID NO: 24012 - DNA, 20 bp, Artificial Sequence
  Description of Artificial Sequence: Synthetic oligonucleotide
  Target: ATXN2; (-) strand; PAM type: NRG; PAM sequence: TGG
attctataaacatttatttt

SEQ ID NO: 24013 - DNA, 20 bp, Artificial Sequence
  Description of Artificial Sequence: Synthetic oligonucleotide
  Target: ATXN2; (-) strand; PAM type: NRG; PAM sequence: CAG
tttttagcagctttgtttat

SEQ ID NO: 24014 - DNA, 20 bp, Artificial Sequence
  Description of Artificial Sequence: Synthetic oligonucleotide
  Target: ATXN2; (-) strand; PAM type: NRG; PAM sequence: CAG
gtatttccttatctttttag

SEQ ID NO: 24015 - DNA, 20 bp, Artificial Sequence
  Description of Artificial Sequence: Synthetic oligonucleotide
  Target: ATXN2; (-) strand; PAM type: NRG; PAM sequence: TAG
accgtatttccttatctttt

SEQ ID NO: 24016 - DNA, 20 bp, Artificial Sequence
  Description of Artificial Sequence: Synthetic oligonucleotide
  Target: ATXN2; (-) strand; PAM type: NRG; PAM sequence: GGG
agtatgtaacactatttgga

SEQ ID NO: 24017 - DNA, 20 bp, Artificial Sequence
  Description of Artificial Sequence: Synthetic oligonucleotide
  Target: ATXN2; (-) strand; PAM type: NRG; PAM sequence: AGG
cagtatgtaacactatttgg

SEQ ID NO: 24018 - DNA, 20 bp, Artificial Sequence
  Description of Artificial Sequence: Synthetic oligonucleotide
  Target: ATXN2; (-) strand; PAM type: NRG; PAM sequence: GAG
acagtatgtaacactatttg

SEQ ID NO: 24019 - DNA, 20 bp, Artificial Sequence
  Description of Artificial Sequence: Synthetic oligonucleotide
  Target: ATXN2; (-) strand; PAM type: NRG; PAM sequence: TGG
acacagtatgtaacactatt

SEQ ID NO: 24020 - DNA, 20 bp, Artificial Sequence
  Description of Artificial Sequence: Synthetic oligonucleotide
  Target: ATXN2; (-) strand; PAM type: NRG; PAM sequence: CAG
tctctaatatgaggcaaaca

SEQ ID NO: 24021 - DNA, 20 bp, Artificial Sequence
  Description of Artificial Sequence: Synthetic oligonucleotide
  Target: ATXN2; (-) strand; PAM type: NRG; PAM sequence: AGG
taaagtacctctctaatatg

SEQ ID NO: 24022 - DNA, 20 bp, Artificial Sequence
  Description of Artificial Sequence: Synthetic oligonucleotide
  Target: ATXN2; (-) strand; PAM type: NRG; PAM sequence: GAG
gtaaagtacctctctaatat

SEQ ID NO: 24023 - DNA, 20 bp, Artificial Sequence
  Description of Artificial Sequence: Synthetic oligonucleotide
  Target: ATXN2; (-) strand; PAM type: NRG; PAM sequence: AAG
taaaactataaagttttgta

SEQ ID NO: 24024 - DNA, 20 bp, Artificial Sequence
  Description of Artificial Sequence: Synthetic oligonucleotide
  Target: ATXN2; (-) strand; PAM type: NRG; PAM sequence: AAG
agatatattgtaaaactata

SEQ ID NO: 24025 - DNA, 20 bp, Artificial Sequence
  Description of Artificial Sequence: Synthetic oligonucleotide
  Target: ATXN2; (-) strand; PAM type: NRG; PAM sequence: CAG
tcctataaggttcataaata

SEQ ID NO: 24026 - DNA, 20 bp, Artificial Sequence
  Description of Artificial Sequence: Synthetic oligonucleotide
  Target: ATXN2; (-) strand; PAM type: NRG; PAM sequence: AGG
attgtgatgagattcctata

SEQ ID NO: 24027 - DNA, 20 bp, Artificial Sequence
  Description of Artificial Sequence: Synthetic oligonucleotide
  Target: ATXN2; (-) strand; PAM type: NRG; PAM sequence: AAG
gattgtgatgagattcctat

SEQ ID NO: 24028 - DNA, 20 bp, Artificial Sequence
  Description of Artificial Sequence: Synthetic oligonucleotide
  Target: ATXN2; (-) strand; PAM type: NRG; PAM sequence: GAG
ctacattatgggattgtgat

SEQ ID NO: 24029 - DNA, 20 bp, Artificial Sequence
  Description of Artificial Sequence: Synthetic oligonucleotide
  Target: ATXN2; (-) strand; PAM type: NRG; PAM sequence: GGG
tcttgcctagtctacattat

SEQ ID NO: 24030 - DNA, 20 bp, Artificial Sequence
  Description of Artificial Sequence: Synthetic oligonucleotide
  Target: ATXN2; (-) strand; PAM type: NRG; PAM sequence: TGG
ttcttgcctagtctacatta

SEQ ID NO: 24031 - DNA, 20 bp, Artificial Sequence
  Description of Artificial Sequence: Synthetic oligonucleotide
  Target: ATXN2; (-) strand; PAM type: NRG; PAM sequence: TAG
aagtgttaataattcttgcc

SEQ ID NO: 24032 - DNA, 20 bp, Artificial Sequence
  Description of Artificial Sequence: Synthetic oligonucleotide
  Target: ATXN2; (-) strand; PAM type: NRG; PAM sequence: AAG
ttgagatttcgcagtgagta

SEQ ID NO: 24033 - DNA, 20 bp, Artificial Sequence
  Description of Artificial Sequence: Synthetic oligonucleotide
  Target: ATXN2; (-) strand; PAM type: NRG; PAM sequence: GAG
tgaagttgagatttcgcagt

SEQ ID NO: 24034 - DNA, 20 bp, Artificial Sequence
  Description of Artificial Sequence: Synthetic oligonucleotide
  Target: ATXN2; (-) strand; PAM type: NRG; PAM sequence: CAG
attctgaagttgagatttcg

SEQ ID NO: 24035 - DNA, 20 bp, Artificial Sequence
  Description of Artificial Sequence: Synthetic oligonucleotide
  Target: ATXN2; (-) strand; PAM type: NRG; PAM sequence: GAG
cagacactcattctgaagtt

SEQ ID NO: 24036 - DNA, 20 bp, Artificial Sequence
  Description of Artificial Sequence: Synthetic oligonucleotide
  Target: ATXN2; (-) strand; PAM type: NRG; PAM sequence: AAG
caagtcagacactcattctg

SEQ ID NO: 24037 - DNA, 20 bp, Artificial Sequence
  Description of Artificial Sequence: Synthetic oligonucleotide
  Target: ATXN2; (-) strand; PAM type: NRG; PAM sequence: CAG
catcatatattaaagcaagt

SEQ ID NO: 24038 - DNA, 20 bp, Artificial Sequence
  Description of Artificial Sequence: Synthetic oligonucleotide
  Target: ATXN2; (-) strand; PAM type: NRG; PAM sequence: AAG
tattcatcatatattaaagc

SEQ ID NO: 24039 - DNA, 20 bp, Artificial Sequence
  Description of Artificial Sequence: Synthetic oligonucleotide
  Target: ATXN2; (-) strand; PAM type: NRG; PAM sequence: AAG
cacttattcatcatatatta

SEQ ID NO: 24040 - DNA, 20 bp, Artificial Sequence
  Description of Artificial Sequence: Synthetic oligonucleotide
  Target: ATXN2; (-) strand; PAM type: NRG; PAM sequence: GGG
gaaacccatatttttattct

SEQ ID NO: 24041 - DNA, 20 bp, Artificial Sequence
  Description of Artificial Sequence: Synthetic oligonucleotide
  Target: ATXN2; (-) strand; PAM type: NRG; PAM sequence: TGG
ggaaacccatatttttattc

SEQ ID NO: 24042 - DNA, 20 bp, Artificial Sequence
  Description of Artificial Sequence: Synthetic oligonucleotide
  Target: ATXN2; (-) strand; PAM type: NRG; PAM sequence: GGG
tagtagaatcaccaggaatt

SEQ ID NO: 24043 - DNA, 20 bp, Artificial Sequence
  Description of Artificial Sequence: Synthetic oligonucleotide
  Target: ATXN2; (-) strand; PAM type: NRG; PAM sequence: TGG
atagtagaatcaccaggaat

SEQ ID NO: 24044 - DNA, 20 bp, Artificial Sequence
  Description of Artificial Sequence: Synthetic oligonucleotide
  Target: ATXN2; (-) strand; PAM type: NRG; PAM sequence: AGG
ttaaaaatagtagaatcacc

SEQ ID NO: 24045 - DNA, 20 bp, Artificial Sequence
  Description of Artificial Sequence: Synthetic oligonucleotide
  Target: ATXN2; (-) strand; PAM type: NRG; PAM sequence: CAG
gttaaaaatagtagaatcac

SEQ ID NO: 24046 - DNA, 20 bp, Artificial Sequence
  Description of Artificial Sequence: Synthetic oligonucleotide
  Target: ATXN2; (-) strand; PAM type: NRG; PAM sequence: TAG
tatgtatatgttaaaaatag

SEQ ID NO: 24047 - DNA, 20 bp, Artificial Sequence
  Description of Artificial Sequence: Synthetic oligonucleotide
  Target: ATXN2; (-) strand; PAM type: NRG; PAM sequence: TAG
aagtatgtatatgttaaaaa

SEQ ID NO: 24048 - DNA, 20 bp, Artificial Sequence
  Description of Artificial Sequence: Synthetic oligonucleotide
  Target: ATXN2; (-) strand; PAM type: NRG; PAM sequence: AAG
aactctgtttgaggaagtgt

SEQ ID NO: 24049 - DNA, 20 bp, Artificial Sequence
  Description of Artificial Sequence: Synthetic oligonucleotide
  Target: ATXN2; (-) strand; PAM type: NRG; PAM sequence: AAG
agctacaactctgtttgagg

SEQ ID NO: 24050 - DNA, 20 bp, Artificial Sequence
  Description of Artificial Sequence: Synthetic oligonucleotide
  Target: ATXN2; (-) strand; PAM type: NRG; PAM sequence: AGG
ctgagctacaactctgtttg

SEQ ID NO: 24051 - DNA, 20 bp, Artificial Sequence
  Description of Artificial Sequence: Synthetic oligonucleotide
  Target: ATXN2; (-) strand; PAM type: NRG; PAM sequence: GAG
gctgagctacaactctgttt

SEQ ID NO: 24052 - DNA, 20 bp, Artificial Sequence
  Description of Artificial Sequence: Synthetic oligonucleotide
  Target: ATXN2; (-) strand; PAM type: NRG; PAM sequence: GAG
cactagatataaagagggct

SEQ ID NO: 24053 - DNA, 20 bp, Artificial Sequence
  Description of Artificial Sequence: Synthetic oligonucleotide
  Target: ATXN2; (-) strand; PAM type: NRG; PAM sequence: GGG
cattacactagatataaaga

SEQ ID NO: 24054 - DNA, 20 bp, Artificial Sequence
  Description of Artificial Sequence: Synthetic oligonucleotide
  Target: ATXN2; (-) strand; PAM type: NRG; PAM sequence: AGG
tcattacactagatataaag

SEQ ID NO: 24055 - DNA, 20 bp, Artificial Sequence
  Description of Artificial Sequence: Synthetic oligonucleotide
  Target: ATXN2; (-) strand; PAM type: NRG; PAM sequence: GAG
gtcattacactagatataaa

SEQ ID NO: 24056 - DNA, 20 bp, Artificial Sequence
  Description of Artificial Sequence: Synthetic oligonucleotide
  Target: ATXN2; (-) strand; PAM type: NRG; PAM sequence: AAG
ttgtcattacactagatata

SEQ ID NO: 24057 - DNA, 20 bp, Artificial Sequence
  Description of Artificial Sequence: Synthetic oligonucleotide
  Target: ATXN2; (-) strand; PAM type: NRG; PAM sequence: TAG
tactcattttgtcattacac

SEQ ID NO: 24058 - DNA, 20 bp, Artificial Sequence
  Description of Artificial Sequence: Synthetic oligonucleotide
  Target: ATXN2; (-) strand; PAM type: NRG; PAM sequence: TGG
gtaacacttgggcataatga

SEQ ID NO: 24059 - DNA, 20 bp, Artificial Sequence
  Description of Artificial Sequence: Synthetic oligonucleotide
  Target: ATXN2; (-) strand; PAM type: NRG; PAM sequence: GGG
agtgggggtaggtaacactt

SEQ ID NO: 24060 - DNA, 20 bp, Artificial Sequence
  Description of Artificial Sequence: Synthetic oligonucleotide
  Target: ATXN2; (-) strand; PAM type: NRG; PAM sequence: TGG
cagtgggggtaggtaacact

SEQ ID NO: 24061 - DNA, 20 bp, Artificial Sequence
  Description of Artificial Sequence: Synthetic oligonucleotide
  Target: ATXN2; (-) strand; PAM type: NRG; PAM sequence: AGG
catcagtggtcagtgggggt

SEQ ID NO: 24062 - DNA, 20 bp, Artificial Sequence
  Description of Artificial Sequence: Synthetic oligonucleotide
  Target: ATXN2; (-) strand; PAM type: NRG; PAM sequence: TAG
tcatcagtggtcagtggggg

SEQ ID NO: 24063 - DNA, 20 bp, Artificial Sequence
  Description of Artificial Sequence: Synthetic oligonucleotide
  Target: ATXN2; (-) strand; PAM type: NRG; PAM sequence: GGG
tggtcatcagtggtcagtgg

SEQ ID NO: 24064 - DNA, 20 bp, Artificial Sequence
  Description of Artificial Sequence: Synthetic oligonucleotide
  Target: ATXN2; (-) strand; PAM type: NRG; PAM sequence: GGG
gtggtcatcagtggtcagtg

SEQ ID NO: 24065 - DNA, 20 bp, Artificial Sequence
  Description of Artificial Sequence: Synthetic oligonucleotide
  Target: ATXN2; (-) strand; PAM type: NRG; PAM sequence: GGG
cgtggtcatcagtggtcagt

SEQ ID NO: 24066 - DNA, 20 bp, Artificial Sequence
  Description of Artificial Sequence: Synthetic oligonucleotide
  Target: ATXN2; (-) strand; PAM type: NRG; PAM sequence: TGG
acgtggtcatcagtggtcag

SEQ ID NO: 24067 - DNA, 20 bp, Artificial Sequence
  Description of Artificial Sequence: Synthetic oligonucleotide
  Target: ATXN2; (-) strand; PAM type: NRG; PAM sequence: CAG
ggaacgtggtcatcagtggt

SEQ ID NO: 24068 - DNA, 20 bp, Artificial Sequence
  Description of Artificial Sequence: Synthetic oligonucleotide
  Target: ATXN2; (-) strand; PAM type: NRG; PAM sequence: TGG
ggggggaacgtggtcatcag

SEQ ID NO: 24069 - DNA, 20 bp, Artificial Sequence
  Description of Artificial Sequence: Synthetic oligonucleotide
  Target: ATXN2; (-) strand; PAM type: NRG; PAM sequence: CAG
ctcggggggaacgtggtcat

SEQ ID NO: 24070 - DNA, 20 bp, Artificial Sequence
  Description of Artificial Sequence: Synthetic oligonucleotide
  Target: ATXN2; (-) strand; PAM type: NRG; PAM sequence: TGG
ccagtccctcggggggaacg

SEQ ID NO: 24071 - DNA, 20 bp, Artificial Sequence
  Description of Artificial Sequence: Synthetic oligonucleotide
  Target: ATXN2; (-) strand; PAM type: NRG; PAM sequence: GGG
gcaaggaccagtccctcggg

SEQ ID NO: 24072 - DNA, 20 bp, Artificial Sequence
  Description of Artificial Sequence: Synthetic oligonucleotide
  Target: ATXN2; (-) strand; PAM type: NRG; PAM sequence: GGG
agcaaggaccagtccctcgg

SEQ ID NO: 24073 - DNA, 20 bp, Artificial Sequence
  Description of Artificial Sequence: Synthetic oligonucleotide
  Target: ATXN2; (-) strand; PAM type: NRG; PAM sequence: GGG
tagcaaggaccagtccctcg

SEQ ID NO: 24074 - DNA, 20 bp, Artificial Sequence
  Description of Artificial Sequence: Synthetic oligonucleotide
  Target: ATXN2; (-) strand; PAM type: NRG; PAM sequence: GGG
gtagcaaggaccagtccctc

SEQ ID NO: 24075 - DNA, 20 bp, Artificial Sequence
  Description of Artificial Sequence: Synthetic oligonucleotide
  Target: ATXN2; (-) strand; PAM type: NRG; PAM sequence: CGG
agtagcaaggaccagtccct

SEQ ID NO: 24076 - DNA, 20 bp, Artificial Sequence
  Description of Artificial Sequence: Synthetic oligonucleotide
  Target: ATXN2; (-) strand; PAM type: NRG; PAM sequence: CAG
actcctccagtagcaaggac

SEQ ID NO: 24077 - DNA, 20 bp, Artificial Sequence
  Description of Artificial Sequence: Synthetic oligonucleotide
  Target: ATXN2; (-) strand; PAM type: NRG; PAM sequence: AGG
cagctactcctccagtagca

SEQ ID NO: 24078 - DNA, 20 bp, Artificial Sequence
  Description of Artificial Sequence: Synthetic oligonucleotide
  Target: ATXN2; (-) strand; PAM type: NRG; PAM sequence: AAG
gcagctactcctccagtagc

SEQ ID NO: 24079 - DNA, 20 bp, Artificial Sequence
  Description of Artificial Sequence: Synthetic oligonucleotide
  Target: ATXN2; (-) strand; PAM type: NRG; PAM sequence: TAG
tgaagcagctactcctccag

SEQ ID NO: 24080 - DNA, 20 bp, Artificial Sequence
  Description of Artificial Sequence: Synthetic oligonucleotide
  Target: ATXN2; (-) strand; PAM type: NRG; PAM sequence: CAG
cagtgaagcagctactcctc

SEQ ID NO: 24081 - DNA, 20 bp, Artificial Sequence
  Description of Artificial Sequence: Synthetic oligonucleotide
  Target: ATXN2; (-) strand; PAM type: NRG; PAM sequence: CAG
ccacaacccacccagtgaag

SEQ ID NO: 24082 - DNA, 20 bp, Artificial Sequence
  Description of Artificial Sequence: Synthetic oligonucleotide
  Target: ATXN2; (-) strand; PAM type: NRG; PAM sequence: AAG
atcccacaacccacccagtg

SEQ ID NO: 24083 - DNA, 20 bp, Artificial Sequence
  Description of Artificial Sequence: Synthetic oligonucleotide
  Target: ATXN2; (-) strand; PAM type: NRG; PAM sequence: CAG
tttgtatcccacaacccacc

SEQ ID NO: 24084 - DNA, 20 bp, Artificial Sequence
  Description of Artificial Sequence: Synthetic oligonucleotide
  Target: ATXN2; (-) strand; PAM type: NRG; PAM sequence: TAG
gggttccatatccagtggcc

SEQ ID NO: 24085 - DNA, 20 bp, Artificial Sequence
  Description of Artificial Sequence: Synthetic oligonucleotide
  Target: ATXN2; (-) strand; PAM type: NRG; PAM sequence: TGG
gggaggggttccatatccag

SEQ ID NO: 24086 - DNA, 20 bp, Artificial Sequence
  Description of Artificial Sequence: Synthetic oligonucleotide
  Target: ATXN2; (-) strand; PAM type: NRG; PAM sequence: CAG
gctgggaggggttccatatc

SEQ ID NO: 24087 - DNA, 20 bp, Artificial Sequence
  Description of Artificial Sequence: Synthetic oligonucleotide
  Target: ATXN2; (-) strand; PAM type: NRG; PAM sequence: GGG
cacagagtttctgctgggag

SEQ ID NO: 24088 - DNA, 20 bp, Artificial Sequence
  Description of Artificial Sequence: Synthetic oligonucleotide
  Target: ATXN2; (-) strand; PAM type: NRG; PAM sequence: GGG
tcacagagtttctgctggga

SEQ ID NO: 24089 - DNA, 20 bp, Artificial Sequence
  Description of Artificial Sequence: Synthetic oligonucleotide
  Target: ATXN2; (-) strand; PAM type: NRG; PAM sequence: AGG
atcacagagtttctgctggg

SEQ ID NO: 24090 - DNA, 20 bp, Artificial Sequence
  Description of Artificial Sequence: Synthetic oligonucleotide
  Target: ATXN2; (-) strand; PAM type: NRG; PAM sequence: GAG
aatcacagagtttctgctgg

SEQ ID NO: 24091 - DNA, 20 bp, Artificial Sequence
  Description of Artificial Sequence: Synthetic oligonucleotide
  Target: ATXN2; (-) strand; PAM type: NRG; PAM sequence: GGG
gaaatcacagagtttctgct

SEQ ID NO: 24092 - DNA, 20 bp, Artificial Sequence
  Description of Artificial Sequence: Synthetic oligonucleotide
  Target: ATXN2; (-) strand; PAM type: NRG; PAM sequence: TGG
cgaaatcacagagtttctgc

SEQ ID NO: 24093 - DNA, 20 bp, Artificial Sequence
  Description of Artificial Sequence: Synthetic oligonucleotide
  Target: ATXN2; (-) strand; PAM type: NRG; PAM sequence: GAG
gcgacatcctcgaaatcaca

SEQ ID NO: 24094 - DNA, 20 bp, Artificial Sequence
  Description of Artificial Sequence: Synthetic oligonucleotide
  Target: ATXN2; (-) strand; PAM type: NRG; PAM sequence: CAG
cagcgacatcctcgaaatca

SEQ ID NO: 24095 - DNA, 20 bp, Artificial Sequence
  Description of Artificial Sequence: Synthetic oligonucleotide
  Target: ATXN2; (-) strand; PAM type: NRG; PAM sequence: CAG
caaggatgtccccaaaggcc

SEQ ID NO: 24096 - DNA, 20 bp, Artificial Sequence
  Description of Artificial Sequence: Synthetic oligonucleotide
  Target: ATXN2; (-) strand; PAM type: NRG; PAM sequence: AGG
gcctccaaggatgtccccaa

SEQ ID NO: 24097 - DNA, 20 bp, Artificial Sequence
  Description of Artificial Sequence: Synthetic oligonucleotide
  Target: ATXN2; (-) strand; PAM type: NRG; PAM sequence: AAG
ggcctccaaggatgtcccca

SEQ ID NO: 24098 - DNA, 20 bp, Artificial Sequence
  Description of Artificial Sequence: Synthetic oligonucleotide
  Target: ATXN2; (-) strand; PAM type: NRG; PAM sequence: AGG
tttcttccttagggcctcca

SEQ ID NO: 24099 - DNA, 20 bp, Artificial Sequence
  Description of Artificial Sequence: Synthetic oligonucleotide
  Target: ATXN2; (-) strand; PAM type: NRG; PAM sequence: AAG
gtttcttccttagggcctcc

SEQ ID NO: 24100 - DNA, 20 bp, Artificial Sequence
  Description of Artificial Sequence: Synthetic oligonucleotide
  Target: ATXN2; (-) strand; PAM type: NRG; PAM sequence: GGG
tgttcactgtttcttcctta

SEQ ID NO: 24101 - DNA, 20 bp, Artificial Sequence
  Description of Artificial Sequence: Synthetic oligonucleotide
  Target: ATXN2; (-) strand; PAM type: NRG; PAM sequence: AGG
atgttcactgtttcttcctt

SEQ ID NO: 24102 - DNA, 20 bp, Artificial Sequence
  Description of Artificial Sequence: Synthetic oligonucleotide
  Target: ATXN2; (-) strand; PAM type: NRG; PAM sequence: TAG
gatgttcactgtttcttcct

SEQ ID NO: 24103 - DNA, 20 bp, Artificial Sequence
  Description of Artificial Sequence: Synthetic oligonucleotide
  Target: ATXN2; (-) strand; PAM type: NRG; PAM sequence: TGG
agtagtactgatgaatatca

SEQ ID NO: 24104 - DNA, 20 bp, Artificial Sequence
  Description of Artificial Sequence: Synthetic oligonucleotide
  Target: ATXN2; (-) strand; PAM type: NRG; PAM sequence: TAG
gggtgtatttagcagaaaag

SEQ ID NO: 24105 - DNA, 20 bp, Artificial Sequence
  Description of Artificial Sequence: Synthetic oligonucleotide
  Target: ATXN2; (-) strand; PAM type: NRG; PAM sequence: AAG
aatgggtgtatttagcagaa

SEQ ID NO: 24106 - DNA, 20 bp, Artificial Sequence
  Description of Artificial Sequence: Synthetic oligonucleotide
  Target: ATXN2; (-) strand; PAM type: NRG; PAM sequence: CAG
gtgtgaatgggtgtatttag

SEQ ID NO: 24107 - DNA, 20 bp, Artificial Sequence
  Description of Artificial Sequence: Synthetic oligonucleotide
  Target: ATXN2; (-) strand; PAM type: NRG; PAM sequence: TAG
tgtgtgtgaatgggtgtatt

SEQ ID NO: 24108 - DNA, 20 bp, Artificial Sequence
  Description of Artificial Sequence: Synthetic oligonucleotide
  Target: ATXN2; (-) strand; PAM type: NRG; PAM sequence: GGG
gtgtgcatgtgtgtgtgaat

SEQ ID NO: 24109 - DNA, 20 bp, Artificial Sequence
  Description of Artificial Sequence: Synthetic oligonucleotide
  Target: ATXN2; (-) strand; PAM type: NRG; PAM sequence: TGG
tgtgtgcatgtgtgtgtgaa

SEQ ID NO: 24110 - DNA, 20 bp, Artificial Sequence
  Description of Artificial Sequence: Synthetic oligonucleotide
  Target: ATXN2; (-) strand; PAM type: NRG; PAM sequence: GAG
ggaaaaactgtagagtgagt

SEQ ID NO: 24111 - DNA, 20 bp, Artificial Sequence
  Description of Artificial Sequence: Synthetic oligonucleotide
  Target: ATXN2; (-) strand; PAM type: NRG; PAM sequence: GAG
ccaaggaaaaactgtagagt

SEQ ID NO: 24112 - DNA, 20 bp, Artificial Sequence
  Description of Artificial Sequence: Synthetic oligonucleotide
  Target: ATXN2; (-) strand; PAM type: NRG; PAM sequence: GAG
ttaaccaaggaaaaactgta

SEQ ID NO: 24113 - DNA, 20 bp, Artificial Sequence
  Description of Artificial Sequence: Synthetic oligonucleotide
  Target: ATXN2; (-) strand; PAM type: NRG; PAM sequence: TAG
ttttaaccaaggaaaaactg

SEQ ID NO: 24114 - DNA, 20 bp, Artificial Sequence
  Description of Artificial Sequence: Synthetic oligonucleotide
  Target: ATXN2; (-) strand; PAM type: NRG; PAM sequence: AGG
tttttttctatttttaacca

SEQ ID NO: 24115 - DNA, 20 bp, Artificial Sequence
  Description of Artificial Sequence: Synthetic oligonucleotide
  Target: ATXN2; (-) strand; PAM type: NRG; PAM sequence: AAG
ttttttttctatttttaacc

SEQ ID NO: 24116 - DNA, 20 bp, Artificial Sequence
  Description of Artificial Sequence: Synthetic oligonucleotide
  Target: ATXN2; (-) strand; PAM type: NRG; PAM sequence: TGG
tatggccaaaaaaatatgta

SEQ ID NO: 24117 - DNA, 20 bp, Artificial Sequence
  Description of Artificial Sequence: Synthetic oligonucleotide
  Target: ATXN2; (-) strand; PAM type: NRG; PAM sequence: TGG
taattctgaaagaattagta

SEQ ID NO: 24118 - DNA, 20 bp, Artificial Sequence
  Description of Artificial Sequence: Synthetic oligonucleotide
  Target: ATXN2; (-) strand; PAM type: NRG; PAM sequence: TAG
caaaataattctgaaagaat

SEQ ID NO: 24119 - DNA, 20 bp, Artificial Sequence
  Description of Artificial Sequence: Synthetic oligonucleotide
  Target: ATXN2; (-) strand; PAM type: NRG; PAM sequence: AAG
attccacaaaataattctga

SEQ ID NO: 24120 - DNA, 20 bp, Artificial Sequence
  Description of Artificial Sequence: Synthetic oligonucleotide
  Target: ATXN2; (-) strand; PAM type: NRG; PAM sequence: TGG
aatttatttataaaactttg

SEQ ID NO: 24121 - DNA, 20 bp, Artificial Sequence
  Description of Artificial Sequence: Synthetic oligonucleotide
  Target: ATXN2; (-) strand; PAM type: NRG; PAM sequence: GGG
tccctttctttaaaaataaa

SEQ ID NO: 24122 - DNA, 20 bp, Artificial Sequence
  Description of Artificial Sequence: Synthetic oligonucleotide
  Target: ATXN2; (-) strand; PAM type: NRG; PAM sequence: AGG
ctccctttctttaaaaataa

SEQ ID NO: 24123 - DNA, 20 bp, Artificial Sequence
  Description of Artificial Sequence: Synthetic oligonucleotide
  Target: ATXN2; (-) strand; PAM type: NRG; PAM sequence: AAG
cctccctttctttaaaaata

SEQ ID NO: 24124 - DNA, 20 bp, Artificial Sequence
  Description of Artificial Sequence: Synthetic oligonucleotide
  Target: ATXN2; (-) strand; PAM type: NRG; PAM sequence: GAG
gattgctacagttcttttaa

SEQ ID NO: 24125 - DNA, 20 bp, Artificial Sequence
  Description of Artificial Sequence: Synthetic oligonucleotide
  Target: ATXN2; (-) strand; PAM type: NRG; PAM sequence: AAG
cagattgctacagttctttt

SEQ ID NO: 24126 - DNA, 20 bp, Artificial Sequence
  Description of Artificial Sequence: Synthetic oligonucleotide
  Target: ATXN2; (-) strand; PAM type: NRG; PAM sequence: CAG
atagttgaaacagattgcta

SEQ ID NO: 24127 - DNA, 20 bp, Artificial Sequence
  Description of Artificial Sequence: Synthetic oligonucleotide
  Target: ATXN2; (-) strand; PAM type: NRG; PAM sequence: CAG
caaataagacatagttgaaa

SEQ ID NO: 24128 - DNA, 20 bp, Artificial Sequence
  Description of Artificial Sequence: Synthetic oligonucleotide
  Target: ATXN2; (-) strand; PAM type: NRG; PAM sequence: TAG
atttctttacaaataagaca

SEQ ID NO: 24129 - DNA, 20 bp, Artificial Sequence
  Description of Artificial Sequence: Synthetic oligonucleotide
  Target: ATXN2; (-) strand; PAM type: NRG; PAM sequence: AAG
taacatatttctttacaaat

SEQ ID NO: 24130 - DNA, 20 bp, Artificial Sequence
  Description of Artificial Sequence: Synthetic oligonucleotide
  Target: ATXN2; (-) strand; PAM type: NRG; PAM sequence: TAG
tatcatgtagtcataatttc

SEQ ID NO: 24131 - DNA, 20 bp, Artificial Sequence
  Description of Artificial Sequence: Synthetic oligonucleotide
  Target: ATXN2; (-) strand; PAM type: NRG; PAM sequence: TAG
gttaaaaatattttatcatg

SEQ ID NO: 24132 - DNA, 20 bp, Artificial Sequence
  Description of Artificial Sequence: Synthetic oligonucleotide
  Target: ATXN2; (-) strand; PAM type: NRG; PAM sequence: AAG
ggaaaggtaaaatatatgga

SEQ ID NO: 24133 - DNA, 20 bp, Artificial Sequence
  Description of Artificial Sequence: Synthetic oligonucleotide
  Target: ATXN2; (-) strand; PAM type: NRG; PAM sequence: TGG
tcagggaaaggtaaaatata

SEQ ID NO: 24134 - DNA, 20 bp, Artificial Sequence
  Description of Artificial Sequence: Synthetic oligonucleotide
  Target: ATXN2; (-) strand; PAM type: NRG; PAM sequence: AGG
agaaaattcgggtcagggaa

SEQ ID NO: 24135 - DNA, 20 bp, Artificial Sequence
  Description of Artificial Sequence: Synthetic oligonucleotide
  Target: ATXN2; (-) strand; PAM type: NRG; PAM sequence: AAG
tagaaaattcgggtcaggga

SEQ ID NO: 24136 - DNA, 20 bp, Artificial Sequence
  Description of Artificial Sequence: Synthetic oligonucleotide
  Target: ATXN2; (-) strand; PAM type: NRG; PAM sequence: GGG
aatgtagaaaattcgggtca

SEQ ID NO: 24137 - DNA, 20 bp, Artificial Sequence
  Description of Artificial Sequence: Synthetic oligonucleotide
  Target: ATXN2; (-) strand; PAM type: NRG; PAM sequence: AGG
taatgtagaaaattcgggtc

SEQ ID NO: 24138 - DNA, 20 bp, Artificial Sequence
  Description of Artificial Sequence: Synthetic oligonucleotide
  Target: ATXN2; (-) strand; PAM type: NRG; PAM sequence: CAG
gtaatgtagaaaattcgggt

SEQ ID NO: 24139 - DNA, 20 bp, Artificial Sequence
  Description of Artificial Sequence: Synthetic oligonucleotide
  Target: ATXN2; (-) strand; PAM type: NRG; PAM sequence: GGG
agaagtaatgtagaaaattc

SEQ ID NO: 24140 - DNA, 20 bp, Artificial Sequence
  Description of Artificial Sequence: Synthetic oligonucleotide
  Target: ATXN2; (-) strand; PAM type: NRG; PAM sequence: CGG
tagaagtaatgtagaaaatt

SEQ ID NO: 24141 - DNA, 20 bp, Artificial Sequence
  Description of Artificial Sequence: Synthetic oligonucleotide
  Target: ATXN2; (-) strand; PAM type: NRG; PAM sequence: TAG
ttctaattttagaagtaatg

SEQ ID NO: 24142 - DNA, 20 bp, Artificial Sequence
  Description of Artificial Sequence: Synthetic oligonucleotide
  Target: ATXN2; (-) strand; PAM type: NRG; PAM sequence: AAG
ttttttttttctaattttag

SEQ ID NO: 24143 - DNA, 20 bp, Artificial Sequence
  Description of Artificial Sequence: Synthetic oligonucleotide
  Target: ATXN2; (-) strand; PAM type: NRG; PAM sequence: TAG
aaattttttttttctaattt

SEQ ID NO: 24144 - DNA, 20 bp, Artificial Sequence
  Description of Artificial Sequence: Synthetic oligonucleotide
  Target: ATXN2; (-) strand; PAM type: NRG; PAM sequence: TAG
tcggggtgtatagggattaa

SEQ ID NO: 24145 - DNA, 20 bp, Artificial Sequence
  Description of Artificial Sequence: Synthetic oligonucleotide
  Target: ATXN2; (-) strand; PAM type: NRG; PAM sequence: GGG
tagtggtatcggggtgtata

SEQ ID NO: 24146 - DNA, 20 bp, Artificial Sequence
  Description of Artificial Sequence: Synthetic oligonucleotide
  Target: ATXN2; (-) strand; PAM type: NRG; PAM sequence: AGG
ttagtggtatcggggtgtat

SEQ ID NO: 24147 - DNA, 20 bp, Artificial Sequence
  Description of Artificial Sequence: Synthetic oligonucleotide
  Target: ATXN2; (-) strand; PAM type: NRG; PAM sequence: TAG
tttagtggtatcggggtgta

SEQ ID NO: 24148 - DNA, 20 bp, Artificial Sequence
  Description of Artificial Sequence: Synthetic oligonucleotide
  Target: ATXN2; (-) strand; PAM type: NRG; PAM sequence: GGG
catatgttttagtggtatcg

SEQ ID NO: 24149 - DNA, 20 bp, Artificial Sequence
  Description of Artificial Sequence: Synthetic oligonucleotide
  Target: ATXN2; (-) strand; PAM type: NRG; PAM sequence: GGG
acatatgttttagtggtatc

SEQ ID NO: 24150 - DNA, 20 bp, Artificial Sequence
  Description of Artificial Sequence: Synthetic oligonucleotide
  Target: ATXN2; (-) strand; PAM type: NRG; PAM sequence: CGG
tacatatgttttagtggtat

SEQ ID NO: 24151 - DNA, 20 bp, Artificial Sequence
  Description of Artificial Sequence: Synthetic oligonucleotide
  Target: ATXN2; (-) strand; PAM type: NRG; PAM sequence: TGG
ggtatgtacatatgttttag

SEQ ID NO: 24152 - DNA, 20 bp, Artificial Sequence
  Description of Artificial Sequence: Synthetic oligonucleotide
  Target: ATXN2; (-) strand; PAM type: NRG; PAM sequence: TAG
aagggtatgtacatatgttt

SEQ ID NO: 24153 - DNA, 20 bp, Artificial Sequence
  Description of Artificial Sequence: Synthetic oligonucleotide
  Target: ATXN2; (-) strand; PAM type: NRG; PAM sequence: GGG
attttagagaaatttaagaa

SEQ ID NO: 24154 - DNA, 20 bp, Artificial Sequence
  Description of Artificial Sequence: Synthetic oligonucleotide
  Target: ATXN2; (-) strand; PAM type: NRG; PAM sequence: AGG
aattttagagaaatttaaga

SEQ ID NO: 24155 - DNA, 20 bp, Artificial Sequence
  Description of Artificial Sequence: Synthetic oligonucleotide
  Target: ATXN2; (-) strand; PAM type: NRG; PAM sequence: AAG
aaattttagagaaatttaag

SEQ ID NO: 24156 - DNA, 20 bp, Artificial Sequence
  Description of Artificial Sequence: Synthetic oligonucleotide
  Target: ATXN2; (-) strand; PAM type: NRG; PAM sequence: AAG
ctaaaattttagagaaattt

SEQ ID NO: 24157 - DNA, 20 bp, Artificial Sequence
  Description of Artificial Sequence: Synthetic oligonucleotide
  Target: ATXN2; (-) strand; PAM type: NRG; PAM sequence: GAG
ataaataaactaaaatttta

SEQ ID NO: 24158 - DNA, 20 bp, Artificial Sequence
  Description of Artificial Sequence: Synthetic oligonucleotide
  Target: ATXN2; (-) strand; PAM type: NRG; PAM sequence: TAG
agataaataaactaaaattt

SEQ ID NO: 24159 - DNA, 20 bp, Artificial Sequence
  Description of Artificial Sequence: Synthetic oligonucleotide
  Target: ATXN2; (-) strand; PAM type: NRG; PAM sequence: GAG
aattgatgatcatgatagaa

SEQ ID NO: 24160 - DNA, 20 bp, Artificial Sequence
  Description of Artificial Sequence: Synthetic oligonucleotide
  Target: ATXN2; (-) strand; PAM type: NRG; PAM sequence: AAG
aaaattgatgatcatgatag

SEQ ID NO: 24161 - DNA, 20 bp, Artificial Sequence
  Description of Artificial Sequence: Synthetic oligonucleotide
  Target: ATXN2; (-) strand; PAM type: NRG; PAM sequence: TAG
tttaaaattgatgatcatga

SEQ ID NO: 24162 - DNA, 20 bp, Artificial Sequence
  Description of Artificial Sequence: Synthetic oligonucleotide
  Target: ATXN2; (-) strand; PAM type: NRG; PAM sequence: GAG
actgcttactgttttaagcc

SEQ ID NO: 24163 - DNA, 20 bp, Artificial Sequence
  Description of Artificial Sequence: Synthetic oligonucleotide
  Target: ATXN2; (-) strand; PAM type: NRG; PAM sequence: AAG
aggttactgcttactgtttt

SEQ ID NO: 24164 - DNA, 20 bp, Artificial Sequence
  Description of Artificial Sequence: Synthetic oligonucleotide
  Target: ATXN2; (-) strand; PAM type: NRG; PAM sequence: AGG
aagcctaagaaactgcttac

SEQ ID NO: 24165 - DNA, 20 bp, Artificial Sequence
  Description of Artificial Sequence: Synthetic oligonucleotide
  Target: ATXN2; (-) strand; PAM type: NRG; PAM sequence: CAG
taagcctaagaaactgctta

SEQ ID NO: 24166 - DNA, 20 bp, Artificial Sequence
  Description of Artificial Sequence: Synthetic oligonucleotide
  Target: ATXN2; (-) strand; PAM type: NRG; PAM sequence: AAG
gctcacagcctgctaagcct

SEQ ID NO: 24167 - DNA, 20 bp, Artificial Sequence
  Description of Artificial Sequence: Synthetic oligonucleotide
  Target: ATXN2; (-) strand; PAM type: NRG; PAM sequence: AAG
ttttcagctcacagcctgct

SEQ ID NO: 24168 - DNA, 20 bp, Artificial Sequence
  Description of Artificial Sequence: Synthetic oligonucleotide
  Target: ATXN2; (-) strand; PAM type: NRG; PAM sequence: CAG
ttaatagaattttcagctca

SEQ ID NO: 24169 - DNA, 20 bp, Artificial Sequence
  Description of Artificial Sequence: Synthetic oligonucleotide
  Target: ATXN2; (-) strand; PAM type: NRG; PAM sequence: CAG
catccctttaatagaatttt

SEQ ID NO: 24170 - DNA, 20 bp, Artificial Sequence
  Description of Artificial Sequence: Synthetic oligonucleotide
  Target: ATXN2; (-) strand; PAM type: NRG; PAM sequence: TAG
aatacaagtcatccctttaa

SEQ ID NO: 24171 - DNA, 20 bp, Artificial Sequence
  Description of Artificial Sequence: Synthetic oligonucleotide
  Target: ATXN2; (-) strand; PAM type: NRG; PAM sequence: AAG
atctattaatagactaatac

SEQ ID NO: 24172 - DNA, 20 bp, Artificial Sequence
  Description of Artificial Sequence: Synthetic oligonucleotide
  Target: ATXN2; (-) strand; PAM type: NRG; PAM sequence: TAG
ttattttggtcatctattaa

SEQ ID NO: 24173 - DNA, 20 bp, Artificial Sequence
  Description of Artificial Sequence: Synthetic oligonucleotide
  Target: ATXN2; (-) strand; PAM type: NRG; PAM sequence: TGG
cccccaaatgtcagttattt

SEQ ID NO: 24174 - DNA, 20 bp, Artificial Sequence
  Description of Artificial Sequence: Synthetic oligonucleotide
  Target: ATXN2; (-) strand; PAM type: NRG; PAM sequence: CAG
ctgatttctcccccaaatgt

SEQ ID NO: 24175 - DNA, 20 bp, Artificial Sequence
  Description of Artificial Sequence: Synthetic oligonucleotide
  Target: ATXN2; (-) strand; PAM type: NRG; PAM sequence: TAG
tagaattttgacaattcata

SEQ ID NO: 24176 - DNA, 20 bp, Artificial Sequence
  Description of Artificial Sequence: Synthetic oligonucleotide
  Target: ATXN2; (-) strand; PAM type: NRG; PAM sequence: TAG
gcatggcagaatcaataatg

SEQ ID NO: 24177 - DNA, 20 bp, Artificial Sequence
  Description of Artificial Sequence: Synthetic oligonucleotide
  Target: ATXN2; (-) strand; PAM type: NRG; PAM sequence: CAG
agtagtcactagtggcatgg

SEQ ID NO: 24178 - DNA, 20 bp, Artificial Sequence
  Description of Artificial Sequence: Synthetic oligonucleotide
  Target: ATXN2; (-) strand; PAM type: NRG; PAM sequence: TGG
aagagtagtcactagtggca

SEQ ID NO: 24179 - DNA, 20 bp, Artificial Sequence
  Description of Artificial Sequence: Synthetic oligonucleotide
  Target: ATXN2; (-) strand; PAM type: NRG; PAM sequence: TGG
ttagaaagagtagtcactag

SEQ ID NO: 24180 - DNA, 20 bp, Artificial Sequence
  Description of Artificial Sequence: Synthetic oligonucleotide
  Target: ATXN2; (-) strand; PAM type: NRG; PAM sequence: TAG
gatttagaaagagtagtcac

SEQ ID NO: 24181 - DNA, 20 bp, Artificial Sequence
  Description of Artificial Sequence: Synthetic oligonucleotide
  Target: ATXN2; (-) strand; PAM type: NRG; PAM sequence: TAG
gtagactgatttagaaagag

SEQ ID NO: 24182 - DNA, 20 bp, Artificial Sequence
  Description of Artificial Sequence: Synthetic oligonucleotide
  Target: ATXN2; (-) strand; PAM type: NRG; PAM sequence: GAG
acagtagactgatttagaaa

SEQ ID NO: 24183 - DNA, 20 bp, Artificial Sequence
  Description of Artificial Sequence: Synthetic oligonucleotide
  Target: ATXN2; (-) strand; PAM type: NRG; PAM sequence: AAG
gcacagtagactgatttaga

SEQ ID NO: 24184 - DNA, 20 bp, Artificial Sequence
  Description of Artificial Sequence: Synthetic oligonucleotide
  Target: ATXN2; (-) strand; PAM type: NRG; PAM sequence: TAG
taatgcacagtagactgatt

SEQ ID NO: 24185 - DNA, 20 bp, Artificial Sequence
  Description of Artificial Sequence: Synthetic oligonucleotide
  Target: ATXN2; (-) strand; PAM type: NRG; PAM sequence: TAG
tagattggtctaatgcacag

SEQ ID NO: 24186 - DNA, 20 bp, Artificial Sequence
  Description of Artificial Sequence: Synthetic oligonucleotide
  Target: ATXN2; (-) strand; PAM type: NRG; PAM sequence: CAG
tgatagattggtctaatgca

SEQ ID NO: 24187 - DNA, 20 bp, Artificial Sequence
  Description of Artificial Sequence: Synthetic oligonucleotide
  Target: ATXN2; (-) strand; PAM type: NRG; PAM sequence: TGG
cactcttttacctgatagat

SEQ ID NO: 24188 - DNA, 20 bp, Artificial Sequence
  Description of Artificial Sequence: Synthetic oligonucleotide
  Target: ATXN2; (-) strand; PAM type: NRG; PAM sequence: TAG
ctgtccactcttttacctga

SEQ ID NO: 24189 - DNA, 20 bp, Artificial Sequence
  Description of Artificial Sequence: Synthetic oligonucleotide
  Target: ATXN2; (-) strand; PAM type: NRG; PAM sequence: GGG
ccagtaggcttctctgatga

SEQ ID NO: 24190 - DNA, 20 bp, Artificial Sequence
  Description of Artificial Sequence: Synthetic oligonucleotide
  Target: ATXN2; (-) strand; PAM type: NRG; PAM sequence: AGG
accagtaggcttctctgatg

SEQ ID NO: 24191 - DNA, 20 bp, Artificial Sequence
  Description of Artificial Sequence: Synthetic oligonucleotide
  Target: ATXN2; (-) strand; PAM type: NRG; PAM sequence: GAG
caccagtaggcttctctgat

SEQ ID NO: 24192 - DNA, 20 bp, Artificial Sequence
  Description of Artificial Sequence: Synthetic oligonucleotide
  Target: ATXN2; (-) strand; PAM type: NRG; PAM sequence: AGG
cgcttggtgttaacaccagt

SEQ ID NO: 24193 - DNA, 20 bp, Artificial Sequence
  Description of Artificial Sequence: Synthetic oligonucleotide
  Target: ATXN2; (-) strand; PAM type: NRG; PAM sequence: TAG
tcgcttggtgttaacaccag

SEQ ID NO: 24194 - DNA, 20 bp, Artificial Sequence
  Description of Artificial Sequence: Synthetic oligonucleotide
  Target: ATXN2; (-) strand; PAM type: NRG; PAM sequence: CAG
ttttcgcttggtgttaacac

SEQ ID NO: 24195 - DNA, 20 bp, Artificial Sequence
  Description of Artificial Sequence: Synthetic oligonucleotide
  Target: ATXN2; (-) strand; PAM type: NRG; PAM sequence: TGG
acattagggaagttttcgct

SEQ ID NO: 24196 - DNA, 20 bp, Artificial Sequence
  Description of Artificial Sequence: Synthetic oligonucleotide
  Target: ATXN2; (-) strand; PAM type: NRG; PAM sequence: AAG
atttggctttgacattaggg

SEQ ID NO: 24197 - DNA, 20 bp, Artificial Sequence
  Description of Artificial Sequence: Synthetic oligonucleotide
  Target: ATXN2; (-) strand; PAM type: NRG; PAM sequence: GGG
gagatttggctttgacatta

SEQ ID NO: 24198 - DNA, 20 bp, Artificial Sequence
  Description of Artificial Sequence: Synthetic oligonucleotide
  Target: ATXN2; (-) strand; PAM type: NRG; PAM sequence: AGG
ggagatttggctttgacatt

SEQ ID NO: 24199 - DNA, 20 bp, Artificial Sequence
  Description of Artificial Sequence: Synthetic oligonucleotide
  Target: ATXN2; (-) strand; PAM type: NRG; PAM sequence: TAG
aggagatttggctttgacat

SEQ ID NO: 24200 - DNA, 20 bp, Artificial Sequence
  Description of Artificial Sequence: Synthetic oligonucleotide
  Target: ATXN2; (-) strand; PAM type: NRG; PAM sequence: TGG
ggtgagagagtgaggagatt

SEQ ID NO: 24201 - DNA, 20 bp, Artificial Sequence
  Description of Artificial Sequence: Synthetic oligonucleotide
  Target: ATXN2; (-) strand; PAM type: NRG; PAM sequence: GAG
cagccgggtgagagagtgag

SEQ ID NO: 24202 - DNA, 20 bp, Artificial Sequence
  Description of Artificial Sequence: Synthetic oligonucleotide
  Target: ATXN2; (-) strand; PAM type: NRG; PAM sequence: AGG
ggcagccgggtgagagagtg

SEQ ID NO: 24203 - DNA, 20 bp, Artificial Sequence
  Description of Artificial Sequence: Synthetic oligonucleotide
  Target: ATXN2; (-) strand; PAM type: NRG; PAM sequence: GAG
tggcagccgggtgagagagt

SEQ ID NO: 24204 - DNA, 20 bp, Artificial Sequence
  Description of Artificial Sequence: Synthetic oligonucleotide
  Target: ATXN2; (-) strand; PAM type: NRG; PAM sequence: GAG
agtttggcagccgggtgaga

SEQ ID NO: 24205 - DNA, 20 bp, Artificial Sequence
  Description of Artificial Sequence: Synthetic oligonucleotide
  Target: ATXN2; (-) strand; PAM type: NRG; PAM sequence: GAG
agagtttggcagccgggtga

SEQ ID NO: 24206 - DNA, 20 bp, Artificial Sequence
  Description of Artificial Sequence: Synthetic oligonucleotide
  Target: ATXN2; (-) strand; PAM type: NRG; PAM sequence: GAG
aaagagtttggcagccgggt

SEQ ID NO: 24207 - DNA, 20 bp, Artificial Sequence
  Description of Artificial Sequence: Synthetic oligonucleotide
  Target: ATXN2; (-) strand; PAM type: NRG; PAM sequence: GGG
ttctaaagagtttggcagcc

SEQ ID NO: 24208 - DNA, 20 bp, Artificial Sequence
  Description of Artificial Sequence: Synthetic oligonucleotide
  Target: ATXN2; (-) strand; PAM type: NRG; PAM sequence: CGG
gttctaaagagtttggcagc

SEQ ID NO: 24209 - DNA, 20 bp, Artificial Sequence
  Description of Artificial Sequence: Synthetic oligonucleotide
  Target: ATXN2; (-) strand; PAM type: NRG; PAM sequence: CAG
tgaagttctaaagagtttgg

SEQ ID NO: 24210 - DNA, 20 bp, Artificial Sequence
  Description of Artificial Sequence: Synthetic oligonucleotide
  Target: ATXN2; (-) strand; PAM type: NRG; PAM sequence: TGG
atttgaagttctaaagagtt

SEQ ID NO: 24211 - DNA, 20 bp, Artificial Sequence
  Description of Artificial Sequence: Synthetic oligonucleotide
  Target: ATXN2; (-) strand; PAM type: NRG; PAM sequence: GAG
tattaatttgaagttctaaa

SEQ ID NO: 24212 - DNA, 20 bp, Artificial Sequence
  Description of Artificial Sequence: Synthetic oligonucleotide
  Target: ATXN2; (-) strand; PAM type: NRG; PAM sequence: AAG
tatattaatttgaagttcta

SEQ ID NO: 24213 - DNA, 20 bp, Artificial Sequence
  Description of Artificial Sequence: Synthetic oligonucleotide
  Target: ATXN2; (-) strand; PAM type: NRG; PAM sequence: AAG
tggcaacatatattaatttg

SEQ ID NO: 24214 - DNA, 20 bp, Artificial Sequence
  Description of Artificial Sequence: Synthetic oligonucleotide
  Target: ATXN2; (-) strand; PAM type: NRG; PAM sequence: TGG
aaataaaataataattctat

SEQ ID NO: 24215 - DNA, 20 bp, Artificial Sequence
  Description of Artificial Sequence: Synthetic oligonucleotide
  Target: ATXN2; (-) strand; PAM type: NRG; PAM sequence: CAG
tccagcctgggcgacagaga

SEQ ID NO: 24216 - DNA, 20 bp, Artificial Sequence
  Description of Artificial Sequence: Synthetic oligonucleotide
  Target: ATXN2; (-) strand; PAM type: NRG; PAM sequence: GAG
gcactccagcctgggcgaca

SEQ ID NO: 24217 - DNA, 20 bp, Artificial Sequence
  Description of Artificial Sequence: Synthetic oligonucleotide
  Target: ATXN2; (-) strand; PAM type: NRG; PAM sequence: CAG
ctgcactccagcctgggcga

SEQ ID NO: 24218 - DNA, 20 bp, Artificial Sequence
  Description of Artificial Sequence: Synthetic oligonucleotide
  Target: ATXN2; (-) strand; PAM type: NRG; PAM sequence: GGG
gtaccactgcactccagcct

SEQ ID NO: 24219 - DNA, 20 bp, Artificial Sequence
  Description of Artificial Sequence: Synthetic oligonucleotide
  Target: ATXN2; (-) strand; PAM type: NRG; PAM sequence: TGG
cgtaccactgcactccagcc

SEQ ID NO: 24220 - DNA, 20 bp, Artificial Sequence
  Description of Artificial Sequence: Synthetic oligonucleotide
  Target: ATXN2; (-) strand; PAM type: NRG; PAM sequence: CAG
gagatcgtaccactgcactc

SEQ ID NO: 24221 - DNA, 20 bp, Artificial Sequence
  Description of Artificial Sequence: Synthetic oligonucleotide
  Target: ATXN2; (-) strand; PAM type: NRG; PAM sequence: GAG
ggcagaggttgcagtgagtt

SEQ ID NO: 24222 - DNA, 20 bp, Artificial Sequence
  Description of Artificial Sequence: Synthetic oligonucleotide
  Target: ATXN2; (-) strand; PAM type: NRG; PAM sequence: GAG
tgggaggcagaggttgcagt

SEQ ID NO: 24223 - DNA, 20 bp, Artificial Sequence
  Description of Artificial Sequence: Synthetic oligonucleotide
  Target: ATXN2; (-) strand; PAM type: NRG; PAM sequence: CAG
aacctgggaggcagaggttg

SEQ ID NO: 24224 - DNA, 20 bp, Artificial Sequence
  Description of Artificial Sequence: Synthetic oligonucleotide
  Target: ATXN2; (-) strand; PAM type: NRG; PAM sequence: AGG
cacttgaacctgggaggcag

SEQ ID NO: 24225 - DNA, 20 bp, Artificial Sequence
  Description of Artificial Sequence: Synthetic oligonucleotide
  Target: ATXN2; (-) strand; PAM type: NRG; PAM sequence: GAG
tcacttgaacctgggaggca

SEQ ID NO: 24226 - DNA, 20 bp, Artificial Sequence
  Description of Artificial Sequence: Synthetic oligonucleotide
  Target: ATXN2; (-) strand; PAM type: NRG; PAM sequence: CAG
aatcacttgaacctgggagg

SEQ ID NO: 24227 - DNA, 20 bp, Artificial Sequence
  Description of Artificial Sequence: Synthetic oligonucleotide
  Target: ATXN2; (-) strand; PAM type: NRG; PAM sequence: AGG
gagaatcacttgaacctggg

SEQ ID NO: 24228 - DNA, 20 bp, Artificial Sequence
  Description of Artificial Sequence: Synthetic oligonucleotide
  Target: ATXN2; (-) strand; PAM type: NRG; PAM sequence: GAG
ggagaatcacttgaacctgg

SEQ ID NO: 24229 - DNA, 20 bp, Artificial Sequence
  Description of Artificial Sequence: Synthetic oligonucleotide
  Target: ATXN2; (-) strand; PAM type: NRG; PAM sequence: GGG
caggagaatcacttgaacct

SEQ ID NO: 24230 - DNA, 20 bp, Artificial Sequence
  Description of Artificial Sequence: Synthetic oligonucleotide
  Target: ATXN2; (-) strand; PAM type: NRG; PAM sequence: TGG
gcaggagaatcacttgaacc

SEQ ID NO: 24231 - DNA, 20 bp, Artificial Sequence
  Description of Artificial Sequence: Synthetic oligonucleotide
  Target: ATXN2; (-) strand; PAM type: NRG; PAM sequence: GAG
tacttgggaggctgaggcag

SEQ ID NO: 24232 - DNA, 20 bp, Artificial Sequence
  Description of Artificial Sequence: Synthetic oligonucleotide
  Target: ATXN2; (-) strand; PAM type: NRG; PAM sequence: AGG
gctacttgggaggctgaggc

SEQ ID NO: 24233 - DNA, 20 bp, Artificial Sequence
  Description of Artificial Sequence: Synthetic oligonucleotide
  Target: ATXN2; (-) strand; PAM type: NRG; PAM sequence: CAG
agctacttgggaggctgagg

SEQ ID NO: 24234 - DNA, 20 bp, Artificial Sequence
  Description of Artificial Sequence: Synthetic oligonucleotide
  Target: ATXN2; (-) strand; PAM type: NRG; PAM sequence: AGG
cccagctacttgggaggctg

SEQ ID NO: 24235 - DNA, 20 bp, Artificial Sequence
  Description of Artificial Sequence: Synthetic oligonucleotide
  Target: ATXN2; (-) strand; PAM type: NRG; PAM sequence: GAG
acccagctacttgggaggct

SEQ ID NO: 24236 - DNA, 20 bp, Artificial Sequence
  Description of Artificial Sequence: Synthetic oligonucleotide
  Target: ATXN2; (-) strand; PAM type: NRG; PAM sequence: AGG
aaaatacccagctacttggg

SEQ ID NO: 24237 - DNA, 20 bp, Artificial Sequence
  Description of Artificial Sequence: Synthetic oligonucleotide
  Target: ATXN2; (-) strand; PAM type: NRG; PAM sequence: GAG
aaaaatacccagctacttgg

SEQ ID NO: 24238 - DNA, 20 bp, Artificial Sequence
  Description of Artificial Sequence: Synthetic oligonucleotide
  Target: ATXN2; (-) strand; PAM type: NRG; PAM sequence: GGG
ctaaaaatacccagctactt

SEQ ID NO: 24239 - DNA, 20 bp, Artificial Sequence
  Description of Artificial Sequence: Synthetic oligonucleotide
  Target: ATXN2; (-) strand; PAM type: NRG; PAM sequence: TGG
actaaaaatacccagctact

SEQ ID NO: 24240 - DNA, 20 bp, Artificial Sequence
  Description of Artificial Sequence: Synthetic oligonucleotide
  Target: ATXN2; (-) strand; PAM type: NRG; PAM sequence: CAG
tcgtctctactaaaaatacc

SEQ ID NO: 24241 - DNA, 20 bp, Artificial Sequence
  Description of Artificial Sequence: Synthetic oligonucleotide
  Target: ATXN2; (-) strand; PAM type: NRG; PAM sequence: TGG
tgagaccagcctggccaaca

SEQ ID NO: 24242 - DNA, 20 bp, Artificial Sequence
  Description of Artificial Sequence: Synthetic oligonucleotide
  Target: ATXN2; (-) strand; PAM type: NRG; PAM sequence: TGG
tcaggagtttgagaccagcc

SEQ ID NO: 24243 - DNA, 20 bp, Artificial Sequence
  Description of Artificial Sequence: Synthetic oligonucleotide
  Target: ATXN2; (-) strand; PAM type: NRG; PAM sequence: CAG
tgaggtcaggagtttgagac

SEQ ID NO: 24244 - DNA, 20 bp, Artificial Sequence
  Description of Artificial Sequence: Synthetic oligonucleotide
  Target: ATXN2; (-) strand; PAM type: NRG; PAM sequence: GAG
tcacttgaggtcaggagttt

SEQ ID NO: 24245 - DNA, 20 bp, Artificial Sequence
  Description of Artificial Sequence: Synthetic oligonucleotide
  Target: ATXN2; (-) strand; PAM type: NRG; PAM sequence: GAG
ggtggatcacttgaggtcag

SEQ ID NO: 24246 - DNA, 20 bp, Artificial Sequence
  Description of Artificial Sequence: Synthetic oligonucleotide
  Target: ATXN2; (-) strand; PAM type: NRG; PAM sequence: AGG
caggtggatcacttgaggtc

SEQ ID NO: 24247 - DNA, 20 bp, Artificial Sequence
  Description of Artificial Sequence: Synthetic oligonucleotide
  Target: ATXN2; (-) strand; PAM type: NRG; PAM sequence: CAG
gcaggtggatcacttgaggt

SEQ ID NO: 24248 - DNA, 20 bp, Artificial Sequence
  Description of Artificial Sequence: Synthetic oligonucleotide
  Target: ATXN2; (-) strand; PAM type: NRG; PAM sequence: AGG
tgaggcaggtggatcacttg

SEQ ID NO: 24249 - DNA, 20 bp, Artificial Sequence
  Description of Artificial Sequence: Synthetic oligonucleotide
  Target: ATXN2; (-) strand; PAM type: NRG; PAM sequence: GAG
ctgaggcaggtggatcactt

SEQ ID NO: 24250 - DNA, 20 bp, Artificial Sequence
  Description of Artificial Sequence: Synthetic oligonucleotide
  Target: ATXN2; (-) strand; PAM type: NRG; PAM sequence: TGG
ctttgggaggctgaggcagg

SEQ ID NO: 24251 - DNA, 20 bp, Artificial Sequence
  Description of Artificial Sequence: Synthetic oligonucleotide
  Target: ATXN2; (-) strand; PAM type: NRG; PAM sequence: AGG
gcactttgggaggctgaggc

SEQ ID NO: 24252 - DNA, 20 bp, Artificial Sequence
  Description of Artificial Sequence: Synthetic oligonucleotide
  Target: ATXN2; (-) strand; PAM type: NRG; PAM sequence: CAG
agcactttgggaggctgagg

SEQ ID NO: 24253 - DNA, 20 bp, Artificial Sequence
  Description of Artificial Sequence: Synthetic oligonucleotide
  Target: ATXN2; (-) strand; PAM type: NRG; PAM sequence: AGG
ctcagcactttgggaggctg

SEQ ID NO: 24254 - DNA, 20 bp, Artificial Sequence
  Description of Artificial Sequence: Synthetic oligonucleotide
  Target: ATXN2; (-) strand; PAM type: NRG; PAM sequence: GAG
tctcagcactttgggaggct

SEQ ID NO: 24255 - DNA, 20 bp, Artificial Sequence
  Description of Artificial Sequence: Synthetic oligonucleotide
  Target: ATXN2; (-) strand; PAM type: NRG; PAM sequence: AGG
tgtaatctcagcactttggg

SEQ ID NO: 24256 - DNA, 20 bp, Artificial Sequence
  Description of Artificial Sequence: Synthetic oligonucleotide
  Target: ATXN2; (-) strand; PAM type: NRG; PAM sequence: GAG
ctgtaatctcagcactttgg

SEQ ID NO: 24257 - DNA, 20 bp, Artificial Sequence
  Description of Artificial Sequence: Synthetic oligonucleotide
  Target: ATXN2; (-) strand; PAM type: NRG; PAM sequence: GGG
gcctgtaatctcagcacttt

SEQ ID NO: 24258 - DNA, 20 bp, Artificial Sequence
  Description of Artificial Sequence: Synthetic oligonucleotide
  Target: ATXN2; (-) strand; PAM type: NRG; PAM sequence: TGG
cgcctgtaatctcagcactt

SEQ ID NO: 24259 - DNA, 20 bp, Artificial Sequence
  Description of Artificial Sequence: Synthetic oligonucleotide
  Target: ATXN2; (-) strand; PAM type: NRG; PAM sequence: CAG
gtggctaacgcctgtaatct

SEQ ID NO: 24260 - DNA, 20 bp, Artificial Sequence
  Description of Artificial Sequence: Synthetic oligonucleotide
  Target: ATXN2; (-) strand; PAM type: NRG; PAM sequence: TGG
ctgttggaagccaggcatgg

SEQ ID NO: 24261 - DNA, 20 bp, Artificial Sequence
  Description of Artificial Sequence: Synthetic oligonucleotide
  Target: ATXN2; (-) strand; PAM type: NRG; PAM sequence: TGG
ttcctgttggaagccaggca

SEQ ID NO: 24262 - DNA, 20 bp, Artificial Sequence
  Description of Artificial Sequence: Synthetic oligonucleotide
  Target: ATXN2; (-) strand; PAM type: NRG; PAM sequence: AGG
ttaaattcctgttggaagcc

SEQ ID NO: 24263 - DNA, 20 bp, Artificial Sequence
  Description of Artificial Sequence: Synthetic oligonucleotide
  Target: ATXN2; (-) strand; PAM type: NRG; PAM sequence: CAG
tttaaattcctgttggaagc

SEQ ID NO: 24264 - DNA, 20 bp, Artificial Sequence
  Description of Artificial Sequence: Synthetic oligonucleotide
  Target: ATXN2; (-) strand; PAM type: NRG; PAM sequence: AAG
cgtgtttaaattcctgttgg

SEQ ID NO: 24265 - DNA, 20 bp, Artificial Sequence
  Description of Artificial Sequence: Synthetic oligonucleotide
  Target: ATXN2; (-) strand; PAM type: NRG; PAM sequence: TGG
gttcgtgtttaaattcctgt

SEQ ID NO: 24266 - DNA, 20 bp, Artificial Sequence
  Description of Artificial Sequence: Synthetic oligonucleotide
  Target: ATXN2; (-) strand; PAM type: NRG; PAM sequence: AAG
ataacattagcattcttcta

SEQ ID NO: 24267 - DNA, 20 bp, Artificial Sequence
  Description of Artificial Sequence: Synthetic oligonucleotide
  Target: ATXN2; (-) strand; PAM type: NRG; PAM sequence: TAG
aaaattatagtgtataacat

SEQ ID NO: 24268 - DNA, 20 bp, Artificial Sequence
  Description of Artificial Sequence: Synthetic oligonucleotide
  Target: ATXN2; (-) strand; PAM type: NRG; PAM sequence: TAG
atatttccatttgaaaatta

SEQ ID NO: 24269 - DNA, 20 bp, Artificial Sequence
  Description of Artificial Sequence: Synthetic oligonucleotide
  Target: ATXN2; (-) strand; PAM type: NRG; PAM sequence: GAG
tatactttctgtgtcattca

SEQ ID NO: 24270 - DNA, 20 bp, Artificial Sequence
  Description of Artificial Sequence: Synthetic oligonucleotide
  Target: ATXN2; (-) strand; PAM type: NRG; PAM sequence: CAG
aatatactttctgtgtcatt

SEQ ID NO: 24271 - DNA, 20 bp, Artificial Sequence
  Description of Artificial Sequence: Synthetic oligonucleotide
  Target: ATXN2; (-) strand; PAM type: NRG; PAM sequence: CAG
gctcatgtattaacttcaca

SEQ ID NO: 24272 - DNA, 20 bp, Artificial Sequence
  Description of Artificial Sequence: Synthetic oligonucleotide
  Target: ATXN2; (-) strand; PAM type: NRG; PAM sequence: AGG
ctttattacattaagattta

SEQ ID NO: 24273 - DNA, 20 bp, Artificial Sequence
  Description of Artificial Sequence: Synthetic oligonucleotide
  Target: ATXN2; (-) strand; PAM type: NRG; PAM sequence: AAG
tctttattacattaagattt

SEQ ID NO: 24274 - DNA, 20 bp, Artificial Sequence
  Description of Artificial Sequence: Synthetic oligonucleotide
  Target: ATXN2; (-) strand; PAM type: NRG; PAM sequence: AAG
gtgaacatctttattacatt

SEQ ID NO: 24275 - DNA, 20 bp, Artificial Sequence
  Description of Artificial Sequence: Synthetic oligonucleotide
  Target: ATXN2; (-) strand; PAM type: NRG; PAM sequence: GAG
gtaagcgatgtttatttaat

SEQ ID NO: 24276 - DNA, 20 bp, Artificial Sequence
  Description of Artificial Sequence: Synthetic oligonucleotide
  Target: ATXN2; (-) strand; PAM type: NRG; PAM sequence: AAG
ttgtagtccatcatttgagt

SEQ ID NO: 24277 - DNA, 20 bp, Artificial Sequence
  Description of Artificial Sequence: Synthetic oligonucleotide
  Target: ATXN2; (-) strand; PAM type: NRG; PAM sequence: GAG
tttcttgtagtccatcattt

SEQ ID NO: 24278 - DNA, 20 bp, Artificial Sequence
  Description of Artificial Sequence: Synthetic oligonucleotide
  Target: ATXN2; (-) strand; PAM type: NRG; PAM sequence: TAG
ttctgttgatatttttcttg

SEQ ID NO: 24279 - DNA, 20 bp, Artificial Sequence
  Description of Artificial Sequence: Synthetic oligonucleotide
  Target: ATXN2; (-) strand; PAM type: NRG; PAM sequence: TGG
gctcaaaagggccttaatag

SEQ ID NO: 24280 - DNA, 20 bp, Artificial Sequence
  Description of Artificial Sequence: Synthetic oligonucleotide
  Target: ATXN2; (-) strand; PAM type: NRG; PAM sequence: TAG
tttgctcaaaagggccttaa

SEQ ID NO: 24281 - DNA, 20 bp, Artificial Sequence
  Description of Artificial Sequence: Synthetic oligonucleotide
  Target: ATXN2; (-) strand; PAM type: NRG; PAM sequence: GGG
ggtgacttctttgctcaaaa

SEQ ID NO: 24282 - DNA, 20 bp, Artificial Sequence
  Description of Artificial Sequence: Synthetic oligonucleotide
  Target: ATXN2; (-) strand; PAM type: NRG; PAM sequence: AGG
aggtgacttctttgctcaaa

SEQ ID NO: 24283 - DNA, 20 bp, Artificial Sequence
  Description of Artificial Sequence: Synthetic oligonucleotide
  Target: ATXN2; (-) strand; PAM type: NRG; PAM sequence: AAG
aaggtgacttctttgctcaa

SEQ ID NO: 24284 - DNA, 20 bp, Artificial Sequence
  Description of Artificial Sequence: Synthetic oligonucleotide
  Target: ATXN2; (-) strand; PAM type: NRG; PAM sequence: AGG
gcaagttccactgattttca

SEQ ID NO: 24285 - DNA, 20 bp, Artificial Sequence
  Description of Artificial Sequence: Synthetic oligonucleotide
  Target: ATXN2; (-) strand; PAM type: NRG; PAM sequence: AAG
agcaagttccactgattttc

SEQ ID NO: 24286 - DNA, 20 bp, Artificial Sequence
  Description of Artificial Sequence: Synthetic oligonucleotide
  Target: ATXN2; (-) strand; PAM type: NRG; PAM sequence: AAG
agcatctaaccttgaagagc

SEQ ID NO: 24287 - DNA, 20 bp, Artificial Sequence
  Description of Artificial Sequence: Synthetic oligonucleotide
  Target: ATXN2; (-) strand; PAM type: NRG; PAM sequence: GAG
ctgaagcatctaaccttgaa

SEQ ID NO: 24288 - DNA, 20 bp, Artificial Sequence
  Description of Artificial Sequence: Synthetic oligonucleotide
  Target: ATXN2; (-) strand; PAM type: NRG; PAM sequence: AAG
gactgaagcatctaaccttg

SEQ ID NO: 24289 - DNA, 20 bp, Artificial Sequence
  Description of Artificial Sequence: Synthetic oligonucleotide
  Target: ATXN2; (-) strand; PAM type: NRG; PAM sequence: AAG
aggtcatatgactttgactg

SEQ ID NO: 24290 - DNA, 20 bp, Artificial Sequence
  Description of Artificial Sequence: Synthetic oligonucleotide
  Target: ATXN2; (-) strand; PAM type: NRG; PAM sequence: AGG
ttgttaccatctaagcaggc

SEQ ID NO: 24291 - DNA, 20 bp, Artificial Sequence
  Description of Artificial Sequence: Synthetic oligonucleotide
  Target: ATXN2; (-) strand; PAM type: NRG; PAM sequence: CAG
attgttaccatctaagcagg

SEQ ID NO: 24292 - DNA, 20 bp, Artificial Sequence
  Description of Artificial Sequence: Synthetic oligonucleotide
  Target: ATXN2; (-) strand; PAM type: NRG; PAM sequence: AGG
taaattgttaccatctaagc

SEQ ID NO: 24293 - DNA, 20 bp, Artificial Sequence
  Description of Artificial Sequence: Synthetic oligonucleotide
  Target: ATXN2; (-) strand; PAM type: NRG; PAM sequence: CAG
ataaattgttaccatctaag

SEQ ID NO: 24294 - DNA, 20 bp, Artificial Sequence
  Description of Artificial Sequence: Synthetic oligonucleotide
  Target: ATXN2; (-) strand; PAM type: NRG; PAM sequence: AAG
taaataaattgttaccatct

SEQ ID NO: 24295 - DNA, 20 bp, Artificial Sequence
  Description of Artificial Sequence: Synthetic oligonucleotide
  Target: ATXN2; (-) strand; PAM type: NRG; PAM sequence: TGG
ttccctggagaaaactgtat

SEQ ID NO: 24296 - DNA, 20 bp, Artificial Sequence
  Description of Artificial Sequence: Synthetic oligonucleotide
  Target: ATXN2; (-) strand; PAM type: NRG; PAM sequence: GAG
gtgtttctcctgcttccctg

SEQ ID NO: 24297 - DNA, 20 bp, Artificial Sequence
  Description of Artificial Sequence: Synthetic oligonucleotide
  Target: ATXN2; (-) strand; PAM type: NRG; PAM sequence: TGG
atgtgtttctcctgcttccc

SEQ ID NO: 24298 - DNA, 20 bp, Artificial Sequence
  Description of Artificial Sequence: Synthetic oligonucleotide
  Target: ATXN2; (-) strand; PAM type: NRG; PAM sequence: AAG
tgcttatgttgggactaata

SEQ ID NO: 24299 - DNA, 20 bp, Artificial Sequence
  Description of Artificial Sequence: Synthetic oligonucleotide
  Target: ATXN2; (-) strand; PAM type: NRG; PAM sequence: GGG
tagttaatattgcttatgtt

SEQ ID NO: 24300 - DNA, 20 bp, Artificial Sequence
  Description of Artificial Sequence: Synthetic oligonucleotide
  Target: ATXN2; (-) strand; PAM type: NRG; PAM sequence: TGG
ttagttaatattgcttatgt

SEQ ID NO: 24301 - DNA, 20 bp, Artificial Sequence
  Description of Artificial Sequence: Synthetic oligonucleotide
  Target: ATXN2; (-) strand; PAM type: NRG; PAM sequence: TAG
tctgatttgttcattaaaat

SEQ ID NO: 24302 - DNA, 20 bp, Artificial Sequence
  Description of Artificial Sequence: Synthetic oligonucleotide
  Target: ATXN2; (-) strand; PAM type: NRG; PAM sequence: TAG
tcataatgtccttttgatac

SEQ ID NO: 24303 - DNA, 20 bp, Artificial Sequence
  Description of Artificial Sequence: Synthetic oligonucleotide
  Target: ATXN2; (-) strand; PAM type: NRG; PAM sequence: AGG
tacagggatatgttgtagaa

SEQ ID NO: 24304 - DNA, 20 bp, Artificial Sequence
  Description of Artificial Sequence: Synthetic oligonucleotide
  Target: ATXN2; (-) strand; PAM type: NRG; PAM sequence: AAG
atacagggatatgttgtaga

SEQ ID NO: 24305 - DNA, 20 bp, Artificial Sequence
  Description of Artificial Sequence: Synthetic oligonucleotide
  Target: ATXN2; (-) strand; PAM type: NRG; PAM sequence: TAG
tcaaatacagggatatgttg

SEQ ID NO: 24306 - DNA, 20 bp, Artificial Sequence
  Description of Artificial Sequence: Synthetic oligonucleotide
  Target: ATXN2; (-) strand; PAM type: NRG; PAM sequence: GGG
attgccacatatcaaataca

SEQ ID NO: 24307 - DNA, 20 bp, Artificial Sequence
  Description of Artificial Sequence: Synthetic oligonucleotide
  Target: ATXN2; (-) strand; PAM type: NRG; PAM sequence: AGG
cattgccacatatcaaatac

SEQ ID NO: 24308 - DNA, 20 bp, Artificial Sequence
  Description of Artificial Sequence: Synthetic oligonucleotide
  Target: ATXN2; (-) strand; PAM type: NRG; PAM sequence: CAG
tcattgccacatatcaaata

SEQ ID NO: 24309 - DNA, 20 bp, Artificial Sequence
  Description of Artificial Sequence: Synthetic oligonucleotide
  Target: ATXN2; (-) strand; PAM type: NRG; PAM sequence: TGG
tgtaattcttattcagtatt

SEQ ID NO: 24310 - DNA, 20 bp, Artificial Sequence
  Description of Artificial Sequence: Synthetic oligonucleotide
  Target: ATXN2; (-) strand; PAM type: NRG; PAM sequence: CAG
aaaatcttgtaattcttatt

SEQ ID NO: 24311 - DNA, 20 bp, Artificial Sequence
  Description of Artificial Sequence: Synthetic oligonucleotide
  Target: ATXN2; (-) strand; PAM type: NRG; PAM sequence: AAG
tttctttcctcgtcaaaaat

SEQ ID NO: 24312 - DNA, 20 bp, Artificial Sequence
  Description of Artificial Sequence: Synthetic oligonucleotide
  Target: ATXN2; (-) strand; PAM type: NRG; PAM sequence: TAG
gacatatgaatttgaatatt

SEQ ID NO: 24313 - DNA, 20 bp, Artificial Sequence
  Description of Artificial Sequence: Synthetic oligonucleotide
  Target: ATXN2; (-) strand; PAM type: NRG; PAM sequence: GAG
ctggaagaagtccttgatct

SEQ ID NO: 24314 - DNA, 20 bp, Artificial Sequence
  Description of Artificial Sequence: Synthetic oligonucleotide
  Target: ATXN2; (-) strand; PAM type: NRG; PAM sequence: AAG
aggctgctttaatctggaag

SEQ ID NO: 24315 - DNA, 20 bp, Artificial Sequence
  Description of Artificial Sequence: Synthetic oligonucleotide
  Target: ATXN2; (-) strand; PAM type: NRG; PAM sequence: AAG
gaaaggctgctttaatctgg

SEQ ID NO: 24316 - DNA, 20 bp, Artificial Sequence
  Description of Artificial Sequence: Synthetic oligonucleotide
  Target: ATXN2; (-) strand; PAM type: NRG; PAM sequence: TGG
agtgaaaggctgctttaatc

SEQ ID NO: 24317 - DNA, 20 bp, Artificial Sequence
  Description of Artificial Sequence: Synthetic oligonucleotide
  Target: ATXN2; (-) strand; PAM type: NRG; PAM sequence: AGG
ttgcaatcttacatagtgaa

SEQ ID NO: 24318 - DNA, 20 bp, Artificial Sequence
  Description of Artificial Sequence: Synthetic oligonucleotide
  Target: ATXN2; (-) strand; PAM type: NRG; PAM sequence: AAG
tttgcaatcttacatagtga

SEQ ID NO: 24319 - DNA, 20 bp, Artificial Sequence
  Description of Artificial Sequence: Synthetic oligonucleotide
  Target: ATXN2; (-) strand; PAM type: NRG; PAM sequence: TAG
gttagctttgcaatcttaca

SEQ ID NO: 24320 - DNA, 20 bp, Artificial Sequence
  Description of Artificial Sequence: Synthetic oligonucleotide
  Target: ATXN2; (-) strand; PAM type: NRG; PAM sequence: TAG
ctgagtaatttttttaaagt

SEQ ID NO: 24321 - DNA, 20 bp, Artificial Sequence
  Description of Artificial Sequence: Synthetic oligonucleotide
  Target: ATXN2; (-) strand; PAM type: NRG; PAM sequence: AAG
ttaactgagtaattttttta

SEQ ID NO: 24322 - DNA, 20 bp, Artificial Sequence
  Description of Artificial Sequence: Synthetic oligonucleotide
  Target: ATXN2; (-) strand; PAM type: NRG; PAM sequence: GAG
gaagaattctaaatttaact

SEQ ID NO: 24323 - DNA, 20 bp, Artificial Sequence
  Description of Artificial Sequence: Synthetic oligonucleotide
  Target: ATXN2; (-) strand; PAM type: NRG; PAM sequence: AAG
gttgatttttagaatgccag

SEQ ID NO: 24324 - DNA, 20 bp, Artificial Sequence
  Description of Artificial Sequence: Synthetic oligonucleotide
  Target: ATXN2; (-) strand; PAM type: NRG; PAM sequence: CAG
gtagttgatttttagaatgc

SEQ ID NO: 24325 - DNA, 20 bp, Artificial Sequence
  Description of Artificial Sequence: Synthetic oligonucleotide
  Target: ATXN2; (-) strand; PAM type: NRG; PAM sequence: TAG
agattaaagtagttgatttt

SEQ ID NO: 24326 - DNA, 20 bp, Artificial Sequence
  Description of Artificial Sequence: Synthetic oligonucleotide
  Target: ATXN2; (-) strand; PAM type: NRG; PAM sequence: TAG
tgtctgcccttagattaaag

SEQ ID NO: 24327 - DNA, 20 bp, Artificial Sequence
  Description of Artificial Sequence: Synthetic oligonucleotide
  Target: ATXN2; (-) strand; PAM type: NRG; PAM sequence: AAG
gcgtgtctgcccttagatta

SEQ ID NO: 24328 - DNA, 20 bp, Artificial Sequence
  Description of Artificial Sequence: Synthetic oligonucleotide
  Target: ATXN2; (-) strand; PAM type: NRG; PAM sequence: TAG
tgactttgcgtgtctgccct

SEQ ID NO: 24329 - DNA, 20 bp, Artificial Sequence
  Description of Artificial Sequence: Synthetic oligonucleotide
  Target: ATXN2; (-) strand; PAM type: NRG; PAM sequence: TAG
tttgagagcgacagcccatg

SEQ ID NO: 24330 - DNA, 20 bp, Artificial Sequence
  Description of Artificial Sequence: Synthetic oligonucleotide
  Target: ATXN2; (-) strand; PAM type: NRG; PAM sequence: CAG
tgggtcttttttgagagcga

SEQ ID NO: 24331 - DNA, 20 bp, Artificial Sequence
  Description of Artificial Sequence: Synthetic oligonucleotide
  Target: ATXN2; (-) strand; PAM type: NRG; PAM sequence: GAG
gttttctgggtcttttttga

SEQ ID NO: 24332 - DNA, 20 bp, Artificial Sequence
  Description of Artificial Sequence: Synthetic oligonucleotide
  Target: ATXN2; (-) strand; PAM type: NRG; PAM sequence: GAG
gtgttttctgggtctttttt

SEQ ID NO: 24333 - DNA, 20 bp, Artificial Sequence
  Description of Artificial Sequence: Synthetic oligonucleotide
  Target: ATXN2; (-) strand; PAM type: NRG; PAM sequence: GGG
aagcagggatggtgttttct

SEQ ID NO: 24334 - DNA, 20 bp, Artificial Sequence
  Description of Artificial Sequence: Synthetic oligonucleotide
  Target: ATXN2; (-) strand; PAM type: NRG; PAM sequence: TGG
taagcagggatggtgttttc

SEQ ID NO: 24335 - DNA, 20 bp, Artificial Sequence
  Description of Artificial Sequence: Synthetic oligonucleotide
  Target: ATXN2; (-) strand; PAM type: NRG; PAM sequence: TGG
ctattggccataagcaggga

SEQ ID NO: 24336 - DNA, 20 bp, Artificial Sequence
  Description of Artificial Sequence: Synthetic oligonucleotide
  Target: ATXN2; (-) strand; PAM type: NRG; PAM sequence: GGG
cttcctattggccataagca

SEQ ID NO: 24337 - DNA, 20 bp, Artificial Sequence
  Description of Artificial Sequence: Synthetic oligonucleotide
  Target: ATXN2; (-) strand; PAM type: NRG; PAM sequence: AGG
ccttcctattggccataagc

SEQ ID NO: 24338 - DNA, 20 bp, Artificial Sequence
  Description of Artificial Sequence: Synthetic oligonucleotide
  Target: ATXN2; (-) strand; PAM type: NRG; PAM sequence: CAG
accttcctattggccataag

SEQ ID NO: 24339 - DNA, 20 bp, Artificial Sequence
  Description of Artificial Sequence: Synthetic oligonucleotide
  Target: ATXN2; (-) strand; PAM type: NRG; PAM sequence: AAG
tgaaccttcctattggccat

SEQ ID NO: 24340 - DNA, 20 bp, Artificial Sequence
  Description of Artificial Sequence: Synthetic oligonucleotide
  Target: ATXN2; (-) strand; PAM type: NRG; PAM sequence: TGG
gtcctagtgaaccttcctat

SEQ ID NO: 24341 - DNA, 20 bp, Artificial Sequence
  Description of Artificial Sequence: Synthetic oligonucleotide
  Target: ATXN2; (-) strand; PAM type: NRG; PAM sequence: TAG
cagctctttggccaaggtcc

SEQ ID NO: 24342 - DNA, 20 bp, Artificial Sequence
  Description of Artificial Sequence: Synthetic oligonucleotide
  Target: ATXN2; (-) strand; PAM type: NRG; PAM sequence: AGG
attttacagctctttggcca

SEQ ID NO: 24343 - DNA, 20 bp, Artificial Sequence
  Description of Artificial Sequence: Synthetic oligonucleotide
  Target: ATXN2; (-) strand; PAM type: NRG; PAM sequence: AAG
cattttacagctctttggcc

SEQ ID NO: 24344 - DNA, 20 bp, Artificial Sequence
  Description of Artificial Sequence: Synthetic oligonucleotide
  Target: ATXN2; (-) strand; PAM type: NRG; PAM sequence: TGG
aggttcattttacagctctt

SEQ ID NO: 24345 - DNA, 20 bp, Artificial Sequence
  Description of Artificial Sequence: Synthetic oligonucleotide
  Target: ATXN2; (-) strand; PAM type: NRG; PAM sequence: CAG
ttgaacttaggttcatttta

SEQ ID NO: 24346 - DNA, 20 bp, Artificial Sequence
  Description of Artificial Sequence: Synthetic oligonucleotide
  Target: ATXN2; (-) strand; PAM type: NRG; PAM sequence: AGG
cttcagccagtcttgaactt

SEQ ID NO: 24347 - DNA, 20 bp, Artificial Sequence
  Description of Artificial Sequence: Synthetic oligonucleotide
  Target: ATXN2; (-) strand; PAM type: NRG; PAM sequence: TAG
tcttcagccagtcttgaact

SEQ ID NO: 24348 - DNA, 20 bp, Artificial Sequence
  Description of Artificial Sequence: Synthetic oligonucleotide
  Target: ATXN2; (-) strand; PAM type: NRG; PAM sequence: CAG
acaaatgaactttcttcagc

SEQ ID NO: 24349 - DNA, 20 bp, Artificial Sequence
  Description of Artificial Sequence: Synthetic oligonucleotide
  Target: ATXN2; (-) strand; PAM type: NRG; PAM sequence: CAG
ttaaacaaatgaactttctt

SEQ ID NO: 24350 - DNA, 20 bp, Artificial Sequence
  Description of Artificial Sequence: Synthetic oligonucleotide
  Target: ATXN2; (-) strand; PAM type: NRG; PAM sequence: TAG
cttatttgcactgtatacag

SEQ ID NO: 24351 - DNA, 20 bp, Artificial Sequence
  Description of Artificial Sequence: Synthetic oligonucleotide
  Target: ATXN2; (-) strand; PAM type: NRG; PAM sequence: CAG
ctccttatttgcactgtata

SEQ ID NO: 24352 - DNA, 20 bp, Artificial Sequence
  Description of Artificial Sequence: Synthetic oligonucleotide
  Target: ATXN2; (-) strand; PAM type: NRG; PAM sequence: CAG
ccccagaagggtctgcccca

SEQ ID NO: 24353 - DNA, 20 bp, Artificial Sequence
  Description of Artificial Sequence: Synthetic oligonucleotide
  Target: ATXN2; (-) strand; PAM type: NRG; PAM sequence: GGG
gcttctttacagccccagaa

SEQ ID NO: 24354 - DNA, 20 bp, Artificial Sequence
  Description of Artificial Sequence: Synthetic oligonucleotide
  Target: ATXN2; (-) strand; PAM type: NRG; PAM sequence: AGG
tgcttctttacagccccaga

SEQ ID NO: 24355 - DNA, 20 bp, Artificial Sequence
  Description of Artificial Sequence: Synthetic oligonucleotide
  Target: ATXN2; (-) strand; PAM type: NRG; PAM sequence: AAG
atgcttctttacagccccag

SEQ ID NO: 24356 - DNA, 20 bp, Artificial Sequence
  Description of Artificial Sequence: Synthetic oligonucleotide
  Target: ATXN2; (-) strand; PAM type: NRG; PAM sequence: CAG
attatgcttctttacagccc

SEQ ID NO: 24357 - DNA, 20 bp, Artificial Sequence
  Description of Artificial Sequence: Synthetic oligonucleotide
  Target: ATXN2; (-) strand; PAM type: NRG; PAM sequence: CAG
ctgataattatgcttcttta

SEQ ID NO: 24358 - DNA, 20 bp, Artificial Sequence
  Description of Artificial Sequence: Synthetic oligonucleotide
  Target: ATXN2; (-) strand; PAM type: NRG; PAM sequence: GGG
ttgaattgttgttaaaaagg

SEQ ID NO: 24359 - DNA, 20 bp, Artificial Sequence
  Description of Artificial Sequence: Synthetic oligonucleotide
  Target: ATXN2; (-) strand; PAM type: NRG; PAM sequence: GGG
cttgaattgttgttaaaaag

SEQ ID NO: 24360 - DNA, 20 bp, Artificial Sequence
  Description of Artificial Sequence: Synthetic oligonucleotide
  Target: ATXN2; (-) strand; PAM type: NRG; PAM sequence: GGG
tcttgaattgttgttaaaaa

SEQ ID NO: 24361 - DNA, 20 bp, Artificial Sequence
  Description of Artificial Sequence: Synthetic oligonucleotide
  Target: ATXN2; (-) strand; PAM type: NRG; PAM sequence: AGG
ctcttgaattgttgttaaaa

SEQ ID NO: 24362 - DNA, 20 bp, Artificial Sequence
  Description of Artificial Sequence: Synthetic oligonucleotide
  Target: ATXN2; (-) strand; PAM type: NRG; PAM sequence: AAG
tctcttgaattgttgttaaa

SEQ ID NO: 24363 - DNA, 20 bp, Artificial Sequence
  Description of Artificial Sequence: Synthetic oligonucleotide
  Target: ATXN2; (-) strand; PAM type: NRG; PAM sequence: AAG
agaaatttgataaatgtgtg

SEQ ID NO: 24364 - DNA, 20 bp, Artificial Sequence
  Description of Artificial Sequence: Synthetic oligonucleotide
  Target: ATXN2; (-) strand; PAM type: NRG; PAM sequence: GAG
ttaaccttttgttcattaga

SEQ ID NO: 24365 - DNA, 20 bp, Artificial Sequence
  Description of Artificial Sequence: Synthetic oligonucleotide
  Target: ATXN2; (-) strand; PAM type: NRG; PAM sequence: GAG
tattaaccttttgttcatta

SEQ ID NO: 24366 - DNA, 20 bp, Artificial Sequence
  Description of Artificial Sequence: Synthetic oligonucleotide
  Target: ATXN2; (-) strand; PAM type: NRG; PAM sequence: TAG
tctattaaccttttgttcat

SEQ ID NO: 24367 - DNA, 20 bp, Artificial Sequence
  Description of Artificial Sequence: Synthetic oligonucleotide
  Target: ATXN2; (-) strand; PAM type: NRG; PAM sequence: TAG
taatttctgtgttttaactt

SEQ ID NO: 24368 - DNA, 20 bp, Artificial Sequence
  Description of Artificial Sequence: Synthetic oligonucleotide
  Target: ATXN2; (-) strand; PAM type: NRG; PAM sequence: TAG
gtgagtttataattacaaaa

SEQ ID NO: 24369 - DNA, 20 bp, Artificial Sequence
  Description of Artificial Sequence: Synthetic oligonucleotide
  Target: ATXN2; (-) strand; PAM type: NRG; PAM sequence: GAG
tctttgtttaactcctatgt

SEQ ID NO: 24370 - DNA, 20 bp, Artificial Sequence
  Description of Artificial Sequence: Synthetic oligonucleotide
  Target: ATXN2; (-) strand; PAM type: NRG; PAM sequence: AGG
cctaaacgcatgtcttcaga

SEQ ID NO: 24371 - DNA, 20 bp, Artificial Sequence
  Description of Artificial Sequence: Synthetic oligonucleotide
  Target: ATXN2; (-) strand; PAM type: NRG; PAM sequence: AAG
gcctaaacgcatgtcttcag

SEQ ID NO: 24372 - DNA, 20 bp, Artificial Sequence
  Description of Artificial Sequence: Synthetic oligonucleotide
  Target: ATXN2; (-) strand; PAM type: NRG; PAM sequence: CAG
tatgcctaaacgcatgtctt

SEQ ID NO: 24373 - DNA, 20 bp, Artificial Sequence
  Description of Artificial Sequence: Synthetic oligonucleotide
  Target: ATXN2; (-) strand; PAM type: NRG; PAM sequence: CAG
cccctctgctcatggttctc

SEQ ID NO: 24374 - DNA, 20 bp, Artificial Sequence
  Description of Artificial Sequence: Synthetic oligonucleotide
  Target: ATXN2; (-) strand; PAM type: NRG; PAM sequence: TGG
ccgtctcacccctctgctca

SEQ ID NO: 24375 - DNA, 20 bp, Artificial Sequence
  Description of Artificial Sequence: Synthetic oligonucleotide
  Target: ATXN2; (-) strand; PAM type: NRG; PAM sequence: CAG
aggcccccctcgcggccatc

SEQ ID NO: 24376 - DNA, 20 bp, Artificial Sequence
  Description of Artificial Sequence: Synthetic oligonucleotide
  Target: ATXN2; (-) strand; PAM type: NRG; PAM sequence: CGG
cgccctccaggcccccctcg

SEQ ID NO: 24377 - DNA, 20 bp, Artificial Sequence
  Description of Artificial Sequence: Synthetic oligonucleotide
  Target: ATXN2; (-) strand; PAM type: NRG; PAM sequence: AGG
cccctacacggccgccctcc

SEQ ID NO: 24378 - DNA, 20 bp, Artificial Sequence
  Description of Artificial Sequence: Synthetic oligonucleotide
  Target: ATXN2; (-) strand; PAM type: NRG; PAM sequence: CAG
acccctacacggccgccctc

SEQ ID NO: 24379 - DNA, 20 bp, Artificial Sequence
  Description of Artificial Sequence: Synthetic oligonucleotide
  Target: ATXN2; (-) strand; PAM type: NRG; PAM sequence: CGG
ctcgggcagccacccctaca

SEQ ID NO: 24380 - DNA, 20 bp, Artificial Sequence
  Description of Artificial Sequence: Synthetic oligonucleotide
  Target: ATXN2; (-) strand; PAM type: NRG; PAM sequence: CAG
caactctcttccacctcggg

SEQ ID NO: 24381 - DNA, 20 bp, Artificial Sequence
  Description of Artificial Sequence: Synthetic oligonucleotide
  Target: ATXN2; (-) strand; PAM type: NRG; PAM sequence: GGG
tcccaactctcttccacctc

SEQ ID NO: 24382 - DNA, 20 bp, Artificial Sequence
  Description of Artificial Sequence: Synthetic oligonucleotide
  Target: ATXN2; (-) strand; PAM type: NRG; PAM sequence: CGG
gtcccaactctcttccacct

SEQ ID NO: 24383 - DNA, 20 bp, Artificial Sequence
  Description of Artificial Sequence: Synthetic oligonucleotide
  Target: ATXN2; (-) strand; PAM type: NRG; PAM sequence: AGG
ccaccttctcgctaccagtc

SEQ ID NO: 24384 - DNA, 20 bp, Artificial Sequence
  Description of Artificial Sequence: Synthetic oligonucleotide
  Target: ATXN2; (-) strand; PAM type: NRG; PAM sequence: CAG
cccaccttctcgctaccagt

SEQ ID NO: 24385 - DNA, 20 bp, Artificial Sequence
  Description of Artificial Sequence: Synthetic oligonucleotide
  Target: ATXN2; (-) strand; PAM type: NRG; PAM sequence: CAG
ctcgcccaccttctcgctac

SEQ ID NO: 24386 - DNA, 20 bp, Artificial Sequence
  Description of Artificial Sequence: Synthetic oligonucleotide
  Target: ATXN2; (-) strand; PAM type: NRG; PAM sequence: TGG
ttgttctgtcaggtgttccc

SEQ ID NO: 24387 - DNA, 20 bp, Artificial Sequence
  Description of Artificial Sequence: Synthetic oligonucleotide
  Target: ATXN2; (-) strand; PAM type: NRG; PAM sequence: AGG
ttcatatcatttgttctgtc

SEQ ID NO: 24388 - DNA, 20 bp, Artificial Sequence
  Description of Artificial Sequence: Synthetic oligonucleotide
  Target: ATXN2; (-) strand; PAM type: NRG; PAM sequence: CAG
cttcatatcatttgttctgt

SEQ ID NO: 24389 - DNA, 20 bp, Artificial Sequence
  Description of Artificial Sequence: Synthetic oligonucleotide
  Target: ATXN2; (-) strand; PAM type: NRG; PAM sequence: TAG
ttttccctcatttttttctt

SEQ ID NO: 24390 - DNA, 20 bp, Artificial Sequence
  Description of Artificial Sequence: Synthetic oligonucleotide
  Target: ATXN2; (-) strand; PAM type: NRG; PAM sequence: AAG
ctcaaagggttaaaatgtac

SEQ ID NO: 24391 - DNA, 20 bp, Artificial Sequence
  Description of Artificial Sequence: Synthetic oligonucleotide
  Target: ATXN2; (-) strand; PAM type: NRG; PAM sequence: GGG
atcaaatgactgtcctcaaa

SEQ ID NO: 24392 - DNA, 20 bp, Artificial Sequence
  Description of Artificial Sequence: Synthetic oligonucleotide
  Target: ATXN2; (-) strand; PAM type: NRG; PAM sequence: AGG
aatcaaatgactgtcctcaa

SEQ ID NO: 24393 - DNA, 20 bp, Artificial Sequence
  Description of Artificial Sequence: Synthetic oligonucleotide
  Target: ATXN2; (-) strand; PAM type: NRG; PAM sequence: AAG
aaatcaaatgactgtcctca

SEQ ID NO: 24394 - DNA, 20 bp, Artificial Sequence
  Description of Artificial Sequence: Synthetic oligonucleotide
  Target: ATXN2; (-) strand; PAM type: NRG; PAM sequence: AAG
aatgtgaatttatgtcagtt

SEQ ID NO: 24395 - DNA, 20 bp, Artificial Sequence
  Description of Artificial Sequence: Synthetic oligonucleotide
  Target: ATXN2; (-) strand; PAM type: NRG; PAM sequence: CAG
agtaaaatgtgaatttatgt

SEQ ID NO: 24396 - DNA, 20 bp, Artificial Sequence
  Description of Artificial Sequence: Synthetic oligonucleotide
  Target: ATXN2; (-) strand; PAM type: NRG; PAM sequence: AAG
acttaatcttaaggaggtta

SEQ ID NO: 24397 - DNA, 20 bp, Artificial Sequence
  Description of Artificial Sequence: Synthetic oligonucleotide
  Target: ATXN2; (-) strand; PAM type: NRG; PAM sequence: AGG
aaacagacttaatcttaagg

SEQ ID NO: 24398 - DNA, 20 bp, Artificial Sequence
  Description of Artificial Sequence: Synthetic oligonucleotide
  Target: ATXN2; (-) strand; PAM type: NRG; PAM sequence: GAG
taaacagacttaatcttaag

SEQ ID NO: 24399 - DNA, 20 bp, Artificial Sequence
  Description of Artificial Sequence: Synthetic oligonucleotide
  Target: ATXN2; (-) strand; PAM type: NRG; PAM sequence: AGG
tttaaacagacttaatctta

SEQ ID NO: 24400 - DNA, 20 bp, Artificial Sequence
  Description of Artificial Sequence: Synthetic oligonucleotide
  Target: ATXN2; (-) strand; PAM type: NRG; PAM sequence: AAG
atttaaacagacttaatctt

SEQ ID NO: 24401 - DNA, 20 bp, Artificial Sequence
  Description of Artificial Sequence: Synthetic oligonucleotide
  Target: ATXN2; (-) strand; PAM type: NRG; PAM sequence: CAG
ggaacgtgtattcatttaaa

SEQ ID NO: 24402 - DNA, 20 bp, Artificial Sequence
  Description of Artificial Sequence: Synthetic oligonucleotide
  Target: ATXN2; (-) strand; PAM type: NRG; PAM sequence: GGG
tagatcctaattaacccttt

SEQ ID NO: 24403 - DNA, 20 bp, Artificial Sequence
  Description of Artificial Sequence: Synthetic oligonucleotide
  Target: ATXN2; (-) strand; PAM type: NRG; PAM sequence: TGG
atagatcctaattaaccctt

SEQ ID NO: 24404 - DNA, 20 bp, Artificial Sequence
  Description of Artificial Sequence: Synthetic oligonucleotide
  Target: ATXN2; (-) strand; PAM type: NRG; PAM sequence: TAG
gtcttcttcaatagtgtgta

SEQ ID NO: 24405 - DNA, 20 bp, Artificial Sequence
  Description of Artificial Sequence: Synthetic oligonucleotide
  Target: ATXN2; (-) strand; PAM type: NRG; PAM sequence: TAG
gtcttaactgtcttcttcaa

SEQ ID NO: 24406 - DNA, 20 bp, Artificial Sequence
  Description of Artificial Sequence: Synthetic oligonucleotide
  Target: ATXN2; (-) strand; PAM type: NRG; PAM sequence: AAG
agaagcaggattaataggca

SEQ ID NO: 24407 - DNA, 20 bp, Artificial Sequence
  Description of Artificial Sequence: Synthetic oligonucleotide
  Target: ATXN2; (-) strand; PAM type: NRG; PAM sequence: AGG
gttatagaagcaggattaat

SEQ ID NO: 24408 - DNA, 20 bp, Artificial Sequence
  Description of Artificial Sequence: Synthetic oligonucleotide
  Target: ATXN2; (-) strand; PAM type: NRG; PAM sequence: TAG
agttatagaagcaggattaa

SEQ ID NO: 24409 - DNA, 20 bp, Artificial Sequence
  Description of Artificial Sequence: Synthetic oligonucleotide
  Target: ATXN2; (-) strand; PAM type: NRG; PAM sequence: AGG
tgagaaacagttatagaagc

SEQ ID NO: 24410 - DNA, 20 bp, Artificial Sequence
  Description of Artificial Sequence: Synthetic oligonucleotide
  Target: ATXN2; (-) strand; PAM type: NRG; PAM sequence: CAG
ctgagaaacagttatagaag

SEQ ID NO: 24411 - DNA, 20 bp, Artificial Sequence
  Description of Artificial Sequence: Synthetic oligonucleotide
  Target: ATXN2; (-) strand; PAM type: NRG; PAM sequence: AAG
ttactgagaaacagttatag

SEQ ID NO: 24412 - DNA, 20 bp, Artificial Sequence
  Description of Artificial Sequence: Synthetic oligonucleotide
  Target: ATXN2; (-) strand; PAM type: NRG; PAM sequence: TAG
cagttactgagaaacagtta

SEQ ID NO: 24413 - DNA, 20 bp, Artificial Sequence
  Description of Artificial Sequence: Synthetic oligonucleotide
  Target: ATXN2; (-) strand; PAM type: NRG; PAM sequence: CAG
aacaaccagttactgagaaa

SEQ ID NO: 24414 - DNA, 20 bp, Artificial Sequence
  Description of Artificial Sequence: Synthetic oligonucleotide
  Target: ATXN2; (-) strand; PAM type: NRG; PAM sequence: GAG
cctttaaacaaccagttact

SEQ ID NO: 24415 - DNA, 20 bp, Artificial Sequence
  Description of Artificial Sequence: Synthetic oligonucleotide
  Target: ATXN2; (-) strand; PAM type: NRG; PAM sequence: CAG
gttatattcctttaaacaac

SEQ ID NO: 24416 - DNA, 20 bp, Artificial Sequence
  Description of Artificial Sequence: Synthetic oligonucleotide
  Target: ATXN2; (-) strand; PAM type: NRG; PAM sequence: TAG
atttattatgtgaaattatc

SEQ ID NO: 24417 - DNA, 20 bp, Artificial Sequence
  Description of Artificial Sequence: Synthetic oligonucleotide
  Target: ATXN2; (-) strand; PAM type: NRG; PAM sequence: AGG
aaataatcttactcctgagt

SEQ ID NO: 24418 - DNA, 20 bp, Artificial Sequence
  Description of Artificial Sequence: Synthetic oligonucleotide
  Target: ATXN2; (-) strand; PAM type: NRG; PAM sequence: TAG
taaataatcttactcctgag

SEQ ID NO: 24419 - DNA, 20 bp, Artificial Sequence
  Description of Artificial Sequence: Synthetic oligonucleotide
  Target: ATXN2; (-) strand; PAM type: NRG; PAM sequence: GAG
cagtaaataatcttactcct

SEQ ID NO: 24420 - DNA, 20 bp, Artificial Sequence
  Description of Artificial Sequence: Synthetic oligonucleotide
  Target: ATXN2; (-) strand; PAM type: NRG; PAM sequence: CAG
cctcagagttaaaactaata

SEQ ID NO: 24421 - DNA, 20 bp, Artificial Sequence
  Description of Artificial Sequence: Synthetic oligonucleotide
  Target: ATXN2; (-) strand; PAM type: NRG; PAM sequence: GAG
cttattttcgttatgcctca

SEQ ID NO: 24422 - DNA, 20 bp, Artificial Sequence
  Description of Artificial Sequence: Synthetic oligonucleotide
  Target: ATXN2; (-) strand; PAM type: NRG; PAM sequence: CAG
tgcttattttcgttatgcct

SEQ ID NO: 24423 - DNA, 20 bp, Artificial Sequence
  Description of Artificial Sequence: Synthetic oligonucleotide
  Target: ATXN2; (-) strand; PAM type: NRG; PAM sequence: TAG
gcatttctaattggatataa

SEQ ID NO: 24424 - DNA, 20 bp, Artificial Sequence
  Description of Artificial Sequence: Synthetic oligonucleotide
  Target: ATXN2; (-) strand; PAM type: NRG; PAM sequence: TGG
aaggaaccagcatttctaat

SEQ ID NO: 24425 - DNA, 20 bp, Artificial Sequence
  Description of Artificial Sequence: Synthetic oligonucleotide
  Target: ATXN2; (-) strand; PAM type: NRG; PAM sequence: CAG
catagataattgtaaggaac

SEQ ID NO: 24426 - DNA, 20 bp, Artificial Sequence
  Description of Artificial Sequence: Synthetic oligonucleotide
  Target: ATXN2; (-) strand; PAM type: NRG; PAM sequence: AGG
gaaaatcatagataattgta

SEQ ID NO: 24427 - DNA, 20 bp, Artificial Sequence
  Description of Artificial Sequence: Synthetic oligonucleotide
  Target: ATXN2; (-) strand; PAM type: NRG; PAM sequence: AAG
tgaaaatcatagataattgt

SEQ ID NO: 24428 - DNA, 20 bp, Artificial Sequence
  Description of Artificial Sequence: Synthetic oligonucleotide
  Target: ATXN2; (-) strand; PAM type: NRG; PAM sequence: TAG
tgtaaacctgatgaaaatca

SEQ ID NO: 24429 - DNA, 20 bp, Artificial Sequence
  Description of Artificial Sequence: Synthetic oligonucleotide
  Target: ATXN2; (-) strand; PAM type: NRG; PAM sequence: AAG
ccaaactgagttctgggttc

SEQ ID NO: 24430 - DNA, 20 bp, Artificial Sequence
  Description of Artificial Sequence: Synthetic oligonucleotide
  Target: ATXN2; (-) strand; PAM type: NRG; PAM sequence: GGG
aagattccaaactgagttct

SEQ ID NO: 24431 - DNA, 20 bp, Artificial Sequence
  Description of Artificial Sequence: Synthetic oligonucleotide
  Target: ATXN2; (-) strand; PAM type: NRG; PAM sequence: TGG
taagattccaaactgagttc

SEQ ID NO: 24432 - DNA, 20 bp, Artificial Sequence
  Description of Artificial Sequence: Synthetic oligonucleotide
  Target: ATXN2; (-) strand; PAM type: NRG; PAM sequence: GAG
gcttaataagattccaaact

SEQ ID NO: 24433 - DNA, 20 bp, Artificial Sequence
  Description of Artificial Sequence: Synthetic oligonucleotide
  Target: ATXN2; (-) strand; PAM type: NRG; PAM sequence: AAG
ttaaatgggacttgcttaat

SEQ ID NO: 24434 - DNA, 20 bp, Artificial Sequence
  Description of Artificial Sequence: Synthetic oligonucleotide
  Target: ATXN2; (-) strand; PAM type: NRG; PAM sequence: GGG
tgttttatttctacttaaat

SEQ ID NO: 24435 - DNA, 20 bp, Artificial Sequence
  Description of Artificial Sequence: Synthetic oligonucleotide
  Target: ATXN2; (-) strand; PAM type: NRG; PAM sequence: TGG
atgttttatttctacttaaa

SEQ ID NO: 24436 - DNA, 20 bp, Artificial Sequence
  Description of Artificial Sequence: Synthetic oligonucleotide
  Target: ATXN2; (-) strand; PAM type: NRG; PAM sequence: GAG
aggagtcacaaactctagaa

SEQ ID NO: 24437 - DNA, 20 bp, Artificial Sequence
  Description of Artificial Sequence: Synthetic oligonucleotide
  Target: ATXN2; (-) strand; PAM type: NRG; PAM sequence: AAG
acaggagtcacaaactctag

SEQ ID NO: 24438 - DNA, 20 bp, Artificial Sequence
  Description of Artificial Sequence: Synthetic oligonucleotide
  Target: ATXN2; (-) strand; PAM type: NRG; PAM sequence: TAG
ctcacaggagtcacaaactc

SEQ ID NO: 24439 - DNA, 20 bp, Artificial Sequence
  Description of Artificial Sequence: Synthetic oligonucleotide
  Target: ATXN2; (-) strand; PAM type: NRG; PAM sequence: GAG
ttatcatttgatactcacag

SEQ ID NO: 24440 - DNA, 20 bp, Artificial Sequence
  Description of Artificial Sequence: Synthetic oligonucleotide
  Target: ATXN2; (-) strand; PAM type: NRG; PAM sequence: AGG
tattatcatttgatactcac

SEQ ID NO: 24441 - DNA, 20 bp, Artificial Sequence
  Description of Artificial Sequence: Synthetic oligonucleotide
  Target: ATXN2; (-) strand; PAM type: NRG; PAM sequence: CAG
atattatcatttgatactca

SEQ ID NO: 24442 - DNA, 20 bp, Artificial Sequence
  Description of Artificial Sequence: Synthetic oligonucleotide
  Target: ATXN2; (-) strand; PAM type: NRG; PAM sequence: TAG
tcaagactttttttttgaaa

SEQ ID NO: 24443 - DNA, 20 bp, Artificial Sequence
  Description of Artificial Sequence: Synthetic oligonucleotide
  Target: ATXN2; (-) strand; PAM type: NRG; PAM sequence: AAG
ttttctagtttaatgaggtc

SEQ ID NO: 24444 - DNA, 20 bp, Artificial Sequence
  Description of Artificial Sequence: Synthetic oligonucleotide
  Target: ATXN2; (-) strand; PAM type: NRG; PAM sequence: AGG
tccctttttctagtttaatg

SEQ ID NO: 24445 - DNA, 20 bp, Artificial Sequence
  Description of Artificial Sequence: Synthetic oligonucleotide
  Target: ATXN2; (-) strand; PAM type: NRG; PAM sequence: GAG
ctccctttttctagtttaat

SEQ ID NO: 24446 - DNA, 20 bp, Artificial Sequence
  Description of Artificial Sequence: Synthetic oligonucleotide
  Target: ATXN2; (-) strand; PAM type: NRG; PAM sequence: TAG
ttagaaggtctccctttttc

SEQ ID NO: 24447 - DNA, 20 bp, Artificial Sequence
  Description of Artificial Sequence: Synthetic oligonucleotide
  Target: ATXN2; (-) strand; PAM type: NRG; PAM sequence: AGG
aactgtataaattatttaga

SEQ ID NO: 24448 - DNA, 20 bp, Artificial Sequence
  Description of Artificial Sequence: Synthetic oligonucleotide
  Target: ATXN2; (-) strand; PAM type: NRG; PAM sequence: AAG
taactgtataaattatttag

SEQ ID NO: 24449 - DNA, 20 bp, Artificial Sequence
  Description of Artificial Sequence: Synthetic oligonucleotide
  Target: ATXN2; (-) strand; PAM type: NRG; PAM sequence: TAG
gtttaactgtataaattatt

SEQ ID NO: 24450 - DNA, 20 bp, Artificial Sequence
  Description of Artificial Sequence: Synthetic oligonucleotide
  Target: ATXN2; (-) strand; PAM type: NRG; PAM sequence: AAG
tattaagcagtcgcttagat

SEQ ID NO: 24451 - DNA, 20 bp, Artificial Sequence
  Description of Artificial Sequence: Synthetic oligonucleotide
  Target: ATXN2; (-) strand; PAM type: NRG; PAM sequence: TAG
gtatttattaagcagtcgct

SEQ ID NO: 24452 - DNA, 20 bp, Artificial Sequence
  Description of Artificial Sequence: Synthetic oligonucleotide
  Target: ATXN2; (-) strand; PAM type: NRG; PAM sequence: CAG
tagttgcagtatttattaag

SEQ ID NO: 24453 - DNA, 20 bp, Artificial Sequence
  Description of Artificial Sequence: Synthetic oligonucleotide
  Target: ATXN2; (-) strand; PAM type: NRG; PAM sequence: AAG
ttgtagttgcagtatttatt

SEQ ID NO: 24454 - DNA, 20 bp, Artificial Sequence
  Description of Artificial Sequence: Synthetic oligonucleotide
  Target: ATXN2; (-) strand; PAM type: NRG; PAM sequence: CAG
tgatgactgctttgtagttg

SEQ ID NO: 24455 - DNA, 20 bp, Artificial Sequence
  Description of Artificial Sequence: Synthetic oligonucleotide
  Target: ATXN2; (-) strand; PAM type: NRG; PAM sequence: TAG
atttggtgatgactgctttg

SEQ ID NO: 24456 - DNA, 20 bp, Artificial Sequence
  Description of Artificial Sequence: Synthetic oligonucleotide
  Target: ATXN2; (-) strand; PAM type: NRG; PAM sequence: TGG
tccatcagtataaatttatt

SEQ ID NO: 24457 - DNA, 20 bp, Artificial Sequence
  Description of Artificial Sequence: Synthetic oligonucleotide
  Target: ATXN2; (-) strand; PAM type: NRG; PAM sequence: CAG
ctttacctaggcatatccat

SEQ ID NO: 24458 - DNA, 20 bp, Artificial Sequence
  Description of Artificial Sequence: Synthetic oligonucleotide
  Target: ATXN2; (-) strand; PAM type: NRG; PAM sequence: AGG
tactagctgtatctttacct

SEQ ID NO: 24459 - DNA, 20 bp, Artificial Sequence
  Description of Artificial Sequence: Synthetic oligonucleotide
  Target: ATXN2; (-) strand; PAM type: NRG; PAM sequence: TAG
atactagctgtatctttacc

SEQ ID NO: 24460 - DNA, 20 bp, Artificial Sequence
  Description of Artificial Sequence: Synthetic oligonucleotide
  Target: ATXN2; (-) strand; PAM type: NRG; PAM sequence: TAG
tgatatgtaatgttaaatac

SEQ ID NO: 24461 - DNA, 20 bp, Artificial Sequence
  Description of Artificial Sequence: Synthetic oligonucleotide
  Target: ATXN2; (-) strand; PAM type: NRG; PAM sequence: AAG
ctgtttgataagattaaggt

SEQ ID NO: 24462 - DNA, 20 bp, Artificial Sequence
  Description of Artificial Sequence: Synthetic oligonucleotide
  Target: ATXN2; (-) strand; PAM type: NRG; PAM sequence: AGG
tggactgtttgataagatta

SEQ ID NO: 24463 - DNA, 20 bp, Artificial Sequence
  Description of Artificial Sequence: Synthetic oligonucleotide
  Target: ATXN2; (-) strand; PAM type: NRG; PAM sequence: AAG
ctggactgtttgataagatt

SEQ ID NO: 24464 - DNA, 20 bp, Artificial Sequence
  Description of Artificial Sequence: Synthetic oligonucleotide
  Target: ATXN2; (-) strand; PAM type: NRG; PAM sequence: AAG
ggagacctggactgtttgat

SEQ ID NO: 24465 - DNA, 20 bp, Artificial Sequence
  Description of Artificial Sequence: Synthetic oligonucleotide
  Target: ATXN2; (-) strand; PAM type: NRG; PAM sequence: TGG
aaccctatggagaggagacc

SEQ ID NO: 24466 - DNA, 20 bp, Artificial Sequence
  Description of Artificial Sequence: Synthetic oligonucleotide
  Target: ATXN2; (-) strand; PAM type: NRG; PAM sequence: GAG
gtgtggaaccctatggagag

SEQ ID NO: 24467 - DNA, 20 bp, Artificial Sequence
  Description of Artificial Sequence: Synthetic oligonucleotide
  Target: ATXN2; (-) strand; PAM type: NRG; PAM sequence: AGG
gtgtgtggaaccctatggag

SEQ ID NO: 24468 - DNA, 20 bp, Artificial Sequence
  Description of Artificial Sequence: Synthetic oligonucleotide
  Target: ATXN2; (-) strand; PAM type: NRG; PAM sequence: GAG
agtgtgtggaaccctatgga

SEQ ID NO: 24469 - DNA, 20 bp, Artificial Sequence
  Description of Artificial Sequence: Synthetic oligonucleotide
  Target: ATXN2; (-) strand; PAM type: NRG; PAM sequence: GAG
taagtgtgtggaaccctatg

SEQ ID NO: 24470 - DNA, 20 bp, Artificial Sequence
  Description of Artificial Sequence: Synthetic oligonucleotide
  Target: ATXN2; (-) strand; PAM type: NRG; PAM sequence: TGG
cttaagtgtgtggaacccta

SEQ ID NO: 24471 - DNA, 20 bp, Artificial Sequence
  Description of Artificial Sequence: Synthetic oligonucleotide
  Target: ATXN2; (-) strand; PAM type: NRG; PAM sequence: TGG
atatatgatacttaagtgtg

SEQ ID NO: 24472 - DNA, 20 bp, Artificial Sequence
  Description of Artificial Sequence: Synthetic oligonucleotide
  Target: ATXN2; (-) strand; PAM type: NRG; PAM sequence: AAG
ctgagaaatatatgatactt

SEQ ID NO: 24473 - DNA, 20 bp, Artificial Sequence
  Description of Artificial Sequence: Synthetic oligonucleotide
  Target: ATXN2; (-) strand; PAM type: NRG; PAM sequence: GAG
taaaaaacctgaagggggct

SEQ ID NO: 24474 - DNA, 20 bp, Artificial Sequence
  Description of Artificial Sequence: Synthetic oligonucleotide
  Target: ATXN2; (-) strand; PAM type: NRG; PAM sequence: GGG
aaagttaaaaaacctgaagg

SEQ ID NO: 24475 - DNA, 20 bp, Artificial Sequence
  Description of Artificial Sequence: Synthetic oligonucleotide
  Target: ATXN2; (-) strand; PAM type: NRG; PAM sequence: GGG
taaagttaaaaaacctgaag

SEQ ID NO: 24476 - DNA, 20 bp, Artificial Sequence
  Description of Artificial Sequence: Synthetic oligonucleotide
  Target: ATXN2; (-) strand; PAM type: NRG; PAM sequence: GGG
ttaaagttaaaaaacctgaa

SEQ ID NO: 24477 - DNA, 20 bp, Artificial Sequence
  Description of Artificial Sequence: Synthetic oligonucleotide
  Target: ATXN2; (-) strand; PAM type: NRG; PAM sequence: AGG
tttaaagttaaaaaacctga

SEQ ID NO: 24478 - DNA, 20 bp, Artificial Sequence
  Description of Artificial Sequence: Synthetic oligonucleotide
  Target: ATXN2; (-) strand; PAM type: NRG; PAM sequence: AAG
ttttaaagttaaaaaacctg

SEQ ID NO: 24479 - DNA, 20 bp, Artificial Sequence
  Description of Artificial Sequence: Synthetic oligonucleotide
  Target: ATXN2; (-) strand; PAM type: NRG; PAM sequence: AAG
tgtttataaacagaatttta

SEQ ID NO: 24480 - DNA, 20 bp, Artificial Sequence
  Description of Artificial Sequence: Synthetic oligonucleotide
  Target: ATXN2; (-) strand; PAM type: NRG; PAM sequence: CAG
agattttagttgtttataaa

SEQ ID NO: 24481 - DNA, 20 bp, Artificial Sequence
  Description of Artificial Sequence: Synthetic oligonucleotide
  Target: ATXN2; (-) strand; PAM type: NRG; PAM sequence: TAG
tgctcactgaggaaagattt

SEQ ID NO: 24482 - DNA, 20 bp, Artificial Sequence
  Description of Artificial Sequence: Synthetic oligonucleotide
  Target: ATXN2; (-) strand; PAM type: NRG; PAM sequence: AAG
atttctttgctcactgagga

SEQ ID NO: 24483 - DNA, 20 bp, Artificial Sequence
  Description of Artificial Sequence: Synthetic oligonucleotide
  Target: ATXN2; (-) strand; PAM type: NRG; PAM sequence: AGG
tgaaatttctttgctcactg

SEQ ID NO: 24484 - DNA, 20 bp, Artificial Sequence
  Description of Artificial Sequence: Synthetic oligonucleotide
  Target: ATXN2; (-) strand; PAM type: NRG; PAM sequence: GAG
gtgaaatttctttgctcact

SEQ ID NO: 24485 - DNA, 20 bp, Artificial Sequence
  Description of Artificial Sequence: Synthetic oligonucleotide
  Target: ATXN2; (-) strand; PAM type: NRG; PAM sequence: GGG
ttttcagtacttaatattgg

SEQ ID NO: 24486 - DNA, 20 bp, Artificial Sequence
  Description of Artificial Sequence: Synthetic oligonucleotide
  Target: ATXN2; (-) strand; PAM type: NRG; PAM sequence: GGG
attttcagtacttaatattg

SEQ ID NO: 24487 - DNA, 20 bp, Artificial Sequence
  Description of Artificial Sequence: Synthetic oligonucleotide
  Target: ATXN2; (-) strand; PAM type: NRG; PAM sequence: GGG
tattttcagtacttaatatt

SEQ ID NO: 24488 - DNA, 20 bp, Artificial Sequence
  Description of Artificial Sequence: Synthetic oligonucleotide
  Target: ATXN2; (-) strand; PAM type: NRG; PAM sequence: TGG
gtattttcagtacttaatat

SEQ ID NO: 24489 - DNA, 20 bp, Artificial Sequence
  Description of Artificial Sequence: Synthetic oligonucleotide
  Target: ATXN2; (-) strand; PAM type: NRG; PAM sequence: CAG
tggacactcttgagtatttt

SEQ ID NO: 24490 - DNA, 20 bp, Artificial Sequence
  Description of Artificial Sequence: Synthetic oligonucleotide
  Target: ATXN2; (-) strand; PAM type: NRG; PAM sequence: GAG
ctctccaaatggacactctt

SEQ ID NO: 24491 - DNA, 20 bp, Artificial Sequence
  Description of Artificial Sequence: Synthetic oligonucleotide
  Target: ATXN2; (-) strand; PAM type: NRG; PAM sequence: TGG
ctccagaattcctctccaaa

SEQ ID NO: 24492 - DNA, 20 bp, Artificial Sequence
  Description of Artificial Sequence: Synthetic oligonucleotide
  Target: ATXN2; (-) strand; PAM type: NRG; PAM sequence: CAG
ttttcattgagtcttttctc

SEQ ID NO: 24493 - DNA, 20 bp, Artificial Sequence
  Description of Artificial Sequence: Synthetic oligonucleotide
  Target: ATXN2; (-) strand; PAM type: NRG; PAM sequence: GAG
caatttcatttgttttcatt

SEQ ID NO: 24494 - DNA, 20 bp, Artificial Sequence
  Description of Artificial Sequence: Synthetic oligonucleotide
  Target: ATXN2; (-) strand; PAM type: NRG; PAM sequence: AAG
agatgaaaatagagaacact

SEQ ID NO: 24495 - DNA, 20 bp, Artificial Sequence
  Description of Artificial Sequence: Synthetic oligonucleotide
  Target: ATXN2; (-) strand; PAM type: NRG; PAM sequence: GAG
tggaaagttagatgaaaata

SEQ ID NO: 24496 - DNA, 20 bp, Artificial Sequence
  Description of Artificial Sequence: Synthetic oligonucleotide
  Target: ATXN2; (-) strand; PAM type: NRG; PAM sequence: TAG
tttggaaagttagatgaaaa

SEQ ID NO: 24497 - DNA, 20 bp, Artificial Sequence
  Description of Artificial Sequence: Synthetic oligonucleotide
  Target: ATXN2; (-) strand; PAM type: NRG; PAM sequence: TAG
gctatttaaatttggaaagt

SEQ ID NO: 24498 - DNA, 20 bp, Artificial Sequence
  Description of Artificial Sequence: Synthetic oligonucleotide
  Target: ATXN2; (-) strand; PAM type: NRG; PAM sequence: AAG
tttagctatttaaatttgga

SEQ ID NO: 24499 - DNA, 20 bp, Artificial Sequence
  Description of Artificial Sequence: Synthetic oligonucleotide
  Target: ATXN2; (-) strand; PAM type: NRG; PAM sequence: TGG
caattttagctatttaaatt

SEQ ID NO: 24500 - DNA, 20 bp, Artificial Sequence
  Description of Artificial Sequence: Synthetic oligonucleotide
  Target: ATXN2; (-) strand; PAM type: NRG; PAM sequence: TAG
aaagagtggacattcaattt

SEQ ID NO: 24501 - DNA, 20 bp, Artificial Sequence
  Description of Artificial Sequence: Synthetic oligonucleotide
  Target: ATXN2; (-) strand; PAM type: NRG; PAM sequence: TGG
ctaactttgtgggaaaagag

SEQ ID NO: 24502 - DNA, 20 bp, Artificial Sequence
  Description of Artificial Sequence: Synthetic oligonucleotide
  Target: ATXN2; (-) strand; PAM type: NRG; PAM sequence: GAG
ttactaactttgtgggaaaa

SEQ ID NO: 24503 - DNA, 20 bp, Artificial Sequence
  Description of Artificial Sequence: Synthetic oligonucleotide
  Target: ATXN2; (-) strand; PAM type: NRG; PAM sequence: AAG
tgttactaactttgtgggaa

SEQ ID NO: 24504 - DNA, 20 bp, Artificial Sequence
  Description of Artificial Sequence: Synthetic oligonucleotide
  Target: ATXN2; (-) strand; PAM type: NRG; PAM sequence: GGG
tagtatgttactaactttgt

SEQ ID NO: 24505 - DNA, 20 bp, Artificial Sequence
  Description of Artificial Sequence: Synthetic oligonucleotide
  Target: ATXN2; (-) strand; PAM type: NRG; PAM sequence: TGG
atagtatgttactaactttg

SEQ ID NO: 24506 - DNA, 20 bp, Artificial Sequence
  Description of Artificial Sequence: Synthetic oligonucleotide
  Target: ATXN2; (-) strand; PAM type: NRG; PAM sequence: TAG
tatggaaatagtaatagcaa

SEQ ID NO: 24507 - DNA, 20 bp, Artificial Sequence
  Description of Artificial Sequence: Synthetic oligonucleotide
  Target: ATXN2; (-) strand; PAM type: NRG; PAM sequence: TAG
ggatggtatggaaatagtaa

SEQ ID NO: 24508 - DNA, 20 bp, Artificial Sequence
  Description of Artificial Sequence: Synthetic oligonucleotide
  Target: ATXN2; (-) strand; PAM type: NRG; PAM sequence: TAG
ttctatggatggtatggaaa

SEQ ID NO: 24509 - DNA, 20 bp, Artificial Sequence
  Description of Artificial Sequence: Synthetic oligonucleotide
  Target: ATXN2; (-) strand; PAM type: NRG; PAM sequence: TGG
caacagttctatggatggta

SEQ ID NO: 24510 - DNA, 20 bp, Artificial Sequence
  Description of Artificial Sequence: Synthetic oligonucleotide
  Target: ATXN2; (-) strand; PAM type: NRG; PAM sequence: TGG
ctgaacaacagttctatgga

SEQ ID NO: 24511 - DNA, 20 bp, Artificial Sequence
  Description of Artificial Sequence: Synthetic oligonucleotide
  Target: ATXN2; (-) strand; PAM type: NRG; PAM sequence: TGG
gatactgaacaacagttcta

SEQ ID NO: 24512 - DNA, 20 bp, Artificial Sequence
  Description of Artificial Sequence: Synthetic oligonucleotide
  Target: ATXN2; (-) strand; PAM type: NRG; PAM sequence: CAG
aaatcagggatactgaacaa

SEQ ID NO: 24513 - DNA, 20 bp, Artificial Sequence
  Description of Artificial Sequence: Synthetic oligonucleotide
  Target: ATXN2; (-) strand; PAM type: NRG; PAM sequence: GGG
tggatcttttccataaatca

SEQ ID NO: 24514 - DNA, 20 bp, Artificial Sequence
  Description of Artificial Sequence: Synthetic oligonucleotide
  Target: ATXN2; (-) strand; PAM type: NRG; PAM sequence: AGG
gtggatcttttccataaatc

SEQ ID NO: 24515 - DNA, 20 bp, Artificial Sequence
  Description of Artificial Sequence: Synthetic oligonucleotide
  Target: ATXN2; (-) strand; PAM type: NRG; PAM sequence: CAG
tgtggatcttttccataaat

SEQ ID NO: 24516 - DNA, 20 bp, Artificial Sequence
  Description of Artificial Sequence: Synthetic oligonucleotide
  Target: ATXN2; (-) strand; PAM type: NRG; PAM sequence: TGG
tgaatatatcttgtaggttg

SEQ ID NO: 24517 - DNA, 20 bp, Artificial Sequence
  Description of Artificial Sequence: Synthetic oligonucleotide
  Target: ATXN2; (-) strand; PAM type: NRG; PAM sequence: AGG
ctaggttgaatatatcttgt

SEQ ID NO: 24518 - DNA, 20 bp, Artificial Sequence
  Description of Artificial Sequence: Synthetic oligonucleotide
  Target: ATXN2; (-) strand; PAM type: NRG; PAM sequence: TAG
tctaggttgaatatatcttg

SEQ ID NO: 24519 - DNA, 20 bp, Artificial Sequence
  Description of Artificial Sequence: Synthetic oligonucleotide
  Target: ATXN2; (-) strand; PAM type: NRG; PAM sequence: AGG
tttactctacctctaaatct

SEQ ID NO: 24520 - DNA, 20 bp, Artificial Sequence
  Description of Artificial Sequence: Synthetic oligonucleotide
  Target: ATXN2; (-) strand; PAM type: NRG; PAM sequence: TAG
ttttactctacctctaaatc

SEQ ID NO: 24521 - DNA, 20 bp, Artificial Sequence
  Description of Artificial Sequence: Synthetic oligonucleotide
  Target: ATXN2; (-) strand; PAM type: NRG; PAM sequence: AAG
aaacctgaatctttagtagg

SEQ ID NO: 24522 - DNA, 20 bp, Artificial Sequence
  Description of Artificial Sequence: Synthetic oligonucleotide
  Target: ATXN2; (-) strand; PAM type: NRG; PAM sequence: AGG
aagaaacctgaatctttagt

SEQ ID NO: 24523 - DNA, 20 bp, Artificial Sequence
  Description of Artificial Sequence: Synthetic oligonucleotide
  Target: ATXN2; (-) strand; PAM type: NRG; PAM sequence: TAG
aaagaaacctgaatctttag

SEQ ID NO: 24524 - DNA, 20 bp, Artificial Sequence
  Description of Artificial Sequence: Synthetic oligonucleotide
  Target: ATXN2; (-) strand; PAM type: NRG; PAM sequence: TAG
gtaaaagaaacctgaatctt

SEQ ID NO: 24525 - DNA, 20 bp, Artificial Sequence
  Description of Artificial Sequence: Synthetic oligonucleotide
  Target: ATXN2; (-) strand; PAM type: NRG; PAM sequence: AAG
cagtttagcaacttaagtaa

SEQ ID NO: 24526 - DNA, 20 bp, Artificial Sequence
  Description of Artificial Sequence: Synthetic oligonucleotide
  Target: ATXN2; (-) strand; PAM type: NRG; PAM sequence: AAG
atgttacagtttagcaactt

SEQ ID NO: 24527 - DNA, 20 bp, Artificial Sequence
  Description of Artificial Sequence: Synthetic oligonucleotide
  Target: ATXN2; (-) strand; PAM type: NRG; PAM sequence: TAG
taagggtggatgttacagtt

SEQ ID NO: 24528 - DNA, 20 bp, Artificial Sequence
  Description of Artificial Sequence: Synthetic oligonucleotide
  Target: ATXN2; (-) strand; PAM type: NRG; PAM sequence: CAG
tagtctaagggtggatgtta

SEQ ID NO: 24529 - DNA, 20 bp, Artificial Sequence
  Description of Artificial Sequence: Synthetic oligonucleotide
  Target: ATXN2; (-) strand; PAM type: NRG; PAM sequence: TGG
aacaacccttagtctaaggg

SEQ ID NO: 24530 - DNA, 20 bp, Artificial Sequence
  Description of Artificial Sequence: Synthetic oligonucleotide
  Target: ATXN2; (-) strand; PAM type: NRG; PAM sequence: GGG
aaaaacaacccttagtctaa

SEQ ID NO: 24531 - DNA, 20 bp, Artificial Sequence
  Description of Artificial Sequence: Synthetic oligonucleotide
  Target: ATXN2; (-) strand; PAM type: NRG; PAM sequence: AGG
caaaaacaacccttagtcta

SEQ ID NO: 24532 - DNA, 20 bp, Artificial Sequence
  Description of Artificial Sequence: Synthetic oligonucleotide
  Target: ATXN2; (-) strand; PAM type: NRG; PAM sequence: AAG
acaaaaacaacccttagtct

SEQ ID NO: 24533 - DNA, 20 bp, Artificial Sequence
  Description of Artificial Sequence: Synthetic oligonucleotide
  Target: ATXN2; (-) strand; PAM type: NRG; PAM sequence: TAG
aaaacaacaaaaacaaccct

SEQ ID NO: 24534 - DNA, 20 bp, Artificial Sequence
  Description of Artificial Sequence: Synthetic oligonucleotide
  Target: ATXN2; (-) strand; PAM type: NRG; PAM sequence: GAG
tcatgtgaagaaagtgacta

SEQ ID NO: 24535 - DNA, 20 bp, Artificial Sequence
  Description of Artificial Sequence: Synthetic oligonucleotide
  Target: ATXN2; (-) strand; PAM type: NRG; PAM sequence: TAG
agtcatgtgaagaaagtgac

SEQ ID NO: 24536 - DNA, 20 bp, Artificial Sequence
  Description of Artificial Sequence: Synthetic oligonucleotide
  Target: ATXN2; (-) strand; PAM type: NRG; PAM sequence: AAG
gatcaagagtcatgtgaaga

SEQ ID NO: 24537 - DNA, 20 bp, Artificial Sequence
  Description of Artificial Sequence: Synthetic oligonucleotide
  Target: ATXN2; (-) strand; PAM type: NRG; PAM sequence: AAG
acatgatcaagagtcatgtg

SEQ ID NO: 24538 - DNA, 20 bp, Artificial Sequence
  Description of Artificial Sequence: Synthetic oligonucleotide
  Target: ATXN2; (-) strand; PAM type: NRG; PAM sequence: GAG
ataatacaagacatgatcaa

SEQ ID NO: 24539 - DNA, 20 bp, Artificial Sequence
  Description of Artificial Sequence: Synthetic oligonucleotide
  Target: ATXN2; (-) strand; PAM type: NRG; PAM sequence: AAG
ttataatacaagacatgatc

SEQ ID NO: 24540 - DNA, 20 bp, Artificial Sequence
  Description of Artificial Sequence: Synthetic oligonucleotide
  Target: ATXN2; (-) strand; PAM type: NRG; PAM sequence: AAG
tctgaggtaacttataatac

SEQ ID NO: 24541 - DNA, 20 bp, Artificial Sequence
  Description of Artificial Sequence: Synthetic oligonucleotide
  Target: ATXN2; (-) strand; PAM type: NRG; PAM sequence: AGG
ttacttcaagaaaggatctg

SEQ ID NO: 24542 - DNA, 20 bp, Artificial Sequence
  Description of Artificial Sequence: Synthetic oligonucleotide
  Target: ATXN2; (-) strand; PAM type: NRG; PAM sequence: GAG
cttacttcaagaaaggatct

SEQ ID NO: 24543 - DNA, 20 bp, Artificial Sequence
  Description of Artificial Sequence: Synthetic oligonucleotide
  Target: ATXN2; (-) strand; PAM type: NRG; PAM sequence: AGG
tattatgcttacttcaagaa

SEQ ID NO: 24544 - DNA, 20 bp, Artificial Sequence
  Description of Artificial Sequence: Synthetic oligonucleotide
  Target: ATXN2; (-) strand; PAM type: NRG; PAM sequence: AAG
atattatgcttacttcaaga

SEQ ID NO: 24545 - DNA, 20 bp, Artificial Sequence
  Description of Artificial Sequence: Synthetic oligonucleotide
  Target: ATXN2; (-) strand; PAM type: NRG; PAM sequence: AAG
ttctatattatgcttacttc

SEQ ID NO: 24546 - DNA, 20 bp, Artificial Sequence
  Description of Artificial Sequence: Synthetic oligonucleotide
  Target: ATXN2; (-) strand; PAM type: NRG; PAM sequence: TAG
gtgcaacactgtggttaata

SEQ ID NO: 24547 - DNA, 20 bp, Artificial Sequence
  Description of Artificial Sequence: Synthetic oligonucleotide
  Target: ATXN2; (-) strand; PAM type: NRG; PAM sequence: TGG
ctaacctatgtgcaacactg

SEQ ID NO: 24548 - DNA, 20 bp, Artificial Sequence
  Description of Artificial Sequence: Synthetic oligonucleotide
  Target: ATXN2; (-) strand; PAM type: NRG; PAM sequence: TGG
ttttttagacataatttata

SEQ ID NO: 24549 - DNA, 20 bp, Artificial Sequence
  Description of Artificial Sequence: Synthetic oligonucleotide
  Target: ATXN2; (-) strand; PAM type: NRG; PAM sequence: TAG
cactggataataaaattttt

SEQ ID NO: 24550 - DNA, 20 bp, Artificial Sequence
  Description of Artificial Sequence: Synthetic oligonucleotide
  Target: ATXN2; (-) strand; PAM type: NRG; PAM sequence: TGG
gttctcaattttaaaaacac

SEQ ID NO: 24551 - DNA, 20 bp, Artificial Sequence
  Description of Artificial Sequence: Synthetic oligonucleotide
  Target: ATXN2; (-) strand; PAM type: NRG; PAM sequence: AGG
agaaattggaaactttgggt

SEQ ID NO: 24552 - DNA, 20 bp, Artificial Sequence
  Description of Artificial Sequence: Synthetic oligonucleotide
  Target: ATXN2; (-) strand; PAM type: NRG; PAM sequence: TAG
aagaaattggaaactttggg

SEQ ID NO: 24553 - DNA, 20 bp, Artificial Sequence
  Description of Artificial Sequence: Synthetic oligonucleotide
  Target: ATXN2; (-) strand; PAM type: NRG; PAM sequence: GGG
ataaagaaattggaaacttt

SEQ ID NO: 24554 - DNA, 20 bp, Artificial Sequence
  Description of Artificial Sequence: Synthetic oligonucleotide
  Target: ATXN2; (-) strand; PAM type: NRG; PAM sequence: TGG
tataaagaaattggaaactt

SEQ ID NO: 24555 - DNA, 20 bp, Artificial Sequence
  Description of Artificial Sequence: Synthetic oligonucleotide
  Target: ATXN2; (-) strand; PAM type: NRG; PAM sequence: TGG
cacttcacatataaagaaat

SEQ ID NO: 24556 - DNA, 20 bp, Artificial Sequence
  Description of Artificial Sequence: Synthetic oligonucleotide
  Target: ATXN2; (-) strand; PAM type: NRG; PAM sequence: AAG
ccaaaaacacttcacatata

SEQ ID NO: 24557 - DNA, 20 bp, Artificial Sequence
  Description of Artificial Sequence: Synthetic oligonucleotide
  Target: ATXN2; (-) strand; PAM type: NRG; PAM sequence: TGG
tttaacccaagacaatcact

SEQ ID NO: 24558 - DNA, 20 bp, Artificial Sequence
  Description of Artificial Sequence: Synthetic oligonucleotide
  Target: ATXN2; (-) strand; PAM type: NRG; PAM sequence: AAG
taaagtgctacatttaaccc

SEQ ID NO: 24559 - DNA, 20 bp, Artificial Sequence
  Description of Artificial Sequence: Synthetic oligonucleotide
  Target: ATXN2; (-) strand; PAM type: NRG; PAM sequence: AAG
attcatgatgtactaagata

SEQ ID NO: 24560 - DNA, 20 bp, Artificial Sequence
  Description of Artificial Sequence: Synthetic oligonucleotide
  Target: ATXN2; (-) strand; PAM type: NRG; PAM sequence: AAG
tgaaatattcatgatgtact

SEQ ID NO: 24561 - DNA, 20 bp, Artificial Sequence
  Description of Artificial Sequence: Synthetic oligonucleotide
  Target: ATXN2; (-) strand; PAM type: NRG; PAM sequence: TAG
tcattgacatatatattatt

SEQ ID NO: 24562 - DNA, 20 bp, Artificial Sequence
  Description of Artificial Sequence: Synthetic oligonucleotide
  Target: ATXN2; (-) strand; PAM type: NRG; PAM sequence: TAG
ggcttttgtggatattaaat

SEQ ID NO: 24563 - DNA, 20 bp, Artificial Sequence
  Description of Artificial Sequence: Synthetic oligonucleotide
  Target: ATXN2; (-) strand; PAM type: NRG; PAM sequence: TGG
ttacttaaaattggcttttg

SEQ ID NO: 24564 - DNA, 20 bp, Artificial Sequence
  Description of Artificial Sequence: Synthetic oligonucleotide
  Target: ATXN2; (-) strand; PAM type: NRG; PAM sequence: TGG
acttcagcattacttaaaat

SEQ ID NO: 24565 - DNA, 20 bp, Artificial Sequence
  Description of Artificial Sequence: Synthetic oligonucleotide
  Target: ATXN2; (-) strand; PAM type: NRG; PAM sequence: CAG
ttggtgagtagctttcactt

SEQ ID NO: 24566 - DNA, 20 bp, Artificial Sequence
  Description of Artificial Sequence: Synthetic oligonucleotide
  Target: ATXN2; (-) strand; PAM type: NRG; PAM sequence: TAG
cactttaatgatttggtgag

SEQ ID NO: 24567 - DNA, 20 bp, Artificial Sequence
  Description of Artificial Sequence: Synthetic oligonucleotide
  Target: ATXN2; (-) strand; PAM type: NRG; PAM sequence: GAG
gtgcactttaatgatttggt

SEQ ID NO: 24568 - DNA, 20 bp, Artificial Sequence
  Description of Artificial Sequence: Synthetic oligonucleotide
  Target: ATXN2; (-) strand; PAM type: NRG; PAM sequence: TGG
gaatgtgcactttaatgatt

SEQ ID NO: 24569 - DNA, 20 bp, Artificial Sequence
  Description of Artificial Sequence: Synthetic oligonucleotide
  Target: ATXN2; (-) strand; PAM type: NRG; PAM sequence: TAG
aatacttaaaatacttaaaa

SEQ ID NO: 24570 - DNA, 20 bp, Artificial Sequence
  Description of Artificial Sequence: Synthetic oligonucleotide
  Target: ATXN2; (-) strand; PAM type: NRG; PAM sequence: TAG
tgtcaatatcattgataaaa

SEQ ID NO: 24571 - DNA, 20 bp, Artificial Sequence
  Description of Artificial Sequence: Synthetic oligonucleotide
  Target: ATXN2; (-) strand; PAM type: NRG; PAM sequence: CAG
atggaggcaagtattttgac

SEQ ID NO: 24572 - DNA, 20 bp, Artificial Sequence
  Description of Artificial Sequence: Synthetic oligonucleotide
  Target: ATXN2; (-) strand; PAM type: NRG; PAM sequence: AAG
aaagagtagttaatggaggc

SEQ ID NO: 24573 - DNA, 20 bp, Artificial Sequence
  Description of Artificial Sequence: Synthetic oligonucleotide
  Target: ATXN2; (-) strand; PAM type: NRG; PAM sequence: AGG
gaccaaagagtagttaatgg

SEQ ID NO: 24574 - DNA, 20 bp, Artificial Sequence
  Description of Artificial Sequence: Synthetic oligonucleotide
  Target: ATXN2; (-) strand; PAM type: NRG; PAM sequence: GAG
agaccaaagagtagttaatg

SEQ ID NO: 24575 - DNA, 20 bp, Artificial Sequence
  Description of Artificial Sequence: Synthetic oligonucleotide
  Target: ATXN2; (-) strand; PAM type: NRG; PAM sequence: TGG
tcagaccaaagagtagttaa

SEQ ID NO: 24576 - DNA, 20 bp, Artificial Sequence
  Description of Artificial Sequence: Synthetic oligonucleotide
  Target: ATXN2; (-) strand; PAM type: NRG; PAM sequence: TAG
ttctggttcagaccaaagag

SEQ ID NO: 24577 - DNA, 20 bp, Artificial Sequence
  Description of Artificial Sequence: Synthetic oligonucleotide
  Target: ATXN2; (-) strand; PAM type: NRG; PAM sequence: GAG
gaattctggttcagaccaaa

SEQ ID NO: 24578 - DNA, 20 bp, Artificial Sequence
  Description of Artificial Sequence: Synthetic oligonucleotide
  Target: ATXN2; (-) strand; PAM type: NRG; PAM sequence: AAG
ccgaattctggttcagacca

SEQ ID NO: 24579 - DNA, 20 bp, Artificial Sequence
  Description of Artificial Sequence: Synthetic oligonucleotide
  Target: ATXN2; (-) strand; PAM type: NRG; PAM sequence: CAG
tttcaacccgaattctggtt

SEQ ID NO: 24580 - DNA, 20 bp, Artificial Sequence
  Description of Artificial Sequence: Synthetic oligonucleotide
  Target: ATXN2; (-) strand; PAM type: NRG; PAM sequence: TGG
tcagatttcaacccgaattc

SEQ ID NO: 24581 - DNA, 20 bp, Artificial Sequence
  Description of Artificial Sequence: Synthetic oligonucleotide
  Target: ATXN2; (-) strand; PAM type: NRG; PAM sequence: CAG
aagatccacttctcacactt

SEQ ID NO: 24582 - DNA, 20 bp, Artificial Sequence
  Description of Artificial Sequence: Synthetic oligonucleotide
  Target: ATXN2; (-) strand; PAM type: NRG; PAM sequence: AAG
ggatcgggctccatgccatc

SEQ ID NO: 24583 - DNA, 20 bp, Artificial Sequence
  Description of Artificial Sequence: Synthetic oligonucleotide
  Target: ATXN2; (-) strand; PAM type: NRG; PAM sequence: GGG
cgtatgggccagcctggatc

SEQ ID NO: 24584 - DNA, 20 bp, Artificial Sequence
  Description of Artificial Sequence: Synthetic oligonucleotide
  Target: ATXN2; (-) strand; PAM type: NRG; PAM sequence: CGG
gcgtatgggccagcctggat

SEQ ID NO: 24585 - DNA, 20 bp, Artificial Sequence
  Description of Artificial Sequence: Synthetic oligonucleotide
  Target: ATXN2; (-) strand; PAM type: NRG; PAM sequence: TGG
tcaccgcgtatgggccagcc

SEQ ID NO: 24586 - DNA, 20 bp, Artificial Sequence
  Description of Artificial Sequence: Synthetic oligonucleotide
  Target: ATXN2; (-) strand; PAM type: NRG; PAM sequence: CAG
agaattcaccgcgtatgggc

SEQ ID NO: 24587 - DNA, 20 bp, Artificial Sequence
  Description of Artificial Sequence: Synthetic oligonucleotide
  Target: ATXN2; (-) strand; PAM type: NRG; PAM sequence: GGG
agacagaattcaccgcgtat

SEQ ID NO: 24588 - DNA, 20 bp, Artificial Sequence
  Description of Artificial Sequence: Synthetic oligonucleotide
  Target: ATXN2; (-) strand; PAM type: NRG; PAM sequence: TGG
gagacagaattcaccgcgta

SEQ ID NO: 24589 - DNA, 20 bp, Artificial Sequence
  Description of Artificial Sequence: Synthetic oligonucleotide
  Target: ATXN2; (-) strand; PAM type: NRG; PAM sequence: CAG
tatcctggggaagtgggaga

SEQ ID NO: 24590 - DNA, 20 bp, Artificial Sequence
  Description of Artificial Sequence: Synthetic oligonucleotide
  Target: ATXN2; (-) strand; PAM type: NRG; PAM sequence: GAG
gtcatatcctggggaagtgg

SEQ ID NO: 24591 - DNA, 20 bp, Artificial Sequence
  Description of Artificial Sequence: Synthetic oligonucleotide
  Target: ATXN2; (-) strand; PAM type: NRG; PAM sequence: GGG
aagtcatatcctggggaagt

SEQ ID NO: 24592 - DNA, 20 bp, Artificial Sequence
  Description of Artificial Sequence: Synthetic oligonucleotide
  Target: ATXN2; (-) strand; PAM type: NRG; PAM sequence: TGG
gaagtcatatcctggggaag

SEQ ID NO: 24593 - DNA, 20 bp, Artificial Sequence
  Description of Artificial Sequence: Synthetic oligonucleotide
  Target: ATXN2; (-) strand; PAM type: NRG; PAM sequence: AAG
agagaagtcatatcctgggg

SEQ ID NO: 24594 - DNA, 20 bp, Artificial Sequence
  Description of Artificial Sequence: Synthetic oligonucleotide
  Target: ATXN2; (-) strand; PAM type: NRG; PAM sequence: GGG
aatagagaagtcatatcctg

SEQ ID NO: 24595 - DNA, 20 bp, Artificial Sequence
  Description of Artificial Sequence: Synthetic oligonucleotide
  Target: ATXN2; (-) strand; PAM type: NRG; PAM sequence: GGG
aaatagagaagtcatatcct

SEQ ID NO: 24596 - DNA, 20 bp, Artificial Sequence
  Description of Artificial Sequence: Synthetic oligonucleotide
  Target: ATXN2; (-) strand; PAM type: NRG; PAM sequence: TGG
gaaatagagaagtcatatcc

SEQ ID NO: 24597 - DNA, 20 bp, Artificial Sequence
  Description of Artificial Sequence: Synthetic oligonucleotide
  Target: ATXN2; (-) strand; PAM type: NRG; PAM sequence: AAG
tcctggacaaagaaatagag

SEQ ID NO: 24598 - DNA, 20 bp, Artificial Sequence
  Description of Artificial Sequence: Synthetic oligonucleotide
  Target: ATXN2; (-) strand; PAM type: NRG; PAM sequence: GAG
tcctcctggacaaagaaata

SEQ ID NO: 24599 - DNA, 20 bp, Artificial Sequence
  Description of Artificial Sequence: Synthetic oligonucleotide
  Target: ATXN2; (-) strand; PAM type: NRG; PAM sequence: TAG
attcctcctggacaaagaaa

SEQ ID NO: 24600 - DNA, 20 bp, Artificial Sequence
  Description of Artificial Sequence: Synthetic oligonucleotide
  Target: ATXN2; (-) strand; PAM type: NRG; PAM sequence: AAG
aaatatattcctcctggaca

SEQ ID NO: 24601 - DNA, 20 bp, Artificial Sequence
  Description of Artificial Sequence: Synthetic oligonucleotide
  Target: ATXN2; (-) strand; PAM type: NRG; PAM sequence: TGG
gaaaataaatatattcctcc

SEQ ID NO: 24602 - DNA, 20 bp, Artificial Sequence
  Description of Artificial Sequence: Synthetic oligonucleotide
  Target: ATXN2; (-) strand; PAM type: NRG; PAM sequence: GGG
tagaggatctctcattttca

SEQ ID NO: 24603 - DNA, 20 bp, Artificial Sequence
  Description of Artificial Sequence: Synthetic oligonucleotide
  Target: ATXN2; (-) strand; PAM type: NRG; PAM sequence: AGG
ttagaggatctctcattttc

SEQ ID NO: 24604 - DNA, 20 bp, Artificial Sequence
  Description of Artificial Sequence: Synthetic oligonucleotide
  Target: ATXN2; (-) strand; PAM type: NRG; PAM sequence: CAG
tttagaggatctctcatttt

SEQ ID NO: 24605 - DNA, 20 bp, Artificial Sequence
  Description of Artificial Sequence: Synthetic oligonucleotide
  Target: ATXN2; (-) strand; PAM type: NRG; PAM sequence: AGG
tttagaataaaatgatttag

SEQ ID NO: 24606 - DNA, 20 bp, Artificial Sequence
  Description of Artificial Sequence: Synthetic oligonucleotide
  Target: ATXN2; (-) strand; PAM type: NRG; PAM sequence: GAG
ttttagaataaaatgattta

SEQ ID NO: 24607 - DNA, 20 bp, Artificial Sequence
  Description of Artificial Sequence: Synthetic oligonucleotide
  Target: ATXN2; (-) strand; PAM type: NRG; PAM sequence: TAG
ccttttagaataaaatgatt

SEQ ID NO: 24608 - DNA, 20 bp, Artificial Sequence
  Description of Artificial Sequence: Synthetic oligonucleotide
  Target: ATXN2; (-) strand; PAM type: NRG; PAM sequence: TAG
ttcattggcttggtaccttt

SEQ ID NO: 24609 - DNA, 20 bp, Artificial Sequence
  Description of Artificial Sequence: Synthetic oligonucleotide
  Target: ATXN2; (-) strand; PAM type: NRG; PAM sequence: TGG
ttagatatgtttcattggct

SEQ ID NO: 24610 - DNA, 20 bp, Artificial Sequence
  Description of Artificial Sequence: Synthetic oligonucleotide
  Target: ATXN2; (-) strand; PAM type: NRG; PAM sequence: TGG
gacttttagatatgtttcat

SEQ ID NO: 24611 - DNA, 20 bp, Artificial Sequence
  Description of Artificial Sequence: Synthetic oligonucleotide
  Target: ATXN2; (-) strand; PAM type: NRG; PAM sequence: TAG
ccttctgtctagatgacttt

SEQ ID NO: 24612 - DNA, 20 bp, Artificial Sequence
  Description of Artificial Sequence: Synthetic oligonucleotide
  Target: ATXN2; (-) strand; PAM type: NRG; PAM sequence: TAG
aacaagcattcccttctgtc

SEQ ID NO: 24613 - DNA, 20 bp, Artificial Sequence
  Description of Artificial Sequence: Synthetic oligonucleotide
  Target: ATXN2; (-) strand; PAM type: NRG; PAM sequence: AAG
gtgtagaacctttttgtaac

SEQ ID NO: 24614 - DNA, 20 bp, Artificial Sequence
  Description of Artificial Sequence: Synthetic oligonucleotide
  Target: ATXN2; (-) strand; PAM type: NRG; PAM sequence: TAG
tgaggcagtttggtttagtg

SEQ ID NO: 24615 - DNA, 20 bp, Artificial Sequence
  Description of Artificial Sequence: Synthetic oligonucleotide
  Target: ATXN2; (-) strand; PAM type: NRG; PAM sequence: TAG
gggagtgaggcagtttggtt

SEQ ID NO: 24616 - DNA, 20 bp, Artificial Sequence
  Description of Artificial Sequence: Synthetic oligonucleotide
  Target: ATXN2; (-) strand; PAM type: NRG; PAM sequence: TGG
catctgggagtgaggcagtt

SEQ ID NO: 24617 - DNA, 20 bp, Artificial Sequence
  Description of Artificial Sequence: Synthetic oligonucleotide
  Target: ATXN2; (-) strand; PAM type: NRG; PAM sequence: CAG
aggggcatctgggagtgagg

SEQ ID NO: 24618 - DNA, 20 bp, Artificial Sequence
  Description of Artificial Sequence: Synthetic oligonucleotide
  Target: ATXN2; (-) strand; PAM type: NRG; PAM sequence: AGG
aacaggggcatctgggagtg

SEQ ID NO: 24619 - DNA, 20 bp, Artificial Sequence
  Description of Artificial Sequence: Synthetic oligonucleotide
  Target: ATXN2; (-) strand; PAM type: NRG; PAM sequence: GAG
gaacaggggcatctgggagt

SEQ ID NO: 24620 - DNA, 20 bp, Artificial Sequence
  Description of Artificial Sequence: Synthetic oligonucleotide
  Target: ATXN2; (-) strand; PAM type: NRG; PAM sequence: GAG
ggaagaacaggggcatctgg

SEQ ID NO: 24621 - DNA, 20 bp, Artificial Sequence
  Description of Artificial Sequence: Synthetic oligonucleotide
  Target: ATXN2; (-) strand; PAM type: NRG; PAM sequence: GGG
atggaagaacaggggcatct

SEQ ID NO: 24622 - DNA, 20 bp, Artificial Sequence
  Description of Artificial Sequence: Synthetic oligonucleotide
  Target: ATXN2; (-) strand; PAM type: NRG; PAM sequence: TGG
gatggaagaacaggggcatc

SEQ ID NO: 24623 - DNA, 20 bp, Artificial Sequence
  Description of Artificial Sequence: Synthetic oligonucleotide
  Target: ATXN2; (-) strand; PAM type: NRG; PAM sequence: GGG
agggtaagatggaagaacag

SEQ ID NO: 24624 - DNA, 20 bp, Artificial Sequence
  Description of Artificial Sequence: Synthetic oligonucleotide
  Target: ATXN2; (-) strand; PAM type: NRG; PAM sequence: GGG
cagggtaagatggaagaaca

SEQ ID NO: 24625 - DNA, 20 bp, Artificial Sequence
  Description of Artificial Sequence: Synthetic oligonucleotide
  Target: ATXN2; (-) strand; PAM type: NRG; PAM sequence: AGG
tcagggtaagatggaagaac

SEQ ID NO: 24626 - DNA, 20 bp, Artificial Sequence
  Description of Artificial Sequence: Synthetic oligonucleotide
  Target: ATXN2; (-) strand; PAM type: NRG; PAM sequence: CAG
ctcagggtaagatggaagaa

SEQ ID NO: 24627 - DNA, 20 bp, Artificial Sequence
  Description of Artificial Sequence: Synthetic oligonucleotide
  Target: ATXN2; (-) strand; PAM type: NRG; PAM sequence: AAG
tagaactcagggtaagatgg

SEQ ID NO: 24628 - DNA, 20 bp, Artificial Sequence
  Description of Artificial Sequence: Synthetic oligonucleotide
  Target: ATXN2; (-) strand; PAM type: NRG; PAM sequence: TGG
ggttagaactcagggtaaga

SEQ ID NO: 24629 - DNA, 20 bp, Artificial Sequence
  Description of Artificial Sequence: Synthetic oligonucleotide
  Target: ATXN2; (-) strand; PAM type: NRG; PAM sequence: AAG
cagaggttagaactcagggt

SEQ ID NO: 24630 - DNA, 20 bp, Artificial Sequence
  Description of Artificial Sequence: Synthetic oligonucleotide
  Target: ATXN2; (-) strand; PAM type: NRG; PAM sequence: GGG
agtccagaggttagaactca

SEQ ID NO: 24631 - DNA, 20 bp, Artificial Sequence
  Description of Artificial Sequence: Synthetic oligonucleotide
  Target: ATXN2; (-) strand; PAM type: NRG; PAM sequence: AGG
cagtccagaggttagaactc

SEQ ID NO: 24632 - DNA, 20 bp, Artificial Sequence
  Description of Artificial Sequence: Synthetic oligonucleotide
  Target: ATXN2; (-) strand; PAM type: NRG; PAM sequence: CAG
acagtccagaggttagaact

SEQ ID NO: 24633 - DNA, 20 bp, Artificial Sequence
  Description of Artificial Sequence: Synthetic oligonucleotide
  Target: ATXN2; (-) strand; PAM type: NRG; PAM sequence: TAG
ggaagggacagtccagaggt

SEQ ID NO: 24634 - DNA, 20 bp, Artificial Sequence
  Description of Artificial Sequence: Synthetic oligonucleotide
  Target: ATXN2; (-) strand; PAM type: NRG; PAM sequence: AGG
taagggaagggacagtccag

SEQ ID NO: 24635 - DNA, 20 bp, Artificial Sequence
  Description of Artificial Sequence: Synthetic oligonucleotide
  Target: ATXN2; (-) strand; PAM type: NRG; PAM sequence: GAG
ctaagggaagggacagtcca

SEQ ID NO: 24636 - DNA, 20 bp, Artificial Sequence
  Description of Artificial Sequence: Synthetic oligonucleotide
  Target: ATXN2; (-) strand; PAM type: NRG; PAM sequence: CAG
atctaagggaagggacagtc

SEQ ID NO: 24637 - DNA, 20 bp, Artificial Sequence
  Description of Artificial Sequence: Synthetic oligonucleotide
  Target: ATXN2; (-) strand; PAM type: NRG; PAM sequence: CAG
gcagaatctaagggaaggga

SEQ ID NO: 24638 - DNA, 20 bp, Artificial Sequence
  Description of Artificial Sequence: Synthetic oligonucleotide
  Target: ATXN2; (-) strand; PAM type: NRG; PAM sequence: GGG
aggagcagaatctaagggaa

SEQ ID NO: 24639 - DNA, 20 bp, Artificial Sequence
  Description of Artificial Sequence: Synthetic oligonucleotide
  Target: ATXN2; (-) strand; PAM type: NRG; PAM sequence: AGG
taggagcagaatctaaggga

SEQ ID NO: 24640 - DNA, 20 bp, Artificial Sequence
  Description of Artificial Sequence: Synthetic oligonucleotide
  Target: ATXN2; (-) strand; PAM type: NRG; PAM sequence: AAG
ttaggagcagaatctaaggg

SEQ ID NO: 24641 - DNA, 20 bp, Artificial Sequence
  Description of Artificial Sequence: Synthetic oligonucleotide
  Target: ATXN2; (-) strand; PAM type: NRG; PAM sequence: GGG
tgcttaggagcagaatctaa

SEQ ID NO: 24642 - DNA, 20 bp, Artificial Sequence
  Description of Artificial Sequence: Synthetic oligonucleotide
  Target: ATXN2; (-) strand; PAM type: NRG; PAM sequence: AGG
gtgcttaggagcagaatcta

SEQ ID NO: 24643 - DNA, 20 bp, Artificial Sequence
  Description of Artificial Sequence: Synthetic oligonucleotide
  Target: ATXN2; (-) strand; PAM type: NRG; PAM sequence: AAG
tgtgcttaggagcagaatct

SEQ ID NO: 24644 - DNA, 20 bp, Artificial Sequence
  Description of Artificial Sequence: Synthetic oligonucleotide
  Target: ATXN2; (-) strand; PAM type: NRG; PAM sequence: CAG
ttaaactttgtgcttaggag

SEQ ID NO: 24645 - DNA, 20 bp, Artificial Sequence
  Description of Artificial Sequence: Synthetic oligonucleotide
  Target: ATXN2; (-) strand; PAM type: NRG; PAM sequence: GAG
ctgttaaactttgtgcttag

SEQ ID NO: 24646 - DNA, 20 bp, Artificial Sequence
  Description of Artificial Sequence: Synthetic oligonucleotide
  Target: ATXN2; (-) strand; PAM type: NRG; PAM sequence: AGG
atctgttaaactttgtgctt

SEQ ID NO: 24647 - DNA, 20 bp, Artificial Sequence
  Description of Artificial Sequence: Synthetic oligonucleotide
  Target: ATXN2; (-) strand; PAM type: NRG; PAM sequence: TAG
catctgttaaactttgtgct

SEQ ID NO: 24648 - DNA, 20 bp, Artificial Sequence
  Description of Artificial Sequence: Synthetic oligonucleotide
  Target: ATXN2; (-) strand; PAM type: NRG; PAM sequence: GAG
aggtcaagtgggatgagaat

SEQ ID NO: 24649 - DNA, 20 bp, Artificial Sequence
  Description of Artificial Sequence: Synthetic oligonucleotide
  Target: ATXN2; (-) strand; PAM type: NRG; PAM sequence: GAG
atagagaggtcaagtgggat

SEQ ID NO: 24650 - DNA, 20 bp, Artificial Sequence
  Description of Artificial Sequence: Synthetic oligonucleotide
  Target: ATXN2; (-) strand; PAM type: NRG; PAM sequence: GGG
cagccatagagaggtcaagt

SEQ ID NO: 24651 - DNA, 20 bp, Artificial Sequence
  Description of Artificial Sequence: Synthetic oligonucleotide
  Target: ATXN2; (-) strand; PAM type: NRG; PAM sequence: TGG
tcagccatagagaggtcaag

SEQ ID NO: 24652 - DNA, 20 bp, Artificial Sequence
  Description of Artificial Sequence: Synthetic oligonucleotide
  Target: ATXN2; (-) strand; PAM type: NRG; PAM sequence: AAG
gaatcagccatagagaggtc

SEQ ID NO: 24653 - DNA, 20 bp, Artificial Sequence
  Description of Artificial Sequence: Synthetic oligonucleotide
  Target: ATXN2; (-) strand; PAM type: NRG; PAM sequence: AGG
tgatggaatcagccatagag

SEQ ID NO: 24654 - DNA, 20 bp, Artificial Sequence
  Description of Artificial Sequence: Synthetic oligonucleotide
  Target: ATXN2; (-) strand; PAM type: NRG; PAM sequence: GAG
ttgatggaatcagccataga

SEQ ID NO: 24655 - DNA, 20 bp, Artificial Sequence
  Description of Artificial Sequence: Synthetic oligonucleotide
  Target: ATXN2; (-) strand; PAM type: NRG; PAM sequence: GAG
gattgatggaatcagccata

SEQ ID NO: 24656 - DNA, 20 bp, Artificial Sequence
  Description of Artificial Sequence: Synthetic oligonucleotide
  Target: ATXN2; (-) strand; PAM type: NRG; PAM sequence: TAG
aagattgatggaatcagcca

SEQ ID NO: 24657 - DNA, 20 bp, Artificial Sequence
  Description of Artificial Sequence: Synthetic oligonucleotide
  Target: ATXN2; (-) strand; PAM type: NRG; PAM sequence: CAG
tagaccaagattgatggaat

SEQ ID NO: 24658 - DNA, 20 bp, Artificial Sequence
  Description of Artificial Sequence: Synthetic oligonucleotide
  Target: ATXN2; (-) strand; PAM type: NRG; PAM sequence: TGG
tgaagatagaccaagattga

SEQ ID NO: 24659 - DNA, 20 bp, Artificial Sequence
  Description of Artificial Sequence: Synthetic oligonucleotide
  Target: ATXN2; (-) strand; PAM type: NRG; PAM sequence: AAG
aaatgttgtgaagatagacc

SEQ ID NO: 24660 - DNA, 20 bp, Artificial Sequence
  Description of Artificial Sequence: Synthetic oligonucleotide
  Target: ATXN2; (-) strand; PAM type: NRG; PAM sequence: TAG
gacaaaaaatgttgtgaaga

SEQ ID NO: 24661 - DNA, 20 bp, Artificial Sequence
  Description of Artificial Sequence: Synthetic oligonucleotide
  Target: ATXN2; (-) strand; PAM type: NRG; PAM sequence: AAG
gaaggacaaaaaatgttgtg

SEQ ID NO: 24662 - DNA, 20 bp, Artificial Sequence
  Description of Artificial Sequence: Synthetic oligonucleotide
  Target: ATXN2; (-) strand; PAM type: NRG; PAM sequence: AGG
aaataaaattgagaaagtga

SEQ ID NO: 24663 - DNA, 20 bp, Artificial Sequence
  Description of Artificial Sequence: Synthetic oligonucleotide
  Target: ATXN2; (-) strand; PAM type: NRG; PAM sequence: AAG
aaaataaaattgagaaagtg

SEQ ID NO: 24664 - DNA, 20 bp, Artificial Sequence
  Description of Artificial Sequence: Synthetic oligonucleotide
  Target: ATXN2; (-) strand; PAM type: NRG; PAM sequence: AAG
cagagaaaataaaattgaga

SEQ ID NO: 24665 - DNA, 20 bp, Artificial Sequence
  Description of Artificial Sequence: Synthetic oligonucleotide
  Target: ATXN2; (-) strand; PAM type: NRG; PAM sequence: GAG
atctcagagaaaataaaatt

SEQ ID NO: 24666 - DNA, 20 bp, Artificial Sequence
  Description of Artificial Sequence: Synthetic oligonucleotide
  Target: ATXN2; (-) strand; PAM type: NRG; PAM sequence: GAG
cagtgagagaagagatctca

SEQ ID NO: 24667 - DNA, 20 bp, Artificial Sequence
  Description of Artificial Sequence: Synthetic oligonucleotide
  Target: ATXN2; (-) strand; PAM type: NRG; PAM sequence: CAG
gccagtgagagaagagatct

SEQ ID NO: 24668 - DNA, 20 bp, Artificial Sequence
  Description of Artificial Sequence: Synthetic oligonucleotide
  Target: ATXN2; (-) strand; PAM type: NRG; PAM sequence: GAG
aagaacagccagtgagagaa

SEQ ID NO: 24669 - DNA, 20 bp, Artificial Sequence
  Description of Artificial Sequence: Synthetic oligonucleotide
  Target: ATXN2; (-) strand; PAM type: NRG; PAM sequence: AAG
caaagaacagccagtgagag

SEQ ID NO: 24670 - DNA, 20 bp, Artificial Sequence
  Description of Artificial Sequence: Synthetic oligonucleotide
  Target: ATXN2; (-) strand; PAM type: NRG; PAM sequence: GAG
aaccaaagaacagccagtga

SEQ ID NO: 24671 - DNA, 20 bp, Artificial Sequence
  Description of Artificial Sequence: Synthetic oligonucleotide
  Target: ATXN2; (-) strand; PAM type: NRG; PAM sequence: GAG
aaaaccaaagaacagccagt

SEQ ID NO: 24672 - DNA, 20 bp, Artificial Sequence
  Description of Artificial Sequence: Synthetic oligonucleotide
  Target: ATXN2; (-) strand; PAM type: NRG; PAM sequence: CAG
atgaaaaaccaaagaacagc

SEQ ID NO: 24673 - DNA, 20 bp, Artificial Sequence
  Description of Artificial Sequence: Synthetic oligonucleotide
  Target: ATXN2; (-) strand; PAM type: NRG; PAM sequence: CAG
agccatgaaaaaccaaagaa

SEQ ID NO: 24674 - DNA, 20 bp, Artificial Sequence
  Description of Artificial Sequence: Synthetic oligonucleotide
  Target: ATXN2; (-) strand; PAM type: NRG; PAM sequence: AAG
attggagccatgaaaaacca

SEQ ID NO: 24675 - DNA, 20 bp, Artificial Sequence
  Description of Artificial Sequence: Synthetic oligonucleotide
  Target: ATXN2; (-) strand; PAM type: NRG; PAM sequence: GAG
catcagcattgccgatattg

SEQ ID NO: 24676 - DNA, 20 bp, Artificial Sequence
  Description of Artificial Sequence: Synthetic oligonucleotide
  Target: ATXN2; (-) strand; PAM type: NRG; PAM sequence: TGG
ttcatcagcattgccgatat

SEQ ID NO: 24677 - DNA, 20 bp, Artificial Sequence
  Description of Artificial Sequence: Synthetic oligonucleotide
  Target: ATXN2; (-) strand; PAM type: NRG; PAM sequence: CAG
ggttcagtttgaggtttcat

SEQ ID NO: 24678 - DNA, 20 bp, Artificial Sequence
  Description of Artificial Sequence: Synthetic oligonucleotide
  Target: ATXN2; (-) strand; PAM type: NRG; PAM sequence: AGG
gagactggcggttcagtttg

SEQ ID NO: 24679 - DNA, 20 bp, Artificial Sequence
  Description of Artificial Sequence: Synthetic oligonucleotide
  Target: ATXN2; (-) strand; PAM type: NRG; PAM sequence: GAG
tgagactggcggttcagttt

SEQ ID NO: 24680 - DNA, 20 bp, Artificial Sequence
  Description of Artificial Sequence: Synthetic oligonucleotide
  Target: ATXN2; (-) strand; PAM type: NRG; PAM sequence: CAG
acactgtgagactggcggtt

SEQ ID NO: 24681 - DNA, 20 bp, Artificial Sequence
  Description of Artificial Sequence: Synthetic oligonucleotide
  Target: ATXN2; (-) strand; PAM type: NRG; PAM sequence: CGG
tgttgacactgtgagactgg

SEQ ID NO: 24682 - DNA, 20 bp, Artificial Sequence
  Description of Artificial Sequence: Synthetic oligonucleotide
  Target: ATXN2; (-) strand; PAM type: NRG; PAM sequence: TGG
agatgttgacactgtgagac

SEQ ID NO: 24683 - DNA, 20 bp, Artificial Sequence
  Description of Artificial Sequence: Synthetic oligonucleotide
  Target: ATXN2; (-) strand; PAM type: NRG; PAM sequence: GAG
ctgatagatgttgacactgt

SEQ ID NO: 24684 - DNA, 20 bp, Artificial Sequence
  Description of Artificial Sequence: Synthetic oligonucleotide
  Target: ATXN2; (-) strand; PAM type: NRG; PAM sequence: TAG
tgaattgacatgtccactga

SEQ ID NO: 24685 - DNA, 20 bp, Artificial Sequence
  Description of Artificial Sequence: Synthetic oligonucleotide
  Target: ATXN2; (-) strand; PAM type: NRG; PAM sequence: TGG
aaggcagtcagcttagagtc

SEQ ID NO: 24686 - DNA, 20 bp, Artificial Sequence
  Description of Artificial Sequence: Synthetic oligonucleotide
  Target: ATXN2; (-) strand; PAM type: NRG; PAM sequence: GAG
tcttaaaggcagtcagctta

SEQ ID NO: 24687 - DNA, 20 bp, Artificial Sequence
  Description of Artificial Sequence: Synthetic oligonucleotide
  Target: ATXN2; (-) strand; PAM type: NRG; PAM sequence: TAG
tctcttaaaggcagtcagct

SEQ ID NO: 24688 - DNA, 20 bp, Artificial Sequence
  Description of Artificial Sequence: Synthetic oligonucleotide
  Target: ATXN2; (-) strand; PAM type: NRG; PAM sequence: CAG
catcctctcttaaaggcagt

SEQ ID NO: 24689 - DNA, 20 bp, Artificial Sequence
  Description of Artificial Sequence: Synthetic oligonucleotide
  Target: ATXN2; (-) strand; PAM type: NRG; PAM sequence: CAG
gatgcatcctctcttaaagg

SEQ ID NO: 24690 - DNA, 20 bp, Artificial Sequence
  Description of Artificial Sequence: Synthetic oligonucleotide
  Target: ATXN2; (-) strand; PAM type: NRG; PAM sequence: AGG
agagatgcatcctctcttaa

SEQ ID NO: 24691 - DNA, 20 bp, Artificial Sequence
  Description of Artificial Sequence: Synthetic oligonucleotide
  Target: ATXN2; (-) strand; PAM type: NRG; PAM sequence: AAG
aagagatgcatcctctctta

SEQ ID NO: 24692 - DNA, 20 bp, Artificial Sequence
  Description of Artificial Sequence: Synthetic oligonucleotide
  Target: ATXN2; (-) strand; PAM type: NRG; PAM sequence: GAG
ctacctatctagtaaagtaa

SEQ ID NO: 24693 - DNA, 20 bp, Artificial Sequence
  Description of Artificial Sequence: Synthetic oligonucleotide
  Target: ATXN2; (-) strand; PAM type: NRG; PAM sequence: AAG
tgctacctatctagtaaagt

SEQ ID NO: 24694 - DNA, 20 bp, Artificial Sequence
  Description of Artificial Sequence: Synthetic oligonucleotide
  Target: ATXN2; (-) strand; PAM type: NRG; PAM sequence: AAG
tacctgctacctatctagta

SEQ ID NO: 24695 - DNA, 20 bp, Artificial Sequence
  Description of Artificial Sequence: Synthetic oligonucleotide
  Target: ATXN2; (-) strand; PAM type: NRG; PAM sequence: TAG
agaaatacctgctacctatc

SEQ ID NO: 24696 - DNA, 20 bp, Artificial Sequence
  Description of Artificial Sequence: Synthetic oligonucleotide
  Target: ATXN2; (-) strand; PAM type: NRG; PAM sequence: GAG
catttattcataaacgtgtt

SEQ ID NO: 24697 - DNA, 20 bp, Artificial Sequence
  Description of Artificial Sequence: Synthetic oligonucleotide
  Target: ATXN2; (-) strand; PAM type: NRG; PAM sequence: GGG
aattgcatatgtgggcttgt

SEQ ID NO: 24698 - DNA, 20 bp, Artificial Sequence
  Description of Artificial Sequence: Synthetic oligonucleotide
  Target: ATXN2; (-) strand; PAM type: NRG; PAM sequence: TGG
taattgcatatgtgggcttg

SEQ ID NO: 24699 - DNA, 20 bp, Artificial Sequence
  Description of Artificial Sequence: Synthetic oligonucleotide
  Target: ATXN2; (-) strand; PAM type: NRG; PAM sequence: GGG
gtgcagctaattgcatatgt

SEQ ID NO: 24700 - DNA, 20 bp, Artificial Sequence
  Description of Artificial Sequence: Synthetic oligonucleotide
  Target: ATXN2; (-) strand; PAM type: NRG; PAM sequence: TGG
tgtgcagctaattgcatatg

SEQ ID NO: 24701 - DNA, 20 bp, Artificial Sequence
  Description of Artificial Sequence: Synthetic oligonucleotide
  Target: ATXN2; (-) strand; PAM type: NRG; PAM sequence: CAG
aaacagtgactccgtttgtg

SEQ ID NO: 24702 - DNA, 20 bp, Artificial Sequence
  Description of Artificial Sequence: Synthetic oligonucleotide
  Target: ATXN2; (-) strand; PAM type: NRG; PAM sequence: CAG
agcaagtttgaggggaaaaa

SEQ ID NO: 24703 - DNA, 20 bp, Artificial Sequence
  Description of Artificial Sequence: Synthetic oligonucleotide
  Target: ATXN2; (-) strand; PAM type: NRG; PAM sequence: GGG
aaacatggagcaagtttgag

SEQ ID NO: 24704 - DNA, 20 bp, Artificial Sequence
  Description of Artificial Sequence: Synthetic oligonucleotide
  Target: ATXN2; (-) strand; PAM type: NRG; PAM sequence: GGG
gaaacatggagcaagtttga

SEQ ID NO: 24705 - DNA, 20 bp, Artificial Sequence
  Description of Artificial Sequence: Synthetic oligonucleotide
  Target: ATXN2; (-) strand; PAM type: NRG; PAM sequence: AGG
ggaaacatggagcaagtttg

SEQ ID NO: 24706 - DNA, 20 bp, Artificial Sequence
  Description of Artificial Sequence: Synthetic oligonucleotide
  Target: ATXN2; (-) strand; PAM type: NRG; PAM sequence: GAG
aggaaacatggagcaagttt

SEQ ID NO: 24707 - DNA, 20 bp, Artificial Sequence
  Description of Artificial Sequence: Synthetic oligonucleotide
  Target: ATXN2; (-) strand; PAM type: NRG; PAM sequence: AAG
agagagaggaaacatggagc

SEQ ID NO: 24708 - DNA, 20 bp, Artificial Sequence
  Description of Artificial Sequence: Synthetic oligonucleotide
  Target: ATXN2; (-) strand; PAM type: NRG; PAM sequence: GAG
taagagagagaggaaacatg

SEQ ID NO: 24709 - DNA, 20 bp, Artificial Sequence
  Description of Artificial Sequence: Synthetic oligonucleotide
  Target: ATXN2; (-) strand; PAM type: NRG; PAM sequence: TGG
ggtaagagagagaggaaaca

SEQ ID NO: 24710 - DNA, 20 bp, Artificial Sequence
  Description of Artificial Sequence: Synthetic oligonucleotide
  Target: ATXN2; (-) strand; PAM type: NRG; PAM sequence: AGG
gatgtactggtaagagagag

SEQ ID NO: 24711 - DNA, 20 bp, Artificial Sequence
  Description of Artificial Sequence: Synthetic oligonucleotide
  Target: ATXN2; (-) strand; PAM type: NRG; PAM sequence: GAG
ggatgtactggtaagagaga

SEQ ID NO: 24712 - DNA, 20 bp, Artificial Sequence
  Description of Artificial Sequence: Synthetic oligonucleotide
  Target: ATXN2; (-) strand; PAM type: NRG; PAM sequence: GAG
atggatgtactggtaagaga

SEQ ID NO: 24713 - DNA, 20 bp, Artificial Sequence
  Description of Artificial Sequence: Synthetic oligonucleotide
  Target: ATXN2; (-) strand; PAM type: NRG; PAM sequence: GAG
taatggatgtactggtaaga

SEQ ID NO: 24714 - DNA, 20 bp, Artificial Sequence
  Description of Artificial Sequence: Synthetic oligonucleotide
  Target: ATXN2; (-) strand; PAM type: NRG; PAM sequence: GAG
cttaatggatgtactggtaa

SEQ ID NO: 24715 - DNA, 20 bp, Artificial Sequence
  Description of Artificial Sequence: Synthetic oligonucleotide
  Target: ATXN2; (-) strand; PAM type: NRG; PAM sequence: AAG
gacttaatggatgtactggt

SEQ ID NO: 24716 - DNA, 20 bp, Artificial Sequence
  Description of Artificial Sequence: Synthetic oligonucleotide
  Target: ATXN2; (-) strand; PAM type: NRG; PAM sequence: TGG
aagtgacttaatggatgtac

SEQ ID NO: 24717 - DNA, 20 bp, Artificial Sequence
  Description of Artificial Sequence: Synthetic oligonucleotide
  Target: ATXN2; (-) strand; PAM type: NRG; PAM sequence: TGG
ttgataactaagtgacttaa

SEQ ID NO: 24718 - DNA, 20 bp, Artificial Sequence
  Description of Artificial Sequence: Synthetic oligonucleotide
  Target: ATXN2; (-) strand; PAM type: NRG; PAM sequence: AAG
ctgaggtttatttgataact

SEQ ID NO: 24719 - DNA, 20 bp, Artificial Sequence
  Description of Artificial Sequence: Synthetic oligonucleotide
  Target: ATXN2; (-) strand; PAM type: NRG; PAM sequence: AGG
ctagttaagggatgagcctg

SEQ ID NO: 24720 - DNA, 20 bp, Artificial Sequence
  Description of Artificial Sequence: Synthetic oligonucleotide
  Target: ATXN2; (-) strand; PAM type: NRG; PAM sequence: GAG
cctagttaagggatgagcct

SEQ ID NO: 24721 - DNA, 20 bp, Artificial Sequence
  Description of Artificial Sequence: Synthetic oligonucleotide
  Target: ATXN2; (-) strand; PAM type: NRG; PAM sequence: GAG
taaccacctagttaagggat

SEQ ID NO: 24722 - DNA, 20 bp, Artificial Sequence
  Description of Artificial Sequence: Synthetic oligonucleotide
  Target: ATXN2; (-) strand; PAM type: NRG; PAM sequence: GGG
tttggtaaccacctagttaa

SEQ ID NO: 24723 - DNA, 20 bp, Artificial Sequence
  Description of Artificial Sequence: Synthetic oligonucleotide
  Target: ATXN2; (-) strand; PAM type: NRG; PAM sequence: AGG
atttggtaaccacctagtta

SEQ ID NO: 24724 - DNA, 20 bp, Artificial Sequence
  Description of Artificial Sequence: Synthetic oligonucleotide
  Target: ATXN2; (-) strand; PAM type: NRG; PAM sequence: AAG
aatttggtaaccacctagtt

SEQ ID NO: 24725 - DNA, 20 bp, Artificial Sequence
  Description of Artificial Sequence: Synthetic oligonucleotide
  Target: ATXN2; (-) strand; PAM type: NRG; PAM sequence: TAG
gtgagaatttggtaaccacc

SEQ ID NO: 24726 - DNA, 20 bp, Artificial Sequence
  Description of Artificial Sequence: Synthetic oligonucleotide
  Target: ATXN2; (-) strand; PAM type: NRG; PAM sequence: TGG
atagttcaactgtgagaatt

SEQ ID NO: 24727 - DNA, 20 bp, Artificial Sequence
  Description of Artificial Sequence: Synthetic oligonucleotide
  Target: ATXN2; (-) strand; PAM type: NRG; PAM sequence: GAG
cactgaaatagttcaactgt

SEQ ID NO: 24728 - DNA, 20 bp, Artificial Sequence
  Description of Artificial Sequence: Synthetic oligonucleotide
  Target: ATXN2; (-) strand; PAM type: NRG; PAM sequence: TAG
gaacagttagtgcactgaaa

SEQ ID NO: 24729 - DNA, 20 bp, Artificial Sequence
  Description of Artificial Sequence: Synthetic oligonucleotide
  Target: ATXN2; (-) strand; PAM type: NRG; PAM sequence: TAG
gctgagacacagagaacagt

SEQ ID NO: 24730 - DNA, 20 bp, Artificial Sequence
  Description of Artificial Sequence: Synthetic oligonucleotide
  Target: ATXN2; (-) strand; PAM type: NRG; PAM sequence: CAG
actggctgagacacagagaa

SEQ ID NO: 24731 - DNA, 20 bp, Artificial Sequence
  Description of Artificial Sequence: Synthetic oligonucleotide
  Target: ATXN2; (-) strand; PAM type: NRG; PAM sequence: GAG
tgaggactggctgagacaca

SEQ ID NO: 24732 - DNA, 20 bp, Artificial Sequence
  Description of Artificial Sequence: Synthetic oligonucleotide
  Target: ATXN2; (-) strand; PAM type: NRG; PAM sequence: CAG
attgaggactggctgagaca

SEQ ID NO: 24733 - DNA, 20 bp, Artificial Sequence
  Description of Artificial Sequence: Synthetic oligonucleotide
  Target: ATXN2; (-) strand; PAM type: NRG; PAM sequence: GAG
tggggcattgaggactggct

SEQ ID NO: 24734 - DNA, 20 bp, Artificial Sequence
  Description of Artificial Sequence: Synthetic oligonucleotide
  Target: ATXN2; (-) strand; PAM type: NRG; PAM sequence: TGG
aaccctggggcattgaggac

SEQ ID NO: 24735 - DNA, 20 bp, Artificial Sequence
  Description of Artificial Sequence: Synthetic oligonucleotide
  Target: ATXN2; (-) strand; PAM type: NRG; PAM sequence: AGG
gaataaaccctggggcattg

SEQ ID NO: 24736 - DNA, 20 bp, Artificial Sequence
  Description of Artificial Sequence: Synthetic oligonucleotide
  Target: ATXN2; (-) strand; PAM type: NRG; PAM sequence: GAG
tgaataaaccctggggcatt

SEQ ID NO: 24737 - DNA, 20 bp, Artificial Sequence
  Description of Artificial Sequence: Synthetic oligonucleotide
  Target: ATXN2; (-) strand; PAM type: NRG; PAM sequence: GGG
gatggggtgaataaaccctg

SEQ ID NO: 24738 - DNA, 20 bp, Artificial Sequence
  Description of Artificial Sequence: Synthetic oligonucleotide
  Target: ATXN2; (-) strand; PAM type: NRG; PAM sequence: GGG
agatggggtgaataaaccct

SEQ ID NO: 24739 - DNA, 20 bp, Artificial Sequence
  Description of Artificial Sequence: Synthetic oligonucleotide
  Target: ATXN2; (-) strand; PAM type: NRG; PAM sequence: TGG
gagatggggtgaataaaccc

SEQ ID NO: 24740 - DNA, 20 bp, Artificial Sequence
  Description of Artificial Sequence: Synthetic oligonucleotide
  Target: ATXN2; (-) strand; PAM type: NRG; PAM sequence: GGG
caccctgttggaaggagatg

SEQ ID NO: 24741 - DNA, 20 bp, Artificial Sequence
  Description of Artificial Sequence: Synthetic oligonucleotide
  Target: ATXN2; (-) strand; PAM type: NRG; PAM sequence: GGG
gcaccctgttggaaggagat

SEQ ID NO: 24742 - DNA, 20 bp, Artificial Sequence
  Description of Artificial Sequence: Synthetic oligonucleotide
  Target: ATXN2; (-) strand; PAM type: NRG; PAM sequence: TGG
agcaccctgttggaaggaga

SEQ ID NO: 24743 - DNA, 20 bp, Artificial Sequence
  Description of Artificial Sequence: Synthetic oligonucleotide
  Target: ATXN2; (-) strand; PAM type: NRG; PAM sequence: GAG
aaagagcaccctgttggaag

SEQ ID NO: 24744 - DNA, 20 bp, Artificial Sequence
  Description of Artificial Sequence: Synthetic oligonucleotide
  Target: ATXN2; (-) strand; PAM type: NRG; PAM sequence: AGG
ctaaagagcaccctgttgga

SEQ ID NO: 24745 - DNA, 20 bp, Artificial Sequence
  Description of Artificial Sequence: Synthetic oligonucleotide
  Target: ATXN2; (-) strand; PAM type: NRG; PAM sequence: AAG
gctaaagagcaccctgttgg

SEQ ID NO: 24746 - DNA, 20 bp, Artificial Sequence
  Description of Artificial Sequence: Synthetic oligonucleotide
  Target: ATXN2; (-) strand; PAM type: NRG; PAM sequence: TGG
catgctaaagagcaccctgt

SEQ ID NO: 24747 - DNA, 20 bp, Artificial Sequence
  Description of Artificial Sequence: Synthetic oligonucleotide
  Target: ATXN2; (-) strand; PAM type: NRG; PAM sequence: GAG
acttggcatgtcatgctaaa

SEQ ID NO: 24748 - DNA, 20 bp, Artificial Sequence
  Description of Artificial Sequence: Synthetic oligonucleotide
  Target: ATXN2; (-) strand; PAM type: NRG; PAM sequence: AAG
ggacttggcatgtcatgcta

SEQ ID NO: 24749 - DNA, 20 bp, Artificial Sequence
  Description of Artificial Sequence: Synthetic oligonucleotide
  Target: ATXN2; (-) strand; PAM type: NRG; PAM sequence: TGG
actgaggtcattaaaggact

SEQ ID NO: 24750 - DNA, 20 bp, Artificial Sequence
  Description of Artificial Sequence: Synthetic oligonucleotide
  Target: ATXN2; (-) strand; PAM type: NRG; PAM sequence: AGG
gtaggaactgaggtcattaa

SEQ ID NO: 24751 - DNA, 20 bp, Artificial Sequence
  Description of Artificial Sequence: Synthetic oligonucleotide
  Target: ATXN2; (-) strand; PAM type: NRG; PAM sequence: AAG
agtaggaactgaggtcatta

SEQ ID NO: 24752 - DNA, 20 bp, Artificial Sequence
  Description of Artificial Sequence: Synthetic oligonucleotide
  Target: ATXN2; (-) strand; PAM type: NRG; PAM sequence: AGG
gcagttgatagtaggaactg

SEQ ID NO: 24753 - DNA, 20 bp, Artificial Sequence
  Description of Artificial Sequence: Synthetic oligonucleotide
  Target: ATXN2; (-) strand; PAM type: NRG; PAM sequence: GAG
ggcagttgatagtaggaact

SEQ ID NO: 24754 - DNA, 20 bp, Artificial Sequence
  Description of Artificial Sequence: Synthetic oligonucleotide
  Target: ATXN2; (-) strand; PAM type: NRG; PAM sequence: AGG
cagcagtggcagttgatagt

SEQ ID NO: 24755 - DNA, 20 bp, Artificial Sequence
  Description of Artificial Sequence: Synthetic oligonucleotide
  Target: ATXN2; (-) strand; PAM type: NRG; PAM sequence: TAG
gcagcagtggcagttgatag

SEQ ID NO: 24756 - DNA, 20 bp, Artificial Sequence
  Description of Artificial Sequence: Synthetic oligonucleotide
  Target: ATXN2; (-) strand; PAM type: NRG; PAM sequence: TAG
ggtgcagcagtggcagttga

SEQ ID NO: 24757 - DNA, 20 bp, Artificial Sequence
  Description of Artificial Sequence: Synthetic oligonucleotide
  Target: ATXN2; (-) strand; PAM type: NRG; PAM sequence: CAG
tgtgtcaggtgcagcagtgg

SEQ ID NO: 24758 - DNA, 20 bp, Artificial Sequence
  Description of Artificial Sequence: Synthetic oligonucleotide
  Target: ATXN2; (-) strand; PAM type: NRG; PAM sequence: TGG
atctgtgtcaggtgcagcag

SEQ ID NO: 24759 - DNA, 20 bp, Artificial Sequence
  Description of Artificial Sequence: Synthetic oligonucleotide
  Target: ATXN2; (-) strand; PAM type: NRG; PAM sequence: CAG
aggatctgtgtcaggtgcag

SEQ ID NO: 24760 - DNA, 20 bp, Artificial Sequence
  Description of Artificial Sequence: Synthetic oligonucleotide
  Target: ATXN2; (-) strand; PAM type: NRG; PAM sequence: CAG
cacaggatctgtgtcaggtg

SEQ ID NO: 24761 - DNA, 20 bp, Artificial Sequence
  Description of Artificial Sequence: Synthetic oligonucleotide
  Target: ATXN2; (-) strand; PAM type: NRG; PAM sequence: AGG
tggaacacaggatctgtgtc

SEQ ID NO: 24762 - DNA, 20 bp, Artificial Sequence
  Description of Artificial Sequence: Synthetic oligonucleotide
  Target: ATXN2; (-) strand; PAM type: NRG; PAM sequence: CAG
ctggaacacaggatctgtgt

SEQ ID NO: 24763 - DNA, 20 bp, Artificial Sequence
  Description of Artificial Sequence: Synthetic oligonucleotide
  Target: ATXN2; (-) strand; PAM type: NRG; PAM sequence: AGG
gttgcatgtgtctggaacac

SEQ ID NO: 24764 - DNA, 20 bp, Artificial Sequence
  Description of Artificial Sequence: Synthetic oligonucleotide
  Target: ATXN2; (-) strand; PAM type: NRG; PAM sequence: CAG
tgttgcatgtgtctggaaca

SEQ ID NO: 24765 - DNA, 20 bp, Artificial Sequence
  Description of Artificial Sequence: Synthetic oligonucleotide
  Target: ATXN2; (-) strand; PAM type: NRG; PAM sequence: TGG
ggctggttgttgcatgtgtc

SEQ ID NO: 24766 - DNA, 20 bp, Artificial Sequence
  Description of Artificial Sequence: Synthetic oligonucleotide
  Target: ATXN2; (-) strand; PAM type: NRG; PAM sequence: TGG
tggccagctcaggagagggc

SEQ ID NO: 24767 - DNA, 20 bp, Artificial Sequence
  Description of Artificial Sequence: Synthetic oligonucleotide
  Target: ATXN2; (-) strand; PAM type: NRG; PAM sequence: GGG
aatttggccagctcaggaga

SEQ ID NO: 24768 - DNA, 20 bp, Artificial Sequence
  Description of Artificial Sequence: Synthetic oligonucleotide
  Target: ATXN2; (-) strand; PAM type: NRG; PAM sequence: AGG
aaatttggccagctcaggag

SEQ ID NO: 24769 - DNA, 20 bp, Artificial Sequence
  Description of Artificial Sequence: Synthetic oligonucleotide
  Target: ATXN2; (-) strand; PAM type: NRG; PAM sequence: GAG
aaaatttggccagctcagga

SEQ ID NO: 24770 - DNA, 20 bp, Artificial Sequence
  Description of Artificial Sequence: Synthetic oligonucleotide
  Target: ATXN2; (-) strand; PAM type: NRG; PAM sequence: GAG
agaaaatttggccagctcag

SEQ ID NO: 24771 - DNA, 20 bp, Artificial Sequence
  Description of Artificial Sequence: Synthetic oligonucleotide
  Target: ATXN2; (-) strand; PAM type: NRG; PAM sequence: AGG
tgagaaaatttggccagctc

SEQ ID NO: 24772 - DNA, 20 bp, Artificial Sequence
  Description of Artificial Sequence: Synthetic oligonucleotide
  Target: ATXN2; (-) strand; PAM type: NRG; PAM sequence: CAG
atgagaaaatttggccagct

SEQ ID NO: 24773 - DNA, 20 bp, Artificial Sequence
  Description of Artificial Sequence: Synthetic oligonucleotide
  Target: ATXN2; (-) strand; PAM type: NRG; PAM sequence: CAG
tggctatgagaaaatttggc

SEQ ID NO: 24774 - DNA, 20 bp, Artificial Sequence
  Description of Artificial Sequence: Synthetic oligonucleotide
  Target: ATXN2; (-) strand; PAM type: NRG; PAM sequence: TGG
agcatggctatgagaaaatt

SEQ ID NO: 24775 - DNA, 20 bp, Artificial Sequence
  Description of Artificial Sequence: Synthetic oligonucleotide
  Target: ATXN2; (-) strand; PAM type: NRG; PAM sequence: GAG
ccatgtacaagcatggctat

SEQ ID NO: 24776 - DNA, 20 bp, Artificial Sequence
  Description of Artificial Sequence: Synthetic oligonucleotide
  Target: ATXN2; (-) strand; PAM type: NRG; PAM sequence: TGG
tgaaaagccatgtacaagca

SEQ ID NO: 24777 - DNA, 20 bp, Artificial Sequence
  Description of Artificial Sequence: Synthetic oligonucleotide
  Target: ATXN2; (-) strand; PAM type: NRG; PAM sequence: AAG
cctgatgaaaagccatgtac

SEQ ID NO: 24778 - DNA, 20 bp, Artificial Sequence
  Description of Artificial Sequence: Synthetic oligonucleotide
  Target: ATXN2; (-) strand; PAM type: NRG; PAM sequence: AAG
agagtttatcacctgatgaa

SEQ ID NO: 24779 - DNA, 20 bp, Artificial Sequence
  Description of Artificial Sequence: Synthetic oligonucleotide
  Target: ATXN2; (-) strand; PAM type: NRG; PAM sequence: GAG
ttagagaagagttgggagaa

SEQ ID NO: 24780 - DNA, 20 bp, Artificial Sequence
  Description of Artificial Sequence: Synthetic oligonucleotide
  Target: ATXN2; (-) strand; PAM type: NRG; PAM sequence: AAG
acttagagaagagttgggag

SEQ ID NO: 24781 - DNA, 20 bp, Artificial Sequence
  Description of Artificial Sequence: Synthetic oligonucleotide
  Target: ATXN2; (-) strand; PAM type: NRG; PAM sequence: GAG
gacacttagagaagagttgg

SEQ ID NO: 24782 - DNA, 20 bp, Artificial Sequence
  Description of Artificial Sequence: Synthetic oligonucleotide
  Target: ATXN2; (-) strand; PAM type: NRG; PAM sequence: GGG
ttgacacttagagaagagtt

SEQ ID NO: 24783 - DNA, 20 bp, Artificial Sequence
  Description of Artificial Sequence: Synthetic oligonucleotide
  Target: ATXN2; (-) strand; PAM type: NRG; PAM sequence: TGG
tttgacacttagagaagagt

SEQ ID NO: 24784 - DNA, 20 bp, Artificial Sequence
  Description of Artificial Sequence: Synthetic oligonucleotide
  Target: ATXN2; (-) strand; PAM type: NRG; PAM sequence: GAG
ggtctttgacacttagagaa

SEQ ID NO: 24785 - DNA, 20 bp, Artificial Sequence
  Description of Artificial Sequence: Synthetic oligonucleotide
  Target: ATXN2; (-) strand; PAM type: NRG; PAM sequence: AAG
agggtctttgacacttagag

SEQ ID NO: 24786 - DNA, 20 bp, Artificial Sequence
  Description of Artificial Sequence: Synthetic oligonucleotide
  Target: ATXN2; (-) strand; PAM type: NRG; PAM sequence: GAG
aatagggtctttgacactta

SEQ ID NO: 24787 - DNA, 20 bp, Artificial Sequence
  Description of Artificial Sequence: Synthetic oligonucleotide
  Target: ATXN2; (-) strand; PAM type: NRG; PAM sequence: TAG
ataatagggtctttgacact

SEQ ID NO: 24788 - DNA, 20 bp, Artificial Sequence
  Description of Artificial Sequence: Synthetic oligonucleotide
  Target: ATXN2; (-) strand; PAM type: NRG; PAM sequence: GGG
cattttgtgataagataata

SEQ ID NO: 24789 - DNA, 20 bp, Artificial Sequence
  Description of Artificial Sequence: Synthetic oligonucleotide
  Target: ATXN2; (-) strand; PAM type: NRG; PAM sequence: AGG
acattttgtgataagataat

SEQ ID NO: 24790 - DNA, 20 bp, Artificial Sequence
  Description of Artificial Sequence: Synthetic oligonucleotide
  Target: ATXN2; (-) strand; PAM type: NRG; PAM sequence: TAG
gacattttgtgataagataa

SEQ ID NO: 24791 - DNA, 20 bp, Artificial Sequence
  Description of Artificial Sequence: Synthetic oligonucleotide
  Target: ATXN2; (-) strand; PAM type: NRG; PAM sequence: AAG
aggaggtgacattttgtgat

SEQ ID NO: 24792 - DNA, 20 bp, Artificial Sequence
  Description of Artificial Sequence: Synthetic oligonucleotide
  Target: ATXN2; (-) strand; PAM type: NRG; PAM sequence: AGG
cagagaaaacctcattgagg

SEQ ID NO: 24793 - DNA, 20 bp, Artificial Sequence
  Description of Artificial Sequence: Synthetic oligonucleotide
  Target: ATXN2; (-) strand; PAM type: NRG; PAM sequence: GAG
tcagagaaaacctcattgag

SEQ ID NO: 24794 - DNA, 20 bp, Artificial Sequence
  Description of Artificial Sequence: Synthetic oligonucleotide
  Target: ATXN2; (-) strand; PAM type: NRG; PAM sequence: AGG
agtcagagaaaacctcattg

SEQ ID NO: 24795 - DNA, 20 bp, Artificial Sequence
  Description of Artificial Sequence: Synthetic oligonucleotide
  Target: ATXN2; (-) strand; PAM type: NRG; PAM sequence: GAG
gagtcagagaaaacctcatt

SEQ ID NO: 24796 - DNA, 20 bp, Artificial Sequence
  Description of Artificial Sequence: Synthetic oligonucleotide
  Target: ATXN2; (-) strand; PAM type: NRG; PAM sequence: GAG
tagcataacctgtagagtca

SEQ ID NO: 24797 - DNA, 20 bp, Artificial Sequence
  Description of Artificial Sequence: Synthetic oligonucleotide
  Target: ATXN2; (-) strand; PAM type: NRG; PAM sequence: CAG
gctagcataacctgtagagt

SEQ ID NO: 24798 - DNA, 20 bp, Artificial Sequence
  Description of Artificial Sequence: Synthetic oligonucleotide
  Target: ATXN2; (-) strand; PAM type: NRG; PAM sequence: GAG
aggagctagcataacctgta

SEQ ID NO: 24799 - DNA, 20 bp, Artificial Sequence
  Description of Artificial Sequence: Synthetic oligonucleotide
  Target: ATXN2; (-) strand; PAM type: NRG; PAM sequence: TAG
ggaggagctagcataacctg

SEQ ID NO: 24800 - DNA, 20 bp, Artificial Sequence
  Description of Artificial Sequence: Synthetic oligonucleotide
  Target: ATXN2; (-) strand; PAM type: NRG; PAM sequence: TAG
catacagaatgaggaggagc

SEQ ID NO: 24801 - DNA, 20 bp, Artificial Sequence
  Description of Artificial Sequence: Synthetic oligonucleotide
  Target: ATXN2; (-) strand; PAM type: NRG; PAM sequence: GAG
ggaacatacagaatgaggag

SEQ ID NO: 24802 - DNA, 20 bp, Artificial Sequence
  Description of Artificial Sequence: Synthetic oligonucleotide
  Target: ATXN2; (-) strand; PAM type: NRG; PAM sequence: AGG
taggaacatacagaatgagg

SEQ ID NO: 24803 - DNA, 20 bp, Artificial Sequence
  Description of Artificial Sequence: Synthetic oligonucleotide
  Target: ATXN2; (-) strand; PAM type: NRG; PAM sequence: GAG
ctaggaacatacagaatgag

SEQ ID NO: 24804 - DNA, 20 bp, Artificial Sequence
  Description of Artificial Sequence: Synthetic oligonucleotide
  Target: ATXN2; (-) strand; PAM type: NRG; PAM sequence: AGG
tactaggaacatacagaatg

SEQ ID NO: 24805 - DNA, 20 bp, Artificial Sequence
  Description of Artificial Sequence: Synthetic oligonucleotide
  Target: ATXN2; (-) strand; PAM type: NRG; PAM sequence: GAG
gtactaggaacatacagaat

SEQ ID NO: 24806 - DNA, 20 bp, Artificial Sequence
  Description of Artificial Sequence: Synthetic oligonucleotide
  Target: ATXN2; (-) strand; PAM type: NRG; PAM sequence: CAG
ttcaaagtactaggaacata

SEQ ID NO: 24807 - DNA, 20 bp, Artificial Sequence
  Description of Artificial Sequence: Synthetic oligonucleotide
  Target: ATXN2; (-) strand; PAM type: NRG; PAM sequence: AGG
aaaggcatgttcaaagtact

SEQ ID NO: 24808 - DNA, 20 bp, Artificial Sequence
  Description of Artificial Sequence: Synthetic oligonucleotide
  Target: ATXN2; (-) strand; PAM type: NRG; PAM sequence: TAG
taaaggcatgttcaaagtac

SEQ ID NO: 24809 - DNA, 20 bp, Artificial Sequence
  Description of Artificial Sequence: Synthetic oligonucleotide
  Target: ATXN2; (-) strand; PAM type: NRG; PAM sequence: AAG
cttggttaaaggcatgttca

SEQ ID NO: 24810 - DNA, 20 bp, Artificial Sequence
  Description of Artificial Sequence: Synthetic oligonucleotide
  Target: ATXN2; (-) strand; PAM type: NRG; PAM sequence: AGG
aatatgatttgcttggttaa

SEQ ID NO: 24811 - DNA, 20 bp, Artificial Sequence
  Description of Artificial Sequence: Synthetic oligonucleotide
  Target: ATXN2; (-) strand; PAM type: NRG; PAM sequence: AAG
caatatgatttgcttggtta

SEQ ID NO: 24812 - DNA, 20 bp, Artificial Sequence
  Description of Artificial Sequence: Synthetic oligonucleotide
  Target: ATXN2; (-) strand; PAM type: NRG; PAM sequence: TGG
gcagtacaatatgatttgct

SEQ ID NO: 24813 - DNA, 20 bp, Artificial Sequence
  Description of Artificial Sequence: Synthetic oligonucleotide
  Target: ATXN2; (-) strand; PAM type: NRG; PAM sequence: CAG
gacacgtgtaacaatcacag

SEQ ID NO: 24814 - DNA, 20 bp, Artificial Sequence
  Description of Artificial Sequence: Synthetic oligonucleotide
  Target: ATXN2; (-) strand; PAM type: NRG; PAM sequence: CAG
ggggacacgtgtaacaatca

SEQ ID NO: 24815 - DNA, 20 bp, Artificial Sequence
  Description of Artificial Sequence: Synthetic oligonucleotide
  Target: ATXN2; (-) strand; PAM type: NRG; PAM sequence: GGG
ttaaaatagttatctggtgg

SEQ ID NO: 24816 - DNA, 20 bp, Artificial Sequence
  Description of Artificial Sequence: Synthetic oligonucleotide
  Target: ATXN2; (-) strand; PAM type: NRG; PAM sequence: GGG
gttaaaatagttatctggtg

SEQ ID NO: 24817 - DNA, 20 bp, Artificial Sequence
  Description of Artificial Sequence: Synthetic oligonucleotide
  Target: ATXN2; (-) strand; PAM type: NRG; PAM sequence: GGG
tgttaaaatagttatctggt

SEQ ID NO: 24818 - DNA, 20 bp, Artificial Sequence
  Description of Artificial Sequence: Synthetic oligonucleotide
  Target: ATXN2; (-) strand; PAM type: NRG; PAM sequence: TGG
ttgttaaaatagttatctgg

SEQ ID NO: 24819 - DNA, 20 bp, Artificial Sequence
  Description of Artificial Sequence: Synthetic oligonucleotide
  Target: ATXN2; (-) strand; PAM type: NRG; PAM sequence: TGG
agcttgttaaaatagttatc

SEQ ID NO: 24820 - DNA, 20 bp, Artificial Sequence
  Description of Artificial Sequence: Synthetic oligonucleotide
  Target: ATXN2; (-) strand; PAM type: NRG; PAM sequence: TAG
tcttgaagagcttgttaaaa

SEQ ID NO: 24821 - DNA, 20 bp, Artificial Sequence
  Description of Artificial Sequence: Synthetic oligonucleotide
  Target: ATXN2; (-) strand; PAM type: NRG; PAM sequence: GAG
gagcaatccaagatcttgaa

SEQ ID NO: 24822 - DNA, 20 bp, Artificial Sequence
  Description of Artificial Sequence: Synthetic oligonucleotide
  Target: ATXN2; (-) strand; PAM type: NRG; PAM sequence: AAG
gtgagcaatccaagatcttg

SEQ ID NO: 24823 - DNA, 20 bp, Artificial Sequence
  Description of Artificial Sequence: Synthetic oligonucleotide
  Target: ATXN2; (-) strand; PAM type: NRG; PAM sequence: AAG
tatatcacggtgagcaatcc

SEQ ID NO: 24824 - DNA, 20 bp, Artificial Sequence
  Description of Artificial Sequence: Synthetic oligonucleotide
  Target: ATXN2; (-) strand; PAM type: NRG; PAM sequence: GAG
aagtgttggtatatcacggt

SEQ ID NO: 24825 - DNA, 20 bp, Artificial Sequence
  Description of Artificial Sequence: Synthetic oligonucleotide
  Target: ATXN2; (-) strand; PAM type: NRG; PAM sequence: CGG
agccaagtgttggtatatca

SEQ ID NO: 24826 - DNA, 20 bp, Artificial Sequence
  Description of Artificial Sequence: Synthetic oligonucleotide
  Target: ATXN2; (-) strand; PAM type: NRG; PAM sequence: TGG
agctctgtggagccaagtgt

SEQ ID NO: 24827 - DNA, 20 bp, Artificial Sequence
  Description of Artificial Sequence: Synthetic oligonucleotide
  Target: ATXN2; (-) strand; PAM type: NRG; PAM sequence: AAG
agagtaagctctgtggagcc

SEQ ID NO: 24828 - DNA, 20 bp, Artificial Sequence
  Description of Artificial Sequence: Synthetic oligonucleotide
  Target: ATXN2; (-) strand; PAM type: NRG; PAM sequence: GAG
ttttgagagtaagctctgtg

SEQ ID NO: 24829 - DNA, 20 bp, Artificial Sequence
  Description of Artificial Sequence: Synthetic oligonucleotide
  Target: ATXN2; (-) strand; PAM type: NRG; PAM sequence: TGG
gcttttgagagtaagctctg

SEQ ID NO: 24830 - DNA, 20 bp, Artificial Sequence
  Description of Artificial Sequence: Synthetic oligonucleotide
  Target: ATXN2; (-) strand; PAM type: NRG; PAM sequence: AAG
gaaaatatgcttttgagagt

SEQ ID NO: 24831 - DNA, 20 bp, Artificial Sequence
  Description of Artificial Sequence: Synthetic oligonucleotide
  Target: ATXN2; (-) strand; PAM type: NRG; PAM sequence: GAG
cttggaaaatatgcttttga

SEQ ID NO: 24832 - DNA, 20 bp, Artificial Sequence
  Description of Artificial Sequence: Synthetic oligonucleotide
  Target: ATXN2; (-) strand; PAM type: NRG; PAM sequence: GAG
atcttggaaaatatgctttt

SEQ ID NO: 24833 - DNA, 20 bp, Artificial Sequence
  Description of Artificial Sequence: Synthetic oligonucleotide
  Target: ATXN2; (-) strand; PAM type: NRG; PAM sequence: TGG
agaaaaggttatggtgatct

SEQ ID NO: 24834 - DNA, 20 bp, Artificial Sequence
  Description of Artificial Sequence: Synthetic oligonucleotide
  Target: ATXN2; (-) strand; PAM type: NRG; PAM sequence: TGG
atctgttagagaaaaggtta

SEQ ID NO: 24835 - DNA, 20 bp, Artificial Sequence
  Description of Artificial Sequence: Synthetic oligonucleotide
  Target: ATXN2; (-) strand; PAM type: NRG; PAM sequence: AGG
tttaagatctgttagagaaa

SEQ ID NO: 24836 - DNA, 20 bp, Artificial Sequence
  Description of Artificial Sequence: Synthetic oligonucleotide
  Target: ATXN2; (-) strand; PAM type: NRG; PAM sequence: AAG
gtttaagatctgttagagaa

SEQ ID NO: 24837 - DNA, 20 bp, Artificial Sequence
  Description of Artificial Sequence: Synthetic oligonucleotide
  Target: ATXN2; (-) strand; PAM type: NRG; PAM sequence: GAG
aattggtttaagatctgtta

SEQ ID NO: 24838 - DNA, 20 bp, Artificial Sequence
  Description of Artificial Sequence: Synthetic oligonucleotide
  Target: ATXN2; (-) strand; PAM type: NRG; PAM sequence: TAG
agaattggtttaagatctgt

SEQ ID NO: 24839 - DNA, 20 bp, Artificial Sequence
  Description of Artificial Sequence: Synthetic oligonucleotide
  Target: ATXN2; (-) strand; PAM type: NRG; PAM sequence: AAG
aatgcaagtagaattggttt

SEQ ID NO: 24840 - DNA, 20 bp, Artificial Sequence
  Description of Artificial Sequence: Synthetic oligonucleotide
  Target: ATXN2; (-) strand; PAM type: NRG; PAM sequence: TGG
gtagagaatgcaagtagaat

SEQ ID NO: 24841 - DNA, 20 bp, Artificial Sequence
  Description of Artificial Sequence: Synthetic oligonucleotide
  Target: ATXN2; (-) strand; PAM type: NRG; PAM sequence: TAG
gcttaggtagagaatgcaag

SEQ ID NO: 24842 - DNA, 20 bp, Artificial Sequence
  Description of Artificial Sequence: Synthetic oligonucleotide
  Target: ATXN2; (-) strand; PAM type: NRG; PAM sequence: AAG
atagcttaggtagagaatgc

SEQ ID NO: 24843 - DNA, 20 bp, Artificial Sequence
  Description of Artificial Sequence: Synthetic oligonucleotide
  Target: ATXN2; (-) strand; PAM type: NRG; PAM sequence: GAG
cctttaatatagcttaggta

SEQ ID NO: 24844 - DNA, 20 bp, Artificial Sequence
  Description of Artificial Sequence: Synthetic oligonucleotide
  Target: ATXN2; (-) strand; PAM type: NRG; PAM sequence: TAG
ttcctttaatatagcttagg

SEQ ID NO: 24845 - DNA, 20 bp, Artificial Sequence
  Description of Artificial Sequence: Synthetic oligonucleotide
  Target: ATXN2; (-) strand; PAM type: NRG; PAM sequence: AGG
ctcttcctttaatatagctt

SEQ ID NO: 24846 - DNA, 20 bp, Artificial Sequence
  Description of Artificial Sequence: Synthetic oligonucleotide
  Target: ATXN2; (-) strand; PAM type: NRG; PAM sequence: TAG
cctcttcctttaatatagct

SEQ ID NO: 24847 - DNA, 20 bp, Artificial Sequence
  Description of Artificial Sequence: Synthetic oligonucleotide
  Target: ATXN2; (-) strand; PAM type: NRG; PAM sequence: TAG
tatttcctcttcctttaata

SEQ ID NO: 24848 - DNA, 20 bp, Artificial Sequence
  Description of Artificial Sequence: Synthetic oligonucleotide
  Target: ATXN2; (-) strand; PAM type: NRG; PAM sequence: CGG
aactcaaggtctgtgtgaga

SEQ ID NO: 24849 - DNA, 20 bp, Artificial Sequence
  Description of Artificial Sequence: Synthetic oligonucleotide
  Target: ATXN2; (-) strand; PAM type: NRG; PAM sequence: GAG
acacaactcaaggtctgtgt

SEQ ID NO: 24850 - DNA, 20 bp, Artificial Sequence
  Description of Artificial Sequence: Synthetic oligonucleotide
  Target: ATXN2; (-) strand; PAM type: NRG; PAM sequence: AGG
tattttggatacacaactca

SEQ ID NO: 24851 - DNA, 20 bp, Artificial Sequence
  Description of Artificial Sequence: Synthetic oligonucleotide
  Target: ATXN2; (-) strand; PAM type: NRG; PAM sequence: AAG
gtattttggatacacaactc

SEQ ID NO: 24852 - DNA, 20 bp, Artificial Sequence
  Description of Artificial Sequence: Synthetic oligonucleotide
  Target: ATXN2; (-) strand; PAM type: NRG; PAM sequence: TGG
gaaatcatgatgcagtattt

SEQ ID NO: 24853 - DNA, 20 bp, Artificial Sequence
  Description of Artificial Sequence: Synthetic oligonucleotide
  Target: ATXN2; (-) strand; PAM type: NRG; PAM sequence: CAG
atttaaaggaaatcatgatg

SEQ ID NO: 24854 - DNA, 20 bp, Artificial Sequence
  Description of Artificial Sequence: Synthetic oligonucleotide
  Target: ATXN2; (-) strand; PAM type: NRG; PAM sequence: AGG
cataaacactaggtatttaa

SEQ ID NO: 24855 - DNA, 20 bp, Artificial Sequence
  Description of Artificial Sequence: Synthetic oligonucleotide
  Target: ATXN2; (-) strand; PAM type: NRG; PAM sequence: AAG
gcataaacactaggtattta

SEQ ID NO: 24856 - DNA, 20 bp, Artificial Sequence
  Description of Artificial Sequence: Synthetic oligonucleotide
  Target: ATXN2; (-) strand; PAM type: NRG; PAM sequence: AGG
aggggcacagcataaacact

SEQ ID NO: 24857 - DNA, 20 bp, Artificial Sequence
  Description of Artificial Sequence: Synthetic oligonucleotide
  Target: ATXN2; (-) strand; PAM type: NRG; PAM sequence: TAG
gaggggcacagcataaacac

SEQ ID NO: 24858 - DNA, 20 bp, Artificial Sequence
  Description of Artificial Sequence: Synthetic oligonucleotide
  Target: ATXN2; (-) strand; PAM type: NRG; PAM sequence: CAG
tccagtgaacgtgaggggca

SEQ ID NO: 24859 - DNA, 20 bp, Artificial Sequence
  Description of Artificial Sequence: Synthetic oligonucleotide
  Target: ATXN2; (-) strand; PAM type: NRG; PAM sequence: GGG
gaaattccagtgaacgtgag

SEQ ID NO: 24860 - DNA, 20 bp, Artificial Sequence
  Description of Artificial Sequence: Synthetic oligonucleotide
  Target: ATXN2; (-) strand; PAM type: NRG; PAM sequence: GGG
agaaattccagtgaacgtga

SEQ ID NO: 24861 - DNA, 20 bp, Artificial Sequence
  Description of Artificial Sequence: Synthetic oligonucleotide
  Target: ATXN2; (-) strand; PAM type: NRG; PAM sequence: AGG
gagaaattccagtgaacgtg

SEQ ID NO: 24862 - DNA, 20 bp, Artificial Sequence
  Description of Artificial Sequence: Synthetic oligonucleotide
  Target: ATXN2; (-) strand; PAM type: NRG; PAM sequence: GAG
agagaaattccagtgaacgt

SEQ ID NO: 24863 - DNA, 20 bp, Artificial Sequence
  Description of Artificial Sequence: Synthetic oligonucleotide
  Target: ATXN2; (-) strand; PAM type: NRG; PAM sequence: CAG
acagcagttcagagaaattc

SEQ ID NO: 24864 - DNA, 20 bp, Artificial Sequence
  Description of Artificial Sequence: Synthetic oligonucleotide
  Target: ATXN2; (-) strand; PAM type: NRG; PAM sequence: GAG
gaaaaatacacagcagttca

SEQ ID NO: 24865 - DNA, 20 bp, Artificial Sequence
  Description of Artificial Sequence: Synthetic oligonucleotide
  Target: ATXN2; (-) strand; PAM type: NRG; PAM sequence: CAG
aagaaaaatacacagcagtt

SEQ ID NO: 24866 - DNA, 20 bp, Artificial Sequence
  Description of Artificial Sequence: Synthetic oligonucleotide
  Target: ATXN2; (-) strand; PAM type: NRG; PAM sequence: CAG
tgaggaagaaaaatacacag

SEQ ID NO: 24867 - DNA, 20 bp, Artificial Sequence
  Description of Artificial Sequence: Synthetic oligonucleotide
  Target: ATXN2; (-) strand; PAM type: NRG; PAM sequence: CAG
gagtgaggaagaaaaataca

SEQ ID NO: 24868 - DNA, 20 bp, Artificial Sequence
  Description of Artificial Sequence: Synthetic oligonucleotide
  Target: ATXN2; (-) strand; PAM type: NRG; PAM sequence: AAG
aaatgatgataggagtgagg

SEQ ID NO: 24869 - DNA, 20 bp, Artificial Sequence
  Description of Artificial Sequence: Synthetic oligonucleotide
  Target: ATXN2; (-) strand; PAM type: NRG; PAM sequence: AGG
ggaaaatgatgataggagtg

SEQ ID NO: 24870 - DNA, 20 bp, Artificial Sequence
  Description of Artificial Sequence: Synthetic oligonucleotide
  Target: ATXN2; (-) strand; PAM type: NRG; PAM sequence: GAG
tggaaaatgatgataggagt

SEQ ID NO: 24871 - DNA, 20 bp, Artificial Sequence
  Description of Artificial Sequence: Synthetic oligonucleotide
  Target: ATXN2; (-) strand; PAM type: NRG; PAM sequence: GAG
gccctggaaaatgatgatag

SEQ ID NO: 24872 - DNA, 20 bp, Artificial Sequence
  Description of Artificial Sequence: Synthetic oligonucleotide
  Target: ATXN2; (-) strand; PAM type: NRG; PAM sequence: AGG
tggccctggaaaatgatgat

SEQ ID NO: 24873 - DNA, 20 bp, Artificial Sequence
  Description of Artificial Sequence: Synthetic oligonucleotide
  Target: ATXN2; (-) strand; PAM type: NRG; PAM sequence: TAG
gtggccctggaaaatgatga

SEQ ID NO: 24874 - DNA, 20 bp, Artificial Sequence
  Description of Artificial Sequence: Synthetic oligonucleotide
  Target: ATXN2; (-) strand; PAM type: NRG; PAM sequence: TGG
gtacaaagctcgagtggccc

SEQ ID NO: 24875 - DNA, 20 bp, Artificial Sequence
  Description of Artificial Sequence: Synthetic oligonucleotide
  Target: ATXN2; (-) strand; PAM type: NRG; PAM sequence: TGG
tgcccagtacaaagctcgag

SEQ ID NO: 24876 - DNA, 20 bp, Artificial Sequence
  Description of Artificial Sequence: Synthetic oligonucleotide
  Target: ATXN2; (-) strand; PAM type: NRG; PAM sequence: GAG
aagtgcccagtacaaagctc

SEQ ID NO: 24877 - DNA, 20 bp, Artificial Sequence
  Description of Artificial Sequence: Synthetic oligonucleotide
  Target: ATXN2; (-) strand; PAM type: NRG; PAM sequence: AAG
tgagtcaagtgcccagtaca

SEQ ID NO: 24878 - DNA, 20 bp, Artificial Sequence
  Description of Artificial Sequence: Synthetic oligonucleotide
  Target: ATXN2; (-) strand; PAM type: NRG; PAM sequence: CAG
aagaaattgagtcaagtgcc

SEQ ID NO: 24879 - DNA, 20 bp, Artificial Sequence
  Description of Artificial Sequence: Synthetic oligonucleotide
  Target: ATXN2; (-) strand; PAM type: NRG; PAM sequence: AAG
ttagcagaagaaattgagtc

SEQ ID NO: 24880 - DNA, 20 bp, Artificial Sequence
  Description of Artificial Sequence: Synthetic oligonucleotide
  Target: ATXN2; (-) strand; PAM type: NRG; PAM sequence: GAG
accagttagcagaagaaatt

SEQ ID NO: 24881 - DNA, 20 bp, Artificial Sequence
  Description of Artificial Sequence: Synthetic oligonucleotide
  Target: ATXN2; (-) strand; PAM type: NRG; PAM sequence: AAG
aagggcaaaccagttagcag

SEQ ID NO: 24882 - DNA, 20 bp, Artificial Sequence
  Description of Artificial Sequence: Synthetic oligonucleotide
  Target: ATXN2; (-) strand; PAM type: NRG; PAM sequence: CAG
agcaagggcaaaccagttag

SEQ ID NO: 24883 - DNA, 20 bp, Artificial Sequence
  Description of Artificial Sequence: Synthetic oligonucleotide
  Target: ATXN2; (-) strand; PAM type: NRG; PAM sequence: TAG
ggaagcaagggcaaaccagt

SEQ ID NO: 24884 - DNA, 20 bp, Artificial Sequence
  Description of Artificial Sequence: Synthetic oligonucleotide
  Target: ATXN2; (-) strand; PAM type: NRG; PAM sequence: CAG
aacgggaagcaagggcaaac

SEQ ID NO: 24885 - DNA, 20 bp, Artificial Sequence
  Description of Artificial Sequence: Synthetic oligonucleotide
  Target: ATXN2; (-) strand; PAM type: NRG; PAM sequence: GGG
atttttaaaacgggaagcaa

SEQ ID NO: 24886 - DNA, 20 bp, Artificial Sequence
  Description of Artificial Sequence: Synthetic oligonucleotide
  Target: ATXN2; (-) strand; PAM type: NRG; PAM sequence: AGG
aatttttaaaacgggaagca

SEQ ID NO: 24887 - DNA, 20 bp, Artificial Sequence
  Description of Artificial Sequence: Synthetic oligonucleotide
  Target: ATXN2; (-) strand; PAM type: NRG; PAM sequence: AAG
gaatttttaaaacgggaagc

SEQ ID NO: 24888 - DNA, 20 bp, Artificial Sequence
  Description of Artificial Sequence: Synthetic oligonucleotide
  Target: ATXN2; (-) strand; PAM type: NRG; PAM sequence: AAG
agaagaatttttaaaacggg

SEQ ID NO: 24889 - DNA, 20 bp, Artificial Sequence
  Description of Artificial Sequence: Synthetic oligonucleotide
  Target: ATXN2; (-) strand; PAM type: NRG; PAM sequence: GGG
ctcagaagaatttttaaaac

SEQ ID NO: 24890 - DNA, 20 bp, Artificial Sequence
  Description of Artificial Sequence: Synthetic oligonucleotide
  Target: ATXN2; (-) strand; PAM type: NRG; PAM sequence: CGG
actcagaagaatttttaaaa

SEQ ID NO: 24891 - DNA, 20 bp, Artificial Sequence
  Description of Artificial Sequence: Synthetic oligonucleotide
  Target: ATXN2; (-) strand; PAM type: NRG; PAM sequence: AAG
cttagaaagagataactcag

SEQ ID NO: 24892 - DNA, 20 bp, Artificial Sequence
  Description of Artificial Sequence: Synthetic oligonucleotide
  Target: ATXN2; (-) strand; PAM type: NRG; PAM sequence: CAG
gcccttagaaagagataact

SEQ ID NO: 24893 - DNA, 20 bp, Artificial Sequence
  Description of Artificial Sequence: Synthetic oligonucleotide
  Target: ATXN2; (-) strand; PAM type: NRG; PAM sequence: GAG
tttcagagtgcccttagaaa

SEQ ID NO: 24894 - DNA, 20 bp, Artificial Sequence
  Description of Artificial Sequence: Synthetic oligonucleotide
  Target: ATXN2; (-) strand; PAM type: NRG; PAM sequence: AAG
tgtttcagagtgcccttaga

SEQ ID NO: 24895 - DNA, 20 bp, Artificial Sequence
  Description of Artificial Sequence: Synthetic oligonucleotide
  Target: ATXN2; (-) strand; PAM type: NRG; PAM sequence: TAG
ctcatgtttcagagtgccct

SEQ ID NO: 24896 - DNA, 20 bp, Artificial Sequence
  Description of Artificial Sequence: Synthetic oligonucleotide
  Target: ATXN2; (-) strand; PAM type: NRG; PAM sequence: GAG
tttcttttcctcatgtttca

SEQ ID NO: 24897 - DNA, 20 bp, Artificial Sequence
  Description of Artificial Sequence: Synthetic oligonucleotide
  Target: ATXN2; (-) strand; PAM type: NRG; PAM sequence: CAG
cttttcttttcctcatgttt

SEQ ID NO: 24898 - DNA, 20 bp, Artificial Sequence
  Description of Artificial Sequence: Synthetic oligonucleotide
  Target: ATXN2; (-) strand; PAM type: NRG; PAM sequence: AGG
tacataaactgtggctttaa

SEQ ID NO: 24899 - DNA, 20 bp, Artificial Sequence
  Description of Artificial Sequence: Synthetic oligonucleotide
  Target: ATXN2; (-) strand; PAM type: NRG; PAM sequence: AAG
atacataaactgtggcttta

SEQ ID NO: 24900 - DNA, 20 bp, Artificial Sequence
  Description of Artificial Sequence: Synthetic oligonucleotide
  Target: ATXN2; (-) strand; PAM type: NRG; PAM sequence: TGG
tatgacagatacataaactg

SEQ ID NO: 24901 - DNA, 20 bp, Artificial Sequence
  Description of Artificial Sequence: Synthetic oligonucleotide
  Target: ATXN2; (-) strand; PAM type: NRG; PAM sequence: CAG
ttcttagtagttgattatga

SEQ ID NO: 24902 - DNA, 20 bp, Artificial Sequence
  Description of Artificial Sequence: Synthetic oligonucleotide
  Target: ATXN2; (-) strand; PAM type: NRG; PAM sequence: TAG
taaactctaaactttcttag

SEQ ID NO: 24903 - DNA, 20 bp, Artificial Sequence
  Description of Artificial Sequence: Synthetic oligonucleotide
  Target: ATXN2; (-) strand; PAM type: NRG; PAM sequence: TAG
ttctaaactctaaactttct

SEQ ID NO: 24904 - DNA, 20 bp, Artificial Sequence
  Description of Artificial Sequence: Synthetic oligonucleotide
  Target: ATXN2; (-) strand; PAM type: NRG; PAM sequence: CAG
gttttagtttctgtttttac

SEQ ID NO: 24905 - DNA, 20 bp, Artificial Sequence
  Description of Artificial Sequence: Synthetic oligonucleotide
  Target: ATXN2; (-) strand; PAM type: NRG; PAM sequence: TAG
tttagttttagttttagttt

SEQ ID NO: 24906 - DNA, 20 bp, Artificial Sequence
  Description of Artificial Sequence: Synthetic oligonucleotide
  Target: ATXN2; (-) strand; PAM type: NRG; PAM sequence: TAG
ataacttttagttttagttt

SEQ ID NO: 24907 - DNA, 20 bp, Artificial Sequence
  Description of Artificial Sequence: Synthetic oligonucleotide
  Target: ATXN2; (-) strand; PAM type: NRG; PAM sequence: TAG
atcactataacttttagttt

SEQ ID NO: 24908 - DNA, 20 bp, Artificial Sequence
  Description of Artificial Sequence: Synthetic oligonucleotide
  Target: ATXN2; (-) strand; PAM type: NRG; PAM sequence: TAG
acacagatcactataacttt

SEQ ID NO: 24909 - DNA, 20 bp, Artificial Sequence
  Description of Artificial Sequence: Synthetic oligonucleotide
  Target: ATXN2; (-) strand; PAM type: NRG; PAM sequence: CAG
aattttgatttataaataca

SEQ ID NO: 24910 - DNA, 20 bp, Artificial Sequence
  Description of Artificial Sequence: Synthetic oligonucleotide
  Target: ATXN2; (-) strand; PAM type: NRG; PAM sequence: TAG
aaggtaacagaaaaaaaagt

SEQ ID NO: 24911 - DNA, 20 bp, Artificial Sequence
  Description of Artificial Sequence: Synthetic oligonucleotide
  Target: ATXN2; (-) strand; PAM type: NRG; PAM sequence: AAG
agaaaaggtaacagaaaaaa

SEQ ID NO: 24912 - DNA, 20 bp, Artificial Sequence
  Description of Artificial Sequence: Synthetic oligonucleotide
  Target: ATXN2; (-) strand; PAM type: NRG; PAM sequence: CAG
ttcctctggagaaaaggtaa

SEQ ID NO: 24913 - DNA, 20 bp, Artificial Sequence
  Description of Artificial Sequence: Synthetic oligonucleotide
  Target: ATXN2; (-) strand; PAM type: NRG; PAM sequence: AGG
aatatgttcctctggagaaa

SEQ ID NO: 24914 - DNA, 20 bp, Artificial Sequence
  Description of Artificial Sequence: Synthetic oligonucleotide
  Target: ATXN2; (-) strand; PAM type: NRG; PAM sequence: AAG
aaatatgttcctctggagaa

SEQ ID NO: 24915 - DNA, 20 bp, Artificial Sequence
  Description of Artificial Sequence: Synthetic oligonucleotide
  Target: ATXN2; (-) strand; PAM type: NRG; PAM sequence: GAG
ttttgaaatatgttcctctg

SEQ ID NO: 24916 - DNA, 20 bp, Artificial Sequence
  Description of Artificial Sequence: Synthetic oligonucleotide
  Target: ATXN2; (-) strand; PAM type: NRG; PAM sequence: TGG
gtttttgaaatatgttcctc

SEQ ID NO: 24917 - DNA, 20 bp, Artificial Sequence
  Description of Artificial Sequence: Synthetic oligonucleotide
  Target: ATXN2; (-) strand; PAM type: NRG; PAM sequence: CAG
attatggtgaacagtttaac

SEQ ID NO: 24918 - DNA, 20 bp, Artificial Sequence
  Description of Artificial Sequence: Synthetic oligonucleotide
  Target: ATXN2; (-) strand; PAM type: NRG; PAM sequence: CAG
agggcagagattatggtgaa

SEQ ID NO: 24919 - DNA, 20 bp, Artificial Sequence
  Description of Artificial Sequence: Synthetic oligonucleotide
  Target: ATXN2; (-) strand; PAM type: NRG; PAM sequence: TGG
atttgcaagggcagagatta

SEQ ID NO: 24920 - DNA, 20 bp, Artificial Sequence
  Description of Artificial Sequence: Synthetic oligonucleotide
  Target: ATXN2; (-) strand; PAM type: NRG; PAM sequence: GAG
tatctaaatttgcaagggca

SEQ ID NO: 24921 - DNA, 20 bp, Artificial Sequence
  Description of Artificial Sequence: Synthetic oligonucleotide
  Target: ATXN2; (-) strand; PAM type: NRG; PAM sequence: CAG
aatatctaaatttgcaaggg

SEQ ID NO: 24922 - DNA, 20 bp, Artificial Sequence
  Description of Artificial Sequence: Synthetic oligonucleotide
  Target: ATXN2; (-) strand; PAM type: NRG; PAM sequence: GGG
aaaaatatctaaatttgcaa

SEQ ID NO: 24923 - DNA, 20 bp, Artificial Sequence
  Description of Artificial Sequence: Synthetic oligonucleotide
  Target: ATXN2; (-) strand; PAM type: NRG; PAM sequence: AGG
aaaaaatatctaaatttgca

SEQ ID NO: 24924 - DNA, 20 bp, Artificial Sequence
  Description of Artificial Sequence: Synthetic oligonucleotide
  Target: ATXN2; (-) strand; PAM type: NRG; PAM sequence: AAG
taaaaaatatctaaatttgc

SEQ ID NO: 24925 - DNA, 20 bp, Artificial Sequence
  Description of Artificial Sequence: Synthetic oligonucleotide
  Target: ATXN2; (-) strand; PAM type: NRG; PAM sequence: AAG
cctggccggttttgtcttct

SEQ ID NO: 24926 - DNA, 20 bp, Artificial Sequence
  Description of Artificial Sequence: Synthetic oligonucleotide
  Target: ATXN2; (-) strand; PAM type: NRG; PAM sequence: CGG
tgtgagccactgtgcctggc

SEQ ID NO: 24927 - DNA, 20 bp, Artificial Sequence
  Description of Artificial Sequence: Synthetic oligonucleotide
  Target: ATXN2; (-) strand; PAM type: NRG; PAM sequence: TGG
caggtgtgagccactgtgcc

SEQ ID NO: 24928 - DNA, 20 bp, Artificial Sequence
  Description of Artificial Sequence: Synthetic oligonucleotide
  Target: ATXN2; (-) strand; PAM type: NRG; PAM sequence: GAG
agtgctgggattacaggtgt

SEQ ID NO: 24929 - DNA, 20 bp, Artificial Sequence
  Description of Artificial Sequence: Synthetic oligonucleotide
  Target: ATXN2; (-) strand; PAM type: NRG; PAM sequence: AGG
tcccaaagtgctgggattac

SEQ ID NO: 24930 - DNA, 20 bp, Artificial Sequence
  Description of Artificial Sequence: Synthetic oligonucleotide
  Target: ATXN2; (-) strand; PAM type: NRG; PAM sequence: CAG
ctcccaaagtgctgggatta

SEQ ID NO: 24931 - DNA, 20 bp, Artificial Sequence
  Description of Artificial Sequence: Synthetic oligonucleotide
  Target: ATXN2; (-) strand; PAM type: NRG; PAM sequence: GGG
cctcggcctcccaaagtgct

SEQ ID NO: 24932 - DNA, 20 bp, Artificial Sequence
  Description of Artificial Sequence: Synthetic oligonucleotide
  Target: ATXN2; (-) strand; PAM type: NRG; PAM sequence: TGG
gcctcggcctcccaaagtgc

SEQ ID NO: 24933 - DNA, 20 bp, Artificial Sequence
  Description of Artificial Sequence: Synthetic oligonucleotide
  Target: ATXN2; (-) strand; PAM type: NRG; PAM sequence: AAG
ccacctgcctcggcctccca

SEQ ID NO: 24934 - DNA, 20 bp, Artificial Sequence
  Description of Artificial Sequence: Synthetic oligonucleotide
  Target: ATXN2; (-) strand; PAM type: NRG; PAM sequence: CGG
acctcgtgatccacctgcct

SEQ ID NO: 24935 - DNA, 20 bp, Artificial Sequence
  Description of Artificial Sequence: Synthetic oligonucleotide
  Target: ATXN2; (-) strand; PAM type: NRG; PAM sequence: TAG
tttcaccatgttggccagga

SEQ ID NO: 24936 - DNA, 20 bp, Artificial Sequence
  Description of Artificial Sequence: Synthetic oligonucleotide
  Target: ATXN2; (-) strand; PAM type: NRG; PAM sequence: AGG
ggggtttcaccatgttggcc

SEQ ID NO: 24937 - DNA, 20 bp, Artificial Sequence
  Description of Artificial Sequence: Synthetic oligonucleotide
  Target: ATXN2; (-) strand; PAM type: NRG; PAM sequence: CAG
cggggtttcaccatgttggc

SEQ ID NO: 24938 - DNA, 20 bp, Artificial Sequence
  Description of Artificial Sequence: Synthetic oligonucleotide
  Target: ATXN2; (-) strand; PAM type: NRG; PAM sequence: TGG
gagacggggtttcaccatgt

SEQ ID NO: 24939 - DNA, 20 bp, Artificial Sequence
  Description of Artificial Sequence: Synthetic oligonucleotide
  Target: ATXN2; (-) strand; PAM type: NRG; PAM sequence: GGG
ctgtatttttagtagagacg

SEQ ID NO: 24940 - DNA, 20 bp, Artificial Sequence
  Description of Artificial Sequence: Synthetic oligonucleotide
  Target: ATXN2; (-) strand; PAM type: NRG; PAM sequence: GGG
tctgtatttttagtagagac

SEQ ID NO: 24941 - DNA, 20 bp, Artificial Sequence
  Description of Artificial Sequence: Synthetic oligonucleotide
  Target: ATXN2; (-) strand; PAM type: NRG; PAM sequence: CGG
ttctgtatttttagtagaga

SEQ ID NO: 24942 - DNA, 20 bp, Artificial Sequence
  Description of Artificial Sequence: Synthetic oligonucleotide
  Target: ATXN2; (-) strand; PAM type: NRG; PAM sequence: GAG
taatttctgtatttttagta

SEQ ID NO: 24943 - DNA, 20 bp, Artificial Sequence
  Description of Artificial Sequence: Synthetic oligonucleotide
  Target: ATXN2; (-) strand; PAM type: NRG; PAM sequence: TAG
tctaatttctgtatttttag

SEQ ID NO: 24944 - DNA, 20 bp, Artificial Sequence
  Description of Artificial Sequence: Synthetic oligonucleotide
  Target: ATXN2; (-) strand; PAM type: NRG; PAM sequence: TAG
ccatctaatttctgtatttt

SEQ ID NO: 24945 - DNA, 20 bp, Artificial Sequence
  Description of Artificial Sequence: Synthetic oligonucleotide
  Target: ATXN2; (-) strand; PAM type: NRG; PAM sequence: AGG
tcccgagtagctgggactat

SEQ ID NO: 24946 - DNA, 20 bp, Artificial Sequence
  Description of Artificial Sequence: Synthetic oligonucleotide
  Target: ATXN2; (-) strand; PAM type: NRG; PAM sequence: TAG
ctcccgagtagctgggacta

SEQ ID NO: 24947 - DNA, 20 bp, Artificial Sequence
  Description of Artificial Sequence: Synthetic oligonucleotide
  Target: ATXN2; (-) strand; PAM type: NRG; PAM sequence: GGG
cctcagcctcccgagtagct

SEQ ID NO: 24948 - DNA, 20 bp, Artificial Sequence
  Description of Artificial Sequence: Synthetic oligonucleotide
  Target: ATXN2; (-) strand; PAM type: NRG; PAM sequence: TGG
gcctcagcctcccgagtagc

SEQ ID NO: 24949 - DNA, 20 bp, Artificial Sequence
  Description of Artificial Sequence: Synthetic oligonucleotide
  Target: ATXN2; (-) strand; PAM type: NRG; PAM sequence: TAG
tcctgcctcagcctcccgag

SEQ ID NO: 24950 - DNA, 20 bp, Artificial Sequence
  Description of Artificial Sequence: Synthetic oligonucleotide
  Target: ATXN2; (-) strand; PAM type: NRG; PAM sequence: GAG
ttctcctgcctcagcctccc

SEQ ID NO: 24951 - DNA, 20 bp, Artificial Sequence
  Description of Artificial Sequence: Synthetic oligonucleotide
  Target: ATXN2; (-) strand; PAM type: NRG; PAM sequence: CAG
ttcaagcgattctcctgcct

SEQ ID NO: 24952 - DNA, 20 bp, Artificial Sequence
  Description of Artificial Sequence: Synthetic oligonucleotide
  Target: ATXN2; (-) strand; PAM type: NRG; PAM sequence: AAG
aacctctgcatcccgggttc

SEQ ID NO: 24953 - DNA, 20 bp, Artificial Sequence
  Description of Artificial Sequence: Synthetic oligonucleotide
  Target: ATXN2; (-) strand; PAM type: NRG; PAM sequence: GGG
cactgcaacctctgcatccc

SEQ ID NO: 24954 - DNA, 20 bp, Artificial Sequence
  Description of Artificial Sequence: Synthetic oligonucleotide
  Target: ATXN2; (-) strand; PAM type: NRG; PAM sequence: CGG
tcactgcaacctctgcatcc

SEQ ID NO: 24955 - DNA, 20 bp, Artificial Sequence
  Description of Artificial Sequence: Synthetic oligonucleotide
  Target: ATXN2; (-) strand; PAM type: NRG; PAM sequence: CGG
ggagtgcagtggtgcaatct

SEQ ID NO: 24956 - DNA, 20 bp, Artificial Sequence
  Description of Artificial Sequence: Synthetic oligonucleotide
  Target: ATXN2; (-) strand; PAM type: NRG; PAM sequence: TGG
gtctccaggctggagtgcag

SEQ ID NO: 24957 - DNA, 20 bp, Artificial Sequence
  Description of Artificial Sequence: Synthetic oligonucleotide
  Target: ATXN2; (-) strand; PAM type: NRG; PAM sequence: CAG
tgtgtctccaggctggagtg

SEQ ID NO: 24958 - DNA, 20 bp, Artificial Sequence
  Description of Artificial Sequence: Synthetic oligonucleotide
  Target: ATXN2; (-) strand; PAM type: NRG; PAM sequence: GAG
ctcgctgtgtctccaggctg

SEQ ID NO: 24959 - DNA, 20 bp, Artificial Sequence
  Description of Artificial Sequence: Synthetic oligonucleotide
  Target: ATXN2; (-) strand; PAM type: NRG; PAM sequence: TGG
atctcgctgtgtctccaggc

SEQ ID NO: 24960 - DNA, 20 bp, Artificial Sequence
  Description of Artificial Sequence: Synthetic oligonucleotide
  Target: ATXN2; (-) strand; PAM type: NRG; PAM sequence: AGG
gggaatctcgctgtgtctcc

SEQ ID NO: 24961 - DNA, 20 bp, Artificial Sequence
  Description of Artificial Sequence: Synthetic oligonucleotide
  Target: ATXN2; (-) strand; PAM type: NRG; PAM sequence: CAG
agggaatctcgctgtgtctc

SEQ ID NO: 24962 - DNA, 20 bp, Artificial Sequence
  Description of Artificial Sequence: Synthetic oligonucleotide
  Target: ATXN2; (-) strand; PAM type: NRG; PAM sequence: GGG
tctttttttttcttttgaga

SEQ ID NO: 24963 - DNA, 20 bp, Artificial Sequence
  Description of Artificial Sequence: Synthetic oligonucleotide
  Target: ATXN2; (-) strand; PAM type: NRG; PAM sequence: AGG
gtctttttttttcttttgag

SEQ ID NO: 24964 - DNA, 20 bp, Artificial Sequence
  Description of Artificial Sequence: Synthetic oligonucleotide
  Target: ATXN2; (-) strand; PAM type: NRG; PAM sequence: GAG
tgtctttttttttcttttga

SEQ ID NO: 24965 - DNA, 20 bp, Artificial Sequence
  Description of Artificial Sequence: Synthetic oligonucleotide
  Target: ATXN2; (-) strand; PAM type: NRG; PAM sequence: GAG
tttgtctttttttttctttt

SEQ ID NO: 24966 - DNA, 20 bp, Artificial Sequence
  Description of Artificial Sequence: Synthetic oligonucleotide
  Target: ATXN2; (-) strand; PAM type: NRG; PAM sequence: TGG
tttatgctctaaacaaattt

SEQ ID NO: 24967 - DNA, 20 bp, Artificial Sequence
  Description of Artificial Sequence: Synthetic oligonucleotide
  Target: ATXN2; (-) strand; PAM type: NRG; PAM sequence: TAG
ttaaaaaaagggaataaatg

SEQ ID NO: 24968 - DNA, 20 bp, Artificial Sequence
  Description of Artificial Sequence: Synthetic oligonucleotide
  Target: ATXN2; (-) strand; PAM type: NRG; PAM sequence: GGG
ataaatttccattaaaaaaa

SEQ ID NO: 24969 - DNA, 20 bp, Artificial Sequence
  Description of Artificial Sequence: Synthetic oligonucleotide
  Target: ATXN2; (-) strand; PAM type: NRG; PAM sequence: AGG
gataaatttccattaaaaaa

SEQ ID NO: 24970 - DNA, 20 bp, Artificial Sequence
  Description of Artificial Sequence: Synthetic oligonucleotide
  Target: ATXN2; (-) strand; PAM type: NRG; PAM sequence: AAG
tgataaatttccattaaaaa

SEQ ID NO: 24971 - DNA, 20 bp, Artificial Sequence
  Description of Artificial Sequence: Synthetic oligonucleotide
  Target: ATXN2; (-) strand; PAM type: NRG; PAM sequence: AAG
ataaatgtttgttagttttt

SEQ ID NO: 24972 - DNA, 20 bp, Artificial Sequence
  Description of Artificial Sequence: Synthetic oligonucleotide
  Target: ATXN2; (-) strand; PAM type: NRG; PAM sequence: TAG
tatgatgaataaatgtttgt

SEQ ID NO: 24973 - DNA, 20 bp, Artificial Sequence
  Description of Artificial Sequence: Synthetic oligonucleotide
  Target: ATXN2; (-) strand; PAM type: NRG; PAM sequence: CAG
catttgtctttgattttcat

SEQ ID NO: 24974 - DNA, 20 bp, Artificial Sequence
  Description of Artificial Sequence: Synthetic oligonucleotide
  Target: ATXN2; (-) strand; PAM type: NRG; PAM sequence: TAG
tgaaaagtttgtttttattt

SEQ ID NO: 24975 - DNA, 20 bp, Artificial Sequence
  Description of Artificial Sequence: Synthetic oligonucleotide
  Target: ATXN2; (-) strand; PAM type: NRG; PAM sequence: AAG
ttcgtatacgtaagtttgaa

SEQ ID NO: 24976 - DNA, 20 bp, Artificial Sequence
  Description of Artificial Sequence: Synthetic oligonucleotide
  Target: ATXN2; (-) strand; PAM type: NRG; PAM sequence: AAG
cagtttatcttcgtatacgt

SEQ ID NO: 24977 - DNA, 20 bp, Artificial Sequence
  Description of Artificial Sequence: Synthetic oligonucleotide
  Target: ATXN2; (-) strand; PAM type: NRG; PAM sequence: CAG
gtagtgtctacgtatgatag

SEQ ID NO: 24978 - DNA, 20 bp, Artificial Sequence
  Description of Artificial Sequence: Synthetic oligonucleotide
  Target: ATXN2; (-) strand; PAM type: NRG; PAM sequence: TAG
ggtgtagtgtctacgtatga

SEQ ID NO: 24979 - DNA, 20 bp, Artificial Sequence
  Description of Artificial Sequence: Synthetic oligonucleotide
  Target: ATXN2; (-) strand; PAM type: NRG; PAM sequence: TAG
taatgaagaaaattatggtg

SEQ ID NO: 24980 - DNA, 20 bp, Artificial Sequence
  Description of Artificial Sequence: Synthetic oligonucleotide
  Target: ATXN2; (-) strand; PAM type: NRG; PAM sequence: TGG
cgatataatgaagaaaatta

SEQ ID NO: 24981 - DNA, 20 bp, Artificial Sequence
  Description of Artificial Sequence: Synthetic oligonucleotide
  Target: ATXN2; (-) strand; PAM type: NRG; PAM sequence: AAG
tgatatgtttcgatataatg

SEQ ID NO: 24982 - DNA, 20 bp, Artificial Sequence
  Description of Artificial Sequence: Synthetic oligonucleotide
  Target: ATXN2; (-) strand; PAM type: NRG; PAM sequence: GGG
tttcttctagtctaatggat

SEQ ID NO: 24983 - DNA, 20 bp, Artificial Sequence
  Description of Artificial Sequence: Synthetic oligonucleotide
  Target: ATXN2; (-) strand; PAM type: NRG; PAM sequence: TGG
ttttcttctagtctaatgga

SEQ ID NO: 24984 - DNA, 20 bp, Artificial Sequence
  Description of Artificial Sequence: Synthetic oligonucleotide
  Target: ATXN2; (-) strand; PAM type: NRG; PAM sequence: TGG
ttcattttcttctagtctaa

SEQ ID NO: 24985 - DNA, 20 bp, Artificial Sequence
  Description of Artificial Sequence: Synthetic oligonucleotide
  Target: ATXN2; (-) strand; PAM type: NRG; PAM sequence: TAG
aaacaagcttcattttcttc

SEQ ID NO: 24986 - DNA, 20 bp, Artificial Sequence
  Description of Artificial Sequence: Synthetic oligonucleotide
  Target: ATXN2; (-) strand; PAM type: NRG; PAM sequence: AAG
actttgacattttgaaaaac

SEQ ID NO: 24987 - DNA, 20 bp, Artificial Sequence
  Description of Artificial Sequence: Synthetic oligonucleotide
  Target: ATXN2; (-) strand; PAM type: NRG; PAM sequence: GGG
ttggttataactgaatgaaa

SEQ ID NO: 24988 - DNA, 20 bp, Artificial Sequence
  Description of Artificial Sequence: Synthetic oligonucleotide
  Target: ATXN2; (-) strand; PAM type: NRG; PAM sequence: AGG
gttggttataactgaatgaa

SEQ ID NO: 24989 - DNA, 20 bp, Artificial Sequence
  Description of Artificial Sequence: Synthetic oligonucleotide
  Target: ATXN2; (-) strand; PAM type: NRG; PAM sequence: AAG
tgttggttataactgaatga

SEQ ID NO: 24990 - DNA, 20 bp, Artificial Sequence
  Description of Artificial Sequence: Synthetic oligonucleotide
  Target: ATXN2; (-) strand; PAM type: NRG; PAM sequence: TGG
gatattgttaatatagatgt

SEQ ID NO: 24991 - DNA, 20 bp, Artificial Sequence
  Description of Artificial Sequence: Synthetic oligonucleotide
  Target: ATXN2; (-) strand; PAM type: NRG; PAM sequence: TAG
tttgttagatattgttaata

SEQ ID NO: 24992 - DNA, 20 bp, Artificial Sequence
  Description of Artificial Sequence: Synthetic oligonucleotide
  Target: ATXN2; (-) strand; PAM type: NRG; PAM sequence: TAG
attttgctcaagtagtttgt

SEQ ID NO: 24993 - DNA, 20 bp, Artificial Sequence
  Description of Artificial Sequence: Synthetic oligonucleotide
  Target: ATXN2; (-) strand; PAM type: NRG; PAM sequence: TAG
atttgctaattttgctcaag

SEQ ID NO: 24994 - DNA, 20 bp, Artificial Sequence
  Description of Artificial Sequence: Synthetic oligonucleotide
  Target: ATXN2; (-) strand; PAM type: NRG; PAM sequence: AAG
ctaatttgctaattttgctc

SEQ ID NO: 24995 - DNA, 20 bp, Artificial Sequence
  Description of Artificial Sequence: Synthetic oligonucleotide
  Target: ATXN2; (-) strand; PAM type: NRG; PAM sequence: AGG
atttttctaaaacattttta

SEQ ID NO: 24996 - DNA, 20 bp, Artificial Sequence
  Description of Artificial Sequence: Synthetic oligonucleotide
  Target: ATXN2; (-) strand; PAM type: NRG; PAM sequence: AAG
tatttttctaaaacattttt

SEQ ID NO: 24997 - DNA, 20 bp, Artificial Sequence
  Description of Artificial Sequence: Synthetic oligonucleotide
  Target: ATXN2; (-) strand; PAM type: NRG; PAM sequence: AAG
tatcaactggaggggctgat

SEQ ID NO: 24998 - DNA, 20 bp, Artificial Sequence
  Description of Artificial Sequence: Synthetic oligonucleotide
  Target: ATXN2; (-) strand; PAM type: NRG; PAM sequence: GGG
tagttacttatcaactggag

SEQ ID NO: 24999 - DNA, 20 bp, Artificial Sequence
  Description of Artificial Sequence: Synthetic oligonucleotide
  Target: ATXN2; (-) strand; PAM type: NRG; PAM sequence: GGG
atagttacttatcaactgga

SEQ ID NO: 25000 - DNA, 20 bp, Artificial Sequence
  Description of Artificial Sequence: Synthetic oligonucleotide
  Target: ATXN2; (-) strand; PAM type: NRG; PAM sequence: AGG
tatagttacttatcaactgg

SEQ ID NO: 25001 - DNA, 20 bp, Artificial Sequence
  Description of Artificial Sequence: Synthetic oligonucleotide
  Target: ATXN2; (-) strand; PAM type: NRG; PAM sequence: GAG
gtatagttacttatcaactg

SEQ ID NO: 25002 - DNA, 20 bp, Artificial Sequence
  Description of Artificial Sequence: Synthetic oligonucleotide
  Target: ATXN2; (-) strand; PAM type: NRG; PAM sequence: TGG
ttgtatagttacttatcaac

SEQ ID NO: 25003 - DNA, 20 bp, Artificial Sequence
  Description of Artificial Sequence: Synthetic oligonucleotide
  Target: ATXN2; (-) strand; PAM type: NRG; PAM sequence: TAG
gctcaaataattgtgttgta

SEQ ID NO: 25004 - DNA, 20 bp, Artificial Sequence
  Description of Artificial Sequence: Synthetic oligonucleotide
  Target: ATXN2; (-) strand; PAM type: NRG; PAM sequence: AAG
gatctgaaggctattttatg

SEQ ID NO: 25005 - DNA, 20 bp, Artificial Sequence
  Description of Artificial Sequence: Synthetic oligonucleotide
  Target: ATXN2; (-) strand; PAM type: NRG; PAM sequence: AGG
aagagagaaccctgatctga

SEQ ID NO: 25006 - DNA, 20 bp, Artificial Sequence
  Description of Artificial Sequence: Synthetic oligonucleotide
  Target: ATXN2; (-) strand; PAM type: NRG; PAM sequence: AAG
aaagagagaaccctgatctg

SEQ ID NO: 25007 - DNA, 20 bp, Artificial Sequence
  Description of Artificial Sequence: Synthetic oligonucleotide
  Target: ATXN2; (-) strand; PAM type: NRG; PAM sequence: GAG
tttacaggttagagaaaaga

SEQ ID NO: 25008 - DNA, 20 bp, Artificial Sequence
  Description of Artificial Sequence: Synthetic oligonucleotide
  Target: ATXN2; (-) strand; PAM type: NRG; PAM sequence: GAG
cttttacaggttagagaaaa

SEQ ID NO: 25009 - DNA, 20 bp, Artificial Sequence
  Description of Artificial Sequence: Synthetic oligonucleotide
  Target: ATXN2; (-) strand; PAM type: NRG; PAM sequence: AAG
ggcttttacaggttagagaa

SEQ ID NO: 25010 - DNA, 20 bp, Artificial Sequence
  Description of Artificial Sequence: Synthetic oligonucleotide
  Target: ATXN2; (-) strand; PAM type: NRG; PAM sequence: GAG
aaggtggcttttacaggtta

SEQ ID NO: 25011 - DNA, 20 bp, Artificial Sequence
  Description of Artificial Sequence: Synthetic oligonucleotide
  Target: ATXN2; (-) strand; PAM type: NRG; PAM sequence: TAG
gaaaggtggcttttacaggt

SEQ ID NO: 25012 - DNA, 20 bp, Artificial Sequence
  Description of Artificial Sequence: Synthetic oligonucleotide
  Target: ATXN2; (-) strand; PAM type: NRG; PAM sequence: AGG
aactgaaaggtggcttttac

SEQ ID NO: 25013 - DNA, 20 bp, Artificial Sequence
  Description of Artificial Sequence: Synthetic oligonucleotide
  Target: ATXN2; (-) strand; PAM type: NRG; PAM sequence: CAG
taactgaaaggtggctttta

SEQ ID NO: 25014 - DNA, 20 bp, Artificial Sequence
  Description of Artificial Sequence: Synthetic oligonucleotide
  Target: ATXN2; (-) strand; PAM type: NRG; PAM sequence: TGG
agatgtctctaactgaaagg

SEQ ID NO: 25015 - DNA, 20 bp, Artificial Sequence
  Description of Artificial Sequence: Synthetic oligonucleotide
  Target: ATXN2; (-) strand; PAM type: NRG; PAM sequence: AGG
tgtagatgtctctaactgaa

SEQ ID NO: 25016 - DNA, 20 bp, Artificial Sequence
  Description of Artificial Sequence: Synthetic oligonucleotide
  Target: ATXN2; (-) strand; PAM type: NRG; PAM sequence: AAG
atgtagatgtctctaactga

SEQ ID NO: 25017 - DNA, 20 bp, Artificial Sequence
  Description of Artificial Sequence: Synthetic oligonucleotide
  Target: ATXN2; (-) strand; PAM type: NRG; PAM sequence: TAG
aagaaggttacaggtaaatg

SEQ ID NO: 25018 - DNA, 20 bp, Artificial Sequence
  Description of Artificial Sequence: Synthetic oligonucleotide
  Target: ATXN2; (-) strand; PAM type: NRG; PAM sequence: AGG
tgtgatctcaagaaggttac

SEQ ID NO: 25019 - DNA, 20 bp, Artificial Sequence
  Description of Artificial Sequence: Synthetic oligonucleotide
  Target: ATXN2; (-) strand; PAM type: NRG; PAM sequence: CAG
gtgtgatctcaagaaggtta

SEQ ID NO: 25020 - DNA, 20 bp, Artificial Sequence
  Description of Artificial Sequence: Synthetic oligonucleotide
  Target: ATXN2; (-) strand; PAM type: NRG; PAM sequence: AGG
ggaccagtgtgatctcaaga

SEQ ID NO: 25021 - DNA, 20 bp, Artificial Sequence
  Description of Artificial Sequence: Synthetic oligonucleotide
  Target: ATXN2; (-) strand; PAM type: NRG; PAM sequence: AAG
aggaccagtgtgatctcaag

SEQ ID NO: 25022 - DNA, 20 bp, Artificial Sequence
  Description of Artificial Sequence: Synthetic oligonucleotide
  Target: ATXN2; (-) strand; PAM type: NRG; PAM sequence: AAG
ctgaggaccagtgtgatctc

SEQ ID NO: 25023 - DNA, 20 bp, Artificial Sequence
  Description of Artificial Sequence: Synthetic oligonucleotide
  Target: ATXN2; (-) strand; PAM type: NRG; PAM sequence: CAG
tcctccacagacctgaggac

SEQ ID NO: 25024 - DNA, 20 bp, Artificial Sequence
  Description of Artificial Sequence: Synthetic oligonucleotide
  Target: ATXN2; (-) strand; PAM type: NRG; PAM sequence: AGG
tcctgtcctccacagacctg

SEQ ID NO: 25025 - DNA, 20 bp, Artificial Sequence
  Description of Artificial Sequence: Synthetic oligonucleotide
  Target: ATXN2; (-) strand; PAM type: NRG; PAM sequence: GAG
ctcctgtcctccacagacct

SEQ ID NO: 25026 - DNA, 20 bp, Artificial Sequence
  Description of Artificial Sequence: Synthetic oligonucleotide
  Target: ATXN2; (-) strand; PAM type: NRG; PAM sequence: CAG
tatgtacctcctgtcctcca

SEQ ID NO: 25027 - DNA, 20 bp, Artificial Sequence
  Description of Artificial Sequence: Synthetic oligonucleotide
  Target: ATXN2; (-) strand; PAM type: NRG; PAM sequence: AAG
tggaatcccttgtttaaaag

SEQ ID NO: 25028 - DNA, 20 bp, Artificial Sequence
  Description of Artificial Sequence: Synthetic oligonucleotide
  Target: ATXN2; (-) strand; PAM type: NRG; PAM sequence: AAG
atgtggaatcccttgtttaa

SEQ ID NO: 25029 - DNA, 20 bp, Artificial Sequence
  Description of Artificial Sequence: Synthetic oligonucleotide
  Target: ATXN2; (-) strand; PAM type: NRG; PAM sequence: TGG
aaagcaccccttgttccatg

SEQ ID NO: 25030 - DNA, 20 bp, Artificial Sequence
  Description of Artificial Sequence: Synthetic oligonucleotide
  Target: ATXN2; (-) strand; PAM type: NRG; PAM sequence: AAG
aagtatttttggctgttaaa

SEQ ID NO: 25031 - DNA, 20 bp, Artificial Sequence
  Description of Artificial Sequence: Synthetic oligonucleotide
  Target: ATXN2; (-) strand; PAM type: NRG; PAM sequence: TGG
ccaaacattggaagtatttt

SEQ ID NO: 25032 - DNA, 20 bp, Artificial Sequence
  Description of Artificial Sequence: Synthetic oligonucleotide
  Target: ATXN2; (-) strand; PAM type: NRG; PAM sequence: AAG
ttctttctcccaaacattgg

SEQ ID NO: 25033 - DNA, 20 bp, Artificial Sequence
  Description of Artificial Sequence: Synthetic oligonucleotide
  Target: ATXN2; (-) strand; PAM type: NRG; PAM sequence: TGG
cccttctttctcccaaacat

SEQ ID NO: 25034 - DNA, 20 bp, Artificial Sequence
  Description of Artificial Sequence: Synthetic oligonucleotide
  Target: ATXN2; (-) strand; PAM type: NRG; PAM sequence: TGG
ttgaatatgagggaaagcgt

SEQ ID NO: 25035 - DNA, 20 bp, Artificial Sequence
  Description of Artificial Sequence: Synthetic oligonucleotide
  Target: ATXN2; (-) strand; PAM type: NRG; PAM sequence: AAG
gaatcgttgaatatgaggga

SEQ ID NO: 25036 - DNA, 20 bp, Artificial Sequence
  Description of Artificial Sequence: Synthetic oligonucleotide
  Target: ATXN2; (-) strand; PAM type: NRG; PAM sequence: GGG
cttggaatcgttgaatatga

SEQ ID NO: 25037 - DNA, 20 bp, Artificial Sequence
  Description of Artificial Sequence: Synthetic oligonucleotide
  Target: ATXN2; (-) strand; PAM type: NRG; PAM sequence: AGG
ccttggaatcgttgaatatg

SEQ ID NO: 25038 - DNA, 20 bp, Artificial Sequence
  Description of Artificial Sequence: Synthetic oligonucleotide
  Target: ATXN2; (-) strand; PAM type: NRG; PAM sequence: GAG
accttggaatcgttgaatat

SEQ ID NO: 25039 - DNA, 20 bp, Artificial Sequence
  Description of Artificial Sequence: Synthetic oligonucleotide
  Target: ATXN2; (-) strand; PAM type: NRG; PAM sequence: TGG
ctagtaccatagtccgacct

SEQ ID NO: 25040 - DNA, 20 bp, Artificial Sequence
  Description of Artificial Sequence: Synthetic oligonucleotide
  Target: ATXN2; (-) strand; PAM type: NRG; PAM sequence: TAG
ttgccagggacctagtacca

SEQ ID NO: 25041 - DNA, 20 bp, Artificial Sequence
  Description of Artificial Sequence: Synthetic oligonucleotide
  Target: ATXN2; (-) strand; PAM type: NRG; PAM sequence: TAG
aggggaggttgccagggacc

SEQ ID NO: 25042 - DNA, 20 bp, Artificial Sequence
  Description of Artificial Sequence: Synthetic oligonucleotide
  Target: ATXN2; (-) strand; PAM type: NRG; PAM sequence: GGG
ggaggaaggggaggttgcca

SEQ ID NO: 25043 - DNA, 20 bp, Artificial Sequence
  Description of Artificial Sequence: Synthetic oligonucleotide
  Target: ATXN2; (-) strand; PAM type: NRG; PAM sequence: AGG
aggaggaaggggaggttgcc

SEQ ID NO: 25044 - DNA, 20 bp, Artificial Sequence
  Description of Artificial Sequence: Synthetic oligonucleotide
  Target: ATXN2; (-) strand; PAM type: NRG; PAM sequence: CAG
caggaggaaggggaggttgc

SEQ ID NO: 25045 - DNA, 20 bp, Artificial Sequence
  Description of Artificial Sequence: Synthetic oligonucleotide
  Target: ATXN2; (-) strand; PAM type: NRG; PAM sequence: AGG
gcattcccaggaggaagggg

SEQ ID NO: 25046 - DNA, 20 bp, Artificial Sequence
  Description of Artificial Sequence: Synthetic oligonucleotide
  Target: ATXN2; (-) strand; PAM type: NRG; PAM sequence: GAG
agcattcccaggaggaaggg

SEQ ID NO: 25047 - DNA, 20 bp, Artificial Sequence
  Description of Artificial Sequence: Synthetic oligonucleotide
  Target: ATXN2; (-) strand; PAM type: NRG; PAM sequence: GGG
tgagcattcccaggaggaag

SEQ ID NO: 25048 - DNA, 20 bp, Artificial Sequence
  Description of Artificial Sequence: Synthetic oligonucleotide
  Target: ATXN2; (-) strand; PAM type: NRG; PAM sequence: GGG
ttgagcattcccaggaggaa

SEQ ID NO: 25049 - DNA, 20 bp, Artificial Sequence
  Description of Artificial Sequence: Synthetic oligonucleotide
  Target: ATXN2; (-) strand; PAM type: NRG; PAM sequence: AGG
tttgagcattcccaggagga

SEQ ID NO: 25050 - DNA, 20 bp, Artificial Sequence
  Description of Artificial Sequence: Synthetic oligonucleotide
  Target: ATXN2; (-) strand; PAM type: NRG; PAM sequence: AAG
atttgagcattcccaggagg

SEQ ID NO: 25051 - DNA, 20 bp, Artificial Sequence
  Description of Artificial Sequence: Synthetic oligonucleotide
  Target: ATXN2; (-) strand; PAM type: NRG; PAM sequence: AGG
cccatttgagcattcccagg

SEQ ID NO: 25052 - DNA, 20 bp, Artificial Sequence
  Description of Artificial Sequence: Synthetic oligonucleotide
  Target: ATXN2; (-) strand; PAM type: NRG; PAM sequence: GAG
tcccatttgagcattcccag

SEQ ID NO: 25053 - DNA, 20 bp, Artificial Sequence
  Description of Artificial Sequence: Synthetic oligonucleotide
  Target: ATXN2; (-) strand; PAM type: NRG; PAM sequence: AGG
cttcccatttgagcattccc

SEQ ID NO: 25054 - DNA, 20 bp, Artificial Sequence
  Description of Artificial Sequence: Synthetic oligonucleotide
  Target: ATXN2; (-) strand; PAM type: NRG; PAM sequence: CAG
ccttcccatttgagcattcc

SEQ ID NO: 25055 - DNA, 20 bp, Artificial Sequence
  Description of Artificial Sequence: Synthetic oligonucleotide
  Target: ATXN2; (-) strand; PAM type: NRG; PAM sequence: GAG
ttcatgctgccttcccattt

SEQ ID NO: 25056 - DNA, 20 bp, Artificial Sequence
  Description of Artificial Sequence: Synthetic oligonucleotide
  Target: ATXN2; (-) strand; PAM type: NRG; PAM sequence: CAG
ccagttcttgtgactttgtc

SEQ ID NO: 25057 - DNA, 20 bp, Artificial Sequence
  Description of Artificial Sequence: Synthetic oligonucleotide
  Target: ATXN2; (-) strand; PAM type: NRG; PAM sequence: CAG
gtaaaaccatttctaaagcc

SEQ ID NO: 25058 - DNA, 20 bp, Artificial Sequence
  Description of Artificial Sequence: Synthetic oligonucleotide
  Target: ATXN2; (-) strand; PAM type: NRG; PAM sequence: AAG
taatggtaaaaccatttcta

SEQ ID NO: 25059 - DNA, 20 bp, Artificial Sequence
  Description of Artificial Sequence: Synthetic oligonucleotide
  Target: ATXN2; (-) strand; PAM type: NRG; PAM sequence: TGG
tgaggtgtcacaactgctaa

SEQ ID NO: 25060 - DNA, 20 bp, Artificial Sequence
  Description of Artificial Sequence: Synthetic oligonucleotide
  Target: ATXN2; (-) strand; PAM type: NRG; PAM sequence: AGG
atccagagttgccacttctg

SEQ ID NO: 25061 - DNA, 20 bp, Artificial Sequence
  Description of Artificial Sequence: Synthetic oligonucleotide
  Target: ATXN2; (-) strand; PAM type: NRG; PAM sequence: GAG
gatccagagttgccacttct

SEQ ID NO: 25062 - DNA, 20 bp, Artificial Sequence
  Description of Artificial Sequence: Synthetic oligonucleotide
  Target: ATXN2; (-) strand; PAM type: NRG; PAM sequence: GAG
ggttagggtattgagatcca

SEQ ID NO: 25063 - DNA, 20 bp, Artificial Sequence
  Description of Artificial Sequence: Synthetic oligonucleotide
  Target: ATXN2; (-) strand; PAM type: NRG; PAM sequence: CAG
taggttagggtattgagatc

SEQ ID NO: 25064 - DNA, 20 bp, Artificial Sequence
  Description of Artificial Sequence: Synthetic oligonucleotide
  Target: ATXN2; (-) strand; PAM type: NRG; PAM sequence: GAG
aggttataggttagggtatt

SEQ ID NO: 25065 - DNA, 20 bp, Artificial Sequence
  Description of Artificial Sequence: Synthetic oligonucleotide
  Target: ATXN2; (-) strand; PAM type: NRG; PAM sequence: GGG
tatgctgaggttataggtta

SEQ ID NO: 25066 - DNA, 20 bp, Artificial Sequence
  Description of Artificial Sequence: Synthetic oligonucleotide
  Target: ATXN2; (-) strand; PAM type: NRG; PAM sequence: AGG
ctatgctgaggttataggtt

SEQ ID NO: 25067 - DNA, 20 bp, Artificial Sequence
  Description of Artificial Sequence: Synthetic oligonucleotide
  Target: ATXN2; (-) strand; PAM type: NRG; PAM sequence: TAG
cctatgctgaggttataggt

SEQ ID NO: 25068 - DNA, 20 bp, Artificial Sequence
  Description of Artificial Sequence: Synthetic oligonucleotide
  Target: ATXN2; (-) strand; PAM type: NRG; PAM sequence: AGG
gttacctatgctgaggttat

SEQ ID NO: 25069 - DNA, 20 bp, Artificial Sequence
  Description of Artificial Sequence: Synthetic oligonucleotide
  Target: ATXN2; (-) strand; PAM type: NRG; PAM sequence: TAG
agttacctatgctgaggtta

SEQ ID NO: 25070 - DNA, 20 bp, Artificial Sequence
  Description of Artificial Sequence: Synthetic oligonucleotide
  Target: ATXN2; (-) strand; PAM type: NRG; PAM sequence: AGG
ttgtggagttacctatgctg

SEQ ID NO: 25071 - DNA, 20 bp, Artificial Sequence
  Description of Artificial Sequence: Synthetic oligonucleotide
  Target: ATXN2; (-) strand; PAM type: NRG; PAM sequence: GAG
attgtggagttacctatgct

SEQ ID NO: 25072 - DNA, 20 bp, Artificial Sequence
  Description of Artificial Sequence: Synthetic oligonucleotide
  Target: ATXN2; (-) strand; PAM type: NRG; PAM sequence: GAG
agtttcctcgtagaattgtg

SEQ ID NO: 25073 - DNA, 20 bp, Artificial Sequence
  Description of Artificial Sequence: Synthetic oligonucleotide
  Target: ATXN2; (-) strand; PAM type: NRG; PAM sequence: TGG
atagtttcctcgtagaattg

SEQ ID NO: 25074 - DNA, 20 bp, Artificial Sequence
  Description of Artificial Sequence: Synthetic oligonucleotide
  Target: ATXN2; (-) strand; PAM type: NRG; PAM sequence: TAG
aatttcctatagtttcctcg

SEQ ID NO: 25075 - DNA, 20 bp, Artificial Sequence
  Description of Artificial Sequence: Synthetic oligonucleotide
  Target: ATXN2; (-) strand; PAM type: NRG; PAM sequence: TAG
ttgcgaatggtaatttccta

SEQ ID NO: 25076 - DNA, 20 bp, Artificial Sequence
  Description of Artificial Sequence: Synthetic oligonucleotide
  Target: ATXN2; (-) strand; PAM type: NRG; PAM sequence: TGG
ggcagcctcccttttgcgaa

SEQ ID NO: 25077 - DNA, 20 bp, Artificial Sequence
  Description of Artificial Sequence: Synthetic oligonucleotide
  Target: ATXN2; (-) strand; PAM type: NRG; PAM sequence: CAG
cccccaccaaaaaaagaagg

SEQ ID NO: 25078 - DNA, 20 bp, Artificial Sequence
  Description of Artificial Sequence: Synthetic oligonucleotide
  Target: ATXN2; (-) strand; PAM type: NRG; PAM sequence: AGG
tcccccccaccaaaaaaaga

SEQ ID NO: 25079 - DNA, 20 bp, Artificial Sequence
  Description of Artificial Sequence: Synthetic oligonucleotide
  Target: ATXN2; (-) strand; PAM type: NRG; PAM sequence: AAG
ctcccccccaccaaaaaaag

SEQ ID NO: 25080 - DNA, 20 bp, Artificial Sequence
  Description of Artificial Sequence: Synthetic oligonucleotide
  Target: ATXN2; (-) strand; PAM type: NRG; PAM sequence: AAG
tggctcccccccaccaaaaa

SEQ ID NO: 25081 - DNA, 20 bp, Artificial Sequence
  Description of Artificial Sequence: Synthetic oligonucleotide
  Target: ATXN2; (-) strand; PAM type: NRG; PAM sequence: TGG
ttaataaacttgcttgcccc

SEQ ID NO: 25082 - DNA, 20 bp, Artificial Sequence
  Description of Artificial Sequence: Synthetic oligonucleotide
  Target: ATXN2; (-) strand; PAM type: NRG; PAM sequence: AGG
agctgctctgcctatggagt

SEQ ID NO: 25083 - DNA, 20 bp, Artificial Sequence
  Description of Artificial Sequence: Synthetic oligonucleotide
  Target: ATXN2; (-) strand; PAM type: NRG; PAM sequence: TAG
cagctgctctgcctatggag

SEQ ID NO: 25084 - DNA, 20 bp, Artificial Sequence
  Description of Artificial Sequence: Synthetic oligonucleotide
  Target: ATXN2; (-) strand; PAM type: NRG; PAM sequence: GAG
cctcagctgctctgcctatg

SEQ ID NO: 25085 - DNA, 20 bp, Artificial Sequence
  Description of Artificial Sequence: Synthetic oligonucleotide
  Target: ATXN2; (-) strand; PAM type: NRG; PAM sequence: TGG
agcctcagctgctctgccta

SEQ ID NO: 25086 - DNA, 20 bp, Artificial Sequence
  Description of Artificial Sequence: Synthetic oligonucleotide
  Target: ATXN2; (-) strand; PAM type: NRG; PAM sequence: CAG
tacgttaaagaatgcagcct

SEQ ID NO: 25087 - DNA, 20 bp, Artificial Sequence
  Description of Artificial Sequence: Synthetic oligonucleotide
  Target: ATXN2; (-) strand; PAM type: NRG; PAM sequence: CAG
ttcttttacgttaaagaatg

SEQ ID NO: 25088 - DNA, 20 bp, Artificial Sequence
  Description of Artificial Sequence: Synthetic oligonucleotide
  Target: ATXN2; (-) strand; PAM type: NRG; PAM sequence: AAG
tggttgattcttttacgtta

SEQ ID NO: 25089 - DNA, 20 bp, Artificial Sequence
  Description of Artificial Sequence: Synthetic oligonucleotide
  Target: ATXN2; (-) strand; PAM type: NRG; PAM sequence: TGG
cttccagcctgtggcccaat

SEQ ID NO: 25090 - DNA, 20 bp, Artificial Sequence
  Description of Artificial Sequence: Synthetic oligonucleotide
  Target: ATXN2; (-) strand; PAM type: NRG; PAM sequence: TGG
gtaaatagtcttccagcctg

SEQ ID NO: 25091 - DNA, 20 bp, Artificial Sequence
  Description of Artificial Sequence: Synthetic oligonucleotide
  Target: ATXN2; (-) strand; PAM type: NRG; PAM sequence: CAG
ttcactggtaaatagtcttc

SEQ ID NO: 25092 - DNA, 20 bp, Artificial Sequence
  Description of Artificial Sequence: Synthetic oligonucleotide
  Target: ATXN2; (-) strand; PAM type: NRG; PAM sequence: TAG
cagtaatattcactggtaaa

SEQ ID NO: 25093 - DNA, 20 bp, Artificial Sequence
  Description of Artificial Sequence: Synthetic oligonucleotide
  Target: ATXN2; (-) strand; PAM type: NRG; PAM sequence: TGG
atccaggcagtaatattcac

SEQ ID NO: 25094 - DNA, 20 bp, Artificial Sequence
  Description of Artificial Sequence: Synthetic oligonucleotide
  Target: ATXN2; (-) strand; PAM type: NRG; PAM sequence: CAG
ttagagaataattatccagg

SEQ ID NO: 25095 - DNA, 20 bp, Artificial Sequence
  Description of Artificial Sequence: Synthetic oligonucleotide
  Target: ATXN2; (-) strand; PAM type: NRG; PAM sequence: AGG
acattagagaataattatcc

SEQ ID NO: 25096 - DNA, 20 bp, Artificial Sequence
  Description of Artificial Sequence: Synthetic oligonucleotide
  Target: ATXN2; (-) strand; PAM type: NRG; PAM sequence: CAG
aacattagagaataattatc

SEQ ID NO: 25097 - DNA, 20 bp, Artificial Sequence
  Description of Artificial Sequence: Synthetic oligonucleotide
  Target: ATXN2; (-) strand; PAM type: NRG; PAM sequence: GAG
aaaaaggagttgaaacatta

SEQ ID NO: 25098 - DNA, 20 bp, Artificial Sequence
  Description of Artificial Sequence: Synthetic oligonucleotide
  Target: ATXN2; (-) strand; PAM type: NRG; PAM sequence: TAG
taaaaaaggagttgaaacat

SEQ ID NO: 25099 - DNA, 20 bp, Artificial Sequence
  Description of Artificial Sequence: Synthetic oligonucleotide
  Target: ATXN2; (-) strand; PAM type: NRG; PAM sequence: GAG
ccagtaaggctttaaaaaag

SEQ ID NO: 25100 - DNA, 20 bp, Artificial Sequence
  Description of Artificial Sequence: Synthetic oligonucleotide
  Target: ATXN2; (-) strand; PAM type: NRG; PAM sequence: AGG
caccagtaaggctttaaaaa

SEQ ID NO: 25101 - DNA, 20 bp, Artificial Sequence
  Description of Artificial Sequence: Synthetic oligonucleotide
  Target: ATXN2; (-) strand; PAM type: NRG; PAM sequence: AAG
tcaccagtaaggctttaaaa

SEQ ID NO: 25102 - DNA, 20 bp, Artificial Sequence
  Description of Artificial Sequence: Synthetic oligonucleotide
  Target: ATXN2; (-) strand; PAM type: NRG; PAM sequence: AGG
ctttatacttttcaccagta

SEQ ID NO: 25103 - DNA, 20 bp, Artificial Sequence
  Description of Artificial Sequence: Synthetic oligonucleotide
  Target: ATXN2; (-) strand; PAM type: NRG; PAM sequence: AAG
actttatacttttcaccagt

SEQ ID NO: 25104 - DNA, 20 bp, Artificial Sequence
  Description of Artificial Sequence: Synthetic oligonucleotide
  Target: ATXN2; (-) strand; PAM type: NRG; PAM sequence: CAG
ctggactttatacttttcac

SEQ ID NO: 25105 - DNA, 20 bp, Artificial Sequence
  Description of Artificial Sequence: Synthetic oligonucleotide
  Target: ATXN2; (-) strand; PAM type: NRG; PAM sequence: TGG
ggatggattacaacctttac

SEQ ID NO: 25106 - DNA, 20 bp, Artificial Sequence
  Description of Artificial Sequence: Synthetic oligonucleotide
  Target: ATXN2; (-) strand; PAM type: NRG; PAM sequence: TGG
atgtgttcattcttctggga

SEQ ID NO: 25107 - DNA, 20 bp, Artificial Sequence
  Description of Artificial Sequence: Synthetic oligonucleotide
  Target: ATXN2; (-) strand; PAM type: NRG; PAM sequence: GGG
gttgatgtgttcattcttct

SEQ ID NO: 25108 - DNA, 20 bp, Artificial Sequence
  Description of Artificial Sequence: Synthetic oligonucleotide
  Target: ATXN2; (-) strand; PAM type: NRG; PAM sequence: TGG
ggttgatgtgttcattcttc

SEQ ID NO: 25109 - DNA, 20 bp, Artificial Sequence
  Description of Artificial Sequence: Synthetic oligonucleotide
  Target: ATXN2; (-) strand; PAM type: NRG; PAM sequence: TGG
aggttgccatcagcattgct

SEQ ID NO: 25110 - DNA, 20 bp, Artificial Sequence
  Description of Artificial Sequence: Synthetic oligonucleotide
  Target: ATXN2; (-) strand; PAM type: NRG; PAM sequence: CAG
cttagcattgaggttgccat

SEQ ID NO: 25111 - DNA, 20 bp, Artificial Sequence
  Description of Artificial Sequence: Synthetic oligonucleotide
  Target: ATXN2; (-) strand; PAM type: NRG; PAM sequence: AGG
cgaggcaagccttagcattg

SEQ ID NO: 25112 - DNA, 20 bp, Artificial Sequence
  Description of Artificial Sequence: Synthetic oligonucleotide
  Target: ATXN2; (-) strand; PAM type: NRG; PAM sequence: GAG
tcgaggcaagccttagcatt

SEQ ID NO: 25113 - DNA, 20 bp, Artificial Sequence
  Description of Artificial Sequence: Synthetic oligonucleotide
  Target: ATXN2; (-) strand; PAM type: NRG; PAM sequence: TAG
gtgaacttcgaggcaagcct

SEQ ID NO: 25114 - DNA, 20 bp, Artificial Sequence
  Description of Artificial Sequence: Synthetic oligonucleotide
  Target: ATXN2; (-) strand; PAM type: NRG; PAM sequence: AAG
taataggtgaacttcgaggc

SEQ ID NO: 25115 - DNA, 20 bp, Artificial Sequence
  Description of Artificial Sequence: Synthetic oligonucleotide
  Target: ATXN2; (-) strand; PAM type: NRG; PAM sequence: AGG
aggttaataggtgaacttcg

SEQ ID NO: 25116 - DNA, 20 bp, Artificial Sequence
  Description of Artificial Sequence: Synthetic oligonucleotide
  Target: ATXN2; (-) strand; PAM type: NRG; PAM sequence: GAG
aaggttaataggtgaacttc

SEQ ID NO: 25117 - DNA, 20 bp, Artificial Sequence
  Description of Artificial Sequence: Synthetic oligonucleotide
  Target: ATXN2; (-) strand; PAM type: NRG; PAM sequence: AGG
caggaggacccaaggttaat

SEQ ID NO: 25118 - DNA, 20 bp, Artificial Sequence
  Description of Artificial Sequence: Synthetic oligonucleotide
  Target: ATXN2; (-) strand; PAM type: NRG; PAM sequence: TAG
acaggaggacccaaggttaa

SEQ ID NO: 25119 - DNA, 20 bp, Artificial Sequence
  Description of Artificial Sequence: Synthetic oligonucleotide
  Target: ATXN2; (-) strand; PAM type: NRG; PAM sequence: AGG
gagtagcacaggaggaccca

SEQ ID NO: 25120 - DNA, 20 bp, Artificial Sequence
  Description of Artificial Sequence: Synthetic oligonucleotide
  Target: ATXN2; (-) strand; PAM type: NRG; PAM sequence: AAG
ggagtagcacaggaggaccc

SEQ ID NO: 25121 - DNA, 20 bp, Artificial Sequence
  Description of Artificial Sequence: Synthetic oligonucleotide
  Target: ATXN2; (-) strand; PAM type: NRG; PAM sequence: AGG
cttacctggagtagcacagg

SEQ ID NO: 25122 - DNA, 20 bp, Artificial Sequence
  Description of Artificial Sequence: Synthetic oligonucleotide
  Target: ATXN2; (-) strand; PAM type: NRG; PAM sequence: GAG
tcttacctggagtagcacag

SEQ ID NO: 25123 - DNA, 20 bp, Artificial Sequence
  Description of Artificial Sequence: Synthetic oligonucleotide
  Target: ATXN2; (-) strand; PAM type: NRG; PAM sequence: AGG
agtcttacctggagtagcac

SEQ ID NO: 25124 - DNA, 20 bp, Artificial Sequence
  Description of Artificial Sequence: Synthetic oligonucleotide
  Target: ATXN2; (-) strand; PAM type: NRG; PAM sequence: CAG
tagtcttacctggagtagca

SEQ ID NO: 25125 - DNA, 20 bp, Artificial Sequence
  Description of Artificial Sequence: Synthetic oligonucleotide
  Target: ATXN2; (-) strand; PAM type: NRG; PAM sequence: TAG
cattatagtcttacctggag

SEQ ID NO: 25126 - DNA, 20 bp, Artificial Sequence
  Description of Artificial Sequence: Synthetic oligonucleotide
  Target: ATXN2; (-) strand; PAM type: NRG; PAM sequence: GAG
ttacattatagtcttacctg

SEQ ID NO: 25127 - DNA, 20 bp, Artificial Sequence
  Description of Artificial Sequence: Synthetic oligonucleotide
  Target: ATXN2; (-) strand; PAM type: NRG; PAM sequence: TGG
acttacattatagtcttacc

SEQ ID NO: 25128 - DNA, 20 bp, Artificial Sequence
  Description of Artificial Sequence: Synthetic oligonucleotide
  Target: ATXN2; (-) strand; PAM type: NRG; PAM sequence: TAG
ttggtggtagacttacatta

SEQ ID NO: 25129 - DNA, 20 bp, Artificial Sequence
  Description of Artificial Sequence: Synthetic oligonucleotide
  Target: ATXN2; (-) strand; PAM type: NRG; PAM sequence: TAG
aaaaggaattgcattggtgg

SEQ ID NO: 25130 - DNA, 20 bp, Artificial Sequence
  Description of Artificial Sequence: Synthetic oligonucleotide
  Target: ATXN2; (-) strand; PAM type: NRG; PAM sequence: TGG
ggcaaaaggaattgcattgg

SEQ ID NO: 25131 - DNA, 20 bp, Artificial Sequence
  Description of Artificial Sequence: Synthetic oligonucleotide
  Target: ATXN2; (-) strand; PAM type: NRG; PAM sequence: TGG
tttggcaaaaggaattgcat

SEQ ID NO: 25132 - DNA, 20 bp, Artificial Sequence
  Description of Artificial Sequence: Synthetic oligonucleotide
  Target: ATXN2; (-) strand; PAM type: NRG; PAM sequence: AGG
ctgcccatgtgtttggcaaa

SEQ ID NO: 25133 - DNA, 20 bp, Artificial Sequence
  Description of Artificial Sequence: Synthetic oligonucleotide
  Target: ATXN2; (-) strand; PAM type: NRG; PAM sequence: AAG
cctgcccatgtgtttggcaa

SEQ ID NO: 25134 - DNA, 20 bp, Artificial Sequence
  Description of Artificial Sequence: Synthetic oligonucleotide
  Target: ATXN2; (-) strand; PAM type: NRG; PAM sequence: TGG
tgatttcctgcccatgtgtt

SEQ ID NO: 25135 - DNA, 20 bp, Artificial Sequence
  Description of Artificial Sequence: Synthetic oligonucleotide
  Target: ATXN2; (-) strand; PAM type: NRG; PAM sequence: AAG
attttaaagcctccataagt

SEQ ID NO: 25136 - DNA, 20 bp, Artificial Sequence
  Description of Artificial Sequence: Synthetic oligonucleotide
  Target: ATXN2; (-) strand; PAM type: NRG; PAM sequence: AAG
agtaattttaaagcctccat

SEQ ID NO: 25137 - DNA, 20 bp, Artificial Sequence
  Description of Artificial Sequence: Synthetic oligonucleotide
  Target: ATXN2; (-) strand; PAM type: NRG; PAM sequence: AAG
acattacttaagtaatttta

SEQ ID NO: 25138 - DNA, 20 bp, Artificial Sequence
  Description of Artificial Sequence: Synthetic oligonucleotide
  Target: ATXN2; (-) strand; PAM type: NRG; PAM sequence: AAG
atgtagggcatacattactt

SEQ ID NO: 25139 - DNA, 20 bp, Artificial Sequence
  Description of Artificial Sequence: Synthetic oligonucleotide
  Target: ATXN2; (-) strand; PAM type: NRG; PAM sequence: GGG
tttttttttttttttatgta

SEQ ID NO: 25140 - DNA, 20 bp, Artificial Sequence
  Description of Artificial Sequence: Synthetic oligonucleotide
  Target: ATXN2; (-) strand; PAM type: NRG; PAM sequence: AGG
ttttttttttttttttatgt

SEQ ID NO: 25141 - DNA, 20 bp, Artificial Sequence
  Description of Artificial Sequence: Synthetic oligonucleotide
  Target: ATXN2; (-) strand; PAM type: NRG; PAM sequence: TAG
tttttttttttttttttatg

SEQ ID NO: 25142 - DNA, 20 bp, Artificial Sequence
  Description of Artificial Sequence: Synthetic oligonucleotide
  Target: ATXN2; (-) strand; PAM type: NRG; PAM sequence: TGG
ggaagacatttactttttac

SEQ ID NO: 25143 - DNA, 20 bp, Artificial Sequence
  Description of Artificial Sequence: Synthetic oligonucleotide
  Target: ATXN2; (-) strand; PAM type: NRG; PAM sequence: AAG
tttatgcacgctgggattgg

SEQ ID NO: 25144 - DNA, 20 bp, Artificial Sequence
  Description of Artificial Sequence: Synthetic oligonucleotide
  Target: ATXN2; (-) strand; PAM type: NRG; PAM sequence: TGG
ttatttatgcacgctgggat

SEQ ID NO: 25145 - DNA, 20 bp, Artificial Sequence
  Description of Artificial Sequence: Synthetic oligonucleotide
  Target: ATXN2; (-) strand; PAM type: NRG; PAM sequence: GGG
agtagttatttatgcacgct

SEQ ID NO: 25146 - DNA, 20 bp, Artificial Sequence
  Description of Artificial Sequence: Synthetic oligonucleotide
  Target: ATXN2; (-) strand; PAM type: NRG; PAM sequence: TGG
tagtagttatttatgcacgc

SEQ ID NO: 25147 - DNA, 20 bp, Artificial Sequence
  Description of Artificial Sequence: Synthetic oligonucleotide
  Target: ATXN2; (-) strand; PAM type: NRG; PAM sequence: TAG
ccggccagaactcttaatag

SEQ ID NO: 25148 - DNA, 20 bp, Artificial Sequence
  Description of Artificial Sequence: Synthetic oligonucleotide
  Target: ATXN2; (-) strand; PAM type: NRG; PAM sequence: TAG
tgcccggccagaactcttaa

SEQ ID NO: 25149 - DNA, 20 bp, Artificial Sequence
  Description of Artificial Sequence: Synthetic oligonucleotide
  Target: ATXN2; (-) strand; PAM type: NRG; PAM sequence: CAG
catgagccaccgtgcccggc

SEQ ID NO: 25150 - DNA, 20 bp, Artificial Sequence
  Description of Artificial Sequence: Synthetic oligonucleotide
  Target: ATXN2; (-) strand; PAM type: NRG; PAM sequence: CGG
caggcatgagccaccgtgcc

SEQ ID NO: 25151 - DNA, 20 bp, Artificial Sequence
  Description of Artificial Sequence: Synthetic oligonucleotide
  Target: ATXN2; (-) strand; PAM type: NRG; PAM sequence: GAG
agtgctgggataccaggcat

SEQ ID NO: 25152 - DNA, 20 bp, Artificial Sequence
  Description of Artificial Sequence: Synthetic oligonucleotide
  Target: ATXN2; (-) strand; PAM type: NRG; PAM sequence: AGG
tcccaaagtgctgggatacc

SEQ ID NO: 25153 - DNA, 20 bp, Artificial Sequence
  Description of Artificial Sequence: Synthetic oligonucleotide
  Target: ATXN2; (-) strand; PAM type: NRG; PAM sequence: CAG
ctcccaaagtgctgggatac

SEQ ID NO: 25154 - DNA, 20 bp, Artificial Sequence
  Description of Artificial Sequence: Synthetic oligonucleotide
  Target: ATXN2; (-) strand; PAM type: NRG; PAM sequence: GGG
cctcggcctcccaaagtgct

SEQ ID NO: 25155 - DNA, 20 bp, Artificial Sequence
  Description of Artificial Sequence: Synthetic oligonucleotide
  Target: ATXN2; (-) strand; PAM type: NRG; PAM sequence: TGG
gcctcggcctcccaaagtgc

SEQ ID NO: 25156 - DNA, 20 bp, Artificial Sequence
  Description of Artificial Sequence: Synthetic oligonucleotide
  Target: ATXN2; (-) strand; PAM type: NRG; PAM sequence: AAG
cctcctgcctcggcctccca

SEQ ID NO: 25157 - DNA, 20 bp, Artificial Sequence
  Description of Artificial Sequence: Synthetic oligonucleotide
  Target: ATXN2; (-) strand; PAM type: NRG; PAM sequence: CGG
acttcgtgatcctcctgcct

SEQ ID NO: 25158 - DNA, 20 bp, Artificial Sequence
  Description of Artificial Sequence: Synthetic oligonucleotide
  Target: ATXN2; (-) strand; PAM type: NRG; PAM sequence: TGG
tttcaccatgttagccagca

SEQ ID NO: 25159 - DNA, 20 bp, Artificial Sequence
  Description of Artificial Sequence: Synthetic oligonucleotide
  Target: ATXN2; (-) strand; PAM type: NRG; PAM sequence: CAG
cagggtttcaccatgttagc

SEQ ID NO: 25160 - DNA, 20 bp, Artificial Sequence
  Description of Artificial Sequence: Synthetic oligonucleotide
  Target: ATXN2; (-) strand; PAM type: NRG; PAM sequence: TAG
gagacagggtttcaccatgt

SEQ ID NO: 25161 - DNA, 20 bp, Artificial Sequence
  Description of Artificial Sequence: Synthetic oligonucleotide
  Target: ATXN2; (-) strand; PAM type: NRG; PAM sequence: GGG
ttgtatttttagtagagaca

SEQ ID NO: 25162 - DNA, 20 bp, Artificial Sequence
  Description of Artificial Sequence: Synthetic oligonucleotide
  Target: ATXN2; (-) strand; PAM type: NRG; PAM sequence: AGG
tttgtatttttagtagagac

SEQ ID NO: 25163 - DNA, 20 bp, Artificial Sequence
  Description of Artificial Sequence: Synthetic oligonucleotide
  Target: ATXN2; (-) strand; PAM type: NRG; PAM sequence: CAG
ttttgtatttttagtagaga

SEQ ID NO: 25164 - DNA, 20 bp, Artificial Sequence
  Description of Artificial Sequence: Synthetic oligonucleotide
  Target: ATXN2; (-) strand; PAM type: NRG; PAM sequence: GAG
aattttttgtatttttagta

SEQ ID NO: 25165 - DNA, 20 bp, Artificial Sequence
  Description of Artificial Sequence: Synthetic oligonucleotide
  Target: ATXN2; (-) strand; PAM type: NRG; PAM sequence: TAG
ctaattttttgtatttttag

SEQ ID NO: 25166 - DNA, 20 bp, Artificial Sequence
  Description of Artificial Sequence: Synthetic oligonucleotide
  Target: ATXN2; (-) strand; PAM type: NRG; PAM sequence: TAG
tggctaattttttgtatttt

SEQ ID NO: 25167 - DNA, 20 bp, Artificial Sequence
  Description of Artificial Sequence: Synthetic oligonucleotide
  Target: ATXN2; (-) strand; PAM type: NRG; PAM sequence: TGG
caggctcccgccaccacacc

SEQ ID NO: 25168 - DNA, 20 bp, Artificial Sequence
  Description of Artificial Sequence: Synthetic oligonucleotide
  Target: ATXN2; (-) strand; PAM type: NRG; PAM sequence: AGG
tcccaagtagctgggactac

SEQ ID NO: 25169 - DNA, 20 bp, Artificial Sequence
  Description of Artificial Sequence: Synthetic oligonucleotide
  Target: ATXN2; (-) strand; PAM type: NRG; PAM sequence: CAG
ctcccaagtagctgggacta

SEQ ID NO: 25170 - DNA, 20 bp, Artificial Sequence
  Description of Artificial Sequence: Synthetic oligonucleotide
  Target: ATXN2; (-) strand; PAM type: NRG; PAM sequence: GGG
ccctagcctcccaagtagct

SEQ ID NO: 25171 - DNA, 20 bp, Artificial Sequence
  Description of Artificial Sequence: Synthetic oligonucleotide
  Target: ATXN2; (-) strand; PAM type: NRG; PAM sequence: TGG
gccctagcctcccaagtagc

SEQ ID NO: 25172 - DNA, 20 bp, Artificial Sequence
  Description of Artificial Sequence: Synthetic oligonucleotide
  Target: ATXN2; (-) strand; PAM type: NRG; PAM sequence: TAG
tcctgccctagcctcccaag

SEQ ID NO: 25173 - DNA, 20 bp, Artificial Sequence
  Description of Artificial Sequence: Synthetic oligonucleotide
  Target: ATXN2; (-) strand; PAM type: NRG; PAM sequence: AAG
ttctcctgccctagcctccc

SEQ ID NO: 25174 - DNA, 20 bp, Artificial Sequence
  Description of Artificial Sequence: Synthetic oligonucleotide
  Target: ATXN2; (-) strand; PAM type: NRG; PAM sequence: TAG
ttcacaccattctcctgccc

SEQ ID NO: 25175 - DNA, 20 bp, Artificial Sequence
  Description of Artificial Sequence: Synthetic oligonucleotide
  Target: ATXN2; (-) strand; PAM type: NRG; PAM sequence: GGG
cactgcaagctctgcctccc

SEQ ID NO: 25176 - DNA, 20 bp, Artificial Sequence
  Description of Artificial Sequence: Synthetic oligonucleotide
  Target: ATXN2; (-) strand; PAM type: NRG; PAM sequence: CGG
tcactgcaagctctgcctcc

SEQ ID NO: 25177 - DNA, 20 bp, Artificial Sequence
  Description of Artificial Sequence: Synthetic oligonucleotide
  Target: ATXN2; (-) strand; PAM type: NRG; PAM sequence: AAG
gtgtgatctcagctcactgc

SEQ ID NO: 25178 - DNA, 20 bp, Artificial Sequence
  Description of Artificial Sequence: Synthetic oligonucleotide
  Target: ATXN2; (-) strand; PAM type: NRG; PAM sequence: CAG
tgagtgcagtggtgtgatct

SEQ ID NO: 25179 - DNA, 20 bp, Artificial Sequence
  Description of Artificial Sequence: Synthetic oligonucleotide
  Target: ATXN2; (-) strand; PAM type: NRG; PAM sequence: TGG
tcgcccagacttgagtgcag

SEQ ID NO: 25180 - DNA, 20 bp, Artificial Sequence
  Description of Artificial Sequence: Synthetic oligonucleotide
  Target: ATXN2; (-) strand; PAM type: NRG; PAM sequence: CAG
ctgtcgcccagacttgagtg

SEQ ID NO: 25181 - DNA, 20 bp, Artificial Sequence
  Description of Artificial Sequence: Synthetic oligonucleotide
  Target: ATXN2; (-) strand; PAM type: NRG; PAM sequence: GAG
tcgctctgtcgcccagactt

SEQ ID NO: 25182 - DNA, 20 bp, Artificial Sequence
  Description of Artificial Sequence: Synthetic oligonucleotide
  Target: ATXN2; (-) strand; PAM type: NRG; PAM sequence: CAG
tggagtctcgctctgtcgcc

SEQ ID NO: 25183 - DNA, 20 bp, Artificial Sequence
  Description of Artificial Sequence: Synthetic oligonucleotide
  Target: ATXN2; (-) strand; PAM type: NRG; PAM sequence: GAG
tttttttttcttttaagatg

SEQ ID NO: 25184 - DNA, 20 bp, Artificial Sequence
  Description of Artificial Sequence: Synthetic oligonucleotide
  Target: ATXN2; (-) strand; PAM type: NRG; PAM sequence: TGG
tctttttttttcttttaaga

SEQ ID NO: 25185 - DNA, 20 bp, Artificial Sequence
  Description of Artificial Sequence: Synthetic oligonucleotide
  Target: ATXN2; (-) strand; PAM type: NRG; PAM sequence: AAG
aaactctttttttttctttt

SEQ ID NO: 25186 - DNA, 20 bp, Artificial Sequence
  Description of Artificial Sequence: Synthetic oligonucleotide
  Target: ATXN2; (-) strand; PAM type: NRG; PAM sequence: CGG
caggcatgagccactgcgcc

SEQ ID NO: 25187 - DNA, 20 bp, Artificial Sequence
  Description of Artificial Sequence: Synthetic oligonucleotide
  Target: ATXN2; (-) strand; PAM type: NRG; PAM sequence: GAG
agtgctgggattacaggcat

SEQ ID NO: 25188 - DNA, 20 bp, Artificial Sequence
  Description of Artificial Sequence: Synthetic oligonucleotide
  Target: ATXN2; (-) strand; PAM type: NRG; PAM sequence: AGG
tctcaaagtgctgggattac

SEQ ID NO: 25189 - DNA, 20 bp, Artificial Sequence
  Description of Artificial Sequence: Synthetic oligonucleotide
  Target: ATXN2; (-) strand; PAM type: NRG; PAM sequence: CAG
ctctcaaagtgctgggatta

SEQ ID NO: 25190 - DNA, 20 bp, Artificial Sequence
  Description of Artificial Sequence: Synthetic oligonucleotide
  Target: ATXN2; (-) strand; PAM type: NRG; PAM sequence: GGG
ccttggcctctcaaagtgct

SEQ ID NO: 25191 - DNA, 20 bp, Artificial Sequence
  Description of Artificial Sequence: Synthetic oligonucleotide
  Target: ATXN2; (-) strand; PAM type: NRG; PAM sequence: TGG
accttggcctctcaaagtgc

SEQ ID NO: 25192 - DNA, 20 bp, Artificial Sequence
  Description of Artificial Sequence: Synthetic oligonucleotide
  Target: ATXN2; (-) strand; PAM type: NRG; PAM sequence: AAG
ccacccaccttggcctctca

SEQ ID NO: 25193 - DNA, 20 bp, Artificial Sequence
  Description of Artificial Sequence: Synthetic oligonucleotide
  Target: ATXN2; (-) strand; PAM type: NRG; PAM sequence: TGG
ctcaggtgatccacccacct

SEQ ID NO: 25194 - DNA, 20 bp, Artificial Sequence
  Description of Artificial Sequence: Synthetic oligonucleotide
  Target: ATXN2; (-) strand; PAM type: NRG; PAM sequence: AGG
ggtcccgaactcctaatctc

SEQ ID NO: 25195 - DNA, 20 bp, Artificial Sequence
  Description of Artificial Sequence: Synthetic oligonucleotide
  Target: ATXN2; (-) strand; PAM type: NRG; PAM sequence: CAG
tggtcccgaactcctaatct

SEQ ID NO: 25196 - DNA, 20 bp, Artificial Sequence
  Description of Artificial Sequence: Synthetic oligonucleotide
  Target: ATXN2; (-) strand; PAM type: NRG; PAM sequence: TGG
tttcaacatgttggccaggc

SEQ ID NO: 25197 - DNA, 20 bp, Artificial Sequence
  Description of Artificial Sequence: Synthetic oligonucleotide
  Target: ATXN2; (-) strand; PAM type: NRG; PAM sequence: AGG
agggtttcaacatgttggcc

SEQ ID NO: 25198 - DNA, 20 bp, Artificial Sequence
  Description of Artificial Sequence: Synthetic oligonucleotide
  Target: ATXN2; (-) strand; PAM type: NRG; PAM sequence: CAG
cagggtttcaacatgttggc

SEQ ID NO: 25199 - DNA, 20 bp, Artificial Sequence
  Description of Artificial Sequence: Synthetic oligonucleotide
  Target: ATXN2; (-) strand; PAM type: NRG; PAM sequence: TGG
gagacagggtttcaacatgt

SEQ ID NO: 25200 - DNA, 20 bp, Artificial Sequence
  Description of Artificial Sequence: Synthetic oligonucleotide
  Target: ATXN2; (-) strand; PAM type: NRG; PAM sequence: GGG
ttgtatttttagtagagaca

SEQ ID NO: 25201 - DNA, 20 bp, Artificial Sequence
  Description of Artificial Sequence: Synthetic oligonucleotide
  Target: ATXN2; (-) strand; PAM type: NRG; PAM sequence: AGG
tttgtatttttagtagagac

SEQ ID NO: 25202 - DNA, 20 bp, Artificial Sequence
  Description of Artificial Sequence: Synthetic oligonucleotide
  Target: ATXN2; (-) strand; PAM type: NRG; PAM sequence: CAG
ttttgtatttttagtagaga

SEQ ID NO: 25203 - DNA, 20 bp, Artificial Sequence
  Description of Artificial Sequence: Synthetic oligonucleotide
  Target: ATXN2; (-) strand; PAM type: NRG; PAM sequence: GAG
aattttttgtatttttagta

SEQ ID NO: 25204 - DNA, 20 bp, Artificial Sequence
  Description of Artificial Sequence: Synthetic oligonucleotide
  Target: ATXN2; (-) strand; PAM type: NRG; PAM sequence: TAG
ctaattttttgtatttttag

SEQ ID NO: 25205 - DNA, 20 bp, Artificial Sequence
  Description of Artificial Sequence: Synthetic oligonucleotide
  Target: ATXN2; (-) strand; PAM type: NRG; PAM sequence: TAG
tggctaattttttgtatttt

SEQ ID NO: 25206 - DNA, 20 bp, Artificial Sequence
  Description of Artificial Sequence: Synthetic oligonucleotide
  Target: ATXN2; (-) strand; PAM type: NRG; PAM sequence: TGG
caagcgcccgccaccacatc

SEQ ID NO: 25207 - DNA, 20 bp, Artificial Sequence
  Description of Artificial Sequence: Synthetic oligonucleotide
  Target: ATXN2; (-) strand; PAM type: NRG; PAM sequence: AAG
ttctgagtagctgggactac

SEQ ID NO: 25208 - DNA, 20 bp, Artificial Sequence
  Description of Artificial Sequence: Synthetic oligonucleotide
  Target: ATXN2; (-) strand; PAM type: NRG; PAM sequence: GGG
cttcagccttctgagtagct

SEQ ID NO: 25209 - DNA, 20 bp, Artificial Sequence
  Description of Artificial Sequence: Synthetic oligonucleotide
  Target: ATXN2; (-) strand; PAM type: NRG; PAM sequence: TGG
gcttcagccttctgagtagc

SEQ ID NO: 25210 - DNA, 20 bp, Artificial Sequence
  Description of Artificial Sequence: Synthetic oligonucleotide
  Target: ATXN2; (-) strand; PAM type: NRG; PAM sequence: TAG
tcctgcttcagccttctgag

SEQ ID NO: 25211 - DNA, 20 bp, Artificial Sequence
  Description of Artificial Sequence: Synthetic oligonucleotide
  Target: ATXN2; (-) strand; PAM type: NRG; PAM sequence: GAG
ttctcctgcttcagccttct

SEQ ID NO: 25212 - DNA, 20 bp, Artificial Sequence
  Description of Artificial Sequence: Synthetic oligonucleotide
  Target: ATXN2; (-) strand; PAM type: NRG; PAM sequence: CAG
ttcaagcgattctcctgctt

SEQ ID NO: 25213 - DNA, 20 bp, Artificial Sequence
  Description of Artificial Sequence: Synthetic oligonucleotide
  Target: ATXN2; (-) strand; PAM type: NRG; PAM sequence: AAG
aacctctgccttccaggttc

SEQ ID NO: 25214 - DNA, 20 bp, Artificial Sequence
  Description of Artificial Sequence: Synthetic oligonucleotide
  Target: ATXN2; (-) strand; PAM type: NRG; PAM sequence: AGG
cactgaaacctctgccttcc

SEQ ID NO: 25215 - DNA, 20 bp, Artificial Sequence
  Description of Artificial Sequence: Synthetic oligonucleotide
  Target: ATXN2; (-) strand; PAM type: NRG; PAM sequence: CAG
tcactgaaacctctgccttc

SEQ ID NO: 25216 - DNA, 20 bp, Artificial Sequence
  Description of Artificial Sequence: Synthetic oligonucleotide
  Target: ATXN2; (-) strand; PAM type: NRG; PAM sequence: TGG
ggagtgcaatggcgtgatct

SEQ ID NO: 25217 - DNA, 20 bp, Artificial Sequence
  Description of Artificial Sequence: Synthetic oligonucleotide
  Target: ATXN2; (-) strand; PAM type: NRG; PAM sequence: TGG
ttgtccaggctggagtgcaa

SEQ ID NO: 25218 - DNA, 20 bp, Artificial Sequence
  Description of Artificial Sequence: Synthetic oligonucleotide
  Target: ATXN2; (-) strand; PAM type: NRG; PAM sequence: GAG
ttgctctgttgtccaggctg

SEQ ID NO: 25219 - DNA, 20 bp, Artificial Sequence
  Description of Artificial Sequence: Synthetic oligonucleotide
  Target: ATXN2; (-) strand; PAM type: NRG; PAM sequence: TGG
tcttgctctgttgtccaggc

SEQ ID NO: 25220 - DNA, 20 bp, Artificial Sequence
  Description of Artificial Sequence: Synthetic oligonucleotide
  Target: ATXN2; (-) strand; PAM type: NRG; PAM sequence: AGG
ggagtcttgctctgttgtcc

SEQ ID NO: 25221 - DNA, 20 bp, Artificial Sequence
  Description of Artificial Sequence: Synthetic oligonucleotide
  Target: ATXN2; (-) strand; PAM type: NRG; PAM sequence: CAG
cggagtcttgctctgttgtc

SEQ ID NO: 25222 - DNA, 20 bp, Artificial Sequence
  Description of Artificial Sequence: Synthetic oligonucleotide
  Target: ATXN2; (-) strand; PAM type: NRG; PAM sequence: GAG
aagaaactctttttgagacg

SEQ ID NO: 25223 - DNA, 20 bp, Artificial Sequence
  Description of Artificial Sequence: Synthetic oligonucleotide
  Target: ATXN2; (-) strand; PAM type: NRG; PAM sequence: CGG
ccaagaaactctttttgaga

SEQ ID NO: 25224 - DNA, 20 bp, Artificial Sequence
  Description of Artificial Sequence: Synthetic oligonucleotide
  Target: ATXN2; (-) strand; PAM type: NRG; PAM sequence: GAG
acacccaagaaactcttttt

SEQ ID NO: 25225 - DNA, 20 bp, Artificial Sequence
  Description of Artificial Sequence: Synthetic oligonucleotide
  Target: ATXN2; (-) strand; PAM type: NRG; PAM sequence: AAG
agatgtctgaaattacaccc

SEQ ID NO: 25226 - DNA, 20 bp, Artificial Sequence
  Description of Artificial Sequence: Synthetic oligonucleotide
  Target: ATXN2; (-) strand; PAM type: NRG; PAM sequence: AAG
ttcatattcttattgcctag

SEQ ID NO: 25227 - DNA, 20 bp, Artificial Sequence
  Description of Artificial Sequence: Synthetic oligonucleotide
  Target: ATXN2; (-) strand; PAM type: NRG; PAM sequence: TAG
ctgttcatattcttattgcc

SEQ ID NO: 25228 - DNA, 20 bp, Artificial Sequence
  Description of Artificial Sequence: Synthetic oligonucleotide
  Target: ATXN2; (-) strand; PAM type: NRG; PAM sequence: GAG
aatttttttttttttttaaa

SEQ ID NO: 25229 - DNA, 20 bp, Artificial Sequence
  Description of Artificial Sequence: Synthetic oligonucleotide
  Target: ATXN2; (-) strand; PAM type: NRG; PAM sequence: AAG
gaaattttttttttttttta

SEQ ID NO: 25230 - DNA, 20 bp, Artificial Sequence
  Description of Artificial Sequence: Synthetic oligonucleotide
  Target: ATXN2; (-) strand; PAM type: NRG; PAM sequence: TGG
ctggcatgagccaccgcacc

SEQ ID NO: 25231 - DNA, 20 bp, Artificial Sequence
  Description of Artificial Sequence: Synthetic oligonucleotide
  Target: ATXN2; (-) strand; PAM type: NRG; PAM sequence: GAG
agtgctgcgattactggcat

SEQ ID NO: 25232 - DNA, 20 bp, Artificial Sequence
  Description of Artificial Sequence: Synthetic oligonucleotide
  Target: ATXN2; (-) strand; PAM type: NRG; PAM sequence: TGG
tcccaaagtgctgcgattac

SEQ ID NO: 25233 - DNA, 20 bp, Artificial Sequence
  Description of Artificial Sequence: Synthetic oligonucleotide
  Target: ATXN2; (-) strand; PAM type: NRG; PAM sequence: AAG
ccacctgcctcagcctccca

SEQ ID NO: 25234 - DNA, 20 bp, Artificial Sequence
  Description of Artificial Sequence: Synthetic oligonucleotide
  Target: ATXN2; (-) strand; PAM type: NRG; PAM sequence: CAG
aactcgtgatccacctgcct

SEQ ID NO: 25235 - DNA, 20 bp, Artificial Sequence
  Description of Artificial Sequence: Synthetic oligonucleotide
  Target: ATXN2; (-) strand; PAM type: NRG; PAM sequence: TGG
tttcaccatgtttgtcaggc

SEQ ID NO: 25236 - DNA, 20 bp, Artificial Sequence
  Description of Artificial Sequence: Synthetic oligonucleotide
  Target: ATXN2; (-) strand; PAM type: NRG; PAM sequence: AGG
ggggtttcaccatgtttgtc

SEQ ID NO: 25237 - DNA, 20 bp, Artificial Sequence
  Description of Artificial Sequence: Synthetic oligonucleotide
  Target: ATXN2; (-) strand; PAM type: NRG; PAM sequence: CAG
aggggtttcaccatgtttgt

SEQ ID NO: 25238 - DNA, 20 bp, Artificial Sequence
  Description of Artificial Sequence: Synthetic oligonucleotide
  Target: ATXN2; (-) strand; PAM type: NRG; PAM sequence: GGG
ttgtgtttttagtagagaag

SEQ ID NO: 25239 - DNA, 20 bp, Artificial Sequence
  Description of Artificial Sequence: Synthetic oligonucleotide
  Target: ATXN2; (-) strand; PAM type: NRG; PAM sequence: GGG
tttgtgtttttagtagagaa

SEQ ID NO: 25240 - DNA, 20 bp, Artificial Sequence
  Description of Artificial Sequence: Synthetic oligonucleotide
  Target: ATXN2; (-) strand; PAM type: NRG; PAM sequence: AGG
ttttgtgtttttagtagaga

SEQ ID NO: 25241 - DNA, 20 bp, Artificial Sequence
  Description of Artificial Sequence: Synthetic oligonucleotide
  Target: ATXN2; (-) strand; PAM type: NRG; PAM sequence: AAG
tttttgtgtttttagtagag

SEQ ID NO: 25242 - DNA, 20 bp, Artificial Sequence
  Description of Artificial Sequence: Synthetic oligonucleotide
  Target: ATXN2; (-) strand; PAM type: NRG; PAM sequence: GAG
taatttttgtgtttttagta

SEQ ID NO: 25243 - DNA, 20 bp, Artificial Sequence
  Description of Artificial Sequence: Synthetic oligonucleotide
  Target: ATXN2; (-) strand; PAM type: NRG; PAM sequence: TAG
gctaatttttgtgtttttag

SEQ ID NO: 25244 - DNA, 20 bp, Artificial Sequence
  Description of Artificial Sequence: Synthetic oligonucleotide
  Target: ATXN2; (-) strand; PAM type: NRG; PAM sequence: TAG
ccagctaatttttgtgtttt

SEQ ID NO: 25245 - DNA, 20 bp, Artificial Sequence
  Description of Artificial Sequence: Synthetic oligonucleotide
  Target: ATXN2; (-) strand; PAM type: NRG; PAM sequence: CAG
tgagtagctgccaccatgcc

SEQ ID NO: 25246 - DNA, 20 bp, Artificial Sequence
  Description of Artificial Sequence: Synthetic oligonucleotide
  Target: ATXN2; (-) strand; PAM type: NRG; PAM sequence: TAG
tcctgcctcagcctcctgag

SEQ ID NO: 25247 - DNA, 20 bp, Artificial Sequence
  Description of Artificial Sequence: Synthetic oligonucleotide
  Target: ATXN2; (-) strand; PAM type: NRG; PAM sequence: GAG
ttctcctgcctcagcctcct

SEQ ID NO: 25248 - DNA, 20 bp, Artificial Sequence
  Description of Artificial Sequence: Synthetic oligonucleotide
  Target: ATXN2; (-) strand; PAM type: NRG; PAM sequence: CAG
ttcaagcgattctcctgcct

SEQ ID NO: 25249 - DNA, 20 bp, Artificial Sequence
  Description of Artificial Sequence: Synthetic oligonucleotide
  Target: ATXN2; (-) strand; PAM type: NRG; PAM sequence: AAG
aacctccgcctcccgggttc

SEQ ID NO: 25250 - DNA, 20 bp, Artificial Sequence
  Description of Artificial Sequence: Synthetic oligonucleotide
  Target: ATXN2; (-) strand; PAM type: NRG; PAM sequence: GGG
cactgcaacctccgcctccc

SEQ ID NO: 25251 - DNA, 20 bp, Artificial Sequence
  Description of Artificial Sequence: Synthetic oligonucleotide
  Target: ATXN2; (-) strand; PAM type: NRG; PAM sequence: CGG
acactgcaacctccgcctcc

SEQ ID NO: 25252 - DNA, 20 bp, Artificial Sequence
  Description of Artificial Sequence: Synthetic oligonucleotide
  Target: ATXN2; (-) strand; PAM type: NRG; PAM sequence: GAG
ttttttctttttttgagaca

SEQ ID NO: 25253 - DNA, 20 bp, Artificial Sequence
  Description of Artificial Sequence: Synthetic oligonucleotide
  Target: ATXN2; (-) strand; PAM type: NRG; PAM sequence: CAG
ttttttttctttttttgaga

SEQ ID NO: 25254 - DNA, 20 bp, Artificial Sequence
  Description of Artificial Sequence: Synthetic oligonucleotide
  Target: ATXN2; (-) strand; PAM type: NRG; PAM sequence: GAG
gcttttttttttcttttttt

SEQ ID NO: 25255 - DNA, 20 bp, Artificial Sequence
  Description of Artificial Sequence: Synthetic oligonucleotide
  Target: ATXN2; (-) strand; PAM type: NRG; PAM sequence: GGG
aaagcacattgcagaacact

SEQ ID NO: 25256 - DNA, 20 bp, Artificial Sequence
  Description of Artificial Sequence: Synthetic oligonucleotide
  Target: ATXN2; (-) strand; PAM type: NRG; PAM sequence: TGG
aaaagcacattgcagaacac

SEQ ID NO: 25257 - DNA, 20 bp, Artificial Sequence
  Description of Artificial Sequence: Synthetic oligonucleotide
  Target: ATXN2; (-) strand; PAM type: NRG; PAM sequence: CAG
ttaagagaaaaagcacattg

SEQ ID NO: 25258 - DNA, 20 bp, Artificial Sequence
  Description of Artificial Sequence: Synthetic oligonucleotide
  Target: ATXN2; (-) strand; PAM type: NRG; PAM sequence: AAG
ctaagatttattaagagaaa

SEQ ID NO: 25259 - DNA, 20 bp, Artificial Sequence
  Description of Artificial Sequence: Synthetic oligonucleotide
  Target: ATXN2; (-) strand; PAM type: NRG; PAM sequence: GAG
agatatctaagatttattaa

SEQ ID NO: 25260 - DNA, 20 bp, Artificial Sequence
  Description of Artificial Sequence: Synthetic oligonucleotide
  Target: ATXN2; (-) strand; PAM type: NRG; PAM sequence: AAG
aaagatatctaagatttatt

SEQ ID NO: 25261 - DNA, 20 bp, Artificial Sequence
  Description of Artificial Sequence: Synthetic oligonucleotide
  Target: ATXN2; (-) strand; PAM type: NRG; PAM sequence: AAG
tccaatatggaaagatatct

SEQ ID NO: 25262 - DNA, 20 bp, Artificial Sequence
  Description of Artificial Sequence: Synthetic oligonucleotide
  Target: ATXN2; (-) strand; PAM type: NRG; PAM sequence: AAG
gaatggtgttccaatatgga

SEQ ID NO: 25263 - DNA, 20 bp, Artificial Sequence
  Description of Artificial Sequence: Synthetic oligonucleotide
  Target: ATXN2; (-) strand; PAM type: NRG; PAM sequence: TGG
aaaagaatggtgttccaata

SEQ ID NO: 25264 - DNA, 20 bp, Artificial Sequence
  Description of Artificial Sequence: Synthetic oligonucleotide
  Target: ATXN2; (-) strand; PAM type: NRG; PAM sequence: TGG
tacatatctcccaaaaagaa

SEQ ID NO: 25265 - DNA, 20 bp, Artificial Sequence
  Description of Artificial Sequence: Synthetic oligonucleotide
  Target: ATXN2; (-) strand; PAM type: NRG; PAM sequence: AAG
aacactacatatctcccaaa

SEQ ID NO: 25266 - DNA, 20 bp, Artificial Sequence
  Description of Artificial Sequence: Synthetic oligonucleotide
  Target: ATXN2; (-) strand; PAM type: NRG; PAM sequence: TAG
tctatcaatatagcatgagt

SEQ ID NO: 25267 - DNA, 20 bp, Artificial Sequence
  Description of Artificial Sequence: Synthetic oligonucleotide
  Target: ATXN2; (-) strand; PAM type: NRG; PAM sequence: GAG
agtgtctatcaatatagcat

SEQ ID NO: 25268 - DNA, 20 bp, Artificial Sequence
  Description of Artificial Sequence: Synthetic oligonucleotide
  Target: ATXN2; (-) strand; PAM type: NRG; PAM sequence: TAG
atgctaagtgtctatcaata

SEQ ID NO: 25269 - DNA, 20 bp, Artificial Sequence
  Description of Artificial Sequence: Synthetic oligonucleotide
  Target: ATXN2; (-) strand; PAM type: NRG; PAM sequence: AAG
tgaaaaattggaaacatgct

SEQ ID NO: 25270 - DNA, 20 bp, Artificial Sequence
  Description of Artificial Sequence: Synthetic oligonucleotide
  Target: ATXN2; (-) strand; PAM type: NRG; PAM sequence: TGG
tatttctaatagtgaaaaat

SEQ ID NO: 25271 - DNA, 20 bp, Artificial Sequence
  Description of Artificial Sequence: Synthetic oligonucleotide
  Target: ATXN2; (-) strand; PAM type: NRG; PAM sequence: TAG
ggccatagcattatttctaa

SEQ ID NO: 25272 - DNA, 20 bp, Artificial Sequence
  Description of Artificial Sequence: Synthetic oligonucleotide
  Target: ATXN2; (-) strand; PAM type: NRG; PAM sequence: TAG
tgaaccaccatgcctggcca

SEQ ID NO: 25273 - DNA, 20 bp, Artificial Sequence
  Description of Artificial Sequence: Synthetic oligonucleotide
  Target: ATXN2; (-) strand; PAM type: NRG; PAM sequence: TGG
taggcgtgaaccaccatgcc

SEQ ID NO: 25274 - DNA, 20 bp, Artificial Sequence
  Description of Artificial Sequence: Synthetic oligonucleotide
  Target: ATXN2; (-) strand; PAM type: NRG; PAM sequence: AGG
tcccaaagtgctgagattat

SEQ ID NO: 25275 - DNA, 20 bp, Artificial Sequence
  Description of Artificial Sequence: Synthetic oligonucleotide
  Target: ATXN2; (-) strand; PAM type: NRG; PAM sequence: TAG
ctcccaaagtgctgagatta

SEQ ID NO: 25276 - DNA, 20 bp, Artificial Sequence
  Description of Artificial Sequence: Synthetic oligonucleotide
  Target: ATXN2; (-) strand; PAM type: NRG; PAM sequence: GAG
cctcggcctcccaaagtgct

SEQ ID NO: 25277 - DNA, 20 bp, Artificial Sequence
  Description of Artificial Sequence: Synthetic oligonucleotide
  Target: ATXN2; (-) strand; PAM type: NRG; PAM sequence: AAG
ctgcccacctcggcctccca

SEQ ID NO: 25278 - DNA, 20 bp, Artificial Sequence
  Description of Artificial Sequence: Synthetic oligonucleotide
  Target: ATXN2; (-) strand; PAM type: NRG; PAM sequence: CGG
ctcaggtgatctgcccacct

SEQ ID NO: 25279 - DNA, 20 bp, Artificial Sequence
  Description of Artificial Sequence: Synthetic oligonucleotide
  Target: ATXN2; (-) strand; PAM type: NRG; PAM sequence: AGG
ggtcttgaactcctgacctc

SEQ ID NO: 25280 - DNA, 20 bp, Artificial Sequence
  Description of Artificial Sequence: Synthetic oligonucleotide
  Target: ATXN2; (-) strand; PAM type: NRG; PAM sequence: CAG
tggtcttgaactcctgacct

SEQ ID NO: 25281 - DNA, 20 bp, Artificial Sequence
  Description of Artificial Sequence: Synthetic oligonucleotide
  Target: ATXN2; (-) strand; PAM type: NRG; PAM sequence: TGG
tcaccatatgttggccaggc

SEQ ID NO: 25282 - DNA, 20 bp, Artificial Sequence
  Description of Artificial Sequence: Synthetic oligonucleotide
  Target: ATXN2; (-) strand; PAM type: NRG; PAM sequence: AGG
ggtttcaccatatgttggcc

SEQ ID NO: 25283 - DNA, 20 bp, Artificial Sequence
  Description of Artificial Sequence: Synthetic oligonucleotide
  Target: ATXN2; (-) strand; PAM type: NRG; PAM sequence: CAG
gggtttcaccatatgttggc

SEQ ID NO: 25284 - DNA, 20 bp, Artificial Sequence
  Description of Artificial Sequence: Synthetic oligonucleotide
  Target: ATXN2; (-) strand; PAM type: NRG; PAM sequence: TGG
gacggggtttcaccatatgt

SEQ ID NO: 25285 - DNA, 20 bp, Artificial Sequence
  Description of Artificial Sequence: Synthetic oligonucleotide
  Target: ATXN2; (-) strand; PAM type: NRG; PAM sequence: GGG
ttgtatttttagtagagacg

SEQ ID NO: 25286 - DNA, 20 bp, Artificial Sequence
  Description of Artificial Sequence: Synthetic oligonucleotide
  Target: ATXN2; (-) strand; PAM type: NRG; PAM sequence: GGG
tttgtatttttagtagagac

SEQ ID NO: 25287 - DNA, 20 bp, Artificial Sequence
  Description of Artificial Sequence: Synthetic oligonucleotide
  Target: ATXN2; (-) strand; PAM type: NRG; PAM sequence: CGG
ttttgtatttttagtagaga

SEQ ID NO: 25288 - DNA, 20 bp, Artificial Sequence
  Description of Artificial Sequence: Synthetic oligonucleotide
  Target: ATXN2; (-) strand; PAM type: NRG; PAM sequence: GAG
taatttttgtatttttagta

SEQ ID NO: 25289 - DNA, 20 bp, Artificial Sequence
  Description of Artificial Sequence: Synthetic oligonucleotide
  Target: ATXN2; (-) strand; PAM type: NRG; PAM sequence: TAG
gctaatttttgtatttttag

SEQ ID NO: 25290 - DNA, 20 bp, Artificial Sequence
  Description of Artificial Sequence: Synthetic oligonucleotide
  Target: ATXN2; (-) strand; PAM type: NRG; PAM sequence: TAG
ccagctaatttttgtatttt

SEQ ID NO: 25291 - DNA, 20 bp, Artificial Sequence
  Description of Artificial Sequence: Synthetic oligonucleotide
  Target: ATXN2; (-) strand; PAM type: NRG; PAM sequence: CAG
taggcgtgcgccaccacacc

SEQ ID NO: 25292 - DNA, 20 bp, Artificial Sequence
  Description of Artificial Sequence: Synthetic oligonucleotide
  Target: ATXN2; (-) strand; PAM type: NRG; PAM sequence: AGG
ttccaagcagctgggactat

SEQ ID NO: 25293 - DNA, 20 bp, Artificial Sequence
  Description of Artificial Sequence: Synthetic oligonucleotide
  Target: ATXN2; (-) strand; PAM type: NRG; PAM sequence: TAG
tttccaagcagctgggacta

SEQ ID NO: 25294 - DNA, 20 bp, Artificial Sequence
  Description of Artificial Sequence: Synthetic oligonucleotide
  Target: ATXN2; (-) strand; PAM type: NRG; PAM sequence: GGG
cctcagctttccaagcagct

SEQ ID NO: 25295 - DNA, 20 bp, Artificial Sequence
  Description of Artificial Sequence: Synthetic oligonucleotide
  Target: ATXN2; (-) strand; PAM type: NRG; PAM sequence: TGG
gcctcagctttccaagcagc

SEQ ID NO: 25296 - DNA, 20 bp, Artificial Sequence
  Description of Artificial Sequence: Synthetic oligonucleotide
  Target: ATXN2; (-) strand; PAM type: NRG; PAM sequence: CAG
tactgcctcagctttccaag

SEQ ID NO: 25297 - DNA, 20 bp, Artificial Sequence
  Description of Artificial Sequence: Synthetic oligonucleotide
  Target: ATXN2; (-) strand; PAM type: NRG; PAM sequence: AAG
ttctactgcctcagctttcc

SEQ ID NO: 25298 - DNA, 20 bp, Artificial Sequence
  Description of Artificial Sequence: Synthetic oligonucleotide
  Target: ATXN2; (-) strand; PAM type: NRG; PAM sequence: CAG
ttcaagtgattctactgcct

SEQ ID NO: 25299 - DNA, 20 bp, Artificial Sequence
  Description of Artificial Sequence: Synthetic oligonucleotide
  Target: ATXN2; (-) strand; PAM type: NRG; PAM sequence: AAG
aacctccacctcctgggttc

SEQ ID NO: 25300 - DNA, 20 bp, Artificial Sequence
  Description of Artificial Sequence: Synthetic oligonucleotide
  Target: ATXN2; (-) strand; PAM type: NRG; PAM sequence: GGG
ccctgtaacctccacctcct

SEQ ID NO: 25301 - DNA, 20 bp, Artificial Sequence
  Description of Artificial Sequence: Synthetic oligonucleotide
  Target: ATXN2; (-) strand; PAM type: NRG; PAM sequence: TGG
tccctgtaacctccacctcc

SEQ ID NO: 25302 - DNA, 20 bp, Artificial Sequence
  Description of Artificial Sequence: Synthetic oligonucleotide
  Target: ATXN2; (-) strand; PAM type: NRG; PAM sequence: CGG
ggagtgcagtggtgcgatct

SEQ ID NO: 25303 - DNA, 20 bp, Artificial Sequence
  Description of Artificial Sequence: Synthetic oligonucleotide
  Target: ATXN2; (-) strand; PAM type: NRG; PAM sequence: TGG
tcacccagactggagtgcag

SEQ ID NO: 25304 - DNA, 20 bp, Artificial Sequence
  Description of Artificial Sequence: Synthetic oligonucleotide
  Target: ATXN2; (-) strand; PAM type: NRG; PAM sequence: CAG
ctgtcacccagactggagtg

SEQ ID NO: 25305 - DNA, 20 bp, Artificial Sequence
  Description of Artificial Sequence: Synthetic oligonucleotide
  Target: ATXN2; (-) strand; PAM type: NRG; PAM sequence: GAG
tcactctgtcacccagactg

SEQ ID NO: 25306 - DNA, 20 bp, Artificial Sequence
  Description of Artificial Sequence: Synthetic oligonucleotide
  Target: ATXN2; (-) strand; PAM type: NRG; PAM sequence: TGG
tctcactctgtcacccagac

SEQ ID NO: 25307 - DNA, 20 bp, Artificial Sequence
  Description of Artificial Sequence: Synthetic oligonucleotide
  Target: ATXN2; (-) strand; PAM type: NRG; PAM sequence: CAG
tggagtctcactctgtcacc

SEQ ID NO: 25308 - DNA, 20 bp, Artificial Sequence
  Description of Artificial Sequence: Synthetic oligonucleotide
  Target: ATXN2; (-) strand; PAM type: NRG; PAM sequence: GAG
tgctgttgttttgagagatg

SEQ ID NO: 25309 - DNA, 20 bp, Artificial Sequence
  Description of Artificial Sequence: Synthetic oligonucleotide
  Target: ATXN2; (-) strand; PAM type: NRG; PAM sequence: TGG
gttgctgttgttttgagaga

SEQ ID NO: 25310 - DNA, 20 bp, Artificial Sequence
  Description of Artificial Sequence: Synthetic oligonucleotide
  Target: ATXN2; (-) strand; PAM type: NRG; PAM sequence: GAG
tgttgttgctgttgttttga

SEQ ID NO: 25311 - DNA, 20 bp, Artificial Sequence
  Description of Artificial Sequence: Synthetic oligonucleotide
  Target: ATXN2; (-) strand; PAM type: NRG; PAM sequence: GAG
gttgttgttgctgttgtttt

SEQ ID NO: 25312 - DNA, 20 bp, Artificial Sequence
  Description of Artificial Sequence: Synthetic oligonucleotide
  Target: ATXN2; (-) strand; PAM type: NRG; PAM sequence: CAG
accaggattttttttttttt

SEQ ID NO: 25313 - DNA, 20 bp, Artificial Sequence
  Description of Artificial Sequence: Synthetic oligonucleotide
  Target: ATXN2; (-) strand; PAM type: NRG; PAM sequence: AGG
gtgagccatcatgcctgacc

SEQ ID NO: 25314 - DNA, 20 bp, Artificial Sequence
  Description of Artificial Sequence: Synthetic oligonucleotide
  Target: ATXN2; (-) strand; PAM type: NRG; PAM sequence: CAG
tgtgagccatcatgcctgac

SEQ ID NO: 25315 - DNA, 20 bp, Artificial Sequence
  Description of Artificial Sequence: Synthetic oligonucleotide
  Target: ATXN2; (-) strand; PAM type: NRG; PAM sequence: GAG
agtgctgggattacaggtgt

SEQ ID NO: 25316 - DNA, 20 bp, Artificial Sequence
  Description of Artificial Sequence: Synthetic oligonucleotide
  Target: ATXN2; (-) strand; PAM type: NRG; PAM sequence: AGG
tcccaaagtgctgggattac

SEQ ID NO: 25317 - DNA, 20 bp, Artificial Sequence
  Description of Artificial Sequence: Synthetic oligonucleotide
  Target: ATXN2; (-) strand; PAM type: NRG; PAM sequence: CAG
ctcccaaagtgctgggatta

SEQ ID NO: 25318 - DNA, 20 bp, Artificial Sequence
  Description of Artificial Sequence: Synthetic oligonucleotide
  Target: ATXN2; (-) strand; PAM type: NRG; PAM sequence: GGG
cctcagcctcccaaagtgct

SEQ ID NO: 25319 - DNA, 20 bp, Artificial Sequence
  Description of Artificial Sequence: Synthetic oligonucleotide
  Target: ATXN2; (-) strand; PAM type: NRG; PAM sequence: TGG
acctcagcctcccaaagtgc

SEQ ID NO: 25320 - DNA, 20 bp, Artificial Sequence
  Description of Artificial Sequence: Synthetic oligonucleotide
  Target: ATXN2; (-) strand; PAM type: NRG; PAM sequence: AAG
ccacccacctcagcctccca

SEQ ID NO: 25321 - DNA, 20 bp, Artificial Sequence
  Description of Artificial Sequence: Synthetic oligonucleotide
  Target: ATXN2; (-) strand; PAM type: NRG; PAM sequence: CAG
ctcaggtaatccacccacct

SEQ ID NO: 25322 - DNA, 20 bp, Artificial Sequence
  Description of Artificial Sequence: Synthetic oligonucleotide
  Target: ATXN2; (-) strand; PAM type: NRG; PAM sequence: AGG
gatctggaactcctgagctc

SEQ ID NO: 25323 - DNA, 20 bp, Artificial Sequence
  Description of Artificial Sequence: Synthetic oligonucleotide
  Target: ATXN2; (-) strand; PAM type: NRG; PAM sequence: CAG
tgatctggaactcctgagct

SEQ ID NO: 25324 - DNA, 20 bp, Artificial Sequence
  Description of Artificial Sequence: Synthetic oligonucleotide
  Target: ATXN2; (-) strand; PAM type: NRG; PAM sequence: GAG
cagggtgatctggaactcct

SEQ ID NO: 25325 - DNA, 20 bp, Artificial Sequence
  Description of Artificial Sequence: Synthetic oligonucleotide
  Target: ATXN2; (-) strand; PAM type: NRG; PAM sequence: TGG
ccatgttgcccagggtgatc

SEQ ID NO: 25326 - DNA, 20 bp, Artificial Sequence
  Description of Artificial Sequence: Synthetic oligonucleotide
  Target: ATXN2; (-) strand; PAM type: NRG; PAM sequence: GGG
gggttttaccatgttgccca

SEQ ID NO: 25327 - DNA, 20 bp, Artificial Sequence
  Description of Artificial Sequence: Synthetic oligonucleotide
  Target: ATXN2; (-) strand; PAM type: NRG; PAM sequence: AGG
agggttttaccatgttgccc

SEQ ID NO: 25328 - DNA, 20 bp, Artificial Sequence
  Description of Artificial Sequence: Synthetic oligonucleotide
  Target: ATXN2; (-) strand; PAM type: NRG; PAM sequence: CAG
cagggttttaccatgttgcc

SEQ ID NO: 25329 - DNA, 20 bp, Artificial Sequence
  Description of Artificial Sequence: Synthetic oligonucleotide
  Target: ATXN2; (-) strand; PAM type: NRG; PAM sequence: GGG
tttctttttctgcagagaca

SEQ ID NO: 25330 - DNA, 20 bp, Artificial Sequence
  Description of Artificial Sequence: Synthetic oligonucleotide
  Target: ATXN2; (-) strand; PAM type: NRG; PAM sequence: AGG
ttttctttttctgcagagac

SEQ ID NO: 25331 - DNA, 20 bp, Artificial Sequence
  Description of Artificial Sequence: Synthetic oligonucleotide
  Target: ATXN2; (-) strand; PAM type: NRG; PAM sequence: CAG
tttttctttttctgcagaga

SEQ ID NO: 25332 - DNA, 20 bp, Artificial Sequence
  Description of Artificial Sequence: Synthetic oligonucleotide
  Target: ATXN2; (-) strand; PAM type: NRG; PAM sequence: GAG
tttttttttctttttctgca

SEQ ID NO: 25333 - DNA, 20 bp, Artificial Sequence
  Description of Artificial Sequence: Synthetic oligonucleotide
  Target: ATXN2; (-) strand; PAM type: NRG; PAM sequence: CAG
tttttttttttctttttctg

SEQ ID NO: 25334 - DNA, 20 bp, Artificial Sequence
  Description of Artificial Sequence: Synthetic oligonucleotide
  Target: ATXN2; (-) strand; PAM type: NRG; PAM sequence: AAG
catgcaaataattatatgtg

SEQ ID NO: 25335 - DNA, 20 bp, Artificial Sequence
  Description of Artificial Sequence: Synthetic oligonucleotide
  Target: ATXN2; (-) strand; PAM type: NRG; PAM sequence: AAG
ttttgccctcatatatccat

SEQ ID NO: 25336 - DNA, 20 bp, Artificial Sequence
  Description of Artificial Sequence: Synthetic oligonucleotide
  Target: ATXN2; (-) strand; PAM type: NRG; PAM sequence: TAG
tgttccagcagttctatctc

SEQ ID NO: 25337 - DNA, 20 bp, Artificial Sequence
  Description of Artificial Sequence: Synthetic oligonucleotide
  Target: ATXN2; (-) strand; PAM type: NRG; PAM sequence: CAG
gcacatacactttgttccag

SEQ ID NO: 25338 - DNA, 20 bp, Artificial Sequence
  Description of Artificial Sequence: Synthetic oligonucleotide
  Target: ATXN2; (-) strand; PAM type: NRG; PAM sequence: CAG
aatgcacatacactttgttc

SEQ ID NO: 25339 - DNA, 20 bp, Artificial Sequence
  Description of Artificial Sequence: Synthetic oligonucleotide
  Target: ATXN2; (-) strand; PAM type: NRG; PAM sequence: TGG
gagtctttctggagagaatc

SEQ ID NO: 25340 - DNA, 20 bp, Artificial Sequence
  Description of Artificial Sequence: Synthetic oligonucleotide
  Target: ATXN2; (-) strand; PAM type: NRG; PAM sequence: GAG
attgatagagtctttctgga

SEQ ID NO: 25341 - DNA, 20 bp, Artificial Sequence
  Description of Artificial Sequence: Synthetic oligonucleotide
  Target: ATXN2; (-) strand; PAM type: NRG; PAM sequence: GAG
aaattgatagagtctttctg

SEQ ID NO: 25342 - DNA, 20 bp, Artificial Sequence
  Description of Artificial Sequence: Synthetic oligonucleotide
  Target: ATXN2; (-) strand; PAM type: NRG; PAM sequence: TGG
ataaattgatagagtctttc

SEQ ID NO: 25343 - DNA, 20 bp, Artificial Sequence
  Description of Artificial Sequence: Synthetic oligonucleotide
  Target: ATXN2; (-) strand; PAM type: NRG; PAM sequence: GAG
gtgaggtggataaattgata

SEQ ID NO: 25344 - DNA, 20 bp, Artificial Sequence
  Description of Artificial Sequence: Synthetic oligonucleotide
  Target: ATXN2; (-) strand; PAM type: NRG; PAM sequence: TAG
tggtgaggtggataaattga

SEQ ID NO: 25345 - DNA, 20 bp, Artificial Sequence
  Description of Artificial Sequence: Synthetic oligonucleotide
  Target: ATXN2; (-) strand; PAM type: NRG; PAM sequence: TGG
cttttacactattggtgagg

SEQ ID NO: 25346 - DNA, 20 bp, Artificial Sequence
  Description of Artificial Sequence: Synthetic oligonucleotide
  Target: ATXN2; (-) strand; PAM type: NRG; PAM sequence: AGG
cttcttttacactattggtg

SEQ ID NO: 25347 - DNA, 20 bp, Artificial Sequence
  Description of Artificial Sequence: Synthetic oligonucleotide
  Target: ATXN2; (-) strand; PAM type: NRG; PAM sequence: GAG
acttcttttacactattggt

SEQ ID NO: 25348 - DNA, 20 bp, Artificial Sequence
  Description of Artificial Sequence: Synthetic oligonucleotide
  Target: ATXN2; (-) strand; PAM type: NRG; PAM sequence: TGG
agagacttcttttacactat

SEQ ID NO: 25349 - DNA, 20 bp, Artificial Sequence
  Description of Artificial Sequence: Synthetic oligonucleotide
  Target: ATXN2; (-) strand; PAM type: NRG; PAM sequence: GAG
atgaaaaatatgaggaaaca

SEQ ID NO: 25350 - DNA, 20 bp, Artificial Sequence
  Description of Artificial Sequence: Synthetic oligonucleotide
  Target: ATXN2; (-) strand; PAM type: NRG; PAM sequence: CAG
gtatgaaaaatatgaggaaa

SEQ ID NO: 25351 - DNA, 20 bp, Artificial Sequence
  Description of Artificial Sequence: Synthetic oligonucleotide
  Target: ATXN2; (-) strand; PAM type: NRG; PAM sequence: AGG
tcacctgtatgaaaaatatg

SEQ ID NO: 25352 - DNA, 20 bp, Artificial Sequence
  Description of Artificial Sequence: Synthetic oligonucleotide
  Target: ATXN2; (-) strand; PAM type: NRG; PAM sequence: GAG
gtcacctgtatgaaaaatat

SEQ ID NO: 25353 - DNA, 20 bp, Artificial Sequence
  Description of Artificial Sequence: Synthetic oligonucleotide
  Target: ATXN2; (-) strand; PAM type: NRG; PAM sequence: AAG
aacctaatataatggttctc

SEQ ID NO: 25354 - DNA, 20 bp, Artificial Sequence
  Description of Artificial Sequence: Synthetic oligonucleotide
  Target: ATXN2; (-) strand; PAM type: NRG; PAM sequence: TGG
tcatatataacctaatataa

SEQ ID NO: 25355 - DNA, 20 bp, Artificial Sequence
  Description of Artificial Sequence: Synthetic oligonucleotide
  Target: ATXN2; (-) strand; PAM type: NRG; PAM sequence: AGG
taataaaactggacatacac

SEQ ID NO: 25356 - DNA, 20 bp, Artificial Sequence
  Description of Artificial Sequence: Synthetic oligonucleotide
  Target: ATXN2; (-) strand; PAM type: NRG; PAM sequence: CAG
gtaataaaactggacataca

SEQ ID NO: 25357 - DNA, 20 bp, Artificial Sequence
  Description of Artificial Sequence: Synthetic oligonucleotide
  Target: ATXN2; (-) strand; PAM type: NRG; PAM sequence: TGG
ctaaagtctagtaataaaac

SEQ ID NO: 25358 - DNA, 20 bp, Artificial Sequence
  Description of Artificial Sequence: Synthetic oligonucleotide
  Target: ATXN2; (-) strand; PAM type: NRG; PAM sequence: TAG
tcctactttgacctaaagtc

SEQ ID NO: 25359 - DNA, 20 bp, Artificial Sequence
  Description of Artificial Sequence: Synthetic oligonucleotide
  Target: ATXN2; (-) strand; PAM type: NRG; PAM sequence: AAG
aaatgtcctactttgaccta

SEQ ID NO: 25360 - DNA, 20 bp, Artificial Sequence
  Description of Artificial Sequence: Synthetic oligonucleotide
  Target: ATXN2; (-) strand; PAM type: NRG; PAM sequence: AAG
gacactcttcctcagacagg

SEQ ID NO: 25361 - DNA, 20 bp, Artificial Sequence
  Description of Artificial Sequence: Synthetic oligonucleotide
  Target: ATXN2; (-) strand; PAM type: NRG; PAM sequence: AGG
aatgacactcttcctcagac

SEQ ID NO: 25362 - DNA, 20 bp, Artificial Sequence
  Description of Artificial Sequence: Synthetic oligonucleotide
  Target: ATXN2; (-) strand; PAM type: NRG; PAM sequence: CAG
taatgacactcttcctcaga

SEQ ID NO: 25363 - DNA, 20 bp, Artificial Sequence
  Description of Artificial Sequence: Synthetic oligonucleotide
  Target: ATXN2; (-) strand; PAM type: NRG; PAM sequence: CAG
ttaataatgacactcttcct

SEQ ID NO: 25364 - DNA, 20 bp, Artificial Sequence
  Description of Artificial Sequence: Synthetic oligonucleotide
  Target: ATXN2; (-) strand; PAM type: NRG; PAM sequence: CAG
gtttgatgtttaaggcataa

SEQ ID NO: 25365 - DNA, 20 bp, Artificial Sequence
  Description of Artificial Sequence: Synthetic oligonucleotide
  Target: ATXN2; (-) strand; PAM type: NRG; PAM sequence: AGG
atatctgtgtttgatgttta

SEQ ID NO: 25366 - DNA, 20 bp, Artificial Sequence
  Description of Artificial Sequence: Synthetic oligonucleotide
  Target: ATXN2; (-) strand; PAM type: NRG; PAM sequence: AAG
catatctgtgtttgatgttt

SEQ ID NO: 25367 - DNA, 20 bp, Artificial Sequence
  Description of Artificial Sequence: Synthetic oligonucleotide
  Target: ATXN2; (-) strand; PAM type: NRG; PAM sequence: GAG
aatcttccattgagtagaaa

SEQ ID NO: 25368 - DNA, 20 bp, Artificial Sequence
  Description of Artificial Sequence: Synthetic oligonucleotide
  Target: ATXN2; (-) strand; PAM type: NRG; PAM sequence: AAG
agaatcttccattgagtaga

SEQ ID NO: 25369 - DNA, 20 bp, Artificial Sequence
  Description of Artificial Sequence: Synthetic oligonucleotide
  Target: ATXN2; (-) strand; PAM type: NRG; PAM sequence: TAG
atgaagaatcttccattgag

SEQ ID NO: 25370 - DNA, 20 bp, Artificial Sequence
  Description of Artificial Sequence: Synthetic oligonucleotide
  Target: ATXN2; (-) strand; PAM type: NRG; PAM sequence: GAG
agaatgaagaatcttccatt

SEQ ID NO: 25371 - DNA, 20 bp, Artificial Sequence
  Description of Artificial Sequence: Synthetic oligonucleotide
  Target: ATXN2; (-) strand; PAM type: NRG; PAM sequence: AAG
accaatatttgagtagaatg

SEQ ID NO: 25372 - DNA, 20 bp, Artificial Sequence
  Description of Artificial Sequence: Synthetic oligonucleotide
  Target: ATXN2; (-) strand; PAM type: NRG; PAM sequence: TAG
ttatggtaccaatatttgag

SEQ ID NO: 25373 - DNA, 20 bp, Artificial Sequence
  Description of Artificial Sequence: Synthetic oligonucleotide
  Target: ATXN2; (-) strand; PAM type: NRG; PAM sequence: GAG
gtgttatggtaccaatattt

SEQ ID NO: 25374 - DNA, 20 bp, Artificial Sequence
  Description of Artificial Sequence: Synthetic oligonucleotide
  Target: ATXN2; (-) strand; PAM type: NRG; PAM sequence: TGG
cttgccaaaaatgagtgtta

SEQ ID NO: 25375 - DNA, 20 bp, Artificial Sequence
  Description of Artificial Sequence: Synthetic oligonucleotide
  Target: ATXN2; (-) strand; PAM type: NRG; PAM sequence: GAG
caaagtgtcttgccaaaaat

SEQ ID NO: 25376 - DNA, 20 bp, Artificial Sequence
  Description of Artificial Sequence: Synthetic oligonucleotide
  Target: ATXN2; (-) strand; PAM type: NRG; PAM sequence: AAG
gagcatagagatataaagca

SEQ ID NO: 25377 - DNA, 20 bp, Artificial Sequence
  Description of Artificial Sequence: Synthetic oligonucleotide
  Target: ATXN2; (-) strand; PAM type: NRG; PAM sequence: AAG
atagagagcatagagatata

SEQ ID NO: 25378 - DNA, 20 bp, Artificial Sequence
  Description of Artificial Sequence: Synthetic oligonucleotide
  Target: ATXN2; (-) strand; PAM type: NRG; PAM sequence: GAG
tctttaggatagagagcata

SEQ ID NO: 25379 - DNA, 20 bp, Artificial Sequence
  Description of Artificial Sequence: Synthetic oligonucleotide
  Target: ATXN2; (-) strand; PAM type: NRG; PAM sequence: TAG
tgtctttaggatagagagca

SEQ ID NO: 25380 - DNA, 20 bp, Artificial Sequence
  Description of Artificial Sequence: Synthetic oligonucleotide
  Target: ATXN2; (-) strand; PAM type: NRG; PAM sequence: GAG
gactctgtctttaggataga

SEQ ID NO: 25381 - DNA, 20 bp, Artificial Sequence
  Description of Artificial Sequence: Synthetic oligonucleotide
  Target: ATXN2; (-) strand; PAM type: NRG; PAM sequence: GAG
aagactctgtctttaggata

SEQ ID NO: 25382 - DNA, 20 bp, Artificial Sequence
  Description of Artificial Sequence: Synthetic oligonucleotide
  Target: ATXN2; (-) strand; PAM type: NRG; PAM sequence: TAG
taaagactctgtctttagga

SEQ ID NO: 25383 - DNA, 20 bp, Artificial Sequence
  Description of Artificial Sequence: Synthetic oligonucleotide
  Target: ATXN2; (-) strand; PAM type: NRG; PAM sequence: AGG
ttaataaagactctgtcttt

SEQ ID NO: 25384 - DNA, 20 bp, Artificial Sequence
  Description of Artificial Sequence: Synthetic oligonucleotide
  Target: ATXN2; (-) strand; PAM type: NRG; PAM sequence: TAG
cttaataaagactctgtctt

SEQ ID NO: 25385 - DNA, 20 bp, Artificial Sequence
  Description of Artificial Sequence: Synthetic oligonucleotide
  Target: ATXN2; (-) strand; PAM type: NRG; PAM sequence: AAG
ataaaaacaaatacttaata

SEQ ID NO: 25386 - DNA, 20 bp, Artificial Sequence
  Description of Artificial Sequence: Synthetic oligonucleotide
  Target: ATXN2; (-) strand; PAM type: NRG; PAM sequence: AAG
cataaggagaccccttctct

SEQ ID NO: 25387 - DNA, 20 bp, Artificial Sequence
  Description of Artificial Sequence: Synthetic oligonucleotide
  Target: ATXN2; (-) strand; PAM type: NRG; PAM sequence: GAG
tccagcctgaatgacataag

SEQ ID NO: 25388 - DNA, 20 bp, Artificial Sequence
  Description of Artificial Sequence: Synthetic oligonucleotide
  Target: ATXN2; (-) strand; PAM type: NRG; PAM sequence: AGG
agtccagcctgaatgacata

SEQ ID NO: 25389 - DNA, 20 bp, Artificial Sequence
  Description of Artificial Sequence: Synthetic oligonucleotide
  Target: ATXN2; (-) strand; PAM type: NRG; PAM sequence: AAG
gagtccagcctgaatgacat

SEQ ID NO: 25390 - DNA, 20 bp, Artificial Sequence
  Description of Artificial Sequence: Synthetic oligonucleotide
  Target: ATXN2; (-) strand; PAM type: NRG; PAM sequence: CAG
tgagcccaggagttggagtc

SEQ ID NO: 25391 - DNA, 20 bp, Artificial Sequence
  Description of Artificial Sequence: Synthetic oligonucleotide
  Target: ATXN2; (-) strand; PAM type: NRG; PAM sequence: GAG
tcacttgagcccaggagttg

SEQ ID NO: 25392 - DNA, 20 bp, Artificial Sequence
  Description of Artificial Sequence: Synthetic oligonucleotide
  Target: ATXN2; (-) strand; PAM type: NRG; PAM sequence: TGG
gatcacttgagcccaggagt

SEQ ID NO: 25393 - DNA, 20 bp, Artificial Sequence
  Description of Artificial Sequence: Synthetic oligonucleotide
  Target: ATXN2; (-) strand; PAM type: NRG; PAM sequence: GAG
ggaggatcacttgagcccag

SEQ ID NO: 25394 - DNA, 20 bp, Artificial Sequence
  Description of Artificial Sequence: Synthetic oligonucleotide
  Target: ATXN2; (-) strand; PAM type: NRG; PAM sequence: AGG
caggaggatcacttgagccc

SEQ ID NO: 25395 - DNA, 20 bp, Artificial Sequence
  Description of Artificial Sequence: Synthetic oligonucleotide
  Target: ATXN2; (-) strand; PAM type: NRG; PAM sequence: CAG
gcaggaggatcacttgagcc

SEQ ID NO: 25396 - DNA, 20 bp, Artificial Sequence
  Description of Artificial Sequence: Synthetic oligonucleotide
  Target: ATXN2; (-) strand; PAM type: NRG; PAM sequence: GAG
ctgaagcaggaggatcactt

SEQ ID NO: 25397 - DNA, 20 bp, Artificial Sequence
  Description of Artificial Sequence: Synthetic oligonucleotide
  Target: ATXN2; (-) strand; PAM type: NRG; PAM sequence: AGG
acttgggaggctgaagcagg

SEQ ID NO: 25398 - DNA, 20 bp, Artificial Sequence
  Description of Artificial Sequence: Synthetic oligonucleotide
  Target: ATXN2; (-) strand; PAM type: NRG; PAM sequence: GAG
tacttgggaggctgaagcag

SEQ ID NO: 25399 - DNA, 20 bp, Artificial Sequence
  Description of Artificial Sequence: Synthetic oligonucleotide
  Target: ATXN2; (-) strand; PAM type: NRG; PAM sequence: AGG
gctacttgggaggctgaagc

SEQ ID NO: 25400 - DNA, 20 bp, Artificial Sequence
  Description of Artificial Sequence: Synthetic oligonucleotide
  Target: ATXN2; (-) strand; PAM type: NRG; PAM sequence: CAG
agctacttgggaggctgaag

SEQ ID NO: 25401 - DNA, 20 bp, Artificial Sequence
  Description of Artificial Sequence: Synthetic oligonucleotide
  Target: ATXN2; (-) strand; PAM type: NRG; PAM sequence: AAG
cccagctacttgggaggctg

SEQ ID NO: 25402 - DNA, 20 bp, Artificial Sequence
  Description of Artificial Sequence: Synthetic oligonucleotide
  Target: ATXN2; (-) strand; PAM type: NRG; PAM sequence: AGG
tgcagtcccagctacttggg

SEQ ID NO: 25403 - DNA, 20 bp, Artificial Sequence
  Description of Artificial Sequence: Synthetic oligonucleotide
  Target: ATXN2; (-) strand; PAM type: NRG; PAM sequence: GAG
ctgcagtcccagctacttgg

SEQ ID NO: 25404 - DNA, 20 bp, Artificial Sequence
  Description of Artificial Sequence: Synthetic oligonucleotide
  Target: ATXN2; (-) strand; PAM type: NRG; PAM sequence: GGG
gcctgcagtcccagctactt

SEQ ID NO: 25405 - DNA, 20 bp, Artificial Sequence
  Description of Artificial Sequence: Synthetic oligonucleotide
  Target: ATXN2; (-) strand; PAM type: NRG; PAM sequence: TGG
tgcctgcagtcccagctact

SEQ ID NO: 25406 - DNA, 20 bp, Artificial Sequence
  Description of Artificial Sequence: Synthetic oligonucleotide
  Target: ATXN2; (-) strand; PAM type: NRG; PAM sequence: CAG
ctggcacatgcctgcagtcc

SEQ ID NO: 25407 - DNA, 20 bp, Artificial Sequence
  Description of Artificial Sequence: Synthetic oligonucleotide
  Target: ATXN2; (-) strand; PAM type: NRG; PAM sequence: CAG
ggtatgctggcacatgcctg

SEQ ID NO: 25408 - DNA, 20 bp, Artificial Sequence
  Description of Artificial Sequence: Synthetic oligonucleotide
  Target: ATXN2; (-) strand; PAM type: NRG; PAM sequence: TGG
aagtgcttagctgggtatgc

SEQ ID NO: 25409 - DNA, 20 bp, Artificial Sequence
  Description of Artificial Sequence: Synthetic oligonucleotide
  Target: ATXN2; (-) strand; PAM type: NRG; PAM sequence: GGG
tgtacttgaagtgcttagct

SEQ ID NO: 25410 - DNA, 20 bp, Artificial Sequence
  Description of Artificial Sequence: Synthetic oligonucleotide
  Target: ATXN2; (-) strand; PAM type: NRG; PAM sequence: TGG
ctgtacttgaagtgcttagc

SEQ ID NO: 25411 - DNA, 20 bp, Artificial Sequence
  Description of Artificial Sequence: Synthetic oligonucleotide
  Target: ATXN2; (-) strand; PAM type: NRG; PAM sequence: TAG
ttatctgtacttgaagtgct

SEQ ID NO: 25412 - DNA, 20 bp, Artificial Sequence
  Description of Artificial Sequence: Synthetic oligonucleotide
  Target: ATXN2; (-) strand; PAM type: NRG; PAM sequence: AAG
taatgcattatctgtacttg

SEQ ID NO: 25413 - DNA, 20 bp, Artificial Sequence
  Description of Artificial Sequence: Synthetic oligonucleotide
  Target: ATXN2; (-) strand; PAM type: NRG; PAM sequence: TAG
aaacgcctcttgtcacatac

SEQ ID NO: 25414 - DNA, 20 bp, Artificial Sequence
  Description of Artificial Sequence: Synthetic oligonucleotide
  Target: ATXN2; (-) strand; PAM type: NRG; PAM sequence: TGG
aaatttcttggtcttaaatt

SEQ ID NO: 25415 - DNA, 20 bp, Artificial Sequence
  Description of Artificial Sequence: Synthetic oligonucleotide
  Target: ATXN2; (-) strand; PAM type: NRG; PAM sequence: TGG
aaagcattacataaatttct

SEQ ID NO: 25416 - DNA, 20 bp, Artificial Sequence
  Description of Artificial Sequence: Synthetic oligonucleotide
  Target: ATXN2; (-) strand; PAM type: NRG; PAM sequence: AAG
attaggttacattggaatta

SEQ ID NO: 25417 - DNA, 20 bp, Artificial Sequence
  Description of Artificial Sequence: Synthetic oligonucleotide
  Target: ATXN2; (-) strand; PAM type: NRG; PAM sequence: TGG
gataaataattaggttacat

SEQ ID NO: 25418 - DNA, 20 bp, Artificial Sequence
  Description of Artificial Sequence: Synthetic oligonucleotide
  Target: ATXN2; (-) strand; PAM type: NRG; PAM sequence: AGG
tgtcattaagataaataatt

SEQ ID NO: 25419 - DNA, 20 bp, Artificial Sequence
  Description of Artificial Sequence: Synthetic oligonucleotide
  Target: ATXN2; (-) strand; PAM type: NRG; PAM sequence: TAG
ttgtcattaagataaataat

SEQ ID NO: 25420 - DNA, 20 bp, Artificial Sequence
  Description of Artificial Sequence: Synthetic oligonucleotide
  Target: ATXN2; (-) strand; PAM type: NRG; PAM sequence: AAG
ctgaagaaaaggttgtcatt

SEQ ID NO: 25421 - DNA, 20 bp, Artificial Sequence
  Description of Artificial Sequence: Synthetic oligonucleotide
  Target: ATXN2; (-) strand; PAM type: NRG; PAM sequence: AGG
aagcctcttgtctgaagaaa

SEQ ID NO: 25422 - DNA, 20 bp, Artificial Sequence
  Description of Artificial Sequence: Synthetic oligonucleotide
  Target: ATXN2; (-) strand; PAM type: NRG; PAM sequence: AAG
taagcctcttgtctgaagaa

SEQ ID NO: 25423 - DNA, 20 bp, Artificial Sequence
  Description of Artificial Sequence: Synthetic oligonucleotide
  Target: ATXN2; (-) strand; PAM type: NRG; PAM sequence: AAG
cattttaagcctcttgtctg

SEQ ID NO: 25424 - DNA, 20 bp, Artificial Sequence
  Description of Artificial Sequence: Synthetic oligonucleotide
  Target: ATXN2; (-) strand; PAM type: NRG; PAM sequence: AAG
aggttgaagtaggacatttt

SEQ ID NO: 25425 - DNA, 20 bp, Artificial Sequence
  Description of Artificial Sequence: Synthetic oligonucleotide
  Target: ATXN2; (-) strand; PAM type: NRG; PAM sequence: AGG
cctagagaagaggttgaagt

SEQ ID NO: 25426 - DNA, 20 bp, Artificial Sequence
  Description of Artificial Sequence: Synthetic oligonucleotide
  Target: ATXN2; (-) strand; PAM type: NRG; PAM sequence: TAG
acctagagaagaggttgaag

SEQ ID NO: 25427 - DNA, 20 bp, Artificial Sequence
  Description of Artificial Sequence: Synthetic oligonucleotide
  Target: ATXN2; (-) strand; PAM type: NRG; PAM sequence: AAG
ttcacctagagaagaggttg

SEQ ID NO: 25428 - DNA, 20 bp, Artificial Sequence
  Description of Artificial Sequence: Synthetic oligonucleotide
  Target: ATXN2; (-) strand; PAM type: NRG; PAM sequence: AGG
gttgacttcacctagagaag

SEQ ID NO: 25429 - DNA, 20 bp, Artificial Sequence
  Description of Artificial Sequence: Synthetic oligonucleotide
  Target: ATXN2; (-) strand; PAM type: NRG; PAM sequence: GAG
tgttgacttcacctagagaa

SEQ ID NO: 25430 - DNA, 20 bp, Artificial Sequence
  Description of Artificial Sequence: Synthetic oligonucleotide
  Target: ATXN2; (-) strand; PAM type: NRG; PAM sequence: AAG
attgttgacttcacctagag

SEQ ID NO: 25431 - DNA, 20 bp, Artificial Sequence
  Description of Artificial Sequence: Synthetic oligonucleotide
  Target: ATXN2; (-) strand; PAM type: NRG; PAM sequence: GAG
ttaattgttgacttcaccta

SEQ ID NO: 25432 - DNA, 20 bp, Artificial Sequence
  Description of Artificial Sequence: Synthetic oligonucleotide
  Target: ATXN2; (-) strand; PAM type: NRG; PAM sequence: TAG
tcttaattgttgacttcacc

SEQ ID NO: 25433 - DNA, 20 bp, Artificial Sequence
  Description of Artificial Sequence: Synthetic oligonucleotide
  Target: ATXN2; (-) strand; PAM type: NRG; PAM sequence: TGG
ataaggtagcctaaggaaag

SEQ ID NO: 25434 - DNA, 20 bp, Artificial Sequence
  Description of Artificial Sequence: Synthetic oligonucleotide
  Target: ATXN2; (-) strand; PAM type: NRG; PAM sequence: AAG
caaataaggtagcctaagga

SEQ ID NO: 25435 - DNA, 20 bp, Artificial Sequence
  Description of Artificial Sequence: Synthetic oligonucleotide
  Target: ATXN2; (-) strand; PAM type: NRG; PAM sequence: AGG
cagccaaataaggtagccta

SEQ ID NO: 25436 - DNA, 20 bp, Artificial Sequence
  Description of Artificial Sequence: Synthetic oligonucleotide
  Target: ATXN2; (-) strand; PAM type: NRG; PAM sequence: AAG
ccagccaaataaggtagcct

SEQ ID NO: 25437 - DNA, 20 bp, Artificial Sequence
  Description of Artificial Sequence: Synthetic oligonucleotide
  Target: ATXN2; (-) strand; PAM type: NRG; PAM sequence: TAG
taacacccagccaaataagg

SEQ ID NO: 25438 - DNA, 20 bp, Artificial Sequence
  Description of Artificial Sequence: Synthetic oligonucleotide
  Target: ATXN2; (-) strand; PAM type: NRG; PAM sequence: AGG
ctttaacacccagccaaata

SEQ ID NO: 25439 - DNA, 20 bp, Artificial Sequence
  Description of Artificial Sequence: Synthetic oligonucleotide
  Target: ATXN2; (-) strand; PAM type: NRG; PAM sequence: AAG
gctttaacacccagccaaat

SEQ ID NO: 25440 - DNA, 20 bp, Artificial Sequence
  Description of Artificial Sequence: Synthetic oligonucleotide
  Target: ATXN2; (-) strand; PAM type: NRG; PAM sequence: CAG
gtgtgttttgctttaacacc

SEQ ID NO: 25441 - DNA, 20 bp, Artificial Sequence
  Description of Artificial Sequence: Synthetic oligonucleotide
  Target: ATXN2; (-) strand; PAM type: NRG; PAM sequence: CGG
ttagaaaccatgggaaatgc

SEQ ID NO: 25442 - DNA, 20 bp, Artificial Sequence
  Description of Artificial Sequence: Synthetic oligonucleotide
  Target: ATXN2; (-) strand; PAM type: NRG; PAM sequence: GGG
aaattaaaattagaaaccat

SEQ ID NO: 25443 - DNA, 20 bp, Artificial Sequence
  Description of Artificial Sequence: Synthetic oligonucleotide
  Target: ATXN2; (-) strand; PAM type: NRG; PAM sequence: TGG
taaattaaaattagaaacca

SEQ ID NO: 25444 - DNA, 20 bp, Artificial Sequence
  Description of Artificial Sequence: Synthetic oligonucleotide
  Target: ATXN2; (-) strand; PAM type: NRG; PAM sequence: TAG
gaagtagcttaaattaaaat

SEQ ID NO: 25445 - DNA, 20 bp, Artificial Sequence
  Description of Artificial Sequence: Synthetic oligonucleotide
  Target: ATXN2; (-) strand; PAM type: NRG; PAM sequence: TAG
ttaaaataaataataagaag

SEQ ID NO: 25446 - DNA, 20 bp, Artificial Sequence
  Description of Artificial Sequence: Synthetic oligonucleotide
  Target: ATXN2; (-) strand; PAM type: NRG; PAM sequence: AAG
tgattaaaataaataataag

SEQ ID NO: 25447 - DNA, 20 bp, Artificial Sequence
  Description of Artificial Sequence: Synthetic oligonucleotide
  Target: ATXN2; (-) strand; PAM type: NRG; PAM sequence: AAG
ttgtgattaaaataaataat

SEQ ID NO: 25448 - DNA, 20 bp, Artificial Sequence
  Description of Artificial Sequence: Synthetic oligonucleotide
  Target: ATXN2; (-) strand; PAM type: NRG; PAM sequence: TGG
aggagtactgtctgttcttg

SEQ ID NO: 25449 - DNA, 20 bp, Artificial Sequence
  Description of Artificial Sequence: Synthetic oligonucleotide
  Target: ATXN2; (-) strand; PAM type: NRG; PAM sequence: GAG
tacttgtaggggttaagcag

SEQ ID NO: 25450 - DNA, 20 bp, Artificial Sequence
  Description of Artificial Sequence: Synthetic oligonucleotide
  Target: ATXN2; (-) strand; PAM type: NRG; PAM sequence: AGG
tttacttgtaggggttaagc

SEQ ID NO: 25451 - DNA, 20 bp, Artificial Sequence
  Description of Artificial Sequence: Synthetic oligonucleotide
  Target: ATXN2; (-) strand; PAM type: NRG; PAM sequence: CAG
ttttacttgtaggggttaag

SEQ ID NO: 25452 - DNA, 20 bp, Artificial Sequence
  Description of Artificial Sequence: Synthetic oligonucleotide
  Target: ATXN2; (-) strand; PAM type: NRG; PAM sequence: AAG
tcattttacttgtaggggtt

SEQ ID NO: 25453 - DNA, 20 bp, Artificial Sequence
  Description of Artificial Sequence: Synthetic oligonucleotide
  Target: ATXN2; (-) strand; PAM type: NRG; PAM sequence: GGG
gtttgtcattttacttgtag

SEQ ID NO: 25454 - DNA, 20 bp, Artificial Sequence
  Description of Artificial Sequence: Synthetic oligonucleotide
  Target: ATXN2; (-) strand; PAM type: NRG; PAM sequence: GGG
tgtttgtcattttacttgta

SEQ ID NO: 25455 - DNA, 20 bp, Artificial Sequence
  Description of Artificial Sequence: Synthetic oligonucleotide
  Target: ATXN2; (-) strand; PAM type: NRG; PAM sequence: AGG
atgtttgtcattttacttgt

SEQ ID NO: 25456 - DNA, 20 bp, Artificial Sequence
  Description of Artificial Sequence: Synthetic oligonucleotide
  Target: ATXN2; (-) strand; PAM type: NRG; PAM sequence: TAG
aatgtttgtcattttacttg

SEQ ID NO: 25457 - DNA, 20 bp, Artificial Sequence
  Description of Artificial Sequence: Synthetic oligonucleotide
  Target: ATXN2; (-) strand; PAM type: NRG; PAM sequence: AAG
tttctcccaagcaatatata

SEQ ID NO: 25458 - DNA, 20 bp, Artificial Sequence
  Description of Artificial Sequence: Synthetic oligonucleotide
  Target: ATXN2; (-) strand; PAM type: NRG; PAM sequence: AAG
ataactagagactttctccc

SEQ ID NO: 25459 - DNA, 20 bp, Artificial Sequence
  Description of Artificial Sequence: Synthetic oligonucleotide
  Target: ATXN2; (-) strand; PAM type: NRG; PAM sequence: GAG
gcaggtttgttgtataacta

SEQ ID NO: 25460 - DNA, 20 bp, Artificial Sequence
  Description of Artificial Sequence: Synthetic oligonucleotide
  Target: ATXN2; (-) strand; PAM type: NRG; PAM sequence: TAG
cagcaggtttgttgtataac

SEQ ID NO: 25461 - DNA, 20 bp, Artificial Sequence
  Description of Artificial Sequence: Synthetic oligonucleotide
  Target: ATXN2; (-) strand; PAM type: NRG; PAM sequence: AGG
gtgagtgtatttagagcagc

SEQ ID NO: 25462 - DNA, 20 bp, Artificial Sequence
  Description of Artificial Sequence: Synthetic oligonucleotide
  Target: ATXN2; (-) strand; PAM type: NRG; PAM sequence: CAG
agtgagtgtatttagagcag

SEQ ID NO: 25463 - DNA, 20 bp, Artificial Sequence
  Description of Artificial Sequence: Synthetic oligonucleotide
  Target: ATXN2; (-) strand; PAM type: NRG; PAM sequence: CAG
tgtagtgagtgtatttagag

SEQ ID NO: 25464 - DNA, 20 bp, Artificial Sequence
  Description of Artificial Sequence: Synthetic oligonucleotide
  Target: ATXN2; (-) strand; PAM type: NRG; PAM sequence: GAG
tattgtagtgagtgtattta

SEQ ID NO: 25465 - DNA, 20 bp, Artificial Sequence
  Description of Artificial Sequence: Synthetic oligonucleotide
  Target: ATXN2; (-) strand; PAM type: NRG; PAM sequence: TAG
gttattgtagtgagtgtatt

SEQ ID NO: 25466 - DNA, 20 bp, Artificial Sequence
  Description of Artificial Sequence: Synthetic oligonucleotide
  Target: ATXN2; (-) strand; PAM type: NRG; PAM sequence: GAG
gttgttgttgttattgtagt

SEQ ID NO: 25467 - DNA, 20 bp, Artificial Sequence
  Description of Artificial Sequence: Synthetic oligonucleotide
  Target: ATXN2; (-) strand; PAM type: NRG; PAM sequence: TAG
ttttgttgttgttgttattg

SEQ ID NO: 25468 - DNA, 20 bp, Artificial Sequence
  Description of Artificial Sequence: Synthetic oligonucleotide
  Target: ATXN2; (-) strand; PAM type: NRG; PAM sequence: TGG
cagtatgacatcctgtcact

SEQ ID NO: 25469 - DNA, 20 bp, Artificial Sequence
  Description of Artificial Sequence: Synthetic oligonucleotide
  Target: ATXN2; (-) strand; PAM type: NRG; PAM sequence: CAG
aattattgctagactctggt

SEQ ID NO: 25470 - DNA, 20 bp, Artificial Sequence
  Description of Artificial Sequence: Synthetic oligonucleotide
  Target: ATXN2; (-) strand; PAM type: NRG; PAM sequence: TGG
ttgtaattattgctagactc

SEQ ID NO: 25471 - DNA, 20 bp, Artificial Sequence
  Description of Artificial Sequence: Synthetic oligonucleotide
  Target: ATXN2; (-) strand; PAM type: NRG; PAM sequence: TAG
aacatctttgtaattattgc

SEQ ID NO: 25472 - DNA, 20 bp, Artificial Sequence
  Description of Artificial Sequence: Synthetic oligonucleotide
  Target: ATXN2; (-) strand; PAM type: NRG; PAM sequence: AAG
gctttggaaaatgacgtagt

SEQ ID NO: 25473 - DNA, 20 bp, Artificial Sequence
  Description of Artificial Sequence: Synthetic oligonucleotide
  Target: ATXN2; (-) strand; PAM type: NRG; PAM sequence: TAG
tgaggctttggaaaatgacg

SEQ ID NO: 25474 - DNA, 20 bp, Artificial Sequence
  Description of Artificial Sequence: Synthetic oligonucleotide
  Target: ATXN2; (-) strand; PAM type: NRG; PAM sequence: TGG
caatgaggaacttgaggctt

SEQ ID NO: 25475 - DNA, 20 bp, Artificial Sequence
  Description of Artificial Sequence: Synthetic oligonucleotide
  Target: ATXN2; (-) strand; PAM type: NRG; PAM sequence: AGG
cacagccaatgaggaacttg

SEQ ID NO: 25476 - DNA, 20 bp, Artificial Sequence
  Description of Artificial Sequence: Synthetic oligonucleotide
  Target: ATXN2; (-) strand; PAM type: NRG; PAM sequence: GAG
tcacagccaatgaggaactt

SEQ ID NO: 25477 - DNA, 20 bp, Artificial Sequence
  Description of Artificial Sequence: Synthetic oligonucleotide
  Target: ATXN2; (-) strand; PAM type: NRG; PAM sequence: AGG
aggtgaactcacagccaatg

SEQ ID NO: 25478 - DNA, 20 bp, Artificial Sequence
  Description of Artificial Sequence: Synthetic oligonucleotide
  Target: ATXN2; (-) strand; PAM type: NRG; PAM sequence: GAG
caggtgaactcacagccaat

SEQ ID NO: 25479 - DNA, 20 bp, Artificial Sequence
  Description of Artificial Sequence: Synthetic oligonucleotide
  Target: ATXN2; (-) strand; PAM type: NRG; PAM sequence: CAG
ctgggatgcaggtgaactca

SEQ ID NO: 25480 - DNA, 20 bp, Artificial Sequence
  Description of Artificial Sequence: Synthetic oligonucleotide
  Target: ATXN2; (-) strand; PAM type: NRG; PAM sequence: AGG
gacctggagccctgggatgc

SEQ ID NO: 25481 - DNA, 20 bp, Artificial Sequence
  Description of Artificial Sequence: Synthetic oligonucleotide
  Target: ATXN2; (-) strand; PAM type: NRG; PAM sequence: CAG
ggacctggagccctgggatg

SEQ ID NO: 25482 - DNA, 20 bp, Artificial Sequence
  Description of Artificial Sequence: Synthetic oligonucleotide
  Target: ATXN2; (-) strand; PAM type: NRG; PAM sequence: GGG
agagaaggacctggagccct

SEQ ID NO: 25483 - DNA, 20 bp, Artificial Sequence
  Description of Artificial Sequence: Synthetic oligonucleotide
  Target: ATXN2; (-) strand; PAM type: NRG; PAM sequence: TGG
aagagaaggacctggagccc

SEQ ID NO: 25484 - DNA, 20 bp, Artificial Sequence
  Description of Artificial Sequence: Synthetic oligonucleotide
  Target: ATXN2; (-) strand; PAM type: NRG; PAM sequence: GAG
aacacaaagagaaggacctg

SEQ ID NO: 25485 - DNA, 20 bp, Artificial Sequence
  Description of Artificial Sequence: Synthetic oligonucleotide
  Target: ATXN2; (-) strand; PAM type: NRG; PAM sequence: TGG
cgaacacaaagagaaggacc

SEQ ID NO: 25486 - DNA, 20 bp, Artificial Sequence
  Description of Artificial Sequence: Synthetic oligonucleotide
  Target: ATXN2; (-) strand; PAM type: NRG; PAM sequence: AGG
gaatggcgaacacaaagaga

SEQ ID NO: 25487 - DNA, 20 bp, Artificial Sequence
  Description of Artificial Sequence: Synthetic oligonucleotide
  Target: ATXN2; (-) strand; PAM type: NRG; PAM sequence: AAG
tgaatggcgaacacaaagag

SEQ ID NO: 25488 - DNA, 20 bp, Artificial Sequence
  Description of Artificial Sequence: Synthetic oligonucleotide
  Target: ATXN2; (-) strand; PAM type: NRG; PAM sequence: GAG
aagtgaatggcgaacacaaa

SEQ ID NO: 25489 - DNA, 20 bp, Artificial Sequence
  Description of Artificial Sequence: Synthetic oligonucleotide
  Target: ATXN2; (-) strand; PAM type: NRG; PAM sequence: AAG
taaagtgaatggcgaacaca

SEQ ID NO: 25490 - DNA, 20 bp, Artificial Sequence
  Description of Artificial Sequence: Synthetic oligonucleotide
  Target: ATXN2; (-) strand; PAM type: NRG; PAM sequence: TGG
gctatcagtgctaaagtgaa

SEQ ID NO: 25491 - DNA, 20 bp, Artificial Sequence
  Description of Artificial Sequence: Synthetic oligonucleotide
  Target: ATXN2; (-) strand; PAM type: NRG; PAM sequence: AAG
tgactctgctatcagtgcta

SEQ ID NO: 25492 - DNA, 20 bp, Artificial Sequence
  Description of Artificial Sequence: Synthetic oligonucleotide
  Target: ATXN2; (-) strand; PAM type: NRG; PAM sequence: CAG
gcttttactgactctgctat

SEQ ID NO: 25493 - DNA, 20 bp, Artificial Sequence
  Description of Artificial Sequence: Synthetic oligonucleotide
  Target: ATXN2; (-) strand; PAM type: NRG; PAM sequence: CAG
tcaaccaaaaccattctttg

SEQ ID NO: 25494 - DNA, 20 bp, Artificial Sequence
  Description of Artificial Sequence: Synthetic oligonucleotide
  Target: ATXN2; (-) strand; PAM type: NRG; PAM sequence: CAG
gtgtgagtgtaactgattgc

SEQ ID NO: 25495 - DNA, 20 bp, Artificial Sequence
  Description of Artificial Sequence: Synthetic oligonucleotide
  Target: ATXN2; (-) strand; PAM type: NRG; PAM sequence: GAG
tgttggtaattcacgtgtgt

SEQ ID NO: 25496 - DNA, 20 bp, Artificial Sequence
  Description of Artificial Sequence: Synthetic oligonucleotide
  Target: ATXN2; (-) strand; PAM type: NRG; PAM sequence: TGG
tttttaacatatgtctttgt

SEQ ID NO: 25497 - DNA, 20 bp, Artificial Sequence
  Description of Artificial Sequence: Synthetic oligonucleotide
  Target: ATXN2; (-) strand; PAM type: NRG; PAM sequence: AAG
aaatgtttctgttagatttt

SEQ ID NO: 25498 - DNA, 20 bp, Artificial Sequence
  Description of Artificial Sequence: Synthetic oligonucleotide
  Target: ATXN2; (-) strand; PAM type: NRG; PAM sequence: TAG
tgttcaataaatgtttctgt

SEQ ID NO: 25499 - DNA, 20 bp, Artificial Sequence
  Description of Artificial Sequence: Synthetic oligonucleotide
  Target: ATXN2; (-) strand; PAM type: NRG; PAM sequence: TGG
ttacctttattatagtgcat

SEQ ID NO: 25500 - DNA, 20 bp, Artificial Sequence
  Description of Artificial Sequence: Synthetic oligonucleotide
  Target: ATXN2; (-) strand; PAM type: NRG; PAM sequence: TAG
ttttaagtttacctttatta

SEQ ID NO: 25501 - DNA, 20 bp, Artificial Sequence
  Description of Artificial Sequence: Synthetic oligonucleotide
  Target: ATXN2; (-) strand; PAM type: NRG; PAM sequence: AAG
tcttcacatacataagtttt

SEQ ID NO: 25502 - DNA, 20 bp, Artificial Sequence
  Description of Artificial Sequence: Synthetic oligonucleotide
  Target: ATXN2; (-) strand; PAM type: NRG; PAM sequence: AAG
cagtttatcttcacatacat

SEQ ID NO: 25503 - DNA, 20 bp, Artificial Sequence
  Description of Artificial Sequence: Synthetic oligonucleotide
  Target: ATXN2; (-) strand; PAM type: NRG; PAM sequence: CAG
ttccgtatcagtttagatag

SEQ ID NO: 25504 - DNA, 20 bp, Artificial Sequence
  Description of Artificial Sequence: Synthetic oligonucleotide
  Target: ATXN2; (-) strand; PAM type: NRG; PAM sequence: TAG
atattccgtatcagtttaga

SEQ ID NO: 25505 - DNA, 20 bp, Artificial Sequence
  Description of Artificial Sequence: Synthetic oligonucleotide
  Target: ATXN2; (-) strand; PAM type: NRG; PAM sequence: TAG
ctatatattccgtatcagtt

SEQ ID NO: 25506 - DNA, 20 bp, Artificial Sequence
  Description of Artificial Sequence: Synthetic oligonucleotide
  Target: ATXN2; (-) strand; PAM type: NRG; PAM sequence: CAG
gaatactatatattccgtat

SEQ ID NO: 25507 - DNA, 20 bp, Artificial Sequence
  Description of Artificial Sequence: Synthetic oligonucleotide
  Target: ATXN2; (-) strand; PAM type: NRG; PAM sequence: AAG
atttgctaaattaaacgtga

SEQ ID NO: 25508 - DNA, 20 bp, Artificial Sequence
  Description of Artificial Sequence: Synthetic oligonucleotide
  Target: ATXN2; (-) strand; PAM type: NRG; PAM sequence: TAG
aaagaaaatacctttactga

SEQ ID NO: 25509 - DNA, 20 bp, Artificial Sequence
  Description of Artificial Sequence: Synthetic oligonucleotide
  Target: ATXN2; (-) strand; PAM type: NRG; PAM sequence: AAG
gtggcttaaaattatatgaa

SEQ ID NO: 25510 - DNA, 20 bp, Artificial Sequence
  Description of Artificial Sequence: Synthetic oligonucleotide
  Target: ATXN2; (-) strand; PAM type: NRG; PAM sequence: TGG
aaaaaaaaaaatgcttcgtg

SEQ ID NO: 25511 - DNA, 20 bp, Artificial Sequence
  Description of Artificial Sequence: Synthetic oligonucleotide
  Target: ATXN2; (-) strand; PAM type: NRG; PAM sequence: GAG
tccagcctgggcaacagaac

SEQ ID NO: 25512 - DNA, 20 bp, Artificial Sequence
  Description of Artificial Sequence: Synthetic oligonucleotide
  Target: ATXN2; (-) strand; PAM type: NRG; PAM sequence: CAG
ctgcattccagcctgggcaa

SEQ ID NO: 25513 - DNA, 20 bp, Artificial Sequence
  Description of Artificial Sequence: Synthetic oligonucleotide
  Target: ATXN2; (-) strand; PAM type: NRG; PAM sequence: GGG
acgccactgcattccagcct

SEQ ID NO: 25514 - DNA, 20 bp, Artificial Sequence
  Description of Artificial Sequence: Synthetic oligonucleotide
  Target: ATXN2; (-) strand; PAM type: NRG; PAM sequence: TGG
cacgccactgcattccagcc

SEQ ID NO: 25515 - DNA, 20 bp, Artificial Sequence
  Description of Artificial Sequence: Synthetic oligonucleotide
  Target: ATXN2; (-) strand; PAM type: NRG; PAM sequence: CAG
gagatcacgccactgcattc

SEQ ID NO: 25516 - DNA, 20 bp, Artificial Sequence
  Description of Artificial Sequence: Synthetic oligonucleotide
  Target: ATXN2; (-) strand; PAM type: NRG; PAM sequence: GAG
ggcagaggttgcagtgagcc

SEQ ID NO: 25517 - DNA, 20 bp, Artificial Sequence
  Description of Artificial Sequence: Synthetic oligonucleotide
  Target: ATXN2; (-) strand; PAM type: NRG; PAM sequence: GAG
cgggaggcagaggttgcagt

SEQ ID NO: 25518 - DNA, 20 bp, Artificial Sequence
  Description of Artificial Sequence: Synthetic oligonucleotide
  Target: ATXN2; (-) strand; PAM type: NRG; PAM sequence: CAG
aacccgggaggcagaggttg

SEQ ID NO: 25519 - DNA, 20 bp, Artificial Sequence
  Description of Artificial Sequence: Synthetic oligonucleotide
  Target: ATXN2; (-) strand; PAM type: NRG; PAM sequence: AGG
cgcttgaacccgggaggcag

SEQ ID NO: 25520 - DNA, 20 bp, Artificial Sequence
  Description of Artificial Sequence: Synthetic oligonucleotide
  Target: ATXN2; (-) strand; PAM type: NRG; PAM sequence: GAG
tcgcttgaacccgggaggca

SEQ ID NO: 25521 - DNA, 20 bp, Artificial Sequence
  Description of Artificial Sequence: Synthetic oligonucleotide
  Target: ATXN2; (-) strand; PAM type: NRG; PAM sequence: CAG
aatcgcttgaacccgggagg

SEQ ID NO: 25522 - DNA, 20 bp, Artificial Sequence
  Description of Artificial Sequence: Synthetic oligonucleotide
  Target: ATXN2; (-) strand; PAM type: NRG; PAM sequence: AGG
gagaatcgcttgaacccggg

SEQ ID NO: 25523 - DNA, 20 bp, Artificial Sequence
  Description of Artificial Sequence: Synthetic oligonucleotide
  Target: ATXN2; (-) strand; PAM type: NRG; PAM sequence: GAG
ggagaatcgcttgaacccgg

SEQ ID NO: 25524 - DNA, 20 bp, Artificial Sequence
  Description of Artificial Sequence: Synthetic oligonucleotide
  Target: ATXN2; (-) strand; PAM type: NRG; PAM sequence: GGG
caggagaatcgcttgaaccc

SEQ ID NO: 25525 - DNA, 20 bp, Artificial Sequence
  Description of Artificial Sequence: Synthetic oligonucleotide
  Target: ATXN2; (-) strand; PAM type: NRG; PAM sequence: CGG
gcaggagaatcgcttgaacc

SEQ ID NO: 25526 - DNA, 20 bp, Artificial Sequence
  Description of Artificial Sequence: Synthetic oligonucleotide
  Target: ATXN2; (-) strand; PAM type: NRG; PAM sequence: GAG
tactcgggagactgaggcag

SEQ ID NO: 25527 - DNA, 20 bp, Artificial Sequence
  Description of Artificial Sequence: Synthetic oligonucleotide
  Target: ATXN2; (-) strand; PAM type: NRG; PAM sequence: AGG
gctactcgggagactgaggc

SEQ ID NO: 25528 - DNA, 20 bp, Artificial Sequence
  Description of Artificial Sequence: Synthetic oligonucleotide
  Target: ATXN2; (-) strand; PAM type: NRG; PAM sequence: CAG
agctactcgggagactgagg

SEQ ID NO: 25529 - DNA, 20 bp, Artificial Sequence
  Description of Artificial Sequence: Synthetic oligonucleotide
  Target: ATXN2; (-) strand; PAM type: NRG; PAM sequence: AGG
cccagctactcgggagactg

SEQ ID NO: 25530 - DNA, 20 bp, Artificial Sequence
  Description of Artificial Sequence: Synthetic oligonucleotide
  Target: ATXN2; (-) strand; PAM type: NRG; PAM sequence: GAG
tcccagctactcgggagact

SEQ ID NO: 25531 - DNA, 20 bp, Artificial Sequence
  Description of Artificial Sequence: Synthetic oligonucleotide
  Target: ATXN2; (-) strand; PAM type: NRG; PAM sequence: GAG
ctgtagtcccagctactcgg

SEQ ID NO: 25532 - DNA, 20 bp, Artificial Sequence
  Description of Artificial Sequence: Synthetic oligonucleotide
  Target: ATXN2; (-) strand; PAM type: NRG; PAM sequence: GGG
acctgtagtcccagctactc

SEQ ID NO: 25533 - DNA, 20 bp, Artificial Sequence
  Description of Artificial Sequence: Synthetic oligonucleotide
  Target: ATXN2; (-) strand; PAM type: NRG; PAM sequence: CGG
cacctgtagtcccagctact

SEQ ID NO: 25534 - DNA, 20 bp, Artificial Sequence
  Description of Artificial Sequence: Synthetic oligonucleotide
  Target: ATXN2; (-) strand; PAM type: NRG; PAM sequence: CAG
gtggtacacacctgtagtcc

SEQ ID NO: 25535 - DNA, 20 bp, Artificial Sequence
  Description of Artificial Sequence: Synthetic oligonucleotide
  Target: ATXN2; (-) strand; PAM type: NRG; PAM sequence: TAG
ggcgtggtggtacacacctg

SEQ ID NO: 25536 - DNA, 20 bp, Artificial Sequence
  Description of Artificial Sequence: Synthetic oligonucleotide
  Target: ATXN2; (-) strand; PAM type: NRG; PAM sequence: TGG
aaaaaattatccgggcgtgg

SEQ ID NO: 25537 - DNA, 20 bp, Artificial Sequence
  Description of Artificial Sequence: Synthetic oligonucleotide
  Target: ATXN2; (-) strand; PAM type: NRG; PAM sequence: TGG
tacaaaaaattatccgggcg

SEQ ID NO: 25538 - DNA, 20 bp, Artificial Sequence
  Description of Artificial Sequence: Synthetic oligonucleotide
  Target: ATXN2; (-) strand; PAM type: NRG; PAM sequence: GGG
aaaaatacaaaaaattatcc

SEQ ID NO: 25539 - DNA, 20 bp, Artificial Sequence
  Description of Artificial Sequence: Synthetic oligonucleotide
  Target: ATXN2; (-) strand; PAM type: NRG; PAM sequence: CGG
taaaaatacaaaaaattatc

SEQ ID NO: 25540 - DNA, 20 bp, Artificial Sequence
  Description of Artificial Sequence: Synthetic oligonucleotide
  Target: ATXN2; (-) strand; PAM type: NRG; PAM sequence: CGG
caagaccagcctggctaaca

SEQ ID NO: 25541 - DNA, 20 bp, Artificial Sequence
  Description of Artificial Sequence: Synthetic oligonucleotide
  Target: ATXN2; (-) strand; PAM type: NRG; PAM sequence: TGG
tcaggagatcaagaccagcc

SEQ ID NO: 25542 - DNA, 20 bp, Artificial Sequence
  Description of Artificial Sequence: Synthetic oligonucleotide
  Target: ATXN2; (-) strand; PAM type: NRG; PAM sequence: CAG
ctaggtcaggagatcaagac

SEQ ID NO: 25543 - DNA, 20 bp, Artificial Sequence
  Description of Artificial Sequence: Synthetic oligonucleotide
  Target: ATXN2; (-) strand; PAM type: NRG; PAM sequence: AAG
tatcactaggtcaggagatc

SEQ ID NO: 25544 - DNA, 20 bp, Artificial Sequence
  Description of Artificial Sequence: Synthetic oligonucleotide
  Target: ATXN2; (-) strand; PAM type: NRG; PAM sequence: GAG
tgggggtatcactaggtcag

SEQ ID NO: 25545 - DNA, 20 bp, Artificial Sequence
  Description of Artificial Sequence: Synthetic oligonucleotide
  Target: ATXN2; (-) strand; PAM type: NRG; PAM sequence: AGG
ggtgggggtatcactaggtc

SEQ ID NO: 25546 - DNA, 20 bp, Artificial Sequence
  Description of Artificial Sequence: Synthetic oligonucleotide
  Target: ATXN2; (-) strand; PAM type: NRG; PAM sequence: CAG
aggtgggggtatcactaggt

SEQ ID NO: 25547 - DNA, 20 bp, Artificial Sequence
  Description of Artificial Sequence: Synthetic oligonucleotide
  Target: ATXN2; (-) strand; PAM type: NRG; PAM sequence: AGG
gccaaggtgggggtatcact

SEQ ID NO: 25548 - DNA, 20 bp, Artificial Sequence
  Description of Artificial Sequence: Synthetic oligonucleotide
  Target: ATXN2; (-) strand; PAM type: NRG; PAM sequence: TAG
ggccaaggtgggggtatcac

SEQ ID NO: 25549 - DNA, 20 bp, Artificial Sequence
  Description of Artificial Sequence: Synthetic oligonucleotide
  Target: ATXN2; (-) strand; PAM type: NRG; PAM sequence: GGG
actttgggaggccaaggtgg

SEQ ID NO: 25550 - DNA, 20 bp, Artificial Sequence
  Description of Artificial Sequence: Synthetic oligonucleotide
  Target: ATXN2; (-) strand; PAM type: NRG; PAM sequence: GGG
cactttgggaggccaaggtg

SEQ ID NO: 25551 - DNA, 20 bp, Artificial Sequence
  Description of Artificial Sequence: Synthetic oligonucleotide
  Target: ATXN2; (-) strand; PAM type: NRG; PAM sequence: GGG
gcactttgggaggccaaggt

SEQ ID NO: 25552 - DNA, 20 bp, Artificial Sequence
  Description of Artificial Sequence: Synthetic oligonucleotide
  Target: ATXN2; (-) strand; PAM type: NRG; PAM sequence: TGG
agcactttgggaggccaagg

SEQ ID NO: 25553 - DNA, 20 bp, Artificial Sequence
  Description of Artificial Sequence: Synthetic oligonucleotide
  Target: ATXN2; (-) strand; PAM type: NRG; PAM sequence: AGG
cccagcactttgggaggcca

SEQ ID NO: 25554 - DNA, 20 bp, Artificial Sequence
  Description of Artificial Sequence: Synthetic oligonucleotide
  Target: ATXN2; (-) strand; PAM type: NRG; PAM sequence: AAG
tcccagcactttgggaggcc

SEQ ID NO: 25555 - DNA, 20 bp, Artificial Sequence
  Description of Artificial Sequence: Synthetic oligonucleotide
  Target: ATXN2; (-) strand; PAM type: NRG; PAM sequence: AGG
tgtaatcccagcactttggg

SEQ ID NO: 25556 - DNA, 20 bp, Artificial Sequence
  Description of Artificial Sequence: Synthetic oligonucleotide
  Target: ATXN2; (-) strand; PAM type: NRG; PAM sequence: GAG
ctgtaatcccagcactttgg

SEQ ID NO: 25557 - DNA, 20 bp, Artificial Sequence
  Description of Artificial Sequence: Synthetic oligonucleotide
  Target: ATXN2; (-) strand; PAM type: NRG; PAM sequence: GGG
gcctgtaatcccagcacttt

SEQ ID NO: 25558 - DNA, 20 bp, Artificial Sequence
  Description of Artificial Sequence: Synthetic oligonucleotide
  Target: ATXN2; (-) strand; PAM type: NRG; PAM sequence: TGG
tgcctgtaatcccagcactt

SEQ ID NO: 25559 - DNA, 20 bp, Artificial Sequence
  Description of Artificial Sequence: Synthetic oligonucleotide
  Target: ATXN2; (-) strand; PAM type: NRG; PAM sequence: CAG
gtggctcatgcctgtaatcc

SEQ ID NO: 25560 - DNA, 20 bp, Artificial Sequence
  Description of Artificial Sequence: Synthetic oligonucleotide
  Target: ATXN2; (-) strand; PAM type: NRG; PAM sequence: TGG
ttcatgtgggctgggcatgg

SEQ ID NO: 25561 - DNA, 20 bp, Artificial Sequence
  Description of Artificial Sequence: Synthetic oligonucleotide
  Target: ATXN2; (-) strand; PAM type: NRG; PAM sequence: TGG
tgcttcatgtgggctgggca

SEQ ID NO: 25562 - DNA, 20 bp, Artificial Sequence
  Description of Artificial Sequence: Synthetic oligonucleotide
  Target: ATXN2; (-) strand; PAM type: NRG; PAM sequence: GGG
aaatatgcttcatgtgggct

SEQ ID NO: 25563 - DNA, 20 bp, Artificial Sequence
  Description of Artificial Sequence: Synthetic oligonucleotide
  Target: ATXN2; (-) strand; PAM type: NRG; PAM sequence: TGG
aaaatatgcttcatgtgggc

SEQ ID NO: 25564 - DNA, 20 bp, Artificial Sequence
  Description of Artificial Sequence: Synthetic oligonucleotide
  Target: ATXN2; (-) strand; PAM type: NRG; PAM sequence: GGG
tattaaaatatgcttcatgt

SEQ ID NO: 25565 - DNA, 20 bp, Artificial Sequence
  Description of Artificial Sequence: Synthetic oligonucleotide
  Target: ATXN2; (-) strand; PAM type: NRG; PAM sequence: TGG
atattaaaatatgcttcatg

SEQ ID NO: 25566 - DNA, 20 bp, Artificial Sequence
  Description of Artificial Sequence: Synthetic oligonucleotide
  Target: ATXN2; (-) strand; PAM type: NRG; PAM sequence: GAG
ggtcacttctgagacatgca

SEQ ID NO: 25567 - DNA, 20 bp, Artificial Sequence
  Description of Artificial Sequence: Synthetic oligonucleotide
  Target: ATXN2; (-) strand; PAM type: NRG; PAM sequence: CAG
ttggtcacttctgagacatg

SEQ ID NO: 25568 - DNA, 20 bp, Artificial Sequence
  Description of Artificial Sequence: Synthetic oligonucleotide
  Target: ATXN2; (-) strand; PAM type: NRG; PAM sequence: GAG
aaattttcttggtcacttct

SEQ ID NO: 25569 - DNA, 20 bp, Artificial Sequence
  Description of Artificial Sequence: Synthetic oligonucleotide
  Target: ATXN2; (-) strand; PAM type: NRG; PAM sequence: TGG
catctggccagaaattttct

SEQ ID NO: 25570 - DNA, 20 bp, Artificial Sequence
  Description of Artificial Sequence: Synthetic oligonucleotide
  Target: ATXN2; (-) strand; PAM type: NRG; PAM sequence: CAG
catgagccaccacatctggc

SEQ ID NO: 25571 - DNA, 20 bp, Artificial Sequence
  Description of Artificial Sequence: Synthetic oligonucleotide
  Target: ATXN2; (-) strand; PAM type: NRG; PAM sequence: TGG
caggcatgagccaccacatc

SEQ ID NO: 25572 - DNA, 20 bp, Artificial Sequence
  Description of Artificial Sequence: Synthetic oligonucleotide
  Target: ATXN2; (-) strand; PAM type: NRG; PAM sequence: GAG
agtgctggtattacaggcat

SEQ ID NO: 25573 - DNA, 20 bp, Artificial Sequence
  Description of Artificial Sequence: Synthetic oligonucleotide
  Target: ATXN2; (-) strand; PAM type: NRG; PAM sequence: AGG
tcccaaagtgctggtattac

SEQ ID NO: 25574 - DNA, 20 bp, Artificial Sequence
  Description of Artificial Sequence: Synthetic oligonucleotide
  Target: ATXN2; (-) strand; PAM type: NRG; PAM sequence: CAG
ctcccaaagtgctggtatta

SEQ ID NO: 25575 - DNA, 20 bp, Artificial Sequence
  Description of Artificial Sequence: Synthetic oligonucleotide
  Target: ATXN2; (-) strand; PAM type: NRG; PAM sequence: TGG
gcctgggcctcccaaagtgc

SEQ ID NO: 25576 - DNA, 20 bp, Artificial Sequence
  Description of Artificial Sequence: Synthetic oligonucleotide
  Target: ATXN2; (-) strand; PAM type: NRG; PAM sequence: AAG
ccacctgcctgggcctccca

SEQ ID NO: 25577 - DNA, 20 bp, Artificial Sequence
  Description of Artificial Sequence: Synthetic oligonucleotide
  Target: ATXN2; (-) strand; PAM type: NRG; PAM sequence: GGG
acctcatgatccacctgcct

SEQ ID NO: 25578 - DNA, 20 bp, Artificial Sequence
  Description of Artificial Sequence: Synthetic oligonucleotide
  Target: ATXN2; (-) strand; PAM type: NRG; PAM sequence: TGG
aacctcatgatccacctgcc

SEQ ID NO: 25579 - DNA, 20 bp, Artificial Sequence
  Description of Artificial Sequence: Synthetic oligonucleotide
  Target: ATXN2; (-) strand; PAM type: NRG; PAM sequence: TGG
tttcaccatgttggccagga

SEQ ID NO: 25580 - DNA, 20 bp, Artificial Sequence
  Description of Artificial Sequence: Synthetic oligonucleotide
  Target: ATXN2; (-) strand; PAM type: NRG; PAM sequence: AGG
agggtttcaccatgttggcc

SEQ ID NO: 25581 - DNA, 20 bp, Artificial Sequence
  Description of Artificial Sequence: Synthetic oligonucleotide
  Target: ATXN2; (-) strand; PAM type: NRG; PAM sequence: CAG
gagggtttcaccatgttggc

SEQ ID NO: 25582 - DNA, 20 bp, Artificial Sequence
  Description of Artificial Sequence: Synthetic oligonucleotide
  Target: ATXN2; (-) strand; PAM type: NRG; PAM sequence: TGG
gagagagggtttcaccatgt

SEQ ID NO: 25583 - DNA, 20 bp, Artificial Sequence
  Description of Artificial Sequence: Synthetic oligonucleotide
  Target: ATXN2; (-) strand; PAM type: NRG; PAM sequence: GGG
ttgtatttttagtagagaga

SEQ ID NO: 25584 - DNA, 20 bp, Artificial Sequence
  Description of Artificial Sequence: Synthetic oligonucleotide
  Target: ATXN2; (-) strand; PAM type: NRG; PAM sequence: AGG
tttgtatttttagtagagag

SEQ ID NO: 25585 - DNA, 20 bp, Artificial Sequence
  Description of Artificial Sequence: Synthetic oligonucleotide
  Target: ATXN2; (-) strand; PAM type: NRG; PAM sequence: GAG
ttttgtatttttagtagaga

SEQ ID NO: 25586 - DNA, 20 bp, Artificial Sequence
  Description of Artificial Sequence: Synthetic oligonucleotide
  Target: ATXN2; (-) strand; PAM type: NRG; PAM sequence: GAG
atttttgtatttttagtaga

SEQ ID NO: 25587 - DNA, 20 bp, Artificial Sequence
  Description of Artificial Sequence: Synthetic oligonucleotide
  Target: ATXN2; (-) strand; PAM type: NRG; PAM sequence: GAG
taatttttgtatttttagta

SEQ ID NO: 25588 - DNA, 20 bp, Artificial Sequence
  Description of Artificial Sequence: Synthetic oligonucleotide
  Target: ATXN2; (-) strand; PAM type: NRG; PAM sequence: TAG
actaatttttgtatttttag

SEQ ID NO: 25589 - DNA, 20 bp, Artificial Sequence
  Description of Artificial Sequence: Synthetic oligonucleotide
  Target: ATXN2; (-) strand; PAM type: NRG; PAM sequence: TAG
ccaactaatttttgtatttt

SEQ ID NO: 25590 - DNA, 20 bp, Artificial Sequence
  Description of Artificial Sequence: Synthetic oligonucleotide
  Target: ATXN2; (-) strand; PAM type: NRG; PAM sequence: AGG
tcccgagtagctgggactac

SEQ ID NO: 25591 - DNA, 20 bp, Artificial Sequence
  Description of Artificial Sequence: Synthetic oligonucleotide
  Target: ATXN2; (-) strand; PAM type: NRG; PAM sequence: CAG
ctcccgagtagctgggacta

SEQ ID NO: 25592 - DNA, 20 bp, Artificial Sequence
  Description of Artificial Sequence: Synthetic oligonucleotide
  Target: ATXN2; (-) strand; PAM type: NRG; PAM sequence: GGG
cctcagcctcccgagtagct

SEQ ID NO: 25593 - DNA, 20 bp, Artificial Sequence
  Description of Artificial Sequence: Synthetic oligonucleotide
  Target: ATXN2; (-) strand; PAM type: NRG; PAM sequence: TGG
tcctcagcctcccgagtagc

SEQ ID NO: 25594 - DNA, 20 bp, Artificial Sequence
  Description of Artificial Sequence: Synthetic oligonucleotide
  Target: ATXN2; (-) strand; PAM type: NRG; PAM sequence: TAG
tccttcctcagcctcccgag

SEQ ID NO: 25595 - DNA, 20 bp, Artificial Sequence
  Description of Artificial Sequence: Synthetic oligonucleotide
  Target: ATXN2; (-) strand; PAM type: NRG; PAM sequence: GAG
ttctccttcctcagcctccc

SEQ ID NO: 25596 - DNA, 20 bp, Artificial Sequence
  Description of Artificial Sequence: Synthetic oligonucleotide
  Target: ATXN2; (-) strand; PAM type: NRG; PAM sequence: CAG
ttcaaacgattctccttcct

SEQ ID NO: 25597 - DNA, 20 bp, Artificial Sequence
  Description of Artificial Sequence: Synthetic oligonucleotide
  Target: ATXN2; (-) strand; PAM type: NRG; PAM sequence: GGG
cattgcaacctccacctccc

SEQ ID NO: 25598 - DNA, 20 bp, Artificial Sequence
  Description of Artificial Sequence: Synthetic oligonucleotide
  Target: ATXN2; (-) strand; PAM type: NRG; PAM sequence: CGG
tcattgcaacctccacctcc

SEQ ID NO: 25599 - DNA, 20 bp, Artificial Sequence
  Description of Artificial Sequence: Synthetic oligonucleotide
  Target: ATXN2; (-) strand; PAM type: NRG; PAM sequence: TGG
gtcgccaggctggagcacag

SEQ ID NO: 25600 - DNA, 20 bp, Artificial Sequence
  Description of Artificial Sequence: Synthetic oligonucleotide
  Target: ATXN2; (-) strand; PAM type: NRG; PAM sequence: CAG
tctgtcgccaggctggagca

SEQ ID NO: 25601 - DNA, 20 bp, Artificial Sequence
  Description of Artificial Sequence: Synthetic oligonucleotide
  Target: ATXN2; (-) strand; PAM type: NRG; PAM sequence: GAG
ctcactctgtcgccaggctg

SEQ ID NO: 25602 - DNA, 20 bp, Artificial Sequence
  Description of Artificial Sequence: Synthetic oligonucleotide
  Target: ATXN2; (-) strand; PAM type: NRG; PAM sequence: TGG
gtctcactctgtcgccaggc

SEQ ID NO: 25603 - DNA, 20 bp, Artificial Sequence
  Description of Artificial Sequence: Synthetic oligonucleotide
  Target: ATXN2; (-) strand; PAM type: NRG; PAM sequence: AGG
cagggtctcactctgtcgcc

SEQ ID NO: 25604 - DNA, 20 bp, Artificial Sequence
  Description of Artificial Sequence: Synthetic oligonucleotide
  Target: ATXN2; (-) strand; PAM type: NRG; PAM sequence: CAG
acagggtctcactctgtcgc

SEQ ID NO: 25605 - DNA, 20 bp, Artificial Sequence
  Description of Artificial Sequence: Synthetic oligonucleotide
  Target: ATXN2; (-) strand; PAM type: NRG; PAM sequence: GGG
ttctttttttttttgagaca

SEQ ID NO: 25606 - DNA, 20 bp, Artificial Sequence
  Description of Artificial Sequence: Synthetic oligonucleotide
  Target: ATXN2; (-) strand; PAM type: NRG; PAM sequence: AGG
tttctttttttttttgagac

SEQ ID NO: 25607 - DNA, 20 bp, Artificial Sequence
  Description of Artificial Sequence: Synthetic oligonucleotide
  Target: ATXN2; (-) strand; PAM type: NRG; PAM sequence: CAG
ttttctttttttttttgaga

SEQ ID NO: 25608 - DNA, 20 bp, Artificial Sequence
  Description of Artificial Sequence: Synthetic oligonucleotide
  Target: ATXN2; (-) strand; PAM type: NRG; PAM sequence: GAG
ttctttttcttttttttttt

SEQ ID NO: 25609 - DNA, 20 bp, Artificial Sequence
  Description of Artificial Sequence: Synthetic oligonucleotide
  Target: ATXN2; (-) strand; PAM type: NRG; PAM sequence: TAG
agatatttttgatggattga

SEQ ID NO: 25610 - DNA, 20 bp, Artificial Sequence
  Description of Artificial Sequence: Synthetic oligonucleotide
  Target: ATXN2; (-) strand; PAM type: NRG; PAM sequence: TGG
aaaaaaagagatatttttga

SEQ ID NO: 25611 - DNA, 20 bp, Artificial Sequence
  Description of Artificial Sequence: Synthetic oligonucleotide
  Target: ATXN2; (-) strand; PAM type: NRG; PAM sequence: GAG
aaaaaagaaaaaaaaaaaaa

SEQ ID NO: 25612 - DNA, 20 bp, Artificial Sequence
  Description of Artificial Sequence: Synthetic oligonucleotide
  Target: ATXN2; (-) strand; PAM type: NRG; PAM sequence: AAG
tcaaaaaagaaaaaaaaaaa

SEQ ID NO: 25613 - DNA, 20 bp, Artificial Sequence
  Description of Artificial Sequence: Synthetic oligonucleotide
  Target: ATXN2; (-) strand; PAM type: NRG; PAM sequence: AAG
gagcaagctccatctcaaaa

SEQ ID NO: 25614 - DNA, 20 bp, Artificial Sequence
  Description of Artificial Sequence: Synthetic oligonucleotide
  Target: ATXN2; (-) strand; PAM type: NRG; PAM sequence: AAG
tccggtctgggtgaaagagc

SEQ ID NO: 25615 - DNA, 20 bp, Artificial Sequence
  Description of Artificial Sequence: Synthetic oligonucleotide
  Target: ATXN2; (-) strand; PAM type: NRG; PAM sequence: GAG
gcactccggtctgggtgaaa

SEQ ID NO: 25616 - DNA, 20 bp, Artificial Sequence
  Description of Artificial Sequence: Synthetic oligonucleotide
  Target: ATXN2; (-) strand; PAM type: NRG; PAM sequence: AAG
ctgcactccggtctgggtga

SEQ ID NO: 25617 - DNA, 20 bp, Artificial Sequence
  Description of Artificial Sequence: Synthetic oligonucleotide
  Target: ATXN2; (-) strand; PAM type: NRG; PAM sequence: GGG
gtgtcactgcactccggtct

SEQ ID NO: 25618 - DNA, 20 bp, Artificial Sequence
  Description of Artificial Sequence: Synthetic oligonucleotide
  Target: ATXN2; (-) strand; PAM type: NRG; PAM sequence: TGG
ggtgtcactgcactccggtc

SEQ ID NO: 25619 - DNA, 20 bp, Artificial Sequence
  Description of Artificial Sequence: Synthetic oligonucleotide
  Target: ATXN2; (-) strand; PAM type: NRG; PAM sequence: CGG
gagatggtgtcactgcactc

SEQ ID NO: 25620 - DNA, 20 bp, Artificial Sequence
  Description of Artificial Sequence: Synthetic oligonucleotide
  Target: ATXN2; (-) strand; PAM type: NRG; PAM sequence: TGG
gatgttgcagggagccgaga

SEQ ID NO: 25621 - DNA, 20 bp, Artificial Sequence
  Description of Artificial Sequence: Synthetic oligonucleotide
  Target: ATXN2; (-) strand; PAM type: NRG; PAM sequence: GAG
ggtggatgttgcagggagcc

SEQ ID NO: 25622 - DNA, 20 bp, Artificial Sequence
  Description of Artificial Sequence: Synthetic oligonucleotide
  Target: ATXN2; (-) strand; PAM type: NRG; PAM sequence: GAG
tggaaggtggatgttgcagg

SEQ ID NO: 25623 - DNA, 20 bp, Artificial Sequence
  Description of Artificial Sequence: Synthetic oligonucleotide
  Target: ATXN2; (-) strand; PAM type: NRG; PAM sequence: GGG
cctggaaggtggatgttgca

SEQ ID NO: 25624 - DNA, 20 bp, Artificial Sequence
  Description of Artificial Sequence: Synthetic oligonucleotide
  Target: ATXN2; (-) strand; PAM type: NRG; PAM sequence: AGG
acctggaaggtggatgttgc

SEQ ID NO: 25625 - DNA, 20 bp, Artificial Sequence
  Description of Artificial Sequence: Synthetic oligonucleotide
  Target: ATXN2; (-) strand; PAM type: NRG; PAM sequence: CAG
aacctggaaggtggatgttg

SEQ ID NO: 25626 - DNA, 20 bp, Artificial Sequence
  Description of Artificial Sequence: Synthetic oligonucleotide
  Target: ATXN2; (-) strand; PAM type: NRG; PAM sequence: TGG
attcccttgaacctggaagg

SEQ ID NO: 25627 - DNA, 20 bp, Artificial Sequence
  Description of Artificial Sequence: Synthetic oligonucleotide
  Target: ATXN2; (-) strand; PAM type: NRG; PAM sequence: AGG
gagattcccttgaacctgga

SEQ ID NO: 25628 - DNA, 20 bp, Artificial Sequence
  Description of Artificial Sequence: Synthetic oligonucleotide
  Target: ATXN2; (-) strand; PAM type: NRG; PAM sequence: AAG
ggagattcccttgaacctgg

SEQ ID NO: 25629 - DNA, 20 bp, Artificial Sequence
  Description of Artificial Sequence: Synthetic oligonucleotide
  Target: ATXN2; (-) strand; PAM type: NRG; PAM sequence: TGG
gcaggagattcccttgaacc

SEQ ID NO: 25630 - DNA, 20 bp, Artificial Sequence
  Description of Artificial Sequence: Synthetic oligonucleotide
  Target: ATXN2; (-) strand; PAM type: NRG; PAM sequence: GAG
tacttgggaggctgaggcag

SEQ ID NO: 25631 - DNA, 20 bp, Artificial Sequence
  Description of Artificial Sequence: Synthetic oligonucleotide
  Target: ATXN2; (-) strand; PAM type: NRG; PAM sequence: AGG
gctacttgggaggctgaggc

SEQ ID NO: 25632 - DNA, 20 bp, Artificial Sequence
  Description of Artificial Sequence: Synthetic oligonucleotide
  Target: ATXN2; (-) strand; PAM type: NRG; PAM sequence: CAG
agctacttgggaggctgagg

SEQ ID NO: 25633 - DNA, 20 bp, Artificial Sequence
  Description of Artificial Sequence: Synthetic oligonucleotide
  Target: ATXN2; (-) strand; PAM type: NRG; PAM sequence: AGG
cttagctacttgggaggctg

SEQ ID NO: 25634 - DNA, 20 bp, Artificial Sequence
  Description of Artificial Sequence: Synthetic oligonucleotide
  Target: ATXN2; (-) strand; PAM type: NRG; PAM sequence: GAG
tcttagctacttgggaggct

SEQ ID NO: 25635 - DNA, 20 bp, Artificial Sequence
  Description of Artificial Sequence: Synthetic oligonucleotide
  Target: ATXN2; (-) strand; PAM type: NRG; PAM sequence: AGG
tgtaatcttagctacttggg

SEQ ID NO: 25636 - DNA, 20 bp, Artificial Sequence
  Description of Artificial Sequence: Synthetic oligonucleotide
  Target: ATXN2; (-) strand; PAM type: NRG; PAM sequence: GAG
ctgtaatcttagctacttgg

SEQ ID NO: 25637 - DNA, 20 bp, Artificial Sequence
  Description of Artificial Sequence: Synthetic oligonucleotide
  Target: ATXN2; (-) strand; PAM type: NRG; PAM sequence: GGG
gcctgtaatcttagctactt

SEQ ID NO: 25638 - DNA, 20 bp, Artificial Sequence
  Description of Artificial Sequence: Synthetic oligonucleotide
  Target: ATXN2; (-) strand; PAM type: NRG; PAM sequence: TGG
cgcctgtaatcttagctact

SEQ ID NO: 25639 - DNA, 20 bp, Artificial Sequence
  Description of Artificial Sequence: Synthetic oligonucleotide
  Target: ATXN2; (-) strand; PAM type: NRG; PAM sequence: TAG
ttggtgggcgcctgtaatct

SEQ ID NO: 25640 - DNA, 20 bp, Artificial Sequence
  Description of Artificial Sequence: Synthetic oligonucleotide
  Target: ATXN2; (-) strand; PAM type: NRG; PAM sequence: GGG
cattagctgggcgtgttggt

SEQ ID NO: 25641 - DNA, 20 bp, Artificial Sequence
  Description of Artificial Sequence: Synthetic oligonucleotide
  Target: ATXN2; (-) strand; PAM type: NRG; PAM sequence: TGG
acattagctgggcgtgttgg

SEQ ID NO: 25642 - DNA, 20 bp, Artificial Sequence
  Description of Artificial Sequence: Synthetic oligonucleotide
  Target: ATXN2; (-) strand; PAM type: NRG; PAM sequence: TGG
caaacattagctgggcgtgt

SEQ ID NO: 25643 - DNA, 20 bp, Artificial Sequence
  Description of Artificial Sequence: Synthetic oligonucleotide
  Target: ATXN2; (-) strand; PAM type: NRG; PAM sequence: GGG
taaaaatacaaacattagct

SEQ ID NO: 25644 - DNA, 20 bp, Artificial Sequence
  Description of Artificial Sequence: Synthetic oligonucleotide
  Target: ATXN2; (-) strand; PAM type: NRG; PAM sequence: TGG
ctaaaaatacaaacattagc

SEQ ID NO: 25645 - DNA, 20 bp, Artificial Sequence
  Description of Artificial Sequence: Synthetic oligonucleotide
  Target: ATXN2; (-) strand; PAM type: NRG; PAM sequence: TAG
tctgctaaaaatacaaacat

SEQ ID NO: 25646 - DNA, 20 bp, Artificial Sequence
  Description of Artificial Sequence: Synthetic oligonucleotide
  Target: ATXN2; (-) strand; PAM type: NRG; PAM sequence: TGG
cgagaccagcctggccaaca

SEQ ID NO: 25647 - DNA, 20 bp, Artificial Sequence
  Description of Artificial Sequence: Synthetic oligonucleotide
  Target: ATXN2; (-) strand; PAM type: NRG; PAM sequence: TGG
tcaggagttcgagaccagcc

SEQ ID NO: 25648 - DNA, 20 bp, Artificial Sequence
  Description of Artificial Sequence: Synthetic oligonucleotide
  Target: ATXN2; (-) strand; PAM type: NRG; PAM sequence: CAG
tgaggtcaggagttcgagac

SEQ ID NO: 25649 - DNA, 20 bp, Artificial Sequence
  Description of Artificial Sequence: Synthetic oligonucleotide
  Target: ATXN2; (-) strand; PAM type: NRG; PAM sequence: GAG
tcacctgaggtcaggagttc

SEQ ID NO: 25650 - DNA, 20 bp, Artificial Sequence
  Description of Artificial Sequence: Synthetic oligonucleotide
  Target: ATXN2; (-) strand; PAM type: NRG; PAM sequence: GAG
ggtggatcacctgaggtcag

SEQ ID NO: 25651 - DNA, 20 bp, Artificial Sequence
  Description of Artificial Sequence: Synthetic oligonucleotide
  Target: ATXN2; (-) strand; PAM type: NRG; PAM sequence: AGG
tgggtggatcacctgaggtc

SEQ ID NO: 25652 - DNA, 20 bp, Artificial Sequence
  Description of Artificial Sequence: Synthetic oligonucleotide
  Target: ATXN2; (-) strand; PAM type: NRG; PAM sequence: CAG
gtgggtggatcacctgaggt

SEQ ID NO: 25653 - DNA, 20 bp, Artificial Sequence
  Description of Artificial Sequence: Synthetic oligonucleotide
  Target: ATXN2; (-) strand; PAM type: NRG; PAM sequence: AGG
caaggtgggtggatcacctg

SEQ ID NO: 25654 - DNA, 20 bp, Artificial Sequence
  Description of Artificial Sequence: Synthetic oligonucleotide
  Target: ATXN2; (-) strand; PAM type: NRG; PAM sequence: GAG
ccaaggtgggtggatcacct

SEQ ID NO: 25655 - DNA, 20 bp, Artificial Sequence
  Description of Artificial Sequence: Synthetic oligonucleotide
  Target: ATXN2; (-) strand; PAM type: NRG; PAM sequence: TGG
ctttgggaggccaaggtggg

SEQ ID NO: 25656 - DNA, 20 bp, Artificial Sequence
  Description of Artificial Sequence: Synthetic oligonucleotide
  Target: ATXN2; (-) strand; PAM type: NRG; PAM sequence: GGG
gcactttgggaggccaaggt

SEQ ID NO: 25657 - DNA, 20 bp, Artificial Sequence
  Description of Artificial Sequence: Synthetic oligonucleotide
  Target: ATXN2; (-) strand; PAM type: NRG; PAM sequence: TGG
agcactttgggaggccaagg

SEQ ID NO: 25658 - DNA, 20 bp, Artificial Sequence
  Description of Artificial Sequence: Synthetic oligonucleotide
  Target: ATXN2; (-) strand; PAM type: NRG; PAM sequence: AGG
cccagcactttgggaggcca

SEQ ID NO: 25659 - DNA, 20 bp, Artificial Sequence
  Description of Artificial Sequence: Synthetic oligonucleotide
  Target: ATXN2; (-) strand; PAM type: NRG; PAM sequence: AAG
tcccagcactttgggaggcc

SEQ ID NO: 25660 - DNA, 20 bp, Artificial Sequence
  Description of Artificial Sequence: Synthetic oligonucleotide
  Target: ATXN2; (-) strand; PAM type: NRG; PAM sequence: AGG
tgtaatcccagcactttggg

SEQ ID NO: 25661 - DNA, 20 bp, Artificial Sequence
  Description of Artificial Sequence: Synthetic oligonucleotide
  Target: ATXN2; (-) strand; PAM type: NRG; PAM sequence: GAG
ctgtaatcccagcactttgg

SEQ ID NO: 25662 - DNA, 20 bp, Artificial Sequence
  Description of Artificial Sequence: Synthetic oligonucleotide
  Target: ATXN2; (-) strand; PAM type: NRG; PAM sequence: GGG
acctgtaatcccagcacttt

SEQ ID NO: 25663 - DNA, 20 bp, Artificial Sequence
  Description of Artificial Sequence: Synthetic oligonucleotide
  Target: ATXN2; (-) strand; PAM type: NRG; PAM sequence: TGG
cacctgtaatcccagcactt

SEQ ID NO: 25664 - DNA, 20 bp, Artificial Sequence
  Description of Artificial Sequence: Synthetic oligonucleotide
  Target: ATXN2; (-) strand; PAM type: NRG; PAM sequence: CAG
gttgctcacacctgtaatcc

SEQ ID NO: 25665 - DNA, 20 bp, Artificial Sequence
  Description of Artificial Sequence: Synthetic oligonucleotide
  Target: ATXN2; (-) strand; PAM type: NRG; PAM sequence: TGG
gagatattttaggccgggca

SEQ ID NO: 25666 - DNA, 20 bp, Artificial Sequence
  Description of Artificial Sequence: Synthetic oligonucleotide
  Target: ATXN2; (-) strand; PAM type: NRG; PAM sequence: GGG
caaaagagatattttaggcc

SEQ ID NO: 25667 - DNA, 20 bp, Artificial Sequence
  Description of Artificial Sequence: Synthetic oligonucleotide
  Target: ATXN2; (-) strand; PAM type: NRG; PAM sequence: CGG
acaaaagagatattttaggc

SEQ ID NO: 25668 - DNA, 20 bp, Artificial Sequence
  Description of Artificial Sequence: Synthetic oligonucleotide
  Target: ATXN2; (-) strand; PAM type: NRG; PAM sequence: AGG
ttaaacaaaagagatatttt

SEQ ID NO: 25669 - DNA, 20 bp, Artificial Sequence
  Description of Artificial Sequence: Synthetic oligonucleotide
  Target: ATXN2; (-) strand; PAM type: NRG; PAM sequence: TAG
attaaacaaaagagatattt

SEQ ID NO: 25670 - DNA, 20 bp, Artificial Sequence
  Description of Artificial Sequence: Synthetic oligonucleotide
  Target: ATXN2; (-) strand; PAM type: NRG; PAM sequence: GAG
agtgcatccattaaacaaaa

SEQ ID NO: 25671 - DNA, 20 bp, Artificial Sequence
  Description of Artificial Sequence: Synthetic oligonucleotide
  Target: ATXN2; (-) strand; PAM type: NRG; PAM sequence: AAG
ttagtgcatccattaaacaa

SEQ ID NO: 25672 - DNA, 20 bp, Artificial Sequence
  Description of Artificial Sequence: Synthetic oligonucleotide
  Target: ATXN2; (-) strand; PAM type: NRG; PAM sequence: TAG
actccgaaggtatatctaat

SEQ ID NO: 25673 - DNA, 20 bp, Artificial Sequence
  Description of Artificial Sequence: Synthetic oligonucleotide
  Target: ATXN2; (-) strand; PAM type: NRG; PAM sequence: AGG
tttggctgcaagtactccga

SEQ ID NO: 25674 - DNA, 20 bp, Artificial Sequence
  Description of Artificial Sequence: Synthetic oligonucleotide
  Target: ATXN2; (-) strand; PAM type: NRG; PAM sequence: AAG
atttggctgcaagtactccg

SEQ ID NO: 25675 - DNA, 20 bp, Artificial Sequence
  Description of Artificial Sequence: Synthetic oligonucleotide
  Target: ATXN2; (-) strand; PAM type: NRG; PAM sequence: AAG
atccacatatatttggctgc

SEQ ID NO: 25676 - DNA, 20 bp, Artificial Sequence
  Description of Artificial Sequence: Synthetic oligonucleotide
  Target: ATXN2; (-) strand; PAM type: NRG; PAM sequence: TGG
aaacaaaatccacatatatt

SEQ ID NO: 25677 - DNA, 20 bp, Artificial Sequence
  Description of Artificial Sequence: Synthetic oligonucleotide
  Target: ATXN2; (-) strand; PAM type: NRG; PAM sequence: AAG
tacatagacatgaatatgga

SEQ ID NO: 25678 - DNA, 20 bp, Artificial Sequence
  Description of Artificial Sequence: Synthetic oligonucleotide
  Target: ATXN2; (-) strand; PAM type: NRG; PAM sequence: TGG
actgtacatagacatgaata

SEQ ID NO: 25679 - DNA, 20 bp, Artificial Sequence
  Description of Artificial Sequence: Synthetic oligonucleotide
  Target: ATXN2; (-) strand; PAM type: NRG; PAM sequence: TAG
gggatattgaccactgtaca

SEQ ID NO: 25680 - DNA, 20 bp, Artificial Sequence
  Description of Artificial Sequence: Synthetic oligonucleotide
  Target: ATXN2; (-) strand; PAM type: NRG; PAM sequence: GGG
actaatggcaagagtttgct

SEQ ID NO: 25681 - DNA, 20 bp, Artificial Sequence
  Description of Artificial Sequence: Synthetic oligonucleotide
  Target: ATXN2; (-) strand; PAM type: NRG; PAM sequence: TGG
tactaatggcaagagtttgc

SEQ ID NO: 25682 - DNA, 20 bp, Artificial Sequence
  Description of Artificial Sequence: Synthetic oligonucleotide
  Target: ATXN2; (-) strand; PAM type: NRG; PAM sequence: GAG
gcttcatttactaatggcaa

SEQ ID NO: 25683 - DNA, 20 bp, Artificial Sequence
  Description of Artificial Sequence: Synthetic oligonucleotide
  Target: ATXN2; (-) strand; PAM type: NRG; PAM sequence: AAG
tggcttcatttactaatggc

SEQ ID NO: 25684 - DNA, 20 bp, Artificial Sequence
  Description of Artificial Sequence: Synthetic oligonucleotide
  Target: ATXN2; (-) strand; PAM type: NRG; PAM sequence: TGG
agaatggcttcatttactaa

SEQ ID NO: 25685 - DNA, 20 bp, Artificial Sequence
  Description of Artificial Sequence: Synthetic oligonucleotide
  Target: ATXN2; (-) strand; PAM type: NRG; PAM sequence: TGG
aggggttaaaccacttagaa

SEQ ID NO: 25686 - DNA, 20 bp, Artificial Sequence
  Description of Artificial Sequence: Synthetic oligonucleotide
  Target: ATXN2; (-) strand; PAM type: NRG; PAM sequence: TAG
ctgggaggggttaaaccact

SEQ ID NO: 25687 - DNA, 20 bp, Artificial Sequence
  Description of Artificial Sequence: Synthetic oligonucleotide
  Target: ATXN2; (-) strand; PAM type: NRG; PAM sequence: GGG
gaagaagtgggttctgggag

SEQ ID NO: 25688 - DNA, 20 bp, Artificial Sequence
  Description of Artificial Sequence: Synthetic oligonucleotide
  Target: ATXN2; (-) strand; PAM type: NRG; PAM sequence: GGG
tgaagaagtgggttctggga

SEQ ID NO: 25689 - DNA, 20 bp, Artificial Sequence
  Description of Artificial Sequence: Synthetic oligonucleotide
  Target: ATXN2; (-) strand; PAM type: NRG; PAM sequence: AGG
atgaagaagtgggttctggg

SEQ ID NO: 25690 - DNA, 20 bp, Artificial Sequence
  Description of Artificial Sequence: Synthetic oligonucleotide
  Target: ATXN2; (-) strand; PAM type: NRG; PAM sequence: GAG
tatgaagaagtgggttctgg

SEQ ID NO: 25691 - DNA, 20 bp, Artificial Sequence
  Description of Artificial Sequence: Synthetic oligonucleotide
  Target: ATXN2; (-) strand; PAM type: NRG; PAM sequence: GGG
tatatgaagaagtgggttct

SEQ ID NO: 25692 - DNA, 20 bp, Artificial Sequence
  Description of Artificial Sequence: Synthetic oligonucleotide
  Target: ATXN2; (-) strand; PAM type: NRG; PAM sequence: TGG
atatatgaagaagtgggttc

SEQ ID NO: 25693 - DNA, 20 bp, Artificial Sequence
  Description of Artificial Sequence: Synthetic oligonucleotide
  Target: ATXN2; (-) strand; PAM type: NRG; PAM sequence: GGG
gtggttatatatgaagaagt

SEQ ID NO: 25694 - DNA, 20 bp, Artificial Sequence
  Description of Artificial Sequence: Synthetic oligonucleotide
  Target: ATXN2; (-) strand; PAM type: NRG; PAM sequence: TGG
agtggttatatatgaagaag

SEQ ID NO: 25695 - DNA, 20 bp, Artificial Sequence
  Description of Artificial Sequence: Synthetic oligonucleotide
  Target: ATXN2; (-) strand; PAM type: NRG; PAM sequence: AAG
cagagtggttatatatgaag

SEQ ID NO: 25696 - DNA, 20 bp, Artificial Sequence
  Description of Artificial Sequence: Synthetic oligonucleotide
  Target: ATXN2; (-) strand; PAM type: NRG; PAM sequence: AAG
tagcagagtggttatatatg

SEQ ID NO: 25697 - DNA, 20 bp, Artificial Sequence
  Description of Artificial Sequence: Synthetic oligonucleotide
  Target: ATXN2; (-) strand; PAM type: NRG; PAM sequence: TGG
gcctgaactttgtagcagag

SEQ ID NO: 25698 - DNA, 20 bp, Artificial Sequence
  Description of Artificial Sequence: Synthetic oligonucleotide
  Target: ATXN2; (-) strand; PAM type: NRG; PAM sequence: GAG
agggcctgaactttgtagca

SEQ ID NO: 25699 - DNA, 20 bp, Artificial Sequence
  Description of Artificial Sequence: Synthetic oligonucleotide
  Target: ATXN2; (-) strand; PAM type: NRG; PAM sequence: CAG
gtagggcctgaactttgtag

SEQ ID NO: 25700 - DNA, 20 bp, Artificial Sequence
  Description of Artificial Sequence: Synthetic oligonucleotide
  Target: ATXN2; (-) strand; PAM type: NRG; PAM sequence: TAG
actgtagggcctgaactttg

SEQ ID NO: 25701 - DNA, 20 bp, Artificial Sequence
  Description of Artificial Sequence: Synthetic oligonucleotide
  Target: ATXN2; (-) strand; PAM type: NRG; PAM sequence: GGG
ctgagacaggtaatactgta

SEQ ID NO: 25702 - DNA, 20 bp, Artificial Sequence
  Description of Artificial Sequence: Synthetic oligonucleotide
  Target: ATXN2; (-) strand; PAM type: NRG; PAM sequence: AGG
tctgagacaggtaatactgt

SEQ ID NO: 25703 - DNA, 20 bp, Artificial Sequence
  Description of Artificial Sequence: Synthetic oligonucleotide
  Target: ATXN2; (-) strand; PAM type: NRG; PAM sequence: TAG
ttctgagacaggtaatactg

SEQ ID NO: 25704 - DNA, 20 bp, Artificial Sequence
  Description of Artificial Sequence: Synthetic oligonucleotide
  Target: ATXN2; (-) strand; PAM type: NRG; PAM sequence: AGG
ctacctgaactttctgagac

SEQ ID NO: 25705 - DNA, 20 bp, Artificial Sequence
  Description of Artificial Sequence: Synthetic oligonucleotide
  Target: ATXN2; (-) strand; PAM type: NRG; PAM sequence: CAG
gctacctgaactttctgaga

SEQ ID NO: 25706 - DNA, 20 bp, Artificial Sequence
  Description of Artificial Sequence: Synthetic oligonucleotide
  Target: ATXN2; (-) strand; PAM type: NRG; PAM sequence: GAG
gcctgctacctgaactttct

SEQ ID NO: 25707 - DNA, 20 bp, Artificial Sequence
  Description of Artificial Sequence: Synthetic oligonucleotide
  Target: ATXN2; (-) strand; PAM type: NRG; PAM sequence: AGG
agtgtgttaataggaagtcc

SEQ ID NO: 25708 - DNA, 20 bp, Artificial Sequence
  Description of Artificial Sequence: Synthetic oligonucleotide
  Target: ATXN2; (-) strand; PAM type: NRG; PAM sequence: CAG
gagtgtgttaataggaagtc

SEQ ID NO: 25709 - DNA, 20 bp, Artificial Sequence
  Description of Artificial Sequence: Synthetic oligonucleotide
  Target: ATXN2; (-) strand; PAM type: NRG; PAM sequence: AAG
agtgagagtgtgttaatagg

SEQ ID NO: 25710 - DNA, 20 bp, Artificial Sequence
  Description of Artificial Sequence: Synthetic oligonucleotide
  Target: ATXN2; (-) strand; PAM type: NRG; PAM sequence: AGG
caaagtgagagtgtgttaat

SEQ ID NO: 25711 - DNA, 20 bp, Artificial Sequence
  Description of Artificial Sequence: Synthetic oligonucleotide
  Target: ATXN2; (-) strand; PAM type: NRG; PAM sequence: TAG
acaaagtgagagtgtgttaa

SEQ ID NO: 25712 - DNA, 20 bp, Artificial Sequence
  Description of Artificial Sequence: Synthetic oligonucleotide
  Target: ATXN2; (-) strand; PAM type: NRG; PAM sequence: GAG
gagaagaggacacaaagtga

SEQ ID NO: 25713 - DNA, 20 bp, Artificial Sequence
  Description of Artificial Sequence: Synthetic oligonucleotide
  Target: ATXN2; (-) strand; PAM type: NRG; PAM sequence: GAG
aagagaagaggacacaaagt

SEQ ID NO: 25714 - DNA, 20 bp, Artificial Sequence
  Description of Artificial Sequence: Synthetic oligonucleotide
  Target: ATXN2; (-) strand; PAM type: NRG; PAM sequence: AAG
gtagaagagaagaggacaca

SEQ ID NO: 25715 - DNA, 20 bp, Artificial Sequence
  Description of Artificial Sequence: Synthetic oligonucleotide
  Target: ATXN2; (-) strand; PAM type: NRG; PAM sequence: AGG
taacattagtagaagagaag

SEQ ID NO: 25716 - DNA, 20 bp, Artificial Sequence
  Description of Artificial Sequence: Synthetic oligonucleotide
  Target: ATXN2; (-) strand; PAM type: NRG; PAM sequence: GAG
ataacattagtagaagagaa

SEQ ID NO: 25717 - DNA, 20 bp, Artificial Sequence
  Description of Artificial Sequence: Synthetic oligonucleotide
  Target: ATXN2; (-) strand; PAM type: NRG; PAM sequence: AAG
caataacattagtagaagag

SEQ ID NO: 25718 - DNA, 20 bp, Artificial Sequence
  Description of Artificial Sequence: Synthetic oligonucleotide
  Target: ATXN2; (-) strand; PAM type: NRG; PAM sequence: GAG
cttcaataacattagtagaa

SEQ ID NO: 25719 - DNA, 20 bp, Artificial Sequence
  Description of Artificial Sequence: Synthetic oligonucleotide
  Target: ATXN2; (-) strand; PAM type: NRG; PAM sequence: AAG
ctcttcaataacattagtag

SEQ ID NO: 25720 - DNA, 20 bp, Artificial Sequence
  Description of Artificial Sequence: Synthetic oligonucleotide
  Target: ATXN2; (-) strand; PAM type: NRG; PAM sequence: TAG
gtactcttcaataacattag

SEQ ID NO: 25721 - DNA, 20 bp, Artificial Sequence
  Description of Artificial Sequence: Synthetic oligonucleotide
  Target: ATXN2; (-) strand; PAM type: NRG; PAM sequence: TAG
tcagtactcttcaataacat

SEQ ID NO: 25722 - DNA, 20 bp, Artificial Sequence
  Description of Artificial Sequence: Synthetic oligonucleotide
  Target: ATXN2; (-) strand; PAM type: NRG; PAM sequence: CAG
ctacatttgctttcataagt

SEQ ID NO: 25723 - DNA, 20 bp, Artificial Sequence
  Description of Artificial Sequence: Synthetic oligonucleotide
  Target: ATXN2; (-) strand; PAM type: NRG; PAM sequence: AAG
gatgctacatttgctttcat

SEQ ID NO: 25724 - DNA, 20 bp, Artificial Sequence
  Description of Artificial Sequence: Synthetic oligonucleotide
  Target: ATXN2; (-) strand; PAM type: NRG; PAM sequence: TGG
cagtatggtcagctaacatg

SEQ ID NO: 25725 - DNA, 20 bp, Artificial Sequence
  Description of Artificial Sequence: Synthetic oligonucleotide
  Target: ATXN2; (-) strand; PAM type: NRG; PAM sequence: CAG
gtgccagacagcagtatggt

SEQ ID NO: 25726 - DNA, 20 bp, Artificial Sequence
  Description of Artificial Sequence: Synthetic oligonucleotide
  Target: ATXN2; (-) strand; PAM type: NRG; PAM sequence: TGG
tcctgtgccagacagcagta

SEQ ID NO: 25727 - DNA, 20 bp, Artificial Sequence
  Description of Artificial Sequence: Synthetic oligonucleotide
  Target: ATXN2; (-) strand; PAM type: NRG; PAM sequence: CAG
aaatttcctgtgccagacag

SEQ ID NO: 25728 - DNA, 20 bp, Artificial Sequence
  Description of Artificial Sequence: Synthetic oligonucleotide
  Target: ATXN2; (-) strand; PAM type: NRG; PAM sequence: CAG
agaaaatttcctgtgccaga

SEQ ID NO: 25729 - DNA, 20 bp, Artificial Sequence
  Description of Artificial Sequence: Synthetic oligonucleotide
  Target: ATXN2; (-) strand; PAM type: NRG; PAM sequence: CAG
ctagagaaaatttcctgtgc

SEQ ID NO: 25730 - DNA, 20 bp, Artificial Sequence
  Description of Artificial Sequence: Synthetic oligonucleotide
  Target: ATXN2; (-) strand; PAM type: NRG; PAM sequence: GAG
ctgagtctaactcccaacta

SEQ ID NO: 25731 - DNA, 20 bp, Artificial Sequence
  Description of Artificial Sequence: Synthetic oligonucleotide
  Target: ATXN2; (-) strand; PAM type: NRG; PAM sequence: TAG
agctgagtctaactcccaac

SEQ ID NO: 25732 - DNA, 20 bp, Artificial Sequence
  Description of Artificial Sequence: Synthetic oligonucleotide
  Target: ATXN2; (-) strand; PAM type: NRG; PAM sequence: GAG
cagtgggcctttatttagct

SEQ ID NO: 25733 - DNA, 20 bp, Artificial Sequence
  Description of Artificial Sequence: Synthetic oligonucleotide
  Target: ATXN2; (-) strand; PAM type: NRG; PAM sequence: TAG
ttgcccagtgggcctttatt

SEQ ID NO: 25734 - DNA, 20 bp, Artificial Sequence
  Description of Artificial Sequence: Synthetic oligonucleotide
  Target: ATXN2; (-) strand; PAM type: NRG; PAM sequence: GGG
tagtgccatcattgcccagt

SEQ ID NO: 25735 - DNA, 20 bp, Artificial Sequence
  Description of Artificial Sequence: Synthetic oligonucleotide
  Target: ATXN2; (-) strand; PAM type: NRG; PAM sequence: TGG
ctagtgccatcattgcccag

SEQ ID NO: 25736 - DNA, 20 bp, Artificial Sequence
  Description of Artificial Sequence: Synthetic oligonucleotide
  Target: ATXN2; (-) strand; PAM type: NRG; PAM sequence: CAG
ttcctagtgccatcattgcc

SEQ ID NO: 25737 - DNA, 20 bp, Artificial Sequence
  Description of Artificial Sequence: Synthetic oligonucleotide
  Target: ATXN2; (-) strand; PAM type: NRG; PAM sequence: TAG
tgtatctacagagcgtttcc

SEQ ID NO: 25738 - DNA, 20 bp, Artificial Sequence
  Description of Artificial Sequence: Synthetic oligonucleotide
  Target: ATXN2; (-) strand; PAM type: NRG; PAM sequence: GAG
aatgcaagcctgtatctaca

SEQ ID NO: 25739 - DNA, 20 bp, Artificial Sequence
  Description of Artificial Sequence: Synthetic oligonucleotide
  Target: ATXN2; (-) strand; PAM type: NRG; PAM sequence: CAG
taaatgcaagcctgtatcta

SEQ ID NO: 25740 - DNA, 20 bp, Artificial Sequence
  Description of Artificial Sequence: Synthetic oligonucleotide
  Target: ATXN2; (-) strand; PAM type: NRG; PAM sequence: AAG
gggtccagtcatttaaatgc

SEQ ID NO: 25741 - DNA, 20 bp, Artificial Sequence
  Description of Artificial Sequence: Synthetic oligonucleotide
  Target: ATXN2; (-) strand; PAM type: NRG; PAM sequence: CAG
taggtggtaccctatgggtc

SEQ ID NO: 25742 - DNA, 20 bp, Artificial Sequence
  Description of Artificial Sequence: Synthetic oligonucleotide
  Target: ATXN2; (-) strand; PAM type: NRG; PAM sequence: GGG
cgtagtaggtggtaccctat

SEQ ID NO: 25743 - DNA, 20 bp, Artificial Sequence
  Description of Artificial Sequence: Synthetic oligonucleotide
  Target: ATXN2; (-) strand; PAM type: NRG; PAM sequence: TGG
tcgtagtaggtggtacccta

SEQ ID NO: 25744 - DNA, 20 bp, Artificial Sequence
  Description of Artificial Sequence: Synthetic oligonucleotide
  Target: ATXN2; (-) strand; PAM type: NRG; PAM sequence: TGG
actccttagttcgtagtagg

SEQ ID NO: 25745 - DNA, 20 bp, Artificial Sequence
  Description of Artificial Sequence: Synthetic oligonucleotide
  Target: ATXN2; (-) strand; PAM type: NRG; PAM sequence: AGG
attactccttagttcgtagt

SEQ ID NO: 25746 - DNA, 20 bp, Artificial Sequence
  Description of Artificial Sequence: Synthetic oligonucleotide
  Target: ATXN2; (-) strand; PAM type: NRG; PAM sequence: TAG
tattactccttagttcgtag

SEQ ID NO: 25747 - DNA, 20 bp, Artificial Sequence
  Description of Artificial Sequence: Synthetic oligonucleotide
  Target: ATXN2; (-) strand; PAM type: NRG; PAM sequence: TAG
aagtattactccttagttcg

SEQ ID NO: 25748 - DNA, 20 bp, Artificial Sequence
  Description of Artificial Sequence: Synthetic oligonucleotide
  Target: ATXN2; (-) strand; PAM type: NRG; PAM sequence: TAG
tcagcagaagtattactcct

SEQ ID NO: 25749 - DNA, 20 bp, Artificial Sequence
  Description of Artificial Sequence: Synthetic oligonucleotide
  Target: ATXN2; (-) strand; PAM type: NRG; PAM sequence: AAG
cagcagagccagatcagcag

SEQ ID NO: 25750 - DNA, 20 bp, Artificial Sequence
  Description of Artificial Sequence: Synthetic oligonucleotide
  Target: ATXN2; (-) strand; PAM type: NRG; PAM sequence: CAG
cctcagcagagccagatcag

SEQ ID NO: 25751 - DNA, 20 bp, Artificial Sequence
  Description of Artificial Sequence: Synthetic oligonucleotide
  Target: ATXN2; (-) strand; PAM type: NRG; PAM sequence: CAG
attcctcagcagagccagat

SEQ ID NO: 25752 - DNA, 20 bp, Artificial Sequence
  Description of Artificial Sequence: Synthetic oligonucleotide
  Target: ATXN2; (-) strand; PAM type: NRG; PAM sequence: CAG
cttatattcctcagcagagc

SEQ ID NO: 25753 - DNA, 20 bp, Artificial Sequence
  Description of Artificial Sequence: Synthetic oligonucleotide
  Target: ATXN2; (-) strand; PAM type: NRG; PAM sequence: GAG
ggagcttatattcctcagca

SEQ ID NO: 25754 - DNA, 20 bp, Artificial Sequence
  Description of Artificial Sequence: Synthetic oligonucleotide
  Target: ATXN2; (-) strand; PAM type: NRG; PAM sequence: CAG
tgggagcttatattcctcag

SEQ ID NO: 25755 - DNA, 20 bp, Artificial Sequence
  Description of Artificial Sequence: Synthetic oligonucleotide
  Target: ATXN2; (-) strand; PAM type: NRG; PAM sequence: CAG
ggctgggagcttatattcct

SEQ ID NO: 25756 - DNA, 20 bp, Artificial Sequence
  Description of Artificial Sequence: Synthetic oligonucleotide
  Target: ATXN2; (-) strand; PAM type: NRG; PAM sequence: GAG
tgggaaggaacagtggctgg

SEQ ID NO: 25757 - DNA, 20 bp, Artificial Sequence
  Description of Artificial Sequence: Synthetic oligonucleotide
  Target: ATXN2; (-) strand; PAM type: NRG; PAM sequence: GGG
actgggaaggaacagtggct

SEQ ID NO: 25758 - DNA, 20 bp, Artificial Sequence
  Description of Artificial Sequence: Synthetic oligonucleotide
  Target: ATXN2; (-) strand; PAM type: NRG; PAM sequence: TGG
tactgggaaggaacagtggc

SEQ ID NO: 25759 - DNA, 20 bp, Artificial Sequence
  Description of Artificial Sequence: Synthetic oligonucleotide
  Target: ATXN2; (-) strand; PAM type: NRG; PAM sequence: TGG
acagtactgggaaggaacag

SEQ ID NO: 25760 - DNA, 20 bp, Artificial Sequence
  Description of Artificial Sequence: Synthetic oligonucleotide
  Target: ATXN2; (-) strand; PAM type: NRG; PAM sequence: CAG
cttacagtactgggaaggaa

SEQ ID NO: 25761 - DNA, 20 bp, Artificial Sequence
  Description of Artificial Sequence: Synthetic oligonucleotide
  Target: ATXN2; (-) strand; PAM type: NRG; PAM sequence: AGG
ggcaacttacagtactggga

SEQ ID NO: 25762 - DNA, 20 bp, Artificial Sequence
  Description of Artificial Sequence: Synthetic oligonucleotide
  Target: ATXN2; (-) strand; PAM type: NRG; PAM sequence: AAG
tggcaacttacagtactggg

SEQ ID NO: 25763 - DNA, 20 bp, Artificial Sequence
  Description of Artificial Sequence: Synthetic oligonucleotide
  Target: ATXN2; (-) strand; PAM type: NRG; PAM sequence: GGG
tagtggcaacttacagtact

SEQ ID NO: 25764 - DNA, 20 bp, Artificial Sequence
  Description of Artificial Sequence: Synthetic oligonucleotide
  Target: ATXN2; (-) strand; PAM type: NRG; PAM sequence: TGG
ttagtggcaacttacagtac

SEQ ID NO: 25765 - DNA, 20 bp, Artificial Sequence
  Description of Artificial Sequence: Synthetic oligonucleotide
  Target: ATXN2; (-) strand; PAM type: NRG; PAM sequence: CAG
ctcctcttagtggcaactta

SEQ ID NO: 25766 - DNA, 20 bp, Artificial Sequence
  Description of Artificial Sequence: Synthetic oligonucleotide
  Target: ATXN2; (-) strand; PAM type: NRG; PAM sequence: TGG
tcgtcccttcctcctcttag

SEQ ID NO: 25767 - DNA, 20 bp, Artificial Sequence
  Description of Artificial Sequence: Synthetic oligonucleotide
  Target: ATXN2; (-) strand; PAM type: NRG; PAM sequence: TAG
gattcgtcccttcctcctct

SEQ ID NO: 25768 - DNA, 20 bp, Artificial Sequence
  Description of Artificial Sequence: Synthetic oligonucleotide
  Target: ATXN2; (-) strand; PAM type: NRG; PAM sequence: TAG
ttgtaggagtattgtgtgtt

SEQ ID NO: 25769 - DNA, 20 bp, Artificial Sequence
  Description of Artificial Sequence: Synthetic oligonucleotide
  Target: ATXN2; (-) strand; PAM type: NRG; PAM sequence: GAG
tggaataacctcttttgtag

SEQ ID NO: 25770 - DNA, 20 bp, Artificial Sequence
  Description of Artificial Sequence: Synthetic oligonucleotide
  Target: ATXN2; (-) strand; PAM type: NRG; PAM sequence: AGG
tctggaataacctcttttgt

SEQ ID NO: 25771 - DNA, 20 bp, Artificial Sequence
  Description of Artificial Sequence: Synthetic oligonucleotide
  Target: ATXN2; (-) strand; PAM type: NRG; PAM sequence: TAG
atctggaataacctcttttg

SEQ ID NO: 25772 - DNA, 20 bp, Artificial Sequence
  Description of Artificial Sequence: Synthetic oligonucleotide
  Target: ATXN2; (-) strand; PAM type: NRG; PAM sequence: TGG
tgccaaataaaaaatccatc

SEQ ID NO: 25773 - DNA, 20 bp, Artificial Sequence
  Description of Artificial Sequence: Synthetic oligonucleotide
  Target: ATXN2; (-) strand; PAM type: NRG; PAM sequence: AAG
ggagacaatgacagttatag

SEQ ID NO: 25774 - DNA, 20 bp, Artificial Sequence
  Description of Artificial Sequence: Synthetic oligonucleotide
  Target: ATXN2; (-) strand; PAM type: NRG; PAM sequence: TAG
tagggagacaatgacagtta

SEQ ID NO: 25775 - DNA, 20 bp, Artificial Sequence
  Description of Artificial Sequence: Synthetic oligonucleotide
  Target: ATXN2; (-) strand; PAM type: NRG; PAM sequence: CAG
gcccattagggagacaatga

SEQ ID NO: 25776 - DNA, 20 bp, Artificial Sequence
  Description of Artificial Sequence: Synthetic oligonucleotide
  Target: ATXN2; (-) strand; PAM type: NRG; PAM sequence: GAG
gcatcactttgcccattagg

SEQ ID NO: 25777 - DNA, 20 bp, Artificial Sequence
  Description of Artificial Sequence: Synthetic oligonucleotide
  Target: ATXN2; (-) strand; PAM type: NRG; PAM sequence: GGG
tggcatcactttgcccatta

SEQ ID NO: 25778 - DNA, 20 bp, Artificial Sequence
  Description of Artificial Sequence: Synthetic oligonucleotide
  Target: ATXN2; (-) strand; PAM type: NRG; PAM sequence: AGG
ttggcatcactttgcccatt

SEQ ID NO: 25779 - DNA, 20 bp, Artificial Sequence
  Description of Artificial Sequence: Synthetic oligonucleotide
  Target: ATXN2; (-) strand; PAM type: NRG; PAM sequence: TAG
tttggcatcactttgcccat

SEQ ID NO: 25780 - DNA, 20 bp, Artificial Sequence
  Description of Artificial Sequence: Synthetic oligonucleotide
  Target: ATXN2; (-) strand; PAM type: NRG; PAM sequence: TGG
ctggctcagatttcttattt

SEQ ID NO: 25781 - DNA, 20 bp, Artificial Sequence
  Description of Artificial Sequence: Synthetic oligonucleotide
  Target: ATXN2; (-) strand; PAM type: NRG; PAM sequence: CAG
catgcttaaatttgctggct

SEQ ID NO: 25782 - DNA, 20 bp, Artificial Sequence
  Description of Artificial Sequence: Synthetic oligonucleotide
  Target: ATXN2; (-) strand; PAM type: NRG; PAM sequence: TGG
agttccatgcttaaatttgc

SEQ ID NO: 25783 - DNA, 20 bp, Artificial Sequence
  Description of Artificial Sequence: Synthetic oligonucleotide
  Target: ATXN2; (-) strand; PAM type: NRG; PAM sequence: AAG
gttagaattagctaggcttg

SEQ ID NO: 25784 - DNA, 20 bp, Artificial Sequence
  Description of Artificial Sequence: Synthetic oligonucleotide
  Target: ATXN2; (-) strand; PAM type: NRG; PAM sequence: AGG
agaagaggttagaattagct

SEQ ID NO: 25785 - DNA, 20 bp, Artificial Sequence
  Description of Artificial Sequence: Synthetic oligonucleotide
  Target: ATXN2; (-) strand; PAM type: NRG; PAM sequence: TAG
aagaagaggttagaattagc

SEQ ID NO: 25786 - DNA, 20 bp, Artificial Sequence
  Description of Artificial Sequence: Synthetic oligonucleotide
  Target: ATXN2; (-) strand; PAM type: NRG; PAM sequence: TAG
ggataagaagaggttagaat

SEQ ID NO: 25787 - DNA, 20 bp, Artificial Sequence
  Description of Artificial Sequence: Synthetic oligonucleotide
  Target: ATXN2; (-) strand; PAM type: NRG; PAM sequence: TAG
agtttgggataagaagaggt

SEQ ID NO: 25788 - DNA, 20 bp, Artificial Sequence
  Description of Artificial Sequence: Synthetic oligonucleotide
  Target: ATXN2; (-) strand; PAM type: NRG; PAM sequence: AGG
acctagtttgggataagaag

SEQ ID NO: 25789 - DNA, 20 bp, Artificial Sequence
  Description of Artificial Sequence: Synthetic oligonucleotide
  Target: ATXN2; (-) strand; PAM type: NRG; PAM sequence: GAG
cacctagtttgggataagaa

SEQ ID NO: 25790 - DNA, 20 bp, Artificial Sequence
  Description of Artificial Sequence: Synthetic oligonucleotide
  Target: ATXN2; (-) strand; PAM type: NRG; PAM sequence: AAG
cacacctagtttgggataag

SEQ ID NO: 25791 - DNA, 20 bp, Artificial Sequence
  Description of Artificial Sequence: Synthetic oligonucleotide
  Target: ATXN2; (-) strand; PAM type: NRG; PAM sequence: AAG
acccacacctagtttgggat

SEQ ID NO: 25792 - DNA, 20 bp, Artificial Sequence
  Description of Artificial Sequence: Synthetic oligonucleotide
  Target: ATXN2; (-) strand; PAM type: NRG; PAM sequence: GGG
tacctacccacacctagttt

SEQ ID NO: 25793 - DNA, 20 bp, Artificial Sequence
  Description of Artificial Sequence: Synthetic oligonucleotide
  Target: ATXN2; (-) strand; PAM type: NRG; PAM sequence: TGG
atacctacccacacctagtt

SEQ ID NO: 25794 - DNA, 20 bp, Artificial Sequence
  Description of Artificial Sequence: Synthetic oligonucleotide
  Target: ATXN2; (-) strand; PAM type: NRG; PAM sequence: TAG
cactcatacctacccacacc

SEQ ID NO: 25795 - DNA, 20 bp, Artificial Sequence
  Description of Artificial Sequence: Synthetic oligonucleotide
  Target: ATXN2; (-) strand; PAM type: NRG; PAM sequence: AGG
gcttttattccctgatgtac

SEQ ID NO: 25796 - DNA, 20 bp, Artificial Sequence
  Description of Artificial Sequence: Synthetic oligonucleotide
  Target: ATXN2; (-) strand; PAM type: NRG; PAM sequence: CAG
tgcttttattccctgatgta

SEQ ID NO: 25797 - DNA, 20 bp, Artificial Sequence
  Description of Artificial Sequence: Synthetic oligonucleotide
  Target: ATXN2; (-) strand; PAM type: NRG; PAM sequence: TGG
ctggcagctaagcccagagg

SEQ ID NO: 25798 - DNA, 20 bp, Artificial Sequence
  Description of Artificial Sequence: Synthetic oligonucleotide
  Target: ATXN2; (-) strand; PAM type: NRG; PAM sequence: AGG
gagctggcagctaagcccag

SEQ ID NO: 25799 - DNA, 20 bp, Artificial Sequence
  Description of Artificial Sequence: Synthetic oligonucleotide
  Target: ATXN2; (-) strand; PAM type: NRG; PAM sequence: GAG
ggagctggcagctaagccca

SEQ ID NO: 25800 - DNA, 20 bp, Artificial Sequence
  Description of Artificial Sequence: Synthetic oligonucleotide
  Target: ATXN2; (-) strand; PAM type: NRG; PAM sequence: CAG
gtggagctggcagctaagcc

SEQ ID NO: 25801 - DNA, 20 bp, Artificial Sequence
  Description of Artificial Sequence: Synthetic oligonucleotide
  Target: ATXN2; (-) strand; PAM type: NRG; PAM sequence: AAG
tgctggtggagctggcagct

SEQ ID NO: 25802 - DNA, 20 bp, Artificial Sequence
  Description of Artificial Sequence: Synthetic oligonucleotide
  Target: ATXN2; (-) strand; PAM type: NRG; PAM sequence: CAG
agtgctgctggtggagctgg

SEQ ID NO: 25803 - DNA, 20 bp, Artificial Sequence
  Description of Artificial Sequence: Synthetic oligonucleotide
  Target: ATXN2; (-) strand; PAM type: NRG; PAM sequence: TGG
agtagtgctgctggtggagc

SEQ ID NO: 25804 - DNA, 20 bp, Artificial Sequence
  Description of Artificial Sequence: Synthetic oligonucleotide
  Target: ATXN2; (-) strand; PAM type: NRG; PAM sequence: GAG
tgggagtagtgctgctggtg

SEQ ID NO: 25805 - DNA, 20 bp, Artificial Sequence
  Description of Artificial Sequence: Synthetic oligonucleotide
  Target: ATXN2; (-) strand; PAM type: NRG; PAM sequence: TGG
aatgggagtagtgctgctgg

SEQ ID NO: 25806 - DNA, 20 bp, Artificial Sequence
  Description of Artificial Sequence: Synthetic oligonucleotide
  Target: ATXN2; (-) strand; PAM type: NRG; PAM sequence: TGG
agcaatgggagtagtgctgc

SEQ ID NO: 25807 - DNA, 20 bp, Artificial Sequence
  Description of Artificial Sequence: Synthetic oligonucleotide
  Target: ATXN2; (-) strand; PAM type: NRG; PAM sequence: TAG
agaattgctagcaatgggag

SEQ ID NO: 25808 - DNA, 20 bp, Artificial Sequence
  Description of Artificial Sequence: Synthetic oligonucleotide
  Target: ATXN2; (-) strand; PAM type: NRG; PAM sequence: GAG
cttagaattgctagcaatgg

SEQ ID NO: 25809 - DNA, 20 bp, Artificial Sequence
  Description of Artificial Sequence: Synthetic oligonucleotide
  Target: ATXN2; (-) strand; PAM type: NRG; PAM sequence: GGG
ctcttagaattgctagcaat

SEQ ID NO: 25810 - DNA, 20 bp, Artificial Sequence
  Description of Artificial Sequence: Synthetic oligonucleotide
  Target: ATXN2; (-) strand; PAM type: NRG; PAM sequence: TGG
gctcttagaattgctagcaa

SEQ ID NO: 25811 - DNA, 20 bp, Artificial Sequence
  Description of Artificial Sequence: Synthetic oligonucleotide
  Target: ATXN2; (-) strand; PAM type: NRG; PAM sequence: TAG
ctcttggctcttagaattgc

SEQ ID NO: 25812 - DNA, 20 bp, Artificial Sequence
  Description of Artificial Sequence: Synthetic oligonucleotide
  Target: ATXN2; (-) strand; PAM type: NRG; PAM sequence: TAG
ctcagcacactcttggctct

SEQ ID NO: 25813 - DNA, 20 bp, Artificial Sequence
  Description of Artificial Sequence: Synthetic oligonucleotide
  Target: ATXN2; (-) strand; PAM type: NRG; PAM sequence: TGG
gaactccctcagcacactct

SEQ ID NO: 25814 - DNA, 20 bp, Artificial Sequence
  Description of Artificial Sequence: Synthetic oligonucleotide
  Target: ATXN2; (-) strand; PAM type: NRG; PAM sequence: CAG
gctgctctggggaactccct

SEQ ID NO: 25815 - DNA, 20 bp, Artificial Sequence
  Description of Artificial Sequence: Synthetic oligonucleotide
  Target: ATXN2; (-) strand; PAM type: NRG; PAM sequence: GGG
agctgagtcctgctgctctg

SEQ ID NO: 25816 - DNA, 20 bp, Artificial Sequence
  Description of Artificial Sequence: Synthetic oligonucleotide
  Target: ATXN2; (-) strand; PAM type: NRG; PAM sequence: GGG
cagctgagtcctgctgctct

SEQ ID NO: 25817 - DNA, 20 bp, Artificial Sequence
  Description of Artificial Sequence: Synthetic oligonucleotide
  Target: ATXN2; (-) strand; PAM type: NRG; PAM sequence: TGG
ccagctgagtcctgctgctc

SEQ ID NO: 25818 - DNA, 20 bp, Artificial Sequence
  Description of Artificial Sequence: Synthetic oligonucleotide
  Target: ATXN2; (-) strand; PAM type: NRG; PAM sequence: GAG
gctccattccacccccagct

SEQ ID NO: 25819 - DNA, 20 bp, Artificial Sequence
  Description of Artificial Sequence: Synthetic oligonucleotide
  Target: ATXN2; (-) strand; PAM type: NRG; PAM sequence: CAG
tgaatgctccattccacccc

SEQ ID NO: 25820 - DNA, 20 bp, Artificial Sequence
  Description of Artificial Sequence: Synthetic oligonucleotide
  Target: ATXN2; (-) strand; PAM type: NRG; PAM sequence: TAG
ttccaaaattcagccatttc

SEQ ID NO: 25821 - DNA, 20 bp, Artificial Sequence
  Description of Artificial Sequence: Synthetic oligonucleotide
  Target: ATXN2; (-) strand; PAM type: NRG; PAM sequence: CAG
tagagagattttccaaaatt

SEQ ID NO: 25822 - DNA, 20 bp, Artificial Sequence
  Description of Artificial Sequence: Synthetic oligonucleotide
  Target: ATXN2; (-) strand; PAM type: NRG; PAM sequence: GAG
gtctcttagaatctcttaga

SEQ ID NO: 25823 - DNA, 20 bp, Artificial Sequence
  Description of Artificial Sequence: Synthetic oligonucleotide
  Target: ATXN2; (-) strand; PAM type: NRG; PAM sequence: GAG
tagtctcttagaatctctta

SEQ ID NO: 25824 - DNA, 20 bp, Artificial Sequence
  Description of Artificial Sequence: Synthetic oligonucleotide
  Target: ATXN2; (-) strand; PAM type: NRG; PAM sequence: TAG
attagtctcttagaatctct

SEQ ID NO: 25825 - DNA, 20 bp, Artificial Sequence
  Description of Artificial Sequence: Synthetic oligonucleotide
  Target: ATXN2; (-) strand; PAM type: NRG; PAM sequence: TAG
gtaagatagcattagtctct

SEQ ID NO: 25826 - DNA, 20 bp, Artificial Sequence
  Description of Artificial Sequence: Synthetic oligonucleotide
  Target: ATXN2; (-) strand; PAM type: NRG; PAM sequence: TAG
aggtgttggtaagatagcat

SEQ ID NO: 25827 - DNA, 20 bp, Artificial Sequence
  Description of Artificial Sequence: Synthetic oligonucleotide
  Target: ATXN2; (-) strand; PAM type: NRG; PAM sequence: TAG
aagatgaggtgttggtaaga

SEQ ID NO: 25828 - DNA, 20 bp, Artificial Sequence
  Description of Artificial Sequence: Synthetic oligonucleotide
  Target: ATXN2; (-) strand; PAM type: NRG; PAM sequence: AAG
agcaaagatgaggtgttggt

SEQ ID NO: 25829 - DNA, 20 bp, Artificial Sequence
  Description of Artificial Sequence: Synthetic oligonucleotide
  Target: ATXN2; (-) strand; PAM type: NRG; PAM sequence: TGG
tttcagcaaagatgaggtgt

SEQ ID NO: 25830 - DNA, 20 bp, Artificial Sequence
  Description of Artificial Sequence: Synthetic oligonucleotide
  Target: ATXN2; (-) strand; PAM type: NRG; PAM sequence: AGG
agtagctttcagcaaagatg

SEQ ID NO: 25831 - DNA, 20 bp, Artificial Sequence
  Description of Artificial Sequence: Synthetic oligonucleotide
  Target: ATXN2; (-) strand; PAM type: NRG; PAM sequence: GAG
cagtagctttcagcaaagat

SEQ ID NO: 25832 - DNA, 20 bp, Artificial Sequence
  Description of Artificial Sequence: Synthetic oligonucleotide
  Target: ATXN2; (-) strand; PAM type: NRG; PAM sequence: AAG
gccatcagtagctttcagca

SEQ ID NO: 25833 - DNA, 20 bp, Artificial Sequence
  Description of Artificial Sequence: Synthetic oligonucleotide
  Target: ATXN2; (-) strand; PAM type: NRG; PAM sequence: CAG
ctagtgccatcagtagcttt

SEQ ID NO: 25834 - DNA, 20 bp, Artificial Sequence
  Description of Artificial Sequence: Synthetic oligonucleotide
  Target: ATXN2; (-) strand; PAM type: NRG; PAM sequence: TAG
cagatttctagtgccatcag

SEQ ID NO: 25835 - DNA, 20 bp, Artificial Sequence
  Description of Artificial Sequence: Synthetic oligonucleotide
  Target: ATXN2; (-) strand; PAM type: NRG; PAM sequence: CAG
ggtcagatttctagtgccat

SEQ ID NO: 25836 - DNA, 20 bp, Artificial Sequence
  Description of Artificial Sequence: Synthetic oligonucleotide
  Target: ATXN2; (-) strand; PAM type: NRG; PAM sequence: TAG
atcaaataaggtcagatttc

SEQ ID NO: 25837 - DNA, 20 bp, Artificial Sequence
  Description of Artificial Sequence: Synthetic oligonucleotide
  Target: ATXN2; (-) strand; PAM type: NRG; PAM sequence: CAG
aggttagtatcaaataaggt

SEQ ID NO: 25838 - DNA, 20 bp, Artificial Sequence
  Description of Artificial Sequence: Synthetic oligonucleotide
  Target: ATXN2; (-) strand; PAM type: NRG; PAM sequence: AGG
attcaggttagtatcaaata

SEQ ID NO: 25839 - DNA, 20 bp, Artificial Sequence
  Description of Artificial Sequence: Synthetic oligonucleotide
  Target: ATXN2; (-) strand; PAM type: NRG; PAM sequence: AAG
gattcaggttagtatcaaat

SEQ ID NO: 25840 - DNA, 20 bp, Artificial Sequence
  Description of Artificial Sequence: Synthetic oligonucleotide
  Target: ATXN2; (-) strand; PAM type: NRG; PAM sequence: TAG
gagaagaacgtgattcaggt

SEQ ID NO: 25841 - DNA, 20 bp, Artificial Sequence
  Description of Artificial Sequence: Synthetic oligonucleotide
  Target: ATXN2; (-) strand; PAM type: NRG; PAM sequence: AGG
tgtagagaagaacgtgattc

SEQ ID NO: 25842 - DNA, 20 bp, Artificial Sequence
  Description of Artificial Sequence: Synthetic oligonucleotide
  Target: ATXN2; (-) strand; PAM type: NRG; PAM sequence: CAG
atgtagagaagaacgtgatt

SEQ ID NO: 25843 - DNA, 20 bp, Artificial Sequence
  Description of Artificial Sequence: Synthetic oligonucleotide
  Target: ATXN2; (-) strand; PAM type: NRG; PAM sequence: AAG
aactttaagataatgtagag

SEQ ID NO: 25844 - DNA, 20 bp, Artificial Sequence
  Description of Artificial Sequence: Synthetic oligonucleotide
  Target: ATXN2; (-) strand; PAM type: NRG; PAM sequence: GAG
cataactttaagataatgta

SEQ ID NO: 25845 - DNA, 20 bp, Artificial Sequence
  Description of Artificial Sequence: Synthetic oligonucleotide
  Target: ATXN2; (-) strand; PAM type: NRG; PAM sequence: TAG
cacataactttaagataatg

SEQ ID NO: 25846 - DNA, 20 bp, Artificial Sequence
  Description of Artificial Sequence: Synthetic oligonucleotide
  Target: ATXN2; (-) strand; PAM type: NRG; PAM sequence: AAG
ccagcaatccacataacttt

SEQ ID NO: 25847 - DNA, 20 bp, Artificial Sequence
  Description of Artificial Sequence: Synthetic oligonucleotide
  Target: ATXN2; (-) strand; PAM type: NRG; PAM sequence: CAG
atggctaaattaatttttgc

SEQ ID NO: 25848 - DNA, 20 bp, Artificial Sequence
  Description of Artificial Sequence: Synthetic oligonucleotide
  Target: ATXN2; (-) strand; PAM type: NRG; PAM sequence: TGG
tacattcttgaaaatacaca

SEQ ID NO: 25849 - DNA, 20 bp, Artificial Sequence
  Description of Artificial Sequence: Synthetic oligonucleotide
  Target: ATXN2; (-) strand; PAM type: NRG; PAM sequence: TGG
gttattatttgatgttttct

SEQ ID NO: 25850 - DNA, 20 bp, Artificial Sequence
  Description of Artificial Sequence: Synthetic oligonucleotide
  Target: ATXN2; (-) strand; PAM type: NRG; PAM sequence: AGG
ggatttcaggatcttaaggt

SEQ ID NO: 25851 - DNA, 20 bp, Artificial Sequence
  Description of Artificial Sequence: Synthetic oligonucleotide
  Target: ATXN2; (-) strand; PAM type: NRG; PAM sequence: TAG
gggatttcaggatcttaagg

SEQ ID NO: 25852 - DNA, 20 bp, Artificial Sequence
  Description of Artificial Sequence: Synthetic oligonucleotide
  Target: ATXN2; (-) strand; PAM type: NRG; PAM sequence: AGG
aaagggatttcaggatctta

SEQ ID NO: 25853 - DNA, 20 bp, Artificial Sequence
  Description of Artificial Sequence: Synthetic oligonucleotide
  Target: ATXN2; (-) strand; PAM type: NRG; PAM sequence: AAG
taaagggatttcaggatctt

SEQ ID NO: 25854 - DNA, 20 bp, Artificial Sequence
  Description of Artificial Sequence: Synthetic oligonucleotide
  Target: ATXN2; (-) strand; PAM type: NRG; PAM sequence: AGG
gtgagaattaaagggatttc

SEQ ID NO: 25855 - DNA, 20 bp, Artificial Sequence
  Description of Artificial Sequence: Synthetic oligonucleotide
  Target: ATXN2; (-) strand; PAM type: NRG; PAM sequence: CAG
tgtgagaattaaagggattt

SEQ ID NO: 25856 - DNA, 20 bp, Artificial Sequence
  Description of Artificial Sequence: Synthetic oligonucleotide
  Target: ATXN2; (-) strand; PAM type: NRG; PAM sequence: GGG
ctagtgttgtgagaattaaa

SEQ ID NO: 25857 - DNA, 20 bp, Artificial Sequence
  Description of Artificial Sequence: Synthetic oligonucleotide
  Target: ATXN2; (-) strand; PAM type: NRG; PAM sequence: AGG
tctagtgttgtgagaattaa

SEQ ID NO: 25858 - DNA, 20 bp, Artificial Sequence
  Description of Artificial Sequence: Synthetic oligonucleotide
  Target: ATXN2; (-) strand; PAM type: NRG; PAM sequence: AAG
gtctagtgttgtgagaatta

SEQ ID NO: 25859 - DNA, 20 bp, Artificial Sequence
  Description of Artificial Sequence: Synthetic oligonucleotide
  Target: ATXN2; (-) strand; PAM type: NRG; PAM sequence: GAG
agttttttgtctagtgttgt

SEQ ID NO: 25860 - DNA, 20 bp, Artificial Sequence
  Description of Artificial Sequence: Synthetic oligonucleotide
  Target: ATXN2; (-) strand; PAM type: NRG; PAM sequence: TAG
ctatagtgtagttttttgtc

SEQ ID NO: 25861 - DNA, 20 bp, Artificial Sequence
  Description of Artificial Sequence: Synthetic oligonucleotide
  Target: ATXN2; (-) strand; PAM type: NRG; PAM sequence: TAG
tttggaattttcctatagtg

SEQ ID NO: 25862 - DNA, 20 bp, Artificial Sequence
  Description of Artificial Sequence: Synthetic oligonucleotide
  Target: ATXN2; (-) strand; PAM type: NRG; PAM sequence: TAG
actcgtttggaattttccta

SEQ ID NO: 25863 - DNA, 20 bp, Artificial Sequence
  Description of Artificial Sequence: Synthetic oligonucleotide
  Target: ATXN2; (-) strand; PAM type: NRG; PAM sequence: TGG
agaagataatatgactcgtt

SEQ ID NO: 25864 - DNA, 20 bp, Artificial Sequence
  Description of Artificial Sequence: Synthetic oligonucleotide
  Target: ATXN2; (-) strand; PAM type: NRG; PAM sequence: AAG
agtcctgttgcttcttccag

SEQ ID NO: 25865 - DNA, 20 bp, Artificial Sequence
  Description of Artificial Sequence: Synthetic oligonucleotide
  Target: ATXN2; (-) strand; PAM type: NRG; PAM sequence: CAG
aacagtcctgttgcttcttc

SEQ ID NO: 25866 - DNA, 20 bp, Artificial Sequence
  Description of Artificial Sequence: Synthetic oligonucleotide
  Target: ATXN2; (-) strand; PAM type: NRG; PAM sequence: CAG
ggatcttagacgtaaaggaa

SEQ ID NO: 25867 - DNA, 20 bp, Artificial Sequence
  Description of Artificial Sequence: Synthetic oligonucleotide
  Target: ATXN2; (-) strand; PAM type: NRG; PAM sequence: AGG
taacaggatcttagacgtaa

SEQ ID NO: 25868 - DNA, 20 bp, Artificial Sequence
  Description of Artificial Sequence: Synthetic oligonucleotide
  Target: ATXN2; (-) strand; PAM type: NRG; PAM sequence: AAG
ttaacaggatcttagacgta

SEQ ID NO: 25869 - DNA, 20 bp, Artificial Sequence
  Description of Artificial Sequence: Synthetic oligonucleotide
  Target: ATXN2; (-) strand; PAM type: NRG; PAM sequence: TAG
ttaagacattaacaggatct

SEQ ID NO: 25870 - DNA, 20 bp, Artificial Sequence
  Description of Artificial Sequence: Synthetic oligonucleotide
  Target: ATXN2; (-) strand; PAM type: NRG; PAM sequence: AGG
agtatgattaagacattaac

SEQ ID NO: 25871 - DNA, 20 bp, Artificial Sequence
  Description of Artificial Sequence: Synthetic oligonucleotide
  Target: ATXN2; (-) strand; PAM type: NRG; PAM sequence: CAG
tagtatgattaagacattaa

SEQ ID NO: 25872 - DNA, 20 bp, Artificial Sequence
  Description of Artificial Sequence: Synthetic oligonucleotide
  Target: ATXN2; (-) strand; PAM type: NRG; PAM sequence: AAG
tttcaaaaactagtatgatt

SEQ ID NO: 25873 - DNA, 20 bp, Artificial Sequence
  Description of Artificial Sequence: Synthetic oligonucleotide
  Target: ATXN2; (-) strand; PAM type: NRG; PAM sequence: TAG
aatgtgtgcttttcaaaaac

SEQ ID NO: 25874 - DNA, 20 bp, Artificial Sequence
  Description of Artificial Sequence: Synthetic oligonucleotide
  Target: ATXN2; (-) strand; PAM type: NRG; PAM sequence: GAG
agagtattgtttttaatact

SEQ ID NO: 25875 - DNA, 20 bp, Artificial Sequence
  Description of Artificial Sequence: Synthetic oligonucleotide
  Target: ATXN2; (-) strand; PAM type: NRG; PAM sequence: GAG
tttaatttcttgaatcaaaa

SEQ ID NO: 25876 - DNA, 20 bp, Artificial Sequence
  Description of Artificial Sequence: Synthetic oligonucleotide
  Target: ATXN2; (-) strand; PAM type: NRG; PAM sequence: AAG
gctttaatttcttgaatcaa

SEQ ID NO: 25877 - DNA, 20 bp, Artificial Sequence
  Description of Artificial Sequence: Synthetic oligonucleotide
  Target: ATXN2; (-) strand; PAM type: NRG; PAM sequence: GAG
taaaaatctctagctgcttc

SEQ ID NO: 25878 - DNA, 20 bp, Artificial Sequence
  Description of Artificial Sequence: Synthetic oligonucleotide
  Target: ATXN2; (-) strand; PAM type: NRG; PAM sequence: TAG
tatggttctataaaaatctc

SEQ ID NO: 25879 - DNA, 20 bp, Artificial Sequence
  Description of Artificial Sequence: Synthetic oligonucleotide
  Target: ATXN2; (-) strand; PAM type: NRG; PAM sequence: TGG
gagaaaaaaatccgtttata

SEQ ID NO: 25880 - DNA, 20 bp, Artificial Sequence
  Description of Artificial Sequence: Synthetic oligonucleotide
  Target: ATXN2; (-) strand; PAM type: NRG; PAM sequence: GAG
acacacacataccctgtagt

SEQ ID NO: 25881 - DNA, 20 bp, Artificial Sequence
  Description of Artificial Sequence: Synthetic oligonucleotide
  Target: ATXN2; (-) strand; PAM type: NRG; PAM sequence: TAG
acacacacacacataccctg

SEQ ID NO: 25882 - DNA, 20 bp, Artificial Sequence
  Description of Artificial Sequence: Synthetic oligonucleotide
  Target: ATXN2; (-) strand; PAM type: NRG; PAM sequence: AAG
gtttgaagacggcttgactc

SEQ ID NO: 25883 - DNA, 20 bp, Artificial Sequence
  Description of Artificial Sequence: Synthetic oligonucleotide
  Target: ATXN2; (-) strand; PAM type: NRG; PAM sequence: CGG
gggatcttttggtttgaaga

SEQ ID NO: 25884 - DNA, 20 bp, Artificial Sequence
  Description of Artificial Sequence: Synthetic oligonucleotide
  Target: ATXN2; (-) strand; PAM type: NRG; PAM sequence: AAG
atttgggatcttttggtttg

SEQ ID NO: 25885 - DNA, 20 bp, Artificial Sequence
  Description of Artificial Sequence: Synthetic oligonucleotide
  Target: ATXN2; (-) strand; PAM type: NRG; PAM sequence: TGG
tgtgtacatttgggatcttt

SEQ ID NO: 25886 - DNA, 20 bp, Artificial Sequence
  Description of Artificial Sequence: Synthetic oligonucleotide
  Target: ATXN2; (-) strand; PAM type: NRG; PAM sequence: GGG
gctactttgtgtgtacattt

SEQ ID NO: 25887 - DNA, 20 bp, Artificial Sequence
  Description of Artificial Sequence: Synthetic oligonucleotide
  Target: ATXN2; (-) strand; PAM type: NRG; PAM sequence: TGG
agctactttgtgtgtacatt

SEQ ID NO: 25888 - DNA, 20 bp, Artificial Sequence
  Description of Artificial Sequence: Synthetic oligonucleotide
  Target: ATXN2; (-) strand; PAM type: NRG; PAM sequence: AAG
aatactgtaaaaacatattt

SEQ ID NO: 25889 - DNA, 20 bp, Artificial Sequence
  Description of Artificial Sequence: Synthetic oligonucleotide
  Target: ATXN2; (-) strand; PAM type: NRG; PAM sequence: TAG
gatccttttagaaatttgtt

SEQ ID NO: 25890 - DNA, 20 bp, Artificial Sequence
  Description of Artificial Sequence: Synthetic oligonucleotide
  Target: ATXN2; (-) strand; PAM type: NRG; PAM sequence: TAG
ctcttacttggggatccttt

SEQ ID NO: 25891 - DNA, 20 bp, Artificial Sequence
  Description of Artificial Sequence: Synthetic oligonucleotide
  Target: ATXN2; (-) strand; PAM type: NRG; PAM sequence: GGG
tccacactggctcttacttg

SEQ ID NO: 25892 - DNA, 20 bp, Artificial Sequence
  Description of Artificial Sequence: Synthetic oligonucleotide
  Target: ATXN2; (-) strand; PAM type: NRG; PAM sequence: GGG
ttccacactggctcttactt

SEQ ID NO: 25893 - DNA, 20 bp, Artificial Sequence
  Description of Artificial Sequence: Synthetic oligonucleotide
  Target: ATXN2; (-) strand; PAM type: NRG; PAM sequence: TGG
tttccacactggctcttact

SEQ ID NO: 25894 - DNA, 20 bp, Artificial Sequence
  Description of Artificial Sequence: Synthetic oligonucleotide
  Target: ATXN2; (-) strand; PAM type: NRG; PAM sequence: TGG
gcttgcttgcttttccacac

SEQ ID NO: 25895 - DNA, 20 bp, Artificial Sequence
  Description of Artificial Sequence: Synthetic oligonucleotide
  Target: ATXN2; (-) strand; PAM type: NRG; PAM sequence: TAG
aagcctgggtcctaaagttt

SEQ ID NO: 25896 - DNA, 20 bp, Artificial Sequence
  Description of Artificial Sequence: Synthetic oligonucleotide
  Target: ATXN2; (-) strand; PAM type: NRG; PAM sequence: AAG
ggaataaagcctgggtccta

SEQ ID NO: 25897 - DNA, 20 bp, Artificial Sequence
  Description of Artificial Sequence: Synthetic oligonucleotide
  Target: ATXN2; (-) strand; PAM type: NRG; PAM sequence: GGG
tggtcagtggaataaagcct

SEQ ID NO: 25898 - DNA, 20 bp, Artificial Sequence
  Description of Artificial Sequence: Synthetic oligonucleotide
  Target: ATXN2; (-) strand; PAM type: NRG; PAM sequence: TGG
ctggtcagtggaataaagcc

SEQ ID NO: 25899 - DNA, 20 bp, Artificial Sequence
  Description of Artificial Sequence: Synthetic oligonucleotide
  Target: ATXN2; (-) strand; PAM type: NRG; PAM sequence: AAG
aaattctggtcagtggaata

SEQ ID NO: 25900 - DNA, 20 bp, Artificial Sequence
  Description of Artificial Sequence: Synthetic oligonucleotide
  Target: ATXN2; (-) strand; PAM type: NRG; PAM sequence: TGG
acaacctaaattctggtcag

SEQ ID NO: 25901 - DNA, 20 bp, Artificial Sequence
  Description of Artificial Sequence: Synthetic oligonucleotide
  Target: ATXN2; (-) strand; PAM type: NRG; PAM sequence: CAG
aacacaacctaaattctggt

SEQ ID NO: 25902 - DNA, 20 bp, Artificial Sequence
  Description of Artificial Sequence: Synthetic oligonucleotide
  Target: ATXN2; (-) strand; PAM type: NRG; PAM sequence: TGG
tcttaacacaacctaaattc

SEQ ID NO: 25903 - DNA, 20 bp, Artificial Sequence
  Description of Artificial Sequence: Synthetic oligonucleotide
  Target: ATXN2; (-) strand; PAM type: NRG; PAM sequence: TAG
aaatgtagcattgagaaaaa

SEQ ID NO: 25904 - DNA, 20 bp, Artificial Sequence
  Description of Artificial Sequence: Synthetic oligonucleotide
  Target: ATXN2; (-) strand; PAM type: NRG; PAM sequence: GAG
taagattaaaatgtagcatt

SEQ ID NO: 25905 - DNA, 20 bp, Artificial Sequence
  Description of Artificial Sequence: Synthetic oligonucleotide
  Target: ATXN2; (-) strand; PAM type: NRG; PAM sequence: TAG
gaagatttaagattaaaatg

SEQ ID NO: 25906 - DNA, 20 bp, Artificial Sequence
  Description of Artificial Sequence: Synthetic oligonucleotide
  Target: ATXN2; (-) strand; PAM type: NRG; PAM sequence: AAG
gtattgtaaacagaagattt

SEQ ID NO: 25907 - DNA, 20 bp, Artificial Sequence
  Description of Artificial Sequence: Synthetic oligonucleotide
  Target: ATXN2; (-) strand; PAM type: NRG; PAM sequence: AAG
aagtttggtattgtaaacag

SEQ ID NO: 25908 - DNA, 20 bp, Artificial Sequence
  Description of Artificial Sequence: Synthetic oligonucleotide
  Target: ATXN2; (-) strand; PAM type: NRG; PAM sequence: CAG
aaaaagtttggtattgtaaa

SEQ ID NO: 25909 - DNA, 20 bp, Artificial Sequence
  Description of Artificial Sequence: Synthetic oligonucleotide
  Target: ATXN2; (-) strand; PAM type: NRG; PAM sequence: TGG
acttttttttaaaaaaagtt

SEQ ID NO: 25910 - DNA, 20 bp, Artificial Sequence
  Description of Artificial Sequence: Synthetic oligonucleotide
  Target: ATXN2; (-) strand; PAM type: NRG; PAM sequence: AAG
tgaatacttttttttaaaaa

SEQ ID NO: 25911 - DNA, 20 bp, Artificial Sequence
  Description of Artificial Sequence: Synthetic oligonucleotide
  Target: ATXN2; (-) strand; PAM type: NRG; PAM sequence: CAG
catttctgtctcgaaagcga

SEQ ID NO: 25912 - DNA, 20 bp, Artificial Sequence
  Description of Artificial Sequence: Synthetic oligonucleotide
  Target: ATXN2; (-) strand; PAM type: NRG; PAM sequence: AAG
cttccccatttctgtctcga

SEQ ID NO: 25913 - DNA, 20 bp, Artificial Sequence
  Description of Artificial Sequence: Synthetic oligonucleotide
  Target: ATXN2; (-) strand; PAM type: NRG; PAM sequence: TAG
ccaaggaatatcattcttta

SEQ ID NO: 25914 - DNA, 20 bp, Artificial Sequence
  Description of Artificial Sequence: Synthetic oligonucleotide
  Target: ATXN2; (-) strand; PAM type: NRG; PAM sequence: AGG
ttggtgaaattttaaaacca

SEQ ID NO: 25915 - DNA, 20 bp, Artificial Sequence
  Description of Artificial Sequence: Synthetic oligonucleotide
  Target: ATXN2; (-) strand; PAM type: NRG; PAM sequence: AAG
tttggtgaaattttaaaacc

SEQ ID NO: 25916 - DNA, 20 bp, Artificial Sequence
  Description of Artificial Sequence: Synthetic oligonucleotide
  Target: ATXN2; (-) strand; PAM type: NRG; PAM sequence: TGG
tctttagaaagagctacttt

SEQ ID NO: 25917 - DNA, 20 bp, Artificial Sequence
  Description of Artificial Sequence: Synthetic oligonucleotide
  Target: ATXN2; (-) strand; PAM type: NRG; PAM sequence: GAG
cctttactcatctttagaaa

SEQ ID NO: 25918 - DNA, 20 bp, Artificial Sequence
  Description of Artificial Sequence: Synthetic oligonucleotide
  Target: ATXN2; (-) strand; PAM type: NRG; PAM sequence: AAG
gtcctttactcatctttaga

SEQ ID NO: 25919 - DNA, 20 bp, Artificial Sequence
  Description of Artificial Sequence: Synthetic oligonucleotide
  Target: ATXN2; (-) strand; PAM type: NRG; PAM sequence: TAG
ctaagtcctttactcatctt

SEQ ID NO: 25920 - DNA, 20 bp, Artificial Sequence
  Description of Artificial Sequence: Synthetic oligonucleotide
  Target: ATXN2; (-) strand; PAM type: NRG; PAM sequence: AAG
acttctgcacatcttcccct

SEQ ID NO: 25921 - DNA, 20 bp, Artificial Sequence
  Description of Artificial Sequence: Synthetic oligonucleotide
  Target: ATXN2; (-) strand; PAM type: NRG; PAM sequence: TAG
ttctcagcatcctgatgata

SEQ ID NO: 25922 - DNA, 20 bp, Artificial Sequence
  Description of Artificial Sequence: Synthetic oligonucleotide
  Target: ATXN2; (-) strand; PAM type: NRG; PAM sequence: CAG
cttatagccagggattttct

SEQ ID NO: 25923 - DNA, 20 bp, Artificial Sequence
  Description of Artificial Sequence: Synthetic oligonucleotide
  Target: ATXN2; (-) strand; PAM type: NRG; PAM sequence: GGG
aaatgcattacttatagcca

SEQ ID NO: 25924 - DNA, 20 bp, Artificial Sequence
  Description of Artificial Sequence: Synthetic oligonucleotide
  Target: ATXN2; (-) strand; PAM type: NRG; PAM sequence: AGG
gaaatgcattacttatagcc

SEQ ID NO: 25925 - DNA, 20 bp, Artificial Sequence
  Description of Artificial Sequence: Synthetic oligonucleotide
  Target: ATXN2; (-) strand; PAM type: NRG; PAM sequence: CAG
tgaaatgcattacttatagc

SEQ ID NO: 25926 - DNA, 20 bp, Artificial Sequence
  Description of Artificial Sequence: Synthetic oligonucleotide
  Target: ATXN2; (-) strand; PAM type: NRG; PAM sequence: TAG
ggcctgaaatgcattactta

SEQ ID NO: 25927 - DNA, 20 bp, Artificial Sequence
  Description of Artificial Sequence: Synthetic oligonucleotide
  Target: ATXN2; (-) strand; PAM type: NRG; PAM sequence: TGG
tctagctaatgatgcaatgt

SEQ ID NO: 25928 - DNA, 20 bp, Artificial Sequence
  Description of Artificial Sequence: Synthetic oligonucleotide
  Target: ATXN2; (-) strand; PAM type: NRG; PAM sequence: TAG
cccagatcttgcttcctttc

SEQ ID NO: 25929 - DNA, 20 bp, Artificial Sequence
  Description of Artificial Sequence: Synthetic oligonucleotide
  Target: ATXN2; (-) strand; PAM type: NRG; PAM sequence: CAG
aatagtgcagaatggatacc

SEQ ID NO: 25930 - DNA, 20 bp, Artificial Sequence
  Description of Artificial Sequence: Synthetic oligonucleotide
  Target: ATXN2; (-) strand; PAM type: NRG; PAM sequence: TGG
atattattaatagtgcagaa

SEQ ID NO: 25931 - DNA, 20 bp, Artificial Sequence
  Description of Artificial Sequence: Synthetic oligonucleotide
  Target: ATXN2; (-) strand; PAM type: NRG; PAM sequence: CAG
agtggatattattaatagtg

SEQ ID NO: 25932 - DNA, 20 bp, Artificial Sequence
  Description of Artificial Sequence: Synthetic oligonucleotide
  Target: ATXN2; (-) strand; PAM type: NRG; PAM sequence: TAG
acgatagtggatattattaa

SEQ ID NO: 25933 - DNA, 20 bp, Artificial Sequence
  Description of Artificial Sequence: Synthetic oligonucleotide
  Target: ATXN2; (-) strand; PAM type: NRG; PAM sequence: TGG
caaatcagaatttacgatag

SEQ ID NO: 25934 - DNA, 20 bp, Artificial Sequence
  Description of Artificial Sequence: Synthetic oligonucleotide
  Target: ATXN2; (-) strand; PAM type: NRG; PAM sequence: TAG
aaacaaatcagaatttacga

SEQ ID NO: 25935 - DNA, 20 bp, Artificial Sequence
  Description of Artificial Sequence: Synthetic oligonucleotide
  Target: ATXN2; (-) strand; PAM type: NRG; PAM sequence: CAG
gtaaccactgtaaaacaaat

SEQ ID NO: 25936 - DNA, 20 bp, Artificial Sequence
  Description of Artificial Sequence: Synthetic oligonucleotide
  Target: ATXN2; (-) strand; PAM type: NRG; PAM sequence: CAG
acaaattttttttaaagaaa

SEQ ID NO: 25937 - DNA, 20 bp, Artificial Sequence
  Description of Artificial Sequence: Synthetic oligonucleotide
  Target: ATXN2; (-) strand; PAM type: NRG; PAM sequence: AAG
acaaaaacaaatttttttta

SEQ ID NO: 25938 - DNA, 20 bp, Artificial Sequence
  Description of Artificial Sequence: Synthetic oligonucleotide
  Target: ATXN2; (-) strand; PAM type: NRG; PAM sequence: AAG
acactccagcatgagtgaca

SEQ ID NO: 25939 - DNA, 20 bp, Artificial Sequence
  Description of Artificial Sequence: Synthetic oligonucleotide
  Target: ATXN2; (-) strand; PAM type: NRG; PAM sequence: GAG
gcggcactacactccagcat

SEQ ID NO: 25940 - DNA, 20 bp, Artificial Sequence
  Description of Artificial Sequence: Synthetic oligonucleotide
  Target: ATXN2; (-) strand; PAM type: NRG; PAM sequence: CAG
gtgattgcggcactacactc

SEQ ID NO: 25941 - DNA, 20 bp, Artificial Sequence
  Description of Artificial Sequence: Synthetic oligonucleotide
  Target: ATXN2; (-) strand; PAM type: NRG; PAM sequence: CGG
gcccagggctgcagtgattg

SEQ ID NO: 25942 - DNA, 20 bp, Artificial Sequence
  Description of Artificial Sequence: Synthetic oligonucleotide
  Target: ATXN2; (-) strand; PAM type: NRG; PAM sequence: CAG
attgcttgagcccagggctg

SEQ ID NO: 25943 - DNA, 20 bp, Artificial Sequence
  Description of Artificial Sequence: Synthetic oligonucleotide
  Target: ATXN2; (-) strand; PAM type: NRG; PAM sequence: GGG
gggaggattgcttgagccca

SEQ ID NO: 25944 - DNA, 20 bp, Artificial Sequence
  Description of Artificial Sequence: Synthetic oligonucleotide
  Target: ATXN2; (-) strand; PAM type: NRG; PAM sequence: AGG
tgggaggattgcttgagccc

SEQ ID NO: 25945 - DNA, 20 bp, Artificial Sequence
  Description of Artificial Sequence: Synthetic oligonucleotide
  Target: ATXN2; (-) strand; PAM type: NRG; PAM sequence: CAG
gtgggaggattgcttgagcc

SEQ ID NO: 25946 - DNA, 20 bp, Artificial Sequence
  Description of Artificial Sequence: Synthetic oligonucleotide
  Target: ATXN2; (-) strand; PAM type: NRG; PAM sequence: GAG
ctgaggtgggaggattgctt

SEQ ID NO: 25947 - DNA, 20 bp, Artificial Sequence
  Description of Artificial Sequence: Synthetic oligonucleotide
  Target: ATXN2; (-) strand; PAM type: NRG; PAM sequence: AGG
acttgggaggctgaggtggg

SEQ ID NO: 25948 - DNA, 20 bp, Artificial Sequence
  Description of Artificial Sequence: Synthetic oligonucleotide
  Target: ATXN2; (-) strand; PAM type: NRG; PAM sequence: GAG
gacttgggaggctgaggtgg

SEQ ID NO: 25949 - DNA, 20 bp, Artificial Sequence
  Description of Artificial Sequence: Synthetic oligonucleotide
  Target: ATXN2; (-) strand; PAM type: NRG; PAM sequence: GGG
gcgacttgggaggctgaggt

SEQ ID NO: 25950 - DNA, 20 bp, Artificial Sequence
  Description of Artificial Sequence: Synthetic oligonucleotide
  Target: ATXN2; (-) strand; PAM type: NRG; PAM sequence: TGG
agcgacttgggaggctgagg

SEQ ID NO: 25951 - DNA, 20 bp, Artificial Sequence
  Description of Artificial Sequence: Synthetic oligonucleotide
  Target: ATXN2; (-) strand; PAM type: NRG; PAM sequence: AGG
ctcagcgacttgggaggctg

SEQ ID NO: 25952 - DNA, 20 bp, Artificial Sequence
  Description of Artificial Sequence: Synthetic oligonucleotide
  Target: ATXN2; (-) strand; PAM type: NRG; PAM sequence: GAG
tctcagcgacttgggaggct

SEQ ID NO: 25953 - DNA, 20 bp, Artificial Sequence
  Description of Artificial Sequence: Synthetic oligonucleotide
  Target: ATXN2; (-) strand; PAM type: NRG; PAM sequence: AGG
tgtaatctcagcgacttggg

SEQ ID NO: 25954 - DNA, 20 bp, Artificial Sequence
  Description of Artificial Sequence: Synthetic oligonucleotide
  Target: ATXN2; (-) strand; PAM type: NRG; PAM sequence: GAG
ctgtaatctcagcgacttgg

SEQ ID NO: 25955 - DNA, 20 bp, Artificial Sequence
  Description of Artificial Sequence: Synthetic oligonucleotide
  Target: ATXN2; (-) strand; PAM type: NRG; PAM sequence: GGG
gcctgtaatctcagcgactt

SEQ ID NO: 25956 - DNA, 20 bp, Artificial Sequence
  Description of Artificial Sequence: Synthetic oligonucleotide
  Target: ATXN2; (-) strand; PAM type: NRG; PAM sequence: TGG
tgcctgtaatctcagcgact

SEQ ID NO: 25957 - DNA, 20 bp, Artificial Sequence
  Description of Artificial Sequence: Synthetic oligonucleotide
  Target: ATXN2; (-) strand; PAM type: NRG; PAM sequence: CAG
gtggctcatgcctgtaatct

SEQ ID NO: 25958 - DNA, 20 bp, Artificial Sequence
  Description of Artificial Sequence: Synthetic oligonucleotide
  Target: ATXN2; (-) strand; PAM type: NRG; PAM sequence: TGG
tccagacttgctgggcatag

SEQ ID NO: 25959 - DNA, 20 bp, Artificial Sequence
  Description of Artificial Sequence: Synthetic oligonucleotide
  Target: ATXN2; (-) strand; PAM type: NRG; PAM sequence: TAG
aaatccagacttgctgggca

SEQ ID NO: 25960 - DNA, 20 bp, Artificial Sequence
  Description of Artificial Sequence: Synthetic oligonucleotide
  Target: ATXN2; (-) strand; PAM type: NRG; PAM sequence: GGG
ttttaaaatccagacttgct

SEQ ID NO: 25961 - DNA, 20 bp, Artificial Sequence
  Description of Artificial Sequence: Synthetic oligonucleotide
  Target: ATXN2; (-) strand; PAM type: NRG; PAM sequence: TGG
tttttaaaatccagacttgc

SEQ ID NO: 25962 - DNA, 20 bp, Artificial Sequence
  Description of Artificial Sequence: Synthetic oligonucleotide
  Target: ATXN2; (-) strand; PAM type: NRG; PAM sequence: CAG
tgttttttttttttaaaatc

SEQ ID NO: 25963 - DNA, 20 bp, Artificial Sequence
  Description of Artificial Sequence: Synthetic oligonucleotide
  Target: ATXN2; (-) strand; PAM type: NRG; PAM sequence: CAG
attgtactatttactaccaa

SEQ ID NO: 25964 - DNA, 20 bp, Artificial Sequence
  Description of Artificial Sequence: Synthetic oligonucleotide
  Target: ATXN2; (-) strand; PAM type: NRG; PAM sequence: TGG
tctcaactttgcaggaatcc

SEQ ID NO: 25965 - DNA, 20 bp, Artificial Sequence
  Description of Artificial Sequence: Synthetic oligonucleotide
  Target: ATXN2; (-) strand; PAM type: NRG; PAM sequence: AGG
tgtttttttctcaactttgc

SEQ ID NO: 25966 - DNA, 20 bp, Artificial Sequence
  Description of Artificial Sequence: Synthetic oligonucleotide
  Target: ATXN2; (-) strand; PAM type: NRG; PAM sequence: CAG
ttgtttttttctcaactttg

SEQ ID NO: 25967 - DNA, 20 bp, Artificial Sequence
  Description of Artificial Sequence: Synthetic oligonucleotide
  Target: ATXN2; (-) strand; PAM type: NRG; PAM sequence: CAG
agttgcctgtagattagagc

SEQ ID NO: 25968 - DNA, 20 bp, Artificial Sequence
  Description of Artificial Sequence: Synthetic oligonucleotide
  Target: ATXN2; (-) strand; PAM type: NRG; PAM sequence: GAG
ccacagttgcctgtagatta

SEQ ID NO: 25969 - DNA, 20 bp, Artificial Sequence
  Description of Artificial Sequence: Synthetic oligonucleotide
  Target: ATXN2; (-) strand; PAM type: NRG; PAM sequence: TAG
tcccacagttgcctgtagat

SEQ ID NO: 25970 - DNA, 20 bp, Artificial Sequence
  Description of Artificial Sequence: Synthetic oligonucleotide
  Target: ATXN2; (-) strand; PAM type: NRG; PAM sequence: TAG
caaattcccacagttgcctg

SEQ ID NO: 25971 - DNA, 20 bp, Artificial Sequence
  Description of Artificial Sequence: Synthetic oligonucleotide
  Target: ATXN2; (-) strand; PAM type: NRG; PAM sequence: CAG
aatctgcatgcaaattccca

SEQ ID NO: 25972 - DNA, 20 bp, Artificial Sequence
  Description of Artificial Sequence: Synthetic oligonucleotide
  Target: ATXN2; (-) strand; PAM type: NRG; PAM sequence: TGG
tattctttgacttatggcat

SEQ ID NO: 25973 - DNA, 20 bp, Artificial Sequence
  Description of Artificial Sequence: Synthetic oligonucleotide
  Target: ATXN2; (-) strand; PAM type: NRG; PAM sequence: TGG
aattaatattctttgactta

SEQ ID NO: 25974 - DNA, 20 bp, Artificial Sequence
  Description of Artificial Sequence: Synthetic oligonucleotide
  Target: ATXN2; (-) strand; PAM type: NRG; PAM sequence: TGG
tttctcaccataggggatga

SEQ ID NO: 25975 - DNA, 20 bp, Artificial Sequence
  Description of Artificial Sequence: Synthetic oligonucleotide
  Target: ATXN2; (-) strand; PAM type: NRG; PAM sequence: GGG
gcttttgtttctcaccatag

SEQ ID NO: 25976 - DNA, 20 bp, Artificial Sequence
  Description of Artificial Sequence: Synthetic oligonucleotide
  Target: ATXN2; (-) strand; PAM type: NRG; PAM sequence: GGG
tgcttttgtttctcaccata

SEQ ID NO: 25977 - DNA, 20 bp, Artificial Sequence
  Description of Artificial Sequence: Synthetic oligonucleotide
  Target: ATXN2; (-) strand; PAM type: NRG; PAM sequence: AGG
atgcttttgtttctcaccat

SEQ ID NO: 25978 - DNA, 20 bp, Artificial Sequence
  Description of Artificial Sequence: Synthetic oligonucleotide
  Target: ATXN2; (-) strand; PAM type: NRG; PAM sequence: TAG
aatgcttttgtttctcacca

SEQ ID NO: 25979 - DNA, 20 bp, Artificial Sequence
  Description of Artificial Sequence: Synthetic oligonucleotide
  Target: ATXN2; (-) strand; PAM type: NRG; PAM sequence: TAG
aacaggtaacacttttctaa

SEQ ID NO: 25980 - DNA, 20 bp, Artificial Sequence
  Description of Artificial Sequence: Synthetic oligonucleotide
  Target: ATXN2; (-) strand; PAM type: NRG; PAM sequence: AGG
cctgtagttccttcagaaac

SEQ ID NO: 25981 - DNA, 20 bp, Artificial Sequence
  Description of Artificial Sequence: Synthetic oligonucleotide
  Target: ATXN2; (-) strand; PAM type: NRG; PAM sequence: CAG
acctgtagttccttcagaaa

SEQ ID NO: 25982 - DNA, 20 bp, Artificial Sequence
  Description of Artificial Sequence: Synthetic oligonucleotide
  Target: ATXN2; (-) strand; PAM type: NRG; PAM sequence: CAG
ctctatacctgtagttcctt

SEQ ID NO: 25983 - DNA, 20 bp, Artificial Sequence
  Description of Artificial Sequence: Synthetic oligonucleotide
  Target: ATXN2; (-) strand; PAM type: NRG; PAM sequence: TAG
cttttttctctctatacctg

SEQ ID NO: 25984 - DNA, 20 bp, Artificial Sequence
  Description of Artificial Sequence: Synthetic oligonucleotide
  Target: ATXN2; (-) strand; PAM type: NRG; PAM sequence: TGG
ttctttatcatctcatctga

SEQ ID NO: 25985 - DNA, 20 bp, Artificial Sequence
  Description of Artificial Sequence: Synthetic oligonucleotide
  Target: ATXN2; (-) strand; PAM type: NRG; PAM sequence: AGG
aacatcgcctgctagtctag

SEQ ID NO: 25986 - DNA, 20 bp, Artificial Sequence
  Description of Artificial Sequence: Synthetic oligonucleotide
  Target: ATXN2; (-) strand; PAM type: NRG; PAM sequence: GAG
caacatcgcctgctagtcta

SEQ ID NO: 25987 - DNA, 20 bp, Artificial Sequence
  Description of Artificial Sequence: Synthetic oligonucleotide
  Target: ATXN2; (-) strand; PAM type: NRG; PAM sequence: TAG
tccaacatcgcctgctagtc

SEQ ID NO: 25988 - DNA, 20 bp, Artificial Sequence
  Description of Artificial Sequence: Synthetic oligonucleotide
  Target: ATXN2; (-) strand; PAM type: NRG; PAM sequence: TAG
cttcctccaacatcgcctgc

SEQ ID NO: 25989 - DNA, 20 bp, Artificial Sequence
  Description of Artificial Sequence: Synthetic oligonucleotide
  Target: ATXN2; (-) strand; PAM type: NRG; PAM sequence: AGG
aggtgggatacaggggctgg

SEQ ID NO: 25990 - DNA, 20 bp, Artificial Sequence
  Description of Artificial Sequence: Synthetic oligonucleotide
  Target: ATXN2; (-) strand; PAM type: NRG; PAM sequence: GAG
gaggtgggatacaggggctg

SEQ ID NO: 25991 - DNA, 20 bp, Artificial Sequence
  Description of Artificial Sequence: Synthetic oligonucleotide
  Target: ATXN2; (-) strand; PAM type: NRG; PAM sequence: TGG
tggaggtgggatacaggggc

SEQ ID NO: 25992 - DNA, 20 bp, Artificial Sequence
  Description of Artificial Sequence: Synthetic oligonucleotide
  Target: ATXN2; (-) strand; PAM type: NRG; PAM sequence: GGG
agcatggaggtgggatacag

SEQ ID NO: 25993 - DNA, 20 bp, Artificial Sequence
  Description of Artificial Sequence: Synthetic oligonucleotide
  Target: ATXN2; (-) strand; PAM type: NRG; PAM sequence: GGG
tagcatggaggtgggataca

SEQ ID NO: 25994 - DNA, 20 bp, Artificial Sequence
  Description of Artificial Sequence: Synthetic oligonucleotide
  Target: ATXN2; (-) strand; PAM type: NRG; PAM sequence: AGG
gtagcatggaggtgggatac

SEQ ID NO: 25995 - DNA, 20 bp, Artificial Sequence
  Description of Artificial Sequence: Synthetic oligonucleotide
  Target: ATXN2; (-) strand; PAM type: NRG; PAM sequence: CAG
ggtagcatggaggtgggata

SEQ ID NO: 25996 - DNA, 20 bp, Artificial Sequence
  Description of Artificial Sequence: Synthetic oligonucleotide
  Target: ATXN2; (-) strand; PAM type: NRG; PAM sequence: GGG
tgtgggggtagcatggaggt

SEQ ID NO: 25997 - DNA, 20 bp, Artificial Sequence
  Description of Artificial Sequence: Synthetic oligonucleotide
  Target: ATXN2; (-) strand; PAM type: NRG; PAM sequence: TGG
ctgtgggggtagcatggagg

SEQ ID NO: 25998 - DNA, 20 bp, Artificial Sequence
  Description of Artificial Sequence: Synthetic oligonucleotide
  Target: ATXN2; (-) strand; PAM type: NRG; PAM sequence: AGG
ctgctgtgggggtagcatgg

SEQ ID NO: 25999 - DNA, 20 bp, Artificial Sequence
  Description of Artificial Sequence: Synthetic oligonucleotide
  Target: ATXN2; (-) strand; PAM type: NRG; PAM sequence: GAG
actgctgtgggggtagcatg

SEQ ID NO: 26000 - DNA, 20 bp, Artificial Sequence
  Description of Artificial Sequence: Synthetic oligonucleotide
  Target: ATXN2; (-) strand; PAM type: NRG; PAM sequence: TGG
ccactgctgtgggggtagca

SEQ ID NO: 26001 - DNA, 20 bp, Artificial Sequence
  Description of Artificial Sequence: Synthetic oligonucleotide
  Target: ATXN2; (-) strand; PAM type: NRG; PAM sequence: TAG
agagcccactgctgtggggg

SEQ ID NO: 26002 - DNA, 20 bp, Artificial Sequence
  Description of Artificial Sequence: Synthetic oligonucleotide
  Target: ATXN2; (-) strand; PAM type: NRG; PAM sequence: GGG
ttgagagcccactgctgtgg

SEQ ID NO: 26003 - DNA, 20 bp, Artificial Sequence
  Description of Artificial Sequence: Synthetic oligonucleotide
  Target: ATXN2; (-) strand; PAM type: NRG; PAM sequence: GGG
gttgagagcccactgctgtg

SEQ ID NO: 26004 - DNA, 20 bp, Artificial Sequence
  Description of Artificial Sequence: Synthetic oligonucleotide
  Target: ATXN2; (-) strand; PAM type: NRG; PAM sequence: GGG
tgttgagagcccactgctgt

SEQ ID NO: 26005 - DNA, 20 bp, Artificial Sequence
  Description of Artificial Sequence: Synthetic oligonucleotide
  Target: ATXN2; (-) strand; PAM type: NRG; PAM sequence: TGG
gtgttgagagcccactgctg

SEQ ID NO: 26006 - DNA, 20 bp, Artificial Sequence
  Description of Artificial Sequence: Synthetic oligonucleotide
  Target: ATXN2; (-) strand; PAM type: NRG; PAM sequence: GAG
atcagaagagaaggtgttga

SEQ ID NO: 26007 - DNA, 20 bp, Artificial Sequence
  Description of Artificial Sequence: Synthetic oligonucleotide
  Target: ATXN2; (-) strand; PAM type: NRG; PAM sequence: GAG
gaatcagaagagaaggtgtt

SEQ ID NO: 26008 - DNA, 20 bp, Artificial Sequence
  Description of Artificial Sequence: Synthetic oligonucleotide
  Target: ATXN2; (-) strand; PAM type: NRG; PAM sequence: AGG
ctgcccagaatcagaagaga

SEQ ID NO: 26009 - DNA, 20 bp, Artificial Sequence
  Description of Artificial Sequence: Synthetic oligonucleotide
  Target: ATXN2; (-) strand; PAM type: NRG; PAM sequence: AAG
tctgcccagaatcagaagag

SEQ ID NO: 26010 - DNA, 20 bp, Artificial Sequence
  Description of Artificial Sequence: Synthetic oligonucleotide
  Target: ATXN2; (-) strand; PAM type: NRG; PAM sequence: GAG
gtttctgcccagaatcagaa

SEQ ID NO: 26011 - DNA, 20 bp, Artificial Sequence
  Description of Artificial Sequence: Synthetic oligonucleotide
  Target: ATXN2; (-) strand; PAM type: NRG; PAM sequence: AAG
aagtttctgcccagaatcag

SEQ ID NO: 26012 - DNA, 20 bp, Artificial Sequence
  Description of Artificial Sequence: Synthetic oligonucleotide
  Target: ATXN2; (-) strand; PAM type: NRG; PAM sequence: CAG
actaagtttctgcccagaat

SEQ ID NO: 26013 - DNA, 20 bp, Artificial Sequence
  Description of Artificial Sequence: Synthetic oligonucleotide
  Target: ATXN2; (-) strand; PAM type: NRG; PAM sequence: CAG
aaaatgactaagtttctgcc

SEQ ID NO: 26014 - DNA, 20 bp, Artificial Sequence
  Description of Artificial Sequence: Synthetic oligonucleotide
  Target: ATXN2; (-) strand; PAM type: NRG; PAM sequence: AAG
atcaccggcccaaaatgact

SEQ ID NO: 26015 - DNA, 20 bp, Artificial Sequence
  Description of Artificial Sequence: Synthetic oligonucleotide
  Target: ATXN2; (-) strand; PAM type: NRG; PAM sequence: CGG
ccaccagcaggtggcatcac

SEQ ID NO: 26016 - DNA, 20 bp, Artificial Sequence
  Description of Artificial Sequence: Synthetic oligonucleotide
  Target: ATXN2; (-) strand; PAM type: NRG; PAM sequence: TGG
tctttatgaccaccagcagg

SEQ ID NO: 26017 - DNA, 20 bp, Artificial Sequence
  Description of Artificial Sequence: Synthetic oligonucleotide
  Target: ATXN2; (-) strand; PAM type: NRG; PAM sequence: AGG
atttctttatgaccaccagc

SEQ ID NO: 26018 - DNA, 20 bp, Artificial Sequence
  Description of Artificial Sequence: Synthetic oligonucleotide
  Target: ATXN2; (-) strand; PAM type: NRG; PAM sequence: CAG
catttctttatgaccaccag

SEQ ID NO: 26019 - DNA, 20 bp, Artificial Sequence
  Description of Artificial Sequence: Synthetic oligonucleotide
  Target: ATXN2; (-) strand; PAM type: NRG; PAM sequence: CAG
agacatttctttatgaccac

SEQ ID NO: 26020 - DNA, 20 bp, Artificial Sequence
  Description of Artificial Sequence: Synthetic oligonucleotide
  Target: ATXN2; (-) strand; PAM type: NRG; PAM sequence: GAG
aagaggttcacacgttggtc

SEQ ID NO: 26021 - DNA, 20 bp, Artificial Sequence
  Description of Artificial Sequence: Synthetic oligonucleotide
  Target: ATXN2; (-) strand; PAM type: NRG; PAM sequence: TGG
cccagaagaggttcacacgt

SEQ ID NO: 26022 - DNA, 20 bp, Artificial Sequence
  Description of Artificial Sequence: Synthetic oligonucleotide
  Target: ATXN2; (-) strand; PAM type: NRG; PAM sequence: AGG
gggctggggatacccagaag

SEQ ID NO: 26023 - DNA, 20 bp, Artificial Sequence
  Description of Artificial Sequence: Synthetic oligonucleotide
  Target: ATXN2; (-) strand; PAM type: NRG; PAM sequence: GAG
ggggctggggatacccagaa

SEQ ID NO: 26024 - DNA, 20 bp, Artificial Sequence
  Description of Artificial Sequence: Synthetic oligonucleotide
  Target: ATXN2; (-) strand; PAM type: NRG; PAM sequence: AAG
atggggctggggatacccag

SEQ ID NO: 26025 - DNA, 20 bp, Artificial Sequence
  Description of Artificial Sequence: Synthetic oligonucleotide
  Target: ATXN2; (-) strand; PAM type: NRG; PAM sequence: CAG
ggtatggggctggggatacc

SEQ ID NO: 26026 - DNA, 20 bp, Artificial Sequence
  Description of Artificial Sequence: Synthetic oligonucleotide
  Target: ATXN2; (-) strand; PAM type: NRG; PAM sequence: GGG
gtttcctgggtatggggctg

SEQ ID NO: 26027 - DNA, 20 bp, Artificial Sequence
  Description of Artificial Sequence: Synthetic oligonucleotide
  Target: ATXN2; (-) strand; PAM type: NRG; PAM sequence: GGG
tgtttcctgggtatggggct

SEQ ID NO: 26028 - DNA, 20 bp, Artificial Sequence
  Description of Artificial Sequence: Synthetic oligonucleotide
  Target: ATXN2; (-) strand; PAM type: NRG; PAM sequence: TGG
ctgtttcctgggtatggggc

SEQ ID NO: 26029 - DNA, 20 bp, Artificial Sequence
  Description of Artificial Sequence: Synthetic oligonucleotide
  Target: ATXN2; (-) strand; PAM type: NRG; PAM sequence: GGG
tactctgtttcctgggtatg

SEQ ID NO: 26030 - DNA, 20 bp, Artificial Sequence
  Description of Artificial Sequence: Synthetic oligonucleotide
  Target: ATXN2; (-) strand; PAM type: NRG; PAM sequence: GGG
gtactctgtttcctgggtat

SEQ ID NO: 26031 - DNA, 20 bp, Artificial Sequence
  Description of Artificial Sequence: Synthetic oligonucleotide
  Target: ATXN2; (-) strand; PAM type: NRG; PAM sequence: TGG
tgtactctgtttcctgggta

SEQ ID NO: 26032 - DNA, 20 bp, Artificial Sequence
  Description of Artificial Sequence: Synthetic oligonucleotide
  Target: ATXN2; (-) strand; PAM type: NRG; PAM sequence: GGG
gaatatgtactctgtttcct

SEQ ID NO: 26033 - DNA, 20 bp, Artificial Sequence
  Description of Artificial Sequence: Synthetic oligonucleotide
  Target: ATXN2; (-) strand; PAM type: NRG; PAM sequence: TGG
tgaatatgtactctgtttcc

SEQ ID NO: 26034 - DNA, 20 bp, Artificial Sequence
  Description of Artificial Sequence: Synthetic oligonucleotide
  Target: ATXN2; (-) strand; PAM type: NRG; PAM sequence: AAG
gtaaaagaggaaagattgag

SEQ ID NO: 26035 - DNA, 20 bp, Artificial Sequence
  Description of Artificial Sequence: Synthetic oligonucleotide
  Target: ATXN2; (-) strand; PAM type: NRG; PAM sequence: GAG
gaggtaaaagaggaaagatt

SEQ ID NO: 26036 - DNA, 20 bp, Artificial Sequence
  Description of Artificial Sequence: Synthetic oligonucleotide
  Target: ATXN2; (-) strand; PAM type: NRG; PAM sequence: AAG
ggctcagaggtaaaagagga

SEQ ID NO: 26037 - DNA, 20 bp, Artificial Sequence
  Description of Artificial Sequence: Synthetic oligonucleotide
  Target: ATXN2; (-) strand; PAM type: NRG; PAM sequence: AGG
tattggctcagaggtaaaag

SEQ ID NO: 26038 - DNA, 20 bp, Artificial Sequence
  Description of Artificial Sequence: Synthetic oligonucleotide
  Target: ATXN2; (-) strand; PAM type: NRG; PAM sequence: GAG
ttattggctcagaggtaaaa

SEQ ID NO: 26039 - DNA, 20 bp, Artificial Sequence
  Description of Artificial Sequence: Synthetic oligonucleotide
  Target: ATXN2; (-) strand; PAM type: NRG; PAM sequence: AAG
cattattggctcagaggtaa

SEQ ID NO: 26040 - DNA, 20 bp, Artificial Sequence
  Description of Artificial Sequence: Synthetic oligonucleotide
  Target: ATXN2; (-) strand; PAM type: NRG; PAM sequence: AGG
cagaggcattattggctcag

SEQ ID NO: 26041 - DNA, 20 bp, Artificial Sequence
  Description of Artificial Sequence: Synthetic oligonucleotide
  Target: ATXN2; (-) strand; PAM type: NRG; PAM sequence: GAG
tcagaggcattattggctca

SEQ ID NO: 26042 - DNA, 20 bp, Artificial Sequence
  Description of Artificial Sequence: Synthetic oligonucleotide
  Target: ATXN2; (-) strand; PAM type: NRG; PAM sequence: CAG
tttcagaggcattattggct

SEQ ID NO: 26043 - DNA, 20 bp, Artificial Sequence
  Description of Artificial Sequence: Synthetic oligonucleotide
  Target: ATXN2; (-) strand; PAM type: NRG; PAM sequence: TGG
tgatttttcagaggcattat

SEQ ID NO: 26044 - DNA, 20 bp, Artificial Sequence
  Description of Artificial Sequence: Synthetic oligonucleotide
  Target: ATXN2; (-) strand; PAM type: NRG; PAM sequence: AGG
aagtttgaatgatttttcag

SEQ ID NO: 26045 - DNA, 20 bp, Artificial Sequence
  Description of Artificial Sequence: Synthetic oligonucleotide
  Target: ATXN2; (-) strand; PAM type: NRG; PAM sequence: GAG
caagtttgaatgatttttca

SEQ ID NO: 26046 - DNA, 20 bp, Artificial Sequence
  Description of Artificial Sequence: Synthetic oligonucleotide
  Target: ATXN2; (-) strand; PAM type: NRG; PAM sequence: CAG
gacaagtttgaatgattttt

SEQ ID NO: 26047 - DNA, 20 bp, Artificial Sequence
  Description of Artificial Sequence: Synthetic oligonucleotide
  Target: ATXN2; (-) strand; PAM type: NRG; PAM sequence: AAG
cctttaaaaaatgctcagac

SEQ ID NO: 26048 - DNA, 20 bp, Artificial Sequence
  Description of Artificial Sequence: Synthetic oligonucleotide
  Target: ATXN2; (-) strand; PAM type: NRG; PAM sequence: CAG
ctggccctttaaaaaatgct

SEQ ID NO: 26049 - DNA, 20 bp, Artificial Sequence
  Description of Artificial Sequence: Synthetic oligonucleotide
  Target: ATXN2; (-) strand; PAM type: NRG; PAM sequence: TGG
tagttatttgaccattattc

SEQ ID NO: 26050 - DNA, 20 bp, Artificial Sequence
  Description of Artificial Sequence: Synthetic oligonucleotide
  Target: ATXN2; (-) strand; PAM type: NRG; PAM sequence: TAG
aatgtttaacactaccattt

SEQ ID NO: 26051 - DNA, 20 bp, Artificial Sequence
  Description of Artificial Sequence: Synthetic oligonucleotide
  Target: ATXN2; (-) strand; PAM type: NRG; PAM sequence: AAG
tttatagtttttatacattt

SEQ ID NO: 26052 - DNA, 20 bp, Artificial Sequence
  Description of Artificial Sequence: Synthetic oligonucleotide
  Target: ATXN2; (-) strand; PAM type: NRG; PAM sequence: TAG
tccagttttatgtcatttta

SEQ ID NO: 26053 - DNA, 20 bp, Artificial Sequence
  Description of Artificial Sequence: Synthetic oligonucleotide
  Target: ATXN2; (-) strand; PAM type: NRG; PAM sequence: CAG
atgttaatgattatttcatc

SEQ ID NO: 26054 - DNA, 20 bp, Artificial Sequence
  Description of Artificial Sequence: Synthetic oligonucleotide
  Target: ATXN2; (-) strand; PAM type: NRG; PAM sequence: GGG
ttctctggaagcacatttga

SEQ ID NO: 26055 - DNA, 20 bp, Artificial Sequence
  Description of Artificial Sequence: Synthetic oligonucleotide
  Target: ATXN2; (-) strand; PAM type: NRG; PAM sequence: AGG
cttctctggaagcacatttg

SEQ ID NO: 26056 - DNA, 20 bp, Artificial Sequence
  Description of Artificial Sequence: Synthetic oligonucleotide
  Target: ATXN2; (-) strand; PAM type: NRG; PAM sequence: GAG
acttctctggaagcacattt

SEQ ID NO: 26057 - DNA, 20 bp, Artificial Sequence
  Description of Artificial Sequence: Synthetic oligonucleotide
  Target: ATXN2; (-) strand; PAM type: NRG; PAM sequence: AAG
gattttgatgacttctctgg

SEQ ID NO: 26058 - DNA, 20 bp, Artificial Sequence
  Description of Artificial Sequence: Synthetic oligonucleotide
  Target: ATXN2; (-) strand; PAM type: NRG; PAM sequence: TGG
gaggattttgatgacttctc

SEQ ID NO: 26059 - DNA, 20 bp, Artificial Sequence
  Description of Artificial Sequence: Synthetic oligonucleotide
  Target: ATXN2; (-) strand; PAM type: NRG; PAM sequence: AGG
tgagaagaaatggttagctg

SEQ ID NO: 26060 - DNA, 20 bp, Artificial Sequence
  Description of Artificial Sequence: Synthetic oligonucleotide
  Target: ATXN2; (-) strand; PAM type: NRG; PAM sequence: GAG
ttgagaagaaatggttagct

SEQ ID NO: 26061 - DNA, 20 bp, Artificial Sequence
  Description of Artificial Sequence: Synthetic oligonucleotide
  Target: ATXN2; (-) strand; PAM type: NRG; PAM sequence: TAG
tttagttgagaagaaatggt

SEQ ID NO: 26062 - DNA, 20 bp, Artificial Sequence
  Description of Artificial Sequence: Synthetic oligonucleotide
  Target: ATXN2; (-) strand; PAM type: NRG; PAM sequence: TGG
ctgatttagttgagaagaaa

SEQ ID NO: 26063 - DNA, 20 bp, Artificial Sequence
  Description of Artificial Sequence: Synthetic oligonucleotide
  Target: ATXN2; (-) strand; PAM type: NRG; PAM sequence: AAG
aaaaggctgatttagttgag

SEQ ID NO: 26064 - DNA, 20 bp, Artificial Sequence
  Description of Artificial Sequence: Synthetic oligonucleotide
  Target: ATXN2; (-) strand; PAM type: NRG; PAM sequence: GAG
gagaaaaggctgatttagtt

SEQ ID NO: 26065 - DNA, 20 bp, Artificial Sequence
  Description of Artificial Sequence: Synthetic oligonucleotide
  Target: ATXN2; (-) strand; PAM type: NRG; PAM sequence: TAG
tgtttgagaaaaggctgatt

SEQ ID NO: 26066 - DNA, 20 bp, Artificial Sequence
  Description of Artificial Sequence: Synthetic oligonucleotide
  Target: ATXN2; (-) strand; PAM type: NRG; PAM sequence: AGG
gaactttgatgtttgagaaa

SEQ ID NO: 26067 - DNA, 20 bp, Artificial Sequence
  Description of Artificial Sequence: Synthetic oligonucleotide
  Target: ATXN2; (-) strand; PAM type: NRG; PAM sequence: AAG
ggaactttgatgtttgagaa

SEQ ID NO: 26068 - DNA, 20 bp, Artificial Sequence
  Description of Artificial Sequence: Synthetic oligonucleotide
  Target: ATXN2; (-) strand; PAM type: NRG; PAM sequence: GAG
tatatggaactttgatgttt

SEQ ID NO: 26069 - DNA, 20 bp, Artificial Sequence
  Description of Artificial Sequence: Synthetic oligonucleotide
  Target: ATXN2; (-) strand; PAM type: NRG; PAM sequence: TGG
tatgattttttaggtttata

SEQ ID NO: 26070 - DNA, 20 bp, Artificial Sequence
  Description of Artificial Sequence: Synthetic oligonucleotide
  Target: ATXN2; (-) strand; PAM type: NRG; PAM sequence: AGG
tcaaaacaatatgatttttt

SEQ ID NO: 26071 - DNA, 20 bp, Artificial Sequence
  Description of Artificial Sequence: Synthetic oligonucleotide
  Target: ATXN2; (-) strand; PAM type: NRG; PAM sequence: TAG
atcaaaacaatatgattttt

SEQ ID NO: 26072 - DNA, 20 bp, Artificial Sequence
  Description of Artificial Sequence: Synthetic oligonucleotide
  Target: ATXN2; (-) strand; PAM type: NRG; PAM sequence: AGG
gttgaaagtgccgcaggaat

SEQ ID NO: 26073 - DNA, 20 bp, Artificial Sequence
  Description of Artificial Sequence: Synthetic oligonucleotide
  Target: ATXN2; (-) strand; PAM type: NRG; PAM sequence: TAG
tgttgaaagtgccgcaggaa

SEQ ID NO: 26074 - DNA, 20 bp, Artificial Sequence
  Description of Artificial Sequence: Synthetic oligonucleotide
  Target: ATXN2; (-) strand; PAM type: NRG; PAM sequence: AGG
aaagttgttgaaagtgccgc

SEQ ID NO: 26075 - DNA, 20 bp, Artificial Sequence
  Description of Artificial Sequence: Synthetic oligonucleotide
  Target: ATXN2; (-) strand; PAM type: NRG; PAM sequence: CAG
aaaagttgttgaaagtgccg

SEQ ID NO: 26076 - DNA, 20 bp, Artificial Sequence
  Description of Artificial Sequence: Synthetic oligonucleotide
  Target: ATXN2; (-) strand; PAM type: NRG; PAM sequence: AAG
ctgtcttaaaaagttgttga

SEQ ID NO: 26077 - DNA, 20 bp, Artificial Sequence
  Description of Artificial Sequence: Synthetic oligonucleotide
  Target: ATXN2; (-) strand; PAM type: NRG; PAM sequence: AAG
taatgagaaactgtcttaaa

SEQ ID NO: 26078 - DNA, 20 bp, Artificial Sequence
  Description of Artificial Sequence: Synthetic oligonucleotide
  Target: ATXN2; (-) strand; PAM type: NRG; PAM sequence: GAG
atataacgatgacacataat

SEQ ID NO: 26079 - DNA, 20 bp, Artificial Sequence
  Description of Artificial Sequence: Synthetic oligonucleotide
  Target: ATXN2; (-) strand; PAM type: NRG; PAM sequence: TGG
actttatatagtatatagat

SEQ ID NO: 26080 - DNA, 20 bp, Artificial Sequence
  Description of Artificial Sequence: Synthetic oligonucleotide
  Target: ATXN2; (-) strand; PAM type: NRG; PAM sequence: TAG
ctgatactttatatagtata

SEQ ID NO: 26081 - DNA, 20 bp, Artificial Sequence
  Description of Artificial Sequence: Synthetic oligonucleotide
  Target: ATXN2; (-) strand; PAM type: NRG; PAM sequence: TAG
ctatatactgatactttata

SEQ ID NO: 26082 - DNA, 20 bp, Artificial Sequence
  Description of Artificial Sequence: Synthetic oligonucleotide
  Target: ATXN2; (-) strand; PAM type: NRG; PAM sequence: TAG
aagtgctaaaaatgactaaa

SEQ ID NO: 26083 - DNA, 20 bp, Artificial Sequence
  Description of Artificial Sequence: Synthetic oligonucleotide
  Target: ATXN2; (-) strand; PAM type: NRG; PAM sequence: AAG
gtgcattgtaggtactcagt

SEQ ID NO: 26084 - DNA, 20 bp, Artificial Sequence
  Description of Artificial Sequence: Synthetic oligonucleotide
  Target: ATXN2; (-) strand; PAM type: NRG; PAM sequence: CAG
atgagtgcattgtaggtact

SEQ ID NO: 26085 - DNA, 20 bp, Artificial Sequence
  Description of Artificial Sequence: Synthetic oligonucleotide
  Target: ATXN2; (-) strand; PAM type: NRG; PAM sequence: AGG
cagacttatgagtgcattgt

SEQ ID NO: 26086 - DNA, 20 bp, Artificial Sequence
  Description of Artificial Sequence: Synthetic oligonucleotide
  Target: ATXN2; (-) strand; PAM type: NRG; PAM sequence: TAG
ccagacttatgagtgcattg

SEQ ID NO: 26087 - DNA, 20 bp, Artificial Sequence
  Description of Artificial Sequence: Synthetic oligonucleotide
  Target: ATXN2; (-) strand; PAM type: NRG; PAM sequence: GAG
cccacctcgtccagacttat

SEQ ID NO: 26088 - DNA, 20 bp, Artificial Sequence
  Description of Artificial Sequence: Synthetic oligonucleotide
  Target: ATXN2; (-) strand; PAM type: NRG; PAM sequence: CAG
atgtgaatccccacctcgtc

SEQ ID NO: 26089 - DNA, 20 bp, Artificial Sequence
  Description of Artificial Sequence: Synthetic oligonucleotide
  Target: ATXN2; (-) strand; PAM type: NRG; PAM sequence: CAG
ggaaatgctgggaattgtat

SEQ ID NO: 26090 - DNA, 20 bp, Artificial Sequence
  Description of Artificial Sequence: Synthetic oligonucleotide
  Target: ATXN2; (-) strand; PAM type: NRG; PAM sequence: GGG
tagttcctacaggaaatgct

SEQ ID NO: 26091 - DNA, 20 bp, Artificial Sequence
  Description of Artificial Sequence: Synthetic oligonucleotide
  Target: ATXN2; (-) strand; PAM type: NRG; PAM sequence: TGG
ctagttcctacaggaaatgc

SEQ ID NO: 26092 - DNA, 20 bp, Artificial Sequence
  Description of Artificial Sequence: Synthetic oligonucleotide
  Target: ATXN2; (-) strand; PAM type: NRG; PAM sequence: AGG
caggagctcctagttcctac

SEQ ID NO: 26093 - DNA, 20 bp, Artificial Sequence
  Description of Artificial Sequence: Synthetic oligonucleotide
  Target: ATXN2; (-) strand; PAM type: NRG; PAM sequence: CAG
ccaggagctcctagttccta

SEQ ID NO: 26094 - DNA, 20 bp, Artificial Sequence
  Description of Artificial Sequence: Synthetic oligonucleotide
  Target: ATXN2; (-) strand; PAM type: NRG; PAM sequence: TAG
ctcttacacccaggagctcc

SEQ ID NO: 26095 - DNA, 20 bp, Artificial Sequence
  Description of Artificial Sequence: Synthetic oligonucleotide
  Target: ATXN2; (-) strand; PAM type: NRG; PAM sequence: GAG
aactagtctcttacacccag

SEQ ID NO: 26096 - DNA, 20 bp, Artificial Sequence
  Description of Artificial Sequence: Synthetic oligonucleotide
  Target: ATXN2; (-) strand; PAM type: NRG; PAM sequence: AGG
gtaactagtctcttacaccc

SEQ ID NO: 26097 - DNA, 20 bp, Artificial Sequence
  Description of Artificial Sequence: Synthetic oligonucleotide
  Target: ATXN2; (-) strand; PAM type: NRG; PAM sequence: CAG
tgtaactagtctcttacacc

SEQ ID NO: 26098 - DNA, 20 bp, Artificial Sequence
  Description of Artificial Sequence: Synthetic oligonucleotide
  Target: ATXN2; (-) strand; PAM type: NRG; PAM sequence: TAG
atttgcttcatttctgtaac

SEQ ID NO: 26099 - DNA, 20 bp, Artificial Sequence
  Description of Artificial Sequence: Synthetic oligonucleotide
  Target: ATXN2; (-) strand; PAM type: NRG; PAM sequence: AAG
ctcattgtattcgattctaa

SEQ ID NO: 26100 - DNA, 20 bp, Artificial Sequence
  Description of Artificial Sequence: Synthetic oligonucleotide
  Target: ATXN2; (-) strand; PAM type: NRG; PAM sequence: TAG
ctttgtttttaattgtattg

SEQ ID NO: 26101 - DNA, 20 bp, Artificial Sequence
  Description of Artificial Sequence: Synthetic oligonucleotide
  Target: ATXN2; (-) strand; PAM type: NRG; PAM sequence: TAG
gcccagagccttttgttcct

SEQ ID NO: 26102 - DNA, 20 bp, Artificial Sequence
  Description of Artificial Sequence: Synthetic oligonucleotide
  Target: ATXN2; (-) strand; PAM type: NRG; PAM sequence: GAG
ctgtcactttagaaagccca

SEQ ID NO: 26103 - DNA, 20 bp, Artificial Sequence
  Description of Artificial Sequence: Synthetic oligonucleotide
  Target: ATXN2; (-) strand; PAM type: NRG; PAM sequence: CAG
cactgtcactttagaaagcc

SEQ ID NO: 26104 - DNA, 20 bp, Artificial Sequence
  Description of Artificial Sequence: Synthetic oligonucleotide
  Target: ATXN2; (-) strand; PAM type: NRG; PAM sequence: AAG
gctgtcactgtcactttaga

SEQ ID NO: 26105 - DNA, 20 bp, Artificial Sequence
  Description of Artificial Sequence: Synthetic oligonucleotide
  Target: ATXN2; (-) strand; PAM type: NRG; PAM sequence: TAG
ataggctgtcactgtcactt

SEQ ID NO: 26106 - DNA, 20 bp, Artificial Sequence
  Description of Artificial Sequence: Synthetic oligonucleotide
  Target: ATXN2; (-) strand; PAM type: NRG; PAM sequence: AGG
ctagatcagctgttgctgat

SEQ ID NO: 26107 - DNA, 20 bp, Artificial Sequence
  Description of Artificial Sequence: Synthetic oligonucleotide
  Target: ATXN2; (-) strand; PAM type: NRG; PAM sequence: TAG
cctagatcagctgttgctga

SEQ ID NO: 26108 - DNA, 20 bp, Artificial Sequence
  Description of Artificial Sequence: Synthetic oligonucleotide
  Target: ATXN2; (-) strand; PAM type: NRG; PAM sequence: CAG
gtgttcttgaaggcctagat

SEQ ID NO: 26109 - DNA, 20 bp, Artificial Sequence
  Description of Artificial Sequence: Synthetic oligonucleotide
  Target: ATXN2; (-) strand; PAM type: NRG; PAM sequence: TAG
ttcttgtgttcttgaaggcc

SEQ ID NO: 26110 - DNA, 20 bp, Artificial Sequence
  Description of Artificial Sequence: Synthetic oligonucleotide
  Target: ATXN2; (-) strand; PAM type: NRG; PAM sequence: AGG
ttttcttcttgtgttcttga

SEQ ID NO: 26111 - DNA, 20 bp, Artificial Sequence
  Description of Artificial Sequence: Synthetic oligonucleotide
  Target: ATXN2; (-) strand; PAM type: NRG; PAM sequence: AAG
attttcttcttgtgttcttg

SEQ ID NO: 26112 - DNA, 20 bp, Artificial Sequence
  Description of Artificial Sequence: Synthetic oligonucleotide
  Target: ATXN2; (-) strand; PAM type: NRG; PAM sequence: TGG
aatgccactccagtctatgt

SEQ ID NO: 26113 - DNA, 20 bp, Artificial Sequence
  Description of Artificial Sequence: Synthetic oligonucleotide
  Target: ATXN2; (-) strand; PAM type: NRG; PAM sequence: CAG
acgtatttttaatgccactc

SEQ ID NO: 26114 - DNA, 20 bp, Artificial Sequence
  Description of Artificial Sequence: Synthetic oligonucleotide
  Target: ATXN2; (-) strand; PAM type: NRG; PAM sequence: CAG
caggcgtgagccaccgctcc

SEQ ID NO: 26115 - DNA, 20 bp, Artificial Sequence
  Description of Artificial Sequence: Synthetic oligonucleotide
  Target: ATXN2; (-) strand; PAM type: NRG; PAM sequence: GAG
aatgctgagattacaggcgt

SEQ ID NO: 26116 - DNA, 20 bp, Artificial Sequence
  Description of Artificial Sequence: Synthetic oligonucleotide
  Target: ATXN2; (-) strand; PAM type: NRG; PAM sequence: AGG
tcccaaaatgctgagattac

SEQ ID NO: 26117 - DNA, 20 bp, Artificial Sequence
  Description of Artificial Sequence: Synthetic oligonucleotide
  Target: ATXN2; (-) strand; PAM type: NRG; PAM sequence: CAG
ctcccaaaatgctgagatta

SEQ ID NO: 26118 - DNA, 20 bp, Artificial Sequence
  Description of Artificial Sequence: Synthetic oligonucleotide
  Target: ATXN2; (-) strand; PAM type: NRG; PAM sequence: GAG
actgggcctcccaaaatgct

SEQ ID NO: 26119 - DNA, 20 bp, Artificial Sequence
  Description of Artificial Sequence: Synthetic oligonucleotide
  Target: ATXN2; (-) strand; PAM type: NRG; PAM sequence: GGG
acctcgtgatctgcctgact

SEQ ID NO: 26120 - DNA, 20 bp, Artificial Sequence
  Description of Artificial Sequence: Synthetic oligonucleotide
  Target: ATXN2; (-) strand; PAM type: NRG; PAM sequence: TGG
gacctcgtgatctgcctgac

SEQ ID NO: 26121 - DNA, 20 bp, Artificial Sequence
  Description of Artificial Sequence: Synthetic oligonucleotide
  Target: ATXN2; (-) strand; PAM type: NRG; PAM sequence: TGG
tttcaccgtgttaaccagga

SEQ ID NO: 26122 - DNA, 20 bp, Artificial Sequence
  Description of Artificial Sequence: Synthetic oligonucleotide
  Target: ATXN2; (-) strand; PAM type: NRG; PAM sequence: AGG
ggggtttcaccgtgttaacc

SEQ ID NO: 26123 - DNA, 20 bp, Artificial Sequence
  Description of Artificial Sequence: Synthetic oligonucleotide
  Target: ATXN2; (-) strand; PAM type: NRG; PAM sequence: CAG
tggggtttcaccgtgttaac

SEQ ID NO: 26124 - DNA, 20 bp, Artificial Sequence
  Description of Artificial Sequence: Synthetic oligonucleotide
  Target: ATXN2; (-) strand; PAM type: NRG; PAM sequence: GGG
ttgtatttttagtagagatg

SEQ ID NO: 26125 - DNA, 20 bp, Artificial Sequence
  Description of Artificial Sequence: Synthetic oligonucleotide
  Target: ATXN2; (-) strand; PAM type: NRG; PAM sequence: GGG
tttgtatttttagtagagat

SEQ ID NO: 26126 - DNA, 20 bp, Artificial Sequence
  Description of Artificial Sequence: Synthetic oligonucleotide
  Target: ATXN2; (-) strand; PAM type: NRG; PAM sequence: TGG
ttttgtatttttagtagaga

SEQ ID NO: 26127 - DNA, 20 bp, Artificial Sequence
  Description of Artificial Sequence: Synthetic oligonucleotide
  Target: ATXN2; (-) strand; PAM type: NRG; PAM sequence: GAG
aactttttgtatttttagta

SEQ ID NO: 26128 - DNA, 20 bp, Artificial Sequence
  Description of Artificial Sequence: Synthetic oligonucleotide
  Target: ATXN2; (-) strand; PAM type: NRG; PAM sequence: TAG
ctaactttttgtatttttag

SEQ ID NO: 26129 - DNA, 20 bp, Artificial Sequence
  Description of Artificial Sequence: Synthetic oligonucleotide
  Target: ATXN2; (-) strand; PAM type: NRG; PAM sequence: TAG
catctaactttttgtatttt

SEQ ID NO: 26130 - DNA, 20 bp, Artificial Sequence
  Description of Artificial Sequence: Synthetic oligonucleotide
  Target: ATXN2; (-) strand; PAM type: NRG; PAM sequence: CGG
gtagctgggattacaggcgc

SEQ ID NO: 26131 - DNA, 20 bp, Artificial Sequence
  Description of Artificial Sequence: Synthetic oligonucleotide
  Target: ATXN2; (-) strand; PAM type: NRG; PAM sequence: AGG
tcccgagtagctgggattac

SEQ ID NO: 26132 - DNA, 20 bp, Artificial Sequence
  Description of Artificial Sequence: Synthetic oligonucleotide
  Target: ATXN2; (-) strand; PAM type: NRG; PAM sequence: CAG
ctcccgagtagctgggatta

SEQ ID NO: 26133 - DNA, 20 bp, Artificial Sequence
  Description of Artificial Sequence: Synthetic oligonucleotide
  Target: ATXN2; (-) strand; PAM type: NRG; PAM sequence: GGG
cctcagcctcccgagtagct

SEQ ID NO: 26134 - DNA, 20 bp, Artificial Sequence
  Description of Artificial Sequence: Synthetic oligonucleotide
  Target: ATXN2; (-) strand; PAM type: NRG; PAM sequence: TGG
gcctcagcctcccgagtagc

SEQ ID NO: 26135 - DNA, 20 bp, Artificial Sequence
  Description of Artificial Sequence: Synthetic oligonucleotide
  Target: ATXN2; (-) strand; PAM type: NRG; PAM sequence: TAG
tcctgcctcagcctcccgag

SEQ ID NO: 26136 - DNA, 20 bp, Artificial Sequence
  Description of Artificial Sequence: Synthetic oligonucleotide
  Target: ATXN2; (-) strand; PAM type: NRG; PAM sequence: GAG
ttctcctgcctcagcctccc

SEQ ID NO: 26137 - DNA, 20 bp, Artificial Sequence
  Description of Artificial Sequence: Synthetic oligonucleotide
  Target: ATXN2; (-) strand; PAM type: NRG; PAM sequence: CAG
ttcacaccattctcctgcct

SEQ ID NO: 26138 - DNA, 20 bp, Artificial Sequence
  Description of Artificial Sequence: Synthetic oligonucleotide
  Target: ATXN2; (-) strand; PAM type: NRG; PAM sequence: TGG
cactgcaagctctgcctccc

SEQ ID NO: 26139 - DNA, 20 bp, Artificial Sequence
  Description of Artificial Sequence: Synthetic oligonucleotide
  Target: ATXN2; (-) strand; PAM type: NRG; PAM sequence: AAG
gcgcgatctctgctcactgc

SEQ ID NO: 26140 - DNA, 20 bp, Artificial Sequence
  Description of Artificial Sequence: Synthetic oligonucleotide
  Target: ATXN2; (-) strand; PAM type: NRG; PAM sequence: TGG
ttgtccaggctggagtgcag

SEQ ID NO: 26141 - DNA, 20 bp, Artificial Sequence
  Description of Artificial Sequence: Synthetic oligonucleotide
  Target: ATXN2; (-) strand; PAM type: NRG; PAM sequence: CAG
ctgttgtccaggctggagtg

SEQ ID NO: 26142 - DNA, 20 bp, Artificial Sequence
  Description of Artificial Sequence: Synthetic oligonucleotide
  Target: ATXN2; (-) strand; PAM type: NRG; PAM sequence: GAG
tcgctctgttgtccaggctg

SEQ ID NO: 26143 - DNA, 20 bp, Artificial Sequence
  Description of Artificial Sequence: Synthetic oligonucleotide
  Target: ATXN2; (-) strand; PAM type: NRG; PAM sequence: TGG
tctcgctctgttgtccaggc

SEQ ID NO: 26144 - DNA, 20 bp, Artificial Sequence
  Description of Artificial Sequence: Synthetic oligonucleotide
  Target: ATXN2; (-) strand; PAM type: NRG; PAM sequence: AGG
ggagtctcgctctgttgtcc

SEQ ID NO: 26145 - DNA, 20 bp, Artificial Sequence
  Description of Artificial Sequence: Synthetic oligonucleotide
  Target: ATXN2; (-) strand; PAM type: NRG; PAM sequence: CAG
tggagtctcgctctgttgtc

SEQ ID NO: 26146 - DNA, 20 bp, Artificial Sequence
  Description of Artificial Sequence: Synthetic oligonucleotide
  Target: ATXN2; (-) strand; PAM type: NRG; PAM sequence: GAG
ttttttgtttttttgagatg

SEQ ID NO: 26147 - DNA, 20 bp, Artificial Sequence
  Description of Artificial Sequence: Synthetic oligonucleotide
  Target: ATXN2; (-) strand; PAM type: NRG; PAM sequence: TGG
tgttttttgtttttttgaga

SEQ ID NO: 26148 - DNA, 20 bp, Artificial Sequence
  Description of Artificial Sequence: Synthetic oligonucleotide
  Target: ATXN2; (-) strand; PAM type: NRG; PAM sequence: GAG
tttttgttttttgttttttt

SEQ ID NO: 26149 - DNA, 20 bp, Artificial Sequence
  Description of Artificial Sequence: Synthetic oligonucleotide
  Target: ATXN2; (-) strand; PAM type: NRG; PAM sequence: CAG
agtgatgggattacaggcgt

SEQ ID NO: 26150 - DNA, 20 bp, Artificial Sequence
  Description of Artificial Sequence: Synthetic oligonucleotide
  Target: ATXN2; (-) strand; PAM type: NRG; PAM sequence: AGG
tcccaaagtgatgggattac

SEQ ID NO: 26151 - DNA, 20 bp, Artificial Sequence
  Description of Artificial Sequence: Synthetic oligonucleotide
  Target: ATXN2; (-) strand; PAM type: NRG; PAM sequence: CAG
ctcccaaagtgatgggatta

SEQ ID NO: 26152 - DNA, 20 bp, Artificial Sequence
  Description of Artificial Sequence: Synthetic oligonucleotide
  Target: ATXN2; (-) strand; PAM type: NRG; PAM sequence: GGG
cctcggcctcccaaagtgat

SEQ ID NO: 26153 - DNA, 20 bp, Artificial Sequence
  Description of Artificial Sequence: Synthetic oligonucleotide
  Target: ATXN2; (-) strand; PAM type: NRG; PAM sequence: TGG
gcctcggcctcccaaagtga

SEQ ID NO: 26154 - DNA, 20 bp, Artificial Sequence
  Description of Artificial Sequence: Synthetic oligonucleotide
  Target: ATXN2; (-) strand; PAM type: NRG; PAM sequence: AAG
ccgcccgcctcggcctccca

SEQ ID NO: 26155 - DNA, 20 bp, Artificial Sequence
  Description of Artificial Sequence: Synthetic oligonucleotide
  Target: ATXN2; (-) strand; PAM type: NRG; PAM sequence: CGG
ctcaggtgatccgcccgcct

SEQ ID NO: 26156 - DNA, 20 bp, Artificial Sequence
  Description of Artificial Sequence: Synthetic oligonucleotide
  Target: ATXN2; (-) strand; PAM type: NRG; PAM sequence: AGG
ggtctcgaactccggacctc

SEQ ID NO: 26157 - DNA, 20 bp, Artificial Sequence
  Description of Artificial Sequence: Synthetic oligonucleotide
  Target: ATXN2; (-) strand; PAM type: NRG; PAM sequence: CAG
tggtctcgaactccggacct

SEQ ID NO: 26158 - DNA, 20 bp, Artificial Sequence
  Description of Artificial Sequence: Synthetic oligonucleotide
  Target: ATXN2; (-) strand; PAM type: NRG; PAM sequence: CGG
gtcaggctggtctcgaactc

SEQ ID NO: 26159 - DNA, 20 bp, Artificial Sequence
  Description of Artificial Sequence: Synthetic oligonucleotide
  Target: ATXN2; (-) strand; PAM type: NRG; PAM sequence: TGG
tttctccatgttggtcaggc

SEQ ID NO: 26160 - DNA, 20 bp, Artificial Sequence
  Description of Artificial Sequence: Synthetic oligonucleotide
  Target: ATXN2; (-) strand; PAM type: NRG; PAM sequence: AGG
ggggtttctccatgttggtc

SEQ ID NO: 26161 - DNA, 20 bp, Artificial Sequence
  Description of Artificial Sequence: Synthetic oligonucleotide
  Target: ATXN2; (-) strand; PAM type: NRG; PAM sequence: CAG
gggggtttctccatgttggt

SEQ ID NO: 26162 - DNA, 20 bp, Artificial Sequence
  Description of Artificial Sequence: Synthetic oligonucleotide
  Target: ATXN2; (-) strand; PAM type: NRG; PAM sequence: TGG
agatgggggtttctccatgt

SEQ ID NO: 26163 - DNA, 20 bp, Artificial Sequence
  Description of Artificial Sequence: Synthetic oligonucleotide
  Target: ATXN2; (-) strand; PAM type: NRG; PAM sequence: GGG
gctatatttagtagagatgg

SEQ ID NO: 26164 - DNA, 20 bp, Artificial Sequence
  Description of Artificial Sequence: Synthetic oligonucleotide
  Target: ATXN2; (-) strand; PAM type: NRG; PAM sequence: GGG
agctatatttagtagagatg

SEQ ID NO: 26165 - DNA, 20 bp, Artificial Sequence
  Description of Artificial Sequence: Synthetic oligonucleotide
  Target: ATXN2; (-) strand; PAM type: NRG; PAM sequence: GGG
cagctatatttagtagagat

SEQ ID NO: 26166 - DNA, 20 bp, Artificial Sequence
  Description of Artificial Sequence: Synthetic oligonucleotide
  Target: ATXN2; (-) strand; PAM type: NRG; PAM sequence: TGG
acagctatatttagtagaga

SEQ ID NO: 26167 - DNA, 20 bp, Artificial Sequence
  Description of Artificial Sequence: Synthetic oligonucleotide
  Target: ATXN2; (-) strand; PAM type: NRG; PAM sequence: GAG
atgcacagctatatttagta

SEQ ID NO: 26168 - DNA, 20 bp, Artificial Sequence
  Description of Artificial Sequence: Synthetic oligonucleotide
  Target: ATXN2; (-) strand; PAM type: NRG; PAM sequence: TAG
ccatgcacagctatatttag

SEQ ID NO: 26169 - DNA, 20 bp, Artificial Sequence
  Description of Artificial Sequence: Synthetic oligonucleotide
  Target: ATXN2; (-) strand; PAM type: NRG; PAM sequence: TAG
ccaccatgcacagctatatt

SEQ ID NO: 26170 - DNA, 20 bp, Artificial Sequence
  Description of Artificial Sequence: Synthetic oligonucleotide
  Target: ATXN2; (-) strand; PAM type: NRG; PAM sequence: CAG
caggcatgcaccaccatgca

SEQ ID NO: 26171 - DNA, 20 bp, Artificial Sequence
  Description of Artificial Sequence: Synthetic oligonucleotide
  Target: ATXN2; (-) strand; PAM type: NRG; PAM sequence: AGG
tcccgagcagctgggattac

SEQ ID NO: 26172 - DNA, 20 bp, Artificial Sequence
  Description of Artificial Sequence: Synthetic oligonucleotide
  Target: ATXN2; (-) strand; PAM type: NRG; PAM sequence: CAG
ctcccgagcagctgggatta

SEQ ID NO: 26173 - DNA, 20 bp, Artificial Sequence
  Description of Artificial Sequence: Synthetic oligonucleotide
  Target: ATXN2; (-) strand; PAM type: NRG; PAM sequence: GGG
cttcagcctcccgagcagct

SEQ ID NO: 26174 - DNA, 20 bp, Artificial Sequence
  Description of Artificial Sequence: Synthetic oligonucleotide
  Target: ATXN2; (-) strand; PAM type: NRG; PAM sequence: TGG
gcttcagcctcccgagcagc

SEQ ID NO: 26175 - DNA, 20 bp, Artificial Sequence
  Description of Artificial Sequence: Synthetic oligonucleotide
  Target: ATXN2; (-) strand; PAM type: NRG; PAM sequence: CAG
tcctgcttcagcctcccgag

SEQ ID NO: 26176 - DNA, 20 bp, Artificial Sequence
  Description of Artificial Sequence: Synthetic oligonucleotide
  Target: ATXN2; (-) strand; PAM type: NRG; PAM sequence: GAG
ttctcctgcttcagcctccc

SEQ ID NO: 26177 - DNA, 20 bp, Artificial Sequence
  Description of Artificial Sequence: Synthetic oligonucleotide
  Target: ATXN2; (-) strand; PAM type: NRG; PAM sequence: CAG
ttcaagtgattctcctgctt

SEQ ID NO: 26178 - DNA, 20 bp, Artificial Sequence
  Description of Artificial Sequence: Synthetic oligonucleotide
  Target: ATXN2; (-) strand; PAM type: NRG; PAM sequence: AAG
agcctctgcctcccaggttc

SEQ ID NO: 26179 - DNA, 20 bp, Artificial Sequence
  Description of Artificial Sequence: Synthetic oligonucleotide
  Target: ATXN2; (-) strand; PAM type: NRG; PAM sequence: AGG
caccgcagcctctgcctccc

SEQ ID NO: 26180 - DNA, 20 bp, Artificial Sequence
  Description of Artificial Sequence: Synthetic oligonucleotide
  Target: ATXN2; (-) strand; PAM type: NRG; PAM sequence: CAG
tcaccgcagcctctgcctcc

SEQ ID NO: 26181 - DNA, 20 bp, Artificial Sequence
  Description of Artificial Sequence: Synthetic oligonucleotide
  Target: ATXN2; (-) strand; PAM type: NRG; PAM sequence: CAG
ggtgcgatctcggctcaccg

SEQ ID NO: 26182 - DNA, 20 bp, Artificial Sequence
  Description of Artificial Sequence: Synthetic oligonucleotide
  Target: ATXN2; (-) strand; PAM type: NRG; PAM sequence: CGG
ggagtgcaatggtgcgatct

SEQ ID NO: 26183 - DNA, 20 bp, Artificial Sequence
  Description of Artificial Sequence: Synthetic oligonucleotide
  Target: ATXN2; (-) strand; PAM type: NRG; PAM sequence: TGG
ttacccaggctggagtgcaa

SEQ ID NO: 26184 - DNA, 20 bp, Artificial Sequence
  Description of Artificial Sequence: Synthetic oligonucleotide
  Target: ATXN2; (-) strand; PAM type: NRG; PAM sequence: GAG
cgctcttgttacccaggctg

SEQ ID NO: 26185 - DNA, 20 bp, Artificial Sequence
  Description of Artificial Sequence: Synthetic oligonucleotide
  Target: ATXN2; (-) strand; PAM type: NRG; PAM sequence: TGG
ttcgctcttgttacccaggc

SEQ ID NO: 26186 - DNA, 20 bp, Artificial Sequence
  Description of Artificial Sequence: Synthetic oligonucleotide
  Target: ATXN2; (-) strand; PAM type: NRG; PAM sequence: AGG
gagtttcgctcttgttaccc

SEQ ID NO: 26187 - DNA, 20 bp, Artificial Sequence
  Description of Artificial Sequence: Synthetic oligonucleotide
  Target: ATXN2; (-) strand; PAM type: NRG; PAM sequence: CAG
agagtttcgctcttgttacc

SEQ ID NO: 26188 - DNA, 20 bp, Artificial Sequence
  Description of Artificial Sequence: Synthetic oligonucleotide
  Target: ATXN2; (-) strand; PAM type: NRG; PAM sequence: GAG
tgttgatttaattttaaaca

SEQ ID NO: 26189 - DNA, 20 bp, Artificial Sequence
  Description of Artificial Sequence: Synthetic oligonucleotide
  Target: ATXN2; (-) strand; PAM type: NRG; PAM sequence: CAG
cctgttgatttaattttaaa

SEQ ID NO: 26190 - DNA, 20 bp, Artificial Sequence
  Description of Artificial Sequence: Synthetic oligonucleotide
  Target: ATXN2; (-) strand; PAM type: NRG; PAM sequence: CAG
cagatgtgagccactgtgcc

SEQ ID NO: 26191 - DNA, 20 bp, Artificial Sequence
  Description of Artificial Sequence: Synthetic oligonucleotide
  Target: ATXN2; (-) strand; PAM type: NRG; PAM sequence: GAG
agtgctgggattacagatgt

SEQ ID NO: 26192 - DNA, 20 bp, Artificial Sequence
  Description of Artificial Sequence: Synthetic oligonucleotide
  Target: ATXN2; (-) strand; PAM type: NRG; PAM sequence: CAG
ctcccaaagtgctgggatta

SEQ ID NO: 26193 - DNA, 20 bp, Artificial Sequence
  Description of Artificial Sequence: Synthetic oligonucleotide
  Target: ATXN2; (-) strand; PAM type: NRG; PAM sequence: GGG
cctcagcctcccaaagtgct

SEQ ID NO: 26194 - DNA, 20 bp, Artificial Sequence
  Description of Artificial Sequence: Synthetic oligonucleotide
  Target: ATXN2; (-) strand; PAM type: NRG; PAM sequence: TGG
gcctcagcctcccaaagtgc

SEQ ID NO: 26195 - DNA, 20 bp, Artificial Sequence
  Description of Artificial Sequence: Synthetic oligonucleotide
  Target: ATXN2; (-) strand; PAM type: NRG; PAM sequence: AAG
ccacccgcctcagcctccca

SEQ ID NO: 26196 - DNA, 20 bp, Artificial Sequence
  Description of Artificial Sequence: Synthetic oligonucleotide
  Target: ATXN2; (-) strand; PAM type: NRG; PAM sequence: CAG
acctcatgatccacccgcct

SEQ ID NO: 26197 - DNA, 20 bp, Artificial Sequence
  Description of Artificial Sequence: Synthetic oligonucleotide
  Target: ATXN2; (-) strand; PAM type: NRG; PAM sequence: TGG
tttcaccatgttggccagga

SEQ ID NO: 26198 - DNA, 20 bp, Artificial Sequence
  Description of Artificial Sequence: Synthetic oligonucleotide
  Target: ATXN2; (-) strand; PAM type: NRG; PAM sequence: AGG
agggtttcaccatgttggcc

SEQ ID NO: 26199 - DNA, 20 bp, Artificial Sequence
  Description of Artificial Sequence: Synthetic oligonucleotide
  Target: ATXN2; (-) strand; PAM type: NRG; PAM sequence: CAG
cagggtttcaccatgttggc

SEQ ID NO: 26200 - DNA, 20 bp, Artificial Sequence
  Description of Artificial Sequence: Synthetic oligonucleotide
  Target: ATXN2; (-) strand; PAM type: NRG; PAM sequence: TGG
gagacagggtttcaccatgt

SEQ ID NO: 26201 - DNA, 20 bp, Artificial Sequence
  Description of Artificial Sequence: Synthetic oligonucleotide
  Target: ATXN2; (-) strand; PAM type: NRG; PAM sequence: GGG
ttgtatttttagtagagaca

SEQ ID NO: 26202 - DNA, 20 bp, Artificial Sequence
  Description of Artificial Sequence: Synthetic oligonucleotide
  Target: ATXN2; (-) strand; PAM type: NRG; PAM sequence: AGG
tttgtatttttagtagagac

SEQ ID NO: 26203 - DNA, 20 bp, Artificial Sequence
  Description of Artificial Sequence: Synthetic oligonucleotide
  Target: ATXN2; (-) strand; PAM type: NRG; PAM sequence: CAG
ttttgtatttttagtagaga

SEQ ID NO: 26204 - DNA, 20 bp, Artificial Sequence
  Description of Artificial Sequence: Synthetic oligonucleotide
  Target: ATXN2; (-) strand; PAM type: NRG; PAM sequence: GAG
taatttttgtatttttagta

SEQ ID NO: 26205 - DNA, 20 bp, Artificial Sequence
  Description of Artificial Sequence: Synthetic oligonucleotide
  Target: ATXN2; (-) strand; PAM type: NRG; PAM sequence: TAG
cctaatttttgtatttttag

SEQ ID NO: 26206 - DNA, 20 bp, Artificial Sequence
  Description of Artificial Sequence: Synthetic oligonucleotide
  Target: ATXN2; (-) strand; PAM type: NRG; PAM sequence: TAG
ctacctaatttttgtatttt

SEQ ID NO: 26207 - DNA, 20 bp, Artificial Sequence
  Description of Artificial Sequence: Synthetic oligonucleotide
  Target: ATXN2; (-) strand; PAM type: NRG; PAM sequence: AGG
tcccgagtagctgggactat

SEQ ID NO: 26208 - DNA, 20 bp, Artificial Sequence
  Description of Artificial Sequence: Synthetic oligonucleotide
  Target: ATXN2; (-) strand; PAM type: NRG; PAM sequence: TAG
ctcccgagtagctgggacta

SEQ ID NO: 26209 - DNA, 20 bp, Artificial Sequence
  Description of Artificial Sequence: Synthetic oligonucleotide
  Target: ATXN2; (-) strand; PAM type: NRG; PAM sequence: GGG
cctcagcctcccgagtagct

SEQ ID NO: 26210 - DNA, 20 bp, Artificial Sequence
  Description of Artificial Sequence: Synthetic oligonucleotide
  Target: ATXN2; (-) strand; PAM type: NRG; PAM sequence: TGG
gcctcagcctcccgagtagc

SEQ ID NO: 26211 - DNA, 20 bp, Artificial Sequence
  Description of Artificial Sequence: Synthetic oligonucleotide
  Target: ATXN2; (-) strand; PAM type: NRG; PAM sequence: TAG
gcctgcctcagcctcccgag

SEQ ID NO: 26212 - DNA, 20 bp, Artificial Sequence
  Description of Artificial Sequence: Synthetic oligonucleotide
  Target: ATXN2; (-) strand; PAM type: NRG; PAM sequence: GAG
ttcgcctgcctcagcctccc

SEQ ID NO: 26213 - DNA, 20 bp, Artificial Sequence
  Description of Artificial Sequence: Synthetic oligonucleotide
  Target: ATXN2; (-) strand; PAM type: NRG; PAM sequence: CAG
ttcaagcaattcgcctgcct

SEQ ID NO: 26214 - DNA, 20 bp, Artificial Sequence
  Description of Artificial Sequence: Synthetic oligonucleotide
  Target: ATXN2; (-) strand; PAM type: NRG; PAM sequence: AAG
gttcaagcaattcaaggttc

SEQ ID NO: 26215 - DNA, 20 bp, Artificial Sequence
  Description of Artificial Sequence: Synthetic oligonucleotide
  Target: ATXN2; (-) strand; PAM type: NRG; PAM sequence: AGG
ctagtagttcaagcaattca

SEQ ID NO: 26216 - DNA, 20 bp, Artificial Sequence
  Description of Artificial Sequence: Synthetic oligonucleotide
  Target: ATXN2; (-) strand; PAM type: NRG; PAM sequence: AAG
cctagtagttcaagcaattc

SEQ ID NO: 26217 - DNA, 20 bp, Artificial Sequence
  Description of Artificial Sequence: Synthetic oligonucleotide
  Target: ATXN2; (-) strand; PAM type: NRG; PAM sequence: AAG
ctccgcctccctagtagttc

SEQ ID NO: 26218 - DNA, 20 bp, Artificial Sequence
  Description of Artificial Sequence: Synthetic oligonucleotide
  Target: ATXN2; (-) strand; PAM type: NRG; PAM sequence: TAG
tacaacctccgcctccctag

SEQ ID NO: 26219 - DNA, 20 bp, Artificial Sequence
  Description of Artificial Sequence: Synthetic oligonucleotide
  Target: ATXN2; (-) strand; PAM type: NRG; PAM sequence: TAG
cactacaacctccgcctccc

SEQ ID NO: 26220 - DNA, 20 bp, Artificial Sequence
  Description of Artificial Sequence: Synthetic oligonucleotide
  Target: ATXN2; (-) strand; PAM type: NRG; PAM sequence: TGG
ggagtgcagtggcgcaatct

SEQ ID NO: 26221 - DNA, 20 bp, Artificial Sequence
  Description of Artificial Sequence: Synthetic oligonucleotide
  Target: ATXN2; (-) strand; PAM type: NRG; PAM sequence: TGG
ctcgccaggttggagtgcag

SEQ ID NO: 26222 - DNA, 20 bp, Artificial Sequence
  Description of Artificial Sequence: Synthetic oligonucleotide
  Target: ATXN2; (-) strand; PAM type: NRG; PAM sequence: CAG
gctctcgccaggttggagtg

SEQ ID NO: 26223 - DNA, 20 bp, Artificial Sequence
  Description of Artificial Sequence: Synthetic oligonucleotide
  Target: ATXN2; (-) strand; PAM type: NRG; PAM sequence: GAG
gtctcgctctcgccaggttg

SEQ ID NO: 26224 - DNA, 20 bp, Artificial Sequence
  Description of Artificial Sequence: Synthetic oligonucleotide
  Target: ATXN2; (-) strand; PAM type: NRG; PAM sequence: TGG
gagtctcgctctcgccaggt

SEQ ID NO: 26225 - DNA, 20 bp, Artificial Sequence
  Description of Artificial Sequence: Synthetic oligonucleotide
  Target: ATXN2; (-) strand; PAM type: NRG; PAM sequence: AGG
gacggagtctcgctctcgcc

SEQ ID NO: 26226 - DNA, 20 bp, Artificial Sequence
  Description of Artificial Sequence: Synthetic oligonucleotide
  Target: ATXN2; (-) strand; PAM type: NRG; PAM sequence: CAG
agacggagtctcgctctcgc

SEQ ID NO: 26227 - DNA, 20 bp, Artificial Sequence
  Description of Artificial Sequence: Synthetic oligonucleotide
  Target: ATXN2; (-) strand; PAM type: NRG; PAM sequence: GAG
tttatttattttttgagacg

SEQ ID NO: 26228 - DNA, 20 bp, Artificial Sequence
  Description of Artificial Sequence: Synthetic oligonucleotide
  Target: ATXN2; (-) strand; PAM type: NRG; PAM sequence: CGG
tatttatttattttttgaga

SEQ ID NO: 26229 - DNA, 20 bp, Artificial Sequence
  Description of Artificial Sequence: Synthetic oligonucleotide
  Target: ATXN2; (-) strand; PAM type: NRG; PAM sequence: GAG
tttttatttatttatttttt

SEQ ID NO: 26230 - DNA, 20 bp, Artificial Sequence
  Description of Artificial Sequence: Synthetic oligonucleotide
  Target: ATXN2; (-) strand; PAM type: NRG; PAM sequence: CAG
ctgtgttcttgtgtacaatt

SEQ ID NO: 26231 - DNA, 20 bp, Artificial Sequence
  Description of Artificial Sequence: Synthetic oligonucleotide
  Target: ATXN2; (-) strand; PAM type: NRG; PAM sequence: AAG
ccagtcccacttccctgggg

SEQ ID NO: 26232 - DNA, 20 bp, Artificial Sequence
  Description of Artificial Sequence: Synthetic oligonucleotide
  Target: ATXN2; (-) strand; PAM type: NRG; PAM sequence: GGG
cccccagtcccacttccctg

SEQ ID NO: 26233 - DNA, 20 bp, Artificial Sequence
  Description of Artificial Sequence: Synthetic oligonucleotide
  Target: ATXN2; (-) strand; PAM type: NRG; PAM sequence: GGG
acccccagtcccacttccct

SEQ ID NO: 26234 - DNA, 20 bp, Artificial Sequence
  Description of Artificial Sequence: Synthetic oligonucleotide
  Target: ATXN2; (-) strand; PAM type: NRG; PAM sequence: TGG
aacccccagtcccacttccc

SEQ ID NO: 26235 - DNA, 20 bp, Artificial Sequence
  Description of Artificial Sequence: Synthetic oligonucleotide
  Target: ATXN2; (-) strand; PAM type: NRG; PAM sequence: CAG
ataatctcctctctaacccc

SEQ ID NO: 26236 - DNA, 20 bp, Artificial Sequence
  Description of Artificial Sequence: Synthetic oligonucleotide
  Target: ATXN2; (-) strand; PAM type: NRG; PAM sequence: AAG
acagatgagtattcaatgaa

SEQ ID NO: 26237 - DNA, 20 bp, Artificial Sequence
  Description of Artificial Sequence: Synthetic oligonucleotide
  Target: ATXN2; (-) strand; PAM type: NRG; PAM sequence: GAG
acaattcagttagaacagat

SEQ ID NO: 26238 - DNA, 20 bp, Artificial Sequence
  Description of Artificial Sequence: Synthetic oligonucleotide
  Target: ATXN2; (-) strand; PAM type: NRG; PAM sequence: CAG
agtatacaattcagttagaa

SEQ ID NO: 26239 - DNA, 20 bp, Artificial Sequence
  Description of Artificial Sequence: Synthetic oligonucleotide
  Target: ATXN2; (-) strand; PAM type: NRG; PAM sequence: TAG
ctcgtagtatacaattcagt

SEQ ID NO: 26240 - DNA, 20 bp, Artificial Sequence
  Description of Artificial Sequence: Synthetic oligonucleotide
  Target: ATXN2; (-) strand; PAM type: NRG; PAM sequence: CAG
tatgctcgtagtatacaatt

SEQ ID NO: 26241 - DNA, 20 bp, Artificial Sequence
  Description of Artificial Sequence: Synthetic oligonucleotide
  Target: ATXN2; (-) strand; PAM type: NRG; PAM sequence: TAG
ggtgtagtagtatatgctcg

SEQ ID NO: 26242 - DNA, 20 bp, Artificial Sequence
  Description of Artificial Sequence: Synthetic oligonucleotide
  Target: ATXN2; (-) strand; PAM type: NRG; PAM sequence: TAG
ctgtataatacatggtgtag

SEQ ID NO: 26243 - DNA, 20 bp, Artificial Sequence
  Description of Artificial Sequence: Synthetic oligonucleotide
  Target: ATXN2; (-) strand; PAM type: NRG; PAM sequence: TAG
aatctgtataatacatggtg

SEQ ID NO: 26244 - DNA, 20 bp, Artificial Sequence
  Description of Artificial Sequence: Synthetic oligonucleotide
  Target: ATXN2; (-) strand; PAM type: NRG; PAM sequence: TGG
aatataatctgtataataca

SEQ ID NO: 26245 - DNA, 20 bp, Artificial Sequence
  Description of Artificial Sequence: Synthetic oligonucleotide
  Target: ATXN2; (-) strand; PAM type: NRG; PAM sequence: TAG
tgtgttattcttcagtatta

SEQ ID NO: 26246 - DNA, 20 bp, Artificial Sequence
  Description of Artificial Sequence: Synthetic oligonucleotide
  Target: ATXN2; (-) strand; PAM type: NRG; PAM sequence: CAG
tgtttctttgtgttattctt

SEQ ID NO: 26247 - DNA, 20 bp, Artificial Sequence
  Description of Artificial Sequence: Synthetic oligonucleotide
  Target: ATXN2; (-) strand; PAM type: NRG; PAM sequence: CAG
tgcccttggttttgttgttc

SEQ ID NO: 26248 - DNA, 20 bp, Artificial Sequence
  Description of Artificial Sequence: Synthetic oligonucleotide
  Target: ATXN2; (-) strand; PAM type: NRG; PAM sequence: TGG
cgtggctccacctgtgccct

SEQ ID NO: 26249 - DNA, 20 bp, Artificial Sequence
  Description of Artificial Sequence: Synthetic oligonucleotide
  Target: ATXN2; (-) strand; PAM type: NRG; PAM sequence: TGG
ccattctagcctgaggagcg

SEQ ID NO: 26250 - DNA, 20 bp, Artificial Sequence
  Description of Artificial Sequence: Synthetic oligonucleotide
  Target: ATXN2; (-) strand; PAM type: NRG; PAM sequence: GAG
ctaccccattctagcctgag

SEQ ID NO: 26251 - DNA, 20 bp, Artificial Sequence
  Description of Artificial Sequence: Synthetic oligonucleotide
  Target: ATXN2; (-) strand; PAM type: NRG; PAM sequence: AGG
ccctaccccattctagcctg

SEQ ID NO: 26252 - DNA, 20 bp, Artificial Sequence
  Description of Artificial Sequence: Synthetic oligonucleotide
  Target: ATXN2; (-) strand; PAM type: NRG; PAM sequence: GAG
cccctaccccattctagcct

SEQ ID NO: 26253 - DNA, 20 bp, Artificial Sequence
  Description of Artificial Sequence: Synthetic oligonucleotide
  Target: ATXN2; (-) strand; PAM type: NRG; PAM sequence: TAG
atcatacccctaccccattc

SEQ ID NO: 26254 - DNA, 20 bp, Artificial Sequence
  Description of Artificial Sequence: Synthetic oligonucleotide
  Target: ATXN2; (-) strand; PAM type: NRG; PAM sequence: CAG
cctaatctagaggctcccca

SEQ ID NO: 26255 - DNA, 20 bp, Artificial Sequence
  Description of Artificial Sequence: Synthetic oligonucleotide
  Target: ATXN2; (-) strand; PAM type: NRG; PAM sequence: AGG
gctaagaatccctaatctag

SEQ ID NO: 26256 - DNA, 20 bp, Artificial Sequence
  Description of Artificial Sequence: Synthetic oligonucleotide
  Target: ATXN2; (-) strand; PAM type: NRG; PAM sequence: GAG
ggctaagaatccctaatcta

SEQ ID NO: 26257 - DNA, 20 bp, Artificial Sequence
  Description of Artificial Sequence: Synthetic oligonucleotide
  Target: ATXN2; (-) strand; PAM type: NRG; PAM sequence: TAG
aaggctaagaatccctaatc

SEQ ID NO: 26258 - DNA, 20 bp, Artificial Sequence
  Description of Artificial Sequence: Synthetic oligonucleotide
  Target: ATXN2; (-) strand; PAM type: NRG; PAM sequence: AAG
catggattaagaaaaaggct

SEQ ID NO: 26259 - DNA, 20 bp, Artificial Sequence
  Description of Artificial Sequence: Synthetic oligonucleotide
  Target: ATXN2; (-) strand; PAM type: NRG; PAM sequence: AGG
gggcccatggattaagaaaa

SEQ ID NO: 26260 - DNA, 20 bp, Artificial Sequence
  Description of Artificial Sequence: Synthetic oligonucleotide
  Target: ATXN2; (-) strand; PAM type: NRG; PAM sequence: AAG
ggggcccatggattaagaaa

SEQ ID NO: 26261 - DNA, 20 bp, Artificial Sequence
  Description of Artificial Sequence: Synthetic oligonucleotide
  Target: ATXN2; (-) strand; PAM type: NRG; PAM sequence: AAG
attgaaggggcccatggatt

SEQ ID NO: 26262 - DNA, 20 bp, Artificial Sequence
  Description of Artificial Sequence: Synthetic oligonucleotide
  Target: ATXN2; (-) strand; PAM type: NRG; PAM sequence: TGG
taaaatattgaaggggccca

SEQ ID NO: 26263 - DNA, 20 bp, Artificial Sequence
  Description of Artificial Sequence: Synthetic oligonucleotide
  Target: ATXN2; (-) strand; PAM type: NRG; PAM sequence: GGG
gcttccctaaaatattgaag

SEQ ID NO: 26264 - DNA, 20 bp, Artificial Sequence
  Description of Artificial Sequence: Synthetic oligonucleotide
  Target: ATXN2; (-) strand; PAM type: NRG; PAM sequence: GGG
ggcttccctaaaatattgaa

SEQ ID NO: 26265 - DNA, 20 bp, Artificial Sequence
  Description of Artificial Sequence: Synthetic oligonucleotide
  Target: ATXN2; (-) strand; PAM type: NRG; PAM sequence: AGG
aggcttccctaaaatattga

SEQ ID NO: 26266 - DNA, 20 bp, Artificial Sequence
  Description of Artificial Sequence: Synthetic oligonucleotide
  Target: ATXN2; (-) strand; PAM type: NRG; PAM sequence: AAG
taggcttccctaaaatattg

SEQ ID NO: 26267 - DNA, 20 bp, Artificial Sequence
  Description of Artificial Sequence: Synthetic oligonucleotide
  Target: ATXN2; (-) strand; PAM type: NRG; PAM sequence: AGG
cattctgaatacggtttcat

SEQ ID NO: 26268 - DNA, 20 bp, Artificial Sequence
  Description of Artificial Sequence: Synthetic oligonucleotide
  Target: ATXN2; (-) strand; PAM type: NRG; PAM sequence: TAG
acattctgaatacggtttca

SEQ ID NO: 26269 - DNA, 20 bp, Artificial Sequence
  Description of Artificial Sequence: Synthetic oligonucleotide
  Target: ATXN2; (-) strand; PAM type: NRG; PAM sequence: CGG
atttaagtacattctgaata

SEQ ID NO: 26270 - DNA, 20 bp, Artificial Sequence
  Description of Artificial Sequence: Synthetic oligonucleotide
  Target: ATXN2; (-) strand; PAM type: NRG; PAM sequence: AAG
cctgtgtattttacgaattt

SEQ ID NO: 26271 - DNA, 20 bp, Artificial Sequence
  Description of Artificial Sequence: Synthetic oligonucleotide
  Target: ATXN2; (-) strand; PAM type: NRG; PAM sequence: TAG
actatgccaacagatttttt

SEQ ID NO: 26272 - DNA, 20 bp, Artificial Sequence
  Description of Artificial Sequence: Synthetic oligonucleotide
  Target: ATXN2; (-) strand; PAM type: NRG; PAM sequence: CAG
catgtatgttactatgccaa

SEQ ID NO: 26273 - DNA, 20 bp, Artificial Sequence
  Description of Artificial Sequence: Synthetic oligonucleotide
  Target: ATXN2; (-) strand; PAM type: NRG; PAM sequence: AAG
taatatttaatgctttaatt

SEQ ID NO: 26274 - DNA, 20 bp, Artificial Sequence
  Description of Artificial Sequence: Synthetic oligonucleotide
  Target: ATXN2; (-) strand; PAM type: NRG; PAM sequence: TGG
atagttattaaacctgttac

SEQ ID NO: 26275 - DNA, 20 bp, Artificial Sequence
  Description of Artificial Sequence: Synthetic oligonucleotide
  Target: ATXN2; (-) strand; PAM type: NRG; PAM sequence: TAG
tcacctctttaaatttataa

SEQ ID NO: 26276 - DNA, 20 bp, Artificial Sequence
  Description of Artificial Sequence: Synthetic oligonucleotide
  Target: ATXN2; (-) strand; PAM type: NRG; PAM sequence: AGG
taggcatgtgccactgcacc

SEQ ID NO: 26277 - DNA, 20 bp, Artificial Sequence
  Description of Artificial Sequence: Synthetic oligonucleotide
  Target: ATXN2; (-) strand; PAM type: NRG; PAM sequence: CAG
ataggcatgtgccactgcac

SEQ ID NO: 26278 - DNA, 20 bp, Artificial Sequence
  Description of Artificial Sequence: Synthetic oligonucleotide
  Target: ATXN2; (-) strand; PAM type: NRG; PAM sequence: AGG
tcctgagtagctgggattat

SEQ ID NO: 26279 - DNA, 20 bp, Artificial Sequence
  Description of Artificial Sequence: Synthetic oligonucleotide
  Target: ATXN2; (-) strand; PAM type: NRG; PAM sequence: TAG
ctcctgagtagctgggatta

SEQ ID NO: 26280 - DNA, 20 bp, Artificial Sequence
  Description of Artificial Sequence: Synthetic oligonucleotide
  Target: ATXN2; (-) strand; PAM type: NRG; PAM sequence: GGG
cctcagcctcctgagtagct

SEQ ID NO: 26281 - DNA, 20 bp, Artificial Sequence
  Description of Artificial Sequence: Synthetic oligonucleotide
  Target: ATXN2; (-) strand; PAM type: NRG; PAM sequence: TGG
acctcagcctcctgagtagc

SEQ ID NO: 26282 - DNA, 20 bp, Artificial Sequence
  Description of Artificial Sequence: Synthetic oligonucleotide
  Target: ATXN2; (-) strand; PAM type: NRG; PAM sequence: TAG
tcccacctcagcctcctgag

SEQ ID NO: 26283 - DNA, 20 bp, Artificial Sequence
  Description of Artificial Sequence: Synthetic oligonucleotide
  Target: ATXN2; (-) strand; PAM type: NRG; PAM sequence: GAG
tcctcccacctcagcctcct

SEQ ID NO: 26284 - DNA, 20 bp, Artificial Sequence
  Description of Artificial Sequence: Synthetic oligonucleotide
  Target: ATXN2; (-) strand; PAM type: NRG; PAM sequence: CAG
ctcaggcagtcctcccacct

SEQ ID NO: 26285 - DNA, 20 bp, Artificial Sequence
  Description of Artificial Sequence: Synthetic oligonucleotide
  Target: ATXN2; (-) strand; PAM type: NRG; PAM sequence: CAG
cttgaacttgtgggctcagg

SEQ ID NO: 26286 - DNA, 20 bp, Artificial Sequence
  Description of Artificial Sequence: Synthetic oligonucleotide
  Target: ATXN2; (-) strand; PAM type: NRG; PAM sequence: AGG
ggccttgaacttgtgggctc

SEQ ID NO: 26287 - DNA, 20 bp, Artificial Sequence
  Description of Artificial Sequence: Synthetic oligonucleotide
  Target: ATXN2; (-) strand; PAM type: NRG; PAM sequence: CAG
tggccttgaacttgtgggct

SEQ ID NO: 26288 - DNA, 20 bp, Artificial Sequence
  Description of Artificial Sequence: Synthetic oligonucleotide
  Target: ATXN2; (-) strand; PAM type: NRG; PAM sequence: GGG
cgctctggccttgaacttgt

SEQ ID NO: 26289 - DNA, 20 bp, Artificial Sequence
  Description of Artificial Sequence: Synthetic oligonucleotide
  Target: ATXN2; (-) strand; PAM type: NRG; PAM sequence: TGG
ccgctctggccttgaacttg

SEQ ID NO: 26290 - DNA, 20 bp, Artificial Sequence
  Description of Artificial Sequence: Synthetic oligonucleotide
  Target: ATXN2; (-) strand; PAM type: NRG; PAM sequence: TGG
tcttgatatggtatccgctc

SEQ ID NO: 26291 - DNA, 20 bp, Artificial Sequence
  Description of Artificial Sequence: Synthetic oligonucleotide
  Target: ATXN2; (-) strand; PAM type: NRG; PAM sequence: TGG
ttagaaacagaatcttgata

SEQ ID NO: 26292 - DNA, 20 bp, Artificial Sequence
  Description of Artificial Sequence: Synthetic oligonucleotide
  Target: ATXN2; (-) strand; PAM type: NRG; PAM sequence: CAG
cctcaaattatttttagaaa

SEQ ID NO: 26293 - DNA, 20 bp, Artificial Sequence
  Description of Artificial Sequence: Synthetic oligonucleotide
  Target: ATXN2; (-) strand; PAM type: NRG; PAM sequence: TAG
acccggcctcaaattatttt

SEQ ID NO: 26294 - DNA, 20 bp, Artificial Sequence
  Description of Artificial Sequence: Synthetic oligonucleotide
  Target: ATXN2; (-) strand; PAM type: NRG; PAM sequence: CGG
caggtgtgagccaccgcacc

SEQ ID NO: 26295 - DNA, 20 bp, Artificial Sequence
  Description of Artificial Sequence: Synthetic oligonucleotide
  Target: ATXN2; (-) strand; PAM type: NRG; PAM sequence: GAG
agtgctgggattacaggtgt

SEQ ID NO: 26296 - DNA, 20 bp, Artificial Sequence
  Description of Artificial Sequence: Synthetic oligonucleotide
  Target: ATXN2; (-) strand; PAM type: NRG; PAM sequence: AGG
ttccaaagtgctgggattac

SEQ ID NO: 26297 - DNA, 20 bp, Artificial Sequence
  Description of Artificial Sequence: Synthetic oligonucleotide
  Target: ATXN2; (-) strand; PAM type: NRG; PAM sequence: CAG
cttccaaagtgctgggatta

SEQ ID NO: 26298 - DNA, 20 bp, Artificial Sequence
  Description of Artificial Sequence: Synthetic oligonucleotide
  Target: ATXN2; (-) strand; PAM type: NRG; PAM sequence: GGG
gccttggcttccaaagtgct

SEQ ID NO: 26299 - DNA, 20 bp, Artificial Sequence
  Description of Artificial Sequence: Synthetic oligonucleotide
  Target: ATXN2; (-) strand; PAM type: NRG; PAM sequence: TGG
tgccttggcttccaaagtgc

SEQ ID NO: 26300 - DNA, 20 bp, Artificial Sequence
  Description of Artificial Sequence: Synthetic oligonucleotide
  Target: ATXN2; (-) strand; PAM type: NRG; PAM sequence: AAG
tccgcctgccttggcttcca

SEQ ID NO: 26301 - DNA, 20 bp, Artificial Sequence
  Description of Artificial Sequence: Synthetic oligonucleotide
  Target: ATXN2; (-) strand; PAM type: NRG; PAM sequence: TGG
ctcaagtgatccgcctgcct

SEQ ID NO: 26302 - DNA, 20 bp, Artificial Sequence
  Description of Artificial Sequence: Synthetic oligonucleotide
  Target: ATXN2; (-) strand; PAM type: NRG; PAM sequence: AAG
ggtcaccaactcctgacctc

SEQ ID NO: 26303 - DNA, 20 bp, Artificial Sequence
  Description of Artificial Sequence: Synthetic oligonucleotide
  Target: ATXN2; (-) strand; PAM type: NRG; PAM sequence: TGG
tttcaccatattggccaggc

SEQ ID NO: 26304 - DNA, 20 bp, Artificial Sequence
  Description of Artificial Sequence: Synthetic oligonucleotide
  Target: ATXN2; (-) strand; PAM type: NRG; PAM sequence: AGG
ggggtttcaccatattggcc

SEQ ID NO: 26305 - DNA, 20 bp, Artificial Sequence
  Description of Artificial Sequence: Synthetic oligonucleotide
  Target: ATXN2; (-) strand; PAM type: NRG; PAM sequence: CAG
aggggtttcaccatattggc

SEQ ID NO: 26306 - DNA, 20 bp, Artificial Sequence
  Description of Artificial Sequence: Synthetic oligonucleotide
  Target: ATXN2; (-) strand; PAM type: NRG; PAM sequence: TGG
gagaaggggtttcaccatat

SEQ ID NO: 26307 - DNA, 20 bp, Artificial Sequence
  Description of Artificial Sequence: Synthetic oligonucleotide
  Target: ATXN2; (-) strand; PAM type: NRG; PAM sequence: GGG
ttgtattttcagtagagaag

SEQ ID NO: 26308 - DNA, 20 bp, Artificial Sequence
  Description of Artificial Sequence: Synthetic oligonucleotide
  Target: ATXN2; (-) strand; PAM type: NRG; PAM sequence: GGG
tttgtattttcagtagagaa

SEQ ID NO: 26309 - DNA, 20 bp, Artificial Sequence
  Description of Artificial Sequence: Synthetic oligonucleotide
  Target: ATXN2; (-) strand; PAM type: NRG; PAM sequence: AGG
gtttgtattttcagtagaga

SEQ ID NO: 26310 - DNA, 20 bp, Artificial Sequence
  Description of Artificial Sequence: Synthetic oligonucleotide
  Target: ATXN2; (-) strand; PAM type: NRG; PAM sequence: AAG
tgtttgtattttcagtagag

SEQ ID NO: 26311 - DNA, 20 bp, Artificial Sequence
  Description of Artificial Sequence: Synthetic oligonucleotide
  Target: ATXN2; (-) strand; PAM type: NRG; PAM sequence: GAG
taatgtttgtattttcagta

SEQ ID NO: 26312 - DNA, 20 bp, Artificial Sequence
  Description of Artificial Sequence: Synthetic oligonucleotide
  Target: ATXN2; (-) strand; PAM type: NRG; PAM sequence: TAG
gctaatgtttgtattttcag

SEQ ID NO: 26313 - DNA, 20 bp, Artificial Sequence
  Description of Artificial Sequence: Synthetic oligonucleotide
  Target: ATXN2; (-) strand; PAM type: NRG; PAM sequence: CAG
ctagctaatgtttgtatttt

SEQ ID NO: 26314 - DNA, 20 bp, Artificial Sequence
  Description of Artificial Sequence: Synthetic oligonucleotide
  Target: ATXN2; (-) strand; PAM type: NRG; PAM sequence: TAG
caggcgcacaccaccacgcc

SEQ ID NO: 26315 - DNA, 20 bp, Artificial Sequence
  Description of Artificial Sequence: Synthetic oligonucleotide
  Target: ATXN2; (-) strand; PAM type: NRG; PAM sequence: AGG
tcctgagtagctgggattac

SEQ ID NO: 26316 - DNA, 20 bp, Artificial Sequence
  Description of Artificial Sequence: Synthetic oligonucleotide
  Target: ATXN2; (-) strand; PAM type: NRG; PAM sequence: CAG
ctcctgagtagctgggatta

SEQ ID NO: 26317 - DNA, 20 bp, Artificial Sequence
  Description of Artificial Sequence: Synthetic oligonucleotide
  Target: ATXN2; (-) strand; PAM type: NRG; PAM sequence: GGG
cctcagcctcctgagtagct

SEQ ID NO: 26318 - DNA, 20 bp, Artificial Sequence
  Description of Artificial Sequence: Synthetic oligonucleotide
  Target: ATXN2; (-) strand; PAM type: NRG; PAM sequence: TGG
gcctcagcctcctgagtagc

SEQ ID NO: 26319 - DNA, 20 bp, Artificial Sequence
  Description of Artificial Sequence: Synthetic oligonucleotide
  Target: ATXN2; (-) strand; PAM type: NRG; PAM sequence: TAG
tcctgcctcagcctcctgag

SEQ ID NO: 26320 - DNA, 20 bp, Artificial Sequence
  Description of Artificial Sequence: Synthetic oligonucleotide
  Target: ATXN2; (-) strand; PAM type: NRG; PAM sequence: GAG
ttctcctgcctcagcctcct

SEQ ID NO: 26321 - DNA, 20 bp, Artificial Sequence
  Description of Artificial Sequence: Synthetic oligonucleotide
  Target: ATXN2; (-) strand; PAM type: NRG; PAM sequence: CAG
ttcaaacgattctcctgcct

SEQ ID NO: 26322 - DNA, 20 bp, Artificial Sequence
  Description of Artificial Sequence: Synthetic oligonucleotide
  Target: ATXN2; (-) strand; PAM type: NRG; PAM sequence: GGG
cattgcaacctctgcctcct

SEQ ID NO: 26323 - DNA, 20 bp, Artificial Sequence
  Description of Artificial Sequence: Synthetic oligonucleotide
  Target: ATXN2; (-) strand; PAM type: NRG; PAM sequence: TGG
ccattgcaacctctgcctcc

SEQ ID NO: 26324 - DNA, 20 bp, Artificial Sequence
  Description of Artificial Sequence: Synthetic oligonucleotide
  Target: ATXN2; (-) strand; PAM type: NRG; PAM sequence: CAG
tgagtgcagtggtgcagtct

SEQ ID NO: 26325 - DNA, 20 bp, Artificial Sequence
  Description of Artificial Sequence: Synthetic oligonucleotide
  Target: ATXN2; (-) strand; PAM type: NRG; PAM sequence: CAG
ccaggctgagtgcagtggtg

SEQ ID NO: 26326 - DNA, 20 bp, Artificial Sequence
  Description of Artificial Sequence: Synthetic oligonucleotide
  Target: ATXN2; (-) strand; PAM type: NRG; PAM sequence: TGG
gtctcccaggctgagtgcag

SEQ ID NO: 26327 - DNA, 20 bp, Artificial Sequence
  Description of Artificial Sequence: Synthetic oligonucleotide
  Target: ATXN2; (-) strand; PAM type: NRG; PAM sequence: CAG
tctgtctcccaggctgagtg

SEQ ID NO: 26328 - DNA, 20 bp, Artificial Sequence
  Description of Artificial Sequence: Synthetic oligonucleotide
  Target: ATXN2; (-) strand; PAM type: NRG; PAM sequence: GAG
ctcgctctgtctcccaggct

SEQ ID NO: 26329 - DNA, 20 bp, Artificial Sequence
  Description of Artificial Sequence: Synthetic oligonucleotide
  Target: ATXN2; (-) strand; PAM type: NRG; PAM sequence: AGG
ggagtctcgctctgtctccc

SEQ ID NO: 26330 - DNA, 20 bp, Artificial Sequence
  Description of Artificial Sequence: Synthetic oligonucleotide
  Target: ATXN2; (-) strand; PAM type: NRG; PAM sequence: CAG
tggagtctcgctctgtctcc

SEQ ID NO: 26331 - DNA, 20 bp, Artificial Sequence
  Description of Artificial Sequence: Synthetic oligonucleotide
  Target: ATXN2; (-) strand; PAM type: NRG; PAM sequence: GAG
gtatatatatttttgagatg

SEQ ID NO: 26332 - DNA, 20 bp, Artificial Sequence
  Description of Artificial Sequence: Synthetic oligonucleotide
  Target: ATXN2; (-) strand; PAM type: NRG; PAM sequence: TGG
atgtatatatatttttgaga

SEQ ID NO: 26333 - DNA, 20 bp, Artificial Sequence
  Description of Artificial Sequence: Synthetic oligonucleotide
  Target: ATXN2; (-) strand; PAM type: NRG; PAM sequence: GAG
ttttatgtatatatattttt

SEQ ID NO: 26334 - DNA, 20 bp, Artificial Sequence
  Description of Artificial Sequence: Synthetic oligonucleotide
  Target: ATXN2; (-) strand; PAM type: NRG; PAM sequence: GGG
ttcatatcgcttgatgttat

SEQ ID NO: 26335 - DNA, 20 bp, Artificial Sequence
  Description of Artificial Sequence: Synthetic oligonucleotide
  Target: ATXN2; (-) strand; PAM type: NRG; PAM sequence: TGG
tttcatatcgcttgatgtta

SEQ ID NO: 26336 - DNA, 20 bp, Artificial Sequence
  Description of Artificial Sequence: Synthetic oligonucleotide
  Target: ATXN2; (-) strand; PAM type: NRG; PAM sequence: CAG
acttaagcacctatagaact

SEQ ID NO: 26337 - DNA, 20 bp, Artificial Sequence
  Description of Artificial Sequence: Synthetic oligonucleotide
  Target: ATXN2; (-) strand; PAM type: NRG; PAM sequence: TAG
atttatgacttaagcaccta

SEQ ID NO: 26338 - DNA, 20 bp, Artificial Sequence
  Description of Artificial Sequence: Synthetic oligonucleotide
  Target: ATXN2; (-) strand; PAM type: NRG; PAM sequence: AAG
attagcagtatttatgactt

SEQ ID NO: 26339 - DNA, 20 bp, Artificial Sequence
  Description of Artificial Sequence: Synthetic oligonucleotide
  Target: ATXN2; (-) strand; PAM type: NRG; PAM sequence: CAG
caaacaactagtagtattag

SEQ ID NO: 26340 - DNA, 20 bp, Artificial Sequence
  Description of Artificial Sequence: Synthetic oligonucleotide
  Target: ATXN2; (-) strand; PAM type: NRG; PAM sequence: TAG
caacaaacaactagtagtat

SEQ ID NO: 26341 - DNA, 20 bp, Artificial Sequence
  Description of Artificial Sequence: Synthetic oligonucleotide
  Target: ATXN2; (-) strand; PAM type: NRG; PAM sequence: TAG
tatgggcaacaaacaactag

SEQ ID NO: 26342 - DNA, 20 bp, Artificial Sequence
  Description of Artificial Sequence: Synthetic oligonucleotide
  Target: ATXN2; (-) strand; PAM type: NRG; PAM sequence: TAG
aaatatgggcaacaaacaac

SEQ ID NO: 26343 - DNA, 20 bp, Artificial Sequence
  Description of Artificial Sequence: Synthetic oligonucleotide
  Target: ATXN2; (-) strand; PAM type: NRG; PAM sequence: GGG
tttttgccatttaaaaatat

SEQ ID NO: 26344 - DNA, 20 bp, Artificial Sequence
  Description of Artificial Sequence: Synthetic oligonucleotide
  Target: ATXN2; (-) strand; PAM type: NRG; PAM sequence: TGG
ttttttgccatttaaaaata

SEQ ID NO: 26345 - DNA, 20 bp, Artificial Sequence
  Description of Artificial Sequence: Synthetic oligonucleotide
  Target: ATXN2; (-) strand; PAM type: NRG; PAM sequence: TAG
actaaccttcaagtgaaatt

SEQ ID NO: 26346 - DNA, 20 bp, Artificial Sequence
  Description of Artificial Sequence: Synthetic oligonucleotide
  Target: ATXN2; (-) strand; PAM type: NRG; PAM sequence: AAG
ctttatttacactaaccttc

SEQ ID NO: 26347 - DNA, 20 bp, Artificial Sequence
  Description of Artificial Sequence: Synthetic oligonucleotide
  Target: ATXN2; (-) strand; PAM type: NRG; PAM sequence: GAG
cattgatgaccttggatgaa

SEQ ID NO: 26348 - DNA, 20 bp, Artificial Sequence
  Description of Artificial Sequence: Synthetic oligonucleotide
  Target: ATXN2; (-) strand; PAM type: NRG; PAM sequence: AAG
ggcattgatgaccttggatg

SEQ ID NO: 26349 - DNA, 20 bp, Artificial Sequence
  Description of Artificial Sequence: Synthetic oligonucleotide
  Target: ATXN2; (-) strand; PAM type: NRG; PAM sequence: TGG
attcagggcattgatgacct

SEQ ID NO: 26350 - DNA, 20 bp, Artificial Sequence
  Description of Artificial Sequence: Synthetic oligonucleotide
  Target: ATXN2; (-) strand; PAM type: NRG; PAM sequence: GGG
gaatttgtggagagaattca

SEQ ID NO: 26351 - DNA, 20 bp, Artificial Sequence
  Description of Artificial Sequence: Synthetic oligonucleotide
  Target: ATXN2; (-) strand; PAM type: NRG; PAM sequence: AGG
agaatttgtggagagaattc

SEQ ID NO: 26352 - DNA, 20 bp, Artificial Sequence
  Description of Artificial Sequence: Synthetic oligonucleotide
  Target: ATXN2; (-) strand; PAM type: NRG; PAM sequence: CAG
aagaatttgtggagagaatt

SEQ ID NO: 26353 - DNA, 20 bp, Artificial Sequence
  Description of Artificial Sequence: Synthetic oligonucleotide
  Target: ATXN2; (-) strand; PAM type: NRG; PAM sequence: GAG
attctcaaagaatttgtgga

SEQ ID NO: 26354 - DNA, 20 bp, Artificial Sequence
  Description of Artificial Sequence: Synthetic oligonucleotide
  Target: ATXN2; (-) strand; PAM type: NRG; PAM sequence: GAG
ggattctcaaagaatttgtg

SEQ ID NO: 26355 - DNA, 20 bp, Artificial Sequence
  Description of Artificial Sequence: Synthetic oligonucleotide
  Target: ATXN2; (-) strand; PAM type: NRG; PAM sequence: TGG
gtggattctcaaagaatttg

SEQ ID NO: 26356 - DNA, 20 bp, Artificial Sequence
  Description of Artificial Sequence: Synthetic oligonucleotide
  Target: ATXN2; (-) strand; PAM type: NRG; PAM sequence: AAG
cctggatctgtggattctca

SEQ ID NO: 26357 - DNA, 20 bp, Artificial Sequence
  Description of Artificial Sequence: Synthetic oligonucleotide
  Target: ATXN2; (-) strand; PAM type: NRG; PAM sequence: TGG
ggattcttcacctggatctg

SEQ ID NO: 26358 - DNA, 20 bp, Artificial Sequence
  Description of Artificial Sequence: Synthetic oligonucleotide
  Target: ATXN2; (-) strand; PAM type: NRG; PAM sequence: TGG
aagaggcaggattcttcacc

SEQ ID NO: 26359 - DNA, 20 bp, Artificial Sequence
  Description of Artificial Sequence: Synthetic oligonucleotide
  Target: ATXN2; (-) strand; PAM type: NRG; PAM sequence: AGG
gcttgtcagtacaaagaggc

SEQ ID NO: 26360 - DNA, 20 bp, Artificial Sequence
  Description of Artificial Sequence: Synthetic oligonucleotide
  Target: ATXN2; (-) strand; PAM type: NRG; PAM sequence: CAG
tgcttgtcagtacaaagagg

SEQ ID NO: 26361 - DNA, 20 bp, Artificial Sequence
  Description of Artificial Sequence: Synthetic oligonucleotide
  Target: ATXN2; (-) strand; PAM type: NRG; PAM sequence: AGG
tcctgcttgtcagtacaaag

SEQ ID NO: 26362 - DNA, 20 bp, Artificial Sequence
  Description of Artificial Sequence: Synthetic oligonucleotide
  Target: ATXN2; (-) strand; PAM type: NRG; PAM sequence: GAG
ttcctgcttgtcagtacaaa

SEQ ID NO: 26363 - DNA, 20 bp, Artificial Sequence
  Description of Artificial Sequence: Synthetic oligonucleotide
  Target: ATXN2; (-) strand; PAM type: NRG; PAM sequence: AAG
tcttcctgcttgtcagtaca

SEQ ID NO: 26364 - DNA, 20 bp, Artificial Sequence
  Description of Artificial Sequence: Synthetic oligonucleotide
  Target: ATXN2; (-) strand; PAM type: NRG; PAM sequence: CAG
ggctctttcttcctgcttgt

SEQ ID NO: 26365 - DNA, 20 bp, Artificial Sequence
  Description of Artificial Sequence: Synthetic oligonucleotide
  Target: ATXN2; (-) strand; PAM type: NRG; PAM sequence: AGG
atttgctttattcatggcag

SEQ ID NO: 26366 - DNA, 20 bp, Artificial Sequence
  Description of Artificial Sequence: Synthetic oligonucleotide
  Target: ATXN2; (-) strand; PAM type: NRG; PAM sequence: GAG
tatttgctttattcatggca

SEQ ID NO: 26367 - DNA, 20 bp, Artificial Sequence
  Description of Artificial Sequence: Synthetic oligonucleotide
  Target: ATXN2; (-) strand; PAM type: NRG; PAM sequence: CAG
cctatttgctttattcatgg

SEQ ID NO: 26368 - DNA, 20 bp, Artificial Sequence
  Description of Artificial Sequence: Synthetic oligonucleotide
  Target: ATXN2; (-) strand; PAM type: NRG; PAM sequence: TGG
tcacctatttgctttattca

SEQ ID NO: 26369 - DNA, 20 bp, Artificial Sequence
  Description of Artificial Sequence: Synthetic oligonucleotide
  Target: ATXN2; (-) strand; PAM type: NRG; PAM sequence: CAG
gccttgatgaccactccttc

SEQ ID NO: 26370 - DNA, 20 bp, Artificial Sequence
  Description of Artificial Sequence: Synthetic oligonucleotide
  Target: ATXN2; (-) strand; PAM type: NRG; PAM sequence: CAG
tttccttaaacctatttctg

SEQ ID NO: 26371 - DNA, 20 bp, Artificial Sequence
  Description of Artificial Sequence: Synthetic oligonucleotide
  Target: ATXN2; (-) strand; PAM type: NRG; PAM sequence: CAG
ggagcctcagaagagttcag

SEQ ID NO: 26372 - DNA, 20 bp, Artificial Sequence
  Description of Artificial Sequence: Synthetic oligonucleotide
  Target: ATXN2; (-) strand; PAM type: NRG; PAM sequence: CAG
gctggagcctcagaagagtt

SEQ ID NO: 26373 - DNA, 20 bp, Artificial Sequence
  Description of Artificial Sequence: Synthetic oligonucleotide
  Target: ATXN2; (-) strand; PAM type: NRG; PAM sequence: GAG
ctcttgctggagcctcagaa

SEQ ID NO: 26374 - DNA, 20 bp, Artificial Sequence
  Description of Artificial Sequence: Synthetic oligonucleotide
  Target: ATXN2; (-) strand; PAM type: NRG; PAM sequence: AAG
agctcttgctggagcctcag

SEQ ID NO: 26375 - DNA, 20 bp, Artificial Sequence
  Description of Artificial Sequence: Synthetic oligonucleotide
  Target: ATXN2; (-) strand; PAM type: NRG; PAM sequence: CAG
tccagctcttgctggagcct

SEQ ID NO: 26376 - DNA, 20 bp, Artificial Sequence
  Description of Artificial Sequence: Synthetic oligonucleotide
  Target: ATXN2; (-) strand; PAM type: NRG; PAM sequence: GAG
agggtttccagctcttgctg

SEQ ID NO: 26377 - DNA, 20 bp, Artificial Sequence
  Description of Artificial Sequence: Synthetic oligonucleotide
  Target: ATXN2; (-) strand; PAM type: NRG; PAM sequence: TGG
gtagggtttccagctcttgc

SEQ ID NO: 26378 - DNA, 20 bp, Artificial Sequence
  Description of Artificial Sequence: Synthetic oligonucleotide
  Target: ATXN2; (-) strand; PAM type: NRG; PAM sequence: CAG
agttaggaatgtagggtttc

SEQ ID NO: 26379 - DNA, 20 bp, Artificial Sequence
  Description of Artificial Sequence: Synthetic oligonucleotide
  Target: ATXN2; (-) strand; PAM type: NRG; PAM sequence: GGG
gctgattagttaggaatgta

SEQ ID NO: 26380 - DNA, 20 bp, Artificial Sequence
  Description of Artificial Sequence: Synthetic oligonucleotide
  Target: ATXN2; (-) strand; PAM type: NRG; PAM sequence: AGG
ggctgattagttaggaatgt

SEQ ID NO: 26381 - DNA, 20 bp, Artificial Sequence
  Description of Artificial Sequence: Synthetic oligonucleotide
  Target: ATXN2; (-) strand; PAM type: NRG; PAM sequence: TAG
gggctgattagttaggaatg

SEQ ID NO: 26382 - DNA, 20 bp, Artificial Sequence
  Description of Artificial Sequence: Synthetic oligonucleotide
  Target: ATXN2; (-) strand; PAM type: NRG; PAM sequence: AGG
cactggggggctgattagtt

SEQ ID NO: 26383 - DNA, 20 bp, Artificial Sequence
  Description of Artificial Sequence: Synthetic oligonucleotide
  Target: ATXN2; (-) strand; PAM type: NRG; PAM sequence: TAG
ccactggggggctgattagt

SEQ ID NO: 26384 - DNA, 20 bp, Artificial Sequence
  Description of Artificial Sequence: Synthetic oligonucleotide
  Target: ATXN2; (-) strand; PAM type: NRG; PAM sequence: TAG
agtcccactggggggctgat

SEQ ID NO: 26385 - DNA, 20 bp, Artificial Sequence
  Description of Artificial Sequence: Synthetic oligonucleotide
  Target: ATXN2; (-) strand; PAM type: NRG; PAM sequence: GGG
ctggagaaagtcccactggg

SEQ ID NO: 26386 - DNA, 20 bp, Artificial Sequence
  Description of Artificial Sequence: Synthetic oligonucleotide
  Target: ATXN2; (-) strand; PAM type: NRG; PAM sequence: GGG
gctggagaaagtcccactgg

SEQ ID NO: 26387 - DNA, 20 bp, Artificial Sequence
  Description of Artificial Sequence: Synthetic oligonucleotide
  Target: ATXN2; (-) strand; PAM type: NRG; PAM sequence: GGG
ggctggagaaagtcccactg

SEQ ID NO: 26388 - DNA, 20 bp, Artificial Sequence
  Description of Artificial Sequence: Synthetic oligonucleotide
  Target: ATXN2; (-) strand; PAM type: NRG; PAM sequence: GGG
tggctggagaaagtcccact

SEQ ID NO: 26389 - DNA, 20 bp, Artificial Sequence
  Description of Artificial Sequence: Synthetic oligonucleotide
  Target: ATXN2; (-) strand; PAM type: NRG; PAM sequence: TGG
gtggctggagaaagtcccac

SEQ ID NO: 26390 - DNA, 20 bp, Artificial Sequence
  Description of Artificial Sequence: Synthetic oligonucleotide
  Target: ATXN2; (-) strand; PAM type: NRG; PAM sequence: AAG
ctgctgggtgtggctggaga

SEQ ID NO: 26391 - DNA, 20 bp, Artificial Sequence
  Description of Artificial Sequence: Synthetic oligonucleotide
  Target: ATXN2; (-) strand; PAM type: NRG; PAM sequence: GAG
cagcctgctgggtgtggctg

SEQ ID NO: 26392 - DNA, 20 bp, Artificial Sequence
  Description of Artificial Sequence: Synthetic oligonucleotide
  Target: ATXN2; (-) strand; PAM type: NRG; PAM sequence: TGG
tccagcctgctgggtgtggc

SEQ ID NO: 26393 - DNA, 20 bp, Artificial Sequence
  Description of Artificial Sequence: Synthetic oligonucleotide
  Target: ATXN2; (-) strand; PAM type: NRG; PAM sequence: TGG
ctaatccagcctgctgggtg

SEQ ID NO: 26394 - DNA, 20 bp, Artificial Sequence
  Description of Artificial Sequence: Synthetic oligonucleotide
  Target: ATXN2; (-) strand; PAM type: NRG; PAM sequence: GGG
tactcctaatccagcctgct

SEQ ID NO: 26395 - DNA, 20 bp, Artificial Sequence
  Description of Artificial Sequence: Synthetic oligonucleotide
  Target: ATXN2; (-) strand; PAM type: NRG; PAM sequence: TGG
ctactcctaatccagcctgc

SEQ ID NO: 26396 - DNA, 20 bp, Artificial Sequence
  Description of Artificial Sequence: Synthetic oligonucleotide
  Target: ATXN2; (-) strand; PAM type: NRG; PAM sequence: CAG
aactctgtctactcctaatc

SEQ ID NO: 26397 - DNA, 20 bp, Artificial Sequence
  Description of Artificial Sequence: Synthetic oligonucleotide
  Target: ATXN2; (-) strand; PAM type: NRG; PAM sequence: AAG
acagtgttctctgttcctct

SEQ ID NO: 26398 - DNA, 20 bp, Artificial Sequence
  Description of Artificial Sequence: Synthetic oligonucleotide
  Target: ATXN2; (-) strand; PAM type: NRG; PAM sequence: CAG
tattctcttcttgcccctca

SEQ ID NO: 26399 - DNA, 20 bp, Artificial Sequence
  Description of Artificial Sequence: Synthetic oligonucleotide
  Target: ATXN2; (-) strand; PAM type: NRG; PAM sequence: CAG
ttcaagatctactctgacca

SEQ ID NO: 26400 - DNA, 20 bp, Artificial Sequence
  Description of Artificial Sequence: Synthetic oligonucleotide
  Target: ATXN2; (-) strand; PAM type: NRG; PAM sequence: AAG
tctcttccagaatgcttttc

SEQ ID NO: 26401 - DNA, 20 bp, Artificial Sequence
  Description of Artificial Sequence: Synthetic oligonucleotide
  Target: ATXN2; (-) strand; PAM type: NRG; PAM sequence: CAG
ggaaggaactgcttctcttc

SEQ ID NO: 26402 - DNA, 20 bp, Artificial Sequence
  Description of Artificial Sequence: Synthetic oligonucleotide
  Target: ATXN2; (-) strand; PAM type: NRG; PAM sequence: AGG
tgactgtgtcatcactcgga

SEQ ID NO: 26403 - DNA, 20 bp, Artificial Sequence
  Description of Artificial Sequence: Synthetic oligonucleotide
  Target: ATXN2; (-) strand; PAM type: NRG; PAM sequence: AAG
atgactgtgtcatcactcgg

SEQ ID NO: 26404 - DNA, 20 bp, Artificial Sequence
  Description of Artificial Sequence: Synthetic oligonucleotide
  Target: ATXN2; (-) strand; PAM type: NRG; PAM sequence: CGG
ttcatgactgtgtcatcact

SEQ ID NO: 26405 - DNA, 20 bp, Artificial Sequence
  Description of Artificial Sequence: Synthetic oligonucleotide
  Target: ATXN2; (-) strand; PAM type: NRG; PAM sequence: TAG
ctttcacctccacggcgttg

SEQ ID NO: 26406 - DNA, 20 bp, Artificial Sequence
  Description of Artificial Sequence: Synthetic oligonucleotide
  Target: ATXN2; (-) strand; PAM type: NRG; PAM sequence: CGG
atacatccctttcacctcca

SEQ ID NO: 26407 - DNA, 20 bp, Artificial Sequence
  Description of Artificial Sequence: Synthetic oligonucleotide
  Target: ATXN2; (-) strand; PAM type: NRG; PAM sequence: AAG
tttaggaaacatagcctcct

SEQ ID NO: 26408 - DNA, 20 bp, Artificial Sequence
  Description of Artificial Sequence: Synthetic oligonucleotide
  Target: ATXN2; (-) strand; PAM type: NRG; PAM sequence: TAG
acactattctttaggaaaca

SEQ ID NO: 26409 - DNA, 20 bp, Artificial Sequence
  Description of Artificial Sequence: Synthetic oligonucleotide
  Target: ATXN2; (-) strand; PAM type: NRG; PAM sequence: AGG
tttggagaacactattcttt

SEQ ID NO: 26410 - DNA, 20 bp, Artificial Sequence
  Description of Artificial Sequence: Synthetic oligonucleotide
  Target: ATXN2; (-) strand; PAM type: NRG; PAM sequence: TAG
atttggagaacactattctt

SEQ ID NO: 26411 - DNA, 20 bp, Artificial Sequence
  Description of Artificial Sequence: Synthetic oligonucleotide
  Target: ATXN2; (-) strand; PAM type: NRG; PAM sequence: GAG
attttcaaatggatcatttg

SEQ ID NO: 26412 - DNA, 20 bp, Artificial Sequence
  Description of Artificial Sequence: Synthetic oligonucleotide
  Target: ATXN2; (-) strand; PAM type: NRG; PAM sequence: TGG
ttattttcaaatggatcatt

SEQ ID NO: 26413 - DNA, 20 bp, Artificial Sequence
  Description of Artificial Sequence: Synthetic oligonucleotide
  Target: ATXN2; (-) strand; PAM type: NRG; PAM sequence: TGG
tggaataatttattttcaaa

SEQ ID NO: 26414 - DNA, 20 bp, Artificial Sequence
  Description of Artificial Sequence: Synthetic oligonucleotide
  Target: ATXN2; (-) strand; PAM type: NRG; PAM sequence: TGG
aggacaactgtagtgtgtgt

SEQ ID NO: 26415 - DNA, 20 bp, Artificial Sequence
  Description of Artificial Sequence: Synthetic oligonucleotide
  Target: ATXN2; (-) strand; PAM type: NRG; PAM sequence: TAG
tagatgctgaaggacaactg

SEQ ID NO: 26416 - DNA, 20 bp, Artificial Sequence
  Description of Artificial Sequence: Synthetic oligonucleotide
  Target: ATXN2; (-) strand; PAM type: NRG; PAM sequence: AGG
caatcccccatagatgctga

SEQ ID NO: 26417 - DNA, 20 bp, Artificial Sequence
  Description of Artificial Sequence: Synthetic oligonucleotide
  Target: ATXN2; (-) strand; PAM type: NRG; PAM sequence: AAG
ccaatcccccatagatgctg

SEQ ID NO: 26418 - DNA, 20 bp, Artificial Sequence
  Description of Artificial Sequence: Synthetic oligonucleotide
  Target: ATXN2; (-) strand; PAM type: NRG; PAM sequence: TAG
gtattagaaccaatccccca

SEQ ID NO: 26419 - DNA, 20 bp, Artificial Sequence
  Description of Artificial Sequence: Synthetic oligonucleotide
  Target: ATXN2; (-) strand; PAM type: NRG; PAM sequence: TAG
ttggtatccctagggggtat

SEQ ID NO: 26420 - DNA, 20 bp, Artificial Sequence
  Description of Artificial Sequence: Synthetic oligonucleotide
  Target: ATXN2; (-) strand; PAM type: NRG; PAM sequence: GGG
tggattttggtatccctagg

SEQ ID NO: 26421 - DNA, 20 bp, Artificial Sequence
  Description of Artificial Sequence: Synthetic oligonucleotide
  Target: ATXN2; (-) strand; PAM type: NRG; PAM sequence: GGG
ctggattttggtatccctag

SEQ ID NO: 26422 - DNA, 20 bp, Artificial Sequence
  Description of Artificial Sequence: Synthetic oligonucleotide
  Target: ATXN2; (-) strand; PAM type: NRG; PAM sequence: GGG
cctggattttggtatcccta

SEQ ID NO: 26423 - DNA, 20 bp, Artificial Sequence
  Description of Artificial Sequence: Synthetic oligonucleotide
  Target: ATXN2; (-) strand; PAM type: NRG; PAM sequence: AGG
ccctggattttggtatccct

SEQ ID NO: 26424 - DNA, 20 bp, Artificial Sequence
  Description of Artificial Sequence: Synthetic oligonucleotide
  Target: ATXN2; (-) strand; PAM type: NRG; PAM sequence: TAG
tccctggattttggtatccc

SEQ ID NO: 26425 - DNA, 20 bp, Artificial Sequence
  Description of Artificial Sequence: Synthetic oligonucleotide
  Target: ATXN2; (-) strand; PAM type: NRG; PAM sequence: TGG
acttaagcatccctggattt

SEQ ID NO: 26426 - DNA, 20 bp, Artificial Sequence
  Description of Artificial Sequence: Synthetic oligonucleotide
  Target: ATXN2; (-) strand; PAM type: NRG; PAM sequence: TGG
atcagggacttaagcatccc

SEQ ID NO: 26427 - DNA, 20 bp, Artificial Sequence
  Description of Artificial Sequence: Synthetic oligonucleotide
  Target: ATXN2; (-) strand; PAM type: NRG; PAM sequence: AAG
ccactttgtatcagggactt

SEQ ID NO: 26428 - DNA, 20 bp, Artificial Sequence
  Description of Artificial Sequence: Synthetic oligonucleotide
  Target: ATXN2; (-) strand; PAM type: NRG; PAM sequence: GGG
tactacaccactttgtatca

SEQ ID NO: 26429 - DNA, 20 bp, Artificial Sequence
  Description of Artificial Sequence: Synthetic oligonucleotide
  Target: ATXN2; (-) strand; PAM type: NRG; PAM sequence: AGG
atactacaccactttgtatc

SEQ ID NO: 26430 - DNA, 20 bp, Artificial Sequence
  Description of Artificial Sequence: Synthetic oligonucleotide
  Target: ATXN2; (-) strand; PAM type: NRG; PAM sequence: CAG
aatactacaccactttgtat

SEQ ID NO: 26431 - DNA, 20 bp, Artificial Sequence
  Description of Artificial Sequence: Synthetic oligonucleotide
  Target: ATXN2; (-) strand; PAM type: NRG; PAM sequence: GAG
tagaggtttaaagtatgcga

SEQ ID NO: 26432 - DNA, 20 bp, Artificial Sequence
  Description of Artificial Sequence: Synthetic oligonucleotide
  Target: ATXN2; (-) strand; PAM type: NRG; PAM sequence: GAG
cctagaggtttaaagtatgc

SEQ ID NO: 26433 - DNA, 20 bp, Artificial Sequence
  Description of Artificial Sequence: Synthetic oligonucleotide
  Target: ATXN2; (-) strand; PAM type: NRG; PAM sequence: AAG
ataggtaacctagaggttta

SEQ ID NO: 26434 - DNA, 20 bp, Artificial Sequence
  Description of Artificial Sequence: Synthetic oligonucleotide
  Target: ATXN2; (-) strand; PAM type: NRG; PAM sequence: AGG
aggtattataggtaacctag

SEQ ID NO: 26435 - DNA, 20 bp, Artificial Sequence
  Description of Artificial Sequence: Synthetic oligonucleotide
  Target: ATXN2; (-) strand; PAM type: NRG; PAM sequence: GAG
taggtattataggtaaccta

SEQ ID NO: 26436 - DNA, 20 bp, Artificial Sequence
  Description of Artificial Sequence: Synthetic oligonucleotide
  Target: ATXN2; (-) strand; PAM type: NRG; PAM sequence: TAG
attaggtattataggtaacc

SEQ ID NO: 26437 - DNA, 20 bp, Artificial Sequence
  Description of Artificial Sequence: Synthetic oligonucleotide
  Target: ATXN2; (-) strand; PAM type: NRG; PAM sequence: AGG
tactttgtattaggtattat

SEQ ID NO: 26438 - DNA, 20 bp, Artificial Sequence
  Description of Artificial Sequence: Synthetic oligonucleotide
  Target: ATXN2; (-) strand; PAM type: NRG; PAM sequence: TAG
ttactttgtattaggtatta

SEQ ID NO: 26439 - DNA, 20 bp, Artificial Sequence
  Description of Artificial Sequence: Synthetic oligonucleotide
  Target: ATXN2; (-) strand; PAM type: NRG; PAM sequence: AGG
cgtagcatttactttgtatt

SEQ ID NO: 26440 - DNA, 20 bp, Artificial Sequence
  Description of Artificial Sequence: Synthetic oligonucleotide
  Target: ATXN2; (-) strand; PAM type: NRG; PAM sequence: TAG
ccgtagcatttactttgtat

SEQ ID NO: 26441 - DNA, 20 bp, Artificial Sequence
  Description of Artificial Sequence: Synthetic oligonucleotide
  Target: ATXN2; (-) strand; PAM type: NRG; PAM sequence: TAG
cagtaccacaactatttccg

SEQ ID NO: 26442 - DNA, 20 bp, Artificial Sequence
  Description of Artificial Sequence: Synthetic oligonucleotide
  Target: ATXN2; (-) strand; PAM type: NRG; PAM sequence: CAG
tcttgtcattattccttaag

SEQ ID NO: 26443 - DNA, 20 bp, Artificial Sequence
  Description of Artificial Sequence: Synthetic oligonucleotide
  Target: ATXN2; (-) strand; PAM type: NRG; PAM sequence: AAG
ttttcttgtcattattcctt

SEQ ID NO: 26444 - DNA, 20 bp, Artificial Sequence
  Description of Artificial Sequence: Synthetic oligonucleotide
  Target: ATXN2; (-) strand; PAM type: NRG; PAM sequence: CAG
gcatctatactgaacatgta

SEQ ID NO: 26445 - DNA, 20 bp, Artificial Sequence
  Description of Artificial Sequence: Synthetic oligonucleotide
  Target: ATXN2; (-) strand; PAM type: NRG; PAM sequence: AAG
aaaattatatgggaaatcaa

SEQ ID NO: 26446 - DNA, 20 bp, Artificial Sequence
  Description of Artificial Sequence: Synthetic oligonucleotide
  Target: ATXN2; (-) strand; PAM type: NRG; PAM sequence: GGG
aagaaaaaaaaaaattatat

SEQ ID NO: 26447 - DNA, 20 bp, Artificial Sequence
  Description of Artificial Sequence: Synthetic oligonucleotide
  Target: ATXN2; (-) strand; PAM type: NRG; PAM sequence: TGG
aaagaaaaaaaaaaattata

SEQ ID NO: 26448 - DNA, 20 bp, Artificial Sequence
  Description of Artificial Sequence: Synthetic oligonucleotide
  Target: ATXN2; (-) strand; PAM type: NRG; PAM sequence: AAG
aagaaaaaaaactgtctgaa

SEQ ID NO: 26449 - DNA, 20 bp, Artificial Sequence
  Description of Artificial Sequence: Synthetic oligonucleotide
  Target: ATXN2; (-) strand; PAM type: NRG; PAM sequence: AAG
gcaacagagtgtgagaagaa

SEQ ID NO: 26450 - DNA, 20 bp, Artificial Sequence
  Description of Artificial Sequence: Synthetic oligonucleotide
  Target: ATXN2; (-) strand; PAM type: NRG; PAM sequence: AAG
cctgcgcaacagagtgtgag

SEQ ID NO: 26451 - DNA, 20 bp, Artificial Sequence
  Description of Artificial Sequence: Synthetic oligonucleotide
  Target: ATXN2; (-) strand; PAM type: NRG; PAM sequence: GAG
cagcctgcgcaacagagtgt

SEQ ID NO: 26452 - DNA, 20 bp, Artificial Sequence
  Description of Artificial Sequence: Synthetic oligonucleotide
  Target: ATXN2; (-) strand; PAM type: NRG; PAM sequence: GAG
gcactccagcctgcgcaaca

SEQ ID NO: 26453 - DNA, 20 bp, Artificial Sequence
  Description of Artificial Sequence: Synthetic oligonucleotide
  Target: ATXN2; (-) strand; PAM type: NRG; PAM sequence: CAG
ctgcactccagcctgcgcaa

SEQ ID NO: 26454 - DNA, 20 bp, Artificial Sequence
  Description of Artificial Sequence: Synthetic oligonucleotide
  Target: ATXN2; (-) strand; PAM type: NRG; PAM sequence: CAG
gagattgtgtcactgcactc

SEQ ID NO: 26455 - DNA, 20 bp, Artificial Sequence
  Description of Artificial Sequence: Synthetic oligonucleotide
  Target: ATXN2; (-) strand; PAM type: NRG; PAM sequence: GAG
agtagaggtttccatgagct

SEQ ID NO: 26456 - DNA, 20 bp, Artificial Sequence
  Description of Artificial Sequence: Synthetic oligonucleotide
  Target: ATXN2; (-) strand; PAM type: NRG; PAM sequence: GAG
tgagaagtagaggtttccat

SEQ ID NO: 26457 - DNA, 20 bp, Artificial Sequence
  Description of Artificial Sequence: Synthetic oligonucleotide
  Target: ATXN2; (-) strand; PAM type: NRG; PAM sequence: AGG
tgcttgaacctgagaagtag

SEQ ID NO: 26458 - DNA, 20 bp, Artificial Sequence
  Description of Artificial Sequence: Synthetic oligonucleotide
  Target: ATXN2; (-) strand; PAM type: NRG; PAM sequence: GAG
ttgcttgaacctgagaagta

SEQ ID NO: 26459 - DNA, 20 bp, Artificial Sequence
  Description of Artificial Sequence: Synthetic oligonucleotide
  Target: ATXN2; (-) strand; PAM type: NRG; PAM sequence: TAG
atttgcttgaacctgagaag

SEQ ID NO: 26460 - DNA, 20 bp, Artificial Sequence
  Description of Artificial Sequence: Synthetic oligonucleotide
  Target: ATXN2; (-) strand; PAM type: NRG; PAM sequence: AAG
gcaatttgcttgaacctgag

SEQ ID NO: 26461 - DNA, 20 bp, Artificial Sequence
  Description of Artificial Sequence: Synthetic oligonucleotide
  Target: ATXN2; (-) strand; PAM type: NRG; PAM sequence: GAG
caagcaatttgcttgaacct

SEQ ID NO: 26462 - DNA, 20 bp, Artificial Sequence
  Description of Artificial Sequence: Synthetic oligonucleotide
  Target: ATXN2; (-) strand; PAM type: NRG; PAM sequence: AAG
gctactcgagaggttgagac

SEQ ID NO: 26463 - DNA, 20 bp, Artificial Sequence
  Description of Artificial Sequence: Synthetic oligonucleotide
  Target: ATXN2; (-) strand; PAM type: NRG; PAM sequence: GAG
tcccagctactcgagaggtt

SEQ ID NO: 26464 - DNA, 20 bp, Artificial Sequence
  Description of Artificial Sequence: Synthetic oligonucleotide
  Target: ATXN2; (-) strand; PAM type: NRG; PAM sequence: AGG
tgtaatcccagctactcgag

SEQ ID NO: 26465 - DNA, 20 bp, Artificial Sequence
  Description of Artificial Sequence: Synthetic oligonucleotide
  Target: ATXN2; (-) strand; PAM type: NRG; PAM sequence: GAG
gtgtaatcccagctactcga

SEQ ID NO: 26466 - DNA, 20 bp, Artificial Sequence
  Description of Artificial Sequence: Synthetic oligonucleotide
  Target: ATXN2; (-) strand; PAM type: NRG; PAM sequence: GAG
atgtgtaatcccagctactc

SEQ ID NO: 26467 - DNA, 20 bp, Artificial Sequence
  Description of Artificial Sequence: Synthetic oligonucleotide
  Target: ATXN2; (-) strand; PAM type: NRG; PAM sequence: CAG
gtagtgcacatgtgtaatcc

SEQ ID NO: 26468 - DNA, 20 bp, Artificial Sequence
  Description of Artificial Sequence: Synthetic oligonucleotide
  Target: ATXN2; (-) strand; PAM type: NRG; PAM sequence: TAG
aaaaaattagctggccatgg

SEQ ID NO: 26469 - DNA, 20 bp, Artificial Sequence
  Description of Artificial Sequence: Synthetic oligonucleotide
  Target: ATXN2; (-) strand; PAM type: NRG; PAM sequence: TGG
tacaaaaaattagctggcca

SEQ ID NO: 26470 - DNA, 20 bp, Artificial Sequence
  Description of Artificial Sequence: Synthetic oligonucleotide
  Target: ATXN2; (-) strand; PAM type: NRG; PAM sequence: TGG
tataagtacaaaaaattagc

SEQ ID NO: 26471 - DNA, 20 bp, Artificial Sequence
  Description of Artificial Sequence: Synthetic oligonucleotide
  Target: ATXN2; (-) strand; PAM type: NRG; PAM sequence: TAG
ctactataagtacaaaaaat

SEQ ID NO: 26472 - DNA, 20 bp, Artificial Sequence
  Description of Artificial Sequence: Synthetic oligonucleotide
  Target: ATXN2; (-) strand; PAM type: NRG; PAM sequence: AAG
caaaaccctagctctactat

SEQ ID NO: 26473 - DNA, 20 bp, Artificial Sequence
  Description of Artificial Sequence: Synthetic oligonucleotide
  Target: ATXN2; (-) strand; PAM type: NRG; PAM sequence: TAG
tggccaacatggcaaaaccc

SEQ ID NO: 26474 - DNA, 20 bp, Artificial Sequence
  Description of Artificial Sequence: Synthetic oligonucleotide
  Target: ATXN2; (-) strand; PAM type: NRG; PAM sequence: TGG
caagaccagcctggccaaca

SEQ ID NO: 26475 - DNA, 20 bp, Artificial Sequence
  Description of Artificial Sequence: Synthetic oligonucleotide
  Target: ATXN2; (-) strand; PAM type: NRG; PAM sequence: TGG
tcaggagttcaagaccagcc

SEQ ID NO: 26476 - DNA, 20 bp, Artificial Sequence
  Description of Artificial Sequence: Synthetic oligonucleotide
  Target: ATXN2; (-) strand; PAM type: NRG; PAM sequence: CAG
tgaggtcaggagttcaagac

SEQ ID NO: 26477 - DNA, 20 bp, Artificial Sequence
  Description of Artificial Sequence: Synthetic oligonucleotide
  Target: ATXN2; (-) strand; PAM type: NRG; PAM sequence: AAG
tcacctgaggtcaggagttc

SEQ ID NO: 26478 - DNA, 20 bp, Artificial Sequence
  Description of Artificial Sequence: Synthetic oligonucleotide
  Target: ATXN2; (-) strand; PAM type: NRG; PAM sequence: GAG
gatggatcacctgaggtcag

SEQ ID NO: 26479 - DNA, 20 bp, Artificial Sequence
  Description of Artificial Sequence: Synthetic oligonucleotide
  Target: ATXN2; (-) strand; PAM type: NRG; PAM sequence: AGG
cagatggatcacctgaggtc

SEQ ID NO: 26480 - DNA, 20 bp, Artificial Sequence
  Description of Artificial Sequence: Synthetic oligonucleotide
  Target: ATXN2; (-) strand; PAM type: NRG; PAM sequence: CAG
gcagatggatcacctgaggt

SEQ ID NO: 26481 - DNA, 20 bp, Artificial Sequence
  Description of Artificial Sequence: Synthetic oligonucleotide
  Target: ATXN2; (-) strand; PAM type: NRG; PAM sequence: AGG
tgaggcagatggatcacctg

SEQ ID NO: 26482 - DNA, 20 bp, Artificial Sequence
  Description of Artificial Sequence: Synthetic oligonucleotide
  Target: ATXN2; (-) strand; PAM type: NRG; PAM sequence: GAG
ctgaggcagatggatcacct

SEQ ID NO: 26483 - DNA, 20 bp, Artificial Sequence
  Description of Artificial Sequence: Synthetic oligonucleotide
  Target: ATXN2; (-) strand; PAM type: NRG; PAM sequence: TGG
cttagggaggctgaggcaga

SEQ ID NO: 26484 - DNA, 20 bp, Artificial Sequence
  Description of Artificial Sequence: Synthetic oligonucleotide
  Target: ATXN2; (-) strand; PAM type: NRG; PAM sequence: CAG
agcacttagggaggctgagg

SEQ ID NO: 26485 - DNA, 20 bp, Artificial Sequence
  Description of Artificial Sequence: Synthetic oligonucleotide
  Target: ATXN2; (-) strand; PAM type: NRG; PAM sequence: AGG
tccagcacttagggaggctg

SEQ ID NO: 26486 - DNA, 20 bp, Artificial Sequence
  Description of Artificial Sequence: Synthetic oligonucleotide
  Target: ATXN2; (-) strand; PAM type: NRG; PAM sequence: GAG
ttccagcacttagggaggct

SEQ ID NO: 26487 - DNA, 20 bp, Artificial Sequence
  Description of Artificial Sequence: Synthetic oligonucleotide
  Target: ATXN2; (-) strand; PAM type: NRG; PAM sequence: AGG
tgtaattccagcacttaggg

SEQ ID NO: 26488 - DNA, 20 bp, Artificial Sequence
  Description of Artificial Sequence: Synthetic oligonucleotide
  Target: ATXN2; (-) strand; PAM type: NRG; PAM sequence: GAG
ctgtaattccagcacttagg

SEQ ID NO: 26489 - DNA, 20 bp, Artificial Sequence
  Description of Artificial Sequence: Synthetic oligonucleotide
  Target: ATXN2; (-) strand; PAM type: NRG; PAM sequence: GGG
acctgtaattccagcactta

SEQ ID NO: 26490 - DNA, 20 bp, Artificial Sequence
  Description of Artificial Sequence: Synthetic oligonucleotide
  Target: ATXN2; (-) strand; PAM type: NRG; PAM sequence: AGG
cacctgtaattccagcactt

SEQ ID NO: 26491 - DNA, 20 bp, Artificial Sequence
  Description of Artificial Sequence: Synthetic oligonucleotide
  Target: ATXN2; (-) strand; PAM type: NRG; PAM sequence: TAG
acacctgtaattccagcact

SEQ ID NO: 26492 - DNA, 20 bp, Artificial Sequence
  Description of Artificial Sequence: Synthetic oligonucleotide
  Target: ATXN2; (-) strand; PAM type: NRG; PAM sequence: CAG
gtgggtcacacctgtaattc

SEQ ID NO: 26493 - DNA, 20 bp, Artificial Sequence
  Description of Artificial Sequence: Synthetic oligonucleotide
  Target: ATXN2; (-) strand; PAM type: NRG; PAM sequence: GGG
gggaaatacgctggggctgt

SEQ ID NO: 26494 - DNA, 20 bp, Artificial Sequence
  Description of Artificial Sequence: Synthetic oligonucleotide
  Target: ATXN2; (-) strand; PAM type: NRG; PAM sequence: TGG
tgggaaatacgctggggctg

SEQ ID NO: 26495 - DNA, 20 bp, Artificial Sequence
  Description of Artificial Sequence: Synthetic oligonucleotide
  Target: ATXN2; (-) strand; PAM type: NRG; PAM sequence: GGG
aatatatgggaaatacgctg

SEQ ID NO: 26496 - DNA, 20 bp, Artificial Sequence
  Description of Artificial Sequence: Synthetic oligonucleotide
  Target: ATXN2; (-) strand; PAM type: NRG; PAM sequence: GGG
aaatatatgggaaatacgct

SEQ ID NO: 26497 - DNA, 20 bp, Artificial Sequence
  Description of Artificial Sequence: Synthetic oligonucleotide
  Target: ATXN2; (-) strand; PAM type: NRG; PAM sequence: TGG
aaaatatatgggaaatacgc

SEQ ID NO: 26498 - DNA, 20 bp, Artificial Sequence
  Description of Artificial Sequence: Synthetic oligonucleotide
  Target: ATXN2; (-) strand; PAM type: NRG; PAM sequence: GGG
accatggatccaaaatatat

SEQ ID NO: 26499 - DNA, 20 bp, Artificial Sequence
  Description of Artificial Sequence: Synthetic oligonucleotide
  Target: ATXN2; (-) strand; PAM type: NRG; PAM sequence: TGG
aaccatggatccaaaatata

SEQ ID NO: 26500 - DNA, 20 bp, Artificial Sequence
  Description of Artificial Sequence: Synthetic oligonucleotide
  Target: ATXN2; (-) strand; PAM type: NRG; PAM sequence: TGG
gctgtgaattcaaccaacca

SEQ ID NO: 26501 - DNA, 20 bp, Artificial Sequence
  Description of Artificial Sequence: Synthetic oligonucleotide
  Target: ATXN2; (-) strand; PAM type: NRG; PAM sequence: CAG
ctctctatccatgggttaca

SEQ ID NO: 26502 - DNA, 20 bp, Artificial Sequence
  Description of Artificial Sequence: Synthetic oligonucleotide
  Target: ATXN2; (-) strand; PAM type: NRG; PAM sequence: GGG
agtcagccctctctatccat

SEQ ID NO: 26503 - DNA, 20 bp, Artificial Sequence
  Description of Artificial Sequence: Synthetic oligonucleotide
  Target: ATXN2; (-) strand; PAM type: NRG; PAM sequence: TGG
cagtcagccctctctatcca

SEQ ID NO: 26504 - DNA, 20 bp, Artificial Sequence
  Description of Artificial Sequence: Synthetic oligonucleotide
  Target: ATXN2; (-) strand; PAM type: NRG; PAM sequence: CAG
tgttagtttgcaaatacagt

SEQ ID NO: 26505 - DNA, 20 bp, Artificial Sequence
  Description of Artificial Sequence: Synthetic oligonucleotide
  Target: ATXN2; (-) strand; PAM type: NRG; PAM sequence: CAG
caaatgttagtttgcaaata

SEQ ID NO: 26506 - DNA, 20 bp, Artificial Sequence
  Description of Artificial Sequence: Synthetic oligonucleotide
  Target: ATXN2; (-) strand; PAM type: NRG; PAM sequence: TAG
acactgatgtcttcaaatgt

SEQ ID NO: 26507 - DNA, 20 bp, Artificial Sequence
  Description of Artificial Sequence: Synthetic oligonucleotide
  Target: ATXN2; (-) strand; PAM type: NRG; PAM sequence: GGG
catttcttagttttgtggct

SEQ ID NO: 26508 - DNA, 20 bp, Artificial Sequence
  Description of Artificial Sequence: Synthetic oligonucleotide
  Target: ATXN2; (-) strand; PAM type: NRG; PAM sequence: TGG
tcatttcttagttttgtggc

SEQ ID NO: 26509 - DNA, 20 bp, Artificial Sequence
  Description of Artificial Sequence: Synthetic oligonucleotide
  Target: ATXN2; (-) strand; PAM type: NRG; PAM sequence: TGG
ccattcatttcttagttttg

SEQ ID NO: 26510 - DNA, 20 bp, Artificial Sequence
  Description of Artificial Sequence: Synthetic oligonucleotide
  Target: ATXN2; (-) strand; PAM type: NRG; PAM sequence: TAG
tgtaattaccattcatttct

SEQ ID NO: 26511 - DNA, 20 bp, Artificial Sequence
  Description of Artificial Sequence: Synthetic oligonucleotide
  Target: ATXN2; (-) strand; PAM type: NRG; PAM sequence: TAG
cttacataggcatgatacca

SEQ ID NO: 26512 - DNA, 20 bp, Artificial Sequence
  Description of Artificial Sequence: Synthetic oligonucleotide
  Target: ATXN2; (-) strand; PAM type: NRG; PAM sequence: AGG
tgtttttttttctcttacat

SEQ ID NO: 26513 - DNA, 20 bp, Artificial Sequence
  Description of Artificial Sequence: Synthetic oligonucleotide
  Target: ATXN2; (-) strand; PAM type: NRG; PAM sequence: TAG
ctgtttttttttctcttaca

SEQ ID NO: 26514 - DNA, 20 bp, Artificial Sequence
  Description of Artificial Sequence: Synthetic oligonucleotide
  Target: ATXN2; (-) strand; PAM type: NRG; PAM sequence: GGG
aattttatactcctaaacca

SEQ ID NO: 26515 - DNA, 20 bp, Artificial Sequence
  Description of Artificial Sequence: Synthetic oligonucleotide
  Target: ATXN2; (-) strand; PAM type: NRG; PAM sequence: AGG
caattttatactcctaaacc

SEQ ID NO: 26516 - DNA, 20 bp, Artificial Sequence
  Description of Artificial Sequence: Synthetic oligonucleotide
  Target: ATXN2; (-) strand; PAM type: NRG; PAM sequence: CAG
ccaattttatactcctaaac

SEQ ID NO: 26517 - DNA, 20 bp, Artificial Sequence
  Description of Artificial Sequence: Synthetic oligonucleotide
  Target: ATXN2; (-) strand; PAM type: NRG; PAM sequence: TAG
aaaaatatttttatactcac

SEQ ID NO: 26518 - DNA, 20 bp, Artificial Sequence
  Description of Artificial Sequence: Synthetic oligonucleotide
  Target: ATXN2; (-) strand; PAM type: NRG; PAM sequence: GAG
tgccttggcttcccaagtgt

SEQ ID NO: 26519 - DNA, 20 bp, Artificial Sequence
  Description of Artificial Sequence: Synthetic oligonucleotide
  Target: ATXN2; (-) strand; PAM type: NRG; PAM sequence: AAG
tccacctgccttggcttccc

SEQ ID NO: 26520 - DNA, 20 bp, Artificial Sequence
  Description of Artificial Sequence: Synthetic oligonucleotide
  Target: ATXN2; (-) strand; PAM type: NRG; PAM sequence: TGG
ctcaggcagtccacctgcct

SEQ ID NO: 26521 - DNA, 20 bp, Artificial Sequence
  Description of Artificial Sequence: Synthetic oligonucleotide
  Target: ATXN2; (-) strand; PAM type: NRG; PAM sequence: CAG
ttcgaactcctgagctcagg

SEQ ID NO: 26522 - DNA, 20 bp, Artificial Sequence
  Description of Artificial Sequence: Synthetic oligonucleotide
  Target: ATXN2; (-) strand; PAM type: NRG; PAM sequence: AGG
ggtttcgaactcctgagctc

SEQ ID NO: 26523 - DNA, 20 bp, Artificial Sequence
  Description of Artificial Sequence: Synthetic oligonucleotide
  Target: ATXN2; (-) strand; PAM type: NRG; PAM sequence: CAG
tggtttcgaactcctgagct

SEQ ID NO: 26524 - DNA, 20 bp, Artificial Sequence
  Description of Artificial Sequence: Synthetic oligonucleotide
  Target: ATXN2; (-) strand; PAM type: NRG; PAM sequence: GAG
caggttggtttcgaactcct

SEQ ID NO: 26525 - DNA, 20 bp, Artificial Sequence
  Description of Artificial Sequence: Synthetic oligonucleotide
  Target: ATXN2; (-) strand; PAM type: NRG; PAM sequence: TGG
ttttgccgtgttgcccaggt

SEQ ID NO: 26526 - DNA, 20 bp, Artificial Sequence
  Description of Artificial Sequence: Synthetic oligonucleotide
  Target: ATXN2; (-) strand; PAM type: NRG; PAM sequence: AGG
aggattttgccgtgttgccc

SEQ ID NO: 26527 - DNA, 20 bp, Artificial Sequence
  Description of Artificial Sequence: Synthetic oligonucleotide
  Target: ATXN2; (-) strand; PAM type: NRG; PAM sequence: CAG
caggattttgccgtgttgcc

SEQ ID NO: 26528 - DNA, 20 bp, Artificial Sequence
  Description of Artificial Sequence: Synthetic oligonucleotide
  Target: ATXN2; (-) strand; PAM type: NRG; PAM sequence: AGG
tttatatttttggtagagac

SEQ ID NO: 26529 - DNA, 20 bp, Artificial Sequence
  Description of Artificial Sequence: Synthetic oligonucleotide
  Target: ATXN2; (-) strand; PAM type: NRG; PAM sequence: CAG
ttttatatttttggtagaga

SEQ ID NO: 26530 - DNA, 20 bp, Artificial Sequence
  Description of Artificial Sequence: Synthetic oligonucleotide
  Target: ATXN2; (-) strand; PAM type: NRG; PAM sequence: GAG
aattttttatatttttggta

SEQ ID NO: 26531 - DNA, 20 bp, Artificial Sequence
  Description of Artificial Sequence: Synthetic oligonucleotide
  Target: ATXN2; (-) strand; PAM type: NRG; PAM sequence: TAG
ctaattttttatatttttgg

SEQ ID NO: 26532 - DNA, 20 bp, Artificial Sequence
  Description of Artificial Sequence: Synthetic oligonucleotide
  Target: ATXN2; (-) strand; PAM type: NRG; PAM sequence: TGG
tggctaattttttatatttt

SEQ ID NO: 26533 - DNA, 20 bp, Artificial Sequence
  Description of Artificial Sequence: Synthetic oligonucleotide
  Target: ATXN2; (-) strand; PAM type: NRG; PAM sequence: TGG
caggtgcgcatcaccatgcc

SEQ ID NO: 26534 - DNA, 20 bp, Artificial Sequence
  Description of Artificial Sequence: Synthetic oligonucleotide
  Target: ATXN2; (-) strand; PAM type: NRG; PAM sequence: AGG
tcccgagtacctgggaccac

SEQ ID NO: 26535 - DNA, 20 bp, Artificial Sequence
  Description of Artificial Sequence: Synthetic oligonucleotide
  Target: ATXN2; (-) strand; PAM type: NRG; PAM sequence: CAG
ctcccgagtacctgggacca

SEQ ID NO: 26536 - DNA, 20 bp, Artificial Sequence
  Description of Artificial Sequence: Synthetic oligonucleotide
  Target: ATXN2; (-) strand; PAM type: NRG; PAM sequence: GGG
cctcagcctcccgagtacct

SEQ ID NO: 26537 - DNA, 20 bp, Artificial Sequence
  Description of Artificial Sequence: Synthetic oligonucleotide
  Target: ATXN2; (-) strand; PAM type: NRG; PAM sequence: TGG
acctcagcctcccgagtacc

SEQ ID NO: 26538 - DNA, 20 bp, Artificial Sequence
  Description of Artificial Sequence: Synthetic oligonucleotide
  Target: ATXN2; (-) strand; PAM type: NRG; PAM sequence: GAG
ttctcccacctcagcctccc

SEQ ID NO: 26539 - DNA, 20 bp, Artificial Sequence
  Description of Artificial Sequence: Synthetic oligonucleotide
  Target: ATXN2; (-) strand; PAM type: NRG; PAM sequence: CAG
ctcaagtgattctcccacct

SEQ ID NO: 26540 - DNA, 20 bp, Artificial Sequence
  Description of Artificial Sequence: Synthetic oligonucleotide
  Target: ATXN2; (-) strand; PAM type: NRG; PAM sequence: AAG
aacctcctcctcccaggctc

SEQ ID NO: 26541 - DNA, 20 bp, Artificial Sequence
  Description of Artificial Sequence: Synthetic oligonucleotide
  Target: ATXN2; (-) strand; PAM type: NRG; PAM sequence: AGG
caccgcaacctcctcctccc

SEQ ID NO: 26542 - DNA, 20 bp, Artificial Sequence
  Description of Artificial Sequence: Synthetic oligonucleotide
  Target: ATXN2; (-) strand; PAM type: NRG; PAM sequence: CAG
tcaccgcaacctcctcctcc

SEQ ID NO: 26543 - DNA, 20 bp, Artificial Sequence
  Description of Artificial Sequence: Synthetic oligonucleotide
  Target: ATXN2; (-) strand; PAM type: NRG; PAM sequence: TGG
gagtgtggtgatgcagatct

SEQ ID NO: 26544 - DNA, 20 bp, Artificial Sequence
  Description of Artificial Sequence: Synthetic oligonucleotide
  Target: ATXN2; (-) strand; PAM type: NRG; PAM sequence: CAG
gaggttggagtgtggtgatg

SEQ ID NO: 26545 - DNA, 20 bp, Artificial Sequence
  Description of Artificial Sequence: Synthetic oligonucleotide
  Target: ATXN2; (-) strand; PAM type: NRG; PAM sequence: TGG
ctatcactgaggttggagtg

SEQ ID NO: 26546 - DNA, 20 bp, Artificial Sequence
  Description of Artificial Sequence: Synthetic oligonucleotide
  Target: ATXN2; (-) strand; PAM type: NRG; PAM sequence: GAG
tcactctatcactgaggttg

SEQ ID NO: 26547 - DNA, 20 bp, Artificial Sequence
  Description of Artificial Sequence: Synthetic oligonucleotide
  Target: ATXN2; (-) strand; PAM type: NRG; PAM sequence: TGG
tctcactctatcactgaggt

SEQ ID NO: 26548 - DNA, 20 bp, Artificial Sequence
  Description of Artificial Sequence: Synthetic oligonucleotide
  Target: ATXN2; (-) strand; PAM type: NRG; PAM sequence: AGG
ggggtctcactctatcactg

SEQ ID NO: 26549 - DNA, 20 bp, Artificial Sequence
  Description of Artificial Sequence: Synthetic oligonucleotide
  Target: ATXN2; (-) strand; PAM type: NRG; PAM sequence: GAG
cggggtctcactctatcact

SEQ ID NO: 26550 - DNA, 20 bp, Artificial Sequence
  Description of Artificial Sequence: Synthetic oligonucleotide
  Target: ATXN2; (-) strand; PAM type: NRG; PAM sequence: GGG
gtatatattttttatatacg

SEQ ID NO: 26551 - DNA, 20 bp, Artificial Sequence
  Description of Artificial Sequence: Synthetic oligonucleotide
  Target: ATXN2; (-) strand; PAM type: NRG; PAM sequence: GGG
tgtatatattttttatatac

SEQ ID NO: 26552 - DNA, 20 bp, Artificial Sequence
  Description of Artificial Sequence: Synthetic oligonucleotide
  Target: ATXN2; (-) strand; PAM type: NRG; PAM sequence: CGG
atgtatatattttttatata

SEQ ID NO: 26553 - DNA, 20 bp, Artificial Sequence
  Description of Artificial Sequence: Synthetic oligonucleotide
  Target: ATXN2; (-) strand; PAM type: NRG; PAM sequence: AAG
tcctttgattgatttttgaa

SEQ ID NO: 26554 - DNA, 20 bp, Artificial Sequence
  Description of Artificial Sequence: Synthetic oligonucleotide
  Target: ATXN2; (-) strand; PAM type: NRG; PAM sequence: AGG
tacagtgacttacagataac

SEQ ID NO: 26555 - DNA, 20 bp, Artificial Sequence
  Description of Artificial Sequence: Synthetic oligonucleotide
  Target: ATXN2; (-) strand; PAM type: NRG; PAM sequence: CAG
atacagtgacttacagataa

SEQ ID NO: 26556 - DNA, 20 bp, Artificial Sequence
  Description of Artificial Sequence: Synthetic oligonucleotide
  Target: ATXN2; (-) strand; PAM type: NRG; PAM sequence: CAG
agtatatatacagtgactta

SEQ ID NO: 26557 - DNA, 20 bp, Artificial Sequence
  Description of Artificial Sequence: Synthetic oligonucleotide
  Target: ATXN2; (-) strand; PAM type: NRG; PAM sequence: CAG
catggtgtctagtatatata

SEQ ID NO: 26558 - DNA, 20 bp, Artificial Sequence
  Description of Artificial Sequence: Synthetic oligonucleotide
  Target: ATXN2; (-) strand; PAM type: NRG; PAM sequence: TAG
tcccccccaaccatggtgtc

SEQ ID NO: 26559 - DNA, 20 bp, Artificial Sequence
  Description of Artificial Sequence: Synthetic oligonucleotide
  Target: ATXN2; (-) strand; PAM type: NRG; PAM sequence: TGG
aaatgcgtcccccccaacca

SEQ ID NO: 26560 - DNA, 20 bp, Artificial Sequence
  Description of Artificial Sequence: Synthetic oligonucleotide
  Target: ATXN2; (-) strand; PAM type: NRG; PAM sequence: AGG
aaaacaaatttatagaatta

SEQ ID NO: 26561 - DNA, 20 bp, Artificial Sequence
  Description of Artificial Sequence: Synthetic oligonucleotide
  Target: ATXN2; (-) strand; PAM type: NRG; PAM sequence: AAG
gaaaacaaatttatagaatt

SEQ ID NO: 26562 - DNA, 20 bp, Artificial Sequence
  Description of Artificial Sequence: Synthetic oligonucleotide
  Target: ATXN2; (-) strand; PAM type: NRG; PAM sequence: TAG
gagttcagaaaacaaattta

SEQ ID NO: 26563 - DNA, 20 bp, Artificial Sequence
  Description of Artificial Sequence: Synthetic oligonucleotide
  Target: ATXN2; (-) strand; PAM type: NRG; PAM sequence: CAG
cattaaacttttctggagtt

SEQ ID NO: 26564 - DNA, 20 bp, Artificial Sequence
  Description of Artificial Sequence: Synthetic oligonucleotide
  Target: ATXN2; (-) strand; PAM type: NRG; PAM sequence: GAG
caatgcattaaacttttctg

SEQ ID NO: 26565 - DNA, 20 bp, Artificial Sequence
  Description of Artificial Sequence: Synthetic oligonucleotide
  Target: ATXN2; (-) strand; PAM type: NRG; PAM sequence: TGG
cccaatgcattaaacttttc

SEQ ID NO: 26566 - DNA, 20 bp, Artificial Sequence
  Description of Artificial Sequence: Synthetic oligonucleotide
  Target: ATXN2; (-) strand; PAM type: NRG; PAM sequence: CGG
gtatgtagtgtcttttttac

SEQ ID NO: 26567 - DNA, 20 bp, Artificial Sequence
  Description of Artificial Sequence: Synthetic oligonucleotide
  Target: ATXN2; (-) strand; PAM type: NRG; PAM sequence: TAG
catcttcacgaagcagtatg

SEQ ID NO: 26568 - DNA, 20 bp, Artificial Sequence
  Description of Artificial Sequence: Synthetic oligonucleotide
  Target: ATXN2; (-) strand; PAM type: NRG; PAM sequence: CAG
aaacactcatcttcacgaag

SEQ ID NO: 26569 - DNA, 20 bp, Artificial Sequence
  Description of Artificial Sequence: Synthetic oligonucleotide
  Target: ATXN2; (-) strand; PAM type: NRG; PAM sequence: AAG
accaaacactcatcttcacg

SEQ ID NO: 26570 - DNA, 20 bp, Artificial Sequence
  Description of Artificial Sequence: Synthetic oligonucleotide
  Target: ATXN2; (-) strand; PAM type: NRG; PAM sequence: TGG
aagtacagttggagaaccag

SEQ ID NO: 26571 - DNA, 20 bp, Artificial Sequence
  Description of Artificial Sequence: Synthetic oligonucleotide
  Target: ATXN2; (-) strand; PAM type: NRG; PAM sequence: CAG
atgaagtacagttggagaac

SEQ ID NO: 26572 - DNA, 20 bp, Artificial Sequence
  Description of Artificial Sequence: Synthetic oligonucleotide
  Target: ATXN2; (-) strand; PAM type: NRG; PAM sequence: GAG
ggtgtcatgaagtacagttg

SEQ ID NO: 26573 - DNA, 20 bp, Artificial Sequence
  Description of Artificial Sequence: Synthetic oligonucleotide
  Target: ATXN2; (-) strand; PAM type: NRG; PAM sequence: TGG
agggtgtcatgaagtacagt

SEQ ID NO: 26574 - DNA, 20 bp, Artificial Sequence
  Description of Artificial Sequence: Synthetic oligonucleotide
  Target: ATXN2; (-) strand; PAM type: NRG; PAM sequence: CAG
tcatagggtgtcatgaagta

SEQ ID NO: 26575 - DNA, 20 bp, Artificial Sequence
  Description of Artificial Sequence: Synthetic oligonucleotide
  Target: ATXN2; (-) strand; PAM type: NRG; PAM sequence: AAG
agacatcatagggtgtcatg

SEQ ID NO: 26576 - DNA, 20 bp, Artificial Sequence
  Description of Artificial Sequence: Synthetic oligonucleotide
  Target: ATXN2; (-) strand; PAM type: NRG; PAM sequence: GGG
ggtgtcctgaagacatcata

SEQ ID NO: 26577 - DNA, 20 bp, Artificial Sequence
  Description of Artificial Sequence: Synthetic oligonucleotide
  Target: ATXN2; (-) strand; PAM type: NRG; PAM sequence: AGG
gggtgtcctgaagacatcat

SEQ ID NO: 26578 - DNA, 20 bp, Artificial Sequence
  Description of Artificial Sequence: Synthetic oligonucleotide
  Target: ATXN2; (-) strand; PAM type: NRG; PAM sequence: TAG
ggggtgtcctgaagacatca

SEQ ID NO: 26579 - DNA, 20 bp, Artificial Sequence
  Description of Artificial Sequence: Synthetic oligonucleotide
  Target: ATXN2; (-) strand; PAM type: NRG; PAM sequence: AAG
ttgccttctggggtgtcctg

SEQ ID NO: 26580 - DNA, 20 bp, Artificial Sequence
  Description of Artificial Sequence: Synthetic oligonucleotide
  Target: ATXN2; (-) strand; PAM type: NRG; PAM sequence: GGG
ccactttcccttgccttctg

SEQ ID NO: 26581 - DNA, 20 bp, Artificial Sequence
  Description of Artificial Sequence: Synthetic oligonucleotide
  Target: ATXN2; (-) strand; PAM type: NRG; PAM sequence: GGG
tccactttcccttgccttct

SEQ ID NO: 26582 - DNA, 20 bp, Artificial Sequence
  Description of Artificial Sequence: Synthetic oligonucleotide
  Target: ATXN2; (-) strand; PAM type: NRG; PAM sequence: TGG
ctccactttcccttgccttc

SEQ ID NO: 26583 - DNA, 20 bp, Artificial Sequence
  Description of Artificial Sequence: Synthetic oligonucleotide
  Target: ATXN2; (-) strand; PAM type: NRG; PAM sequence: TAG
aagaagagctagtgatgtcc

SEQ ID NO: 26584 - DNA, 20 bp, Artificial Sequence
  Description of Artificial Sequence: Synthetic oligonucleotide
  Target: ATXN2; (-) strand; PAM type: NRG; PAM sequence: TAG
gctttggttggaagaagagc

SEQ ID NO: 26585 - DNA, 20 bp, Artificial Sequence
  Description of Artificial Sequence: Synthetic oligonucleotide
  Target: ATXN2; (-) strand; PAM type: NRG; PAM sequence: GAG
caaggctttggttggaagaa

SEQ ID NO: 26586 - DNA, 20 bp, Artificial Sequence
  Description of Artificial Sequence: Synthetic oligonucleotide
  Target: ATXN2; (-) strand; PAM type: NRG; PAM sequence: AAG
aacaaggctttggttggaag

SEQ ID NO: 26587 - DNA, 20 bp, Artificial Sequence
  Description of Artificial Sequence: Synthetic oligonucleotide
  Target: ATXN2; (-) strand; PAM type: NRG; PAM sequence: AAG
taaaacaaggctttggttgg

SEQ ID NO: 26588 - DNA, 20 bp, Artificial Sequence
  Description of Artificial Sequence: Synthetic oligonucleotide
  Target: ATXN2; (-) strand; PAM type: NRG; PAM sequence: TGG
agttaaaacaaggctttggt

SEQ ID NO: 26589 - DNA, 20 bp, Artificial Sequence
  Description of Artificial Sequence: Synthetic oligonucleotide
  Target: ATXN2; (-) strand; PAM type: NRG; PAM sequence: TGG
tcttagttaaaacaaggctt

SEQ ID NO: 26590 - DNA, 20 bp, Artificial Sequence
  Description of Artificial Sequence: Synthetic oligonucleotide
  Target: ATXN2; (-) strand; PAM type: NRG; PAM sequence: AGG
gctgactcttagttaaaaca

SEQ ID NO: 26591 - DNA, 20 bp, Artificial Sequence
  Description of Artificial Sequence: Synthetic oligonucleotide
  Target: ATXN2; (-) strand; PAM type: NRG; PAM sequence: AAG
tgctgactcttagttaaaac

SEQ ID NO: 26592 - DNA, 20 bp, Artificial Sequence
  Description of Artificial Sequence: Synthetic oligonucleotide
  Target: ATXN2; (-) strand; PAM type: NRG; PAM sequence: TAG
tgagatcccatgctgactct

SEQ ID NO: 26593 - DNA, 20 bp, Artificial Sequence
  Description of Artificial Sequence: Synthetic oligonucleotide
  Target: ATXN2; (-) strand; PAM type: NRG; PAM sequence: GAG
tcagtttttttccctctgat

SEQ ID NO: 26594 - DNA, 20 bp, Artificial Sequence
  Description of Artificial Sequence: Synthetic oligonucleotide
  Target: ATXN2; (-) strand; PAM type: NRG; PAM sequence: CAG
ctttttagtatagaataggt

SEQ ID NO: 26595 - DNA, 20 bp, Artificial Sequence
  Description of Artificial Sequence: Synthetic oligonucleotide
  Target: ATXN2; (-) strand; PAM type: NRG; PAM sequence: AGG
ttttctttttagtatagaat

SEQ ID NO: 26596 - DNA, 20 bp, Artificial Sequence
  Description of Artificial Sequence: Synthetic oligonucleotide
  Target: ATXN2; (-) strand; PAM type: NRG; PAM sequence: TAG
attttctttttagtatagaa

SEQ ID NO: 26597 - DNA, 20 bp, Artificial Sequence
  Description of Artificial Sequence: Synthetic oligonucleotide
  Target: ATXN2; (-) strand; PAM type: NRG; PAM sequence: TAG
ttaacattttctttttagta

SEQ ID NO: 26598 - DNA, 20 bp, Artificial Sequence
  Description of Artificial Sequence: Synthetic oligonucleotide
  Target: ATXN2; (-) strand; PAM type: NRG; PAM sequence: TAG
agactttaacattttctttt

SEQ ID NO: 26599 - DNA, 20 bp, Artificial Sequence
  Description of Artificial Sequence: Synthetic oligonucleotide
  Target: ATXN2; (-) strand; PAM type: NRG; PAM sequence: CAG
caggtgtgagtcaccatgcc

SEQ ID NO: 26600 - DNA, 20 bp, Artificial Sequence
  Description of Artificial Sequence: Synthetic oligonucleotide
  Target: ATXN2; (-) strand; PAM type: NRG; PAM sequence: GAG
agtgctgggattacaggtgt

SEQ ID NO: 26601 - DNA, 20 bp, Artificial Sequence
  Description of Artificial Sequence: Synthetic oligonucleotide
  Target: ATXN2; (-) strand; PAM type: NRG; PAM sequence: AGG
tccccaagtgctgggattac

SEQ ID NO: 26602 - DNA, 20 bp, Artificial Sequence
  Description of Artificial Sequence: Synthetic oligonucleotide
  Target: ATXN2; (-) strand; PAM type: NRG; PAM sequence: CAG
ctccccaagtgctgggatta

SEQ ID NO: 26603 - DNA, 20 bp, Artificial Sequence
  Description of Artificial Sequence: Synthetic oligonucleotide
  Target: ATXN2; (-) strand; PAM type: NRG; PAM sequence: GGG
tctcagcctccccaagtgct

SEQ ID NO: 26604 - DNA, 20 bp, Artificial Sequence
  Description of Artificial Sequence: Synthetic oligonucleotide
  Target: ATXN2; (-) strand; PAM type: NRG; PAM sequence: TGG
atctcagcctccccaagtgc

SEQ ID NO: 26605 - DNA, 20 bp, Artificial Sequence
  Description of Artificial Sequence: Synthetic oligonucleotide
  Target: ATXN2; (-) strand; PAM type: NRG; PAM sequence: AAG
cctcccatctcagcctcccc

SEQ ID NO: 26606 - DNA, 20 bp, Artificial Sequence
  Description of Artificial Sequence: Synthetic oligonucleotide
  Target: ATXN2; (-) strand; PAM type: NRG; PAM sequence: CAG
ctcacttgatcctcccatct

SEQ ID NO: 26607 - DNA, 20 bp, Artificial Sequence
  Description of Artificial Sequence: Synthetic oligonucleotide
  Target: ATXN2; (-) strand; PAM type: NRG; PAM sequence: GGG
caggctgatcttgaactcct

SEQ ID NO: 26608 - DNA, 20 bp, Artificial Sequence
  Description of Artificial Sequence: Synthetic oligonucleotide
  Target: ATXN2; (-) strand; PAM type: NRG; PAM sequence: TGG
acaggctgatcttgaactcc

SEQ ID NO: 26609 - DNA, 20 bp, Artificial Sequence
  Description of Artificial Sequence: Synthetic oligonucleotide
  Target: ATXN2; (-) strand; PAM type: NRG; PAM sequence: AGG
gatgtctcactgtgttgcac

SEQ ID NO: 26610 - DNA, 20 bp, Artificial Sequence
  Description of Artificial Sequence: Synthetic oligonucleotide
  Target: ATXN2; (-) strand; PAM type: NRG; PAM sequence: CAG
agatgtctcactgtgttgca

SEQ ID NO: 26611 - DNA, 20 bp, Artificial Sequence
  Description of Artificial Sequence: Synthetic oligonucleotide
  Target: ATXN2; (-) strand; PAM type: NRG; PAM sequence: CAG
tagtttagtttttgtagaga

SEQ ID NO: 26612 - DNA, 20 bp, Artificial Sequence
  Description of Artificial Sequence: Synthetic oligonucleotide
  Target: ATXN2; (-) strand; PAM type: NRG; PAM sequence: GAG
tttttagtttagtttttgta

SEQ ID NO: 26613 - DNA, 20 bp, Artificial Sequence
  Description of Artificial Sequence: Synthetic oligonucleotide
  Target: ATXN2; (-) strand; PAM type: NRG; PAM sequence: TAG
tttttttagtttagtttttg

SEQ ID NO: 26614 - DNA, 20 bp, Artificial Sequence
  Description of Artificial Sequence: Synthetic oligonucleotide
  Target: ATXN2; (-) strand; PAM type: NRG; PAM sequence: TAG
tttgtttgttttttttagtt

SEQ ID NO: 26615 - DNA, 20 bp, Artificial Sequence
  Description of Artificial Sequence: Synthetic oligonucleotide
  Target: ATXN2; (-) strand; PAM type: NRG; PAM sequence: TAG
atttttttgtttgttttttt

SEQ ID NO: 26616 - DNA, 20 bp, Artificial Sequence
  Description of Artificial Sequence: Synthetic oligonucleotide
  Target: ATXN2; (-) strand; PAM type: NRG; PAM sequence: TGG
tccccatgcaccaccctacc

SEQ ID NO: 26617 - DNA, 20 bp, Artificial Sequence
  Description of Artificial Sequence: Synthetic oligonucleotide
  Target: ATXN2; (-) strand; PAM type: NRG; PAM sequence: CAG
ctcaagctgttctcccattt

SEQ ID NO: 26618 - DNA, 20 bp, Artificial Sequence
  Description of Artificial Sequence: Synthetic oligonucleotide
  Target: ATXN2; (-) strand; PAM type: NRG; PAM sequence: AAG
gcttactgcttcctgggctc

SEQ ID NO: 26619 - DNA, 20 bp, Artificial Sequence
  Description of Artificial Sequence: Synthetic oligonucleotide
  Target: ATXN2; (-) strand; PAM type: NRG; PAM sequence: GGG
atcatggcttactgcttcct

SEQ ID NO: 26620 - DNA, 20 bp, Artificial Sequence
  Description of Artificial Sequence: Synthetic oligonucleotide
  Target: ATXN2; (-) strand; PAM type: NRG; PAM sequence: TGG
catcatggcttactgcttcc

SEQ ID NO: 26621 - DNA, 20 bp, Artificial Sequence
  Description of Artificial Sequence: Synthetic oligonucleotide
  Target: ATXN2; (-) strand; PAM type: NRG; PAM sequence: TGG
agaatgcagtggcgccatca

SEQ ID NO: 26622 - DNA, 20 bp, Artificial Sequence
  Description of Artificial Sequence: Synthetic oligonucleotide
  Target: ATXN2; (-) strand; PAM type: NRG; PAM sequence: TGG
tcacccctactagaatgcag

SEQ ID NO: 26623 - DNA, 20 bp, Artificial Sequence
  Description of Artificial Sequence: Synthetic oligonucleotide
  Target: ATXN2; (-) strand; PAM type: NRG; PAM sequence: CAG
ctgtcacccctactagaatg

SEQ ID NO: 26624 - DNA, 20 bp, Artificial Sequence
  Description of Artificial Sequence: Synthetic oligonucleotide
  Target: ATXN2; (-) strand; PAM type: NRG; PAM sequence: TAG
tctctctctgtcacccctac

SEQ ID NO: 26625 - DNA, 20 bp, Artificial Sequence
  Description of Artificial Sequence: Synthetic oligonucleotide
  Target: ATXN2; (-) strand; PAM type: NRG; PAM sequence: GGG
tgtatttatttgttgagaaa

SEQ ID NO: 26626 - DNA, 20 bp, Artificial Sequence
  Description of Artificial Sequence: Synthetic oligonucleotide
  Target: ATXN2; (-) strand; PAM type: NRG; PAM sequence: AGG
atgtatttatttgttgagaa

SEQ ID NO: 26627 - DNA, 20 bp, Artificial Sequence
  Description of Artificial Sequence: Synthetic oligonucleotide
  Target: ATXN2; (-) strand; PAM type: NRG; PAM sequence: AAG
tatgtatttatttgttgaga

SEQ ID NO: 26628 - DNA, 20 bp, Artificial Sequence
  Description of Artificial Sequence: Synthetic oligonucleotide
  Target: ATXN2; (-) strand; PAM type: NRG; PAM sequence: GAG
tttgtatgtatttatttgtt

SEQ ID NO: 26629 - DNA, 20 bp, Artificial Sequence
  Description of Artificial Sequence: Synthetic oligonucleotide
  Target: ATXN2; (-) strand; PAM type: NRG; PAM sequence: TGG
gtttttattgcctgtaacaa

SEQ ID NO: 26630 - DNA, 20 bp, Artificial Sequence
  Description of Artificial Sequence: Synthetic oligonucleotide
  Target: ATXN2; (-) strand; PAM type: NRG; PAM sequence: TGG
ctgaccttccctgctcattg

SEQ ID NO: 26631 - DNA, 20 bp, Artificial Sequence
  Description of Artificial Sequence: Synthetic oligonucleotide
  Target: ATXN2; (-) strand; PAM type: NRG; PAM sequence: GAG
gcccacatctgtccttttta

SEQ ID NO: 26632 - DNA, 20 bp, Artificial Sequence
  Description of Artificial Sequence: Synthetic oligonucleotide
  Target: ATXN2; (-) strand; PAM type: NRG; PAM sequence: TAG
aagcccacatctgtcctttt

SEQ ID NO: 26633 - DNA, 20 bp, Artificial Sequence
  Description of Artificial Sequence: Synthetic oligonucleotide
  Target: ATXN2; (-) strand; PAM type: NRG; PAM sequence: AAG
ttagatactttttcaaaacc

SEQ ID NO: 26634 - DNA, 20 bp, Artificial Sequence
  Description of Artificial Sequence: Synthetic oligonucleotide
  Target: ATXN2; (-) strand; PAM type: NRG; PAM sequence: TAG
taccttactaactagagttt

SEQ ID NO: 26635 - DNA, 20 bp, Artificial Sequence
  Description of Artificial Sequence: Synthetic oligonucleotide
  Target: ATXN2; (-) strand; PAM type: NRG; PAM sequence: GAG
agaatctaccttactaacta

SEQ ID NO: 26636 - DNA, 20 bp, Artificial Sequence
  Description of Artificial Sequence: Synthetic oligonucleotide
  Target: ATXN2; (-) strand; PAM type: NRG; PAM sequence: TAG
gaagaatctaccttactaac

SEQ ID NO: 26637 - DNA, 20 bp, Artificial Sequence
  Description of Artificial Sequence: Synthetic oligonucleotide
  Target: ATXN2; (-) strand; PAM type: NRG; PAM sequence: AAG
ctggatttaatcccaacgtg

SEQ ID NO: 26638 - DNA, 20 bp, Artificial Sequence
  Description of Artificial Sequence: Synthetic oligonucleotide
  Target: ATXN2; (-) strand; PAM type: NRG; PAM sequence: TGG
gtgccttcttcttttactcc

SEQ ID NO: 26639 - DNA, 20 bp, Artificial Sequence
  Description of Artificial Sequence: Synthetic oligonucleotide
  Target: ATXN2; (-) strand; PAM type: NRG; PAM sequence: CGG
attacaggcgtgagccaccg

SEQ ID NO: 26640 - DNA, 20 bp, Artificial Sequence
  Description of Artificial Sequence: Synthetic oligonucleotide
  Target: ATXN2; (-) strand; PAM type: NRG; PAM sequence: GAG
attgctgggattacaggcgt

SEQ ID NO: 26641 - DNA, 20 bp, Artificial Sequence
  Description of Artificial Sequence: Synthetic oligonucleotide
  Target: ATXN2; (-) strand; PAM type: NRG; PAM sequence: AGG
tcccaaattgctgggattac

SEQ ID NO: 26642 - DNA, 20 bp, Artificial Sequence
  Description of Artificial Sequence: Synthetic oligonucleotide
  Target: ATXN2; (-) strand; PAM type: NRG; PAM sequence: CAG
ctcccaaattgctgggatta

SEQ ID NO: 26643 - DNA, 20 bp, Artificial Sequence
  Description of Artificial Sequence: Synthetic oligonucleotide
  Target: ATXN2; (-) strand; PAM type: NRG; PAM sequence: GGG
ccttgggctcccaaattgct

SEQ ID NO: 26644 - DNA, 20 bp, Artificial Sequence
  Description of Artificial Sequence: Synthetic oligonucleotide
  Target: ATXN2; (-) strand; PAM type: NRG; PAM sequence: TGG
gccttgggctcccaaattgc

SEQ ID NO: 26645 - DNA, 20 bp, Artificial Sequence
  Description of Artificial Sequence: Synthetic oligonucleotide
  Target: ATXN2; (-) strand; PAM type: NRG; PAM sequence: GGG
ccttgtgatccacctgcctt

SEQ ID NO: 26646 - DNA, 20 bp, Artificial Sequence
  Description of Artificial Sequence: Synthetic oligonucleotide
  Target: ATXN2; (-) strand; PAM type: NRG; PAM sequence: TGG
accttgtgatccacctgcct

SEQ ID NO: 26647 - DNA, 20 bp, Artificial Sequence
  Description of Artificial Sequence: Synthetic oligonucleotide
  Target: ATXN2; (-) strand; PAM type: NRG; PAM sequence: TGG
tttcactgtgtttcccaggc

SEQ ID NO: 26648 - DNA, 20 bp, Artificial Sequence
  Description of Artificial Sequence: Synthetic oligonucleotide
  Target: ATXN2; (-) strand; PAM type: NRG; PAM sequence: AGG
tgggtttcactgtgtttccc

SEQ ID NO: 26649 - DNA, 20 bp, Artificial Sequence
  Description of Artificial Sequence: Synthetic oligonucleotide
  Target: ATXN2; (-) strand; PAM type: NRG; PAM sequence: CAG
atgggtttcactgtgtttcc

SEQ ID NO: 26650 - DNA, 20 bp, Artificial Sequence
  Description of Artificial Sequence: Synthetic oligonucleotide
  Target: ATXN2; (-) strand; PAM type: NRG; PAM sequence: GGG
tttgtatttttagtagagat

SEQ ID NO: 26651 - DNA, 20 bp, Artificial Sequence
  Description of Artificial Sequence: Synthetic oligonucleotide
  Target: ATXN2; (-) strand; PAM type: NRG; PAM sequence: TGG
ttttgtatttttagtagaga

SEQ ID NO: 26652 - DNA, 20 bp, Artificial Sequence
  Description of Artificial Sequence: Synthetic oligonucleotide
  Target: ATXN2; (-) strand; PAM type: NRG; PAM sequence: GAG
taacttttgtatttttagta

SEQ ID NO: 26653 - DNA, 20 bp, Artificial Sequence
  Description of Artificial Sequence: Synthetic oligonucleotide
  Target: ATXN2; (-) strand; PAM type: NRG; PAM sequence: TAG
gctaacttttgtatttttag

SEQ ID NO: 26654 - DNA, 20 bp, Artificial Sequence
  Description of Artificial Sequence: Synthetic oligonucleotide
  Target: ATXN2; (-) strand; PAM type: NRG; PAM sequence: TAG
cctgctaacttttgtatttt

SEQ ID NO: 26655 - DNA, 20 bp, Artificial Sequence
  Description of Artificial Sequence: Synthetic oligonucleotide
  Target: ATXN2; (-) strand; PAM type: NRG; PAM sequence: AGG
tcccgagaagctgagacgac

SEQ ID NO: 26656 - DNA, 20 bp, Artificial Sequence
  Description of Artificial Sequence: Synthetic oligonucleotide
  Target: ATXN2; (-) strand; PAM type: NRG; PAM sequence: CAG
ctcccgagaagctgagacga

SEQ ID NO: 26657 - DNA, 20 bp, Artificial Sequence
  Description of Artificial Sequence: Synthetic oligonucleotide
  Target: ATXN2; (-) strand; PAM type: NRG; PAM sequence: GAG
cctgagcctcccgagaagct

SEQ ID NO: 26658 - DNA, 20 bp, Artificial Sequence
  Description of Artificial Sequence: Synthetic oligonucleotide
  Target: ATXN2; (-) strand; PAM type: NRG; PAM sequence: AAG
tcctgcctgagcctcccgag

SEQ ID NO: 26659 - DNA, 20 bp, Artificial Sequence
  Description of Artificial Sequence: Synthetic oligonucleotide
  Target: ATXN2; (-) strand; PAM type: NRG; PAM sequence: GAG
ttctcctgcctgagcctccc

SEQ ID NO: 26660 - DNA, 20 bp, Artificial Sequence
  Description of Artificial Sequence: Synthetic oligonucleotide
  Target: ATXN2; (-) strand; PAM type: NRG; PAM sequence: GAG
ttccagtgattctcctgcct

SEQ ID NO: 26661 - DNA, 20 bp, Artificial Sequence
  Description of Artificial Sequence: Synthetic oligonucleotide
  Target: ATXN2; (-) strand; PAM type: NRG; PAM sequence: CAG
aacctctgcctcccgggttc

SEQ ID NO: 26662 - DNA, 20 bp, Artificial Sequence
  Description of Artificial Sequence: Synthetic oligonucleotide
  Target: ATXN2; (-) strand; PAM type: NRG; PAM sequence: GGG
caccacaacctctgcctccc

SEQ ID NO: 26663 - DNA, 20 bp, Artificial Sequence
  Description of Artificial Sequence: Synthetic oligonucleotide
  Target: ATXN2; (-) strand; PAM type: NRG; PAM sequence: CGG
tcaccacaacctctgcctcc

SEQ ID NO: 26664 - DNA, 20 bp, Artificial Sequence
  Description of Artificial Sequence: Synthetic oligonucleotide
  Target: ATXN2; (-) strand; PAM type: NRG; PAM sequence: TGG
ggagtgcagtggcgcgatct

SEQ ID NO: 26665 - DNA, 20 bp, Artificial Sequence
  Description of Artificial Sequence: Synthetic oligonucleotide
  Target: ATXN2; (-) strand; PAM type: NRG; PAM sequence: TGG
ttgcccaggttggagtgcag

SEQ ID NO: 26666 - DNA, 20 bp, Artificial Sequence
  Description of Artificial Sequence: Synthetic oligonucleotide
  Target: ATXN2; (-) strand; PAM type: NRG; PAM sequence: CAG
ctgttgcccaggttggagtg

SEQ ID NO: 26667 - DNA, 20 bp, Artificial Sequence
  Description of Artificial Sequence: Synthetic oligonucleotide
  Target: ATXN2; (-) strand; PAM type: NRG; PAM sequence: GAG
tcactctgttgcccaggttg

SEQ ID NO: 26668 - DNA, 20 bp, Artificial Sequence
  Description of Artificial Sequence: Synthetic oligonucleotide
  Target: ATXN2; (-) strand; PAM type: NRG; PAM sequence: TGG
tctcactctgttgcccaggt

SEQ ID NO: 26669 - DNA, 20 bp, Artificial Sequence
  Description of Artificial Sequence: Synthetic oligonucleotide
  Target: ATXN2; (-) strand; PAM type: NRG; PAM sequence: AGG
ggagtctcactctgttgccc

SEQ ID NO: 26670 - DNA, 20 bp, Artificial Sequence
  Description of Artificial Sequence: Synthetic oligonucleotide
  Target: ATXN2; (-) strand; PAM type: NRG; PAM sequence: CAG
tggagtctcactctgttgcc

SEQ ID NO: 26671 - DNA, 20 bp, Artificial Sequence
  Description of Artificial Sequence: Synthetic oligonucleotide
  Target: ATXN2; (-) strand; PAM type: NRG; PAM sequence: GAG
ttttgtttgtttttgagttg

SEQ ID NO: 26672 - DNA, 20 bp, Artificial Sequence
  Description of Artificial Sequence: Synthetic oligonucleotide
  Target: ATXN2; (-) strand; PAM type: NRG; PAM sequence: TGG
ttttttgtttgtttttgagt

SEQ ID NO: 26673 - DNA, 20 bp, Artificial Sequence
  Description of Artificial Sequence: Synthetic oligonucleotide
  Target: ATXN2; (-) strand; PAM type: NRG; PAM sequence: GAG
ttctttttttgtttgttttt

SEQ ID NO: 26674 - DNA, 20 bp, Artificial Sequence
  Description of Artificial Sequence: Synthetic oligonucleotide
  Target: ATXN2; (-) strand; PAM type: NRG; PAM sequence: TAG
agctggcatgttctgtgtgt

SEQ ID NO: 26675 - DNA, 20 bp, Artificial Sequence
  Description of Artificial Sequence: Synthetic oligonucleotide
  Target: ATXN2; (-) strand; PAM type: NRG; PAM sequence: TGG
tacttattgacctactaagc

SEQ ID NO: 26676 - DNA, 20 bp, Artificial Sequence
  Description of Artificial Sequence: Synthetic oligonucleotide
  Target: ATXN2; (-) strand; PAM type: NRG; PAM sequence: AAG
aatctacttattgacctact

SEQ ID NO: 26677 - DNA, 20 bp, Artificial Sequence
  Description of Artificial Sequence: Synthetic oligonucleotide
  Target: ATXN2; (-) strand; PAM type: NRG; PAM sequence: CGG
caggcgtgagccaccgcgcc

SEQ ID NO: 26678 - DNA, 20 bp, Artificial Sequence
  Description of Artificial Sequence: Synthetic oligonucleotide
  Target: ATXN2; (-) strand; PAM type: NRG; PAM sequence: GAG
agtgctgggattacaggcgt

SEQ ID NO: 26679 - DNA, 20 bp, Artificial Sequence
  Description of Artificial Sequence: Synthetic oligonucleotide
  Target: ATXN2; (-) strand; PAM type: NRG; PAM sequence: AGG
tcccaaagtgctgggattac

SEQ ID NO: 26680 - DNA, 20 bp, Artificial Sequence
  Description of Artificial Sequence: Synthetic oligonucleotide
  Target: ATXN2; (-) strand; PAM type: NRG; PAM sequence: CAG
ctcccaaagtgctgggatta

SEQ ID NO: 26681 - DNA, 20 bp, Artificial Sequence
  Description of Artificial Sequence: Synthetic oligonucleotide
  Target: ATXN2; (-) strand; PAM type: NRG; PAM sequence: GGG
cctcggcctcccaaagtgct

SEQ ID NO: 26682 - DNA, 20 bp, Artificial Sequence
  Description of Artificial Sequence: Synthetic oligonucleotide
  Target: ATXN2; (-) strand; PAM type: NRG; PAM sequence: TGG
acctcggcctcccaaagtgc

SEQ ID NO: 26683 - DNA, 20 bp, Artificial Sequence
  Description of Artificial Sequence: Synthetic oligonucleotide
  Target: ATXN2; (-) strand; PAM type: NRG; PAM sequence: AAG
ccgcccacctcggcctccca

SEQ ID NO: 26684 - DNA, 20 bp, Artificial Sequence
  Description of Artificial Sequence: Synthetic oligonucleotide
  Target: ATXN2; (-) strand; PAM type: NRG; PAM sequence: CGG
acctcgtgatccgcccacct

SEQ ID NO: 26685 - DNA, 20 bp, Artificial Sequence
  Description of Artificial Sequence: Synthetic oligonucleotide
  Target: ATXN2; (-) strand; PAM type: NRG; PAM sequence: TGG
tttcaccgttttagccggga

SEQ ID NO: 26686 - DNA, 20 bp, Artificial Sequence
  Description of Artificial Sequence: Synthetic oligonucleotide
  Target: ATXN2; (-) strand; PAM type: NRG; PAM sequence: GGG
ggggtttcaccgttttagcc

SEQ ID NO: 26687 - DNA, 20 bp, Artificial Sequence
  Description of Artificial Sequence: Synthetic oligonucleotide
  Target: ATXN2; (-) strand; PAM type: NRG; PAM sequence: CGG
cggggtttcaccgttttagc

SEQ ID NO: 26688 - DNA, 20 bp, Artificial Sequence
  Description of Artificial Sequence: Synthetic oligonucleotide
  Target: ATXN2; (-) strand; PAM type: NRG; PAM sequence: TAG
gagacggggtttcaccgttt

SEQ ID NO: 26689 - DNA, 20 bp, Artificial Sequence
  Description of Artificial Sequence: Synthetic oligonucleotide
  Target: ATXN2; (-) strand; PAM type: NRG; PAM sequence: GGG
ttgtatttttagtagagacg

SEQ ID NO: 26690 - DNA, 20 bp, Artificial Sequence
  Description of Artificial Sequence: Synthetic oligonucleotide
  Target: ATXN2; (-) strand; PAM type: NRG; PAM sequence: GGG
tttgtatttttagtagagac

SEQ ID NO: 26691 - DNA, 20 bp, Artificial Sequence
  Description of Artificial Sequence: Synthetic oligonucleotide
  Target: ATXN2; (-) strand; PAM type: NRG; PAM sequence: CGG
ttttgtatttttagtagaga

SEQ ID NO: 26692 - DNA, 20 bp, Artificial Sequence
  Description of Artificial Sequence: Synthetic oligonucleotide
  Target: ATXN2; (-) strand; PAM type: NRG; PAM sequence: GAG
aattttttgtatttttagta

SEQ ID NO: 26693 - DNA, 20 bp, Artificial Sequence
  Description of Artificial Sequence: Synthetic oligonucleotide
  Target: ATXN2; (-) strand; PAM type: NRG; PAM sequence: TAG
ctaattttttgtatttttag

SEQ ID NO: 26694 - DNA, 20 bp, Artificial Sequence
  Description of Artificial Sequence: Synthetic oligonucleotide
  Target: ATXN2; (-) strand; PAM type: NRG; PAM sequence: TAG
cggctaattttttgtatttt

SEQ ID NO: 26695 - DNA, 20 bp, Artificial Sequence
  Description of Artificial Sequence: Synthetic oligonucleotide
  Target: ATXN2; (-) strand; PAM type: NRG; PAM sequence: CGG
caggcgcccgccactacgcc

SEQ ID NO: 26696 - DNA, 20 bp, Artificial Sequence
  Description of Artificial Sequence: Synthetic oligonucleotide
  Target: ATXN2; (-) strand; PAM type: NRG; PAM sequence: AGG
tcccaagtagctgggactac

SEQ ID NO: 26697 - DNA, 20 bp, Artificial Sequence
  Description of Artificial Sequence: Synthetic oligonucleotide
  Target: ATXN2; (-) strand; PAM type: NRG; PAM sequence: CAG
ctcccaagtagctgggacta

SEQ ID NO: 26698 - DNA, 20 bp, Artificial Sequence
  Description of Artificial Sequence: Synthetic oligonucleotide
  Target: ATXN2; (-) strand; PAM type: NRG; PAM sequence: GGG
cctcagcctcccaagtagct

SEQ ID NO: 26699 - DNA, 20 bp, Artificial Sequence
  Description of Artificial Sequence: Synthetic oligonucleotide
  Target: ATXN2; (-) strand; PAM type: NRG; PAM sequence: TGG
gcctcagcctcccaagtagc

SEQ ID NO: 26700 - DNA, 20 bp, Artificial Sequence
  Description of Artificial Sequence: Synthetic oligonucleotide
  Target: ATXN2; (-) strand; PAM type: NRG; PAM sequence: TAG
tcctgcctcagcctcccaag

SEQ ID NO: 26701 - DNA, 20 bp, Artificial Sequence
  Description of Artificial Sequence: Synthetic oligonucleotide
  Target: ATXN2; (-) strand; PAM type: NRG; PAM sequence: AAG
ttctcctgcctcagcctccc

SEQ ID NO: 26702 - DNA, 20 bp, Artificial Sequence
  Description of Artificial Sequence: Synthetic oligonucleotide
  Target: ATXN2; (-) strand; PAM type: NRG; PAM sequence: CAG
ttcacgccattctcctgcct

SEQ ID NO: 26703 - DNA, 20 bp, Artificial Sequence
  Description of Artificial Sequence: Synthetic oligonucleotide
  Target: ATXN2; (-) strand; PAM type: NRG; PAM sequence: GGG
cactgcaagctccgcctcct

SEQ ID NO: 26704 - DNA, 20 bp, Artificial Sequence
  Description of Artificial Sequence: Synthetic oligonucleotide
  Target: ATXN2; (-) strand; PAM type: NRG; PAM sequence: TGG
tcactgcaagctccgcctcc

SEQ ID NO: 26705 - DNA, 20 bp, Artificial Sequence
  Description of Artificial Sequence: Synthetic oligonucleotide
  Target: ATXN2; (-) strand; PAM type: NRG; PAM sequence: AAG
gcgggatctcggctcactgc

SEQ ID NO: 26706 - DNA, 20 bp, Artificial Sequence
  Description of Artificial Sequence: Synthetic oligonucleotide
  Target: ATXN2; (-) strand; PAM type: NRG; PAM sequence: CGG
ggagtgcagtggcgggatct

SEQ ID NO: 26707 - DNA, 20 bp, Artificial Sequence
  Description of Artificial Sequence: Synthetic oligonucleotide
  Target: ATXN2; (-) strand; PAM type: NRG; PAM sequence: GGG
ccaggctggagtgcagtggc

SEQ ID NO: 26708 - DNA, 20 bp, Artificial Sequence
  Description of Artificial Sequence: Synthetic oligonucleotide
  Target: ATXN2; (-) strand; PAM type: NRG; PAM sequence: CGG
cccaggctggagtgcagtgg

SEQ ID NO: 26709 - DNA, 20 bp, Artificial Sequence
  Description of Artificial Sequence: Synthetic oligonucleotide
  Target: ATXN2; (-) strand; PAM type: NRG; PAM sequence: TGG
tcgcccaggctggagtgcag

SEQ ID NO: 26710 - DNA, 20 bp, Artificial Sequence
  Description of Artificial Sequence: Synthetic oligonucleotide
  Target: ATXN2; (-) strand; PAM type: NRG; PAM sequence: CAG
ctgtcgcccaggctggagtg

SEQ ID NO: 26711 - DNA, 20 bp, Artificial Sequence
  Description of Artificial Sequence: Synthetic oligonucleotide
  Target: ATXN2; (-) strand; PAM type: NRG; PAM sequence: GAG
tcgctctgtcgcccaggctg

SEQ ID NO: 26712 - DNA, 20 bp, Artificial Sequence
  Description of Artificial Sequence: Synthetic oligonucleotide
  Target: ATXN2; (-) strand; PAM type: NRG; PAM sequence: TGG
tctcgctctgtcgcccaggc

SEQ ID NO: 26713 - DNA, 20 bp, Artificial Sequence
  Description of Artificial Sequence: Synthetic oligonucleotide
  Target: ATXN2; (-) strand; PAM type: NRG; PAM sequence: AGG
ggagtctcgctctgtcgccc

SEQ ID NO: 26714 - DNA, 20 bp, Artificial Sequence
  Description of Artificial Sequence: Synthetic oligonucleotide
  Target: ATXN2; (-) strand; PAM type: NRG; PAM sequence: CAG
cggagtctcgctctgtcgcc

SEQ ID NO: 26715 - DNA, 20 bp, Artificial Sequence
  Description of Artificial Sequence: Synthetic oligonucleotide
  Target: ATXN2; (-) strand; PAM type: NRG; PAM sequence: GAG
ttttttttttttttgagacg

SEQ ID NO: 26716 - DNA, 20 bp, Artificial Sequence
  Description of Artificial Sequence: Synthetic oligonucleotide
  Target: ATXN2; (-) strand; PAM type: NRG; PAM sequence: CGG
ttttttttttttttttgaga

SEQ ID NO: 26717 - DNA, 20 bp, Artificial Sequence
  Description of Artificial Sequence: Synthetic oligonucleotide
  Target: ATXN2; (-) strand; PAM type: NRG; PAM sequence: GAG
atgttttttttttttttttt

SEQ ID NO: 26718 - DNA, 20 bp, Artificial Sequence
  Description of Artificial Sequence: Synthetic oligonucleotide
  Target: ATXN2; (-) strand; PAM type: NRG; PAM sequence: TGG
ctatacagggcccttcccag

SEQ ID NO: 26719 - DNA, 20 bp, Artificial Sequence
  Description of Artificial Sequence: Synthetic oligonucleotide
  Target: ATXN2; (-) strand; PAM type: NRG; PAM sequence: CAG
atgctatacagggcccttcc

SEQ ID NO: 26720 - DNA, 20 bp, Artificial Sequence
  Description of Artificial Sequence: Synthetic oligonucleotide
  Target: ATXN2; (-) strand; PAM type: NRG; PAM sequence: GGG
taaagttgggatgctataca

SEQ ID NO: 26721 - DNA, 20 bp, Artificial Sequence
  Description of Artificial Sequence: Synthetic oligonucleotide
  Target: ATXN2; (-) strand; PAM type: NRG; PAM sequence: AGG
ataaagttgggatgctatac

SEQ ID NO: 26722 - DNA, 20 bp, Artificial Sequence
  Description of Artificial Sequence: Synthetic oligonucleotide
  Target: ATXN2; (-) strand; PAM type: NRG; PAM sequence: CAG
aataaagttgggatgctata

SEQ ID NO: 26723 - DNA, 20 bp, Artificial Sequence
  Description of Artificial Sequence: Synthetic oligonucleotide
  Target: ATXN2; (-) strand; PAM type: NRG; PAM sequence: GGG
gttgtttacagaataaagtt

SEQ ID NO: 26724 - DNA, 20 bp, Artificial Sequence
  Description of Artificial Sequence: Synthetic oligonucleotide
  Target: ATXN2; (-) strand; PAM type: NRG; PAM sequence: TGG
tgttgtttacagaataaagt

SEQ ID NO: 26725 - DNA, 20 bp, Artificial Sequence
  Description of Artificial Sequence: Synthetic oligonucleotide
  Target: ATXN2; (-) strand; PAM type: NRG; PAM sequence: AAG
ccactgttgtttacagaata

SEQ ID NO: 26726 - DNA, 20 bp, Artificial Sequence
  Description of Artificial Sequence: Synthetic oligonucleotide
  Target: ATXN2; (-) strand; PAM type: NRG; PAM sequence: CAG
tcagtggccactgttgttta

SEQ ID NO: 26727 - DNA, 20 bp, Artificial Sequence
  Description of Artificial Sequence: Synthetic oligonucleotide
  Target: ATXN2; (-) strand; PAM type: NRG; PAM sequence: TGG
cccttgctcaaaatcttcag

SEQ ID NO: 26728 - DNA, 20 bp, Artificial Sequence
  Description of Artificial Sequence: Synthetic oligonucleotide
  Target: ATXN2; (-) strand; PAM type: NRG; PAM sequence: CAG
catcccttgctcaaaatctt

SEQ ID NO: 26729 - DNA, 20 bp, Artificial Sequence
  Description of Artificial Sequence: Synthetic oligonucleotide
  Target: ATXN2; (-) strand; PAM type: NRG; PAM sequence: TAG
ttcttagacattgcttttat

SEQ ID NO: 26730 - DNA, 20 bp, Artificial Sequence
  Description of Artificial Sequence: Synthetic oligonucleotide
  Target: ATXN2; (-) strand; PAM type: NRG; PAM sequence: TAG
cattgacataaagaaattct

SEQ ID NO: 26731 - DNA, 20 bp, Artificial Sequence
  Description of Artificial Sequence: Synthetic oligonucleotide
  Target: ATXN2; (-) strand; PAM type: NRG; PAM sequence: AAG
caatcttgggcattgacata

SEQ ID NO: 26732 - DNA, 20 bp, Artificial Sequence
  Description of Artificial Sequence: Synthetic oligonucleotide
  Target: ATXN2; (-) strand; PAM type: NRG; PAM sequence: GGG
tctcattttcagtcaatctt

SEQ ID NO: 26733 - DNA, 20 bp, Artificial Sequence
  Description of Artificial Sequence: Synthetic oligonucleotide
  Target: ATXN2; (-) strand; PAM type: NRG; PAM sequence: TGG
ttctcattttcagtcaatct

SEQ ID NO: 26734 - DNA, 20 bp, Artificial Sequence
  Description of Artificial Sequence: Synthetic oligonucleotide
  Target: ATXN2; (-) strand; PAM type: NRG; PAM sequence: CAG
tcttccagatttctcatttt

SEQ ID NO: 26735 - DNA, 20 bp, Artificial Sequence
  Description of Artificial Sequence: Synthetic oligonucleotide
  Target: ATXN2; (-) strand; PAM type: NRG; PAM sequence: CAG
ctcctaaacaacttgtcttc

SEQ ID NO: 26736 - DNA, 20 bp, Artificial Sequence
  Description of Artificial Sequence: Synthetic oligonucleotide
  Target: ATXN2; (-) strand; PAM type: NRG; PAM sequence: AGG
gtccttgttttcttccacca

SEQ ID NO: 26737 - DNA, 20 bp, Artificial Sequence
  Description of Artificial Sequence: Synthetic oligonucleotide
  Target: ATXN2; (-) strand; PAM type: NRG; PAM sequence: AAG
ggtccttgttttcttccacc

SEQ ID NO: 26738 - DNA, 20 bp, Artificial Sequence
  Description of Artificial Sequence: Synthetic oligonucleotide
  Target: ATXN2; (-) strand; PAM type: NRG; PAM sequence: TGG
gtgaaaatagaaaataagtg

SEQ ID NO: 26739 - DNA, 20 bp, Artificial Sequence
  Description of Artificial Sequence: Synthetic oligonucleotide
  Target: ATXN2; (-) strand; PAM type: NRG; PAM sequence: AAG
taacagtgaaaatagaaaat

SEQ ID NO: 26740 - DNA, 20 bp, Artificial Sequence
  Description of Artificial Sequence: Synthetic oligonucleotide
  Target: ATXN2; (-) strand; PAM type: NRG; PAM sequence: TAG
aaaagatttaacagtgaaaa

SEQ ID NO: 26741 - DNA, 20 bp, Artificial Sequence
  Description of Artificial Sequence: Synthetic oligonucleotide
  Target: ATXN2; (-) strand; PAM type: NRG; PAM sequence: CAG
gtgtgtaccaaaagatttaa

SEQ ID NO: 26742 - DNA, 20 bp, Artificial Sequence
  Description of Artificial Sequence: Synthetic oligonucleotide
  Target: ATXN2; (-) strand; PAM type: NRG; PAM sequence: AAG
gttcaaaacgtgtgtaccaa

SEQ ID NO: 26743 - DNA, 20 bp, Artificial Sequence
  Description of Artificial Sequence: Synthetic oligonucleotide
  Target: ATXN2; (-) strand; PAM type: NRG; PAM sequence: AAG
atatatgcacacatggtaaa

SEQ ID NO: 26744 - DNA, 20 bp, Artificial Sequence
  Description of Artificial Sequence: Synthetic oligonucleotide
  Target: ATXN2; (-) strand; PAM type: NRG; PAM sequence: TGG
aaaaattatatatgcacaca

SEQ ID NO: 26745 - DNA, 20 bp, Artificial Sequence
  Description of Artificial Sequence: Synthetic oligonucleotide
  Target: ATXN2; (-) strand; PAM type: NRG; PAM sequence: TAG
taagaagtagtatctcactg

SEQ ID NO: 26746 - DNA, 20 bp, Artificial Sequence
  Description of Artificial Sequence: Synthetic oligonucleotide
  Target: ATXN2; (-) strand; PAM type: NRG; PAM sequence: TAG
cctagtgggagagtaagaag

SEQ ID NO: 26747 - DNA, 20 bp, Artificial Sequence
  Description of Artificial Sequence: Synthetic oligonucleotide
  Target: ATXN2; (-) strand; PAM type: NRG; PAM sequence: AAG
catcctagtgggagagtaag

SEQ ID NO: 26748 - DNA, 20 bp, Artificial Sequence
  Description of Artificial Sequence: Synthetic oligonucleotide
  Target: ATXN2; (-) strand; PAM type: NRG; PAM sequence: AAG
acccatcctagtgggagagt

SEQ ID NO: 26749 - DNA, 20 bp, Artificial Sequence
  Description of Artificial Sequence: Synthetic oligonucleotide
  Target: ATXN2; (-) strand; PAM type: NRG; PAM sequence: GAG
ttatacccatcctagtggga

SEQ ID NO: 26750 - DNA, 20 bp, Artificial Sequence
  Description of Artificial Sequence: Synthetic oligonucleotide
  Target: ATXN2; (-) strand; PAM type: NRG; PAM sequence: GAG
gattatacccatcctagtgg

SEQ ID NO: 26751 - DNA, 20 bp, Artificial Sequence
  Description of Artificial Sequence: Synthetic oligonucleotide
  Target: ATXN2; (-) strand; PAM type: NRG; PAM sequence: GGG
ttgattatacccatcctagt

SEQ ID NO: 26752 - DNA, 20 bp, Artificial Sequence
  Description of Artificial Sequence: Synthetic oligonucleotide
  Target: ATXN2; (-) strand; PAM type: NRG; PAM sequence: TGG
tttgattatacccatcctag

SEQ ID NO: 26753 - DNA, 20 bp, Artificial Sequence
  Description of Artificial Sequence: Synthetic oligonucleotide
  Target: ATXN2; (-) strand; PAM type: NRG; PAM sequence: TAG
ctctttgattatacccatcc

SEQ ID NO: 26754 - DNA, 20 bp, Artificial Sequence
  Description of Artificial Sequence: Synthetic oligonucleotide
  Target: ATXN2; (-) strand; PAM type: NRG; PAM sequence: CAG
tatgtttttcacatcctcac

SEQ ID NO: 26755 - DNA, 20 bp, Artificial Sequence
  Description of Artificial Sequence: Synthetic oligonucleotide
  Target: ATXN2; (-) strand; PAM type: NRG; PAM sequence: AGG
aatcctactagcagtgtctg

SEQ ID NO: 26756 - DNA, 20 bp, Artificial Sequence
  Description of Artificial Sequence: Synthetic oligonucleotide
  Target: ATXN2; (-) strand; PAM type: NRG; PAM sequence: GAG
caatcctactagcagtgtct

SEQ ID NO: 26757 - DNA, 20 bp, Artificial Sequence
  Description of Artificial Sequence: Synthetic oligonucleotide
  Target: ATXN2; (-) strand; PAM type: NRG; PAM sequence: CAG
tcattttacaatcctactag

SEQ ID NO: 26758 - DNA, 20 bp, Artificial Sequence
  Description of Artificial Sequence: Synthetic oligonucleotide
  Target: ATXN2; (-) strand; PAM type: NRG; PAM sequence: TAG
gtatcattttacaatcctac

SEQ ID NO: 26759 - DNA, 20 bp, Artificial Sequence
  Description of Artificial Sequence: Synthetic oligonucleotide
  Target: ATXN2; (-) strand; PAM type: NRG; PAM sequence: TAG
ctacatagctgtttccaacg

SEQ ID NO: 26760 - DNA, 20 bp, Artificial Sequence
  Description of Artificial Sequence: Synthetic oligonucleotide
  Target: ATXN2; (-) strand; PAM type: NRG; PAM sequence: TAG
tatcattttacaatcctaca

SEQ ID NO: 26761 - DNA, 20 bp, Artificial Sequence
  Description of Artificial Sequence: Synthetic oligonucleotide
  Target: ATXN2; (-) strand; PAM type: NRG; PAM sequence: TGG
ggctgatttcctgggcatag

SEQ ID NO: 26762 - DNA, 20 bp, Artificial Sequence
  Description of Artificial Sequence: Synthetic oligonucleotide
  Target: ATXN2; (-) strand; PAM type: NRG; PAM sequence: TAG
acaggctgatttcctgggca

SEQ ID NO: 26763 - DNA, 20 bp, Artificial Sequence
  Description of Artificial Sequence: Synthetic oligonucleotide
  Target: ATXN2; (-) strand; PAM type: NRG; PAM sequence: GGG
gttgcacaggctgatttcct

SEQ ID NO: 26764 - DNA, 20 bp, Artificial Sequence
  Description of Artificial Sequence: Synthetic oligonucleotide
  Target: ATXN2; (-) strand; PAM type: NRG; PAM sequence: TGG
tgttgcacaggctgatttcc

SEQ ID NO: 26765 - DNA, 20 bp, Artificial Sequence
  Description of Artificial Sequence: Synthetic oligonucleotide
  Target: ATXN2; (-) strand; PAM type: NRG; PAM sequence: AGG
ttggggtctcactgttgcac

SEQ ID NO: 26766 - DNA, 20 bp, Artificial Sequence
  Description of Artificial Sequence: Synthetic oligonucleotide
  Target: ATXN2; (-) strand; PAM type: NRG; PAM sequence: CAG
gttggggtctcactgttgca

SEQ ID NO: 26767 - DNA, 20 bp, Artificial Sequence
  Description of Artificial Sequence: Synthetic oligonucleotide
  Target: ATXN2; (-) strand; PAM type: NRG; PAM sequence: GGG
attttttgaaaatagagttg

SEQ ID NO: 26768 - DNA, 20 bp, Artificial Sequence
  Description of Artificial Sequence: Synthetic oligonucleotide
  Target: ATXN2; (-) strand; PAM type: NRG; PAM sequence: GGG
tattttttgaaaatagagtt

SEQ ID NO: 26769 - DNA, 20 bp, Artificial Sequence
  Description of Artificial Sequence: Synthetic oligonucleotide
  Target: ATXN2; (-) strand; PAM type: NRG; PAM sequence: TGG
ttattttttgaaaatagagt

SEQ ID NO: 26770 - DNA, 20 bp, Artificial Sequence
  Description of Artificial Sequence: Synthetic oligonucleotide
  Target: ATXN2; (-) strand; PAM type: NRG; PAM sequence: GAG
tttattattttttgaaaata

SEQ ID NO: 26771 - DNA, 20 bp, Artificial Sequence
  Description of Artificial Sequence: Synthetic oligonucleotide
  Target: ATXN2; (-) strand; PAM type: NRG; PAM sequence: TAG
tttttattattttttgaaaa

SEQ ID NO: 26772 - DNA, 20 bp, Artificial Sequence
  Description of Artificial Sequence: Synthetic oligonucleotide
  Target: ATXN2; (-) strand; PAM type: NRG; PAM sequence: GGG
gaaccttttacataactgtt

SEQ ID NO: 26773 - DNA, 20 bp, Artificial Sequence
  Description of Artificial Sequence: Synthetic oligonucleotide
  Target: ATXN2; (-) strand; PAM type: NRG; PAM sequence: TGG
tgaaccttttacataactgt

SEQ ID NO: 26774 - DNA, 20 bp, Artificial Sequence
  Description of Artificial Sequence: Synthetic oligonucleotide
  Target: ATXN2; (-) strand; PAM type: NRG; PAM sequence: TGG
catacctgcaagataattgc

SEQ ID NO: 26775 - DNA, 20 bp, Artificial Sequence
  Description of Artificial Sequence: Synthetic oligonucleotide
  Target: ATXN2; (-) strand; PAM type: NRG; PAM sequence: AAG
acatacatacacatacctgc

SEQ ID NO: 26776 - DNA, 20 bp, Artificial Sequence
  Description of Artificial Sequence: Synthetic oligonucleotide
  Target: ATXN2; (-) strand; PAM type: NRG; PAM sequence: GGG
taggttttcaattctcatgg

SEQ ID NO: 26777 - DNA, 20 bp, Artificial Sequence
  Description of Artificial Sequence: Synthetic oligonucleotide
  Target: ATXN2; (-) strand; PAM type: NRG; PAM sequence: GGG
ataggttttcaattctcatg

SEQ ID NO: 26778 - DNA, 20 bp, Artificial Sequence
  Description of Artificial Sequence: Synthetic oligonucleotide
  Target: ATXN2; (-) strand; PAM type: NRG; PAM sequence: GGG
cataggttttcaattctcat

SEQ ID NO: 26779 - DNA, 20 bp, Artificial Sequence
  Description of Artificial Sequence: Synthetic oligonucleotide
  Target: ATXN2; (-) strand; PAM type: NRG; PAM sequence: TGG
acataggttttcaattctca

SEQ ID NO: 26780 - DNA, 20 bp, Artificial Sequence
  Description of Artificial Sequence: Synthetic oligonucleotide
  Target: ATXN2; (-) strand; PAM type: NRG; PAM sequence: AGG
aaaaaactgcgtgtggacat

SEQ ID NO: 26781 - DNA, 20 bp, Artificial Sequence
  Description of Artificial Sequence: Synthetic oligonucleotide
  Target: ATXN2; (-) strand; PAM type: NRG; PAM sequence: TAG
aaaaaaactgcgtgtggaca

SEQ ID NO: 26782 - DNA, 20 bp, Artificial Sequence
  Description of Artificial Sequence: Synthetic oligonucleotide
  Target: ATXN2; (-) strand; PAM type: NRG; PAM sequence: TGG
aaaaaaaaaaaaactgcgtg

SEQ ID NO: 26783 - DNA, 20 bp, Artificial Sequence
  Description of Artificial Sequence: Synthetic oligonucleotide
  Target: ATXN2; (-) strand; PAM type: NRG; PAM sequence: GAG
gcactccagcctgggtgaca

SEQ ID NO: 26784 - DNA, 20 bp, Artificial Sequence
  Description of Artificial Sequence: Synthetic oligonucleotide
  Target: ATXN2; (-) strand; PAM type: NRG; PAM sequence: CAG
ctgcactccagcctgggtga

SEQ ID NO: 26785 - DNA, 20 bp, Artificial Sequence
  Description of Artificial Sequence: Synthetic oligonucleotide
  Target: ATXN2; (-) strand; PAM type: NRG; PAM sequence: GGG
acgccactgcactccagcct

SEQ ID NO: 26786 - DNA, 20 bp, Artificial Sequence
  Description of Artificial Sequence: Synthetic oligonucleotide
  Target: ATXN2; (-) strand; PAM type: NRG; PAM sequence: TGG
cacgccactgcactccagcc

SEQ ID NO: 26787 - DNA, 20 bp, Artificial Sequence
  Description of Artificial Sequence: Synthetic oligonucleotide
  Target: ATXN2; (-) strand; PAM type: NRG; PAM sequence: CAG
gagatcacgccactgcactc

SEQ ID NO: 26788 - DNA, 20 bp, Artificial Sequence
  Description of Artificial Sequence: Synthetic oligonucleotide
  Target: ATXN2; (-) strand; PAM type: NRG; PAM sequence: GAG
agccgaggctacagtgagcc

SEQ ID NO: 26789 - DNA, 20 bp, Artificial Sequence
  Description of Artificial Sequence: Synthetic oligonucleotide
  Target: ATXN2; (-) strand; PAM type: NRG; PAM sequence: GAG
tgggaagccgaggctacagt

SEQ ID NO: 26790 - DNA, 20 bp, Artificial Sequence
  Description of Artificial Sequence: Synthetic oligonucleotide
  Target: ATXN2; (-) strand; PAM type: NRG; PAM sequence: CAG
aagctgggaagccgaggcta

SEQ ID NO: 26791 - DNA, 20 bp, Artificial Sequence
  Description of Artificial Sequence: Synthetic oligonucleotide
  Target: ATXN2; (-) strand; PAM type: NRG; PAM sequence: AGG
cacttgaagctgggaagccg

SEQ ID NO: 26792 - DNA, 20 bp, Artificial Sequence
  Description of Artificial Sequence: Synthetic oligonucleotide
  Target: ATXN2; (-) strand; PAM type: NRG; PAM sequence: GAG
tcacttgaagctgggaagcc

SEQ ID NO: 26793 - DNA, 20 bp, Artificial Sequence
  Description of Artificial Sequence: Synthetic oligonucleotide
  Target: ATXN2; (-) strand; PAM type: NRG; PAM sequence: AAG
gagaatcacttgaagctggg

SEQ ID NO: 26794 - DNA, 20 bp, Artificial Sequence
  Description of Artificial Sequence: Synthetic oligonucleotide
  Target: ATXN2; (-) strand; PAM type: NRG; PAM sequence: GGG
gcagagaatcacttgaagct

SEQ ID NO: 26795 - DNA, 20 bp, Artificial Sequence
  Description of Artificial Sequence: Synthetic oligonucleotide
  Target: ATXN2; (-) strand; PAM type: NRG; PAM sequence: TGG
ggcagagaatcacttgaagc

SEQ ID NO: 26796 - DNA, 20 bp, Artificial Sequence
  Description of Artificial Sequence: Synthetic oligonucleotide
  Target: ATXN2; (-) strand; PAM type: NRG; PAM sequence: AAG
ctgaggcagagaatcacttg

SEQ ID NO: 26797 - DNA, 20 bp, Artificial Sequence
  Description of Artificial Sequence: Synthetic oligonucleotide
  Target: ATXN2; (-) strand; PAM type: NRG; PAM sequence: GAG
ctactagggaggctgaggca

SEQ ID NO: 26798 - DNA, 20 bp, Artificial Sequence
  Description of Artificial Sequence: Synthetic oligonucleotide
  Target: ATXN2; (-) strand; PAM type: NRG; PAM sequence: CAG
agctactagggaggctgagg

SEQ ID NO: 26799 - DNA, 20 bp, Artificial Sequence
  Description of Artificial Sequence: Synthetic oligonucleotide
  Target: ATXN2; (-) strand; PAM type: NRG; PAM sequence: AGG
ctcagctactagggaggctg

SEQ ID NO: 26800 - DNA, 20 bp, Artificial Sequence
  Description of Artificial Sequence: Synthetic oligonucleotide
  Target: ATXN2; (-) strand; PAM type: NRG; PAM sequence: GAG
tctcagctactagggaggct

SEQ ID NO: 26801 - DNA, 20 bp, Artificial Sequence
  Description of Artificial Sequence: Synthetic oligonucleotide
  Target: ATXN2; (-) strand; PAM type: NRG; PAM sequence: AGG
tgtaatctcagctactaggg

SEQ ID NO: 26802 - DNA, 20 bp, Artificial Sequence
  Description of Artificial Sequence: Synthetic oligonucleotide
  Target: ATXN2; (-) strand; PAM type: NRG; PAM sequence: GAG
ctgtaatctcagctactagg

SEQ ID NO: 26803 - DNA, 20 bp, Artificial Sequence
  Description of Artificial Sequence: Synthetic oligonucleotide
  Target: ATXN2; (-) strand; PAM type: NRG; PAM sequence: GGG
acctgtaatctcagctacta

SEQ ID NO: 26804 - DNA, 20 bp, Artificial Sequence
  Description of Artificial Sequence: Synthetic oligonucleotide
  Target: ATXN2; (-) strand; PAM type: NRG; PAM sequence: AGG
cacctgtaatctcagctact

SEQ ID NO: 26805 - DNA, 20 bp, Artificial Sequence
  Description of Artificial Sequence: Synthetic oligonucleotide
  Target: ATXN2; (-) strand; PAM type: NRG; PAM sequence: TAG
gcacctgtaatctcagctac

SEQ ID NO: 26806 - DNA, 20 bp, Artificial Sequence
  Description of Artificial Sequence: Synthetic oligonucleotide
  Target: ATXN2; (-) strand; PAM type: NRG; PAM sequence: CAG
gtggcgtgcacctgtaatct

SEQ ID NO: 26807 - DNA, 20 bp, Artificial Sequence
  Description of Artificial Sequence: Synthetic oligonucleotide
  Target: ATXN2; (-) strand; PAM type: NRG; PAM sequence: TGG
caaaaatgagctgggtgtgg

SEQ ID NO: 26808 - DNA, 20 bp, Artificial Sequence
  Description of Artificial Sequence: Synthetic oligonucleotide
  Target: ATXN2; (-) strand; PAM type: NRG; PAM sequence: TGG
atacaaaaatgagctgggtg

SEQ ID NO: 26809 - DNA, 20 bp, Artificial Sequence
  Description of Artificial Sequence: Synthetic oligonucleotide
  Target: ATXN2; (-) strand; PAM type: NRG; PAM sequence: GGG
taaaaatacaaaaatgagct

SEQ ID NO: 26810 - DNA, 20 bp, Artificial Sequence
  Description of Artificial Sequence: Synthetic oligonucleotide
  Target: ATXN2; (-) strand; PAM type: NRG; PAM sequence: TGG
ctaaaaatacaaaaatgagc

SEQ ID NO: 26811 - DNA, 20 bp, Artificial Sequence
  Description of Artificial Sequence: Synthetic oligonucleotide
  Target: ATXN2; (-) strand; PAM type: NRG; PAM sequence: GAG
tctactaaaaatacaaaaat

SEQ ID NO: 26812 - DNA, 20 bp, Artificial Sequence
  Description of Artificial Sequence: Synthetic oligonucleotide
  Target: ATXN2; (-) strand; PAM type: NRG; PAM sequence: TGG
cgagaccagcctgcccaaca

SEQ ID NO: 26813 - DNA, 20 bp, Artificial Sequence
  Description of Artificial Sequence: Synthetic oligonucleotide
  Target: ATXN2; (-) strand; PAM type: NRG; PAM sequence: CAG
tgaggccgggagttcgagac

SEQ ID NO: 26814 - DNA, 20 bp, Artificial Sequence
  Description of Artificial Sequence: Synthetic oligonucleotide
  Target: ATXN2; (-) strand; PAM type: NRG; PAM sequence: GAG
tcatttgaggccgggagttc

SEQ ID NO: 26815 - DNA, 20 bp, Artificial Sequence
  Description of Artificial Sequence: Synthetic oligonucleotide
  Target: ATXN2; (-) strand; PAM type: NRG; PAM sequence: GAG
ggcagatcatttgaggccgg

SEQ ID NO: 26816 - DNA, 20 bp, Artificial Sequence
  Description of Artificial Sequence: Synthetic oligonucleotide
  Target: ATXN2; (-) strand; PAM type: NRG; PAM sequence: GGG
ctggcagatcatttgaggcc

SEQ ID NO: 26817 - DNA, 20 bp, Artificial Sequence
  Description of Artificial Sequence: Synthetic oligonucleotide
  Target: ATXN2; (-) strand; PAM type: NRG; PAM sequence: CGG
gctggcagatcatttgaggc

SEQ ID NO: 26818 - DNA, 20 bp, Artificial Sequence
  Description of Artificial Sequence: Synthetic oligonucleotide
  Target: ATXN2; (-) strand; PAM type: NRG; PAM sequence: AGG
tggggctggcagatcatttg

SEQ ID NO: 26819 - DNA, 20 bp, Artificial Sequence
  Description of Artificial Sequence: Synthetic oligonucleotide
  Target: ATXN2; (-) strand; PAM type: NRG; PAM sequence: GAG
ctggggctggcagatcattt

SEQ ID NO: 26820 - DNA, 20 bp, Artificial Sequence
  Description of Artificial Sequence: Synthetic oligonucleotide
  Target: ATXN2; (-) strand; PAM type: NRG; PAM sequence: CAG
ctttgggaggctggggctgg

SEQ ID NO: 26821 - DNA, 20 bp, Artificial Sequence
  Description of Artificial Sequence: Synthetic oligonucleotide
  Target: ATXN2; (-) strand; PAM type: NRG; PAM sequence: TGG
gcactttgggaggctggggc

SEQ ID NO: 26822 - DNA, 20 bp, Artificial Sequence
  Description of Artificial Sequence: Synthetic oligonucleotide
  Target: ATXN2; (-) strand; PAM type: NRG; PAM sequence: GGG
cccagcactttgggaggctg

SEQ ID NO: 26823 - DNA, 20 bp, Artificial Sequence
  Description of Artificial Sequence: Synthetic oligonucleotide
  Target: ATXN2; (-) strand; PAM type: NRG; PAM sequence: GGG
tcccagcactttgggaggct

SEQ ID NO: 26824 - DNA, 20 bp, Artificial Sequence
  Description of Artificial Sequence: Synthetic oligonucleotide
  Target: ATXN2; (-) strand; PAM type: NRG; PAM sequence: TGG
atcccagcactttgggaggc

SEQ ID NO: 26825 - DNA, 20 bp, Artificial Sequence
  Description of Artificial Sequence: Synthetic oligonucleotide
  Target: ATXN2; (-) strand; PAM type: NRG; PAM sequence: AGG
tgtaatcccagcactttggg

SEQ ID NO: 26826 - DNA, 20 bp, Artificial Sequence
  Description of Artificial Sequence: Synthetic oligonucleotide
  Target: ATXN2; (-) strand; PAM type: NRG; PAM sequence: GAG
ctgtaatcccagcactttgg

SEQ ID NO: 26827 - DNA, 20 bp, Artificial Sequence
  Description of Artificial Sequence: Synthetic oligonucleotide
  Target: ATXN2; (-) strand; PAM type: NRG; PAM sequence: GGG
ctctgtaatcccagcacttt

SEQ ID NO: 26828 - DNA, 20 bp, Artificial Sequence
  Description of Artificial Sequence: Synthetic oligonucleotide
  Target: ATXN2; (-) strand; PAM type: NRG; PAM sequence: TGG
cctctgtaatcccagcactt

SEQ ID NO: 26829 - DNA, 20 bp, Artificial Sequence
  Description of Artificial Sequence: Synthetic oligonucleotide
  Target: ATXN2; (-) strand; PAM type: NRG; PAM sequence: CAG
ggctcatgcctctgtaatcc

SEQ ID NO: 26830 - DNA, 20 bp, Artificial Sequence
  Description of Artificial Sequence: Synthetic oligonucleotide
  Target: ATXN2; (-) strand; PAM type: NRG; PAM sequence: TGG
tttgtgtgggccgggtgtgg

SEQ ID NO: 26831 - DNA, 20 bp, Artificial Sequence
  Description of Artificial Sequence: Synthetic oligonucleotide
  Target: ATXN2; (-) strand; PAM type: NRG; PAM sequence: TGG
gtttttgtgtgggccgggtg

SEQ ID NO: 26832 - DNA, 20 bp, Artificial Sequence
  Description of Artificial Sequence: Synthetic oligonucleotide
  Target: ATXN2; (-) strand; PAM type: NRG; PAM sequence: GGG
ttaaagtttttgtgtgggcc

SEQ ID NO: 26833 - DNA, 20 bp, Artificial Sequence
  Description of Artificial Sequence: Synthetic oligonucleotide
  Target: ATXN2; (-) strand; PAM type: NRG; PAM sequence: CGG
tttaaagtttttgtgtgggc

SEQ ID NO: 26834 - DNA, 20 bp, Artificial Sequence
  Description of Artificial Sequence: Synthetic oligonucleotide
  Target: ATXN2; (-) strand; PAM type: NRG; PAM sequence: GGG
gacttttaaagtttttgtgt

SEQ ID NO: 26835 - DNA, 20 bp, Artificial Sequence
  Description of Artificial Sequence: Synthetic oligonucleotide
  Target: ATXN2; (-) strand; PAM type: NRG; PAM sequence: TGG
tgacttttaaagtttttgtg

SEQ ID NO: 26836 - DNA, 20 bp, Artificial Sequence
  Description of Artificial Sequence: Synthetic oligonucleotide
  Target: ATXN2; (-) strand; PAM type: NRG; PAM sequence: AAG
gctgcgaacagtgactttta

SEQ ID NO: 26837 - DNA, 20 bp, Artificial Sequence
  Description of Artificial Sequence: Synthetic oligonucleotide
  Target: ATXN2; (-) strand; PAM type: NRG; PAM sequence: CAG
atacataatcctgctgcgaa

SEQ ID NO: 26838 - DNA, 20 bp, Artificial Sequence
  Description of Artificial Sequence: Synthetic oligonucleotide
  Target: ATXN2; (-) strand; PAM type: NRG; PAM sequence: TGG
tttgtttattcatcagttgg

SEQ ID NO: 26839 - DNA, 20 bp, Artificial Sequence
  Description of Artificial Sequence: Synthetic oligonucleotide
  Target: ATXN2; (-) strand; PAM type: NRG; PAM sequence: TGG
cattttgtttattcatcagt

SEQ ID NO: 26840 - DNA, 20 bp, Artificial Sequence
  Description of Artificial Sequence: Synthetic oligonucleotide
  Target: ATXN2; (-) strand; PAM type: NRG; PAM sequence: CAG
actacattttgtttattcat

SEQ ID NO: 26841 - DNA, 20 bp, Artificial Sequence
  Description of Artificial Sequence: Synthetic oligonucleotide
  Target: ATXN2; (-) strand; PAM type: NRG; PAM sequence: AGG
attccattatacagttacac

SEQ ID NO: 26842 - DNA, 20 bp, Artificial Sequence
  Description of Artificial Sequence: Synthetic oligonucleotide
  Target: ATXN2; (-) strand; PAM type: NRG; PAM sequence: CAG
tattccattatacagttaca

SEQ ID NO: 26843 - DNA, 20 bp, Artificial Sequence
  Description of Artificial Sequence: Synthetic oligonucleotide
  Target: ATXN2; (-) strand; PAM type: NRG; PAM sequence: CAG
tggccaaatattccattata

SEQ ID NO: 26844 - DNA, 20 bp, Artificial Sequence
  Description of Artificial Sequence: Synthetic oligonucleotide
  Target: ATXN2; (-) strand; PAM type: NRG; PAM sequence: TGG
tagtacttctttctttttca

SEQ ID NO: 26845 - DNA, 20 bp, Artificial Sequence
  Description of Artificial Sequence: Synthetic oligonucleotide
  Target: ATXN2; (-) strand; PAM type: NRG; PAM sequence: TAG
ttccatgctgtagcatgtat

SEQ ID NO: 26846 - DNA, 20 bp, Artificial Sequence
  Description of Artificial Sequence: Synthetic oligonucleotide
  Target: ATXN2; (-) strand; PAM type: NRG; PAM sequence: TAG
agtatgtttcttccatgctg

SEQ ID NO: 26847 - DNA, 20 bp, Artificial Sequence
  Description of Artificial Sequence: Synthetic oligonucleotide
  Target: ATXN2; (-) strand; PAM type: NRG; PAM sequence: TAG
tatgataggcttgtttcact

SEQ ID NO: 26848 - DNA, 20 bp, Artificial Sequence
  Description of Artificial Sequence: Synthetic oligonucleotide
  Target: ATXN2; (-) strand; PAM type: NRG; PAM sequence: AGG
ctggccatatatattatgat

SEQ ID NO: 26849 - DNA, 20 bp, Artificial Sequence
  Description of Artificial Sequence: Synthetic oligonucleotide
  Target: ATXN2; (-) strand; PAM type: NRG; PAM sequence: TAG
tctggccatatatattatga

SEQ ID NO: 26850 - DNA, 20 bp, Artificial Sequence
  Description of Artificial Sequence: Synthetic oligonucleotide
  Target: ATXN2; (-) strand; PAM type: NRG; PAM sequence: TGG
cagccatgagccaccgcatc

SEQ ID NO: 26851 - DNA, 20 bp, Artificial Sequence
  Description of Artificial Sequence: Synthetic oligonucleotide
  Target: ATXN2; (-) strand; PAM type: NRG; PAM sequence: GAG
agtgctgggattgcagccat

SEQ ID NO: 26852 - DNA, 20 bp, Artificial Sequence
  Description of Artificial Sequence: Synthetic oligonucleotide
  Target: ATXN2; (-) strand; PAM type: NRG; PAM sequence: CAG
ctcccaaagtgctgggattg

SEQ ID NO: 26853 - DNA, 20 bp, Artificial Sequence
  Description of Artificial Sequence: Synthetic oligonucleotide
  Target: ATXN2; (-) strand; PAM type: NRG; PAM sequence: GGG
cctcggactcccaaagtgct

SEQ ID NO: 26854 - DNA, 20 bp, Artificial Sequence
  Description of Artificial Sequence: Synthetic oligonucleotide
  Target: ATXN2; (-) strand; PAM type: NRG; PAM sequence: TGG
acctcggactcccaaagtgc

SEQ ID NO: 26855 - DNA, 20 bp, Artificial Sequence
  Description of Artificial Sequence: Synthetic oligonucleotide
  Target: ATXN2; (-) strand; PAM type: NRG; PAM sequence: AAG
ctgcccacctcggactccca

SEQ ID NO: 26856 - DNA, 20 bp, Artificial Sequence
  Description of Artificial Sequence: Synthetic oligonucleotide
  Target: ATXN2; (-) strand; PAM type: NRG; PAM sequence: CGG
ctcaagtgatctgcccacct

SEQ ID NO: 26857 - DNA, 20 bp, Artificial Sequence
  Description of Artificial Sequence: Synthetic oligonucleotide
  Target: ATXN2; (-) strand; PAM type: NRG; PAM sequence: AAG
ggtctcgaattcctgacctc

SEQ ID NO: 26858 - DNA, 20 bp, Artificial Sequence
  Description of Artificial Sequence: Synthetic oligonucleotide
  Target: ATXN2; (-) strand; PAM type: NRG; PAM sequence: TGG
ttgcaccatgttggccaggc

SEQ ID NO: 26859 - DNA, 20 bp, Artificial Sequence
  Description of Artificial Sequence: Synthetic oligonucleotide
  Target: ATXN2; (-) strand; PAM type: NRG; PAM sequence: AGG
ggggttgcaccatgttggcc

SEQ ID NO: 26860 - DNA, 20 bp, Artificial Sequence
  Description of Artificial Sequence: Synthetic oligonucleotide
  Target: ATXN2; (-) strand; PAM type: NRG; PAM sequence: CAG
cggggttgcaccatgttggc

SEQ ID NO: 26861 - DNA, 20 bp, Artificial Sequence
  Description of Artificial Sequence: Synthetic oligonucleotide
  Target: ATXN2; (-) strand; PAM type: NRG; PAM sequence: TGG
aagacggggttgcaccatgt

SEQ ID NO: 26862 - DNA, 20 bp, Artificial Sequence
  Description of Artificial Sequence: Synthetic oligonucleotide
  Target: ATXN2; (-) strand; PAM type: NRG; PAM sequence: GGG
ttatatttttagtaaagacg

SEQ ID NO: 26863 - DNA, 20 bp, Artificial Sequence
  Description of Artificial Sequence: Synthetic oligonucleotide
  Target: ATXN2; (-) strand; PAM type: NRG; PAM sequence: GGG
tttatatttttagtaaagac

SEQ ID NO: 26864 - DNA, 20 bp, Artificial Sequence
  Description of Artificial Sequence: Synthetic oligonucleotide
  Target: ATXN2; (-) strand; PAM type: NRG; PAM sequence: CGG
ttttatatttttagtaaaga

SEQ ID NO: 26865 - DNA, 20 bp, Artificial Sequence
  Description of Artificial Sequence: Synthetic oligonucleotide
  Target: ATXN2; (-) strand; PAM type: NRG; PAM sequence: AAG
ctaattttatatttttagta

SEQ ID NO: 26866 - DNA, 20 bp, Artificial Sequence
  Description of Artificial Sequence: Synthetic oligonucleotide
  Target: ATXN2; (-) strand; PAM type: NRG; PAM sequence: TAG
acctactaattttatatttt

SEQ ID NO: 26867 - DNA, 20 bp, Artificial Sequence
  Description of Artificial Sequence: Synthetic oligonucleotide
  Target: ATXN2; (-) strand; PAM type: NRG; PAM sequence: AGG
tcttgagtagctgggactat

SEQ ID NO: 26868 - DNA, 20 bp, Artificial Sequence
  Description of Artificial Sequence: Synthetic oligonucleotide
  Target: ATXN2; (-) strand; PAM type: NRG; PAM sequence: TAG
ctcttgagtagctgggacta

SEQ ID NO: 26869 - DNA, 20 bp, Artificial Sequence
  Description of Artificial Sequence: Synthetic oligonucleotide
  Target: ATXN2; (-) strand; PAM type: NRG; PAM sequence: GGG
cctcagcctcttgagtagct

SEQ ID NO: 26870 - DNA, 20 bp, Artificial Sequence
  Description of Artificial Sequence: Synthetic oligonucleotide
  Target: ATXN2; (-) strand; PAM type: NRG; PAM sequence: TGG
gcctcagcctcttgagtagc

SEQ ID NO: 26871 - DNA, 20 bp, Artificial Sequence
  Description of Artificial Sequence: Synthetic oligonucleotide
  Target: ATXN2; (-) strand; PAM type: NRG; PAM sequence: TAG
tcctgcctcagcctcttgag

SEQ ID NO: 26872 - DNA, 20 bp, Artificial Sequence
  Description of Artificial Sequence: Synthetic oligonucleotide
  Target: ATXN2; (-) strand; PAM type: NRG; PAM sequence: GAG
ttctcctgcctcagcctctt

SEQ ID NO: 26873 - DNA, 20 bp, Artificial Sequence
  Description of Artificial Sequence: Synthetic oligonucleotide
  Target: ATXN2; (-) strand; PAM type: NRG; PAM sequence: CAG
ttgaagcgattctcctgcct

SEQ ID NO: 26874 - DNA, 20 bp, Artificial Sequence
  Description of Artificial Sequence: Synthetic oligonucleotide
  Target: ATXN2; (-) strand; PAM type: NRG; PAM sequence: AAG
atcctctgcctcccaggttg

SEQ ID NO: 26875 - DNA, 20 bp, Artificial Sequence
  Description of Artificial Sequence: Synthetic oligonucleotide
  Target: ATXN2; (-) strand; PAM type: NRG; PAM sequence: AGG
cactgcatcctctgcctccc

SEQ ID NO: 26876 - DNA, 20 bp, Artificial Sequence
  Description of Artificial Sequence: Synthetic oligonucleotide
  Target: ATXN2; (-) strand; PAM type: NRG; PAM sequence: CAG
tcactgcatcctctgcctcc

SEQ ID NO: 26877 - DNA, 20 bp, Artificial Sequence
  Description of Artificial Sequence: Synthetic oligonucleotide
  Target: ATXN2; (-) strand; PAM type: NRG; PAM sequence: CAG
ggagcgcagtggcatgattg

SEQ ID NO: 26878 - DNA, 20 bp, Artificial Sequence
  Description of Artificial Sequence: Synthetic oligonucleotide
  Target: ATXN2; (-) strand; PAM type: NRG; PAM sequence: TGG
tcgcccaggctggagcgcag

SEQ ID NO: 26879 - DNA, 20 bp, Artificial Sequence
  Description of Artificial Sequence: Synthetic oligonucleotide
  Target: ATXN2; (-) strand; PAM type: NRG; PAM sequence: CAG
gtgtcgcccaggctggagcg

SEQ ID NO: 26880 - DNA, 20 bp, Artificial Sequence
  Description of Artificial Sequence: Synthetic oligonucleotide
  Target: ATXN2; (-) strand; PAM type: NRG; PAM sequence: GAG
tcactgtgtcgcccaggctg

SEQ ID NO: 26881 - DNA, 20 bp, Artificial Sequence
  Description of Artificial Sequence: Synthetic oligonucleotide
  Target: ATXN2; (-) strand; PAM type: NRG; PAM sequence: TGG
tctcactgtgtcgcccaggc

SEQ ID NO: 26882 - DNA, 20 bp, Artificial Sequence
  Description of Artificial Sequence: Synthetic oligonucleotide
  Target: ATXN2; (-) strand; PAM type: NRG; PAM sequence: AGG
agagtctcactgtgtcgccc

SEQ ID NO: 26883 - DNA, 20 bp, Artificial Sequence
  Description of Artificial Sequence: Synthetic oligonucleotide
  Target: ATXN2; (-) strand; PAM type: NRG; PAM sequence: CAG
cagagtctcactgtgtcgcc

SEQ ID NO: 26884 - DNA, 20 bp, Artificial Sequence
  Description of Artificial Sequence: Synthetic oligonucleotide
  Target: ATXN2; (-) strand; PAM type: NRG; PAM sequence: GAG
tcttttttttttttgaaaca

SEQ ID NO: 26885 - DNA, 20 bp, Artificial Sequence
  Description of Artificial Sequence: Synthetic oligonucleotide
  Target: ATXN2; (-) strand; PAM type: NRG; PAM sequence: CAG
tttcttttttttttttgaaa

SEQ ID NO: 26886 - DNA, 20 bp, Artificial Sequence
  Description of Artificial Sequence: Synthetic oligonucleotide
  Target: ATXN2; (-) strand; PAM type: NRG; PAM sequence: TAG
taatggaatcatataatata

SEQ ID NO: 26887 - DNA, 20 bp, Artificial Sequence
  Description of Artificial Sequence: Synthetic oligonucleotide
  Target: ATXN2; (-) strand; PAM type: NRG; PAM sequence: TGG
ttctggacattgcgtattaa

SEQ ID NO: 26888 - DNA, 20 bp, Artificial Sequence
  Description of Artificial Sequence: Synthetic oligonucleotide
  Target: ATXN2; (-) strand; PAM type: NRG; PAM sequence: TGG
cttcataggtttgcccattc

SEQ ID NO: 26889 - DNA, 20 bp, Artificial Sequence
  Description of Artificial Sequence: Synthetic oligonucleotide
  Target: ATXN2; (-) strand; PAM type: NRG; PAM sequence: AGG
tattgatttattgtcttcat

SEQ ID NO: 26890 - DNA, 20 bp, Artificial Sequence
  Description of Artificial Sequence: Synthetic oligonucleotide
  Target: ATXN2; (-) strand; PAM type: NRG; PAM sequence: TAG
ctattgatttattgtcttca

SEQ ID NO: 26891 - DNA, 20 bp, Artificial Sequence
  Description of Artificial Sequence: Synthetic oligonucleotide
  Target: ATXN2; (-) strand; PAM type: NRG; PAM sequence: AGG
tttcaattttccccagctcc

SEQ ID NO: 26892 - DNA, 20 bp, Artificial Sequence
  Description of Artificial Sequence: Synthetic oligonucleotide
  Target: ATXN2; (-) strand; PAM type: NRG; PAM sequence: CAG
gtttcaattttccccagctc

SEQ ID NO: 26893 - DNA, 20 bp, Artificial Sequence
  Description of Artificial Sequence: Synthetic oligonucleotide
  Target: ATXN2; (-) strand; PAM type: NRG; PAM sequence: CAG
ctgtttgtttcaattttccc

SEQ ID NO: 26894 - DNA, 20 bp, Artificial Sequence
  Description of Artificial Sequence: Synthetic oligonucleotide
  Target: ATXN2; (-) strand; PAM type: NRG; PAM sequence: CAG
agaaactctgaaccccttag

SEQ ID NO: 26895 - DNA, 20 bp, Artificial Sequence
  Description of Artificial Sequence: Synthetic oligonucleotide
  Target: ATXN2; (-) strand; PAM type: NRG; PAM sequence: TAG
aaaagaaactctgaacccct

SEQ ID NO: 26896 - DNA, 20 bp, Artificial Sequence
  Description of Artificial Sequence: Synthetic oligonucleotide
  Target: ATXN2; (-) strand; PAM type: NRG; PAM sequence: AAG
tacattttcatcaccctgaa

SEQ ID NO: 26897 - DNA, 20 bp, Artificial Sequence
  Description of Artificial Sequence: Synthetic oligonucleotide
  Target: ATXN2; (-) strand; PAM type: NRG; PAM sequence: CAG
cattttttaaaatatattca

SEQ ID NO: 26898 - DNA, 20 bp, Artificial Sequence
  Description of Artificial Sequence: Synthetic oligonucleotide
  Target: ATXN2; (-) strand; PAM type: NRG; PAM sequence: CAG
caggcatgaacctctgctcc

SEQ ID NO: 26899 - DNA, 20 bp, Artificial Sequence
  Description of Artificial Sequence: Synthetic oligonucleotide
  Target: ATXN2; (-) strand; PAM type: NRG; PAM sequence: AGG
tcccaaagtgctgggattac

SEQ ID NO: 26900 - DNA, 20 bp, Artificial Sequence
  Description of Artificial Sequence: Synthetic oligonucleotide
  Target: ATXN2; (-) strand; PAM type: NRG; PAM sequence: CAG
ctcccaaagtgctgggatta

SEQ ID NO: 26901 - DNA, 20 bp, Artificial Sequence
  Description of Artificial Sequence: Synthetic oligonucleotide
  Target: ATXN2; (-) strand; PAM type: NRG; PAM sequence: GGG
ccccagcctcccaaagtgct

SEQ ID NO: 26902 - DNA, 20 bp, Artificial Sequence
  Description of Artificial Sequence: Synthetic oligonucleotide
  Target: ATXN2; (-) strand; PAM type: NRG; PAM sequence: TGG
gccccagcctcccaaagtgc

SEQ ID NO: 26903 - DNA, 20 bp, Artificial Sequence
  Description of Artificial Sequence: Synthetic oligonucleotide
  Target: ATXN2; (-) strand; PAM type: NRG; PAM sequence: AAG
cctcctgccccagcctccca

SEQ ID NO: 26904 - DNA, 20 bp, Artificial Sequence
  Description of Artificial Sequence: Synthetic oligonucleotide
  Target: ATXN2; (-) strand; PAM type: NRG; PAM sequence: CAG
ctcaaatgatcctcctgccc

SEQ ID NO: 26905 - DNA, 20 bp, Artificial Sequence
  Description of Artificial Sequence: Synthetic oligonucleotide
  Target: ATXN2; (-) strand; PAM type: NRG; PAM sequence: GGG
ccaggctggtctcaaactct

SEQ ID NO: 26906 - DNA, 20 bp, Artificial Sequence
  Description of Artificial Sequence: Synthetic oligonucleotide
  Target: ATXN2; (-) strand; PAM type: NRG; PAM sequence: TGG
cccaggctggtctcaaactc

SEQ ID NO: 26907 - DNA, 20 bp, Artificial Sequence
  Description of Artificial Sequence: Synthetic oligonucleotide
  Target: ATXN2; (-) strand; PAM type: NRG; PAM sequence: TGG
tctcattatgttgcccaggc

SEQ ID NO: 26908 - DNA, 20 bp, Artificial Sequence
  Description of Artificial Sequence: Synthetic oligonucleotide
  Target: ATXN2; (-) strand; PAM type: NRG; PAM sequence: AGG
gaggtctcattatgttgccc

SEQ ID NO: 26909 - DNA, 20 bp, Artificial Sequence
  Description of Artificial Sequence: Synthetic oligonucleotide
  Target: ATXN2; (-) strand; PAM type: NRG; PAM sequence: CAG
tgaggtctcattatgttgcc

SEQ ID NO: 26910 - DNA, 20 bp, Artificial Sequence
  Description of Artificial Sequence: Synthetic oligonucleotide
  Target: ATXN2; (-) strand; PAM type: NRG; PAM sequence: AGG
ttgttattttttgtttgatg

SEQ ID NO: 26911 - DNA, 20 bp, Artificial Sequence
  Description of Artificial Sequence: Synthetic oligonucleotide
  Target: ATXN2; (-) strand; PAM type: NRG; PAM sequence: GAG
gttgttattttttgtttgat

SEQ ID NO: 26912 - DNA, 20 bp, Artificial Sequence
  Description of Artificial Sequence: Synthetic oligonucleotide
  Target: ATXN2; (-) strand; PAM type: NRG; PAM sequence: TGG
cagatgtgtatcaccactcc

SEQ ID NO: 26913 - DNA, 20 bp, Artificial Sequence
  Description of Artificial Sequence: Synthetic oligonucleotide
  Target: ATXN2; (-) strand; PAM type: NRG; PAM sequence: CAG
tcctgattaagctgggactg

SEQ ID NO: 26914 - DNA, 20 bp, Artificial Sequence
  Description of Artificial Sequence: Synthetic oligonucleotide
  Target: ATXN2; (-) strand; PAM type: NRG; PAM sequence: GGG
cttagcctcctgattaagct

SEQ ID NO: 26915 - DNA, 20 bp, Artificial Sequence
  Description of Artificial Sequence: Synthetic oligonucleotide
  Target: ATXN2; (-) strand; PAM type: NRG; PAM sequence: TGG
ccttagcctcctgattaagc

SEQ ID NO: 26916 - DNA, 20 bp, Artificial Sequence
  Description of Artificial Sequence: Synthetic oligonucleotide
  Target: ATXN2; (-) strand; PAM type: NRG; PAM sequence: AAG
ttcaccttagcctcctgatt

SEQ ID NO: 26917 - DNA, 20 bp, Artificial Sequence
  Description of Artificial Sequence: Synthetic oligonucleotide
  Target: ATXN2; (-) strand; PAM type: NRG; PAM sequence: TAG
tgggttcaggtgattcacct

SEQ ID NO: 26918 - DNA, 20 bp, Artificial Sequence
  Description of Artificial Sequence: Synthetic oligonucleotide
  Target: ATXN2; (-) strand; PAM type: NRG; PAM sequence: AGG
aacctcaaactcatgggttc

SEQ ID NO: 26919 - DNA, 20 bp, Artificial Sequence
  Description of Artificial Sequence: Synthetic oligonucleotide
  Target: ATXN2; (-) strand; PAM type: NRG; PAM sequence: CAG
taacctcaaactcatgggtt

SEQ ID NO: 26920 - DNA, 20 bp, Artificial Sequence
  Description of Artificial Sequence: Synthetic oligonucleotide
  Target: ATXN2; (-) strand; PAM type: NRG; PAM sequence: GGG
caccataacctcaaactcat

SEQ ID NO: 26921 - DNA, 20 bp, Artificial Sequence
  Description of Artificial Sequence: Synthetic oligonucleotide
  Target: ATXN2; (-) strand; PAM type: NRG; PAM sequence: TGG
tcaccataacctcaaactca

SEQ ID NO: 26922 - DNA, 20 bp, Artificial Sequence
  Description of Artificial Sequence: Synthetic oligonucleotide
  Target: ATXN2; (-) strand; PAM type: NRG; PAM sequence: TAG
ggagtgcagtggcgccatcg

SEQ ID NO: 26923 - DNA, 20 bp, Artificial Sequence
  Description of Artificial Sequence: Synthetic oligonucleotide
  Target: ATXN2; (-) strand; PAM type: NRG; PAM sequence: TGG
ttgtccaggctggagtgcag

SEQ ID NO: 26924 - DNA, 20 bp, Artificial Sequence
  Description of Artificial Sequence: Synthetic oligonucleotide
  Target: ATXN2; (-) strand; PAM type: NRG; PAM sequence: CAG
ttgttgtccaggctggagtg

SEQ ID NO: 26925 - DNA, 20 bp, Artificial Sequence
  Description of Artificial Sequence: Synthetic oligonucleotide
  Target: ATXN2; (-) strand; PAM type: NRG; PAM sequence: GAG
tcattttgttgtccaggctg

SEQ ID NO: 26926 - DNA, 20 bp, Artificial Sequence
  Description of Artificial Sequence: Synthetic oligonucleotide
  Target: ATXN2; (-) strand; PAM type: NRG; PAM sequence: TGG
tctcattttgttgtccaggc

SEQ ID NO: 26927 - DNA, 20 bp, Artificial Sequence
  Description of Artificial Sequence: Synthetic oligonucleotide
  Target: ATXN2; (-) strand; PAM type: NRG; PAM sequence: AGG
agggtctcattttgttgtcc

SEQ ID NO: 26928 - DNA, 20 bp, Artificial Sequence
  Description of Artificial Sequence: Synthetic oligonucleotide
  Target: ATXN2; (-) strand; PAM type: NRG; PAM sequence: CAG
cagggtctcattttgttgtc

SEQ ID NO: 26929 - DNA, 20 bp, Artificial Sequence
  Description of Artificial Sequence: Synthetic oligonucleotide
  Target: ATXN2; (-) strand; PAM type: NRG; PAM sequence: GGG
ttttcttctattttgagaca

SEQ ID NO: 26930 - DNA, 20 bp, Artificial Sequence
  Description of Artificial Sequence: Synthetic oligonucleotide
  Target: ATXN2; (-) strand; PAM type: NRG; PAM sequence: AGG
tttttcttctattttgagac

SEQ ID NO: 26931 - DNA, 20 bp, Artificial Sequence
  Description of Artificial Sequence: Synthetic oligonucleotide
  Target: ATXN2; (-) strand; PAM type: NRG; PAM sequence: CAG
ttttttcttctattttgaga

SEQ ID NO: 26932 - DNA, 20 bp, Artificial Sequence
  Description of Artificial Sequence: Synthetic oligonucleotide
  Target: ATXN2; (-) strand; PAM type: NRG; PAM sequence: GAG
ttttttttttcttctatttt

SEQ ID NO: 26933 - DNA, 20 bp, Artificial Sequence
  Description of Artificial Sequence: Synthetic oligonucleotide
  Target: ATXN2; (-) strand; PAM type: NRG; PAM sequence: AGG
tttgagatagggagaaaatt

SEQ ID NO: 26934 - DNA, 20 bp, Artificial Sequence
  Description of Artificial Sequence: Synthetic oligonucleotide
  Target: ATXN2; (-) strand; PAM type: NRG; PAM sequence: TAG
atttgagatagggagaaaat

SEQ ID NO: 26935 - DNA, 20 bp, Artificial Sequence
  Description of Artificial Sequence: Synthetic oligonucleotide
  Target: ATXN2; (-) strand; PAM type: NRG; PAM sequence: GAG
aatcattcatttgagatagg

SEQ ID NO: 26936 - DNA, 20 bp, Artificial Sequence
  Description of Artificial Sequence: Synthetic oligonucleotide
  Target: ATXN2; (-) strand; PAM type: NRG; PAM sequence: GGG
ttaatcattcatttgagata

SEQ ID NO: 26937 - DNA, 20 bp, Artificial Sequence
  Description of Artificial Sequence: Synthetic oligonucleotide
  Target: ATXN2; (-) strand; PAM type: NRG; PAM sequence: AGG
tttaatcattcatttgagat

SEQ ID NO: 26938 - DNA, 20 bp, Artificial Sequence
  Description of Artificial Sequence: Synthetic oligonucleotide
  Target: ATXN2; (-) strand; PAM type: NRG; PAM sequence: TAG
atttaatcattcatttgaga

SEQ ID NO: 26939 - DNA, 20 bp, Artificial Sequence
  Description of Artificial Sequence: Synthetic oligonucleotide
  Target: ATXN2; (-) strand; PAM type: NRG; PAM sequence: GAG
gaaaatttaatcattcattt

SEQ ID NO: 26940 - DNA, 20 bp, Artificial Sequence
  Description of Artificial Sequence: Synthetic oligonucleotide
  Target: ATXN2; (-) strand; PAM type: NRG; PAM sequence: TAG
atctcactttatcgtagtgc

SEQ ID NO: 26941 - DNA, 20 bp, Artificial Sequence
  Description of Artificial Sequence: Synthetic oligonucleotide
  Target: ATXN2; (-) strand; PAM type: NRG; PAM sequence: TAG
tattttatctcactttatcg

SEQ ID NO: 26942 - DNA, 20 bp, Artificial Sequence
  Description of Artificial Sequence: Synthetic oligonucleotide
  Target: ATXN2; (-) strand; PAM type: NRG; PAM sequence: GGG
taggatatatttttctctta

SEQ ID NO: 26943 - DNA, 20 bp, Artificial Sequence
  Description of Artificial Sequence: Synthetic oligonucleotide
  Target: ATXN2; (-) strand; PAM type: NRG; PAM sequence: AGG
ataggatatatttttctctt

SEQ ID NO: 26944 - DNA, 20 bp, Artificial Sequence
  Description of Artificial Sequence: Synthetic oligonucleotide
  Target: ATXN2; (-) strand; PAM type: NRG; PAM sequence: TAG
aataggatatatttttctct

SEQ ID NO: 26945 - DNA, 20 bp, Artificial Sequence
  Description of Artificial Sequence: Synthetic oligonucleotide
  Target: ATXN2; (-) strand; PAM type: NRG; PAM sequence: AGG
ctgctttttattacttaaat

SEQ ID NO: 26946 - DNA, 20 bp, Artificial Sequence
  Description of Artificial Sequence: Synthetic oligonucleotide
  Target: ATXN2; (-) strand; PAM type: NRG; PAM sequence: TAG
actgctttttattacttaaa

SEQ ID NO: 26947 - DNA, 20 bp, Artificial Sequence
  Description of Artificial Sequence: Synthetic oligonucleotide
  Target: ATXN2; (-) strand; PAM type: NRG; PAM sequence: AGG
acaaacagaatgtattagta

SEQ ID NO: 26948 - DNA, 20 bp, Artificial Sequence
  Description of Artificial Sequence: Synthetic oligonucleotide
  Target: ATXN2; (-) strand; PAM type: NRG; PAM sequence: AAG
cacaaacagaatgtattagt

SEQ ID NO: 26949 - DNA, 20 bp, Artificial Sequence
  Description of Artificial Sequence: Synthetic oligonucleotide
  Target: ATXN2; (-) strand; PAM type: NRG; PAM sequence: TAG
ctctcacaaacagaatgtat

SEQ ID NO: 26950 - DNA, 20 bp, Artificial Sequence
  Description of Artificial Sequence: Synthetic oligonucleotide
  Target: ATXN2; (-) strand; PAM type: NRG; PAM sequence: CAG
caatttgtacctctcacaaa

SEQ ID NO: 26951 - DNA, 20 bp, Artificial Sequence
  Description of Artificial Sequence: Synthetic oligonucleotide
  Target: ATXN2; (-) strand; PAM type: NRG; PAM sequence: AAG
tttcccttgaattttaactg

SEQ ID NO: 26952 - DNA, 20 bp, Artificial Sequence
  Description of Artificial Sequence: Synthetic oligonucleotide
  Target: ATXN2; (-) strand; PAM type: NRG; PAM sequence: AAG
ttaatgggcttagtcaaact

SEQ ID NO: 26953 - DNA, 20 bp, Artificial Sequence
  Description of Artificial Sequence: Synthetic oligonucleotide
  Target: ATXN2; (-) strand; PAM type: NRG; PAM sequence: TAG
tttatcttatttaatgggct

SEQ ID NO: 26954 - DNA, 20 bp, Artificial Sequence
  Description of Artificial Sequence: Synthetic oligonucleotide
  Target: ATXN2; (-) strand; PAM type: NRG; PAM sequence: GGG
tgccttttatcttatttaat

SEQ ID NO: 26955 - DNA, 20 bp, Artificial Sequence
  Description of Artificial Sequence: Synthetic oligonucleotide
  Target: ATXN2; (-) strand; PAM type: NRG; PAM sequence: TGG
gtgccttttatcttatttaa

SEQ ID NO: 26956 - DNA, 20 bp, Artificial Sequence
  Description of Artificial Sequence: Synthetic oligonucleotide
  Target: ATXN2; (-) strand; PAM type: NRG; PAM sequence: CAG
aaaaaaaaggttactaattg

SEQ ID NO: 26957 - DNA, 20 bp, Artificial Sequence
  Description of Artificial Sequence: Synthetic oligonucleotide
  Target: ATXN2; (-) strand; PAM type: NRG; PAM sequence: AGG
ccctggtttcaaaaaaaaaa

SEQ ID NO: 26958 - DNA, 20 bp, Artificial Sequence
  Description of Artificial Sequence: Synthetic oligonucleotide
  Target: ATXN2; (-) strand; PAM type: NRG; PAM sequence: AAG
accctggtttcaaaaaaaaa

SEQ ID NO: 26959 - DNA, 20 bp, Artificial Sequence
  Description of Artificial Sequence: Synthetic oligonucleotide
  Target: ATXN2; (-) strand; PAM type: NRG; PAM sequence: TGG
cagtgagccaagtgagaccc

SEQ ID NO: 26960 - DNA, 20 bp, Artificial Sequence
  Description of Artificial Sequence: Synthetic oligonucleotide
  Target: ATXN2; (-) strand; PAM type: NRG; PAM sequence: GAG
gaggctgcagtgagccaagt

SEQ ID NO: 26961 - DNA, 20 bp, Artificial Sequence
  Description of Artificial Sequence: Synthetic oligonucleotide
  Target: ATXN2; (-) strand; PAM type: NRG; PAM sequence: AAG
gattgaggctgcagtgagcc

SEQ ID NO: 26962 - DNA, 20 bp, Artificial Sequence
  Description of Artificial Sequence: Synthetic oligonucleotide
  Target: ATXN2; (-) strand; PAM type: NRG; PAM sequence: GAG
agggagattgaggctgcagt

SEQ ID NO: 26963 - DNA, 20 bp, Artificial Sequence
  Description of Artificial Sequence: Synthetic oligonucleotide
  Target: ATXN2; (-) strand; PAM type: NRG; PAM sequence: CAG
gcgcagggagattgaggctg

SEQ ID NO: 26964 - DNA, 20 bp, Artificial Sequence
  Description of Artificial Sequence: Synthetic oligonucleotide
  Target: ATXN2; (-) strand; PAM type: NRG; PAM sequence: AGG
atctgagcgcagggagattg

SEQ ID NO: 26965 - DNA, 20 bp, Artificial Sequence
  Description of Artificial Sequence: Synthetic oligonucleotide
  Target: ATXN2; (-) strand; PAM type: NRG; PAM sequence: GAG
catctgagcgcagggagatt

SEQ ID NO: 26966 - DNA, 20 bp, Artificial Sequence
  Description of Artificial Sequence: Synthetic oligonucleotide
  Target: ATXN2; (-) strand; PAM type: NRG; PAM sequence: GAG
gaggatcatctgagcgcagg

SEQ ID NO: 26967 - DNA, 20 bp, Artificial Sequence
  Description of Artificial Sequence: Synthetic oligonucleotide
  Target: ATXN2; (-) strand; PAM type: NRG; PAM sequence: GGG
gagaggatcatctgagcgca

SEQ ID NO: 26968 - DNA, 20 bp, Artificial Sequence
  Description of Artificial Sequence: Synthetic oligonucleotide
  Target: ATXN2; (-) strand; PAM type: NRG; PAM sequence: AGG
tgagaggatcatctgagcgc

SEQ ID NO: 26969 - DNA, 20 bp, Artificial Sequence
  Description of Artificial Sequence: Synthetic oligonucleotide
  Target: ATXN2; (-) strand; PAM type: NRG; PAM sequence: CAG
gtgagaggatcatctgagcg

SEQ ID NO: 26970 - DNA, 20 bp, Artificial Sequence
  Description of Artificial Sequence: Synthetic oligonucleotide
  Target: ATXN2; (-) strand; PAM type: NRG; PAM sequence: GAG
cagaggtgagaggatcatct

SEQ ID NO: 26971 - DNA, 20 bp, Artificial Sequence
  Description of Artificial Sequence: Synthetic oligonucleotide
  Target: ATXN2; (-) strand; PAM type: NRG; PAM sequence: AGG
attcgggtggcagaggtgag

SEQ ID NO: 26972 - DNA, 20 bp, Artificial Sequence
  Description of Artificial Sequence: Synthetic oligonucleotide
  Target: ATXN2; (-) strand; PAM type: NRG; PAM sequence: GAG
tattcgggtggcagaggtga

SEQ ID NO: 26973 - DNA, 20 bp, Artificial Sequence
  Description of Artificial Sequence: Synthetic oligonucleotide
  Target: ATXN2; (-) strand; PAM type: NRG; PAM sequence: GAG
gctattcgggtggcagaggt

SEQ ID NO: 26974 - DNA, 20 bp, Artificial Sequence
  Description of Artificial Sequence: Synthetic oligonucleotide
  Target: ATXN2; (-) strand; PAM type: NRG; PAM sequence: AGG
cccagctattcgggtggcag

SEQ ID NO: 26975 - DNA, 20 bp, Artificial Sequence
  Description of Artificial Sequence: Synthetic oligonucleotide
  Target: ATXN2; (-) strand; PAM type: NRG; PAM sequence: GAG
tcccagctattcgggtggca

SEQ ID NO: 26976 - DNA, 20 bp, Artificial Sequence
  Description of Artificial Sequence: Synthetic oligonucleotide
  Target: ATXN2; (-) strand; PAM type: NRG; PAM sequence: CAG
agtcccagctattcgggtgg

SEQ ID NO: 26977 - DNA, 20 bp, Artificial Sequence
  Description of Artificial Sequence: Synthetic oligonucleotide
  Target: ATXN2; (-) strand; PAM type: NRG; PAM sequence: TGG
tgtagtcccagctattcggg

SEQ ID NO: 26978 - DNA, 20 bp, Artificial Sequence
  Description of Artificial Sequence: Synthetic oligonucleotide
  Target: ATXN2; (-) strand; PAM type: NRG; PAM sequence: GGG
acctgtagtcccagctattc

SEQ ID NO: 26979 - DNA, 20 bp, Artificial Sequence
  Description of Artificial Sequence: Synthetic oligonucleotide
  Target: ATXN2; (-) strand; PAM type: NRG; PAM sequence: CGG
tacctgtagtcccagctatt

SEQ ID NO: 26980 - DNA, 20 bp, Artificial Sequence
  Description of Artificial Sequence: Synthetic oligonucleotide
  Target: ATXN2; (-) strand; PAM type: NRG; PAM sequence: CAG
gtggtatgtacctgtagtcc

SEQ ID NO: 26981 - DNA, 20 bp, Artificial Sequence
  Description of Artificial Sequence: Synthetic oligonucleotide
  Target: ATXN2; (-) strand; PAM type: NRG; PAM sequence: TAG
gacacggtggtatgtacctg

SEQ ID NO: 26982 - DNA, 20 bp, Artificial Sequence
  Description of Artificial Sequence: Synthetic oligonucleotide
  Target: ATXN2; (-) strand; PAM type: NRG; PAM sequence: TGG
caaaaagtagccagacacgg

SEQ ID NO: 26983 - DNA, 20 bp, Artificial Sequence
  Description of Artificial Sequence: Synthetic oligonucleotide
  Target: ATXN2; (-) strand; PAM type: NRG; PAM sequence: CGG
atacaaaaagtagccagaca

SEQ ID NO: 26984 - DNA, 20 bp, Artificial Sequence
  Description of Artificial Sequence: Synthetic oligonucleotide
  Target: ATXN2; (-) strand; PAM type: NRG; PAM sequence: CAG
aaaaaaatacaaaaagtagc

SEQ ID NO: 26985 - DNA, 20 bp, Artificial Sequence
  Description of Artificial Sequence: Synthetic oligonucleotide
  Target: ATXN2; (-) strand; PAM type: NRG; PAM sequence: TAG
tacaaaaaaaatacaaaaag

SEQ ID NO: 26986 - DNA, 20 bp, Artificial Sequence
  Description of Artificial Sequence: Synthetic oligonucleotide
  Target: ATXN2; (-) strand; PAM type: NRG; PAM sequence: AAG
ttctacaaaaaaaatacaaa

SEQ ID NO: 26987 - DNA, 20 bp, Artificial Sequence
  Description of Artificial Sequence: Synthetic oligonucleotide
  Target: ATXN2; (-) strand; PAM type: NRG; PAM sequence: TGG
gaccagcctgggcaatatgg

SEQ ID NO: 26988 - DNA, 20 bp, Artificial Sequence
  Description of Artificial Sequence: Synthetic oligonucleotide
  Target: ATXN2; (-) strand; PAM type: NRG; PAM sequence: TGG
caagaccagcctgggcaata

SEQ ID NO: 26989 - DNA, 20 bp, Artificial Sequence
  Description of Artificial Sequence: Synthetic oligonucleotide
  Target: ATXN2; (-) strand; PAM type: NRG; PAM sequence: GGG
cagtagttcaagaccagcct

SEQ ID NO: 26990 - DNA, 20 bp, Artificial Sequence
  Description of Artificial Sequence: Synthetic oligonucleotide
  Target: ATXN2; (-) strand; PAM type: NRG; PAM sequence: TGG
ccagtagttcaagaccagcc

SEQ ID NO: 26991 - DNA, 20 bp, Artificial Sequence
  Description of Artificial Sequence: Synthetic oligonucleotide
  Target: ATXN2; (-) strand; PAM type: NRG; PAM sequence: CAG
tgagcccagtagttcaagac

SEQ ID NO: 26992 - DNA, 20 bp, Artificial Sequence
  Description of Artificial Sequence: Synthetic oligonucleotide
  Target: ATXN2; (-) strand; PAM type: NRG; PAM sequence: AAG
ttgcttgagcccagtagttc

SEQ ID NO: 26993 - DNA, 20 bp, Artificial Sequence
  Description of Artificial Sequence: Synthetic oligonucleotide
  Target: ATXN2; (-) strand; PAM type: NRG; PAM sequence: TAG
gatgaattgcttgagcccag

SEQ ID NO: 26994 - DNA, 20 bp, Artificial Sequence
  Description of Artificial Sequence: Synthetic oligonucleotide
  Target: ATXN2; (-) strand; PAM type: NRG; PAM sequence: CAG
gcagatgaattgcttgagcc

SEQ ID NO: 26995 - DNA, 20 bp, Artificial Sequence
  Description of Artificial Sequence: Synthetic oligonucleotide
  Target: ATXN2; (-) strand; PAM type: NRG; PAM sequence: GAG
ccaaggcagatgaattgctt

SEQ ID NO: 26996 - DNA, 20 bp, Artificial Sequence
  Description of Artificial Sequence: Synthetic oligonucleotide
  Target: ATXN2; (-) strand; PAM type: NRG; PAM sequence: CAG
agcactttgggaggccaagg

SEQ ID NO: 26997 - DNA, 20 bp, Artificial Sequence
  Description of Artificial Sequence: Synthetic oligonucleotide
  Target: ATXN2; (-) strand; PAM type: NRG; PAM sequence: AGG
ctcagcactttgggaggcca

SEQ ID NO: 26998 - DNA, 20 bp, Artificial Sequence
  Description of Artificial Sequence: Synthetic oligonucleotide
  Target: ATXN2; (-) strand; PAM type: NRG; PAM sequence: AAG
tctcagcactttgggaggcc

SEQ ID NO: 26999 - DNA, 20 bp, Artificial Sequence
  Description of Artificial Sequence: Synthetic oligonucleotide
  Target: ATXN2; (-) strand; PAM type: NRG; PAM sequence: AGG
tgtaatctcagcactttggg

SEQ ID NO: 27000 - DNA, 20 bp, Artificial Sequence
  Description of Artificial Sequence: Synthetic oligonucleotide
  Target: ATXN2; (-) strand; PAM type: NRG; PAM sequence: GAG
ctgtaatctcagcactttgg

SEQ ID NO: 27001 - DNA, 20 bp, Artificial Sequence
  Description of Artificial Sequence: Synthetic oligonucleotide
  Target: ATXN2; (-) strand; PAM type: NRG; PAM sequence: GGG
tcctgtaatctcagcacttt

SEQ ID NO: 27002 - DNA, 20 bp, Artificial Sequence
  Description of Artificial Sequence: Synthetic oligonucleotide
  Target: ATXN2; (-) strand; PAM type: NRG; PAM sequence: TGG
ttcctgtaatctcagcactt

SEQ ID NO: 27003 - DNA, 20 bp, Artificial Sequence
  Description of Artificial Sequence: Synthetic oligonucleotide
  Target: ATXN2; (-) strand; PAM type: NRG; PAM sequence: CAG
gtggctcattcctgtaatct

SEQ ID NO: 27004 - DNA, 20 bp, Artificial Sequence
  Description of Artificial Sequence: Synthetic oligonucleotide
  Target: ATXN2; (-) strand; PAM type: NRG; PAM sequence: TGG
aaattactggctgggtacag

SEQ ID NO: 27005 - DNA, 20 bp, Artificial Sequence
  Description of Artificial Sequence: Synthetic oligonucleotide
  Target: ATXN2; (-) strand; PAM type: NRG; PAM sequence: CAG
ataaaattactggctgggta

SEQ ID NO: 27006 - DNA, 20 bp, Artificial Sequence
  Description of Artificial Sequence: Synthetic oligonucleotide
  Target: ATXN2; (-) strand; PAM type: NRG; PAM sequence: GGG
aaaacataaaattactggct

SEQ ID NO: 27007 - DNA, 20 bp, Artificial Sequence
  Description of Artificial Sequence: Synthetic oligonucleotide
  Target: ATXN2; (-) strand; PAM type: NRG; PAM sequence: TGG
aaaaacataaaattactggc

SEQ ID NO: 27008 - DNA, 20 bp, Artificial Sequence
  Description of Artificial Sequence: Synthetic oligonucleotide
  Target: ATXN2; (-) strand; PAM type: NRG; PAM sequence: TGG
ctttaaaaacataaaattac

SEQ ID NO: 27009 - DNA, 20 bp, Artificial Sequence
  Description of Artificial Sequence: Synthetic oligonucleotide
  Target: ATXN2; (-) strand; PAM type: NRG; PAM sequence: AAG
agttagctaatttagagctt

SEQ ID NO: 27010 - DNA, 20 bp, Artificial Sequence
  Description of Artificial Sequence: Synthetic oligonucleotide
  Target: ATXN2; (-) strand; PAM type: NRG; PAM sequence: GAG
attttaagttagctaattta

SEQ ID NO: 27011 - DNA, 20 bp, Artificial Sequence
  Description of Artificial Sequence: Synthetic oligonucleotide
  Target: ATXN2; (-) strand; PAM type: NRG; PAM sequence: TAG
aaattttaagttagctaatt

SEQ ID NO: 27012 - DNA, 20 bp, Artificial Sequence
  Description of Artificial Sequence: Synthetic oligonucleotide
  Target: ATXN2; (-) strand; PAM type: NRG; PAM sequence: TAG
tttcagttcaaattttaagt

SEQ ID NO: 27013 - DNA, 20 bp, Artificial Sequence
  Description of Artificial Sequence: Synthetic oligonucleotide
  Target: ATXN2; (-) strand; PAM type: NRG; PAM sequence: AAG
caattttcagttcaaatttt

SEQ ID NO: 27014 - DNA, 20 bp, Artificial Sequence
  Description of Artificial Sequence: Synthetic oligonucleotide
  Target: ATXN2; (-) strand; PAM type: NRG; PAM sequence: CAG
taccatttctaaacaatttt

SEQ ID NO: 27015 - DNA, 20 bp, Artificial Sequence
  Description of Artificial Sequence: Synthetic oligonucleotide
  Target: ATXN2; (-) strand; PAM type: NRG; PAM sequence: CAG
gttgattttgaagtaaaata

SEQ ID NO: 27016 - DNA, 20 bp, Artificial Sequence
  Description of Artificial Sequence: Synthetic oligonucleotide
  Target: ATXN2; (-) strand; PAM type: NRG; PAM sequence: AAG
ttattttttagttgattttg

SEQ ID NO: 27017 - DNA, 20 bp, Artificial Sequence
  Description of Artificial Sequence: Synthetic oligonucleotide
  Target: ATXN2; (-) strand; PAM type: NRG; PAM sequence: TAG
ttgagttttttattattttt

SEQ ID NO: 27018 - DNA, 20 bp, Artificial Sequence
  Description of Artificial Sequence: Synthetic oligonucleotide
  Target: ATXN2; (-) strand; PAM type: NRG; PAM sequence: GAG
ggaatctgattagtaagttt

SEQ ID NO: 27019 - DNA, 20 bp, Artificial Sequence
  Description of Artificial Sequence: Synthetic oligonucleotide
  Target: ATXN2; (-) strand; PAM type: NRG; PAM sequence: AAG
ttcagaggaatctgattagt

SEQ ID NO: 27020 - DNA, 20 bp, Artificial Sequence
  Description of Artificial Sequence: Synthetic oligonucleotide
  Target: ATXN2; (-) strand; PAM type: NRG; PAM sequence: TAG
agctttcagaggaatctgat

SEQ ID NO: 27021 - DNA, 20 bp, Artificial Sequence
  Description of Artificial Sequence: Synthetic oligonucleotide
  Target: ATXN2; (-) strand; PAM type: NRG; PAM sequence: AGG
gatcttcactcagctttcag

SEQ ID NO: 27022 - DNA, 20 bp, Artificial Sequence
  Description of Artificial Sequence: Synthetic oligonucleotide
  Target: ATXN2; (-) strand; PAM type: NRG; PAM sequence: GAG
tgatcttcactcagctttca

SEQ ID NO: 27023 - DNA, 20 bp, Artificial Sequence
  Description of Artificial Sequence: Synthetic oligonucleotide
  Target: ATXN2; (-) strand; PAM type: NRG; PAM sequence: CAG
attgatcttcactcagcttt

SEQ ID NO: 27024 - DNA, 20 bp, Artificial Sequence
  Description of Artificial Sequence: Synthetic oligonucleotide
  Target: ATXN2; (-) strand; PAM type: NRG; PAM sequence: CAG
atgggctattgatcttcact

SEQ ID NO: 27025 - DNA, 20 bp, Artificial Sequence
  Description of Artificial Sequence: Synthetic oligonucleotide
  Target: ATXN2; (-) strand; PAM type: NRG; PAM sequence: GGG
tatttgattctgtagagcat

SEQ ID NO: 27026 - DNA, 20 bp, Artificial Sequence
  Description of Artificial Sequence: Synthetic oligonucleotide
  Target: ATXN2; (-) strand; PAM type: NRG; PAM sequence: TGG
atatttgattctgtagagca

SEQ ID NO: 27027 - DNA, 20 bp, Artificial Sequence
  Description of Artificial Sequence: Synthetic oligonucleotide
  Target: ATXN2; (-) strand; PAM type: NRG; PAM sequence: GAG
gatgtatatttgattctgta

SEQ ID NO: 27028 - DNA, 20 bp, Artificial Sequence
  Description of Artificial Sequence: Synthetic oligonucleotide
  Target: ATXN2; (-) strand; PAM type: NRG; PAM sequence: TAG
ttgatgtatatttgattctg

SEQ ID NO: 27029 - DNA, 20 bp, Artificial Sequence
  Description of Artificial Sequence: Synthetic oligonucleotide
  Target: ATXN2; (-) strand; PAM type: NRG; PAM sequence: TAG
gcaccactcaggctttgctg

SEQ ID NO: 27030 - DNA, 20 bp, Artificial Sequence
  Description of Artificial Sequence: Synthetic oligonucleotide
  Target: ATXN2; (-) strand; PAM type: NRG; PAM sequence: AGG
ttgttagttttgcaccactc

SEQ ID NO: 27031 - DNA, 20 bp, Artificial Sequence
  Description of Artificial Sequence: Synthetic oligonucleotide
  Target: ATXN2; (-) strand; PAM type: NRG; PAM sequence: CAG
cttgttagttttgcaccact

SEQ ID NO: 27032 - DNA, 20 bp, Artificial Sequence
  Description of Artificial Sequence: Synthetic oligonucleotide
  Target: ATXN2; (-) strand; PAM type: NRG; PAM sequence: TAG
atattttttcttgttcttgt

SEQ ID NO: 27033 - DNA, 20 bp, Artificial Sequence
  Description of Artificial Sequence: Synthetic oligonucleotide
  Target: ATXN2; (-) strand; PAM type: NRG; PAM sequence: AAG
taaatacagcaaacctcatg

SEQ ID NO: 27034 - DNA, 20 bp, Artificial Sequence
  Description of Artificial Sequence: Synthetic oligonucleotide
  Target: ATXN2; (-) strand; PAM type: NRG; PAM sequence: CAG
tcaccttgtttttttaaata

SEQ ID NO: 27035 - DNA, 20 bp, Artificial Sequence
  Description of Artificial Sequence: Synthetic oligonucleotide
  Target: ATXN2; (-) strand; PAM type: NRG; PAM sequence: TGG
gcaatctagtattacgtacg

SEQ ID NO: 27036 - DNA, 20 bp, Artificial Sequence
  Description of Artificial Sequence: Synthetic oligonucleotide
  Target: ATXN2; (-) strand; PAM type: NRG; PAM sequence: TAG
tagtgtgggaatcagcaatc

SEQ ID NO: 27037 - DNA, 20 bp, Artificial Sequence
  Description of Artificial Sequence: Synthetic oligonucleotide
  Target: ATXN2; (-) strand; PAM type: NRG; PAM sequence: CAG
ttaggagatagtgtgggaat

SEQ ID NO: 27038 - DNA, 20 bp, Artificial Sequence
  Description of Artificial Sequence: Synthetic oligonucleotide
  Target: ATXN2; (-) strand; PAM type: NRG; PAM sequence: GGG
atctttttaggagatagtgt

SEQ ID NO: 27039 - DNA, 20 bp, Artificial Sequence
  Description of Artificial Sequence: Synthetic oligonucleotide
  Target: ATXN2; (-) strand; PAM type: NRG; PAM sequence: TGG
gatctttttaggagatagtg

SEQ ID NO: 27040 - DNA, 20 bp, Artificial Sequence
  Description of Artificial Sequence: Synthetic oligonucleotide
  Target: ATXN2; (-) strand; PAM type: NRG; PAM sequence: TAG
cttttgatctttttaggaga

SEQ ID NO: 27041 - DNA, 20 bp, Artificial Sequence
  Description of Artificial Sequence: Synthetic oligonucleotide
  Target: ATXN2; (-) strand; PAM type: NRG; PAM sequence: GAG
acttcttttgatctttttag

SEQ ID NO: 27042 - DNA, 20 bp, Artificial Sequence
  Description of Artificial Sequence: Synthetic oligonucleotide
  Target: ATXN2; (-) strand; PAM type: NRG; PAM sequence: AGG
aaacttcttttgatcttttt

SEQ ID NO: 27043 - DNA, 20 bp, Artificial Sequence
  Description of Artificial Sequence: Synthetic oligonucleotide
  Target: ATXN2; (-) strand; PAM type: NRG; PAM sequence: TAG
aaaacttcttttgatctttt

SEQ ID NO: 27044 - DNA, 20 bp, Artificial Sequence
  Description of Artificial Sequence: Synthetic oligonucleotide
  Target: ATXN2; (-) strand; PAM type: NRG; PAM sequence: TGG
cataaacagtatctttgtat

SEQ ID NO: 27045 - DNA, 20 bp, Artificial Sequence
  Description of Artificial Sequence: Synthetic oligonucleotide
  Target: ATXN2; (-) strand; PAM type: NRG; PAM sequence: CAG
acagaatgttcacccataaa

SEQ ID NO: 27046 - DNA, 20 bp, Artificial Sequence
  Description of Artificial Sequence: Synthetic oligonucleotide
  Target: ATXN2; (-) strand; PAM type: NRG; PAM sequence: CAG
cctaatggagaaaatgaaaa

SEQ ID NO: 27047 - DNA, 20 bp, Artificial Sequence
  Description of Artificial Sequence: Synthetic oligonucleotide
  Target: ATXN2; (-) strand; PAM type: NRG; PAM sequence: GAG
cctgatccagaagcctaatg

SEQ ID NO: 27048 - DNA, 20 bp, Artificial Sequence
  Description of Artificial Sequence: Synthetic oligonucleotide
  Target: ATXN2; (-) strand; PAM type: NRG; PAM sequence: TGG
atcctgatccagaagcctaa

SEQ ID NO: 27049 - DNA, 20 bp, Artificial Sequence
  Description of Artificial Sequence: Synthetic oligonucleotide
  Target: ATXN2; (-) strand; PAM type: NRG; PAM sequence: AAG
taaaatagatcctgatccag

SEQ ID NO: 27050 - DNA, 20 bp, Artificial Sequence
  Description of Artificial Sequence: Synthetic oligonucleotide
  Target: ATXN2; (-) strand; PAM type: NRG; PAM sequence: CAG
acttaaaatagatcctgatc

SEQ ID NO: 27051 - DNA, 20 bp, Artificial Sequence
  Description of Artificial Sequence: Synthetic oligonucleotide
  Target: ATXN2; (-) strand; PAM type: NRG; PAM sequence: TAG
ctcctcctccccacttaaaa

SEQ ID NO: 27052 - DNA, 20 bp, Artificial Sequence
  Description of Artificial Sequence: Synthetic oligonucleotide
  Target: ATXN2; (-) strand; PAM type: NRG; PAM sequence: TAG
acaaatttctttcaggtagc

SEQ ID NO: 27053 - DNA, 20 bp, Artificial Sequence
  Description of Artificial Sequence: Synthetic oligonucleotide
  Target: ATXN2; (-) strand; PAM type: NRG; PAM sequence: TAG
tggcacaaatttctttcagg

SEQ ID NO: 27054 - DNA, 20 bp, Artificial Sequence
  Description of Artificial Sequence: Synthetic oligonucleotide
  Target: ATXN2; (-) strand; PAM type: NRG; PAM sequence: AGG
agatggcacaaatttctttc

SEQ ID NO: 27055 - DNA, 20 bp, Artificial Sequence
  Description of Artificial Sequence: Synthetic oligonucleotide
  Target: ATXN2; (-) strand; PAM type: NRG; PAM sequence: CAG
gagatggcacaaatttcttt

SEQ ID NO: 27056 - DNA, 20 bp, Artificial Sequence
  Description of Artificial Sequence: Synthetic oligonucleotide
  Target: ATXN2; (-) strand; PAM type: NRG; PAM sequence: TGG
gctaatttcatattttgaga

SEQ ID NO: 27057 - DNA, 20 bp, Artificial Sequence
  Description of Artificial Sequence: Synthetic oligonucleotide
  Target: ATXN2; (-) strand; PAM type: NRG; PAM sequence: GAG
ctaggctaatttcatatttt

SEQ ID NO: 27058 - DNA, 20 bp, Artificial Sequence
  Description of Artificial Sequence: Synthetic oligonucleotide
  Target: ATXN2; (-) strand; PAM type: NRG; PAM sequence: AGG
taagctatcacaccaggcct

SEQ ID NO: 27059 - DNA, 20 bp, Artificial Sequence
  Description of Artificial Sequence: Synthetic oligonucleotide
  Target: ATXN2; (-) strand; PAM type: NRG; PAM sequence: TAG
ttaagctatcacaccaggcc

SEQ ID NO: 27060 - DNA, 20 bp, Artificial Sequence
  Description of Artificial Sequence: Synthetic oligonucleotide
  Target: ATXN2; (-) strand; PAM type: NRG; PAM sequence: AGG
caggcttaagctatcacacc

SEQ ID NO: 27061 - DNA, 20 bp, Artificial Sequence
  Description of Artificial Sequence: Synthetic oligonucleotide
  Target: ATXN2; (-) strand; PAM type: NRG; PAM sequence: CAG
acaggcttaagctatcacac

SEQ ID NO: 27062 - DNA, 20 bp, Artificial Sequence
  Description of Artificial Sequence: Synthetic oligonucleotide
  Target: ATXN2; (-) strand; PAM type: NRG; PAM sequence: AAG
agtgctcggattacaggctt

SEQ ID NO: 27063 - DNA, 20 bp, Artificial Sequence
  Description of Artificial Sequence: Synthetic oligonucleotide
  Target: ATXN2; (-) strand; PAM type: NRG; PAM sequence: AGG
tcccaaagtgctcggattac

SEQ ID NO: 27064 - DNA, 20 bp, Artificial Sequence
  Description of Artificial Sequence: Synthetic oligonucleotide
  Target: ATXN2; (-) strand; PAM type: NRG; PAM sequence: CAG
ctcccaaagtgctcggatta

SEQ ID NO: 27065 - DNA, 20 bp, Artificial Sequence
  Description of Artificial Sequence: Synthetic oligonucleotide
  Target: ATXN2; (-) strand; PAM type: NRG; PAM sequence: CGG
cctcagcctcccaaagtgct

SEQ ID NO: 27066 - DNA, 20 bp, Artificial Sequence
  Description of Artificial Sequence: Synthetic oligonucleotide
  Target: ATXN2; (-) strand; PAM type: NRG; PAM sequence: AAG
ctctttgcctcagcctccca

SEQ ID NO: 27067 - DNA, 20 bp, Artificial Sequence
  Description of Artificial Sequence: Synthetic oligonucleotide
  Target: ATXN2; (-) strand; PAM type: NRG; PAM sequence: CAG
ccaagcaatcctctttgcct

SEQ ID NO: 27068 - DNA, 20 bp, Artificial Sequence
  Description of Artificial Sequence: Synthetic oligonucleotide
  Target: ATXN2; (-) strand; PAM type: NRG; PAM sequence: AAG
tgtcttgaactcctgagccc

SEQ ID NO: 27069 - DNA, 20 bp, Artificial Sequence
  Description of Artificial Sequence: Synthetic oligonucleotide
  Target: ATXN2; (-) strand; PAM type: NRG; PAM sequence: GAG
ccaggctgtcttgaactcct

SEQ ID NO: 27070 - DNA, 20 bp, Artificial Sequence
  Description of Artificial Sequence: Synthetic oligonucleotide
  Target: ATXN2; (-) strand; PAM type: NRG; PAM sequence: AGG
gaggtcccactatgttgccc

SEQ ID NO: 27071 - DNA, 20 bp, Artificial Sequence
  Description of Artificial Sequence: Synthetic oligonucleotide
  Target: ATXN2; (-) strand; PAM type: NRG; PAM sequence: CAG
cgaggtcccactatgttgcc

SEQ ID NO: 27072 - DNA, 20 bp, Artificial Sequence
  Description of Artificial Sequence: Synthetic oligonucleotide
  Target: ATXN2; (-) strand; PAM type: NRG; PAM sequence: AGG
ttcttttttaagtagagacg

SEQ ID NO: 27073 - DNA, 20 bp, Artificial Sequence
  Description of Artificial Sequence: Synthetic oligonucleotide
  Target: ATXN2; (-) strand; PAM type: NRG; PAM sequence: GAG
tttcttttttaagtagagac

SEQ ID NO: 27074 - DNA, 20 bp, Artificial Sequence
  Description of Artificial Sequence: Synthetic oligonucleotide
  Target: ATXN2; (-) strand; PAM type: NRG; PAM sequence: GAG
gaatttttcttttttaagta

SEQ ID NO: 27075 - DNA, 20 bp, Artificial Sequence
  Description of Artificial Sequence: Synthetic oligonucleotide
  Target: ATXN2; (-) strand; PAM type: NRG; PAM sequence: TAG
tagaatttttcttttttaag

SEQ ID NO: 27076 - DNA, 20 bp, Artificial Sequence
  Description of Artificial Sequence: Synthetic oligonucleotide
  Target: ATXN2; (-) strand; PAM type: NRG; PAM sequence: AAG
ttttagaatttttctttttt

SEQ ID NO: 27077 - DNA, 20 bp, Artificial Sequence
  Description of Artificial Sequence: Synthetic oligonucleotide
  Target: ATXN2; (-) strand; PAM type: NRG; PAM sequence: TAG
tgtctctttcactctctttt

SEQ ID NO: 27078 - DNA, 20 bp, Artificial Sequence
  Description of Artificial Sequence: Synthetic oligonucleotide
  Target: ATXN2; (-) strand; PAM type: NRG; PAM sequence: TGG
agaagtgctcaaacgatgat

SEQ ID NO: 27079 - DNA, 20 bp, Artificial Sequence
  Description of Artificial Sequence: Synthetic oligonucleotide
  Target: ATXN2; (-) strand; PAM type: NRG; PAM sequence: AAG
aaatagtaccttttataaag

SEQ ID NO: 27080 - DNA, 20 bp, Artificial Sequence
  Description of Artificial Sequence: Synthetic oligonucleotide
  Target: ATXN2; (-) strand; PAM type: NRG; PAM sequence: AAG
tgaaaatagtaccttttata

SEQ ID NO: 27081 - DNA, 20 bp, Artificial Sequence
  Description of Artificial Sequence: Synthetic oligonucleotide
  Target: ATXN2; (-) strand; PAM type: NRG; PAM sequence: TAG
tttaacttctgagctgaaaa

SEQ ID NO: 27082 - DNA, 20 bp, Artificial Sequence
  Description of Artificial Sequence: Synthetic oligonucleotide
  Target: ATXN2; (-) strand; PAM type: NRG; PAM sequence: GAG
tttctttctctttaacttct

SEQ ID NO: 27083 - DNA, 20 bp, Artificial Sequence
  Description of Artificial Sequence: Synthetic oligonucleotide
  Target: ATXN2; (-) strand; PAM type: NRG; PAM sequence: CGG
caggcatgagccatcgcacc

SEQ ID NO: 27084 - DNA, 20 bp, Artificial Sequence
  Description of Artificial Sequence: Synthetic oligonucleotide
  Target: ATXN2; (-) strand; PAM type: NRG; PAM sequence: GAG
agtgctgggattacaggcat

SEQ ID NO: 27085 - DNA, 20 bp, Artificial Sequence
  Description of Artificial Sequence: Synthetic oligonucleotide
  Target: ATXN2; (-) strand; PAM type: NRG; PAM sequence: AGG
tcccaaagtgctgggattac

SEQ ID NO: 27086 - DNA, 20 bp, Artificial Sequence
  Description of Artificial Sequence: Synthetic oligonucleotide
  Target: ATXN2; (-) strand; PAM type: NRG; PAM sequence: CAG
ctcccaaagtgctgggatta

SEQ ID NO: 27087 - DNA, 20 bp, Artificial Sequence
  Description of Artificial Sequence: Synthetic oligonucleotide
  Target: ATXN2; (-) strand; PAM type: NRG; PAM sequence: GGG
cctcggcctcccaaagtgct

SEQ ID NO: 27088 - DNA, 20 bp, Artificial Sequence
  Description of Artificial Sequence: Synthetic oligonucleotide
  Target: ATXN2; (-) strand; PAM type: NRG; PAM sequence: TGG
gcctcggcctcccaaagtgc

SEQ ID NO: 27089 - DNA, 20 bp, Artificial Sequence
  Description of Artificial Sequence: Synthetic oligonucleotide
  Target: ATXN2; (-) strand; PAM type: NRG; PAM sequence: AAG
ccatccgcctcggcctccca

SEQ ID NO: 27090 - DNA, 20 bp, Artificial Sequence
  Description of Artificial Sequence: Synthetic oligonucleotide
  Target: ATXN2; (-) strand; PAM type: NRG; PAM sequence: CGG
acctcgtgatccatccgcct

SEQ ID NO: 27091 - DNA, 20 bp, Artificial Sequence
  Description of Artificial Sequence: Synthetic oligonucleotide
  Target: ATXN2; (-) strand; PAM type: NRG; PAM sequence: TGG
tttcaccgtgttagccaagg

SEQ ID NO: 27092 - DNA, 20 bp, Artificial Sequence
  Description of Artificial Sequence: Synthetic oligonucleotide
  Target: ATXN2; (-) strand; PAM type: NRG; PAM sequence: AGG
gggtttcaccgtgttagcca

SEQ ID NO: 27093 - DNA, 20 bp, Artificial Sequence
  Description of Artificial Sequence: Synthetic oligonucleotide
  Target: ATXN2; (-) strand; PAM type: NRG; PAM sequence: AAG
ggggtttcaccgtgttagcc

SEQ ID NO: 27094 - DNA, 20 bp, Artificial Sequence
  Description of Artificial Sequence: Synthetic oligonucleotide
  Target: ATXN2; (-) strand; PAM type: NRG; PAM sequence: TAG
gagacggggtttcaccgtgt

SEQ ID NO: 27095 - DNA, 20 bp, Artificial Sequence
  Description of Artificial Sequence: Synthetic oligonucleotide
  Target: ATXN2; (-) strand; PAM type: NRG; PAM sequence: GGG
ttgtatttttagtagagacg

SEQ ID NO: 27096 - DNA, 20 bp, Artificial Sequence
  Description of Artificial Sequence: Synthetic oligonucleotide
  Target: ATXN2; (-) strand; PAM type: NRG; PAM sequence: GGG
tttgtatttttagtagagac

SEQ ID NO: 27097 - DNA, 20 bp, Artificial Sequence
  Description of Artificial Sequence: Synthetic oligonucleotide
  Target: ATXN2; (-) strand; PAM type: NRG; PAM sequence: CGG
ttttgtatttttagtagaga

SEQ ID NO: 27098 - DNA, 20 bp, Artificial Sequence
  Description of Artificial Sequence: Synthetic oligonucleotide
  Target: ATXN2; (-) strand; PAM type: NRG; PAM sequence: GAG
aattttttgtatttttagta

SEQ ID NO: 27099 - DNA, 20 bp, Artificial Sequence
  Description of Artificial Sequence: Synthetic oligonucleotide
  Target: ATXN2; (-) strand; PAM type: NRG; PAM sequence: TAG
ctaattttttgtatttttag

SEQ ID NO: 27100 - DNA, 20 bp, Artificial Sequence
  Description of Artificial Sequence: Synthetic oligonucleotide
  Target: ATXN2; (-) strand; PAM type: NRG; PAM sequence: TAG
cggctaattttttgtatttt

SEQ ID NO: 27101 - DNA, 20 bp, Artificial Sequence
  Description of Artificial Sequence: Synthetic oligonucleotide
  Target: ATXN2; (-) strand; PAM type: NRG; PAM sequence: CGG
gaggtacccgccacagcgcc

SEQ ID NO: 27102 - DNA, 20 bp, Artificial Sequence
  Description of Artificial Sequence: Synthetic oligonucleotide
  Target: ATXN2; (-) strand; PAM type: NRG; PAM sequence: CAG
gggactagaggtacccgcca

SEQ ID NO: 27103 - DNA, 20 bp, Artificial Sequence
  Description of Artificial Sequence: Synthetic oligonucleotide
  Target: ATXN2; (-) strand; PAM type: NRG; PAM sequence: AGG
tcccgggtagctgggactag

SEQ ID NO: 27104 - DNA, 20 bp, Artificial Sequence
  Description of Artificial Sequence: Synthetic oligonucleotide
  Target: ATXN2; (-) strand; PAM type: NRG; PAM sequence: GAG
ctcccgggtagctgggacta

SEQ ID NO: 27105 - DNA, 20 bp, Artificial Sequence
  Description of Artificial Sequence: Synthetic oligonucleotide
  Target: ATXN2; (-) strand; PAM type: NRG; PAM sequence: TAG
gcctcccgggtagctgggac

SEQ ID NO: 27106 - DNA, 20 bp, Artificial Sequence
  Description of Artificial Sequence: Synthetic oligonucleotide
  Target: ATXN2; (-) strand; PAM type: NRG; PAM sequence: GGG
cctcagcctcccgggtagct

SEQ ID NO: 27107 - DNA, 20 bp, Artificial Sequence
  Description of Artificial Sequence: Synthetic oligonucleotide
  Target: ATXN2; (-) strand; PAM type: NRG; PAM sequence: TGG
gcctcagcctcccgggtagc

SEQ ID NO: 27108 - DNA, 20 bp, Artificial Sequence
  Description of Artificial Sequence: Synthetic oligonucleotide
  Target: ATXN2; (-) strand; PAM type: NRG; PAM sequence: TAG
tcctgcctcagcctcccggg

SEQ ID NO: 27109 - DNA, 20 bp, Artificial Sequence
  Description of Artificial Sequence: Synthetic oligonucleotide
  Target: ATXN2; (-) strand; PAM type: NRG; PAM sequence: GGG
ttctcctgcctcagcctccc

SEQ ID NO: 27110 - DNA, 20 bp, Artificial Sequence
  Description of Artificial Sequence: Synthetic oligonucleotide
  Target: ATXN2; (-) strand; PAM type: NRG; PAM sequence: CGG
tttctcctgcctcagcctcc

SEQ ID NO: 27111 - DNA, 20 bp, Artificial Sequence
  Description of Artificial Sequence: Synthetic oligonucleotide
  Target: ATXN2; (-) strand; PAM type: NRG; PAM sequence: CAG
catgccattttctcctgcct

SEQ ID NO: 27112 - DNA, 20 bp, Artificial Sequence
  Description of Artificial Sequence: Synthetic oligonucleotide
  Target: ATXN2; (-) strand; PAM type: NRG; PAM sequence: GGG
cactgcaagctccgcctccc

SEQ ID NO: 27113 - DNA, 20 bp, Artificial Sequence
  Description of Artificial Sequence: Synthetic oligonucleotide
  Target: ATXN2; (-) strand; PAM type: NRG; PAM sequence: CGG
tcactgcaagctccgcctcc

SEQ ID NO: 27114 - DNA, 20 bp, Artificial Sequence
  Description of Artificial Sequence: Synthetic oligonucleotide
  Target: ATXN2; (-) strand; PAM type: NRG; PAM sequence: AAG
gcgcgatctcggctcactgc

SEQ ID NO: 27115 - DNA, 20 bp, Artificial Sequence
  Description of Artificial Sequence: Synthetic oligonucleotide
  Target: ATXN2; (-) strand; PAM type: NRG; PAM sequence: CGG
ggagtgcagtagcgcgatct

SEQ ID NO: 27116 - DNA, 20 bp, Artificial Sequence
  Description of Artificial Sequence: Synthetic oligonucleotide
  Target: ATXN2; (-) strand; PAM type: NRG; PAM sequence: TAG
ttgcccaggctggagtgcag

SEQ ID NO: 27117 - DNA, 20 bp, Artificial Sequence
  Description of Artificial Sequence: Synthetic oligonucleotide
  Target: ATXN2; (-) strand; PAM type: NRG; PAM sequence: CAG
ctgttgcccaggctggagtg

SEQ ID NO: 27118 - DNA, 20 bp, Artificial Sequence
  Description of Artificial Sequence: Synthetic oligonucleotide
  Target: ATXN2; (-) strand; PAM type: NRG; PAM sequence: GAG
ttgctctgttgcccaggctg

SEQ ID NO: 27119 - DNA, 20 bp, Artificial Sequence
  Description of Artificial Sequence: Synthetic oligonucleotide
  Target: ATXN2; (-) strand; PAM type: NRG; PAM sequence: TGG
tcttgctctgttgcccaggc

SEQ ID NO: 27120 - DNA, 20 bp, Artificial Sequence
  Description of Artificial Sequence: Synthetic oligonucleotide
  Target: ATXN2; (-) strand; PAM type: NRG; PAM sequence: AGG
agagtcttgctctgttgccc

SEQ ID NO: 27121 - DNA, 20 bp, Artificial Sequence
  Description of Artificial Sequence: Synthetic oligonucleotide
  Target: ATXN2; (-) strand; PAM type: NRG; PAM sequence: CAG
cagagtcttgctctgttgcc

SEQ ID NO: 27122 - DNA, 20 bp, Artificial Sequence
  Description of Artificial Sequence: Synthetic oligonucleotide
  Target: ATXN2; (-) strand; PAM type: NRG; PAM sequence: GAG
tattttttatttttgagaca

SEQ ID NO: 27123 - DNA, 20 bp, Artificial Sequence
  Description of Artificial Sequence: Synthetic oligonucleotide
  Target: ATXN2; (-) strand; PAM type: NRG; PAM sequence: CAG
tttattttttatttttgaga

SEQ ID NO: 27124 - DNA, 20 bp, Artificial Sequence
  Description of Artificial Sequence: Synthetic oligonucleotide
  Target: ATXN2; (-) strand; PAM type: NRG; PAM sequence: GAG
tatttttattttttattttt

SEQ ID NO: 27125 - DNA, 20 bp, Artificial Sequence
  Description of Artificial Sequence: Synthetic oligonucleotide
  Target: ATXN2; (-) strand; PAM type: NRG; PAM sequence: CAG
tttttgtcttagttcttcta

SEQ ID NO: 27126 - DNA, 20 bp, Artificial Sequence
  Description of Artificial Sequence: Synthetic oligonucleotide
  Target: ATXN2; (-) strand; PAM type: NRG; PAM sequence: TAG
tgaatttactttttttgtct

SEQ ID NO: 27127 - DNA, 20 bp, Artificial Sequence
  Description of Artificial Sequence: Synthetic oligonucleotide
  Target: ATXN2; (-) strand; PAM type: NRG; PAM sequence: TGG
ctattcttcactaatagtat

SEQ ID NO: 27128 - DNA, 20 bp, Artificial Sequence
  Description of Artificial Sequence: Synthetic oligonucleotide
  Target: ATXN2; (-) strand; PAM type: NRG; PAM sequence: TAG
tgactactattcttcactaa

SEQ ID NO: 27129 - DNA, 20 bp, Artificial Sequence
  Description of Artificial Sequence: Synthetic oligonucleotide
  Target: ATXN2; (-) strand; PAM type: NRG; PAM sequence: AAG
tttgccataggtttgagaat

SEQ ID NO: 27130 - DNA, 20 bp, Artificial Sequence
  Description of Artificial Sequence: Synthetic oligonucleotide
  Target: ATXN2; (-) strand; PAM type: NRG; PAM sequence: GAG
aacacttttgccataggttt

SEQ ID NO: 27131 - DNA, 20 bp, Artificial Sequence
  Description of Artificial Sequence: Synthetic oligonucleotide
  Target: ATXN2; (-) strand; PAM type: NRG; PAM sequence: AGG
attctgaacacttttgccat

SEQ ID NO: 27132 - DNA, 20 bp, Artificial Sequence
  Description of Artificial Sequence: Synthetic oligonucleotide
  Target: ATXN2; (-) strand; PAM type: NRG; PAM sequence: TAG
aattctgaacacttttgcca

SEQ ID NO: 27133 - DNA, 20 bp, Artificial Sequence
  Description of Artificial Sequence: Synthetic oligonucleotide
  Target: ATXN2; (-) strand; PAM type: NRG; PAM sequence: TGG
atttgtacagctgtaagaat

SEQ ID NO: 27134 - DNA, 20 bp, Artificial Sequence
  Description of Artificial Sequence: Synthetic oligonucleotide
  Target: ATXN2; (-) strand; PAM type: NRG; PAM sequence: AAG
aaagatatttgtacagctgt

SEQ ID NO: 27135 - DNA, 20 bp, Artificial Sequence
  Description of Artificial Sequence: Synthetic oligonucleotide
  Target: ATXN2; (-) strand; PAM type: NRG; PAM sequence: CAG
aaacagaaaagatatttgta

SEQ ID NO: 27136 - DNA, 20 bp, Artificial Sequence
  Description of Artificial Sequence: Synthetic oligonucleotide
  Target: ATXN2; (-) strand; PAM type: NRG; PAM sequence: AAG
tatttgccagggaaacagaa

SEQ ID NO: 27137 - DNA, 20 bp, Artificial Sequence
  Description of Artificial Sequence: Synthetic oligonucleotide
  Target: ATXN2; (-) strand; PAM type: NRG; PAM sequence: CAG
ttacatatttgccagggaaa

SEQ ID NO: 27138 - DNA, 20 bp, Artificial Sequence
  Description of Artificial Sequence: Synthetic oligonucleotide
  Target: ATXN2; (-) strand; PAM type: NRG; PAM sequence: GGG
aatgttttacatatttgcca

SEQ ID NO: 27139 - DNA, 20 bp, Artificial Sequence
  Description of Artificial Sequence: Synthetic oligonucleotide
  Target: ATXN2; (-) strand; PAM type: NRG; PAM sequence: AGG
aaatgttttacatatttgcc

SEQ ID NO: 27140 - DNA, 20 bp, Artificial Sequence
  Description of Artificial Sequence: Synthetic oligonucleotide
  Target: ATXN2; (-) strand; PAM type: NRG; PAM sequence: CAG
aaaatgttttacatatttgc

SEQ ID NO: 27141 - DNA, 20 bp, Artificial Sequence
  Description of Artificial Sequence: Synthetic oligonucleotide
  Target: ATXN2; (-) strand; PAM type: NRG; PAM sequence: AAG
tgttctgttttttattagaa

SEQ ID NO: 27142 - DNA, 20 bp, Artificial Sequence
  Description of Artificial Sequence: Synthetic oligonucleotide
  Target: ATXN2; (-) strand; PAM type: NRG; PAM sequence: TAG
acagttgttctgttttttat

SEQ ID NO: 27143 - DNA, 20 bp, Artificial Sequence
  Description of Artificial Sequence: Synthetic oligonucleotide
  Target: ATXN2; (-) strand; PAM type: NRG; PAM sequence: CAG
agtgggcatgtgtacttgaa

SEQ ID NO: 27144 - DNA, 20 bp, Artificial Sequence
  Description of Artificial Sequence: Synthetic oligonucleotide
  Target: ATXN2; (-) strand; PAM type: NRG; PAM sequence: GGG
cctgggaaagaatattaagt

SEQ ID NO: 27145 - DNA, 20 bp, Artificial Sequence
  Description of Artificial Sequence: Synthetic oligonucleotide
  Target: ATXN2; (-) strand; PAM type: NRG; PAM sequence: TGG
tcctgggaaagaatattaag

SEQ ID NO: 27146 - DNA, 20 bp, Artificial Sequence
  Description of Artificial Sequence: Synthetic oligonucleotide
  Target: ATXN2; (-) strand; PAM type: NRG; PAM sequence: AAG
tactcctgggaaagaatatt

SEQ ID NO: 27147 - DNA, 20 bp, Artificial Sequence
  Description of Artificial Sequence: Synthetic oligonucleotide
  Target: ATXN2; (-) strand; PAM type: NRG; PAM sequence: AAG
tctatttcatactcctggga

SEQ ID NO: 27148 - DNA, 20 bp, Artificial Sequence
  Description of Artificial Sequence: Synthetic oligonucleotide
  Target: ATXN2; (-) strand; PAM type: NRG; PAM sequence: GGG
tatttctatttcatactcct

SEQ ID NO: 27149 - DNA, 20 bp, Artificial Sequence
  Description of Artificial Sequence: Synthetic oligonucleotide
  Target: ATXN2; (-) strand; PAM type: NRG; PAM sequence: TGG
ctatttctatttcatactcc

SEQ ID NO: 27150 - DNA, 20 bp, Artificial Sequence
  Description of Artificial Sequence: Synthetic oligonucleotide
  Target: ATXN2; (-) strand; PAM type: NRG; PAM sequence: TGG
ataaagcaagagaaggaatg

SEQ ID NO: 27151 - DNA, 20 bp, Artificial Sequence
  Description of Artificial Sequence: Synthetic oligonucleotide
  Target: ATXN2; (-) strand; PAM type: NRG; PAM sequence: AGG
actagtaataaagcaagaga

SEQ ID NO: 27152 - DNA, 20 bp, Artificial Sequence
  Description of Artificial Sequence: Synthetic oligonucleotide
  Target: ATXN2; (-) strand; PAM type: NRG; PAM sequence: AAG
aactagtaataaagcaagag

SEQ ID NO: 27153 - DNA, 20 bp, Artificial Sequence
  Description of Artificial Sequence: Synthetic oligonucleotide
  Target: ATXN2; (-) strand; PAM type: NRG; PAM sequence: GAG
taaaactagtaataaagcaa

SEQ ID NO: 27154 - DNA, 20 bp, Artificial Sequence
  Description of Artificial Sequence: Synthetic oligonucleotide
  Target: ATXN2; (-) strand; PAM type: NRG; PAM sequence: AAG
attaaaactagtaataaagc

SEQ ID NO: 27155 - DNA, 20 bp, Artificial Sequence
  Description of Artificial Sequence: Synthetic oligonucleotide
  Target: ATXN2; (-) strand; PAM type: NRG; PAM sequence: AAG
atatattaaaactagtaata

SEQ ID NO: 27156 - DNA, 20 bp, Artificial Sequence
  Description of Artificial Sequence: Synthetic oligonucleotide
  Target: ATXN2; (-) strand; PAM type: NRG; PAM sequence: TAG
gcatgcagatatattaaaac

SEQ ID NO: 27157 - DNA, 20 bp, Artificial Sequence
  Description of Artificial Sequence: Synthetic oligonucleotide
  Target: ATXN2; (-) strand; PAM type: NRG; PAM sequence: CAG
tcaatggagtcttatgcatg

SEQ ID NO: 27158 - DNA, 20 bp, Artificial Sequence
  Description of Artificial Sequence: Synthetic oligonucleotide
  Target: ATXN2; (-) strand; PAM type: NRG; PAM sequence: GAG
tgtcttggatggtttcaatg

SEQ ID NO: 27159 - DNA, 20 bp, Artificial Sequence
  Description of Artificial Sequence: Synthetic oligonucleotide
  Target: ATXN2; (-) strand; PAM type: NRG; PAM sequence: TGG
cttgtcttggatggtttcaa

SEQ ID NO: 27160 - DNA, 20 bp, Artificial Sequence
  Description of Artificial Sequence: Synthetic oligonucleotide
  Target: ATXN2; (-) strand; PAM type: NRG; PAM sequence: TGG
tttttttctcttgtcttgga

SEQ ID NO: 27161 - DNA, 20 bp, Artificial Sequence
  Description of Artificial Sequence: Synthetic oligonucleotide
  Target: ATXN2; (-) strand; PAM type: NRG; PAM sequence: TGG
attatttttttctcttgtct

SEQ ID NO: 27162 - DNA, 20 bp, Artificial Sequence
  Description of Artificial Sequence: Synthetic oligonucleotide
  Target: ATXN2; (-) strand; PAM type: NRG; PAM sequence: TAG
atatacttactatctagttt

SEQ ID NO: 27163 - DNA, 20 bp, Artificial Sequence
  Description of Artificial Sequence: Synthetic oligonucleotide
  Target: ATXN2; (-) strand; PAM type: NRG; PAM sequence: TAG
atgctaatatacttactatc

SEQ ID NO: 27164 - DNA, 20 bp, Artificial Sequence
  Description of Artificial Sequence: Synthetic oligonucleotide
  Target: ATXN2; (-) strand; PAM type: NRG; PAM sequence: GGG
agtaagactgtttactgata

SEQ ID NO: 27165 - DNA, 20 bp, Artificial Sequence
  Description of Artificial Sequence: Synthetic oligonucleotide
  Target: ATXN2; (-) strand; PAM type: NRG; PAM sequence: AGG
cagtaagactgtttactgat

SEQ ID NO: 27166 - DNA, 20 bp, Artificial Sequence
  Description of Artificial Sequence: Synthetic oligonucleotide
  Target: ATXN2; (-) strand; PAM type: NRG; PAM sequence: TAG
tcagtaagactgtttactga

SEQ ID NO: 27167 - DNA, 20 bp, Artificial Sequence
  Description of Artificial Sequence: Synthetic oligonucleotide
  Target: ATXN2; (-) strand; PAM type: NRG; PAM sequence: AAG
gtttccaggacattttcagt

SEQ ID NO: 27168 - DNA, 20 bp, Artificial Sequence
  Description of Artificial Sequence: Synthetic oligonucleotide
  Target: ATXN2; (-) strand; PAM type: NRG; PAM sequence: CAG
atatgtttccaggacatttt

SEQ ID NO: 27169 - DNA, 20 bp, Artificial Sequence
  Description of Artificial Sequence: Synthetic oligonucleotide
  Target: ATXN2; (-) strand; PAM type: NRG; PAM sequence: AGG
taagtaatgcatatgtttcc

SEQ ID NO: 27170 - DNA, 20 bp, Artificial Sequence
  Description of Artificial Sequence: Synthetic oligonucleotide
  Target: ATXN2; (-) strand; PAM type: NRG; PAM sequence: CAG
gtaagtaatgcatatgtttc

SEQ ID NO: 27171 - DNA, 20 bp, Artificial Sequence
  Description of Artificial Sequence: Synthetic oligonucleotide
  Target: ATXN2; (-) strand; PAM type: NRG; PAM sequence: AAG
ctattaggtaaagaataggt

SEQ ID NO: 27172 - DNA, 20 bp, Artificial Sequence
  Description of Artificial Sequence: Synthetic oligonucleotide
  Target: ATXN2; (-) strand; PAM type: NRG; PAM sequence: AGG
ctctctattaggtaaagaat

SEQ ID NO: 27173 - DNA, 20 bp, Artificial Sequence
  Description of Artificial Sequence: Synthetic oligonucleotide
  Target: ATXN2; (-) strand; PAM type: NRG; PAM sequence: TAG
actctctattaggtaaagaa

SEQ ID NO: 27174 - DNA, 20 bp, Artificial Sequence
  Description of Artificial Sequence: Synthetic oligonucleotide
  Target: ATXN2; (-) strand; PAM type: NRG; PAM sequence: AAG
cttaaactctctattaggta

SEQ ID NO: 27175 - DNA, 20 bp, Artificial Sequence
  Description of Artificial Sequence: Synthetic oligonucleotide
  Target: ATXN2; (-) strand; PAM type: NRG; PAM sequence: AGG
gcattcttaaactctctatt

SEQ ID NO: 27176 - DNA, 20 bp, Artificial Sequence
  Description of Artificial Sequence: Synthetic oligonucleotide
  Target: ATXN2; (-) strand; PAM type: NRG; PAM sequence: TAG
agcattcttaaactctctat

SEQ ID NO: 27177 - DNA, 20 bp, Artificial Sequence
  Description of Artificial Sequence: Synthetic oligonucleotide
  Target: ATXN2; (-) strand; PAM type: NRG; PAM sequence: TAG
gatggtttaagtaaaacaag

SEQ ID NO: 27178 - DNA, 20 bp, Artificial Sequence
  Description of Artificial Sequence: Synthetic oligonucleotide
  Target: ATXN2; (-) strand; PAM type: NRG; PAM sequence: AAG
tgggatggtttaagtaaaac

SEQ ID NO: 27179 - DNA, 20 bp, Artificial Sequence
  Description of Artificial Sequence: Synthetic oligonucleotide
  Target: ATXN2; (-) strand; PAM type: NRG; PAM sequence: AAG
cactgctagtgggatggttt

SEQ ID NO: 27180 - DNA, 20 bp, Artificial Sequence
  Description of Artificial Sequence: Synthetic oligonucleotide
  Target: ATXN2; (-) strand; PAM type: NRG; PAM sequence: TGG
acttaacactgctagtggga

SEQ ID NO: 27181 - DNA, 20 bp, Artificial Sequence
  Description of Artificial Sequence: Synthetic oligonucleotide
  Target: ATXN2; (-) strand; PAM type: NRG; PAM sequence: GGG
aaacacttaacactgctagt

SEQ ID NO: 27182 - DNA, 20 bp, Artificial Sequence
  Description of Artificial Sequence: Synthetic oligonucleotide
  Target: ATXN2; (-) strand; PAM type: NRG; PAM sequence: TGG
aaaacacttaacactgctag

SEQ ID NO: 27183 - DNA, 20 bp, Artificial Sequence
  Description of Artificial Sequence: Synthetic oligonucleotide
  Target: ATXN2; (-) strand; PAM type: NRG; PAM sequence: TAG
tgcaaaacacttaacactgc

SEQ ID NO: 27184 - DNA, 20 bp, Artificial Sequence
  Description of Artificial Sequence: Synthetic oligonucleotide
  Target: ATXN2; (-) strand; PAM type: NRG; PAM sequence: GAG
actacttagtggtactgagg

SEQ ID NO: 27185 - DNA, 20 bp, Artificial Sequence
  Description of Artificial Sequence: Synthetic oligonucleotide
  Target: ATXN2; (-) strand; PAM type: NRG; PAM sequence: GGG
ctactacttagtggtactga

SEQ ID NO: 27186 - DNA, 20 bp, Artificial Sequence
  Description of Artificial Sequence: Synthetic oligonucleotide
  Target: ATXN2; (-) strand; PAM type: NRG; PAM sequence: AGG
actactacttagtggtactg

SEQ ID NO: 27187 - DNA, 20 bp, Artificial Sequence
  Description of Artificial Sequence: Synthetic oligonucleotide
  Target: ATXN2; (-) strand; PAM type: NRG; PAM sequence: GAG
tactactacttagtggtact

SEQ ID NO: 27188 - DNA, 20 bp, Artificial Sequence
  Description of Artificial Sequence: Synthetic oligonucleotide
  Target: ATXN2; (-) strand; PAM type: NRG; PAM sequence: TGG
gaaagattactactacttag

SEQ ID NO: 27189 - DNA, 20 bp, Artificial Sequence
  Description of Artificial Sequence: Synthetic oligonucleotide
  Target: ATXN2; (-) strand; PAM type: NRG; PAM sequence: TAG
tgagaaagattactactact

SEQ ID NO: 27190 - DNA, 20 bp, Artificial Sequence
  Description of Artificial Sequence: Synthetic oligonucleotide
  Target: ATXN2; (-) strand; PAM type: NRG; PAM sequence: AAG
gctgaatggtaaatgtgaga

SEQ ID NO: 27191 - DNA, 20 bp, Artificial Sequence
  Description of Artificial Sequence: Synthetic oligonucleotide
  Target: ATXN2; (-) strand; PAM type: NRG; PAM sequence: GAG
ttgcgctgaatggtaaatgt

SEQ ID NO: 27192 - DNA, 20 bp, Artificial Sequence
  Description of Artificial Sequence: Synthetic oligonucleotide
  Target: ATXN2; (-) strand; PAM type: NRG; PAM sequence: TGG
gtctatcagcttgcgctgaa

SEQ ID NO: 27193 - DNA, 20 bp, Artificial Sequence
  Description of Artificial Sequence: Synthetic oligonucleotide
  Target: ATXN2; (-) strand; PAM type: NRG; PAM sequence: CAG
agtggaatatgattgtctat

SEQ ID NO: 27194 - DNA, 20 bp, Artificial Sequence
  Description of Artificial Sequence: Synthetic oligonucleotide
  Target: ATXN2; (-) strand; PAM type: NRG; PAM sequence: TGG
gaaattcagttttaaagcag

SEQ ID NO: 27195 - DNA, 20 bp, Artificial Sequence
  Description of Artificial Sequence: Synthetic oligonucleotide
  Target: ATXN2; (-) strand; PAM type: NRG; PAM sequence: CAG
aaagaaattcagttttaaag

SEQ ID NO: 27196 - DNA, 20 bp, Artificial Sequence
  Description of Artificial Sequence: Synthetic oligonucleotide
  Target: ATXN2; (-) strand; PAM type: NRG; PAM sequence: AAG
tttaaagaaattcagtttta

SEQ ID NO: 27197 - DNA, 20 bp, Artificial Sequence
  Description of Artificial Sequence: Synthetic oligonucleotide
  Target: ATXN2; (-) strand; PAM type: NRG; PAM sequence: CAG
attgtatttttaaagaaatt

SEQ ID NO: 27198 - DNA, 20 bp, Artificial Sequence
  Description of Artificial Sequence: Synthetic oligonucleotide
  Target: ATXN2; (-) strand; PAM type: NRG; PAM sequence: AAG
tttattttattgtattttta

SEQ ID NO: 27199 - DNA, 20 bp, Artificial Sequence
  Description of Artificial Sequence: Synthetic oligonucleotide
  Target: ATXN2; (-) strand; PAM type: NRG; PAM sequence: CAG
ttgtaatgatttaagaaatg

SEQ ID NO: 27200 - DNA, 20 bp, Artificial Sequence
  Description of Artificial Sequence: Synthetic oligonucleotide
  Target: ATXN2; (-) strand; PAM type: NRG; PAM sequence: AAG
ctcctcacttgtaatgattt

SEQ ID NO: 27201 - DNA, 20 bp, Artificial Sequence
  Description of Artificial Sequence: Synthetic oligonucleotide
  Target: ATXN2; (-) strand; PAM type: NRG; PAM sequence: TGG
ccagtgaatgtatgaaaagg

SEQ ID NO: 27202 - DNA, 20 bp, Artificial Sequence
  Description of Artificial Sequence: Synthetic oligonucleotide
  Target: ATXN2; (-) strand; PAM type: NRG; PAM sequence: AGG
tgaccagtgaatgtatgaaa

SEQ ID NO: 27203 - DNA, 20 bp, Artificial Sequence
  Description of Artificial Sequence: Synthetic oligonucleotide
  Target: ATXN2; (-) strand; PAM type: NRG; PAM sequence: AAG
atgaccagtgaatgtatgaa

SEQ ID NO: 27204 - DNA, 20 bp, Artificial Sequence
  Description of Artificial Sequence: Synthetic oligonucleotide
  Target: ATXN2; (-) strand; PAM type: NRG; PAM sequence: CAG
aaaatagttttaaaaatgac

SEQ ID NO: 27205 - DNA, 20 bp, Artificial Sequence
  Description of Artificial Sequence: Synthetic oligonucleotide
  Target: ATXN2; (-) strand; PAM type: NRG; PAM sequence: TAG
aactgggaaaagtagaaaaa

SEQ ID NO: 27206 - DNA, 20 bp, Artificial Sequence
  Description of Artificial Sequence: Synthetic oligonucleotide
  Target: ATXN2; (-) strand; PAM type: NRG; PAM sequence: TAG
atgccacaaactgggaaaag

SEQ ID NO: 27207 - DNA, 20 bp, Artificial Sequence
  Description of Artificial Sequence: Synthetic oligonucleotide
  Target: ATXN2; (-) strand; PAM type: NRG; PAM sequence: AAG
gacatgccacaaactgggaa

SEQ ID NO: 27208 - DNA, 20 bp, Artificial Sequence
  Description of Artificial Sequence: Synthetic oligonucleotide
  Target: ATXN2; (-) strand; PAM type: NRG; PAM sequence: GGG
aaaaagacatgccacaaact

SEQ ID NO: 27209 - DNA, 20 bp, Artificial Sequence
  Description of Artificial Sequence: Synthetic oligonucleotide
  Target: ATXN2; (-) strand; PAM type: NRG; PAM sequence: TGG
taaaaagacatgccacaaac

SEQ ID NO: 27210 - DNA, 20 bp, Artificial Sequence
  Description of Artificial Sequence: Synthetic oligonucleotide
  Target: ATXN2; (-) strand; PAM type: NRG; PAM sequence: AAG
aaaagtaccatacatttaaa

SEQ ID NO: 27211 - DNA, 20 bp, Artificial Sequence
  Description of Artificial Sequence: Synthetic oligonucleotide
  Target: ATXN2; (-) strand; PAM type: NRG; PAM sequence: AAG
aaagacttagacgtgtccaa

SEQ ID NO: 27212 - DNA, 20 bp, Artificial Sequence
  Description of Artificial Sequence: Synthetic oligonucleotide
  Target: ATXN2; (-) strand; PAM type: NRG; PAM sequence: TAG
aaaaaaaaaaaaaaaagact

SEQ ID NO: 27213 - DNA, 20 bp, Artificial Sequence
  Description of Artificial Sequence: Synthetic oligonucleotide
  Target: ATXN2; (-) strand; PAM type: NRG; PAM sequence: AAG
tctcaaaaaaaaaaaaaaaa

SEQ ID NO: 27214 - DNA, 20 bp, Artificial Sequence
  Description of Artificial Sequence: Synthetic oligonucleotide
  Target: ATXN2; (-) strand; PAM type: NRG; PAM sequence: GAG
tcactccagcttgggcgaca

SEQ ID NO: 27215 - DNA, 20 bp, Artificial Sequence
  Description of Artificial Sequence: Synthetic oligonucleotide
  Target: ATXN2; (-) strand; PAM type: NRG; PAM sequence: CAG
catcactccagcttgggcga

SEQ ID NO: 27216 - DNA, 20 bp, Artificial Sequence
  Description of Artificial Sequence: Synthetic oligonucleotide
  Target: ATXN2; (-) strand; PAM type: NRG; PAM sequence: GGG
gtgccacatcactccagctt

SEQ ID NO: 27217 - DNA, 20 bp, Artificial Sequence
  Description of Artificial Sequence: Synthetic oligonucleotide
  Target: ATXN2; (-) strand; PAM type: NRG; PAM sequence: TGG
tgtgccacatcactccagct

SEQ ID NO: 27218 - DNA, 20 bp, Artificial Sequence
  Description of Artificial Sequence: Synthetic oligonucleotide
  Target: ATXN2; (-) strand; PAM type: NRG; PAM sequence: CAG
gagattgtgccacatcactc

SEQ ID NO: 27219 - DNA, 20 bp, Artificial Sequence
  Description of Artificial Sequence: Synthetic oligonucleotide
  Target: ATXN2; (-) strand; PAM type: NRG; PAM sequence: GAG
agtggaggttgcagtgagcc

SEQ ID NO: 27220 - DNA, 20 bp, Artificial Sequence
  Description of Artificial Sequence: Synthetic oligonucleotide
  Target: ATXN2; (-) strand; PAM type: NRG; PAM sequence: GAG
tgggaagtggaggttgcagt

SEQ ID NO: 27221 - DNA, 20 bp, Artificial Sequence
  Description of Artificial Sequence: Synthetic oligonucleotide
  Target: ATXN2; (-) strand; PAM type: NRG; PAM sequence: CAG
aatttgggaagtggaggttg

SEQ ID NO: 27222 - DNA, 20 bp, Artificial Sequence
  Description of Artificial Sequence: Synthetic oligonucleotide
  Target: ATXN2; (-) strand; PAM type: NRG; PAM sequence: AGG
tgcttgaatttgggaagtgg

SEQ ID NO: 27223 - DNA, 20 bp, Artificial Sequence
  Description of Artificial Sequence: Synthetic oligonucleotide
  Target: ATXN2; (-) strand; PAM type: NRG; PAM sequence: GAG
ttgcttgaatttgggaagtg

SEQ ID NO: 27224 - DNA, 20 bp, Artificial Sequence
  Description of Artificial Sequence: Synthetic oligonucleotide
  Target: ATXN2; (-) strand; PAM type: NRG; PAM sequence: TGG
aattgcttgaatttgggaag

SEQ ID NO: 27225 - DNA, 20 bp, Artificial Sequence
  Description of Artificial Sequence: Synthetic oligonucleotide
  Target: ATXN2; (-) strand; PAM type: NRG; PAM sequence: AAG
gagaattgcttgaatttggg

SEQ ID NO: 27226 - DNA, 20 bp, Artificial Sequence
  Description of Artificial Sequence: Synthetic oligonucleotide
  Target: ATXN2; (-) strand; PAM type: NRG; PAM sequence: GGG
caggagaattgcttgaattt

SEQ ID NO: 27227 - DNA, 20 bp, Artificial Sequence
  Description of Artificial Sequence: Synthetic oligonucleotide
  Target: ATXN2; (-) strand; PAM type: NRG; PAM sequence: TGG
gcaggagaattgcttgaatt

SEQ ID NO: 27228 - DNA, 20 bp, Artificial Sequence
  Description of Artificial Sequence: Synthetic oligonucleotide
  Target: ATXN2; (-) strand; PAM type: NRG; PAM sequence: GAG
tactcaggaggctaaggcag

SEQ ID NO: 27229 - DNA, 20 bp, Artificial Sequence
  Description of Artificial Sequence: Synthetic oligonucleotide
  Target: ATXN2; (-) strand; PAM type: NRG; PAM sequence: AGG
gctactcaggaggctaaggc

SEQ ID NO: 27230 - DNA, 20 bp, Artificial Sequence
  Description of Artificial Sequence: Synthetic oligonucleotide
  Target: ATXN2; (-) strand; PAM type: NRG; PAM sequence: CAG
agctactcaggaggctaagg

SEQ ID NO: 27231 - DNA, 20 bp, Artificial Sequence
  Description of Artificial Sequence: Synthetic oligonucleotide
  Target: ATXN2; (-) strand; PAM type: NRG; PAM sequence: AGG
cccagctactcaggaggcta

SEQ ID NO: 27232 - DNA, 20 bp, Artificial Sequence
  Description of Artificial Sequence: Synthetic oligonucleotide
  Target: ATXN2; (-) strand; PAM type: NRG; PAM sequence: AAG
tcccagctactcaggaggct

SEQ ID NO: 27233 - DNA, 20 bp, Artificial Sequence
  Description of Artificial Sequence: Synthetic oligonucleotide
  Target: ATXN2; (-) strand; PAM type: NRG; PAM sequence: AGG
tgtaatcccagctactcagg

SEQ ID NO: 27234 - DNA, 20 bp, Artificial Sequence
  Description of Artificial Sequence: Synthetic oligonucleotide
  Target: ATXN2; (-) strand; PAM type: NRG; PAM sequence: GAG
ctgtaatcccagctactcag

SEQ ID NO: 27235 - DNA, 20 bp, Artificial Sequence
  Description of Artificial Sequence: Synthetic oligonucleotide
  Target: ATXN2; (-) strand; PAM type: NRG; PAM sequence: AGG
gcctgtaatcccagctactc

SEQ ID NO: 27236 - DNA, 20 bp, Artificial Sequence
  Description of Artificial Sequence: Synthetic oligonucleotide
  Target: ATXN2; (-) strand; PAM type: NRG; PAM sequence: CAG
tgcctgtaatcccagctact

SEQ ID NO: 27237 - DNA, 20 bp, Artificial Sequence
  Description of Artificial Sequence: Synthetic oligonucleotide
  Target: ATXN2; (-) strand; PAM type: NRG; PAM sequence: CAG
gtagcacatgcctgtaatcc

SEQ ID NO: 27238 - DNA, 20 bp, Artificial Sequence
  Description of Artificial Sequence: Synthetic oligonucleotide
  Target: ATXN2; (-) strand; PAM type: NRG; PAM sequence: TAG
aaaaaattagtcaggcatgg

SEQ ID NO: 27239 - DNA, 20 bp, Artificial Sequence
  Description of Artificial Sequence: Synthetic oligonucleotide
  Target: ATXN2; (-) strand; PAM type: NRG; PAM sequence: TGG
acaaaaaaattagtcaggca

SEQ ID NO: 27240 - DNA, 20 bp, Artificial Sequence
  Description of Artificial Sequence: Synthetic oligonucleotide
  Target: ATXN2; (-) strand; PAM type: NRG; PAM sequence: AGG
aaaatacaaaaaaattagtc

SEQ ID NO: 27241 - DNA, 20 bp, Artificial Sequence
  Description of Artificial Sequence: Synthetic oligonucleotide
  Target: ATXN2; (-) strand; PAM type: NRG; PAM sequence: CAG
aaaaatacaaaaaaattagt

SEQ ID NO: 27242 - DNA, 20 bp, Artificial Sequence
  Description of Artificial Sequence: Synthetic oligonucleotide
  Target: ATXN2; (-) strand; PAM type: NRG; PAM sequence: TAG
tactaaaaatacaaaaaaat

SEQ ID NO: 27243 - DNA, 20 bp, Artificial Sequence
  Description of Artificial Sequence: Synthetic oligonucleotide
  Target: ATXN2; (-) strand; PAM type: NRG; PAM sequence: TGG
tgagaccaacctggtcaacc

SEQ ID NO: 27244 - DNA, 20 bp, Artificial Sequence
  Description of Artificial Sequence: Synthetic oligonucleotide
  Target: ATXN2; (-) strand; PAM type: NRG; PAM sequence: TGG
tcaggagtttgagaccaacc

SEQ ID NO: 27245 - DNA, 20 bp, Artificial Sequence
  Description of Artificial Sequence: Synthetic oligonucleotide
  Target: ATXN2; (-) strand; PAM type: NRG; PAM sequence: GAG
tcacttgaggtcaggagttt

SEQ ID NO: 27246 - DNA, 20 bp, Artificial Sequence
  Description of Artificial Sequence: Synthetic oligonucleotide
  Target: ATXN2; (-) strand; PAM type: NRG; PAM sequence: GAG
ggtggatcacttgaggtcag

SEQ ID NO: 27247 - DNA, 20 bp, Artificial Sequence
  Description of Artificial Sequence: Synthetic oligonucleotide
  Target: ATXN2; (-) strand; PAM type: NRG; PAM sequence: AGG
cgggtggatcacttgaggtc

SEQ ID NO: 27248 - DNA, 20 bp, Artificial Sequence
  Description of Artificial Sequence: Synthetic oligonucleotide
  Target: ATXN2; (-) strand; PAM type: NRG; PAM sequence: CAG
gcgggtggatcacttgaggt

SEQ ID NO: 27249 - DNA, 20 bp, Artificial Sequence
  Description of Artificial Sequence: Synthetic oligonucleotide
  Target: ATXN2; (-) strand; PAM type: NRG; PAM sequence: AGG
caaagcgggtggatcacttg

SEQ ID NO: 27250 - DNA, 20 bp, Artificial Sequence
  Description of Artificial Sequence: Synthetic oligonucleotide
  Target: ATXN2; (-) strand; PAM type: NRG; PAM sequence: GAG
ccaaagcgggtggatcactt

SEQ ID NO: 27251 - DNA, 20 bp, Artificial Sequence
  Description of Artificial Sequence: Synthetic oligonucleotide
  Target: ATXN2; (-) strand; PAM type: NRG; PAM sequence: TGG
ctttgggaggccaaagcggg

SEQ ID NO: 27252 - DNA, 20 bp, Artificial Sequence
  Description of Artificial Sequence: Synthetic oligonucleotide
  Target: ATXN2; (-) strand; PAM type: NRG; PAM sequence: GGG
gcactttgggaggccaaagc

SEQ ID NO: 27253 - DNA, 20 bp, Artificial Sequence
  Description of Artificial Sequence: Synthetic oligonucleotide
  Target: ATXN2; (-) strand; PAM type: NRG; PAM sequence: CGG
agcactttgggaggccaaag

SEQ ID NO: 27254 - DNA, 20 bp, Artificial Sequence
  Description of Artificial Sequence: Synthetic oligonucleotide
  Target: ATXN2; (-) strand; PAM type: NRG; PAM sequence: AAG
cccagcactttgggaggcca

SEQ ID NO: 27255 - DNA, 20 bp, Artificial Sequence
  Description of Artificial Sequence: Synthetic oligonucleotide
  Target: ATXN2; (-) strand; PAM type: NRG; PAM sequence: AGG
tgtaatcccagcactttggg

SEQ ID NO: 27256 - DNA, 20 bp, Artificial Sequence
  Description of Artificial Sequence: Synthetic oligonucleotide
  Target: ATXN2; (-) strand; PAM type: NRG; PAM sequence: GAG
ttgtaatcccagcactttgg

SEQ ID NO: 27257 - DNA, 20 bp, Artificial Sequence
  Description of Artificial Sequence: Synthetic oligonucleotide
  Target: ATXN2; (-) strand; PAM type: NRG; PAM sequence: GGG
gcttgtaatcccagcacttt

SEQ ID NO: 27258 - DNA, 20 bp, Artificial Sequence
  Description of Artificial Sequence: Synthetic oligonucleotide
  Target: ATXN2; (-) strand; PAM type: NRG; PAM sequence: TGG
cgcttgtaatcccagcactt

SEQ ID NO: 27259 - DNA, 20 bp, Artificial Sequence
  Description of Artificial Sequence: Synthetic oligonucleotide
  Target: ATXN2; (-) strand; PAM type: NRG; PAM sequence: CAG
ggtgctcacgcttgtaatcc

SEQ ID NO: 27260 - DNA, 20 bp, Artificial Sequence
  Description of Artificial Sequence: Synthetic oligonucleotide
  Target: ATXN2; (-) strand; PAM type: NRG; PAM sequence: TGG
ttaaagatttaggccgggtg

SEQ ID NO: 27261 - DNA, 20 bp, Artificial Sequence
  Description of Artificial Sequence: Synthetic oligonucleotide
  Target: ATXN2; (-) strand; PAM type: NRG; PAM sequence: GGG
agagattaaagatttaggcc

SEQ ID NO: 27262 - DNA, 20 bp, Artificial Sequence
  Description of Artificial Sequence: Synthetic oligonucleotide
  Target: ATXN2; (-) strand; PAM type: NRG; PAM sequence: CGG
aagagattaaagatttaggc

SEQ ID NO: 27263 - DNA, 20 bp, Artificial Sequence
  Description of Artificial Sequence: Synthetic oligonucleotide
  Target: ATXN2; (-) strand; PAM type: NRG; PAM sequence: AGG
tataaagagattaaagattt

SEQ ID NO: 27264 - DNA, 20 bp, Artificial Sequence
  Description of Artificial Sequence: Synthetic oligonucleotide
  Target: ATXN2; (-) strand; PAM type: NRG; PAM sequence: TAG
ttataaagagattaaagatt

SEQ ID NO: 27265 - DNA, 20 bp, Artificial Sequence
  Description of Artificial Sequence: Synthetic oligonucleotide
  Target: ATXN2; (-) strand; PAM type: NRG; PAM sequence: AAG
ctttgattataaagagatta

SEQ ID NO: 27266 - DNA, 20 bp, Artificial Sequence
  Description of Artificial Sequence: Synthetic oligonucleotide
  Target: ATXN2; (-) strand; PAM type: NRG; PAM sequence: GAG
tcgatacctttgattataaa

SEQ ID NO: 27267 - DNA, 20 bp, Artificial Sequence
  Description of Artificial Sequence: Synthetic oligonucleotide
  Target: ATXN2; (-) strand; PAM type: NRG; PAM sequence: AAG
gatcgatacctttgattata

SEQ ID NO: 27268 - DNA, 20 bp, Artificial Sequence
  Description of Artificial Sequence: Synthetic oligonucleotide
  Target: ATXN2; (-) strand; PAM type: NRG; PAM sequence: AAG
gcaaaaaaatcatgaagtaa

SEQ ID NO: 27269 - DNA, 20 bp, Artificial Sequence
  Description of Artificial Sequence: Synthetic oligonucleotide
  Target: ATXN2; (-) strand; PAM type: NRG; PAM sequence: AAG
accagagcaaaaaaatcatg

SEQ ID NO: 27270 - DNA, 20 bp, Artificial Sequence
  Description of Artificial Sequence: Synthetic oligonucleotide
  Target: ATXN2; (-) strand; PAM type: NRG; PAM sequence: GAG
ctttataagcatgactacca

SEQ ID NO: 27271 - DNA, 20 bp, Artificial Sequence
  Description of Artificial Sequence: Synthetic oligonucleotide
  Target: ATXN2; (-) strand; PAM type: NRG; PAM sequence: CAG
gactttataagcatgactac

SEQ ID NO: 27272 - DNA, 20 bp, Artificial Sequence
  Description of Artificial Sequence: Synthetic oligonucleotide
  Target: ATXN2; (-) strand; PAM type: NRG; PAM sequence: AAG
tgagtggagaaggactttat

SEQ ID NO: 27273 - DNA, 20 bp, Artificial Sequence
  Description of Artificial Sequence: Synthetic oligonucleotide
  Target: ATXN2; (-) strand; PAM type: NRG; PAM sequence: AGG
tgtttaattttgagtggaga

SEQ ID NO: 27274 - DNA, 20 bp, Artificial Sequence
  Description of Artificial Sequence: Synthetic oligonucleotide
  Target: ATXN2; (-) strand; PAM type: NRG; PAM sequence: AAG
ttgtttaattttgagtggag

SEQ ID NO: 27275 - DNA, 20 bp, Artificial Sequence
  Description of Artificial Sequence: Synthetic oligonucleotide
  Target: ATXN2; (-) strand; PAM type: NRG; PAM sequence: GAG
aatttgtttaattttgagtg

SEQ ID NO: 27276 - DNA, 20 bp, Artificial Sequence
  Description of Artificial Sequence: Synthetic oligonucleotide
  Target: ATXN2; (-) strand; PAM type: NRG; PAM sequence: TGG
tgaatttgtttaattttgag

SEQ ID NO: 27277 - DNA, 20 bp, Artificial Sequence
  Description of Artificial Sequence: Synthetic oligonucleotide
  Target: ATXN2; (-) strand; PAM type: NRG; PAM sequence: GAG
ctgtgaatttgtttaatttt

SEQ ID NO: 27278 - DNA, 20 bp, Artificial Sequence
  Description of Artificial Sequence: Synthetic oligonucleotide
  Target: ATXN2; (-) strand; PAM type: NRG; PAM sequence: GAG
acaacacccagactacactg

SEQ ID NO: 27279 - DNA, 20 bp, Artificial Sequence
  Description of Artificial Sequence: Synthetic oligonucleotide
  Target: ATXN2; (-) strand; PAM type: NRG; PAM sequence: TGG
aaacaacacccagactacac

SEQ ID NO: 27280 - DNA, 20 bp, Artificial Sequence
  Description of Artificial Sequence: Synthetic oligonucleotide
  Target: ATXN2; (-) strand; PAM type: NRG; PAM sequence: CAG
tgattaaacaaaacaacacc

SEQ ID NO: 27281 - DNA, 20 bp, Artificial Sequence
  Description of Artificial Sequence: Synthetic oligonucleotide
  Target: ATXN2; (-) strand; PAM type: NRG; PAM sequence: GAG
ataaaaccaaatagattaat

SEQ ID NO: 27282 - DNA, 20 bp, Artificial Sequence
  Description of Artificial Sequence: Synthetic oligonucleotide
  Target: ATXN2; (-) strand; PAM type: NRG; PAM sequence: TAG
cactgataaataaaaccaaa

SEQ ID NO: 27283 - DNA, 20 bp, Artificial Sequence
  Description of Artificial Sequence: Synthetic oligonucleotide
  Target: ATXN2; (-) strand; PAM type: NRG; PAM sequence: TAG
ctgggacattggggacaaat

SEQ ID NO: 27284 - DNA, 20 bp, Artificial Sequence
  Description of Artificial Sequence: Synthetic oligonucleotide
  Target: ATXN2; (-) strand; PAM type: NRG; PAM sequence: GGG
taaatgattctgggacattg

SEQ ID NO: 27285 - DNA, 20 bp, Artificial Sequence
  Description of Artificial Sequence: Synthetic oligonucleotide
  Target: ATXN2; (-) strand; PAM type: NRG; PAM sequence: GGG
gtaaatgattctgggacatt

SEQ ID NO: 27286 - DNA, 20 bp, Artificial Sequence
  Description of Artificial Sequence: Synthetic oligonucleotide
  Target: ATXN2; (-) strand; PAM type: NRG; PAM sequence: TGG
agtaaatgattctgggacat

SEQ ID NO: 27287 - DNA, 20 bp, Artificial Sequence
  Description of Artificial Sequence: Synthetic oligonucleotide
  Target: ATXN2; (-) strand; PAM type: NRG; PAM sequence: GGG
attattcagtaaatgattct

SEQ ID NO: 27288 - DNA, 20 bp, Artificial Sequence
  Description of Artificial Sequence: Synthetic oligonucleotide
  Target: ATXN2; (-) strand; PAM type: NRG; PAM sequence: TGG
gattattcagtaaatgattc

SEQ ID NO: 27289 - DNA, 20 bp, Artificial Sequence
  Description of Artificial Sequence: Synthetic oligonucleotide
  Target: ATXN2; (-) strand; PAM type: NRG; PAM sequence: CAG
tggaggaaaggtggattatt

SEQ ID NO: 27290 - DNA, 20 bp, Artificial Sequence
  Description of Artificial Sequence: Synthetic oligonucleotide
  Target: ATXN2; (-) strand; PAM type: NRG; PAM sequence: TGG
ctttaattctggaggaaagg

SEQ ID NO: 27291 - DNA, 20 bp, Artificial Sequence
  Description of Artificial Sequence: Synthetic oligonucleotide
  Target: ATXN2; (-) strand; PAM type: NRG; PAM sequence: AGG
gcactttaattctggaggaa

SEQ ID NO: 27292 - DNA, 20 bp, Artificial Sequence
  Description of Artificial Sequence: Synthetic oligonucleotide
  Target: ATXN2; (-) strand; PAM type: NRG; PAM sequence: AAG
agcactttaattctggagga

SEQ ID NO: 27293 - DNA, 20 bp, Artificial Sequence
  Description of Artificial Sequence: Synthetic oligonucleotide
  Target: ATXN2; (-) strand; PAM type: NRG; PAM sequence: AGG
atatagcactttaattctgg

SEQ ID NO: 27294 - DNA, 20 bp, Artificial Sequence
  Description of Artificial Sequence: Synthetic oligonucleotide
  Target: ATXN2; (-) strand; PAM type: NRG; PAM sequence: GAG
aatatagcactttaattctg

SEQ ID NO: 27295 - DNA, 20 bp, Artificial Sequence
  Description of Artificial Sequence: Synthetic oligonucleotide
  Target: ATXN2; (-) strand; PAM type: NRG; PAM sequence: TGG
gcaatatagcactttaattc

SEQ ID NO: 27296 - DNA, 20 bp, Artificial Sequence
  Description of Artificial Sequence: Synthetic oligonucleotide
  Target: ATXN2; (-) strand; PAM type: NRG; PAM sequence: TAG
tattttattaatatgcaata

SEQ ID NO: 27297 - DNA, 20 bp, Artificial Sequence
  Description of Artificial Sequence: Synthetic oligonucleotide
  Target: ATXN2; (-) strand; PAM type: NRG; PAM sequence: GGG
atccaaaactgaatttatgt

SEQ ID NO: 27298 - DNA, 20 bp, Artificial Sequence
  Description of Artificial Sequence: Synthetic oligonucleotide
  Target: ATXN2; (-) strand; PAM type: NRG; PAM sequence: TGG
catccaaaactgaatttatg

SEQ ID NO: 27299 - DNA, 20 bp, Artificial Sequence
  Description of Artificial Sequence: Synthetic oligonucleotide
  Target: ATXN2; (-) strand; PAM type: NRG; PAM sequence: GAG
tgtcacagtggctacgtatg

SEQ ID NO: 27300 - DNA, 20 bp, Artificial Sequence
  Description of Artificial Sequence: Synthetic oligonucleotide
  Target: ATXN2; (-) strand; PAM type: NRG; PAM sequence: TGG
actgtcacagtggctacgta

SEQ ID NO: 27301 - DNA, 20 bp, Artificial Sequence
  Description of Artificial Sequence: Synthetic oligonucleotide
  Target: ATXN2; (-) strand; PAM type: NRG; PAM sequence: TGG
aagaattataactgtcacag

SEQ ID NO: 27302 - DNA, 20 bp, Artificial Sequence
  Description of Artificial Sequence: Synthetic oligonucleotide
  Target: ATXN2; (-) strand; PAM type: NRG; PAM sequence: CAG
aaaaagaattataactgtca

SEQ ID NO: 27303 - DNA, 20 bp, Artificial Sequence
  Description of Artificial Sequence: Synthetic oligonucleotide
  Target: ATXN2; (-) strand; PAM type: NRG; PAM sequence: AAG
aaaaaaaaaaaaaaaaaaaa

SEQ ID NO: 27304 - DNA, 20 bp, Artificial Sequence
  Description of Artificial Sequence: Synthetic oligonucleotide
  Target: ATXN2; (-) strand; PAM type: NRG; PAM sequence: GAG
cactccagcctgggcaacaa

SEQ ID NO: 27305 - DNA, 20 bp, Artificial Sequence
  Description of Artificial Sequence: Synthetic oligonucleotide
  Target: ATXN2; (-) strand; PAM type: NRG; PAM sequence: AAG
tgcactccagcctgggcaac

SEQ ID NO: 27306 - DNA, 20 bp, Artificial Sequence
  Description of Artificial Sequence: Synthetic oligonucleotide
  Target: ATXN2; (-) strand; PAM type: NRG; PAM sequence: GGG
gcgccattgcactccagcct

SEQ ID NO: 27307 - DNA, 20 bp, Artificial Sequence
  Description of Artificial Sequence: Synthetic oligonucleotide
  Target: ATXN2; (-) strand; PAM type: NRG; PAM sequence: TGG
cgcgccattgcactccagcc

SEQ ID NO: 27308 - DNA, 20 bp, Artificial Sequence
  Description of Artificial Sequence: Synthetic oligonucleotide
  Target: ATXN2; (-) strand; PAM type: NRG; PAM sequence: CAG
gagatcgcgccattgcactc

SEQ ID NO: 27309 - DNA, 20 bp, Artificial Sequence
  Description of Artificial Sequence: Synthetic oligonucleotide
  Target: ATXN2; (-) strand; PAM type: NRG; PAM sequence: GAG
ggtggaggttgcagtgagcc

SEQ ID NO: 27310 - DNA, 20 bp, Artificial Sequence
  Description of Artificial Sequence: Synthetic oligonucleotide
  Target: ATXN2; (-) strand; PAM type: NRG; PAM sequence: GAG
cgggaggtggaggttgcagt

SEQ ID NO: 27311 - DNA, 20 bp, Artificial Sequence
  Description of Artificial Sequence: Synthetic oligonucleotide
  Target: ATXN2; (-) strand; PAM type: NRG; PAM sequence: CAG
aactcgggaggtggaggttg

SEQ ID NO: 27312 - DNA, 20 bp, Artificial Sequence
  Description of Artificial Sequence: Synthetic oligonucleotide
  Target: ATXN2; (-) strand; PAM type: NRG; PAM sequence: AGG
cgcttgaactcgggaggtgg

SEQ ID NO: 27313 - DNA, 20 bp, Artificial Sequence
  Description of Artificial Sequence: Synthetic oligonucleotide
  Target: ATXN2; (-) strand; PAM type: NRG; PAM sequence: GAG
tcgcttgaactcgggaggtg

SEQ ID NO: 27314 - DNA, 20 bp, Artificial Sequence
  Description of Artificial Sequence: Synthetic oligonucleotide
  Target: ATXN2; (-) strand; PAM type: NRG; PAM sequence: TGG
aatcgcttgaactcgggagg

SEQ ID NO: 27315 - DNA, 20 bp, Artificial Sequence
  Description of Artificial Sequence: Synthetic oligonucleotide
  Target: ATXN2; (-) strand; PAM type: NRG; PAM sequence: AGG
gagaatcgcttgaactcggg

SEQ ID NO: 27316 - DNA, 20 bp, Artificial Sequence
  Description of Artificial Sequence: Synthetic oligonucleotide
  Target: ATXN2; (-) strand; PAM type: NRG; PAM sequence: GAG
ggagaatcgcttgaactcgg

SEQ ID NO: 27317 - DNA, 20 bp, Artificial Sequence
  Description of Artificial Sequence: Synthetic oligonucleotide
  Target: ATXN2; (-) strand; PAM type: NRG; PAM sequence: GGG
caggagaatcgcttgaactc

SEQ ID NO: 27318 - DNA, 20 bp, Artificial Sequence
  Description of Artificial Sequence: Synthetic oligonucleotide
  Target: ATXN2; (-) strand; PAM type: NRG; PAM sequence: CGG
gcaggagaatcgcttgaact

SEQ ID NO: 27319 - DNA, 20 bp, Artificial Sequence
  Description of Artificial Sequence: Synthetic oligonucleotide
  Target: ATXN2; (-) strand; PAM type: NRG; PAM sequence: GAG
tactcgggaggctgaggcag

SEQ ID NO: 27320 - DNA, 20 bp, Artificial Sequence
  Description of Artificial Sequence: Synthetic oligonucleotide
  Target: ATXN2; (-) strand; PAM type: NRG; PAM sequence: AGG
gctactcgggaggctgaggc

SEQ ID NO: 27321 - DNA, 20 bp, Artificial Sequence
  Description of Artificial Sequence: Synthetic oligonucleotide
  Target: ATXN2; (-) strand; PAM type: NRG; PAM sequence: CAG
agctactcgggaggctgagg

SEQ ID NO: 27322 - DNA, 20 bp, Artificial Sequence
  Description of Artificial Sequence: Synthetic oligonucleotide
  Target: ATXN2; (-) strand; PAM type: NRG; PAM sequence: AGG
cccagctactcgggaggctg

SEQ ID NO: 27323 - DNA, 20 bp, Artificial Sequence
  Description of Artificial Sequence: Synthetic oligonucleotide
  Target: ATXN2; (-) strand; PAM type: NRG; PAM sequence: GAG
tcccagctactcgggaggct

SEQ ID NO: 27324 - DNA, 20 bp, Artificial Sequence
  Description of Artificial Sequence: Synthetic oligonucleotide
  Target: ATXN2; (-) strand; PAM type: NRG; PAM sequence: AGG
tgtagtcccagctactcggg

SEQ ID NO: 27325 - DNA, 20 bp, Artificial Sequence
  Description of Artificial Sequence: Synthetic oligonucleotide
  Target: ATXN2; (-) strand; PAM type: NRG; PAM sequence: GAG
ctgtagtcccagctactcgg

SEQ ID NO: 27326 - DNA, 20 bp, Artificial Sequence
  Description of Artificial Sequence: Synthetic oligonucleotide
  Target: ATXN2; (-) strand; PAM type: NRG; PAM sequence: GGG
acctgtagtcccagctactc

SEQ ID NO: 27327 - DNA, 20 bp, Artificial Sequence
  Description of Artificial Sequence: Synthetic oligonucleotide
  Target: ATXN2; (-) strand; PAM type: NRG; PAM sequence: CGG
tacctgtagtcccagctact

SEQ ID NO: 27328 - DNA, 20 bp, Artificial Sequence
  Description of Artificial Sequence: Synthetic oligonucleotide
  Target: ATXN2; (-) strand; PAM type: NRG; PAM sequence: CAG
gtggcgcatacctgtagtcc

SEQ ID NO: 27329 - DNA, 20 bp, Artificial Sequence
  Description of Artificial Sequence: Synthetic oligonucleotide
  Target: ATXN2; (-) strand; PAM type: NRG; PAM sequence: TAG
gtcatggtggcgcatacctg

SEQ ID NO: 27330 - DNA, 20 bp, Artificial Sequence
  Description of Artificial Sequence: Synthetic oligonucleotide
  Target: ATXN2; (-) strand; PAM type: NRG; PAM sequence: TGG
acaaaattagccggtcatgg

SEQ ID NO: 27331 - DNA, 20 bp, Artificial Sequence
  Description of Artificial Sequence: Synthetic oligonucleotide
  Target: ATXN2; (-) strand; PAM type: NRG; PAM sequence: TGG
aatacaaaattagccggtca

SEQ ID NO: 27332 - DNA, 20 bp, Artificial Sequence
  Description of Artificial Sequence: Synthetic oligonucleotide
  Target: ATXN2; (-) strand; PAM type: NRG; PAM sequence: CGG
actaaaaatacaaaattagc

SEQ ID NO: 27333 - DNA, 20 bp, Artificial Sequence
  Description of Artificial Sequence: Synthetic oligonucleotide
  Target: ATXN2; (-) strand; PAM type: NRG; PAM sequence: TAG
ctctactaaaaatacaaaat

SEQ ID NO: 27334 - DNA, 20 bp, Artificial Sequence
  Description of Artificial Sequence: Synthetic oligonucleotide
  Target: ATXN2; (-) strand; PAM type: NRG; PAM sequence: GAG
tgaccagcctgaccaacatg

SEQ ID NO: 27335 - DNA, 20 bp, Artificial Sequence
  Description of Artificial Sequence: Synthetic oligonucleotide
  Target: ATXN2; (-) strand; PAM type: NRG; PAM sequence: TGG
catgaccagcctgaccaaca

SEQ ID NO: 27336 - DNA, 20 bp, Artificial Sequence
  Description of Artificial Sequence: Synthetic oligonucleotide
  Target: ATXN2; (-) strand; PAM type: NRG; PAM sequence: CAG
tgaggcaggcagatcatgac

SEQ ID NO: 27337 - DNA, 20 bp, Artificial Sequence
  Description of Artificial Sequence: Synthetic oligonucleotide
  Target: ATXN2; (-) strand; PAM type: NRG; PAM sequence: CAG
ctttgggaggctgaggcagg

SEQ ID NO: 27338 - DNA, 20 bp, Artificial Sequence
  Description of Artificial Sequence: Synthetic oligonucleotide
  Target: ATXN2; (-) strand; PAM type: NRG; PAM sequence: AGG
gcactttgggaggctgaggc

SEQ ID NO: 27339 - DNA, 20 bp, Artificial Sequence
  Description of Artificial Sequence: Synthetic oligonucleotide
  Target: ATXN2; (-) strand; PAM type: NRG; PAM sequence: CAG
agcactttgggaggctgagg

SEQ ID NO: 27340 - DNA, 20 bp, Artificial Sequence
  Description of Artificial Sequence: Synthetic oligonucleotide
  Target: ATXN2; (-) strand; PAM type: NRG; PAM sequence: AGG
tccagcactttgggaggctg

SEQ ID NO: 27341 - DNA, 20 bp, Artificial Sequence
  Description of Artificial Sequence: Synthetic oligonucleotide
  Target: ATXN2; (-) strand; PAM type: NRG; PAM sequence: GAG
ttccagcactttgggaggct

SEQ ID NO: 27342 - DNA, 20 bp, Artificial Sequence
  Description of Artificial Sequence: Synthetic oligonucleotide
  Target: ATXN2; (-) strand; PAM type: NRG; PAM sequence: AGG
tataattccagcactttggg

SEQ ID NO: 27343 - DNA, 20 bp, Artificial Sequence
  Description of Artificial Sequence: Synthetic oligonucleotide
  Target: ATXN2; (-) strand; PAM type: NRG; PAM sequence: GAG
ctataattccagcactttgg

SEQ ID NO: 27344 - DNA, 20 bp, Artificial Sequence
  Description of Artificial Sequence: Synthetic oligonucleotide
  Target: ATXN2; (-) strand; PAM type: NRG; PAM sequence: GGG
gcctataattccagcacttt

SEQ ID NO: 27345 - DNA, 20 bp, Artificial Sequence
  Description of Artificial Sequence: Synthetic oligonucleotide
  Target: ATXN2; (-) strand; PAM type: NRG; PAM sequence: TGG
cgcctataattccagcactt

SEQ ID NO: 27346 - DNA, 20 bp, Artificial Sequence
  Description of Artificial Sequence: Synthetic oligonucleotide
  Target: ATXN2; (-) strand; PAM type: NRG; PAM sequence: CAG
gtggctcacgcctataattc

SEQ ID NO: 27347 - DNA, 20 bp, Artificial Sequence
  Description of Artificial Sequence: Synthetic oligonucleotide
  Target: ATXN2; (-) strand; PAM type: NRG; PAM sequence: TGG
aacttgtcagctgggtgcgg

SEQ ID NO: 27348 - DNA, 20 bp, Artificial Sequence
  Description of Artificial Sequence: Synthetic oligonucleotide
  Target: ATXN2; (-) strand; PAM type: NRG; PAM sequence: CGG
cataacttgtcagctgggtg

SEQ ID NO: 27349 - DNA, 20 bp, Artificial Sequence
  Description of Artificial Sequence: Synthetic oligonucleotide
  Target: ATXN2; (-) strand; PAM type: NRG; PAM sequence: GGG
taaaacataacttgtcagct

SEQ ID NO: 27350 - DNA, 20 bp, Artificial Sequence
  Description of Artificial Sequence: Synthetic oligonucleotide
  Target: ATXN2; (-) strand; PAM type: NRG; PAM sequence: TGG
ttaaaacataacttgtcagc

SEQ ID NO: 27351 - DNA, 20 bp, Artificial Sequence
  Description of Artificial Sequence: Synthetic oligonucleotide
  Target: ATXN2; (-) strand; PAM type: NRG; PAM sequence: CAG
agaattaaaacataacttgt

SEQ ID NO: 27352 - DNA, 20 bp, Artificial Sequence
  Description of Artificial Sequence: Synthetic oligonucleotide
  Target: ATXN2; (-) strand; PAM type: NRG; PAM sequence: CAG
acttgccctacaaaatatgt

SEQ ID NO: 27353 - DNA, 20 bp, Artificial Sequence
  Description of Artificial Sequence: Synthetic oligonucleotide
  Target: ATXN2; (-) strand; PAM type: NRG; PAM sequence: AGG
ttccacaagagtcataaagg

SEQ ID NO: 27354 - DNA, 20 bp, Artificial Sequence
  Description of Artificial Sequence: Synthetic oligonucleotide
  Target: ATXN2; (-) strand; PAM type: NRG; PAM sequence: GAG
tttccacaagagtcataaag

SEQ ID NO: 27355 - DNA, 20 bp, Artificial Sequence
  Description of Artificial Sequence: Synthetic oligonucleotide
  Target: ATXN2; (-) strand; PAM type: NRG; PAM sequence: AGG
tttttccacaagagtcataa

SEQ ID NO: 27356 - DNA, 20 bp, Artificial Sequence
  Description of Artificial Sequence: Synthetic oligonucleotide
  Target: ATXN2; (-) strand; PAM type: NRG; PAM sequence: AAG
ttttttccacaagagtcata

SEQ ID NO: 27357 - DNA, 20 bp, Artificial Sequence
  Description of Artificial Sequence: Synthetic oligonucleotide
  Target: ATXN2; (-) strand; PAM type: NRG; PAM sequence: GAG
ttggaaatttttttccacaa

SEQ ID NO: 27358 - DNA, 20 bp, Artificial Sequence
  Description of Artificial Sequence: Synthetic oligonucleotide
  Target: ATXN2; (-) strand; PAM type: NRG; PAM sequence: AAG
ctttggaaatttttttccac

SEQ ID NO: 27359 - DNA, 20 bp, Artificial Sequence
  Description of Artificial Sequence: Synthetic oligonucleotide
  Target: ATXN2; (-) strand; PAM type: NRG; PAM sequence: TGG
gtgtattaacagaagaactt

SEQ ID NO: 27360 - DNA, 20 bp, Artificial Sequence
  Description of Artificial Sequence: Synthetic oligonucleotide
  Target: ATXN2; (-) strand; PAM type: NRG; PAM sequence: AAG
tagattatgtgtattaacag

SEQ ID NO: 27361 - DNA, 20 bp, Artificial Sequence
  Description of Artificial Sequence: Synthetic oligonucleotide
  Target: ATXN2; (-) strand; PAM type: NRG; PAM sequence: CAG
tattagattatgtgtattaa

SEQ ID NO: 27362 - DNA, 20 bp, Artificial Sequence
  Description of Artificial Sequence: Synthetic oligonucleotide
  Target: ATXN2; (-) strand; PAM type: NRG; PAM sequence: TAG
aaaatgattctaaagcttat

SEQ ID NO: 27363 - DNA, 20 bp, Artificial Sequence
  Description of Artificial Sequence: Synthetic oligonucleotide
  Target: ATXN2; (-) strand; PAM type: NRG; PAM sequence: AAG
aaattgacaaaatgattcta

SEQ ID NO: 27364 - DNA, 20 bp, Artificial Sequence
  Description of Artificial Sequence: Synthetic oligonucleotide
  Target: ATXN2; (-) strand; PAM type: NRG; PAM sequence: TAG
tatatatatatccgtttttg

SEQ ID NO: 27365 - DNA, 20 bp, Artificial Sequence
  Description of Artificial Sequence: Synthetic oligonucleotide
  Target: ATXN2; (-) strand; PAM type: NRG; PAM sequence: GGG
gctgagattgcactccagcc

SEQ ID NO: 27366 - DNA, 20 bp, Artificial Sequence
  Description of Artificial Sequence: Synthetic oligonucleotide
  Target: ATXN2; (-) strand; PAM type: NRG; PAM sequence: CGG
agctgagattgcactccagc

SEQ ID NO: 27367 - DNA, 20 bp, Artificial Sequence
  Description of Artificial Sequence: Synthetic oligonucleotide
  Target: ATXN2; (-) strand; PAM type: NRG; PAM sequence: CAG
agtgagctgagattgcactc

SEQ ID NO: 27368 - DNA, 20 bp, Artificial Sequence
  Description of Artificial Sequence: Synthetic oligonucleotide
  Target: ATXN2; (-) strand; PAM type: NRG; PAM sequence: GAG
ggtggaggttgcagtgagct

SEQ ID NO: 27369 - DNA, 20 bp, Artificial Sequence
  Description of Artificial Sequence: Synthetic oligonucleotide
  Target: ATXN2; (-) strand; PAM type: NRG; PAM sequence: GAG
ccgtaggtggaggttgcagt

SEQ ID NO: 27370 - DNA, 20 bp, Artificial Sequence
  Description of Artificial Sequence: Synthetic oligonucleotide
  Target: ATXN2; (-) strand; PAM type: NRG; PAM sequence: CAG
aaccccgtaggtggaggttg

SEQ ID NO: 27371 - DNA, 20 bp, Artificial Sequence
  Description of Artificial Sequence: Synthetic oligonucleotide
  Target: ATXN2; (-) strand; PAM type: NRG; PAM sequence: AGG
tactcgaaccccgtaggtgg

SEQ ID NO: 27372 - DNA, 20 bp, Artificial Sequence
  Description of Artificial Sequence: Synthetic oligonucleotide
  Target: ATXN2; (-) strand; PAM type: NRG; PAM sequence: GAG
ttactcgaaccccgtaggtg

SEQ ID NO: 27373 - DNA, 20 bp, Artificial Sequence
  Description of Artificial Sequence: Synthetic oligonucleotide
  Target: ATXN2; (-) strand; PAM type: NRG; PAM sequence: TGG
aattactcgaaccccgtagg

SEQ ID NO: 27374 - DNA, 20 bp, Artificial Sequence
  Description of Artificial Sequence: Synthetic oligonucleotide
  Target: ATXN2; (-) strand; PAM type: NRG; PAM sequence: AGG
gagaattactcgaaccccgt

SEQ ID NO: 27375 - DNA, 20 bp, Artificial Sequence
  Description of Artificial Sequence: Synthetic oligonucleotide
  Target: ATXN2; (-) strand; PAM type: NRG; PAM sequence: TAG
ggagaattactcgaaccccg

SEQ ID NO: 27376 - DNA, 20 bp, Artificial Sequence
  Description of Artificial Sequence: Synthetic oligonucleotide
  Target: ATXN2; (-) strand; PAM type: NRG; PAM sequence: GAG
tacttgggaagctgaggcag

SEQ ID NO: 27377 - DNA, 20 bp, Artificial Sequence
  Description of Artificial Sequence: Synthetic oligonucleotide
  Target: ATXN2; (-) strand; PAM type: NRG; PAM sequence: AGG
gctacttgggaagctgaggc

SEQ ID NO: 27378 - DNA, 20 bp, Artificial Sequence
  Description of Artificial Sequence: Synthetic oligonucleotide
  Target: ATXN2; (-) strand; PAM type: NRG; PAM sequence: CAG
agctacttgggaagctgagg

SEQ ID NO: 27379 - DNA, 20 bp, Artificial Sequence
  Description of Artificial Sequence: Synthetic oligonucleotide
  Target: ATXN2; (-) strand; PAM type: NRG; PAM sequence: AGG
accagctacttgggaagctg

SEQ ID NO: 27380 - DNA, 20 bp, Artificial Sequence
  Description of Artificial Sequence: Synthetic oligonucleotide
  Target: ATXN2; (-) strand; PAM type: NRG; PAM sequence: GAG
taccagctacttgggaagct

SEQ ID NO: 27381 - DNA, 20 bp, Artificial Sequence
  Description of Artificial Sequence: Synthetic oligonucleotide
  Target: ATXN2; (-) strand; PAM type: NRG; PAM sequence: AAG
gcaggtaccagctacttggg

SEQ ID NO: 27382 - DNA, 20 bp, Artificial Sequence
  Description of Artificial Sequence: Synthetic oligonucleotide
  Target: ATXN2; (-) strand; PAM type: NRG; PAM sequence: GGG
gtggcaggtaccagctactt

SEQ ID NO: 27383 - DNA, 20 bp, Artificial Sequence
  Description of Artificial Sequence: Synthetic oligonucleotide
  Target: ATXN2; (-) strand; PAM type: NRG; PAM sequence: TGG
ggtggcaggtaccagctact

SEQ ID NO: 27384 - DNA, 20 bp, Artificial Sequence
  Description of Artificial Sequence: Synthetic oligonucleotide
  Target: ATXN2; (-) strand; PAM type: NRG; PAM sequence: CAG
ctggacatggtggcaggtac

SEQ ID NO: 27385 - DNA, 20 bp, Artificial Sequence
  Description of Artificial Sequence: Synthetic oligonucleotide
  Target: ATXN2; (-) strand; PAM type: NRG; PAM sequence: AGG
aatcatctggacatggtggc

SEQ ID NO: 27386 - DNA, 20 bp, Artificial Sequence
  Description of Artificial Sequence: Synthetic oligonucleotide
  Target: ATXN2; (-) strand; PAM type: NRG; PAM sequence: CAG
aaatcatctggacatggtgg

SEQ ID NO: 27387 - DNA, 20 bp, Artificial Sequence
  Description of Artificial Sequence: Synthetic oligonucleotide
  Target: ATXN2; (-) strand; PAM type: NRG; PAM sequence: TGG
caaaaatcatctggacatgg

SEQ ID NO: 27388 - DNA, 20 bp, Artificial Sequence
  Description of Artificial Sequence: Synthetic oligonucleotide
  Target: ATXN2; (-) strand; PAM type: NRG; PAM sequence: TGG
atacaaaaatcatctggaca

SEQ ID NO: 27389 - DNA, 20 bp, Artificial Sequence
  Description of Artificial Sequence: Synthetic oligonucleotide
  Target: ATXN2; (-) strand; PAM type: NRG; PAM sequence: TGG
ctaaaaatacaaaaatcatc

SEQ ID NO: 27390 - DNA, 20 bp, Artificial Sequence
  Description of Artificial Sequence: Synthetic oligonucleotide
  Target: ATXN2; (-) strand; PAM type: NRG; PAM sequence: TGG
tgagaccagcctggccaaca

SEQ ID NO: 27391 - DNA, 20 bp, Artificial Sequence
  Description of Artificial Sequence: Synthetic oligonucleotide
  Target: ATXN2; (-) strand; PAM type: NRG; PAM sequence: TGG
acgggagtttgagaccagcc

SEQ ID NO: 27392 - DNA, 20 bp, Artificial Sequence
  Description of Artificial Sequence: Synthetic oligonucleotide
  Target: ATXN2; (-) strand; PAM type: NRG; PAM sequence: CAG
tgaggacgggagtttgagac

SEQ ID NO: 27393 - DNA, 20 bp, Artificial Sequence
  Description of Artificial Sequence: Synthetic oligonucleotide
  Target: ATXN2; (-) strand; PAM type: NRG; PAM sequence: GAG
tcacttgaggacgggagttt

SEQ ID NO: 27394 - DNA, 20 bp, Artificial Sequence
  Description of Artificial Sequence: Synthetic oligonucleotide
  Target: ATXN2; (-) strand; PAM type: NRG; PAM sequence: GAG
ggccgatcacttgaggacgg

SEQ ID NO: 27395 - DNA, 20 bp, Artificial Sequence
  Description of Artificial Sequence: Synthetic oligonucleotide
  Target: ATXN2; (-) strand; PAM type: NRG; PAM sequence: GGG
tgggccgatcacttgaggac

SEQ ID NO: 27396 - DNA, 20 bp, Artificial Sequence
  Description of Artificial Sequence: Synthetic oligonucleotide
  Target: ATXN2; (-) strand; PAM type: NRG; PAM sequence: CGG
gtgggccgatcacttgagga

SEQ ID NO: 27397 - DNA, 20 bp, Artificial Sequence
  Description of Artificial Sequence: Synthetic oligonucleotide
  Target: ATXN2; (-) strand; PAM type: NRG; PAM sequence: AGG
tgaggtgggccgatcacttg

SEQ ID NO: 27398 - DNA, 20 bp, Artificial Sequence
  Description of Artificial Sequence: Synthetic oligonucleotide
  Target: ATXN2; (-) strand; PAM type: NRG; PAM sequence: GAG
ctgaggtgggccgatcactt

SEQ ID NO: 27399 - DNA, 20 bp, Artificial Sequence
  Description of Artificial Sequence: Synthetic oligonucleotide
  Target: ATXN2; (-) strand; PAM type: NRG; PAM sequence: GGG
gcactttggaaggctgaggt

SEQ ID NO: 27400 - DNA, 20 bp, Artificial Sequence
  Description of Artificial Sequence: Synthetic oligonucleotide
  Target: ATXN2; (-) strand; PAM type: NRG; PAM sequence: TGG
agcactttggaaggctgagg

SEQ ID NO: 27401 - DNA, 20 bp, Artificial Sequence
  Description of Artificial Sequence: Synthetic oligonucleotide
  Target: ATXN2; (-) strand; PAM type: NRG; PAM sequence: AGG
cccagcactttggaaggctg

SEQ ID NO: 27402 - DNA, 20 bp, Artificial Sequence
  Description of Artificial Sequence: Synthetic oligonucleotide
  Target: ATXN2; (-) strand; PAM type: NRG; PAM sequence: GAG
tcccagcactttggaaggct

SEQ ID NO: 27403 - DNA, 20 bp, Artificial Sequence
  Description of Artificial Sequence: Synthetic oligonucleotide
  Target: ATXN2; (-) strand; PAM type: NRG; PAM sequence: AGG
tgtaatcccagcactttgga

SEQ ID NO: 27404 - DNA, 20 bp, Artificial Sequence
  Description of Artificial Sequence: Synthetic oligonucleotide
  Target: ATXN2; (-) strand; PAM type: NRG; PAM sequence: AAG
ctgtaatcccagcactttgg

SEQ ID NO: 27405 - DNA, 20 bp, Artificial Sequence
  Description of Artificial Sequence: Synthetic oligonucleotide
  Target: ATXN2; (-) strand; PAM type: NRG; PAM sequence: TGG
cgcctgtaatcccagcactt

SEQ ID NO: 27406 - DNA, 20 bp, Artificial Sequence
  Description of Artificial Sequence: Synthetic oligonucleotide
  Target: ATXN2; (-) strand; PAM type: NRG; PAM sequence: CAG
ttggctcacgcctgtaatcc

SEQ ID NO: 27407 - DNA, 20 bp, Artificial Sequence
  Description of Artificial Sequence: Synthetic oligonucleotide
  Target: ATXN2; (-) strand; PAM type: NRG; PAM sequence: TGG
tcagttttggccgggcacgt

SEQ ID NO: 27408 - DNA, 20 bp, Artificial Sequence
  Description of Artificial Sequence: Synthetic oligonucleotide
  Target: ATXN2; (-) strand; PAM type: NRG; PAM sequence: GGG
taatatattcagttttggcc

SEQ ID NO: 27409 - DNA, 20 bp, Artificial Sequence
  Description of Artificial Sequence: Synthetic oligonucleotide
  Target: ATXN2; (-) strand; PAM type: NRG; PAM sequence: CGG
ataatatattcagttttggc

SEQ ID NO: 27410 - DNA, 20 bp, Artificial Sequence
  Description of Artificial Sequence: Synthetic oligonucleotide
  Target: ATXN2; (-) strand; PAM type: NRG; PAM sequence: TGG
aaagataatatattcagttt

SEQ ID NO: 27411 - DNA, 20 bp, Artificial Sequence
  Description of Artificial Sequence: Synthetic oligonucleotide
  Target: ATXN2; (-) strand; PAM type: NRG; PAM sequence: CAG
atctctaaagataatatatt

SEQ ID NO: 27412 - DNA, 20 bp, Artificial Sequence
  Description of Artificial Sequence: Synthetic oligonucleotide
  Target: ATXN2; (-) strand; PAM type: NRG; PAM sequence: AAG
tttcctcaaataaatctcta

SEQ ID NO: 27413 - DNA, 20 bp, Artificial Sequence
  Description of Artificial Sequence: Synthetic oligonucleotide
  Target: ATXN2; (-) strand; PAM type: NRG; PAM sequence: TGG
gaaacatgccatactttgaa

SEQ ID NO: 27414 - DNA, 20 bp, Artificial Sequence
  Description of Artificial Sequence: Synthetic oligonucleotide
  Target: ATXN2; (-) strand; PAM type: NRG; PAM sequence: TGG
taaaagtagatttggctaaa

SEQ ID NO: 27415 - DNA, 20 bp, Artificial Sequence
  Description of Artificial Sequence: Synthetic oligonucleotide
  Target: ATXN2; (-) strand; PAM type: NRG; PAM sequence: TGG
aggagacataaaagtagatt

SEQ ID NO: 27416 - DNA, 20 bp, Artificial Sequence
  Description of Artificial Sequence: Synthetic oligonucleotide
  Target: ATXN2; (-) strand; PAM type: NRG; PAM sequence: TAG
agctgaaggagacataaaag

SEQ ID NO: 27417 - DNA, 20 bp, Artificial Sequence
  Description of Artificial Sequence: Synthetic oligonucleotide
  Target: ATXN2; (-) strand; PAM type: NRG; PAM sequence: AAG
cacagctgaaggagacataa

SEQ ID NO: 27418 - DNA, 20 bp, Artificial Sequence
  Description of Artificial Sequence: Synthetic oligonucleotide
  Target: ATXN2; (-) strand; PAM type: NRG; PAM sequence: GAG
ttatgaagacacagctgaag

SEQ ID NO: 27419 - DNA, 20 bp, Artificial Sequence
  Description of Artificial Sequence: Synthetic oligonucleotide
  Target: ATXN2; (-) strand; PAM type: NRG; PAM sequence: AGG
atttatgaagacacagctga

SEQ ID NO: 27420 - DNA, 20 bp, Artificial Sequence
  Description of Artificial Sequence: Synthetic oligonucleotide
  Target: ATXN2; (-) strand; PAM type: NRG; PAM sequence: AAG
gatttatgaagacacagctg

SEQ ID NO: 27421 - DNA, 20 bp, Artificial Sequence
  Description of Artificial Sequence: Synthetic oligonucleotide
  Target: ATXN2; (-) strand; PAM type: NRG; PAM sequence: CAG
attgaagatttatgaagaca

SEQ ID NO: 27422 - DNA, 20 bp, Artificial Sequence
  Description of Artificial Sequence: Synthetic oligonucleotide
  Target: ATXN2; (-) strand; PAM type: NRG; PAM sequence: AAG
ggataaattgaagatttatg

SEQ ID NO: 27423 - DNA, 20 bp, Artificial Sequence
  Description of Artificial Sequence: Synthetic oligonucleotide
  Target: ATXN2; (-) strand; PAM type: NRG; PAM sequence: AAG
taggacatggggataaattg

SEQ ID NO: 27424 - DNA, 20 bp, Artificial Sequence
  Description of Artificial Sequence: Synthetic oligonucleotide
  Target: ATXN2; (-) strand; PAM type: NRG; PAM sequence: GGG
aaaaataagcataggacatg

SEQ ID NO: 27425 - DNA, 20 bp, Artificial Sequence
  Description of Artificial Sequence: Synthetic oligonucleotide
  Target: ATXN2; (-) strand; PAM type: NRG; PAM sequence: GGG
caaaaataagcataggacat

SEQ ID NO: 27426 - DNA, 20 bp, Artificial Sequence
  Description of Artificial Sequence: Synthetic oligonucleotide
  Target: ATXN2; (-) strand; PAM type: NRG; PAM sequence: TGG
acaaaaataagcataggaca

SEQ ID NO: 27427 - DNA, 20 bp, Artificial Sequence
  Description of Artificial Sequence: Synthetic oligonucleotide
  Target: ATXN2; (-) strand; PAM type: NRG; PAM sequence: AGG
tcaaaaacaaaaataagcat

SEQ ID NO: 27428 - DNA, 20 bp, Artificial Sequence
  Description of Artificial Sequence: Synthetic oligonucleotide
  Target: ATXN2; (-) strand; PAM type: NRG; PAM sequence: TAG
ctcaaaaacaaaaataagca

SEQ ID NO: 27429 - DNA, 20 bp, Artificial Sequence
  Description of Artificial Sequence: Synthetic oligonucleotide
  Target: ATXN2; (-) strand; PAM type: NRG; PAM sequence: AAG
tctgtctcaaaaacaaaaat

SEQ ID NO: 27430 - DNA, 20 bp, Artificial Sequence
  Description of Artificial Sequence: Synthetic oligonucleotide
  Target: ATXN2; (-) strand; PAM type: NRG; PAM sequence: CAG
tccagcctgggtgacagagc

SEQ ID NO: 27431 - DNA, 20 bp, Artificial Sequence
  Description of Artificial Sequence: Synthetic oligonucleotide
  Target: ATXN2; (-) strand; PAM type: NRG; PAM sequence: GAG
gcactccagcctgggtgaca

SEQ ID NO: 27432 - DNA, 20 bp, Artificial Sequence
  Description of Artificial Sequence: Synthetic oligonucleotide
  Target: ATXN2; (-) strand; PAM type: NRG; PAM sequence: CAG
ctgcactccagcctgggtga

SEQ ID NO: 27433 - DNA, 20 bp, Artificial Sequence
  Description of Artificial Sequence: Synthetic oligonucleotide
  Target: ATXN2; (-) strand; PAM type: NRG; PAM sequence: GGG
gtggtgctgcactccagcct

SEQ ID NO: 27434 - DNA, 20 bp, Artificial Sequence
  Description of Artificial Sequence: Synthetic oligonucleotide
  Target: ATXN2; (-) strand; PAM type: NRG; PAM sequence: TGG
ggtggtgctgcactccagcc

SEQ ID NO: 27435 - DNA, 20 bp, Artificial Sequence
  Description of Artificial Sequence: Synthetic oligonucleotide
  Target: ATXN2; (-) strand; PAM type: NRG; PAM sequence: CAG
gagatggtggtgctgcactc

SEQ ID NO: 27436 - DNA, 20 bp, Artificial Sequence
  Description of Artificial Sequence: Synthetic oligonucleotide
  Target: ATXN2; (-) strand; PAM type: NRG; PAM sequence: TGG
tttgcaatgagccgagatgg

SEQ ID NO: 27437 - DNA, 20 bp, Artificial Sequence
  Description of Artificial Sequence: Synthetic oligonucleotide
  Target: ATXN2; (-) strand; PAM type: NRG; PAM sequence: TGG
gagtttgcaatgagccgaga

SEQ ID NO: 27438 - DNA, 20 bp, Artificial Sequence
  Description of Artificial Sequence: Synthetic oligonucleotide
  Target: ATXN2; (-) strand; PAM type: NRG; PAM sequence: GAG
gacggagtttgcaatgagcc

SEQ ID NO: 27439 - DNA, 20 bp, Artificial Sequence
  Description of Artificial Sequence: Synthetic oligonucleotide
  Target: ATXN2; (-) strand; PAM type: NRG; PAM sequence: GAG
caggagacggagtttgcaat

SEQ ID NO: 27440 - DNA, 20 bp, Artificial Sequence
  Description of Artificial Sequence: Synthetic oligonucleotide
  Target: ATXN2; (-) strand; PAM type: NRG; PAM sequence: GAG
tcgcttgaatccaggagacg

SEQ ID NO: 27441 - DNA, 20 bp, Artificial Sequence
  Description of Artificial Sequence: Synthetic oligonucleotide
  Target: ATXN2; (-) strand; PAM type: NRG; PAM sequence: CGG
aatcgcttgaatccaggaga

SEQ ID NO: 27442 - DNA, 20 bp, Artificial Sequence
  Description of Artificial Sequence: Synthetic oligonucleotide
  Target: ATXN2; (-) strand; PAM type: NRG; PAM sequence: GAG
ggagaatcgcttgaatccag

SEQ ID NO: 27443 - DNA, 20 bp, Artificial Sequence
  Description of Artificial Sequence: Synthetic oligonucleotide
  Target: ATXN2; (-) strand; PAM type: NRG; PAM sequence: AGG
caggagaatcgcttgaatcc

SEQ ID NO: 27444 - DNA, 20 bp, Artificial Sequence
  Description of Artificial Sequence: Synthetic oligonucleotide
  Target: ATXN2; (-) strand; PAM type: NRG; PAM sequence: CAG
gcaggagaatcgcttgaatc

SEQ ID NO: 27445 - DNA, 20 bp, Artificial Sequence
  Description of Artificial Sequence: Synthetic oligonucleotide
  Target: ATXN2; (-) strand; PAM type: NRG; PAM sequence: GAG
tacttgggaggctgaggcag

SEQ ID NO: 27446 - DNA, 20 bp, Artificial Sequence
  Description of Artificial Sequence: Synthetic oligonucleotide
  Target: ATXN2; (-) strand; PAM type: NRG; PAM sequence: AGG
gctacttgggaggctgaggc

SEQ ID NO: 27447 - DNA, 20 bp, Artificial Sequence
  Description of Artificial Sequence: Synthetic oligonucleotide
  Target: ATXN2; (-) strand; PAM type: NRG; PAM sequence: CAG
agctacttgggaggctgagg

SEQ ID NO: 27448 - DNA, 20 bp, Artificial Sequence
  Description of Artificial Sequence: Synthetic oligonucleotide
  Target: ATXN2; (-) strand; PAM type: NRG; PAM sequence: AGG
cccagctacttgggaggctg

SEQ ID NO: 27449 - DNA, 20 bp, Artificial Sequence
  Description of Artificial Sequence: Synthetic oligonucleotide
  Target: ATXN2; (-) strand; PAM type: NRG; PAM sequence: GAG
tcccagctacttgggaggct

SEQ ID NO: 27450 - DNA, 20 bp, Artificial Sequence
  Description of Artificial Sequence: Synthetic oligonucleotide
  Target: ATXN2; (-) strand; PAM type: NRG; PAM sequence: AGG
tgtaatcccagctacttggg

SEQ ID NO: 27451 - DNA, 20 bp, Artificial Sequence
  Description of Artificial Sequence: Synthetic oligonucleotide
  Target: ATXN2; (-) strand; PAM type: NRG; PAM sequence: GAG
ctgtaatcccagctacttgg

SEQ ID NO: 27452 - DNA, 20 bp, Artificial Sequence
  Description of Artificial Sequence: Synthetic oligonucleotide
  Target: ATXN2; (-) strand; PAM type: NRG; PAM sequence: GGG
acctgtaatcccagctactt

SEQ ID NO: 27453 - DNA, 20 bp, Artificial Sequence
  Description of Artificial Sequence: Synthetic oligonucleotide
  Target: ATXN2; (-) strand; PAM type: NRG; PAM sequence: TGG
cacctgtaatcccagctact

SEQ ID NO: 27454 - DNA, 20 bp, Artificial Sequence
  Description of Artificial Sequence: Synthetic oligonucleotide
  Target: ATXN2; (-) strand; PAM type: NRG; PAM sequence: CAG
gtgacgggcacctgtaatcc

SEQ ID NO: 27455 - DNA, 20 bp, Artificial Sequence
  Description of Artificial Sequence: Synthetic oligonucleotide
  Target: ATXN2; (-) strand; PAM type: NRG; PAM sequence: GGG
aattagctgggcgaggtgac

SEQ ID NO: 27456 - DNA, 20 bp, Artificial Sequence
  Description of Artificial Sequence: Synthetic oligonucleotide
  Target: ATXN2; (-) strand; PAM type: NRG; PAM sequence: CGG
aaattagctgggcgaggtga

SEQ ID NO: 27457 - DNA, 20 bp, Artificial Sequence
  Description of Artificial Sequence: Synthetic oligonucleotide
  Target: ATXN2; (-) strand; PAM type: NRG; PAM sequence: AGG
atacaaaaattagctgggcg

SEQ ID NO: 27458 - DNA, 20 bp, Artificial Sequence
  Description of Artificial Sequence: Synthetic oligonucleotide
  Target: ATXN2; (-) strand; PAM type: NRG; PAM sequence: GAG
aatacaaaaattagctgggc

SEQ ID NO: 27459 - DNA, 20 bp, Artificial Sequence
  Description of Artificial Sequence: Synthetic oligonucleotide
  Target: ATXN2; (-) strand; PAM type: NRG; PAM sequence: GGG
taaaaatacaaaaattagct

SEQ ID NO: 27460 - DNA, 20 bp, Artificial Sequence
  Description of Artificial Sequence: Synthetic oligonucleotide
  Target: ATXN2; (-) strand; PAM type: NRG; PAM sequence: TGG
ctaaaaatacaaaaattagc

SEQ ID NO: 27461 - DNA, 20 bp, Artificial Sequence
  Description of Artificial Sequence: Synthetic oligonucleotide
  Target: ATXN2; (-) strand; PAM type: NRG; PAM sequence: TAG
tctactaaaaatacaaaaat

SEQ ID NO: 27462 - DNA, 20 bp, Artificial Sequence
  Description of Artificial Sequence: Synthetic oligonucleotide
  Target: ATXN2; (-) strand; PAM type: NRG; PAM sequence: TGG
ggagaccagcctggccgaca

SEQ ID NO: 27463 - DNA, 20 bp, Artificial Sequence
  Description of Artificial Sequence: Synthetic oligonucleotide
  Target: ATXN2; (-) strand; PAM type: NRG; PAM sequence: TGG
taaggagttggagaccagcc

SEQ ID NO: 27464 - DNA, 20 bp, Artificial Sequence
  Description of Artificial Sequence: Synthetic oligonucleotide
  Target: ATXN2; (-) strand; PAM type: NRG; PAM sequence: CAG
tgaggtaaggagttggagac

SEQ ID NO: 27465 - DNA, 20 bp, Artificial Sequence
  Description of Artificial Sequence: Synthetic oligonucleotide
  Target: ATXN2; (-) strand; PAM type: NRG; PAM sequence: GAG
tcacctgaggtaaggagttg

SEQ ID NO: 27466 - DNA, 20 bp, Artificial Sequence
  Description of Artificial Sequence: Synthetic oligonucleotide
  Target: ATXN2; (-) strand; PAM type: NRG; PAM sequence: TGG
gatcacctgaggtaaggagt

SEQ ID NO: 27467 - DNA, 20 bp, Artificial Sequence
  Description of Artificial Sequence: Synthetic oligonucleotide
  Target: ATXN2; (-) strand; PAM type: NRG; PAM sequence: GAG
ggcggatcacctgaggtaag

SEQ ID NO: 27468 - DNA, 20 bp, Artificial Sequence
  Description of Artificial Sequence: Synthetic oligonucleotide
  Target: ATXN2; (-) strand; PAM type: NRG; PAM sequence: AGG
gtggcggatcacctgaggta

SEQ ID NO: 27469 - DNA, 20 bp, Artificial Sequence
  Description of Artificial Sequence: Synthetic oligonucleotide
  Target: ATXN2; (-) strand; PAM type: NRG; PAM sequence: AAG
cgtggcggatcacctgaggt

SEQ ID NO: 27470 - DNA, 20 bp, Artificial Sequence
  Description of Artificial Sequence: Synthetic oligonucleotide
  Target: ATXN2; (-) strand; PAM type: NRG; PAM sequence: AGG
caggcgtggcggatcacctg

SEQ ID NO: 27471 - DNA, 20 bp, Artificial Sequence
  Description of Artificial Sequence: Synthetic oligonucleotide
  Target: ATXN2; (-) strand; PAM type: NRG; PAM sequence: GAG
ccaggcgtggcggatcacct

SEQ ID NO: 27472 - DNA, 20 bp, Artificial Sequence
  Description of Artificial Sequence: Synthetic oligonucleotide
  Target: ATXN2; (-) strand; PAM type: NRG; PAM sequence: CGG
aacaaaccagccaggcgtgg

SEQ ID NO: 27473 - DNA, 20 bp, Artificial Sequence
  Description of Artificial Sequence: Synthetic oligonucleotide
  Target: ATXN2; (-) strand; PAM type: NRG; PAM sequence: TGG
aaaaacaaaccagccaggcg

SEQ ID NO: 27474 - DNA, 20 bp, Artificial Sequence
  Description of Artificial Sequence: Synthetic oligonucleotide
  Target: ATXN2; (-) strand; PAM type: NRG; PAM sequence: AGG
gtctcaaaaacaaaccagcc

SEQ ID NO: 27475 - DNA, 20 bp, Artificial Sequence
  Description of Artificial Sequence: Synthetic oligonucleotide
  Target: ATXN2; (-) strand; PAM type: NRG; PAM sequence: CAG
tgtctcaaaaacaaaccagc

SEQ ID NO: 27476 - DNA, 20 bp, Artificial Sequence
  Description of Artificial Sequence: Synthetic oligonucleotide
  Target: ATXN2; (-) strand; PAM type: NRG; PAM sequence: CAG
accttgtctcaaaaacaaac

SEQ ID NO: 27477 - DNA, 20 bp, Artificial Sequence
  Description of Artificial Sequence: Synthetic oligonucleotide
  Target: ATXN2; (-) strand; PAM type: NRG; PAM sequence: AAG
actccagctgggtgacaagc

SEQ ID NO: 27478 - DNA, 20 bp, Artificial Sequence
  Description of Artificial Sequence: Synthetic oligonucleotide
  Target: ATXN2; (-) strand; PAM type: NRG; PAM sequence: AAG
cggcactccagctgggtgac

SEQ ID NO: 27479 - DNA, 20 bp, Artificial Sequence
  Description of Artificial Sequence: Synthetic oligonucleotide
  Target: ATXN2; (-) strand; PAM type: NRG; PAM sequence: GGG
tatgccacggcactccagct

SEQ ID NO: 27480 - DNA, 20 bp, Artificial Sequence
  Description of Artificial Sequence: Synthetic oligonucleotide
  Target: ATXN2; (-) strand; PAM type: NRG; PAM sequence: TGG
ttatgccacggcactccagc

SEQ ID NO: 27481 - DNA, 20 bp, Artificial Sequence
  Description of Artificial Sequence: Synthetic oligonucleotide
  Target: ATXN2; (-) strand; PAM type: NRG; PAM sequence: CAG
gtggttatgccacggcactc

SEQ ID NO: 27482 - DNA, 20 bp, Artificial Sequence
  Description of Artificial Sequence: Synthetic oligonucleotide
  Target: ATXN2; (-) strand; PAM type: NRG; PAM sequence: CGG
agtgagctgtggttatgcca

SEQ ID NO: 27483 - DNA, 20 bp, Artificial Sequence
  Description of Artificial Sequence: Synthetic oligonucleotide
  Target: ATXN2; (-) strand; PAM type: NRG; PAM sequence: TGG
gtcaaggctgcagtgagctg

SEQ ID NO: 27484 - DNA, 20 bp, Artificial Sequence
  Description of Artificial Sequence: Synthetic oligonucleotide
  Target: ATXN2; (-) strand; PAM type: NRG; PAM sequence: GAG
cagtaagtcaaggctgcagt

SEQ ID NO: 27485 - DNA, 20 bp, Artificial Sequence
  Description of Artificial Sequence: Synthetic oligonucleotide
  Target: ATXN2; (-) strand; PAM type: NRG; PAM sequence: CAG
cagccagtaagtcaaggctg

SEQ ID NO: 27486 - DNA, 20 bp, Artificial Sequence
  Description of Artificial Sequence: Synthetic oligonucleotide
  Target: ATXN2; (-) strand; PAM type: NRG; PAM sequence: AGG
cacttgcagccagtaagtca

SEQ ID NO: 27487 - DNA, 20 bp, Artificial Sequence
  Description of Artificial Sequence: Synthetic oligonucleotide
  Target: ATXN2; (-) strand; PAM type: NRG; PAM sequence: AAG
tcacttgcagccagtaagtc

SEQ ID NO: 27488 - DNA, 20 bp, Artificial Sequence
  Description of Artificial Sequence: Synthetic oligonucleotide
  Target: ATXN2; (-) strand; PAM type: NRG; PAM sequence: AAG
gaggttcacttgcagccagt

SEQ ID NO: 27489 - DNA, 20 bp, Artificial Sequence
  Description of Artificial Sequence: Synthetic oligonucleotide
  Target: ATXN2; (-) strand; PAM type: NRG; PAM sequence: CAG
gtgagaggttcacttgcagc

SEQ ID NO: 27490 - DNA, 20 bp, Artificial Sequence
  Description of Artificial Sequence: Synthetic oligonucleotide
  Target: ATXN2; (-) strand; PAM type: NRG; PAM sequence: CAG
tgaggtgagaggttcacttg

SEQ ID NO: 27491 - DNA, 20 bp, Artificial Sequence
  Description of Artificial Sequence: Synthetic oligonucleotide
  Target: ATXN2; (-) strand; PAM type: NRG; PAM sequence: AGG
acttggtgggctgaggtgag

SEQ ID NO: 27492 - DNA, 20 bp, Artificial Sequence
  Description of Artificial Sequence: Synthetic oligonucleotide
  Target: ATXN2; (-) strand; PAM type: NRG; PAM sequence: GAG
tacttggtgggctgaggtga

SEQ ID NO: 27493 - DNA, 20 bp, Artificial Sequence
  Description of Artificial Sequence: Synthetic oligonucleotide
  Target: ATXN2; (-) strand; PAM type: NRG; PAM sequence: GAG
gctacttggtgggctgaggt

SEQ ID NO: 27494 - DNA, 20 bp, Artificial Sequence
  Description of Artificial Sequence: Synthetic oligonucleotide
  Target: ATXN2; (-) strand; PAM type: NRG; PAM sequence: AGG
cccagctacttggtgggctg

SEQ ID NO: 27495 - DNA, 20 bp, Artificial Sequence
  Description of Artificial Sequence: Synthetic oligonucleotide
  Target: ATXN2; (-) strand; PAM type: NRG; PAM sequence: GAG
acccagctacttggtgggct

SEQ ID NO: 27496 - DNA, 20 bp, Artificial Sequence
  Description of Artificial Sequence: Synthetic oligonucleotide
  Target: ATXN2; (-) strand; PAM type: NRG; PAM sequence: GGG
tgtaaacccagctacttggt

SEQ ID NO: 27497 - DNA, 20 bp, Artificial Sequence
  Description of Artificial Sequence: Synthetic oligonucleotide
  Target: ATXN2; (-) strand; PAM type: NRG; PAM sequence: TGG
ctgtaaacccagctacttgg

SEQ ID NO: 27498 - DNA, 20 bp, Artificial Sequence
  Description of Artificial Sequence: Synthetic oligonucleotide
  Target: ATXN2; (-) strand; PAM type: NRG; PAM sequence: TGG
ctcctgtaaacccagctact

SEQ ID NO: 27499 - DNA, 20 bp, Artificial Sequence
  Description of Artificial Sequence: Synthetic oligonucleotide
  Target: ATXN2; (-) strand; PAM type: NRG; PAM sequence: CAG
gtggtgtactcctgtaaacc

SEQ ID NO: 27500 - DNA, 20 bp, Artificial Sequence
  Description of Artificial Sequence: Synthetic oligonucleotide
  Target: ATXN2; (-) strand; PAM type: NRG; PAM sequence: TGG
caaaaattagccgggtgtgg

SEQ ID NO: 27501 - DNA, 20 bp, Artificial Sequence
  Description of Artificial Sequence: Synthetic oligonucleotide
  Target: ATXN2; (-) strand; PAM type: NRG; PAM sequence: TGG
gtacaaaaattagccgggtg

SEQ ID NO: 27502 - DNA, 20 bp, Artificial Sequence
  Description of Artificial Sequence: Synthetic oligonucleotide
  Target: ATXN2; (-) strand; PAM type: NRG; PAM sequence: GGG
aaaaagtacaaaaattagcc

SEQ ID NO: 27503 - DNA, 20 bp, Artificial Sequence
  Description of Artificial Sequence: Synthetic oligonucleotide
  Target: ATXN2; (-) strand; PAM type: NRG; PAM sequence: CGG
caaaaagtacaaaaattagc

SEQ ID NO: 27504 - DNA, 20 bp, Artificial Sequence
  Description of Artificial Sequence: Synthetic oligonucleotide
  Target: ATXN2; (-) strand; PAM type: NRG; PAM sequence: TAG
tctacaaaaagtacaaaaat

SEQ ID NO: 27505 - DNA, 20 bp, Artificial Sequence
  Description of Artificial Sequence: Synthetic oligonucleotide
  Target: ATXN2; (-) strand; PAM type: NRG; PAM sequence: AAG
caaaaccccatctctacaaa

SEQ ID NO: 27506 - DNA, 20 bp, Artificial Sequence
  Description of Artificial Sequence: Synthetic oligonucleotide
  Target: ATXN2; (-) strand; PAM type: NRG; PAM sequence: TGG
caagactcgccttggcaact

SEQ ID NO: 27507 - DNA, 20 bp, Artificial Sequence
  Description of Artificial Sequence: Synthetic oligonucleotide
  Target: ATXN2; (-) strand; PAM type: NRG; PAM sequence: TGG
caggagttcaagactcgcct

SEQ ID NO: 27508 - DNA, 20 bp, Artificial Sequence
  Description of Artificial Sequence: Synthetic oligonucleotide
  Target: ATXN2; (-) strand; PAM type: NRG; PAM sequence: AAG
gaggatgagttcaggagttc

SEQ ID NO: 27509 - DNA, 20 bp, Artificial Sequence
  Description of Artificial Sequence: Synthetic oligonucleotide
  Target: ATXN2; (-) strand; PAM type: NRG; PAM sequence: GAG
aggcgggaggatgagttcag

SEQ ID NO: 27510 - DNA, 20 bp, Artificial Sequence
  Description of Artificial Sequence: Synthetic oligonucleotide
  Target: ATXN2; (-) strand; PAM type: NRG; PAM sequence: AGG
tgaggcgggaggatgagttc

SEQ ID NO: 27511 - DNA, 20 bp, Artificial Sequence
  Description of Artificial Sequence: Synthetic oligonucleotide
  Target: ATXN2; (-) strand; PAM type: NRG; PAM sequence: CAG
ctgaggcgggaggatgagtt

SEQ ID NO: 27512 - DNA, 20 bp, Artificial Sequence
  Description of Artificial Sequence: Synthetic oligonucleotide
  Target: ATXN2; (-) strand; PAM type: NRG; PAM sequence: GAG
ggaggctgaggcgggaggat

SEQ ID NO: 27513 - DNA, 20 bp, Artificial Sequence
  Description of Artificial Sequence: Synthetic oligonucleotide
  Target: ATXN2; (-) strand; PAM type: NRG; PAM sequence: AGG
cttttggaggctgaggcggg

SEQ ID NO: 27514 - DNA, 20 bp, Artificial Sequence
  Description of Artificial Sequence: Synthetic oligonucleotide
  Target: ATXN2; (-) strand; PAM type: NRG; PAM sequence: GAG
acttttggaggctgaggcgg

SEQ ID NO: 27515 - DNA, 20 bp, Artificial Sequence
  Description of Artificial Sequence: Synthetic oligonucleotide
  Target: ATXN2; (-) strand; PAM type: NRG; PAM sequence: GGG
acacttttggaggctgaggc

SEQ ID NO: 27516 - DNA, 20 bp, Artificial Sequence
  Description of Artificial Sequence: Synthetic oligonucleotide
  Target: ATXN2; (-) strand; PAM type: NRG; PAM sequence: CGG
aacacttttggaggctgagg

SEQ ID NO: 27517 - DNA, 20 bp, Artificial Sequence
  Description of Artificial Sequence: Synthetic oligonucleotide
  Target: ATXN2; (-) strand; PAM type: NRG; PAM sequence: AGG
ttcaacacttttggaggctg

SEQ ID NO: 27518 - DNA, 20 bp, Artificial Sequence
  Description of Artificial Sequence: Synthetic oligonucleotide
  Target: ATXN2; (-) strand; PAM type: NRG; PAM sequence: GAG
tttcaacacttttggaggct

SEQ ID NO: 27519 - DNA, 20 bp, Artificial Sequence
  Description of Artificial Sequence: Synthetic oligonucleotide
  Target: ATXN2; (-) strand; PAM type: NRG; PAM sequence: AGG
tgtaatttcaacacttttgg

SEQ ID NO: 27520 - DNA, 20 bp, Artificial Sequence
  Description of Artificial Sequence: Synthetic oligonucleotide
  Target: ATXN2; (-) strand; PAM type: NRG; PAM sequence: GAG
ctgtaatttcaacacttttg

SEQ ID NO: 27521 - DNA, 20 bp, Artificial Sequence
  Description of Artificial Sequence: Synthetic oligonucleotide
  Target: ATXN2; (-) strand; PAM type: NRG; PAM sequence: TGG
gcctgtaatttcaacacttt

SEQ ID NO: 27522 - DNA, 20 bp, Artificial Sequence
  Description of Artificial Sequence: Synthetic oligonucleotide
  Target: ATXN2; (-) strand; PAM type: NRG; PAM sequence: TGG
tagaaataggccaggtgcag

SEQ ID NO: 27523 - DNA, 20 bp, Artificial Sequence
  Description of Artificial Sequence: Synthetic oligonucleotide
  Target: ATXN2; (-) strand; PAM type: NRG; PAM sequence: CAG
gtgtagaaataggccaggtg

SEQ ID NO: 27524 - DNA, 20 bp, Artificial Sequence
  Description of Artificial Sequence: Synthetic oligonucleotide
  Target: ATXN2; (-) strand; PAM type: NRG; PAM sequence: AGG
ccaaagtgtagaaataggcc

SEQ ID NO: 27525 - DNA, 20 bp, Artificial Sequence
  Description of Artificial Sequence: Synthetic oligonucleotide
  Target: ATXN2; (-) strand; PAM type: NRG; PAM sequence: CAG
tccaaagtgtagaaataggc

SEQ ID NO: 27526 - DNA, 20 bp, Artificial Sequence
  Description of Artificial Sequence: Synthetic oligonucleotide
  Target: ATXN2; (-) strand; PAM type: NRG; PAM sequence: AGG
agaatccaaagtgtagaaat

SEQ ID NO: 27527 - DNA, 20 bp, Artificial Sequence
  Description of Artificial Sequence: Synthetic oligonucleotide
  Target: ATXN2; (-) strand; PAM type: NRG; PAM sequence: TAG
cagaatccaaagtgtagaaa

SEQ ID NO: 27528 - DNA, 20 bp, Artificial Sequence
  Description of Artificial Sequence: Synthetic oligonucleotide
  Target: ATXN2; (-) strand; PAM type: NRG; PAM sequence: TAG
tgggagcagaatccaaagtg

SEQ ID NO: 27529 - DNA, 20 bp, Artificial Sequence
  Description of Artificial Sequence: Synthetic oligonucleotide
  Target: ATXN2; (-) strand; PAM type: NRG; PAM sequence: AAG
atacatgggagcagaatcca

SEQ ID NO: 27530 - DNA, 20 bp, Artificial Sequence
  Description of Artificial Sequence: Synthetic oligonucleotide
  Target: ATXN2; (-) strand; PAM type: NRG; PAM sequence: CAG
tgattcaagatacatgggag

SEQ ID NO: 27531 - DNA, 20 bp, Artificial Sequence
  Description of Artificial Sequence: Synthetic oligonucleotide
  Target: ATXN2; (-) strand; PAM type: NRG; PAM sequence: GAG
ggttgattcaagatacatgg

SEQ ID NO: 27532 - DNA, 20 bp, Artificial Sequence
  Description of Artificial Sequence: Synthetic oligonucleotide
  Target: ATXN2; (-) strand; PAM type: NRG; PAM sequence: GGG
aaggttgattcaagatacat

SEQ ID NO: 27533 - DNA, 20 bp, Artificial Sequence
  Description of Artificial Sequence: Synthetic oligonucleotide
  Target: ATXN2; (-) strand; PAM type: NRG; PAM sequence: TGG
taaggttgattcaagataca

SEQ ID NO: 27534 - DNA, 20 bp, Artificial Sequence
  Description of Artificial Sequence: Synthetic oligonucleotide
  Target: ATXN2; (-) strand; PAM type: NRG; PAM sequence: AAG
agtaagagtaaggttgattc

SEQ ID NO: 27535 - DNA, 20 bp, Artificial Sequence
  Description of Artificial Sequence: Synthetic oligonucleotide
  Target: ATXN2; (-) strand; PAM type: NRG; PAM sequence: AGG
gtgtggtactagtaagagta

SEQ ID NO: 27536 - DNA, 20 bp, Artificial Sequence
  Description of Artificial Sequence: Synthetic oligonucleotide
  Target: ATXN2; (-) strand; PAM type: NRG; PAM sequence: AAG
tgtgtggtactagtaagagt

SEQ ID NO: 27537 - DNA, 20 bp, Artificial Sequence
  Description of Artificial Sequence: Synthetic oligonucleotide
  Target: ATXN2; (-) strand; PAM type: NRG; PAM sequence: GAG
atactgtgtggtactagtaa

SEQ ID NO: 27538 - DNA, 20 bp, Artificial Sequence
  Description of Artificial Sequence: Synthetic oligonucleotide
  Target: ATXN2; (-) strand; PAM type: NRG; PAM sequence: AAG
aaatactgtgtggtactagt

SEQ ID NO: 27539 - DNA, 20 bp, Artificial Sequence
  Description of Artificial Sequence: Synthetic oligonucleotide
  Target: ATXN2; (-) strand; PAM type: NRG; PAM sequence: TAG
aaaaaaatactgtgtggtac

SEQ ID NO: 27540 - DNA, 20 bp, Artificial Sequence
  Description of Artificial Sequence: Synthetic oligonucleotide
  Target: ATXN2; (-) strand; PAM type: NRG; PAM sequence: TGG
aacgataaaaaaatactgtg

SEQ ID NO: 27541 - DNA, 20 bp, Artificial Sequence
  Description of Artificial Sequence: Synthetic oligonucleotide
  Target: ATXN2; (-) strand; PAM type: NRG; PAM sequence: TGG
gcataaaatagaattttatt

SEQ ID NO: 27542 - DNA, 20 bp, Artificial Sequence
  Description of Artificial Sequence: Synthetic oligonucleotide
  Target: ATXN2; (-) strand; PAM type: NRG; PAM sequence: TAG
taaaaacctctagcataaaa

SEQ ID NO: 27543 - DNA, 20 bp, Artificial Sequence
  Description of Artificial Sequence: Synthetic oligonucleotide
  Target: ATXN2; (-) strand; PAM type: NRG; PAM sequence: TAG
ataaaaaaaataaaaacctc

SEQ ID NO: 27544 - DNA, 20 bp, Artificial Sequence
  Description of Artificial Sequence: Synthetic oligonucleotide
  Target: ATXN2; (-) strand; PAM type: NRG; PAM sequence: CAG
cctatcatgtttgccaaagt

SEQ ID NO: 27545 - DNA, 20 bp, Artificial Sequence
  Description of Artificial Sequence: Synthetic oligonucleotide
  Target: ATXN2; (-) strand; PAM type: NRG; PAM sequence: AAG
ctaccctatcatgtttgcca

SEQ ID NO: 27546 - DNA, 20 bp, Artificial Sequence
  Description of Artificial Sequence: Synthetic oligonucleotide
  Target: ATXN2; (-) strand; PAM type: NRG; PAM sequence: TAG
tttataatttttagagtata

SEQ ID NO: 27547 - DNA, 20 bp, Artificial Sequence
  Description of Artificial Sequence: Synthetic oligonucleotide
  Target: ATXN2; (-) strand; PAM type: NRG; PAM sequence: GAG
tacatgttttataattttta

SEQ ID NO: 27548 - DNA, 20 bp, Artificial Sequence
  Description of Artificial Sequence: Synthetic oligonucleotide
  Target: ATXN2; (-) strand; PAM type: NRG; PAM sequence: TAG
gttacatgttttataatttt

SEQ ID NO: 27549 - DNA, 20 bp, Artificial Sequence
  Description of Artificial Sequence: Synthetic oligonucleotide
  Target: ATXN2; (-) strand; PAM type: NRG; PAM sequence: AAG
tggtcatcttccatttatta

SEQ ID NO: 27550 - DNA, 20 bp, Artificial Sequence
  Description of Artificial Sequence: Synthetic oligonucleotide
  Target: ATXN2; (-) strand; PAM type: NRG; PAM sequence: TGG
attacatgtttattaagata

SEQ ID NO: 27551 - DNA, 20 bp, Artificial Sequence
  Description of Artificial Sequence: Synthetic oligonucleotide
  Target: ATXN2; (-) strand; PAM type: NRG; PAM sequence: AAG
aaaagcattacatgtttatt

SEQ ID NO: 27552 - DNA, 20 bp, Artificial Sequence
  Description of Artificial Sequence: Synthetic oligonucleotide
  Target: ATXN2; (-) strand; PAM type: NRG; PAM sequence: AAG
gttcgtggtacacagtagaa

SEQ ID NO: 27553 - DNA, 20 bp, Artificial Sequence
  Description of Artificial Sequence: Synthetic oligonucleotide
  Target: ATXN2; (-) strand; PAM type: NRG; PAM sequence: TAG
gaatagttcgtggtacacag

SEQ ID NO: 27554 - DNA, 20 bp, Artificial Sequence
  Description of Artificial Sequence: Synthetic oligonucleotide
  Target: ATXN2; (-) strand; PAM type: NRG; PAM sequence: CAG
acagaatagttcgtggtaca

SEQ ID NO: 27555 - DNA, 20 bp, Artificial Sequence
  Description of Artificial Sequence: Synthetic oligonucleotide
  Target: ATXN2; (-) strand; PAM type: NRG; PAM sequence: TGG
aagctaaacagaatagttcg

SEQ ID NO: 27556 - DNA, 20 bp, Artificial Sequence
  Description of Artificial Sequence: Synthetic oligonucleotide
  Target: ATXN2; (-) strand; PAM type: NRG; PAM sequence: TAG
taatggaaagctaaacagaa

SEQ ID NO: 27557 - DNA, 20 bp, Artificial Sequence
  Description of Artificial Sequence: Synthetic oligonucleotide
  Target: ATXN2; (-) strand; PAM type: NRG; PAM sequence: CAG
ctatgtaatggaaagctaaa

SEQ ID NO: 27558 - DNA, 20 bp, Artificial Sequence
  Description of Artificial Sequence: Synthetic oligonucleotide
  Target: ATXN2; (-) strand; PAM type: NRG; PAM sequence: AAG
gaacggatctatgtaatgga

SEQ ID NO: 27559 - DNA, 20 bp, Artificial Sequence
  Description of Artificial Sequence: Synthetic oligonucleotide
  Target: ATXN2; (-) strand; PAM type: NRG; PAM sequence: TGG
ggtggaacggatctatgtaa

SEQ ID NO: 27560 - DNA, 20 bp, Artificial Sequence
  Description of Artificial Sequence: Synthetic oligonucleotide
  Target: ATXN2; (-) strand; PAM type: NRG; PAM sequence: CGG
aaagaaagaaacaggtggaa

SEQ ID NO: 27561 - DNA, 20 bp, Artificial Sequence
  Description of Artificial Sequence: Synthetic oligonucleotide
  Target: ATXN2; (-) strand; PAM type: NRG; PAM sequence: TGG
gattaaaagaaagaaacagg

SEQ ID NO: 27562 - DNA, 20 bp, Artificial Sequence
  Description of Artificial Sequence: Synthetic oligonucleotide
  Target: ATXN2; (-) strand; PAM type: NRG; PAM sequence: AGG
tgagattaaaagaaagaaac

SEQ ID NO: 27563 - DNA, 20 bp, Artificial Sequence
  Description of Artificial Sequence: Synthetic oligonucleotide
  Target: ATXN2; (-) strand; PAM type: NRG; PAM sequence: CAG
ttgagattaaaagaaagaaa

SEQ ID NO: 27564 - DNA, 20 bp, Artificial Sequence
  Description of Artificial Sequence: Synthetic oligonucleotide
  Target: ATXN2; (-) strand; PAM type: NRG; PAM sequence: AAG
agattattgagattaaaaga

SEQ ID NO: 27565 - DNA, 20 bp, Artificial Sequence
  Description of Artificial Sequence: Synthetic oligonucleotide
  Target: ATXN2; (-) strand; PAM type: NRG; PAM sequence: AAG
acagagattattgagattaa

SEQ ID NO: 27566 - DNA, 20 bp, Artificial Sequence
  Description of Artificial Sequence: Synthetic oligonucleotide
  Target: ATXN2; (-) strand; PAM type: NRG; PAM sequence: GAG
gaggcagtacagagattatt

SEQ ID NO: 27567 - DNA, 20 bp, Artificial Sequence
  Description of Artificial Sequence: Synthetic oligonucleotide
  Target: ATXN2; (-) strand; PAM type: NRG; PAM sequence: GAG
gccagtatggaggcagtaca

SEQ ID NO: 27568 - DNA, 20 bp, Artificial Sequence
  Description of Artificial Sequence: Synthetic oligonucleotide
  Target: ATXN2; (-) strand; PAM type: NRG; PAM sequence: CAG
aggccagtatggaggcagta

SEQ ID NO: 27569 - DNA, 20 bp, Artificial Sequence
  Description of Artificial Sequence: Synthetic oligonucleotide
  Target: ATXN2; (-) strand; PAM type: NRG; PAM sequence: CAG
tattgaggccagtatggagg

SEQ ID NO: 27570 - DNA, 20 bp, Artificial Sequence
  Description of Artificial Sequence: Synthetic oligonucleotide
  Target: ATXN2; (-) strand; PAM type: NRG; PAM sequence: AGG
acttattgaggccagtatgg

SEQ ID NO: 27571 - DNA, 20 bp, Artificial Sequence
  Description of Artificial Sequence: Synthetic oligonucleotide
  Target: ATXN2; (-) strand; PAM type: NRG; PAM sequence: GAG
cacttattgaggccagtatg

SEQ ID NO: 27572 - DNA, 20 bp, Artificial Sequence
  Description of Artificial Sequence: Synthetic oligonucleotide
  Target: ATXN2; (-) strand; PAM type: NRG; PAM sequence: TGG
ggcacttattgaggccagta

SEQ ID NO: 27573 - DNA, 20 bp, Artificial Sequence
  Description of Artificial Sequence: Synthetic oligonucleotide
  Target: ATXN2; (-) strand; PAM type: NRG; PAM sequence: CAG
agagtggcacttattgaggc

SEQ ID NO: 27574 - DNA, 20 bp, Artificial Sequence
  Description of Artificial Sequence: Synthetic oligonucleotide
  Target: ATXN2; (-) strand; PAM type: NRG; PAM sequence: AGG
ctggagagtggcacttattg

SEQ ID NO: 27575 - DNA, 20 bp, Artificial Sequence
  Description of Artificial Sequence: Synthetic oligonucleotide
  Target: ATXN2; (-) strand; PAM type: NRG; PAM sequence: GAG
actggagagtggcacttatt

SEQ ID NO: 27576 - DNA, 20 bp, Artificial Sequence
  Description of Artificial Sequence: Synthetic oligonucleotide
  Target: ATXN2; (-) strand; PAM type: NRG; PAM sequence: TGG
gccaagcagtaactggagag

SEQ ID NO: 27577 - DNA, 20 bp, Artificial Sequence
  Description of Artificial Sequence: Synthetic oligonucleotide
  Target: ATXN2; (-) strand; PAM type: NRG; PAM sequence: GAG
ggggccaagcagtaactgga

SEQ ID NO: 27578 - DNA, 20 bp, Artificial Sequence
  Description of Artificial Sequence: Synthetic oligonucleotide
  Target: ATXN2; (-) strand; PAM type: NRG; PAM sequence: GAG
ctggggccaagcagtaactg

SEQ ID NO: 27579 - DNA, 20 bp, Artificial Sequence
  Description of Artificial Sequence: Synthetic oligonucleotide
  Target: ATXN2; (-) strand; PAM type: NRG; PAM sequence: TGG
ttctggggccaagcagtaac

SEQ ID NO: 27580 - DNA, 20 bp, Artificial Sequence
  Description of Artificial Sequence: Synthetic oligonucleotide
  Target: ATXN2; (-) strand; PAM type: NRG; PAM sequence: CAG
gtgttcattctggggccaag

SEQ ID NO: 27581 - DNA, 20 bp, Artificial Sequence
  Description of Artificial Sequence: Synthetic oligonucleotide
  Target: ATXN2; (-) strand; PAM type: NRG; PAM sequence: AAG
tatgtgttcattctggggcc

SEQ ID NO: 27582 - DNA, 20 bp, Artificial Sequence
  Description of Artificial Sequence: Synthetic oligonucleotide
  Target: ATXN2; (-) strand; PAM type: NRG; PAM sequence: GGG
acagatatgtgttcattctg

SEQ ID NO: 27583 - DNA, 20 bp, Artificial Sequence
  Description of Artificial Sequence: Synthetic oligonucleotide
  Target: ATXN2; (-) strand; PAM type: NRG; PAM sequence: GGG
cacagatatgtgttcattct

SEQ ID NO: 27584 - DNA, 20 bp, Artificial Sequence
  Description of Artificial Sequence: Synthetic oligonucleotide
  Target: ATXN2; (-) strand; PAM type: NRG; PAM sequence: TGG
acacagatatgtgttcattc

SEQ ID NO: 27585 - DNA, 20 bp, Artificial Sequence
  Description of Artificial Sequence: Synthetic oligonucleotide
  Target: ATXN2; (-) strand; PAM type: NRG; PAM sequence: CAG
tgctgtggtttattaagaca

SEQ ID NO: 27586 - DNA, 20 bp, Artificial Sequence
  Description of Artificial Sequence: Synthetic oligonucleotide
  Target: ATXN2; (-) strand; PAM type: NRG; PAM sequence: AAG
caactttgctgtggtttatt

SEQ ID NO: 27587 - DNA, 20 bp, Artificial Sequence
  Description of Artificial Sequence: Synthetic oligonucleotide
  Target: ATXN2; (-) strand; PAM type: NRG; PAM sequence: TGG
ttacggcctcaactttgctg

SEQ ID NO: 27588 - DNA, 20 bp, Artificial Sequence
  Description of Artificial Sequence: Synthetic oligonucleotide
  Target: ATXN2; (-) strand; PAM type: NRG; PAM sequence: CGG
gacattagaaaagctgttta

SEQ ID NO: 27589 - DNA, 20 bp, Artificial Sequence
  Description of Artificial Sequence: Synthetic oligonucleotide
  Target: ATXN2; (-) strand; PAM type: NRG; PAM sequence: AAG
tgaacggcgtgacattagaa

SEQ ID NO: 27590 - DNA, 20 bp, Artificial Sequence
  Description of Artificial Sequence: Synthetic oligonucleotide
  Target: ATXN2; (-) strand; PAM type: NRG; PAM sequence: TAG
tcttctgaacggcgtgacat

SEQ ID NO: 27591 - DNA, 20 bp, Artificial Sequence
  Description of Artificial Sequence: Synthetic oligonucleotide
  Target: ATXN2; (-) strand; PAM type: NRG; PAM sequence: CGG
aaacagggatctcttctgaa

SEQ ID NO: 27592 - DNA, 20 bp, Artificial Sequence
  Description of Artificial Sequence: Synthetic oligonucleotide
  Target: ATXN2; (-) strand; PAM type: NRG; PAM sequence: GGG
cagagtacgagtaacaaaca

SEQ ID NO: 27593 - DNA, 20 bp, Artificial Sequence
  Description of Artificial Sequence: Synthetic oligonucleotide
  Target: ATXN2; (-) strand; PAM type: NRG; PAM sequence: AGG
acagagtacgagtaacaaac

SEQ ID NO: 27594 - DNA, 20 bp, Artificial Sequence
  Description of Artificial Sequence: Synthetic oligonucleotide
  Target: ATXN2; (-) strand; PAM type: NRG; PAM sequence: CAG
aacagagtacgagtaacaaa

SEQ ID NO: 27595 - DNA, 20 bp, Artificial Sequence
  Description of Artificial Sequence: Synthetic oligonucleotide
  Target: ATXN2; (-) strand; PAM type: NRG; PAM sequence: GAG
gtgtatcagtaacagagtac

SEQ ID NO: 27596 - DNA, 20 bp, Artificial Sequence
  Description of Artificial Sequence: Synthetic oligonucleotide
  Target: ATXN2; (-) strand; PAM type: NRG; PAM sequence: GAG
ttgatagtgtatcagtaaca

SEQ ID NO: 27597 - DNA, 20 bp, Artificial Sequence
  Description of Artificial Sequence: Synthetic oligonucleotide
  Target: ATXN2; (-) strand; PAM type: NRG; PAM sequence: CAG
tcttgatagtgtatcagtaa

SEQ ID NO: 27598 - DNA, 20 bp, Artificial Sequence
  Description of Artificial Sequence: Synthetic oligonucleotide
  Target: ATXN2; (-) strand; PAM type: NRG; PAM sequence: CAG
ttttggtcttgatagtgtat

SEQ ID NO: 27599 - DNA, 20 bp, Artificial Sequence
  Description of Artificial Sequence: Synthetic oligonucleotide
  Target: ATXN2; (-) strand; PAM type: NRG; PAM sequence: TAG
ggttgtctttttggtcttga

SEQ ID NO: 27600 - DNA, 20 bp, Artificial Sequence
  Description of Artificial Sequence: Synthetic oligonucleotide
  Target: ATXN2; (-) strand; PAM type: NRG; PAM sequence: TGG
ttctcatatggttgtctttt

SEQ ID NO: 27601 - DNA, 20 bp, Artificial Sequence
  Description of Artificial Sequence: Synthetic oligonucleotide
  Target: ATXN2; (-) strand; PAM type: NRG; PAM sequence: TGG
tgtgctgttgtgttctcata

SEQ ID NO: 27602 - DNA, 20 bp, Artificial Sequence
  Description of Artificial Sequence: Synthetic oligonucleotide
  Target: ATXN2; (-) strand; PAM type: NRG; PAM sequence: TGG
ttctacagattgttttattc

SEQ ID NO: 27603 - DNA, 20 bp, Artificial Sequence
  Description of Artificial Sequence: Synthetic oligonucleotide
  Target: ATXN2; (-) strand; PAM type: NRG; PAM sequence: CAG
cagtgagaaataaaattcta

SEQ ID NO: 27604 - DNA, 20 bp, Artificial Sequence
  Description of Artificial Sequence: Synthetic oligonucleotide
  Target: ATXN2; (-) strand; PAM type: NRG; PAM sequence: GAG
atgtgtaattagagaacagt

SEQ ID NO: 27605 - DNA, 20 bp, Artificial Sequence
  Description of Artificial Sequence: Synthetic oligonucleotide
  Target: ATXN2; (-) strand; PAM type: NRG; PAM sequence: CAG
gttaatgtgtaattagagaa

SEQ ID NO: 27606 - DNA, 20 bp, Artificial Sequence
  Description of Artificial Sequence: Synthetic oligonucleotide
  Target: ATXN2; (-) strand; PAM type: NRG; PAM sequence: GAG
ggagtgttaatgtgtaatta

SEQ ID NO: 27607 - DNA, 20 bp, Artificial Sequence
  Description of Artificial Sequence: Synthetic oligonucleotide
  Target: ATXN2; (-) strand; PAM type: NRG; PAM sequence: TAG
ttggagtgttaatgtgtaat

SEQ ID NO: 27608 - DNA, 20 bp, Artificial Sequence
  Description of Artificial Sequence: Synthetic oligonucleotide
  Target: ATXN2; (-) strand; PAM type: NRG; PAM sequence: GAG
ttagtagttggaagaagttg

SEQ ID NO: 27609 - DNA, 20 bp, Artificial Sequence
  Description of Artificial Sequence: Synthetic oligonucleotide
  Target: ATXN2; (-) strand; PAM type: NRG; PAM sequence: TGG
ttttagtagttggaagaagt

SEQ ID NO: 27610 - DNA, 20 bp, Artificial Sequence
  Description of Artificial Sequence: Synthetic oligonucleotide
  Target: ATXN2; (-) strand; PAM type: NRG; PAM sequence: AAG
tagattttagtagttggaag

SEQ ID NO: 27611 - DNA, 20 bp, Artificial Sequence
  Description of Artificial Sequence: Synthetic oligonucleotide
  Target: ATXN2; (-) strand; PAM type: NRG; PAM sequence: AAG
gtgtagattttagtagttgg

SEQ ID NO: 27612 - DNA, 20 bp, Artificial Sequence
  Description of Artificial Sequence: Synthetic oligonucleotide
  Target: ATXN2; (-) strand; PAM type: NRG; PAM sequence: TGG
attgtgtagattttagtagt

SEQ ID NO: 27613 - DNA, 20 bp, Artificial Sequence
  Description of Artificial Sequence: Synthetic oligonucleotide
  Target: ATXN2; (-) strand; PAM type: NRG; PAM sequence: TAG
aagaattgtgtagattttag

SEQ ID NO: 27614 - DNA, 20 bp, Artificial Sequence
  Description of Artificial Sequence: Synthetic oligonucleotide
  Target: ATXN2; (-) strand; PAM type: NRG; PAM sequence: TAG
taaaagaattgtgtagattt

SEQ ID NO: 27615 - DNA, 20 bp, Artificial Sequence
  Description of Artificial Sequence: Synthetic oligonucleotide
  Target: ATXN2; (-) strand; PAM type: NRG; PAM sequence: TAG
taaaaaataaaagaattgtg

SEQ ID NO: 27616 - DNA, 20 bp, Artificial Sequence
  Description of Artificial Sequence: Synthetic oligonucleotide
  Target: ATXN2; (-) strand; PAM type: NRG; PAM sequence: AAG
atctcaaaaataaaaaataa

SEQ ID NO: 27617 - DNA, 20 bp, Artificial Sequence
  Description of Artificial Sequence: Synthetic oligonucleotide
  Target: ATXN2; (-) strand; PAM type: NRG; PAM sequence: GAG
tccagcctgagtgacagagc

SEQ ID NO: 27618 - DNA, 20 bp, Artificial Sequence
  Description of Artificial Sequence: Synthetic oligonucleotide
  Target: ATXN2; (-) strand; PAM type: NRG; PAM sequence: GAG
gcactccagcctgagtgaca

SEQ ID NO: 27619 - DNA, 20 bp, Artificial Sequence
  Description of Artificial Sequence: Synthetic oligonucleotide
  Target: ATXN2; (-) strand; PAM type: NRG; PAM sequence: CAG
ctgcactccagcctgagtga

SEQ ID NO: 27620 - DNA, 20 bp, Artificial Sequence
  Description of Artificial Sequence: Synthetic oligonucleotide
  Target: ATXN2; (-) strand; PAM type: NRG; PAM sequence: GAG
gtaccactgcactccagcct

SEQ ID NO: 27621 - DNA, 20 bp, Artificial Sequence
  Description of Artificial Sequence: Synthetic oligonucleotide
  Target: ATXN2; (-) strand; PAM type: NRG; PAM sequence: CAG
gagatcgtaccactgcactc

SEQ ID NO: 27622 - DNA, 20 bp, Artificial Sequence
  Description of Artificial Sequence: Synthetic oligonucleotide
  Target: ATXN2; (-) strand; PAM type: NRG; PAM sequence: GAG
ggtggaggttgcaatgagct

SEQ ID NO: 27623 - DNA, 20 bp, Artificial Sequence
  Description of Artificial Sequence: Synthetic oligonucleotide
  Target: ATXN2; (-) strand; PAM type: NRG; PAM sequence: GAG
cagaaggtggaggttgcaat

SEQ ID NO: 27624 - DNA, 20 bp, Artificial Sequence
  Description of Artificial Sequence: Synthetic oligonucleotide
  Target: ATXN2; (-) strand; PAM type: NRG; PAM sequence: AGG
catttgaacccagaaggtgg

SEQ ID NO: 27625 - DNA, 20 bp, Artificial Sequence
  Description of Artificial Sequence: Synthetic oligonucleotide
  Target: ATXN2; (-) strand; PAM type: NRG; PAM sequence: GAG
tcatttgaacccagaaggtg

SEQ ID NO: 27626 - DNA, 20 bp, Artificial Sequence
  Description of Artificial Sequence: Synthetic oligonucleotide
  Target: ATXN2; (-) strand; PAM type: NRG; PAM sequence: TGG
aatcatttgaacccagaagg

SEQ ID NO: 27627 - DNA, 20 bp, Artificial Sequence
  Description of Artificial Sequence: Synthetic oligonucleotide
  Target: ATXN2; (-) strand; PAM type: NRG; PAM sequence: AGG
gagaatcatttgaacccaga

SEQ ID NO: 27628 - DNA, 20 bp, Artificial Sequence
  Description of Artificial Sequence: Synthetic oligonucleotide
  Target: ATXN2; (-) strand; PAM type: NRG; PAM sequence: AAG
ggagaatcatttgaacccag

SEQ ID NO: 27629 - DNA, 20 bp, Artificial Sequence
  Description of Artificial Sequence: Synthetic oligonucleotide
  Target: ATXN2; (-) strand; PAM type: NRG; PAM sequence: CAG
acaggagaatcatttgaacc

SEQ ID NO: 27630 - DNA, 20 bp, Artificial Sequence
  Description of Artificial Sequence: Synthetic oligonucleotide
  Target: ATXN2; (-) strand; PAM type: NRG; PAM sequence: GAG
tactcgggaggctgagacag

SEQ ID NO: 27631 - DNA, 20 bp, Artificial Sequence
  Description of Artificial Sequence: Synthetic oligonucleotide
  Target: ATXN2; (-) strand; PAM type: NRG; PAM sequence: AGG
gctactcgggaggctgagac

SEQ ID NO: 27632 - DNA, 20 bp, Artificial Sequence
  Description of Artificial Sequence: Synthetic oligonucleotide
  Target: ATXN2; (-) strand; PAM type: NRG; PAM sequence: CAG
agctactcgggaggctgaga

SEQ ID NO: 27633 - DNA, 20 bp, Artificial Sequence
  Description of Artificial Sequence: Synthetic oligonucleotide
  Target: ATXN2; (-) strand; PAM type: NRG; PAM sequence: GAG
tcccagctactcgggaggct

SEQ ID NO: 27634 - DNA, 20 bp, Artificial Sequence
  Description of Artificial Sequence: Synthetic oligonucleotide
  Target: ATXN2; (-) strand; PAM type: NRG; PAM sequence: AGG
tctaatcccagctactcggg

SEQ ID NO: 27635 - DNA, 20 bp, Artificial Sequence
  Description of Artificial Sequence: Synthetic oligonucleotide
  Target: ATXN2; (-) strand; PAM type: NRG; PAM sequence: GAG
ctctaatcccagctactcgg

SEQ ID NO: 27636 - DNA, 20 bp, Artificial Sequence
  Description of Artificial Sequence: Synthetic oligonucleotide
  Target: ATXN2; (-) strand; PAM type: NRG; PAM sequence: GGG
gcctctaatcccagctactc

SEQ ID NO: 27637 - DNA, 20 bp, Artificial Sequence
  Description of Artificial Sequence: Synthetic oligonucleotide
  Target: ATXN2; (-) strand; PAM type: NRG; PAM sequence: CGG
cgcctctaatcccagctact

SEQ ID NO: 27638 - DNA, 20 bp, Artificial Sequence
  Description of Artificial Sequence: Synthetic oligonucleotide
  Target: ATXN2; (-) strand; PAM type: NRG; PAM sequence: CAG
ctggtgtgcgcctctaatcc

SEQ ID NO: 27639 - DNA, 20 bp, Artificial Sequence
  Description of Artificial Sequence: Synthetic oligonucleotide
  Target: ATXN2; (-) strand; PAM type: NRG; PAM sequence: TGG
aaaaaattagcctggtgtgc

SEQ ID NO: 27640 - DNA, 20 bp, Artificial Sequence
  Description of Artificial Sequence: Synthetic oligonucleotide
  Target: ATXN2; (-) strand; PAM type: NRG; PAM sequence: TGG
ttttacaaaaaaaattagcc

SEQ ID NO: 27641 - DNA, 20 bp, Artificial Sequence
  Description of Artificial Sequence: Synthetic oligonucleotide
  Target: ATXN2; (-) strand; PAM type: NRG; PAM sequence: TAG
ctagattttacaaaaaaaat

SEQ ID NO: 27642 - DNA, 20 bp, Artificial Sequence
  Description of Artificial Sequence: Synthetic oligonucleotide
  Target: ATXN2; (-) strand; PAM type: NRG; PAM sequence: TAG
cagcgatgcaaataattgtc

SEQ ID NO: 27643 - DNA, 20 bp, Artificial Sequence
  Description of Artificial Sequence: Synthetic oligonucleotide
  Target: ATXN2; (-) strand; PAM type: NRG; PAM sequence: CAG
cattgaatatcaaatggagt

SEQ ID NO: 27644 - DNA, 20 bp, Artificial Sequence
  Description of Artificial Sequence: Synthetic oligonucleotide
  Target: ATXN2; (-) strand; PAM type: NRG; PAM sequence: GAG
atgacattgaatatcaaatg

SEQ ID NO: 27645 - DNA, 20 bp, Artificial Sequence
  Description of Artificial Sequence: Synthetic oligonucleotide
  Target: ATXN2; (-) strand; PAM type: NRG; PAM sequence: TGG
gcatgacattgaatatcaaa

SEQ ID NO: 27646 - DNA, 20 bp, Artificial Sequence
  Description of Artificial Sequence: Synthetic oligonucleotide
  Target: ATXN2; (-) strand; PAM type: NRG; PAM sequence: TGG
gtgaataaattcaagaaaaa

SEQ ID NO: 27647 - DNA, 20 bp, Artificial Sequence
  Description of Artificial Sequence: Synthetic oligonucleotide
  Target: ATXN2; (-) strand; PAM type: NRG; PAM sequence: AAG
caaagcacgtgaataaattc

SEQ ID NO: 27648 - DNA, 20 bp, Artificial Sequence
  Description of Artificial Sequence: Synthetic oligonucleotide
  Target: ATXN2; (-) strand; PAM type: NRG; PAM sequence: AAG
ttttagagttagagatagca

SEQ ID NO: 27649 - DNA, 20 bp, Artificial Sequence
  Description of Artificial Sequence: Synthetic oligonucleotide
  Target: ATXN2; (-) strand; PAM type: NRG; PAM sequence: TAG
agcatttttagagttagaga

SEQ ID NO: 27650 - DNA, 20 bp, Artificial Sequence
  Description of Artificial Sequence: Synthetic oligonucleotide
  Target: ATXN2; (-) strand; PAM type: NRG; PAM sequence: GAG
tctaagcatttttagagtta

SEQ ID NO: 27651 - DNA, 20 bp, Artificial Sequence
  Description of Artificial Sequence: Synthetic oligonucleotide
  Target: ATXN2; (-) strand; PAM type: NRG; PAM sequence: TAG
attctaagcatttttagagt

SEQ ID NO: 27652 - DNA, 20 bp, Artificial Sequence
  Description of Artificial Sequence: Synthetic oligonucleotide
  Target: ATXN2; (-) strand; PAM type: NRG; PAM sequence: GAG
ctctattctaagcattttta

SEQ ID NO: 27653 - DNA, 20 bp, Artificial Sequence
  Description of Artificial Sequence: Synthetic oligonucleotide
  Target: ATXN2; (-) strand; PAM type: NRG; PAM sequence: TAG
tactctattctaagcatttt

SEQ ID NO: 27654 - DNA, 20 bp, Artificial Sequence
  Description of Artificial Sequence: Synthetic oligonucleotide
  Target: ATXN2; (-) strand; PAM type: NRG; PAM sequence: AAG
tacgccatgtactctattct

SEQ ID NO: 27655 - DNA, 20 bp, Artificial Sequence
  Description of Artificial Sequence: Synthetic oligonucleotide
  Target: ATXN2; (-) strand; PAM type: NRG; PAM sequence: GAG
gtgttcacagtttcttcagg

SEQ ID NO: 27656 - DNA, 20 bp, Artificial Sequence
  Description of Artificial Sequence: Synthetic oligonucleotide
  Target: ATXN2; (-) strand; PAM type: NRG; PAM sequence: GGG
tggtgttcacagtttcttca

SEQ ID NO: 27657 - DNA, 20 bp, Artificial Sequence
  Description of Artificial Sequence: Synthetic oligonucleotide
  Target: ATXN2; (-) strand; PAM type: NRG; PAM sequence: AGG
atggtgttcacagtttcttc

SEQ ID NO: 27658 - DNA, 20 bp, Artificial Sequence
  Description of Artificial Sequence: Synthetic oligonucleotide
  Target: ATXN2; (-) strand; PAM type: NRG; PAM sequence: CAG
catggtgttcacagtttctt

SEQ ID NO: 27659 - DNA, 20 bp, Artificial Sequence
  Description of Artificial Sequence: Synthetic oligonucleotide
  Target: ATXN2; (-) strand; PAM type: NRG; PAM sequence: CAG
atgtaatttcatggtgttca

SEQ ID NO: 27660 - DNA, 20 bp, Artificial Sequence
  Description of Artificial Sequence: Synthetic oligonucleotide
  Target: ATXN2; (-) strand; PAM type: NRG; PAM sequence: TGG
cccacgctaatgtaatttca

SEQ ID NO: 27661 - DNA, 20 bp, Artificial Sequence
  Description of Artificial Sequence: Synthetic oligonucleotide
  Target: ATXN2; (-) strand; PAM type: NRG; PAM sequence: AAG
agtgatgggattataggtgc

SEQ ID NO: 27662 - DNA, 20 bp, Artificial Sequence
  Description of Artificial Sequence: Synthetic oligonucleotide
  Target: ATXN2; (-) strand; PAM type: NRG; PAM sequence: AGG
ttcaaaagtgatgggattat

SEQ ID NO: 27663 - DNA, 20 bp, Artificial Sequence
  Description of Artificial Sequence: Synthetic oligonucleotide
  Target: ATXN2; (-) strand; PAM type: NRG; PAM sequence: TAG
cttcaaaagtgatgggatta

SEQ ID NO: 27664 - DNA, 20 bp, Artificial Sequence
  Description of Artificial Sequence: Synthetic oligonucleotide
  Target: ATXN2; (-) strand; PAM type: NRG; PAM sequence: GGG
ccttggccttcaaaagtgat

SEQ ID NO: 27665 - DNA, 20 bp, Artificial Sequence
  Description of Artificial Sequence: Synthetic oligonucleotide
  Target: ATXN2; (-) strand; PAM type: NRG; PAM sequence: TGG
accttggccttcaaaagtga

SEQ ID NO: 27666 - DNA, 20 bp, Artificial Sequence
  Description of Artificial Sequence: Synthetic oligonucleotide
  Target: ATXN2; (-) strand; PAM type: NRG; PAM sequence: AAG
tcctctaccttggccttcaa

SEQ ID NO: 27667 - DNA, 20 bp, Artificial Sequence
  Description of Artificial Sequence: Synthetic oligonucleotide
  Target: ATXN2; (-) strand; PAM type: NRG; PAM sequence: TGG
gttcaagcaatcctctacct

SEQ ID NO: 27668 - DNA, 20 bp, Artificial Sequence
  Description of Artificial Sequence: Synthetic oligonucleotide
  Target: ATXN2; (-) strand; PAM type: NRG; PAM sequence: AAG
ggcctttacctcctgggttc

SEQ ID NO: 27669 - DNA, 20 bp, Artificial Sequence
  Description of Artificial Sequence: Synthetic oligonucleotide
  Target: ATXN2; (-) strand; PAM type: NRG; PAM sequence: GGG
caggctggcctttacctcct

SEQ ID NO: 27670 - DNA, 20 bp, Artificial Sequence
  Description of Artificial Sequence: Synthetic oligonucleotide
  Target: ATXN2; (-) strand; PAM type: NRG; PAM sequence: TGG
ccaggctggcctttacctcc

SEQ ID NO: 27671 - DNA, 20 bp, Artificial Sequence
  Description of Artificial Sequence: Synthetic oligonucleotide
  Target: ATXN2; (-) strand; PAM type: NRG; PAM sequence: TGG
tctcactatgtttcccaggc

SEQ ID NO: 27672 - DNA, 20 bp, Artificial Sequence
  Description of Artificial Sequence: Synthetic oligonucleotide
  Target: ATXN2; (-) strand; PAM type: NRG; PAM sequence: AGG
tggttctcactatgtttccc

SEQ ID NO: 27673 - DNA, 20 bp, Artificial Sequence
  Description of Artificial Sequence: Synthetic oligonucleotide
  Target: ATXN2; (-) strand; PAM type: NRG; PAM sequence: CAG
ctggttctcactatgtttcc

SEQ ID NO: 27674 - DNA, 20 bp, Artificial Sequence
  Description of Artificial Sequence: Synthetic oligonucleotide
  Target: ATXN2; (-) strand; PAM type: NRG; PAM sequence: TGG
taaaaatattttatagacac

SEQ ID NO: 27675 - DNA, 20 bp, Artificial Sequence
  Description of Artificial Sequence: Synthetic oligonucleotide
  Target: ATXN2; (-) strand; PAM type: NRG; PAM sequence: TAG
taatttttaaaaatatttta

SEQ ID NO: 27676 - DNA, 20 bp, Artificial Sequence
  Description of Artificial Sequence: Synthetic oligonucleotide
  Target: ATXN2; (-) strand; PAM type: NRG; PAM sequence: CGG
caggtgcacgccgctatgcc

SEQ ID NO: 27677 - DNA, 20 bp, Artificial Sequence
  Description of Artificial Sequence: Synthetic oligonucleotide
  Target: ATXN2; (-) strand; PAM type: NRG; PAM sequence: AGG
tcccaagtagctggggctac

SEQ ID NO: 27678 - DNA, 20 bp, Artificial Sequence
  Description of Artificial Sequence: Synthetic oligonucleotide
  Target: ATXN2; (-) strand; PAM type: NRG; PAM sequence: CAG
ctcccaagtagctggggcta

SEQ ID NO: 27679 - DNA, 20 bp, Artificial Sequence
  Description of Artificial Sequence: Synthetic oligonucleotide
  Target: ATXN2; (-) strand; PAM type: NRG; PAM sequence: GGG
ctcagcctcccaagtagctg

SEQ ID NO: 27680 - DNA, 20 bp, Artificial Sequence
  Description of Artificial Sequence: Synthetic oligonucleotide
  Target: ATXN2; (-) strand; PAM type: NRG; PAM sequence: GGG
cctcagcctcccaagtagct

SEQ ID NO: 27681 - DNA, 20 bp, Artificial Sequence
  Description of Artificial Sequence: Synthetic oligonucleotide
  Target: ATXN2; (-) strand; PAM type: NRG; PAM sequence: TGG
acctcagcctcccaagtagc

SEQ ID NO: 27682 - DNA, 20 bp, Artificial Sequence
  Description of Artificial Sequence: Synthetic oligonucleotide
  Target: ATXN2; (-) strand; PAM type: NRG; PAM sequence: TAG
tcccacctcagcctcccaag

SEQ ID NO: 27683 - DNA, 20 bp, Artificial Sequence
  Description of Artificial Sequence: Synthetic oligonucleotide
  Target: ATXN2; (-) strand; PAM type: NRG; PAM sequence: AAG
ctctcccacctcagcctccc

SEQ ID NO: 27684 - DNA, 20 bp, Artificial Sequence
  Description of Artificial Sequence: Synthetic oligonucleotide
  Target: ATXN2; (-) strand; PAM type: NRG; PAM sequence: CAG
ctcaagcgactctcccacct

SEQ ID NO: 27685 - DNA, 20 bp, Artificial Sequence
  Description of Artificial Sequence: Synthetic oligonucleotide
  Target: ATXN2; (-) strand; PAM type: NRG; PAM sequence: AAG
tagcctcgacctcctggctc

SEQ ID NO: 27686 - DNA, 20 bp, Artificial Sequence
  Description of Artificial Sequence: Synthetic oligonucleotide
  Target: ATXN2; (-) strand; PAM type: NRG; PAM sequence: TGG
ttactgtagcctcgacctcc

SEQ ID NO: 27687 - DNA, 20 bp, Artificial Sequence
  Description of Artificial Sequence: Synthetic oligonucleotide
  Target: ATXN2; (-) strand; PAM type: NRG; PAM sequence: TAG
ggtgtgatcatggcttactg

SEQ ID NO: 27688 - DNA, 20 bp, Artificial Sequence
  Description of Artificial Sequence: Synthetic oligonucleotide
  Target: ATXN2; (-) strand; PAM type: NRG; PAM sequence: TGG
ggaatgcagtggtgtgatca

SEQ ID NO: 27689 - DNA, 20 bp, Artificial Sequence
  Description of Artificial Sequence: Synthetic oligonucleotide
  Target: ATXN2; (-) strand; PAM type: NRG; PAM sequence: TGG
tcactcaggctggaatgcag

SEQ ID NO: 27690 - DNA, 20 bp, Artificial Sequence
  Description of Artificial Sequence: Synthetic oligonucleotide
  Target: ATXN2; (-) strand; PAM type: NRG; PAM sequence: CAG
ctgtcactcaggctggaatg

SEQ ID NO: 27691 - DNA, 20 bp, Artificial Sequence
  Description of Artificial Sequence: Synthetic oligonucleotide
  Target: ATXN2; (-) strand; PAM type: NRG; PAM sequence: TGG
tcatgctctgtcactcaggc

SEQ ID NO: 27692 - DNA, 20 bp, Artificial Sequence
  Description of Artificial Sequence: Synthetic oligonucleotide
  Target: ATXN2; (-) strand; PAM type: NRG; PAM sequence: AGG
agggtcatgctctgtcactc

SEQ ID NO: 27693 - DNA, 20 bp, Artificial Sequence
  Description of Artificial Sequence: Synthetic oligonucleotide
  Target: ATXN2; (-) strand; PAM type: NRG; PAM sequence: CAG
cagggtcatgctctgtcact

SEQ ID NO: 27694 - DNA, 20 bp, Artificial Sequence
  Description of Artificial Sequence: Synthetic oligonucleotide
  Target: ATXN2; (-) strand; PAM type: NRG; PAM sequence: GGG
ttcttttttttaaagaaaca

SEQ ID NO: 27695 - DNA, 20 bp, Artificial Sequence
  Description of Artificial Sequence: Synthetic oligonucleotide
  Target: ATXN2; (-) strand; PAM type: NRG; PAM sequence: AGG
tttcttttttttaaagaaac

SEQ ID NO: 27696 - DNA, 20 bp, Artificial Sequence
  Description of Artificial Sequence: Synthetic oligonucleotide
  Target: ATXN2; (-) strand; PAM type: NRG; PAM sequence: CAG
ttttcttttttttaaagaaa

SEQ ID NO: 27697 - DNA, 20 bp, Artificial Sequence
  Description of Artificial Sequence: Synthetic oligonucleotide
  Target: ATXN2; (-) strand; PAM type: NRG; PAM sequence: AAG
aattttttttctttttttta

SEQ ID NO: 27698 - DNA, 20 bp, Artificial Sequence
  Description of Artificial Sequence: Synthetic oligonucleotide
  Target: ATXN2; (-) strand; PAM type: NRG; PAM sequence: TAG
tagaaaaatttacacacatg

SEQ ID NO: 27699 - DNA, 20 bp, Artificial Sequence
  Description of Artificial Sequence: Synthetic oligonucleotide
  Target: ATXN2; (-) strand; PAM type: NRG; PAM sequence: TAG
gaaactgtataccctcaccc

SEQ ID NO: 27700 - DNA, 20 bp, Artificial Sequence
  Description of Artificial Sequence: Synthetic oligonucleotide
  Target: ATXN2; (-) strand; PAM type: NRG; PAM sequence: TAG
acctagtgaaactgtgtacc

SEQ ID NO: 27701 - DNA, 20 bp, Artificial Sequence
  Description of Artificial Sequence: Synthetic oligonucleotide
  Target: ATXN2; (-) strand; PAM type: NRG; PAM sequence: TAG
ttgggtcccttttgagaacc

SEQ ID NO: 27702 - DNA, 20 bp, Artificial Sequence
  Description of Artificial Sequence: Synthetic oligonucleotide
  Target: ATXN2; (-) strand; PAM type: NRG; PAM sequence: GAG
atctattttgggtccctttt

SEQ ID NO: 27703 - DNA, 20 bp, Artificial Sequence
  Description of Artificial Sequence: Synthetic oligonucleotide
  Target: ATXN2; (-) strand; PAM type: NRG; PAM sequence: GGG
gaaatacaagaatctatttt

SEQ ID NO: 27704 - DNA, 20 bp, Artificial Sequence
  Description of Artificial Sequence: Synthetic oligonucleotide
  Target: ATXN2; (-) strand; PAM type: NRG; PAM sequence: TGG
agaaatacaagaatctattt

SEQ ID NO: 27705 - DNA, 20 bp, Artificial Sequence
  Description of Artificial Sequence: Synthetic oligonucleotide
  Target: ATXN2; (-) strand; PAM type: NRG; PAM sequence: AAG
tggacagtacggagaaatac

SEQ ID NO: 27706 - DNA, 20 bp, Artificial Sequence
  Description of Artificial Sequence: Synthetic oligonucleotide
  Target: ATXN2; (-) strand; PAM type: NRG; PAM sequence: GAG
ttgttgctatggacagtacg

SEQ ID NO: 27707 - DNA, 20 bp, Artificial Sequence
  Description of Artificial Sequence: Synthetic oligonucleotide
  Target: ATXN2; (-) strand; PAM type: NRG; PAM sequence: CGG
gcttgttgctatggacagta

SEQ ID NO: 27708 - DNA, 20 bp, Artificial Sequence
  Description of Artificial Sequence: Synthetic oligonucleotide
  Target: ATXN2; (-) strand; PAM type: NRG; PAM sequence: CAG
gctgtgcttgttgctatgga

SEQ ID NO: 27709 - DNA, 20 bp, Artificial Sequence
  Description of Artificial Sequence: Synthetic oligonucleotide
  Target: ATXN2; (-) strand; PAM type: NRG; PAM sequence: TGG
ccttgctgtgcttgttgcta

SEQ ID NO: 27710 - DNA, 20 bp, Artificial Sequence
  Description of Artificial Sequence: Synthetic oligonucleotide
  Target: ATXN2; (-) strand; PAM type: NRG; PAM sequence: GGG
gcagatacttagagagctct

SEQ ID NO: 27711 - DNA, 20 bp, Artificial Sequence
  Description of Artificial Sequence: Synthetic oligonucleotide
  Target: ATXN2; (-) strand; PAM type: NRG; PAM sequence: TGG
agcagatacttagagagctc

SEQ ID NO: 27712 - DNA, 20 bp, Artificial Sequence
  Description of Artificial Sequence: Synthetic oligonucleotide
  Target: ATXN2; (-) strand; PAM type: NRG; PAM sequence: GAG
tcatccagcagatacttaga

SEQ ID NO: 27713 - DNA, 20 bp, Artificial Sequence
  Description of Artificial Sequence: Synthetic oligonucleotide
  Target: ATXN2; (-) strand; PAM type: NRG; PAM sequence: GAG
agtcatccagcagatactta

SEQ ID NO: 27714 - DNA, 20 bp, Artificial Sequence
  Description of Artificial Sequence: Synthetic oligonucleotide
  Target: ATXN2; (-) strand; PAM type: NRG; PAM sequence: TAG
atagtcatccagcagatact

SEQ ID NO: 27715 - DNA, 20 bp, Artificial Sequence
  Description of Artificial Sequence: Synthetic oligonucleotide
  Target: ATXN2; (-) strand; PAM type: NRG; PAM sequence: CAG
ttacatatatagtcatccag

SEQ ID NO: 27716 - DNA, 20 bp, Artificial Sequence
  Description of Artificial Sequence: Synthetic oligonucleotide
  Target: ATXN2; (-) strand; PAM type: NRG; PAM sequence: CAG
gtcttacatatatagtcatc

SEQ ID NO: 27717 - DNA, 20 bp, Artificial Sequence
  Description of Artificial Sequence: Synthetic oligonucleotide
  Target: ATXN2; (-) strand; PAM type: NRG; PAM sequence: TAG
tgtaagtggtcttacatata

SEQ ID NO: 27718 - DNA, 20 bp, Artificial Sequence
  Description of Artificial Sequence: Synthetic oligonucleotide
  Target: ATXN2; (-) strand; PAM type: NRG; PAM sequence: TGG
aagaatgaaaaagctgtaag

SEQ ID NO: 27719 - DNA, 20 bp, Artificial Sequence
  Description of Artificial Sequence: Synthetic oligonucleotide
  Target: ATXN2; (-) strand; PAM type: NRG; PAM sequence: AAG
ggaaagaatgaaaaagctgt

SEQ ID NO: 27720 - DNA, 20 bp, Artificial Sequence
  Description of Artificial Sequence: Synthetic oligonucleotide
  Target: ATXN2; (-) strand; PAM type: NRG; PAM sequence: AAG
attttatggaaagaatgaaa

SEQ ID NO: 27721 - DNA, 20 bp, Artificial Sequence
  Description of Artificial Sequence: Synthetic oligonucleotide
  Target: ATXN2; (-) strand; PAM type: NRG; PAM sequence: AAG
tagaagcattattttatgga

SEQ ID NO: 27722 - DNA, 20 bp, Artificial Sequence
  Description of Artificial Sequence: Synthetic oligonucleotide
  Target: ATXN2; (-) strand; PAM type: NRG; PAM sequence: TGG
tttgtagaagcattatttta

SEQ ID NO: 27723 - DNA, 20 bp, Artificial Sequence
  Description of Artificial Sequence: Synthetic oligonucleotide
  Target: ATXN2; (-) strand; PAM type: NRG; PAM sequence: AAG
gccttaatacacttttgtag

SEQ ID NO: 27724 - DNA, 20 bp, Artificial Sequence
  Description of Artificial Sequence: Synthetic oligonucleotide
  Target: ATXN2; (-) strand; PAM type: NRG; PAM sequence: TAG
agtgccttaatacacttttg

SEQ ID NO: 27725 - DNA, 20 bp, Artificial Sequence
  Description of Artificial Sequence: Synthetic oligonucleotide
  Target: ATXN2; (-) strand; PAM type: NRG; PAM sequence: CAG
gtgtttgaataaatgaaatt

SEQ ID NO: 27726 - DNA, 20 bp, Artificial Sequence
  Description of Artificial Sequence: Synthetic oligonucleotide
  Target: ATXN2; (-) strand; PAM type: NRG; PAM sequence: AGG
agtgctttggcacatagtac

SEQ ID NO: 27727 - DNA, 20 bp, Artificial Sequence
  Description of Artificial Sequence: Synthetic oligonucleotide
  Target: ATXN2; (-) strand; PAM type: NRG; PAM sequence: CAG
tagtgctttggcacatagta

SEQ ID NO: 27728 - DNA, 20 bp, Artificial Sequence
  Description of Artificial Sequence: Synthetic oligonucleotide
  Target: ATXN2; (-) strand; PAM type: NRG; PAM sequence: TAG
tagtatagtgctttggcaca

SEQ ID NO: 27729 - DNA, 20 bp, Artificial Sequence
  Description of Artificial Sequence: Synthetic oligonucleotide
  Target: ATXN2; (-) strand; PAM type: NRG; PAM sequence: TGG
catggtctagtatagtgctt

SEQ ID NO: 27730 - DNA, 20 bp, Artificial Sequence
  Description of Artificial Sequence: Synthetic oligonucleotide
  Target: ATXN2; (-) strand; PAM type: NRG; PAM sequence: TAG
tttattctcatggtctagta

SEQ ID NO: 27731 - DNA, 20 bp, Artificial Sequence
  Description of Artificial Sequence: Synthetic oligonucleotide
  Target: ATXN2; (-) strand; PAM type: NRG; PAM sequence: TAG
tattatttattctcatggtc

SEQ ID NO: 27732 - DNA, 20 bp, Artificial Sequence
  Description of Artificial Sequence: Synthetic oligonucleotide
  Target: ATXN2; (-) strand; PAM type: NRG; PAM sequence: TGG
gtctttattatttattctca

SEQ ID NO: 27733 - DNA, 20 bp, Artificial Sequence
  Description of Artificial Sequence: Synthetic oligonucleotide
  Target: ATXN2; (-) strand; PAM type: NRG; PAM sequence: CAG
ctttgtgctccaagtaaaga

SEQ ID NO: 27734 - DNA, 20 bp, Artificial Sequence
  Description of Artificial Sequence: Synthetic oligonucleotide
  Target: ATXN2; (-) strand; PAM type: NRG; PAM sequence: AAG
agctctttgtgctccaagta

SEQ ID NO: 27735 - DNA, 20 bp, Artificial Sequence
  Description of Artificial Sequence: Synthetic oligonucleotide
  Target: ATXN2; (-) strand; PAM type: NRG; PAM sequence: AAG
gtttgagctctttgtgctcc

SEQ ID NO: 27736 - DNA, 20 bp, Artificial Sequence
  Description of Artificial Sequence: Synthetic oligonucleotide
  Target: ATXN2; (-) strand; PAM type: NRG; PAM sequence: GAG
tgtctcccctgttacagttt

SEQ ID NO: 27737 - DNA, 20 bp, Artificial Sequence
  Description of Artificial Sequence: Synthetic oligonucleotide
  Target: ATXN2; (-) strand; PAM type: NRG; PAM sequence: CAG
tatgcttgtctcccctgtta

SEQ ID NO: 27738 - DNA, 20 bp, Artificial Sequence
  Description of Artificial Sequence: Synthetic oligonucleotide
  Target: ATXN2; (-) strand; PAM type: NRG; PAM sequence: AAG
cactgccagctaccacacac

SEQ ID NO: 27739 - DNA, 20 bp, Artificial Sequence
  Description of Artificial Sequence: Synthetic oligonucleotide
  Target: ATXN2; (-) strand; PAM type: NRG; PAM sequence: CAG
tgccacatgacacacactgc

SEQ ID NO: 27740 - DNA, 20 bp, Artificial Sequence
  Description of Artificial Sequence: Synthetic oligonucleotide
  Target: ATXN2; (-) strand; PAM type: NRG; PAM sequence: CAG
accccttagatgtgtgtccc

SEQ ID NO: 27741 - DNA, 20 bp, Artificial Sequence
  Description of Artificial Sequence: Synthetic oligonucleotide
  Target: ATXN2; (-) strand; PAM type: NRG; PAM sequence: TAG
cttttccttcacacacccct

SEQ ID NO: 27742 - DNA, 20 bp, Artificial Sequence
  Description of Artificial Sequence: Synthetic oligonucleotide
  Target: ATXN2; (-) strand; PAM type: NRG; PAM sequence: GGG
tccttccctgcctcattcct

SEQ ID NO: 27743 - DNA, 20 bp, Artificial Sequence
  Description of Artificial Sequence: Synthetic oligonucleotide
  Target: ATXN2; (-) strand; PAM type: NRG; PAM sequence: TGG
ttccttccctgcctcattcc

SEQ ID NO: 27744 - DNA, 20 bp, Artificial Sequence
  Description of Artificial Sequence: Synthetic oligonucleotide
  Target: ATXN2; (-) strand; PAM type: NRG; PAM sequence: CAG
atgttggtttcaccctcctt

SEQ ID NO: 27745 - DNA, 20 bp, Artificial Sequence
  Description of Artificial Sequence: Synthetic oligonucleotide
  Target: ATXN2; (-) strand; PAM type: NRG; PAM sequence: TGG
ttattgctgcacttgaatgt

SEQ ID NO: 27746 - DNA, 20 bp, Artificial Sequence
  Description of Artificial Sequence: Synthetic oligonucleotide
  Target: ATXN2; (-) strand; PAM type: NRG; PAM sequence: TGG
cctctaactgccaggtcctt

SEQ ID NO: 27747 - DNA, 20 bp, Artificial Sequence
  Description of Artificial Sequence: Synthetic oligonucleotide
  Target: ATXN2; (-) strand; PAM type: NRG; PAM sequence: AGG
acgattaacctctaactgcc

SEQ ID NO: 27748 - DNA, 20 bp, Artificial Sequence
  Description of Artificial Sequence: Synthetic oligonucleotide
  Target: ATXN2; (-) strand; PAM type: NRG; PAM sequence: CAG
tacgattaacctctaactgc

SEQ ID NO: 27749 - DNA, 20 bp, Artificial Sequence
  Description of Artificial Sequence: Synthetic oligonucleotide
  Target: ATXN2; (-) strand; PAM type: NRG; PAM sequence: AGG
tctagccattatcctgccta

SEQ ID NO: 27750 - DNA, 20 bp, Artificial Sequence
  Description of Artificial Sequence: Synthetic oligonucleotide
  Target: ATXN2; (-) strand; PAM type: NRG; PAM sequence: AAG
ttctagccattatcctgcct

SEQ ID NO: 27751 - DNA, 20 bp, Artificial Sequence
  Description of Artificial Sequence: Synthetic oligonucleotide
  Target: ATXN2; (-) strand; PAM type: NRG; PAM sequence: TAG
tttttaatcctgaattcttc

SEQ ID NO: 27752 - DNA, 20 bp, Artificial Sequence
  Description of Artificial Sequence: Synthetic oligonucleotide
  Target: ATXN2; (-) strand; PAM type: NRG; PAM sequence: AGG
gccaccgcactgggcccaaa

SEQ ID NO: 27753 - DNA, 20 bp, Artificial Sequence
  Description of Artificial Sequence: Synthetic oligonucleotide
  Target: ATXN2; (-) strand; PAM type: NRG; PAM sequence: AAG
agccaccgcactgggcccaa

SEQ ID NO: 27754 - DNA, 20 bp, Artificial Sequence
  Description of Artificial Sequence: Synthetic oligonucleotide
  Target: ATXN2; (-) strand; PAM type: NRG; PAM sequence: GGG
caggcatgagccaccgcact

SEQ ID NO: 27755 - DNA, 20 bp, Artificial Sequence
  Description of Artificial Sequence: Synthetic oligonucleotide
  Target: ATXN2; (-) strand; PAM type: NRG; PAM sequence: TGG
acaggcatgagccaccgcac

SEQ ID NO: 27756 - DNA, 20 bp, Artificial Sequence
  Description of Artificial Sequence: Synthetic oligonucleotide
  Target: ATXN2; (-) strand; PAM type: NRG; PAM sequence: GAG
agtgctgggattacaggcat

SEQ ID NO: 27757 - DNA, 20 bp, Artificial Sequence
  Description of Artificial Sequence: Synthetic oligonucleotide
  Target: ATXN2; (-) strand; PAM type: NRG; PAM sequence: AGG
tcccaaagtgctgggattac

SEQ ID NO: 27758 - DNA, 20 bp, Artificial Sequence
  Description of Artificial Sequence: Synthetic oligonucleotide
  Target: ATXN2; (-) strand; PAM type: NRG; PAM sequence: CAG
ctcccaaagtgctgggatta

SEQ ID NO: 27759 - DNA, 20 bp, Artificial Sequence
  Description of Artificial Sequence: Synthetic oligonucleotide
  Target: ATXN2; (-) strand; PAM type: NRG; PAM sequence: GGG
cctcggcctcccaaagtgct

SEQ ID NO: 27760 - DNA, 20 bp, Artificial Sequence
  Description of Artificial Sequence: Synthetic oligonucleotide
  Target: ATXN2; (-) strand; PAM type: NRG; PAM sequence: TGG
gcctcggcctcccaaagtgc

SEQ ID NO: 27761 - DNA, 20 bp, Artificial Sequence
  Description of Artificial Sequence: Synthetic oligonucleotide
  Target: ATXN2; (-) strand; PAM type: NRG; PAM sequence: AAG
ccatctgcctcggcctccca

SEQ ID NO: 27762 - DNA, 20 bp, Artificial Sequence
  Description of Artificial Sequence: Synthetic oligonucleotide
  Target: ATXN2; (-) strand; PAM type: NRG; PAM sequence: CGG
accttgtgatccatctgcct

SEQ ID NO: 27763 - DNA, 20 bp, Artificial Sequence
  Description of Artificial Sequence: Synthetic oligonucleotide
  Target: ATXN2; (-) strand; PAM type: NRG; PAM sequence: TGG
tttcaccgtgttagctagga

SEQ ID NO: 27764 - DNA, 20 bp, Artificial Sequence
  Description of Artificial Sequence: Synthetic oligonucleotide
  Target: ATXN2; (-) strand; PAM type: NRG; PAM sequence: AGG
ggggtttcaccgtgttagct

SEQ ID NO: 27765 - DNA, 20 bp, Artificial Sequence
  Description of Artificial Sequence: Synthetic oligonucleotide
  Target: ATXN2; (-) strand; PAM type: NRG; PAM sequence: TAG
tggggtttcaccgtgttagc

SEQ ID NO: 27766 - DNA, 20 bp, Artificial Sequence
  Description of Artificial Sequence: Synthetic oligonucleotide
  Target: ATXN2; (-) strand; PAM type: NRG; PAM sequence: TAG
gagatggggtttcaccgtgt

SEQ ID NO: 27767 - DNA, 20 bp, Artificial Sequence
  Description of Artificial Sequence: Synthetic oligonucleotide
  Target: ATXN2; (-) strand; PAM type: NRG; PAM sequence: GGG
ttgtatttttagtagagatg

SEQ ID NO: 27768 - DNA, 20 bp, Artificial Sequence
  Description of Artificial Sequence: Synthetic oligonucleotide
  Target: ATXN2; (-) strand; PAM type: NRG; PAM sequence: GGG
tttgtatttttagtagagat

SEQ ID NO: 27769 - DNA, 20 bp, Artificial Sequence
  Description of Artificial Sequence: Synthetic oligonucleotide
  Target: ATXN2; (-) strand; PAM type: NRG; PAM sequence: TGG
ttttgtatttttagtagaga

SEQ ID NO: 27770 - DNA, 20 bp, Artificial Sequence
  Description of Artificial Sequence: Synthetic oligonucleotide
  Target: ATXN2; (-) strand; PAM type: NRG; PAM sequence: GAG
aaatttttgtatttttagta

SEQ ID NO: 27771 - DNA, 20 bp, Artificial Sequence
  Description of Artificial Sequence: Synthetic oligonucleotide
  Target: ATXN2; (-) strand; PAM type: NRG; PAM sequence: TAG
ctaaatttttgtatttttag

SEQ ID NO: 27772 - DNA, 20 bp, Artificial Sequence
  Description of Artificial Sequence: Synthetic oligonucleotide
  Target: ATXN2; (-) strand; PAM type: NRG; PAM sequence: TAG
cagctaaatttttgtatttt

SEQ ID NO: 27773 - DNA, 20 bp, Artificial Sequence
  Description of Artificial Sequence: Synthetic oligonucleotide
  Target: ATXN2; (-) strand; PAM type: NRG; PAM sequence: CAG
caggcacctgccaccacgcc

SEQ ID NO: 27774 - DNA, 20 bp, Artificial Sequence
  Description of Artificial Sequence: Synthetic oligonucleotide
  Target: ATXN2; (-) strand; PAM type: NRG; PAM sequence: AGG
tcccgagtagctgggactac

SEQ ID NO: 27775 - DNA, 20 bp, Artificial Sequence
  Description of Artificial Sequence: Synthetic oligonucleotide
  Target: ATXN2; (-) strand; PAM type: NRG; PAM sequence: CAG
ctcccgagtagctgggacta

SEQ ID NO: 27776 - DNA, 20 bp, Artificial Sequence
  Description of Artificial Sequence: Synthetic oligonucleotide
  Target: ATXN2; (-) strand; PAM type: NRG; PAM sequence: GGG
cctcagcctcccgagtagct

SEQ ID NO: 27777 - DNA, 20 bp, Artificial Sequence
  Description of Artificial Sequence: Synthetic oligonucleotide
  Target: ATXN2; (-) strand; PAM type: NRG; PAM sequence: TGG
gcctcagcctcccgagtagc

SEQ ID NO: 27778 - DNA, 20 bp, Artificial Sequence
  Description of Artificial Sequence: Synthetic oligonucleotide
  Target: ATXN2; (-) strand; PAM type: NRG; PAM sequence: TAG
tcctgcctcagcctcccgag

SEQ ID NO: 27779 - DNA, 20 bp, Artificial Sequence
  Description of Artificial Sequence: Synthetic oligonucleotide
  Target: ATXN2; (-) strand; PAM type: NRG; PAM sequence: GAG
ttctcctgcctcagcctccc

SEQ ID NO: 27780 - DNA, 20 bp, Artificial Sequence
  Description of Artificial Sequence: Synthetic oligonucleotide
  Target: ATXN2; (-) strand; PAM type: NRG; PAM sequence: CAG
ttcacgccattctcctgcct

SEQ ID NO: 27781 - DNA, 20 bp, Artificial Sequence
  Description of Artificial Sequence: Synthetic oligonucleotide
  Target: ATXN2; (-) strand; PAM type: NRG; PAM sequence: GGG
cactgcaagctccgcctccc

SEQ ID NO: 27782 - DNA, 20 bp, Artificial Sequence
  Description of Artificial Sequence: Synthetic oligonucleotide
  Target: ATXN2; (-) strand; PAM type: NRG; PAM sequence: CGG
tcactgcaagctccgcctcc

SEQ ID NO: 27783 - DNA, 20 bp, Artificial Sequence
  Description of Artificial Sequence: Synthetic oligonucleotide
  Target: ATXN2; (-) strand; PAM type: NRG; PAM sequence: AAG
gcactatcttggctcactgc

SEQ ID NO: 27784 - DNA, 20 bp, Artificial Sequence
  Description of Artificial Sequence: Synthetic oligonucleotide
  Target: ATXN2; (-) strand; PAM type: NRG; PAM sequence: TGG
ggagtgcagtggcactatct

SEQ ID NO: 27785 - DNA, 20 bp, Artificial Sequence
  Description of Artificial Sequence: Synthetic oligonucleotide
  Target: ATXN2; (-) strand; PAM type: NRG; PAM sequence: TGG
ttgcccaggctggagtgcag

SEQ ID NO: 27786 - DNA, 20 bp, Artificial Sequence
  Description of Artificial Sequence: Synthetic oligonucleotide
  Target: ATXN2; (-) strand; PAM type: NRG; PAM sequence: CAG
ctcttgcccaggctggagtg

SEQ ID NO: 27787 - DNA, 20 bp, Artificial Sequence
  Description of Artificial Sequence: Synthetic oligonucleotide
  Target: ATXN2; (-) strand; PAM type: NRG; PAM sequence: GAG
tctcgctcttgcccaggctg

SEQ ID NO: 27788 - DNA, 20 bp, Artificial Sequence
  Description of Artificial Sequence: Synthetic oligonucleotide
  Target: ATXN2; (-) strand; PAM type: NRG; PAM sequence: TGG
agtctcgctcttgcccaggc

SEQ ID NO: 27789 - DNA, 20 bp, Artificial Sequence
  Description of Artificial Sequence: Synthetic oligonucleotide
  Target: ATXN2; (-) strand; PAM type: NRG; PAM sequence: AGG
acagagtctcgctcttgccc

SEQ ID NO: 27790 - DNA, 20 bp, Artificial Sequence
  Description of Artificial Sequence: Synthetic oligonucleotide
  Target: ATXN2; (-) strand; PAM type: NRG; PAM sequence: CAG
gacagagtctcgctcttgcc

SEQ ID NO: 27791 - DNA, 20 bp, Artificial Sequence
  Description of Artificial Sequence: Synthetic oligonucleotide
  Target: ATXN2; (-) strand; PAM type: NRG; PAM sequence: GAG
ttgtttttgtttttgagaca

SEQ ID NO: 27792 - DNA, 20 bp, Artificial Sequence
  Description of Artificial Sequence: Synthetic oligonucleotide
  Target: ATXN2; (-) strand; PAM type: NRG; PAM sequence: CAG
ttttgtttttgtttttgaga

SEQ ID NO: 27793 - DNA, 20 bp, Artificial Sequence
  Description of Artificial Sequence: Synthetic oligonucleotide
  Target: ATXN2; (-) strand; PAM type: NRG; PAM sequence: GAG
tttgttttgtttttgttttt

SEQ ID NO: 27794 - DNA, 20 bp, Artificial Sequence
  Description of Artificial Sequence: Synthetic oligonucleotide
  Target: ATXN2; (-) strand; PAM type: NRG; PAM sequence: AGG
acttcctgctcatcctaaaa

SEQ ID NO: 27795 - DNA, 20 bp, Artificial Sequence
  Description of Artificial Sequence: Synthetic oligonucleotide
  Target: ATXN2; (-) strand; PAM type: NRG; PAM sequence: AAG
cacttcctgctcatcctaaa

SEQ ID NO: 27796 - DNA, 20 bp, Artificial Sequence
  Description of Artificial Sequence: Synthetic oligonucleotide
  Target: ATXN2; (-) strand; PAM type: NRG; PAM sequence: TAG
ttctagttaatctttccctt

SEQ ID NO: 27797 - DNA, 20 bp, Artificial Sequence
  Description of Artificial Sequence: Synthetic oligonucleotide
  Target: ATXN2; (-) strand; PAM type: NRG; PAM sequence: TAG
ctcttcaacatctgcctttc

SEQ ID NO: 27798 - DNA, 20 bp, Artificial Sequence
  Description of Artificial Sequence: Synthetic oligonucleotide
  Target: ATXN2; (-) strand; PAM type: NRG; PAM sequence: GGG
tataccacttctctgtttct

SEQ ID NO: 27799 - DNA, 20 bp, Artificial Sequence
  Description of Artificial Sequence: Synthetic oligonucleotide
  Target: ATXN2; (-) strand; PAM type: NRG; PAM sequence: TGG
ttataccacttctctgtttc

SEQ ID NO: 27800 - DNA, 20 bp, Artificial Sequence
  Description of Artificial Sequence: Synthetic oligonucleotide
  Target: ATXN2; (-) strand; PAM type: NRG; PAM sequence: TGG
caggcgtgagccaccacgcc

SEQ ID NO: 27801 - DNA, 20 bp, Artificial Sequence
  Description of Artificial Sequence: Synthetic oligonucleotide
  Target: ATXN2; (-) strand; PAM type: NRG; PAM sequence: GAG
agtgctgggattacaggcgt

SEQ ID NO: 27802 - DNA, 20 bp, Artificial Sequence
  Description of Artificial Sequence: Synthetic oligonucleotide
  Target: ATXN2; (-) strand; PAM type: NRG; PAM sequence: AGG
tcccaaagtgctgggattac

SEQ ID NO: 27803 - DNA, 20 bp, Artificial Sequence
  Description of Artificial Sequence: Synthetic oligonucleotide
  Target: ATXN2; (-) strand; PAM type: NRG; PAM sequence: CAG
ctcccaaagtgctgggatta

SEQ ID NO: 27804 - DNA, 20 bp, Artificial Sequence
  Description of Artificial Sequence: Synthetic oligonucleotide
  Target: ATXN2; (-) strand; PAM type: NRG; PAM sequence: GGG
cctcagcctcccaaagtgct

SEQ ID NO: 27805 - DNA, 20 bp, Artificial Sequence
  Description of Artificial Sequence: Synthetic oligonucleotide
  Target: ATXN2; (-) strand; PAM type: NRG; PAM sequence: TGG
gcctcagcctcccaaagtgc

SEQ ID NO: 27806 - DNA, 20 bp, Artificial Sequence
  Description of Artificial Sequence: Synthetic oligonucleotide
  Target: ATXN2; (-) strand; PAM type: NRG; PAM sequence: AAG
tcacctgcctcagcctccca

SEQ ID NO: 27807 - DNA, 20 bp, Artificial Sequence
  Description of Artificial Sequence: Synthetic oligonucleotide
  Target: ATXN2; (-) strand; PAM type: NRG; PAM sequence: CAG
cctcaagtgatcacctgcct

SEQ ID NO: 27808 - DNA, 20 bp, Artificial Sequence
  Description of Artificial Sequence: Synthetic oligonucleotide
  Target: ATXN2; (-) strand; PAM type: NRG; PAM sequence: AAG
ggtctcgaactcctgacctc

SEQ ID NO: 27809 - DNA, 20 bp, Artificial Sequence
  Description of Artificial Sequence: Synthetic oligonucleotide
  Target: ATXN2; (-) strand; PAM type: NRG; PAM sequence: TGG
tttcaccatgttggccaggc

SEQ ID NO: 27810 - DNA, 20 bp, Artificial Sequence
  Description of Artificial Sequence: Synthetic oligonucleotide
  Target: ATXN2; (-) strand; PAM type: NRG; PAM sequence: AGG
ggggtttcaccatgttggcc

SEQ ID NO: 27811 - DNA, 20 bp, Artificial Sequence
  Description of Artificial Sequence: Synthetic oligonucleotide
  Target: ATXN2; (-) strand; PAM type: NRG; PAM sequence: CAG
tggggtttcaccatgttggc

SEQ ID NO: 27812 - DNA, 20 bp, Artificial Sequence
  Description of Artificial Sequence: Synthetic oligonucleotide
  Target: ATXN2; (-) strand; PAM type: NRG; PAM sequence: TGG
gagatggggtttcaccatgt

SEQ ID NO: 27813 - DNA, 20 bp, Artificial Sequence
  Description of Artificial Sequence: Synthetic oligonucleotide
  Target: ATXN2; (-) strand; PAM type: NRG; PAM sequence: GGG
ttgtatttttagtagagatg

SEQ ID NO: 27814 - DNA, 20 bp, Artificial Sequence
  Description of Artificial Sequence: Synthetic oligonucleotide
  Target: ATXN2; (-) strand; PAM type: NRG; PAM sequence: GGG
tttgtatttttagtagagat

SEQ ID NO: 27815 - DNA, 20 bp, Artificial Sequence
  Description of Artificial Sequence: Synthetic oligonucleotide
  Target: ATXN2; (-) strand; PAM type: NRG; PAM sequence: TGG
ttttgtatttttagtagaga

SEQ ID NO: 27816 - DNA, 20 bp, Artificial Sequence
  Description of Artificial Sequence: Synthetic oligonucleotide
  Target: ATXN2; (-) strand; PAM type: NRG; PAM sequence: GAG
taatttttgtatttttagta

SEQ ID NO: 27817 - DNA, 20 bp, Artificial Sequence
  Description of Artificial Sequence: Synthetic oligonucleotide
  Target: ATXN2; (-) strand; PAM type: NRG; PAM sequence: TAG
gctaatttttgtatttttag

SEQ ID NO: 27818 - DNA, 20 bp, Artificial Sequence
  Description of Artificial Sequence: Synthetic oligonucleotide
  Target: ATXN2; (-) strand; PAM type: NRG; PAM sequence: TAG
ccggctaatttttgtatttt

SEQ ID NO: 27819 - DNA, 20 bp, Artificial Sequence
  Description of Artificial Sequence: Synthetic oligonucleotide
  Target: ATXN2; (-) strand; PAM type: NRG; PAM sequence: CGG
taggtgcctgccaccacgcc

SEQ ID NO: 27820 - DNA, 20 bp, Artificial Sequence
  Description of Artificial Sequence: Synthetic oligonucleotide
  Target: ATXN2; (-) strand; PAM type: NRG; PAM sequence: AGG
tcctgagtagctggggctat

SEQ ID NO: 27821 - DNA, 20 bp, Artificial Sequence
  Description of Artificial Sequence: Synthetic oligonucleotide
  Target: ATXN2; (-) strand; PAM type: NRG; PAM sequence: TAG
ctcctgagtagctggggcta

SEQ ID NO: 27822 - DNA, 20 bp, Artificial Sequence
  Description of Artificial Sequence: Synthetic oligonucleotide
  Target: ATXN2; (-) strand; PAM type: NRG; PAM sequence: GGG
ctcagcctcctgagtagctg

SEQ ID NO: 27823 - DNA, 20 bp, Artificial Sequence
  Description of Artificial Sequence: Synthetic oligonucleotide
  Target: ATXN2; (-) strand; PAM type: NRG; PAM sequence: GGG
cctcagcctcctgagtagct

SEQ ID NO: 27824 - DNA, 20 bp, Artificial Sequence
  Description of Artificial Sequence: Synthetic oligonucleotide
  Target: ATXN2; (-) strand; PAM type: NRG; PAM sequence: TGG
gcctcagcctcctgagtagc

SEQ ID NO: 27825 - DNA, 20 bp, Artificial Sequence
  Description of Artificial Sequence: Synthetic oligonucleotide
  Target: ATXN2; (-) strand; PAM type: NRG; PAM sequence: TAG
tgcagcctcagcctcctgag

SEQ ID NO: 27826 - DNA, 20 bp, Artificial Sequence
  Description of Artificial Sequence: Synthetic oligonucleotide
  Target: ATXN2; (-) strand; PAM type: NRG; PAM sequence: GAG
cactgcagcctcagcctcct

SEQ ID NO: 27827 - DNA, 20 bp, Artificial Sequence
  Description of Artificial Sequence: Synthetic oligonucleotide
  Target: ATXN2; (-) strand; PAM type: NRG; PAM sequence: CAG
atttcagctcactgcagcct

SEQ ID NO: 27828 - DNA, 20 bp, Artificial Sequence
  Description of Artificial Sequence: Synthetic oligonucleotide
  Target: ATXN2; (-) strand; PAM type: NRG; PAM sequence: CAG
ggcgtgatttcagctcactg

SEQ ID NO: 27829 - DNA, 20 bp, Artificial Sequence
  Description of Artificial Sequence: Synthetic oligonucleotide
  Target: ATXN2; (-) strand; PAM type: NRG; PAM sequence: CAG
gaagtgcagtggcgtgattt

SEQ ID NO: 27830 - DNA, 20 bp, Artificial Sequence
  Description of Artificial Sequence: Synthetic oligonucleotide
  Target: ATXN2; (-) strand; PAM type: NRG; PAM sequence: TGG
tcacccaggctgaagtgcag

SEQ ID NO: 27831 - DNA, 20 bp, Artificial Sequence
  Description of Artificial Sequence: Synthetic oligonucleotide
  Target: ATXN2; (-) strand; PAM type: NRG; PAM sequence: CAG
ctgtcacccaggctgaagtg

SEQ ID NO: 27832 - DNA, 20 bp, Artificial Sequence
  Description of Artificial Sequence: Synthetic oligonucleotide
  Target: ATXN2; (-) strand; PAM type: NRG; PAM sequence: AAG
tcggtctgtcacccaggctg

SEQ ID NO: 27833 - DNA, 20 bp, Artificial Sequence
  Description of Artificial Sequence: Synthetic oligonucleotide
  Target: ATXN2; (-) strand; PAM type: NRG; PAM sequence: AGG
ggagtctcggtctgtcaccc

SEQ ID NO: 27834 - DNA, 20 bp, Artificial Sequence
  Description of Artificial Sequence: Synthetic oligonucleotide
  Target: ATXN2; (-) strand; PAM type: NRG; PAM sequence: CAG
tggagtctcggtctgtcacc

SEQ ID NO: 27835 - DNA, 20 bp, Artificial Sequence
  Description of Artificial Sequence: Synthetic oligonucleotide
  Target: ATXN2; (-) strand; PAM type: NRG; PAM sequence: CGG
tttttttttagatggagtct

SEQ ID NO: 27836 - DNA, 20 bp, Artificial Sequence
  Description of Artificial Sequence: Synthetic oligonucleotide
  Target: ATXN2; (-) strand; PAM type: NRG; PAM sequence: GAG
tttttctttttttttagatg

SEQ ID NO: 27837 - DNA, 20 bp, Artificial Sequence
  Description of Artificial Sequence: Synthetic oligonucleotide
  Target: ATXN2; (-) strand; PAM type: NRG; PAM sequence: TGG
tctttttctttttttttaga

SEQ ID NO: 27838 - DNA, 20 bp, Artificial Sequence
  Description of Artificial Sequence: Synthetic oligonucleotide
  Target: ATXN2; (-) strand; PAM type: NRG; PAM sequence: TAG
tttttctttttctttttttt

SEQ ID NO: 27839 - DNA, 20 bp, Artificial Sequence
  Description of Artificial Sequence: Synthetic oligonucleotide
  Target: ATXN2; (-) strand; PAM type: NRG; PAM sequence: AAG
ttttagtagagaggattttt

SEQ ID NO: 27840 - DNA, 20 bp, Artificial Sequence
  Description of Artificial Sequence: Synthetic oligonucleotide
  Target: ATXN2; (-) strand; PAM type: NRG; PAM sequence: AGG
ttcctctggttttagtagag

SEQ ID NO: 27841 - DNA, 20 bp, Artificial Sequence
  Description of Artificial Sequence: Synthetic oligonucleotide
  Target: ATXN2; (-) strand; PAM type: NRG; PAM sequence: GAG
tttcctctggttttagtaga

SEQ ID NO: 27842 - DNA, 20 bp, Artificial Sequence
  Description of Artificial Sequence: Synthetic oligonucleotide
  Target: ATXN2; (-) strand; PAM type: NRG; PAM sequence: GAG
tttttcctctggttttagta

SEQ ID NO: 27843 - DNA, 20 bp, Artificial Sequence
  Description of Artificial Sequence: Synthetic oligonucleotide
  Target: ATXN2; (-) strand; PAM type: NRG; PAM sequence: TAG
tatttttcctctggttttag

SEQ ID NO: 27844 - DNA, 20 bp, Artificial Sequence
  Description of Artificial Sequence: Synthetic oligonucleotide
  Target: ATXN2; (-) strand; PAM type: NRG; PAM sequence: TAG
tattatttttcctctggttt

SEQ ID NO: 27845 - DNA, 20 bp, Artificial Sequence
  Description of Artificial Sequence: Synthetic oligonucleotide
  Target: ATXN2; (-) strand; PAM type: NRG; PAM sequence: TGG
cctcattattatttttcctc

SEQ ID NO: 27846 - DNA, 20 bp, Artificial Sequence
  Description of Artificial Sequence: Synthetic oligonucleotide
  Target: ATXN2; (-) strand; PAM type: NRG; PAM sequence: CGG
attacatgagtcaccgcacc

SEQ ID NO: 27847 - DNA, 20 bp, Artificial Sequence
  Description of Artificial Sequence: Synthetic oligonucleotide
  Target: ATXN2; (-) strand; PAM type: NRG; PAM sequence: GAG
ccaaagtcctgggattacat

SEQ ID NO: 27848 - DNA, 20 bp, Artificial Sequence
  Description of Artificial Sequence: Synthetic oligonucleotide
  Target: ATXN2; (-) strand; PAM type: NRG; PAM sequence: GGG
ccttggcctcccaaagtcct

SEQ ID NO: 27849 - DNA, 20 bp, Artificial Sequence
  Description of Artificial Sequence: Synthetic oligonucleotide
  Target: ATXN2; (-) strand; PAM type: NRG; PAM sequence: TGG
accttggcctcccaaagtcc

SEQ ID NO: 27850 - DNA, 20 bp, Artificial Sequence
  Description of Artificial Sequence: Synthetic oligonucleotide
  Target: ATXN2; (-) strand; PAM type: NRG; PAM sequence: AAG
cttcccaccttggcctccca

SEQ ID NO: 27851 - DNA, 20 bp, Artificial Sequence
  Description of Artificial Sequence: Synthetic oligonucleotide
  Target: ATXN2; (-) strand; PAM type: NRG; PAM sequence: TGG
gcctaagagtcttcccacct

SEQ ID NO: 27852 - DNA, 20 bp, Artificial Sequence
  Description of Artificial Sequence: Synthetic oligonucleotide
  Target: ATXN2; (-) strand; PAM type: NRG; PAM sequence: GAG
tctcaaactgctgggcctaa

SEQ ID NO: 27853 - DNA, 20 bp, Artificial Sequence
  Description of Artificial Sequence: Synthetic oligonucleotide
  Target: ATXN2; (-) strand; PAM type: NRG; PAM sequence: AAG
ggtctcaaactgctgggcct

SEQ ID NO: 27854 - DNA, 20 bp, Artificial Sequence
  Description of Artificial Sequence: Synthetic oligonucleotide
  Target: ATXN2; (-) strand; PAM type: NRG; PAM sequence: GGG
caggctggtctcaaactgct

SEQ ID NO: 27855 - DNA, 20 bp, Artificial Sequence
  Description of Artificial Sequence: Synthetic oligonucleotide
  Target: ATXN2; (-) strand; PAM type: NRG; PAM sequence: TGG
acaggctggtctcaaactgc

SEQ ID NO: 27856 - DNA, 20 bp, Artificial Sequence
  Description of Artificial Sequence: Synthetic oligonucleotide
  Target: ATXN2; (-) strand; PAM type: NRG; PAM sequence: TGG
tttccctgtattgcacaggc

SEQ ID NO: 27857 - DNA, 20 bp, Artificial Sequence
  Description of Artificial Sequence: Synthetic oligonucleotide
  Target: ATXN2; (-) strand; PAM type: NRG; PAM sequence: AGG
ggggtttccctgtattgcac

SEQ ID NO: 27858 - DNA, 20 bp, Artificial Sequence
  Description of Artificial Sequence: Synthetic oligonucleotide
  Target: ATXN2; (-) strand; PAM type: NRG; PAM sequence: CAG
tggggtttccctgtattgca

SEQ ID NO: 27859 - DNA, 20 bp, Artificial Sequence
  Description of Artificial Sequence: Synthetic oligonucleotide
  Target: ATXN2; (-) strand; PAM type: NRG; PAM sequence: GGG
ttatattttttgtagagatg

SEQ ID NO: 27860 - DNA, 20 bp, Artificial Sequence
  Description of Artificial Sequence: Synthetic oligonucleotide
  Target: ATXN2; (-) strand; PAM type: NRG; PAM sequence: GGG
tttatattttttgtagagat

SEQ ID NO: 27861 - DNA, 20 bp, Artificial Sequence
  Description of Artificial Sequence: Synthetic oligonucleotide
  Target: ATXN2; (-) strand; PAM type: NRG; PAM sequence: TGG
atttatattttttgtagaga

SEQ ID NO: 27862 - DNA, 20 bp, Artificial Sequence
  Description of Artificial Sequence: Synthetic oligonucleotide
  Target: ATXN2; (-) strand; PAM type: NRG; PAM sequence: GAG
ttatatttatattttttgta

SEQ ID NO: 27863 - DNA, 20 bp, Artificial Sequence
  Description of Artificial Sequence: Synthetic oligonucleotide
  Target: ATXN2; (-) strand; PAM type: NRG; PAM sequence: TAG
ttttatatttatattttttg

SEQ ID NO: 27864 - DNA, 20 bp, Artificial Sequence
  Description of Artificial Sequence: Synthetic oligonucleotide
  Target: ATXN2; (-) strand; PAM type: NRG; PAM sequence: GGG
cctcaacctcctacataact

SEQ ID NO: 27865 - DNA, 20 bp, Artificial Sequence
  Description of Artificial Sequence: Synthetic oligonucleotide
  Target: ATXN2; (-) strand; PAM type: NRG; PAM sequence: TGG
acctcaacctcctacataac

SEQ ID NO: 27866 - DNA, 20 bp, Artificial Sequence
  Description of Artificial Sequence: Synthetic oligonucleotide
  Target: ATXN2; (-) strand; PAM type: NRG; PAM sequence: AGG
agcctcgacttcccaggctc

SEQ ID NO: 27867 - DNA, 20 bp, Artificial Sequence
  Description of Artificial Sequence: Synthetic oligonucleotide
  Target: ATXN2; (-) strand; PAM type: NRG; PAM sequence: CAG
cagcctcgacttcccaggct

SEQ ID NO: 27868 - DNA, 20 bp, Artificial Sequence
  Description of Artificial Sequence: Synthetic oligonucleotide
  Target: ATXN2; (-) strand; PAM type: NRG; PAM sequence: AGG
cactgcagcctcgacttccc

SEQ ID NO: 27869 - DNA, 20 bp, Artificial Sequence
  Description of Artificial Sequence: Synthetic oligonucleotide
  Target: ATXN2; (-) strand; PAM type: NRG; PAM sequence: CAG
tcactgcagcctcgacttcc

SEQ ID NO: 27870 - DNA, 20 bp, Artificial Sequence
  Description of Artificial Sequence: Synthetic oligonucleotide
  Target: ATXN2; (-) strand; PAM type: NRG; PAM sequence: CAG
gatgcaatcacagctcactg

SEQ ID NO: 27871 - DNA, 20 bp, Artificial Sequence
  Description of Artificial Sequence: Synthetic oligonucleotide
  Target: ATXN2; (-) strand; PAM type: NRG; PAM sequence: CAG
ggagtgcagtgatgcaatca

SEQ ID NO: 27872 - DNA, 20 bp, Artificial Sequence
  Description of Artificial Sequence: Synthetic oligonucleotide
  Target: ATXN2; (-) strand; PAM type: NRG; PAM sequence: CAG
ctgttgcccaggctggagtg

SEQ ID NO: 27873 - DNA, 20 bp, Artificial Sequence
  Description of Artificial Sequence: Synthetic oligonucleotide
  Target: ATXN2; (-) strand; PAM type: NRG; PAM sequence: GAG
ttgctctgttgcccaggctg

SEQ ID NO: 27874 - DNA, 20 bp, Artificial Sequence
  Description of Artificial Sequence: Synthetic oligonucleotide
  Target: ATXN2; (-) strand; PAM type: NRG; PAM sequence: TGG
tcttgctctgttgcccaggc

SEQ ID NO: 27875 - DNA, 20 bp, Artificial Sequence
  Description of Artificial Sequence: Synthetic oligonucleotide
  Target: ATXN2; (-) strand; PAM type: NRG; PAM sequence: AGG
atgatcttgctctgttgccc

SEQ ID NO: 27876 - DNA, 20 bp, Artificial Sequence
  Description of Artificial Sequence: Synthetic oligonucleotide
  Target: ATXN2; (-) strand; PAM type: NRG; PAM sequence: CAG
gatgatcttgctctgttgcc

SEQ ID NO: 27877 - DNA, 20 bp, Artificial Sequence
  Description of Artificial Sequence: Synthetic oligonucleotide
  Target: ATXN2; (-) strand; PAM type: NRG; PAM sequence: CAG
atcttttttttttttttttt

SEQ ID NO: 27878 - DNA, 20 bp, Artificial Sequence
  Description of Artificial Sequence: Synthetic oligonucleotide
  Target: ATXN2; (-) strand; PAM type: NRG; PAM sequence: AAG
gggaaggttggttaatggaa

SEQ ID NO: 27879 - DNA, 20 bp, Artificial Sequence
  Description of Artificial Sequence: Synthetic oligonucleotide
  Target: ATXN2; (-) strand; PAM type: NRG; PAM sequence: TGG
aaaaggggaaggttggttaa

SEQ ID NO: 27880 - DNA, 20 bp, Artificial Sequence
  Description of Artificial Sequence: Synthetic oligonucleotide
  Target: ATXN2; (-) strand; PAM type: NRG; PAM sequence: TGG
aaatcataaaaggggaaggt

SEQ ID NO: 27881 - DNA, 20 bp, Artificial Sequence
  Description of Artificial Sequence: Synthetic oligonucleotide
  Target: ATXN2; (-) strand; PAM type: NRG; PAM sequence: AGG
tgaaaaatcataaaagggga

SEQ ID NO: 27882 - DNA, 20 bp, Artificial Sequence
  Description of Artificial Sequence: Synthetic oligonucleotide
  Target: ATXN2; (-) strand; PAM type: NRG; PAM sequence: AAG
gtgaaaaatcataaaagggg

SEQ ID NO: 27883 - DNA, 20 bp, Artificial Sequence
  Description of Artificial Sequence: Synthetic oligonucleotide
  Target: ATXN2; (-) strand; PAM type: NRG; PAM sequence: GGG
ttagtgaaaaatcataaaag

SEQ ID NO: 27884 - DNA, 20 bp, Artificial Sequence
  Description of Artificial Sequence: Synthetic oligonucleotide
  Target: ATXN2; (-) strand; PAM type: NRG; PAM sequence: GGG
tttagtgaaaaatcataaaa

SEQ ID NO: 27885 - DNA, 20 bp, Artificial Sequence
  Description of Artificial Sequence: Synthetic oligonucleotide
  Target: ATXN2; (-) strand; PAM type: NRG; PAM sequence: AGG
atttagtgaaaaatcataaa

SEQ ID NO: 27886 - DNA, 20 bp, Artificial Sequence
  Description of Artificial Sequence: Synthetic oligonucleotide
  Target: ATXN2; (-) strand; PAM type: NRG; PAM sequence: AAG
catttagtgaaaaatcataa

SEQ ID NO: 27887 - DNA, 20 bp, Artificial Sequence
  Description of Artificial Sequence: Synthetic oligonucleotide
  Target: ATXN2; (-) strand; PAM type: NRG; PAM sequence: TAG
aacagattctttgtcacatt

SEQ ID NO: 27888 - DNA, 20 bp, Artificial Sequence
  Description of Artificial Sequence: Synthetic oligonucleotide
  Target: ATXN2; (-) strand; PAM type: NRG; PAM sequence: CAG
gaagaattacttttgcttaa

SEQ ID NO: 27889 - DNA, 20 bp, Artificial Sequence
  Description of Artificial Sequence: Synthetic oligonucleotide
  Target: ATXN2; (-) strand; PAM type: NRG; PAM sequence: AAG
ttctaattggatttagtctg

SEQ ID NO: 27890 - DNA, 20 bp, Artificial Sequence
  Description of Artificial Sequence: Synthetic oligonucleotide
  Target: ATXN2; (-) strand; PAM type: NRG; PAM sequence: TAG
atgaccattctaattggatt

SEQ ID NO: 27891 - DNA, 20 bp, Artificial Sequence
  Description of Artificial Sequence: Synthetic oligonucleotide
  Target: ATXN2; (-) strand; PAM type: NRG; PAM sequence: TGG
ttattcatgaccattctaat

SEQ ID NO: 27892 - DNA, 20 bp, Artificial Sequence
  Description of Artificial Sequence: Synthetic oligonucleotide
  Target: ATXN2; (-) strand; PAM type: NRG; PAM sequence: CAG
tactggctttggtgaagtaa

SEQ ID NO: 27893 - DNA, 20 bp, Artificial Sequence
  Description of Artificial Sequence: Synthetic oligonucleotide
  Target: ATXN2; (-) strand; PAM type: NRG; PAM sequence: AAG
atgctatactggctttggtg

SEQ ID NO: 27894 - DNA, 20 bp, Artificial Sequence
  Description of Artificial Sequence: Synthetic oligonucleotide
  Target: ATXN2; (-) strand; PAM type: NRG; PAM sequence: TGG
aatacatgctatactggctt

SEQ ID NO: 27895 - DNA, 20 bp, Artificial Sequence
  Description of Artificial Sequence: Synthetic oligonucleotide
  Target: ATXN2; (-) strand; PAM type: NRG; PAM sequence: TGG
atcaaaaatacatgctatac

SEQ ID NO: 27896 - DNA, 20 bp, Artificial Sequence
  Description of Artificial Sequence: Synthetic oligonucleotide
  Target: ATXN2; (-) strand; PAM type: NRG; PAM sequence: AGG
cgctgcatttagggcttttt

SEQ ID NO: 27897 - DNA, 20 bp, Artificial Sequence
  Description of Artificial Sequence: Synthetic oligonucleotide
  Target: ATXN2; (-) strand; PAM type: NRG; PAM sequence: TAG
ccgctgcatttagggctttt

SEQ ID NO: 27898 - DNA, 20 bp, Artificial Sequence
  Description of Artificial Sequence: Synthetic oligonucleotide
  Target: ATXN2; (-) strand; PAM type: NRG; PAM sequence: GGG
catattttccgctgcattta

SEQ ID NO: 27899 - DNA, 20 bp, Artificial Sequence
  Description of Artificial Sequence: Synthetic oligonucleotide
  Target: ATXN2; (-) strand; PAM type: NRG; PAM sequence: AGG
tcatattttccgctgcattt

SEQ ID NO: 27900 - DNA, 20 bp, Artificial Sequence
  Description of Artificial Sequence: Synthetic oligonucleotide
  Target: ATXN2; (-) strand; PAM type: NRG; PAM sequence: TAG
atcatattttccgctgcatt

SEQ ID NO: 27901 - DNA, 20 bp, Artificial Sequence
  Description of Artificial Sequence: Synthetic oligonucleotide
  Target: ATXN2; (-) strand; PAM type: NRG; PAM sequence: TGG
cagaaaagtttgccagctct

SEQ ID NO: 27902 - DNA, 20 bp, Artificial Sequence
  Description of Artificial Sequence: Synthetic oligonucleotide
  Target: ATXN2; (-) strand; PAM type: NRG; PAM sequence: CAG
ctctttacagaaaagtttgc

SEQ ID NO: 27903 - DNA, 20 bp, Artificial Sequence
  Description of Artificial Sequence: Synthetic oligonucleotide
  Target: ATXN2; (-) strand; PAM type: NRG; PAM sequence: AAG
ttgactgtctctttacagaa

SEQ ID NO: 27904 - DNA, 20 bp, Artificial Sequence
  Description of Artificial Sequence: Synthetic oligonucleotide
  Target: ATXN2; (-) strand; PAM type: NRG; PAM sequence: CAG
aaaatttgactgtctcttta

SEQ ID NO: 27905 - DNA, 20 bp, Artificial Sequence
  Description of Artificial Sequence: Synthetic oligonucleotide
  Target: ATXN2; (-) strand; PAM type: NRG; PAM sequence: CAG
gactgtaggacttgcaaagc

SEQ ID NO: 27906 - DNA, 20 bp, Artificial Sequence
  Description of Artificial Sequence: Synthetic oligonucleotide
  Target: ATXN2; (-) strand; PAM type: NRG; PAM sequence: AAG
agctgactgtaggacttgca

SEQ ID NO: 27907 - DNA, 20 bp, Artificial Sequence
  Description of Artificial Sequence: Synthetic oligonucleotide
  Target: ATXN2; (-) strand; PAM type: NRG; PAM sequence: AGG
gagtagttgtagctgactgt

SEQ ID NO: 27908 - DNA, 20 bp, Artificial Sequence
  Description of Artificial Sequence: Synthetic oligonucleotide
  Target: ATXN2; (-) strand; PAM type: NRG; PAM sequence: TAG
tgagtagttgtagctgactg

SEQ ID NO: 27909 - DNA, 20 bp, Artificial Sequence
  Description of Artificial Sequence: Synthetic oligonucleotide
  Target: ATXN2; (-) strand; PAM type: NRG; PAM sequence: TAG
gccatagagttgagtagttg

SEQ ID NO: 27910 - DNA, 20 bp, Artificial Sequence
  Description of Artificial Sequence: Synthetic oligonucleotide
  Target: ATXN2; (-) strand; PAM type: NRG; PAM sequence: TAG
gctgtagccatagagttgag

SEQ ID NO: 27911 - DNA, 20 bp, Artificial Sequence
  Description of Artificial Sequence: Synthetic oligonucleotide
  Target: ATXN2; (-) strand; PAM type: NRG; PAM sequence: GAG
atggctgtagccatagagtt

SEQ ID NO: 27912 - DNA, 20 bp, Artificial Sequence
  Description of Artificial Sequence: Synthetic oligonucleotide
  Target: ATXN2; (-) strand; PAM type: NRG; PAM sequence: GAG
ttttgatggctgtagccata

SEQ ID NO: 27913 - DNA, 20 bp, Artificial Sequence
  Description of Artificial Sequence: Synthetic oligonucleotide
  Target: ATXN2; (-) strand; PAM type: NRG; PAM sequence: TAG
tgttttgatggctgtagcca

SEQ ID NO: 27914 - DNA, 20 bp, Artificial Sequence
  Description of Artificial Sequence: Synthetic oligonucleotide
  Target: ATXN2; (-) strand; PAM type: NRG; PAM sequence: TAG
tatggctgttttgatggctg

SEQ ID NO: 27915 - DNA, 20 bp, Artificial Sequence
  Description of Artificial Sequence: Synthetic oligonucleotide
  Target: ATXN2; (-) strand; PAM type: NRG; PAM sequence: TGG
attgtctatggctgttttga

SEQ ID NO: 27916 - DNA, 20 bp, Artificial Sequence
  Description of Artificial Sequence: Synthetic oligonucleotide
  Target: ATXN2; (-) strand; PAM type: NRG; PAM sequence: TGG
atgcgtttgtgcattgtcta

SEQ ID NO: 27917 - DNA, 20 bp, Artificial Sequence
  Description of Artificial Sequence: Synthetic oligonucleotide
  Target: ATXN2; (-) strand; PAM type: NRG; PAM sequence: TAG
aaataaattttattgtagca

SEQ ID NO: 27918 - DNA, 20 bp, Artificial Sequence
  Description of Artificial Sequence: Synthetic oligonucleotide
  Target: ATXN2; (-) strand; PAM type: NRG; PAM sequence: TAG
tcagtaaataaattttattg

SEQ ID NO: 27919 - DNA, 20 bp, Artificial Sequence
  Description of Artificial Sequence: Synthetic oligonucleotide
  Target: ATXN2; (-) strand; PAM type: NRG; PAM sequence: CAG
gggtcagcaaatctgctcat

SEQ ID NO: 27920 - DNA, 20 bp, Artificial Sequence
  Description of Artificial Sequence: Synthetic oligonucleotide
  Target: ATXN2; (-) strand; PAM type: NRG; PAM sequence: CAG
tcagcctagatgataggggt

SEQ ID NO: 27921 - DNA, 20 bp, Artificial Sequence
  Description of Artificial Sequence: Synthetic oligonucleotide
  Target: ATXN2; (-) strand; PAM type: NRG; PAM sequence: GGG
attctcagcctagatgatag

SEQ ID NO: 27922 - DNA, 20 bp, Artificial Sequence
  Description of Artificial Sequence: Synthetic oligonucleotide
  Target: ATXN2; (-) strand; PAM type: NRG; PAM sequence: GGG
tattctcagcctagatgata

SEQ ID NO: 27923 - DNA, 20 bp, Artificial Sequence
  Description of Artificial Sequence: Synthetic oligonucleotide
  Target: ATXN2; (-) strand; PAM type: NRG; PAM sequence: AGG
gtattctcagcctagatgat

SEQ ID NO: 27924 - DNA, 20 bp, Artificial Sequence
  Description of Artificial Sequence: Synthetic oligonucleotide
  Target: ATXN2; (-) strand; PAM type: NRG; PAM sequence: TAG
agtattctcagcctagatga

SEQ ID NO: 27925 - DNA, 20 bp, Artificial Sequence
  Description of Artificial Sequence: Synthetic oligonucleotide
  Target: ATXN2; (-) strand; PAM type: NRG; PAM sequence: TAG
tctttgcagtattctcagcc

SEQ ID NO: 27926 - DNA, 20 bp, Artificial Sequence
  Description of Artificial Sequence: Synthetic oligonucleotide
  Target: ATXN2; (-) strand; PAM type: NRG; PAM sequence: CAG
cattttctttgcagtattct

SEQ ID NO: 27927 - DNA, 20 bp, Artificial Sequence
  Description of Artificial Sequence: Synthetic oligonucleotide
  Target: ATXN2; (-) strand; PAM type: NRG; PAM sequence: CAG
ctactgcttcattttctttg

SEQ ID NO: 27928 - DNA, 20 bp, Artificial Sequence
  Description of Artificial Sequence: Synthetic oligonucleotide
  Target: ATXN2; (-) strand; PAM type: NRG; PAM sequence: TGG
tctttactccaactcaacta

SEQ ID NO: 27929 - DNA, 20 bp, Artificial Sequence
  Description of Artificial Sequence: Synthetic oligonucleotide
  Target: ATXN2; (-) strand; PAM type: NRG; PAM sequence: CAG
cttgattttccatccatttc

SEQ ID NO: 27930 - DNA, 20 bp, Artificial Sequence
  Description of Artificial Sequence: Synthetic oligonucleotide
  Target: ATXN2; (-) strand; PAM type: NRG; PAM sequence: TGG
gctctgtattcgtgtatctt

SEQ ID NO: 27931 - DNA, 20 bp, Artificial Sequence
  Description of Artificial Sequence: Synthetic oligonucleotide
  Target: ATXN2; (-) strand; PAM type: NRG; PAM sequence: TGG
ttagggccttcagtcgcttt

SEQ ID NO: 27932 - DNA, 20 bp, Artificial Sequence
  Description of Artificial Sequence: Synthetic oligonucleotide
  Target: ATXN2; (-) strand; PAM type: NRG; PAM sequence: CAG
ctaaaacttcttagggcctt

SEQ ID NO: 27933 - DNA, 20 bp, Artificial Sequence
  Description of Artificial Sequence: Synthetic oligonucleotide
  Target: ATXN2; (-) strand; PAM type: NRG; PAM sequence: GGG
cattttgctaaaacttctta

SEQ ID NO: 27934 - DNA, 20 bp, Artificial Sequence
  Description of Artificial Sequence: Synthetic oligonucleotide
  Target: ATXN2; (-) strand; PAM type: NRG; PAM sequence: AGG
tcattttgctaaaacttctt

SEQ ID NO: 27935 - DNA, 20 bp, Artificial Sequence
  Description of Artificial Sequence: Synthetic oligonucleotide
  Target: ATXN2; (-) strand; PAM type: NRG; PAM sequence: TAG
ttcattttgctaaaacttct

SEQ ID NO: 27936 - DNA, 20 bp, Artificial Sequence
  Description of Artificial Sequence: Synthetic oligonucleotide
  Target: ATXN2; (-) strand; PAM type: NRG; PAM sequence: AGG
ttccagtgcagacagatctg

SEQ ID NO: 27937 - DNA, 20 bp, Artificial Sequence
  Description of Artificial Sequence: Synthetic oligonucleotide
  Target: ATXN2; (-) strand; PAM type: NRG; PAM sequence: GAG
attccagtgcagacagatct

SEQ ID NO: 27938 - DNA, 20 bp, Artificial Sequence
  Description of Artificial Sequence: Synthetic oligonucleotide
  Target: ATXN2; (-) strand; PAM type: NRG; PAM sequence: CAG
tatttgaattccagtgcaga

SEQ ID NO: 27939 - DNA, 20 bp, Artificial Sequence
  Description of Artificial Sequence: Synthetic oligonucleotide
  Target: ATXN2; (-) strand; PAM type: NRG; PAM sequence: CAG
cctttatttgaattccagtg

SEQ ID NO: 27940 - DNA, 20 bp, Artificial Sequence
  Description of Artificial Sequence: Synthetic oligonucleotide
  Target: ATXN2; (-) strand; PAM type: NRG; PAM sequence: CAG
tttatcctttatttgaattc

SEQ ID NO: 27941 - DNA, 20 bp, Artificial Sequence
  Description of Artificial Sequence: Synthetic oligonucleotide
  Target: ATXN2; (-) strand; PAM type: NRG; PAM sequence: CAG
tcagattatcattggaaaat

SEQ ID NO: 27942 - DNA, 20 bp, Artificial Sequence
  Description of Artificial Sequence: Synthetic oligonucleotide
  Target: ATXN2; (-) strand; PAM type: NRG; PAM sequence: TGG
agagaccatcagattatcat

SEQ ID NO: 27943 - DNA, 20 bp, Artificial Sequence
  Description of Artificial Sequence: Synthetic oligonucleotide
  Target: ATXN2; (-) strand; PAM type: NRG; PAM sequence: CAG
tcataattagaagagaccat

SEQ ID NO: 27944 - DNA, 20 bp, Artificial Sequence
  Description of Artificial Sequence: Synthetic oligonucleotide
  Target: ATXN2; (-) strand; PAM type: NRG; PAM sequence: GAG
tggcacattcataattagaa

SEQ ID NO: 27945 - DNA, 20 bp, Artificial Sequence
  Description of Artificial Sequence: Synthetic oligonucleotide
  Target: ATXN2; (-) strand; PAM type: NRG; PAM sequence: AAG
cttggcacattcataattag

SEQ ID NO: 27946 - DNA, 20 bp, Artificial Sequence
  Description of Artificial Sequence: Synthetic oligonucleotide
  Target: ATXN2; (-) strand; PAM type: NRG; PAM sequence: TAG
caccttggcacattcataat

SEQ ID NO: 27947 - DNA, 20 bp, Artificial Sequence
  Description of Artificial Sequence: Synthetic oligonucleotide
  Target: ATXN2; (-) strand; PAM type: NRG; PAM sequence: TGG
atatgagctgtgagtcacct

SEQ ID NO: 27948 - DNA, 20 bp, Artificial Sequence
  Description of Artificial Sequence: Synthetic oligonucleotide
  Target: ATXN2; (-) strand; PAM type: NRG; PAM sequence: GAG
ctttacgtcatatgagctgt

SEQ ID NO: 27949 - DNA, 20 bp, Artificial Sequence
  Description of Artificial Sequence: Synthetic oligonucleotide
  Target: ATXN2; (-) strand; PAM type: NRG; PAM sequence: GAG
aaagtacctttacgtcatat

SEQ ID NO: 27950 - DNA, 20 bp, Artificial Sequence
  Description of Artificial Sequence: Synthetic oligonucleotide
  Target: ATXN2; (-) strand; PAM type: NRG; PAM sequence: AAG
ttgatttactgagaaactga

SEQ ID NO: 27951 - DNA, 20 bp, Artificial Sequence
  Description of Artificial Sequence: Synthetic oligonucleotide
  Target: ATXN2; (-) strand; PAM type: NRG; PAM sequence: GAG
atgttccagtttgatttact

SEQ ID NO: 27952 - DNA, 20 bp, Artificial Sequence
  Description of Artificial Sequence: Synthetic oligonucleotide
  Target: ATXN2; (-) strand; PAM type: NRG; PAM sequence: CAG
cttgaatgttatacatgttc

SEQ ID NO: 27953 - DNA, 20 bp, Artificial Sequence
  Description of Artificial Sequence: Synthetic oligonucleotide
  Target: ATXN2; (-) strand; PAM type: NRG; PAM sequence: TGG
tacagtgaataagtttcctt

SEQ ID NO: 27954 - DNA, 20 bp, Artificial Sequence
  Description of Artificial Sequence: Synthetic oligonucleotide
  Target: ATXN2; (-) strand; PAM type: NRG; PAM sequence: AAG
cttcttacggtacagtgaat

SEQ ID NO: 27955 - DNA, 20 bp, Artificial Sequence
  Description of Artificial Sequence: Synthetic oligonucleotide
  Target: ATXN2; (-) strand; PAM type: NRG; PAM sequence: CAG
aatagtgacttcttacggta

SEQ ID NO: 27956 - DNA, 20 bp, Artificial Sequence
  Description of Artificial Sequence: Synthetic oligonucleotide
  Target: ATXN2; (-) strand; PAM type: NRG; PAM sequence: CGG
tttgaaatagtgacttctta

SEQ ID NO: 27957 - DNA, 20 bp, Artificial Sequence
  Description of Artificial Sequence: Synthetic oligonucleotide
  Target: ATXN2; (-) strand; PAM type: NRG; PAM sequence: TAG
atgaataaaaggctttgaaa

SEQ ID NO: 27958 - DNA, 20 bp, Artificial Sequence
  Description of Artificial Sequence: Synthetic oligonucleotide
  Target: ATXN2; (-) strand; PAM type: NRG; PAM sequence: AGG
catatatgcaaatgaataaa

SEQ ID NO: 27959 - DNA, 20 bp, Artificial Sequence
  Description of Artificial Sequence: Synthetic oligonucleotide
  Target: ATXN2; (-) strand; PAM type: NRG; PAM sequence: AAG
gcatatatgcaaatgaataa

SEQ ID NO: 27960 - DNA, 20 bp, Artificial Sequence
  Description of Artificial Sequence: Synthetic oligonucleotide
  Target: ATXN2; (-) strand; PAM type: NRG; PAM sequence: AAG
ttgatttcaataaagtttaa

SEQ ID NO: 27961 - DNA, 20 bp, Artificial Sequence
  Description of Artificial Sequence: Synthetic oligonucleotide
  Target: ATXN2; (-) strand; PAM type: NRG; PAM sequence: AAG
taacatcattgatttcaata

SEQ ID NO: 27962 - DNA, 20 bp, Artificial Sequence
  Description of Artificial Sequence: Synthetic oligonucleotide
  Target: ATXN2; (-) strand; PAM type: NRG; PAM sequence: AAG
gtaaggtcagtgtgactttt

SEQ ID NO: 27963 - DNA, 20 bp, Artificial Sequence
  Description of Artificial Sequence: Synthetic oligonucleotide
  Target: ATXN2; (-) strand; PAM type: NRG; PAM sequence: CAG
ccttttaacatgagtaaggt

SEQ ID NO: 27964 - DNA, 20 bp, Artificial Sequence
  Description of Artificial Sequence: Synthetic oligonucleotide
  Target: ATXN2; (-) strand; PAM type: NRG; PAM sequence: AGG
gaaaccttttaacatgagta

SEQ ID NO: 27965 - DNA, 20 bp, Artificial Sequence
  Description of Artificial Sequence: Synthetic oligonucleotide
  Target: ATXN2; (-) strand; PAM type: NRG; PAM sequence: AAG
ggaaaccttttaacatgagt

SEQ ID NO: 27966 - DNA, 20 bp, Artificial Sequence
  Description of Artificial Sequence: Synthetic oligonucleotide
  Target: ATXN2; (-) strand; PAM type: NRG; PAM sequence: GAG
ctggggaaaccttttaacat

SEQ ID NO: 27967 - DNA, 20 bp, Artificial Sequence
  Description of Artificial Sequence: Synthetic oligonucleotide
  Target: ATXN2; (-) strand; PAM type: NRG; PAM sequence: GGG
gccaccacactcggctgctg

SEQ ID NO: 27968 - DNA, 20 bp, Artificial Sequence
  Description of Artificial Sequence: Synthetic oligonucleotide
  Target: ATXN2; (-) strand; PAM type: NRG; PAM sequence: GGG
agccaccacactcggctgct

SEQ ID NO: 27969 - DNA, 20 bp, Artificial Sequence
  Description of Artificial Sequence: Synthetic oligonucleotide
  Target: ATXN2; (-) strand; PAM type: NRG; PAM sequence: TGG
gagccaccacactcggctgc

SEQ ID NO: 27970 - DNA, 20 bp, Artificial Sequence
  Description of Artificial Sequence: Synthetic oligonucleotide
  Target: ATXN2; (-) strand; PAM type: NRG; PAM sequence: CGG
caggcgtgagccaccacact

SEQ ID NO: 27971 - DNA, 20 bp, Artificial Sequence
  Description of Artificial Sequence: Synthetic oligonucleotide
  Target: ATXN2; (-) strand; PAM type: NRG; PAM sequence: GAG
agtgctaggattacaggcgt

SEQ ID NO: 27972 - DNA, 20 bp, Artificial Sequence
  Description of Artificial Sequence: Synthetic oligonucleotide
  Target: ATXN2; (-) strand; PAM type: NRG; PAM sequence: AGG
tcccaaagtgctaggattac

SEQ ID NO: 27973 - DNA, 20 bp, Artificial Sequence
  Description of Artificial Sequence: Synthetic oligonucleotide
  Target: ATXN2; (-) strand; PAM type: NRG; PAM sequence: CAG
ctcccaaagtgctaggatta

SEQ ID NO: 27974 - DNA, 20 bp, Artificial Sequence
  Description of Artificial Sequence: Synthetic oligonucleotide
  Target: ATXN2; (-) strand; PAM type: NRG; PAM sequence: AGG
ccttggcctcccaaagtgct

SEQ ID NO: 27975 - DNA, 20 bp, Artificial Sequence
  Description of Artificial Sequence: Synthetic oligonucleotide
  Target: ATXN2; (-) strand; PAM type: NRG; PAM sequence: TAG
accttggcctcccaaagtgc

SEQ ID NO: 27976 - DNA, 20 bp, Artificial Sequence
  Description of Artificial Sequence: Synthetic oligonucleotide
  Target: ATXN2; (-) strand; PAM type: NRG; PAM sequence: AAG
ccacccaccttggcctccca

SEQ ID NO: 27977 - DNA, 20 bp, Artificial Sequence
  Description of Artificial Sequence: Synthetic oligonucleotide
  Target: ATXN2; (-) strand; PAM type: NRG; PAM sequence: TGG
acctcatgatccacccacct

SEQ ID NO: 27978 - DNA, 20 bp, Artificial Sequence
  Description of Artificial Sequence: Synthetic oligonucleotide
  Target: ATXN2; (-) strand; PAM type: NRG; PAM sequence: AGG
ggggtttcaccatattggcc

SEQ ID NO: 27979 - DNA, 20 bp, Artificial Sequence
  Description of Artificial Sequence: Synthetic oligonucleotide
  Target: ATXN2; (-) strand; PAM type: NRG; PAM sequence: CAG
cggggtttcaccatattggc

SEQ ID NO: 27980 - DNA, 20 bp, Artificial Sequence
  Description of Artificial Sequence: Synthetic oligonucleotide
  Target: ATXN2; (-) strand; PAM type: NRG; PAM sequence: TGG
gagacggggtttcaccatat

SEQ ID NO: 27981 - DNA, 20 bp, Artificial Sequence
  Description of Artificial Sequence: Synthetic oligonucleotide
  Target: ATXN2; (-) strand; PAM type: NRG; PAM sequence: GGG
ttatatttttagtagagacg

SEQ ID NO: 27982 - DNA, 20 bp, Artificial Sequence
  Description of Artificial Sequence: Synthetic oligonucleotide
  Target: ATXN2; (-) strand; PAM type: NRG; PAM sequence: GGG
tttatatttttagtagagac

SEQ ID NO: 27983 - DNA, 20 bp, Artificial Sequence
  Description of Artificial Sequence: Synthetic oligonucleotide
  Target: ATXN2; (-) strand; PAM type: NRG; PAM sequence: CGG
ttttatatttttagtagaga

SEQ ID NO: 27984 - DNA, 20 bp, Artificial Sequence
  Description of Artificial Sequence: Synthetic oligonucleotide
  Target: ATXN2; (-) strand; PAM type: NRG; PAM sequence: GAG
taatttttatatttttagta

SEQ ID NO: 27985 - DNA, 20 bp, Artificial Sequence
  Description of Artificial Sequence: Synthetic oligonucleotide
  Target: ATXN2; (-) strand; PAM type: NRG; PAM sequence: TAG
gctaatttttatatttttag

SEQ ID NO: 27986 - DNA, 20 bp, Artificial Sequence
  Description of Artificial Sequence: Synthetic oligonucleotide
  Target: ATXN2; (-) strand; PAM type: NRG; PAM sequence: TAG
ccagctaatttttatatttt

SEQ ID NO: 27987 - DNA, 20 bp, Artificial Sequence
  Description of Artificial Sequence: Synthetic oligonucleotide
  Target: ATXN2; (-) strand; PAM type: NRG; PAM sequence: CAG
taggcgtctgccaccatgcc

SEQ ID NO: 27988 - DNA, 20 bp, Artificial Sequence
  Description of Artificial Sequence: Synthetic oligonucleotide
  Target: ATXN2; (-) strand; PAM type: NRG; PAM sequence: AGG
tcccgaggagctgggattat

SEQ ID NO: 27989 - DNA, 20 bp, Artificial Sequence
  Description of Artificial Sequence: Synthetic oligonucleotide
  Target: ATXN2; (-) strand; PAM type: NRG; PAM sequence: TAG
ctcccgaggagctgggatta

SEQ ID NO: 27990 - DNA, 20 bp, Artificial Sequence
  Description of Artificial Sequence: Synthetic oligonucleotide
  Target: ATXN2; (-) strand; PAM type: NRG; PAM sequence: GGG
cctaagcctcccgaggagct

SEQ ID NO: 27991 - DNA, 20 bp, Artificial Sequence
  Description of Artificial Sequence: Synthetic oligonucleotide
  Target: ATXN2; (-) strand; PAM type: NRG; PAM sequence: TGG
gcctaagcctcccgaggagc

SEQ ID NO: 27992 - DNA, 20 bp, Artificial Sequence
  Description of Artificial Sequence: Synthetic oligonucleotide
  Target: ATXN2; (-) strand; PAM type: NRG; PAM sequence: GAG
ttctgcctaagcctcccgag

SEQ ID NO: 27993 - DNA, 20 bp, Artificial Sequence
  Description of Artificial Sequence: Synthetic oligonucleotide
  Target: ATXN2; (-) strand; PAM type: NRG; PAM sequence: AGG
tcttctgcctaagcctcccg

SEQ ID NO: 27994 - DNA, 20 bp, Artificial Sequence
  Description of Artificial Sequence: Synthetic oligonucleotide
  Target: ATXN2; (-) strand; PAM type: NRG; PAM sequence: GAG
ttcttctgcctaagcctccc

SEQ ID NO: 27995 - DNA, 20 bp, Artificial Sequence
  Description of Artificial Sequence: Synthetic oligonucleotide
  Target: ATXN2; (-) strand; PAM type: NRG; PAM sequence: AAG
ttcaagcaattcttctgcct

SEQ ID NO: 27996 - DNA, 20 bp, Artificial Sequence
  Description of Artificial Sequence: Synthetic oligonucleotide
  Target: ATXN2; (-) strand; PAM type: NRG; PAM sequence: AAG
aacctctgcttcctaggttc

SEQ ID NO: 27997 - DNA, 20 bp, Artificial Sequence
  Description of Artificial Sequence: Synthetic oligonucleotide
  Target: ATXN2; (-) strand; PAM type: NRG; PAM sequence: AGG
cactgcaacctctgcttcct

SEQ ID NO: 27998 - DNA, 20 bp, Artificial Sequence
  Description of Artificial Sequence: Synthetic oligonucleotide
  Target: ATXN2; (-) strand; PAM type: NRG; PAM sequence: TAG
tcactgcaacctctgcttcc

SEQ ID NO: 27999 - DNA, 20 bp, Artificial Sequence
  Description of Artificial Sequence: Synthetic oligonucleotide
  Target: ATXN2; (-) strand; PAM type: NRG; PAM sequence: CAG
ggagtgcagtggcgtgatct

SEQ ID NO: 28000 - DNA, 20 bp, Artificial Sequence
  Description of Artificial Sequence: Synthetic oligonucleotide
  Target: ATXN2; (-) strand; PAM type: NRG; PAM sequence: TGG
tcacccaggctggagtgcag

SEQ ID NO: 28001 - DNA, 20 bp, Artificial Sequence
  Description of Artificial Sequence: Synthetic oligonucleotide
  Target: ATXN2; (-) strand; PAM type: NRG; PAM sequence: CAG
ctgtcacccaggctggagtg

SEQ ID NO: 28002 - DNA, 20 bp, Artificial Sequence
  Description of Artificial Sequence: Synthetic oligonucleotide
  Target: ATXN2; (-) strand; PAM type: NRG; PAM sequence: GAG
tcgctctgtcacccaggctg

SEQ ID NO: 28003 - DNA, 20 bp, Artificial Sequence
  Description of Artificial Sequence: Synthetic oligonucleotide
  Target: ATXN2; (-) strand; PAM type: NRG; PAM sequence: TGG
tctcgctctgtcacccaggc

SEQ ID NO: 28004 - DNA, 20 bp, Artificial Sequence
  Description of Artificial Sequence: Synthetic oligonucleotide
  Target: ATXN2; (-) strand; PAM type: NRG; PAM sequence: AGG
ggagtctcgctctgtcaccc

SEQ ID NO: 28005 - DNA, 20 bp, Artificial Sequence
  Description of Artificial Sequence: Synthetic oligonucleotide
  Target: ATXN2; (-) strand; PAM type: NRG; PAM sequence: CAG
cggagtctcgctctgtcacc

SEQ ID NO: 28006 - DNA, 20 bp, Artificial Sequence
  Description of Artificial Sequence: Synthetic oligonucleotide
  Target: ATXN2; (-) strand; PAM type: NRG; PAM sequence: GAG
gaaacctttattttgaggcg

SEQ ID NO: 28007 - DNA, 20 bp, Artificial Sequence
  Description of Artificial Sequence: Synthetic oligonucleotide
  Target: ATXN2; (-) strand; PAM type: NRG; PAM sequence: CGG
gggaaacctttattttgagg

SEQ ID NO: 28008 - DNA, 20 bp, Artificial Sequence
  Description of Artificial Sequence: Synthetic oligonucleotide
  Target: ATXN2; (-) strand; PAM type: NRG; PAM sequence: AGG
ccagggaaacctttattttg

SEQ ID NO: 28009 - DNA, 20 bp, Artificial Sequence
  Description of Artificial Sequence: Synthetic oligonucleotide
  Target: ATXN2; (-) strand; PAM type: NRG; PAM sequence: GAG
gccagggaaacctttatttt

SEQ ID NO: 28010 - DNA, 20 bp, Artificial Sequence
  Description of Artificial Sequence: Synthetic oligonucleotide
  Target: ATXN2; (-) strand; PAM type: NRG; PAM sequence: GGG
tgagccaccgcgcccagcca

SEQ ID NO: 28011 - DNA, 20 bp, Artificial Sequence
  Description of Artificial Sequence: Synthetic oligonucleotide
  Target: ATXN2; (-) strand; PAM type: NRG; PAM sequence: AGG
gtgagccaccgcgcccagcc

SEQ ID NO: 28012 - DNA, 20 bp, Artificial Sequence
  Description of Artificial Sequence: Synthetic oligonucleotide
  Target: ATXN2; (-) strand; PAM type: NRG; PAM sequence: CAG
cgtgagccaccgcgcccagc

SEQ ID NO: 28013 - DNA, 20 bp, Artificial Sequence
  Description of Artificial Sequence: Synthetic oligonucleotide
  Target: ATXN2; (-) strand; PAM type: NRG; PAM sequence: CAG
caagcgtgagccaccgcgcc

SEQ ID NO: 28014 - DNA, 20 bp, Artificial Sequence
  Description of Artificial Sequence: Synthetic oligonucleotide
  Target: ATXN2; (-) strand; PAM type: NRG; PAM sequence: GAG
agtgctgggatcacaagcgt

SEQ ID NO: 28015 - DNA, 20 bp, Artificial Sequence
  Description of Artificial Sequence: Synthetic oligonucleotide
  Target: ATXN2; (-) strand; PAM type: NRG; PAM sequence: AAG
tcccaaagtgctgggatcac

SEQ ID NO: 28016 - DNA, 20 bp, Artificial Sequence
  Description of Artificial Sequence: Synthetic oligonucleotide
  Target: ATXN2; (-) strand; PAM type: NRG; PAM sequence: GGG
cctaggcctcccaaagtgct

SEQ ID NO: 28017 - DNA, 20 bp, Artificial Sequence
  Description of Artificial Sequence: Synthetic oligonucleotide
  Target: ATXN2; (-) strand; PAM type: NRG; PAM sequence: TGG
gcctaggcctcccaaagtgc

SEQ ID NO: 28018 - DNA, 20 bp, Artificial Sequence
  Description of Artificial Sequence: Synthetic oligonucleotide
  Target: ATXN2; (-) strand; PAM type: NRG; PAM sequence: AAG
ccacctgcctaggcctccca

SEQ ID NO: 28019 - DNA, 20 bp, Artificial Sequence
  Description of Artificial Sequence: Synthetic oligonucleotide
  Target: ATXN2; (-) strand; PAM type: NRG; PAM sequence: AGG
ctcaggtgatccacctgcct

SEQ ID NO: 28020 - DNA, 20 bp, Artificial Sequence
  Description of Artificial Sequence: Synthetic oligonucleotide
  Target: ATXN2; (-) strand; PAM type: NRG; PAM sequence: TAG
cctcaggtgatccacctgcc

SEQ ID NO: 28021 - DNA, 20 bp, Artificial Sequence
  Description of Artificial Sequence: Synthetic oligonucleotide
  Target: ATXN2; (-) strand; PAM type: NRG; PAM sequence: AGG
ggtcttgaactcctgacctc

SEQ ID NO: 28022 - DNA, 20 bp, Artificial Sequence
  Description of Artificial Sequence: Synthetic oligonucleotide
  Target: ATXN2; (-) strand; PAM type: NRG; PAM sequence: CAG
tggtcttgaactcctgacct

SEQ ID NO: 28023 - DNA, 20 bp, Artificial Sequence
  Description of Artificial Sequence: Synthetic oligonucleotide
  Target: ATXN2; (-) strand; PAM type: NRG; PAM sequence: TGG
tttctccacgttggtcaggc

SEQ ID NO: 28024 - DNA, 20 bp, Artificial Sequence
  Description of Artificial Sequence: Synthetic oligonucleotide
  Target: ATXN2; (-) strand; PAM type: NRG; PAM sequence: AGG
tgggtttctccacgttggtc

SEQ ID NO: 28025 - DNA, 20 bp, Artificial Sequence
  Description of Artificial Sequence: Synthetic oligonucleotide
  Target: ATXN2; (-) strand; PAM type: NRG; PAM sequence: CAG
ctgggtttctccacgttggt

SEQ ID NO: 28026 - DNA, 20 bp, Artificial Sequence
  Description of Artificial Sequence: Synthetic oligonucleotide
  Target: ATXN2; (-) strand; PAM type: NRG; PAM sequence: TGG
gagactgggtttctccacgt

SEQ ID NO: 28027 - DNA, 20 bp, Artificial Sequence
  Description of Artificial Sequence: Synthetic oligonucleotide
  Target: ATXN2; (-) strand; PAM type: NRG; PAM sequence: GGG
ttgtatttttagtagagact

SEQ ID NO: 28028 - DNA, 20 bp, Artificial Sequence
  Description of Artificial Sequence: Synthetic oligonucleotide
  Target: ATXN2; (-) strand; PAM type: NRG; PAM sequence: TGG
tttgtatttttagtagagac

SEQ ID NO: 28029 - DNA, 20 bp, Artificial Sequence
  Description of Artificial Sequence: Synthetic oligonucleotide
  Target: ATXN2; (-) strand; PAM type: NRG; PAM sequence: GAG
ctaactttgtatttttagta

SEQ ID NO: 28030 - DNA, 20 bp, Artificial Sequence
  Description of Artificial Sequence: Synthetic oligonucleotide
  Target: ATXN2; (-) strand; PAM type: NRG; PAM sequence: TAG
ggctaactttgtatttttag

SEQ ID NO: 28031 - DNA, 20 bp, Artificial Sequence
  Description of Artificial Sequence: Synthetic oligonucleotide
  Target: ATXN2; (-) strand; PAM type: NRG; PAM sequence: TAG
cccggctaactttgtatttt

SEQ ID NO: 28032 - DNA, 20 bp, Artificial Sequence
  Description of Artificial Sequence: Synthetic oligonucleotide
  Target: ATXN2; (-) strand; PAM type: NRG; PAM sequence: CGG
caggcatgtgccaccatgcc

SEQ ID NO: 28033 - DNA, 20 bp, Artificial Sequence
  Description of Artificial Sequence: Synthetic oligonucleotide
  Target: ATXN2; (-) strand; PAM type: NRG; PAM sequence: AGG
tcccgagtagctgggattac

SEQ ID NO: 28034 - DNA, 20 bp, Artificial Sequence
  Description of Artificial Sequence: Synthetic oligonucleotide
  Target: ATXN2; (-) strand; PAM type: NRG; PAM sequence: CAG
ctcccgagtagctgggatta

SEQ ID NO: 28035 - DNA, 20 bp, Artificial Sequence
  Description of Artificial Sequence: Synthetic oligonucleotide
  Target: ATXN2; (-) strand; PAM type: NRG; PAM sequence: GGG
tctcagcctcccgagtagct

SEQ ID NO: 28036 - DNA, 20 bp, Artificial Sequence
  Description of Artificial Sequence: Synthetic oligonucleotide
  Target: ATXN2; (-) strand; PAM type: NRG; PAM sequence: TGG
atctcagcctcccgagtagc

SEQ ID NO: 28037 - DNA, 20 bp, Artificial Sequence
  Description of Artificial Sequence: Synthetic oligonucleotide
  Target: ATXN2; (-) strand; PAM type: NRG; PAM sequence: TAG
tcctatctcagcctcccgag

SEQ ID NO: 28038 - DNA, 20 bp, Artificial Sequence
  Description of Artificial Sequence: Synthetic oligonucleotide
  Target: ATXN2; (-) strand; PAM type: NRG; PAM sequence: GAG
ttctcctatctcagcctccc

SEQ ID NO: 28039 - DNA, 20 bp, Artificial Sequence
  Description of Artificial Sequence: Synthetic oligonucleotide
  Target: ATXN2; (-) strand; PAM type: NRG; PAM sequence: CAG
ttcaagcgattctcctatct

SEQ ID NO: 28040 - DNA, 20 bp, Artificial Sequence
  Description of Artificial Sequence: Synthetic oligonucleotide
  Target: ATXN2; (-) strand; PAM type: NRG; PAM sequence: AAG
aacctccgccttctgggttc

SEQ ID NO: 28041 - DNA, 20 bp, Artificial Sequence
  Description of Artificial Sequence: Synthetic oligonucleotide
  Target: ATXN2; (-) strand; PAM type: NRG; PAM sequence: GGG
cactgcaacctccgccttct

SEQ ID NO: 28042 - DNA, 20 bp, Artificial Sequence
  Description of Artificial Sequence: Synthetic oligonucleotide
  Target: ATXN2; (-) strand; PAM type: NRG; PAM sequence: TGG
tcactgcaacctccgccttc

SEQ ID NO: 28043 - DNA, 20 bp, Artificial Sequence
  Description of Artificial Sequence: Synthetic oligonucleotide
  Target: ATXN2; (-) strand; PAM type: NRG; PAM sequence: TGG
tcgcccaggctggagtgcaa

SEQ ID NO: 28044 - DNA, 20 bp, Artificial Sequence
  Description of Artificial Sequence: Synthetic oligonucleotide
  Target: ATXN2; (-) strand; PAM type: NRG; PAM sequence: GAG
tgctcttgtcgcccaggctg

SEQ ID NO: 28045 - DNA, 20 bp, Artificial Sequence
  Description of Artificial Sequence: Synthetic oligonucleotide
  Target: ATXN2; (-) strand; PAM type: NRG; PAM sequence: TGG
tttgctcttgtcgcccaggc

SEQ ID NO: 28046 - DNA, 20 bp, Artificial Sequence
  Description of Artificial Sequence: Synthetic oligonucleotide
  Target: ATXN2; (-) strand; PAM type: NRG; PAM sequence: AGG
gagttttgctcttgtcgccc

SEQ ID NO: 28047 - DNA, 20 bp, Artificial Sequence
  Description of Artificial Sequence: Synthetic oligonucleotide
  Target: ATXN2; (-) strand; PAM type: NRG; PAM sequence: CAG
ggagttttgctcttgtcgcc

SEQ ID NO: 28048 - DNA, 20 bp, Artificial Sequence
  Description of Artificial Sequence: Synthetic oligonucleotide
  Target: ATXN2; (-) strand; PAM type: NRG; PAM sequence: GAG
tttttgttttccttgggacg

SEQ ID NO: 28049 - DNA, 20 bp, Artificial Sequence
  Description of Artificial Sequence: Synthetic oligonucleotide
  Target: ATXN2; (-) strand; PAM type: NRG; PAM sequence: CGG
cttttttgttttccttggga

SEQ ID NO: 28050 - DNA, 20 bp, Artificial Sequence
  Description of Artificial Sequence: Synthetic oligonucleotide
  Target: ATXN2; (-) strand; PAM type: NRG; PAM sequence: GGG
ttttcttttttgttttcctt

SEQ ID NO: 28051 - DNA, 20 bp, Artificial Sequence
  Description of Artificial Sequence: Synthetic oligonucleotide
  Target: ATXN2; (-) strand; PAM type: NRG; PAM sequence: TGG
tttttcttttttgttttcct

SEQ ID NO: 28052 - DNA, 20 bp, Artificial Sequence
  Description of Artificial Sequence: Synthetic oligonucleotide
  Target: ATXN2; (-) strand; PAM type: NRG; PAM sequence: GGG
aatctttggctttatttttg

SEQ ID NO: 28053 - DNA, 20 bp, Artificial Sequence
  Description of Artificial Sequence: Synthetic oligonucleotide
  Target: ATXN2; (-) strand; PAM type: NRG; PAM sequence: GGG
taatctttggctttattttt

SEQ ID NO: 28054 - DNA, 20 bp, Artificial Sequence
  Description of Artificial Sequence: Synthetic oligonucleotide
  Target: ATXN2; (-) strand; PAM type: NRG; PAM sequence: TGG
ttaatctttggctttatttt

SEQ ID NO: 28055 - DNA, 20 bp, Artificial Sequence
  Description of Artificial Sequence: Synthetic oligonucleotide
  Target: ATXN2; (-) strand; PAM type: NRG; PAM sequence: TGG
ttttttttttttttaatctt

SEQ ID NO: 28056 - DNA, 20 bp, Artificial Sequence
  Description of Artificial Sequence: Synthetic oligonucleotide
  Target: ATXN2; (-) strand; PAM type: NRG; PAM sequence: AAG
tgcagactattatgttgttc

SEQ ID NO: 28057 - DNA, 20 bp, Artificial Sequence
  Description of Artificial Sequence: Synthetic oligonucleotide
  Target: ATXN2; (-) strand; PAM type: NRG; PAM sequence: CAG
ttctcaagcaatataagatg

SEQ ID NO: 28058 - DNA, 20 bp, Artificial Sequence
  Description of Artificial Sequence: Synthetic oligonucleotide
  Target: ATXN2; (-) strand; PAM type: NRG; PAM sequence: AAG
aaaaaattctcaagcaatat

SEQ ID NO: 28059 - DNA, 20 bp, Artificial Sequence
  Description of Artificial Sequence: Synthetic oligonucleotide
  Target: ATXN2; (-) strand; PAM type: NRG; PAM sequence: AAG
aaaaaaaaaaaaaaattctc

SEQ ID NO: 28060 - DNA, 20 bp, Artificial Sequence
  Description of Artificial Sequence: Synthetic oligonucleotide
  Target: ATXN2; (-) strand; PAM type: NRG; PAM sequence: AAG
ttctccacaaataaagctaa

SEQ ID NO: 28061 - DNA, 20 bp, Artificial Sequence
  Description of Artificial Sequence: Synthetic oligonucleotide
  Target: ATXN2; (-) strand; PAM type: NRG; PAM sequence: AAG
aaaggatttctccacaaata

SEQ ID NO: 28062 - DNA, 20 bp, Artificial Sequence
  Description of Artificial Sequence: Synthetic oligonucleotide
  Target: ATXN2; (-) strand; PAM type: NRG; PAM sequence: AGG
gtaagttccatggttgttaa

SEQ ID NO: 28063 - DNA, 20 bp, Artificial Sequence
  Description of Artificial Sequence: Synthetic oligonucleotide
  Target: ATXN2; (-) strand; PAM type: NRG; PAM sequence: AAG
agtaagttccatggttgtta

SEQ ID NO: 28064 - DNA, 20 bp, Artificial Sequence
  Description of Artificial Sequence: Synthetic oligonucleotide
  Target: ATXN2; (-) strand; PAM type: NRG; PAM sequence: TGG
tgcccagccagtaagttcca

SEQ ID NO: 28065 - DNA, 20 bp, Artificial Sequence
  Description of Artificial Sequence: Synthetic oligonucleotide
  Target: ATXN2; (-) strand; PAM type: NRG; PAM sequence: AAG
aaccactgtgcccagccagt

SEQ ID NO: 28066 - DNA, 20 bp, Artificial Sequence
  Description of Artificial Sequence: Synthetic oligonucleotide
  Target: ATXN2; (-) strand; PAM type: NRG; PAM sequence: CAG
catgaaccactgtgcccagc

SEQ ID NO: 28067 - DNA, 20 bp, Artificial Sequence
  Description of Artificial Sequence: Synthetic oligonucleotide
  Target: ATXN2; (-) strand; PAM type: NRG; PAM sequence: CAG
taggcatgaaccactgtgcc

SEQ ID NO: 28068 - DNA, 20 bp, Artificial Sequence
  Description of Artificial Sequence: Synthetic oligonucleotide
  Target: ATXN2; (-) strand; PAM type: NRG; PAM sequence: AGG
tcccaaattgctgggattgt

SEQ ID NO: 28069 - DNA, 20 bp, Artificial Sequence
  Description of Artificial Sequence: Synthetic oligonucleotide
  Target: ATXN2; (-) strand; PAM type: NRG; PAM sequence: TAG
ctcccaaattgctgggattg

SEQ ID NO: 28070 - DNA, 20 bp, Artificial Sequence
  Description of Artificial Sequence: Synthetic oligonucleotide
  Target: ATXN2; (-) strand; PAM type: NRG; PAM sequence: GGG
cctgggcctcccaaattgct

SEQ ID NO: 28071 - DNA, 20 bp, Artificial Sequence
  Description of Artificial Sequence: Synthetic oligonucleotide
  Target: ATXN2; (-) strand; PAM type: NRG; PAM sequence: TGG
acctgggcctcccaaattgc

SEQ ID NO: 28072 - DNA, 20 bp, Artificial Sequence
  Description of Artificial Sequence: Synthetic oligonucleotide
  Target: ATXN2; (-) strand; PAM type: NRG; PAM sequence: GGG
cttaggtgatccacccacct

SEQ ID NO: 28073 - DNA, 20 bp, Artificial Sequence
  Description of Artificial Sequence: Synthetic oligonucleotide
  Target: ATXN2; (-) strand; PAM type: NRG; PAM sequence: TGG
ccttaggtgatccacccacc

SEQ ID NO: 28074 - DNA, 20 bp, Artificial Sequence
  Description of Artificial Sequence: Synthetic oligonucleotide
  Target: ATXN2; (-) strand; PAM type: NRG; PAM sequence: AGG
gatttcaagctcctgacctt

SEQ ID NO: 28075 - DNA, 20 bp, Artificial Sequence
  Description of Artificial Sequence: Synthetic oligonucleotide
  Target: ATXN2; (-) strand; PAM type: NRG; PAM sequence: TAG
tgatttcaagctcctgacct

SEQ ID NO: 28076 - DNA, 20 bp, Artificial Sequence
  Description of Artificial Sequence: Synthetic oligonucleotide
  Target: ATXN2; (-) strand; PAM type: NRG; PAM sequence: AAG
atgttggccaggctgatttc

SEQ ID NO: 28077 - DNA, 20 bp, Artificial Sequence
  Description of Artificial Sequence: Synthetic oligonucleotide
  Target: ATXN2; (-) strand; PAM type: NRG; PAM sequence: AGG
ggggttttaccatgttggcc

SEQ ID NO: 28078 - DNA, 20 bp, Artificial Sequence
  Description of Artificial Sequence: Synthetic oligonucleotide
  Target: ATXN2; (-) strand; PAM type: NRG; PAM sequence: CAG
tggggttttaccatgttggc

SEQ ID NO: 28079 - DNA, 20 bp, Artificial Sequence
  Description of Artificial Sequence: Synthetic oligonucleotide
  Target: ATXN2; (-) strand; PAM type: NRG; PAM sequence: TGG
gagatggggttttaccatgt

SEQ ID NO: 28080 - DNA, 20 bp, Artificial Sequence
  Description of Artificial Sequence: Synthetic oligonucleotide
  Target: ATXN2; (-) strand; PAM type: NRG; PAM sequence: GGG
ttgtatttttagtagagatg

SEQ ID NO: 28081 - DNA, 20 bp, Artificial Sequence
  Description of Artificial Sequence: Synthetic oligonucleotide
  Target: ATXN2; (-) strand; PAM type: NRG; PAM sequence: GGG
tttgtatttttagtagagat

SEQ ID NO: 28082 - DNA, 20 bp, Artificial Sequence
  Description of Artificial Sequence: Synthetic oligonucleotide
  Target: ATXN2; (-) strand; PAM type: NRG; PAM sequence: TGG
ttttgtatttttagtagaga

SEQ ID NO: 28083 - DNA, 20 bp, Artificial Sequence
  Description of Artificial Sequence: Synthetic oligonucleotide
  Target: ATXN2; (-) strand; PAM type: NRG; PAM sequence: GAG
taatttttgtatttttagta

SEQ ID NO: 28084 - DNA, 20 bp, Artificial Sequence
  Description of Artificial Sequence: Synthetic oligonucleotide
  Target: ATXN2; (-) strand; PAM type: NRG; PAM sequence: TAG
ggtaatttttgtatttttag

SEQ ID NO: 28085 - DNA, 20 bp, Artificial Sequence
  Description of Artificial Sequence: Synthetic oligonucleotide
  Target: ATXN2; (-) strand; PAM type: NRG; PAM sequence: TAG
ccgggtaatttttgtatttt

SEQ ID NO: 28086 - DNA, 20 bp, Artificial Sequence
  Description of Artificial Sequence: Synthetic oligonucleotide
  Target: ATXN2; (-) strand; PAM type: NRG; PAM sequence: GGG
aggcacgtaccaccacaccc

SEQ ID NO: 28087 - DNA, 20 bp, Artificial Sequence
  Description of Artificial Sequence: Synthetic oligonucleotide
  Target: ATXN2; (-) strand; PAM type: NRG; PAM sequence: CGG
caggcacgtaccaccacacc

SEQ ID NO: 28088 - DNA, 20 bp, Artificial Sequence
  Description of Artificial Sequence: Synthetic oligonucleotide
  Target: ATXN2; (-) strand; PAM type: NRG; PAM sequence: AGG
tccctaataactgggattac

SEQ ID NO: 28089 - DNA, 20 bp, Artificial Sequence
  Description of Artificial Sequence: Synthetic oligonucleotide
  Target: ATXN2; (-) strand; PAM type: NRG; PAM sequence: CAG
ctccctaataactgggatta

SEQ ID NO: 28090 - DNA, 20 bp, Artificial Sequence
  Description of Artificial Sequence: Synthetic oligonucleotide
  Target: ATXN2; (-) strand; PAM type: NRG; PAM sequence: GGG
cttcagcctccctaataact

SEQ ID NO: 28091 - DNA, 20 bp, Artificial Sequence
  Description of Artificial Sequence: Synthetic oligonucleotide
  Target: ATXN2; (-) strand; PAM type: NRG; PAM sequence: TGG
gcttcagcctccctaataac

SEQ ID NO: 28092 - DNA, 20 bp, Artificial Sequence
  Description of Artificial Sequence: Synthetic oligonucleotide
  Target: ATXN2; (-) strand; PAM type: NRG; PAM sequence: CAG
ttcaagcagttatcttgctt

SEQ ID NO: 28093 - DNA, 20 bp, Artificial Sequence
  Description of Artificial Sequence: Synthetic oligonucleotide
  Target: ATXN2; (-) strand; PAM type: NRG; PAM sequence: CAG
ctccacctcctgggttcaag

SEQ ID NO: 28094 - DNA, 20 bp, Artificial Sequence
  Description of Artificial Sequence: Synthetic oligonucleotide
  Target: ATXN2; (-) strand; PAM type: NRG; PAM sequence: AAG
aacctccacctcctgggttc

SEQ ID NO: 28095 - DNA, 20 bp, Artificial Sequence
  Description of Artificial Sequence: Synthetic oligonucleotide
  Target: ATXN2; (-) strand; PAM type: NRG; PAM sequence: GGG
cactgcaacctccacctcct

SEQ ID NO: 28096 - DNA, 20 bp, Artificial Sequence
  Description of Artificial Sequence: Synthetic oligonucleotide
  Target: ATXN2; (-) strand; PAM type: NRG; PAM sequence: TGG
gcactgcaacctccacctcc

SEQ ID NO: 28097 - DNA, 20 bp, Artificial Sequence
  Description of Artificial Sequence: Synthetic oligonucleotide
  Target: ATXN2; (-) strand; PAM type: NRG; PAM sequence: TGG
tgggtacagtggcgtgatct

SEQ ID NO: 28098 - DNA, 20 bp, Artificial Sequence
  Description of Artificial Sequence: Synthetic oligonucleotide
  Target: ATXN2; (-) strand; PAM type: NRG; PAM sequence: TGG
gtcgcccaggctgggtacag

SEQ ID NO: 28099 - DNA, 20 bp, Artificial Sequence
  Description of Artificial Sequence: Synthetic oligonucleotide
  Target: ATXN2; (-) strand; PAM type: NRG; PAM sequence: CAG
tctgtcgcccaggctgggta

SEQ ID NO: 28100 - DNA, 20 bp, Artificial Sequence
  Description of Artificial Sequence: Synthetic oligonucleotide
  Target: ATXN2; (-) strand; PAM type: NRG; PAM sequence: GGG
cttgctctgtcgcccaggct

SEQ ID NO: 28101 - DNA, 20 bp, Artificial Sequence
  Description of Artificial Sequence: Synthetic oligonucleotide
  Target: ATXN2; (-) strand; PAM type: NRG; PAM sequence: TGG
tcttgctctgtcgcccaggc

SEQ ID NO: 28102 - DNA, 20 bp, Artificial Sequence
  Description of Artificial Sequence: Synthetic oligonucleotide
  Target: ATXN2; (-) strand; PAM type: NRG; PAM sequence: AGG
agagtcttgctctgtcgccc

SEQ ID NO: 28103 - DNA, 20 bp, Artificial Sequence
  Description of Artificial Sequence: Synthetic oligonucleotide
  Target: ATXN2; (-) strand; PAM type: NRG; PAM sequence: CAG
cagagtcttgctctgtcgcc

SEQ ID NO: 28104 - DNA, 20 bp, Artificial Sequence
  Description of Artificial Sequence: Synthetic oligonucleotide
  Target: ATXN2; (-) strand; PAM type: NRG; PAM sequence: GAG
tgtttgtttgttttgagaca

SEQ ID NO: 28105 - DNA, 20 bp, Artificial Sequence
  Description of Artificial Sequence: Synthetic oligonucleotide
  Target: ATXN2; (-) strand; PAM type: NRG; PAM sequence: CAG
tttgtttgtttgttttgaga

SEQ ID NO: 28106 - DNA, 20 bp, Artificial Sequence
  Description of Artificial Sequence: Synthetic oligonucleotide
  Target: ATXN2; (-) strand; PAM type: NRG; PAM sequence: GAG
aatgtttgtttgtttgtttt

SEQ ID NO: 28107 - DNA, 20 bp, Artificial Sequence
  Description of Artificial Sequence: Synthetic oligonucleotide
  Target: ATXN2; (-) strand; PAM type: NRG; PAM sequence: AAG
ttgtttatctcagttgtcat

SEQ ID NO: 28108 - DNA, 20 bp, Artificial Sequence
  Description of Artificial Sequence: Synthetic oligonucleotide
  Target: ATXN2; (-) strand; PAM type: NRG; PAM sequence: CAG
gtttggtttgttgtttatct

SEQ ID NO: 28109 - DNA, 20 bp, Artificial Sequence
  Description of Artificial Sequence: Synthetic oligonucleotide
  Target: ATXN2; (-) strand; PAM type: NRG; PAM sequence: TGG
gtgacataaattatgtggtt

SEQ ID NO: 28110 - DNA, 20 bp, Artificial Sequence
  Description of Artificial Sequence: Synthetic oligonucleotide
  Target: ATXN2; (-) strand; PAM type: NRG; PAM sequence: TGG
ctgcagtgacataaattatg

SEQ ID NO: 28111 - DNA, 20 bp, Artificial Sequence
  Description of Artificial Sequence: Synthetic oligonucleotide
  Target: ATXN2; (-) strand; PAM type: NRG; PAM sequence: CAG
atgttcttaacattatactg

SEQ ID NO: 28112 - DNA, 20 bp, Artificial Sequence
  Description of Artificial Sequence: Synthetic oligonucleotide
  Target: ATXN2; (-) strand; PAM type: NRG; PAM sequence: TAG
ctaaagtgaggacacaaatc

SEQ ID NO: 28113 - DNA, 20 bp, Artificial Sequence
  Description of Artificial Sequence: Synthetic oligonucleotide
  Target: ATXN2; (-) strand; PAM type: NRG; PAM sequence: AGG
ttaggaaacttgctaaagtg

SEQ ID NO: 28114 - DNA, 20 bp, Artificial Sequence
  Description of Artificial Sequence: Synthetic oligonucleotide
  Target: ATXN2; (-) strand; PAM type: NRG; PAM sequence: GAG
tttaggaaacttgctaaagt

SEQ ID NO: 28115 - DNA, 20 bp, Artificial Sequence
  Description of Artificial Sequence: Synthetic oligonucleotide
  Target: ATXN2; (-) strand; PAM type: NRG; PAM sequence: AAG
catatttaggaaacttgcta

SEQ ID NO: 28116 - DNA, 20 bp, Artificial Sequence
  Description of Artificial Sequence: Synthetic oligonucleotide
  Target: ATXN2; (-) strand; PAM type: NRG; PAM sequence: AGG
atgaggaaacaggcatattt

SEQ ID NO: 28117 - DNA, 20 bp, Artificial Sequence
  Description of Artificial Sequence: Synthetic oligonucleotide
  Target: ATXN2; (-) strand; PAM type: NRG; PAM sequence: TAG
gatgaggaaacaggcatatt

SEQ ID NO: 28118 - DNA, 20 bp, Artificial Sequence
  Description of Artificial Sequence: Synthetic oligonucleotide
  Target: ATXN2; (-) strand; PAM type: NRG; PAM sequence: AGG
cacgtcatagatgaggaaac

SEQ ID NO: 28119 - DNA, 20 bp, Artificial Sequence
  Description of Artificial Sequence: Synthetic oligonucleotide
  Target: ATXN2; (-) strand; PAM type: NRG; PAM sequence: CAG
ccacgtcatagatgaggaaa

SEQ ID NO: 28120 - DNA, 20 bp, Artificial Sequence
  Description of Artificial Sequence: Synthetic oligonucleotide
  Target: ATXN2; (-) strand; PAM type: NRG; PAM sequence: AGG
tattatccacgtcatagatg

SEQ ID NO: 28121 - DNA, 20 bp, Artificial Sequence
  Description of Artificial Sequence: Synthetic oligonucleotide
  Target: ATXN2; (-) strand; PAM type: NRG; PAM sequence: GAG
ctattatccacgtcatagat

SEQ ID NO: 28122 - DNA, 20 bp, Artificial Sequence
  Description of Artificial Sequence: Synthetic oligonucleotide
  Target: ATXN2; (-) strand; PAM type: NRG; PAM sequence: TAG
tacagctattatccacgtca

SEQ ID NO: 28123 - DNA, 20 bp, Artificial Sequence
  Description of Artificial Sequence: Synthetic oligonucleotide
  Target: ATXN2; (-) strand; PAM type: NRG; PAM sequence: CAG
agttgtttctgtagtagata

SEQ ID NO: 28124 - DNA, 20 bp, Artificial Sequence
  Description of Artificial Sequence: Synthetic oligonucleotide
  Target: ATXN2; (-) strand; PAM type: NRG; PAM sequence: TAG
atcacaagttgtttctgtag

SEQ ID NO: 28125 - DNA, 20 bp, Artificial Sequence
  Description of Artificial Sequence: Synthetic oligonucleotide
  Target: ATXN2; (-) strand; PAM type: NRG; PAM sequence: TAG
atcatcacaagttgtttctg

SEQ ID NO: 28126 - DNA, 20 bp, Artificial Sequence
  Description of Artificial Sequence: Synthetic oligonucleotide
  Target: ATXN2; (-) strand; PAM type: NRG; PAM sequence: AAG
tttgttcacataatcatcac

SEQ ID NO: 28127 - DNA, 20 bp, Artificial Sequence
  Description of Artificial Sequence: Synthetic oligonucleotide
  Target: ATXN2; (-) strand; PAM type: NRG; PAM sequence: CAG
tgtgccagactctgtgctaa

SEQ ID NO: 28128 - DNA, 20 bp, Artificial Sequence
  Description of Artificial Sequence: Synthetic oligonucleotide
  Target: ATXN2; (-) strand; PAM type: NRG; PAM sequence: CAG
tgagtgcatattctatgtgc

SEQ ID NO: 28129 - DNA, 20 bp, Artificial Sequence
  Description of Artificial Sequence: Synthetic oligonucleotide
  Target: ATXN2; (-) strand; PAM type: NRG; PAM sequence: GAG
gataatattaactaaaattt

SEQ ID NO: 28130 - DNA, 20 bp, Artificial Sequence
  Description of Artificial Sequence: Synthetic oligonucleotide
  Target: ATXN2; (-) strand; PAM type: NRG; PAM sequence: AGG
aatagtctgtcaaattatta

SEQ ID NO: 28131 - DNA, 20 bp, Artificial Sequence
  Description of Artificial Sequence: Synthetic oligonucleotide
  Target: ATXN2; (-) strand; PAM type: NRG; PAM sequence: AAG
taatagtctgtcaaattatt

SEQ ID NO: 28132 - DNA, 20 bp, Artificial Sequence
  Description of Artificial Sequence: Synthetic oligonucleotide
  Target: ATXN2; (-) strand; PAM type: NRG; PAM sequence: TAG
tttataattctcttctgtaa

SEQ ID NO: 28133 - DNA, 20 bp, Artificial Sequence
  Description of Artificial Sequence: Synthetic oligonucleotide
  Target: ATXN2; (-) strand; PAM type: NRG; PAM sequence: GAG
tatgaattgatttcatttct

SEQ ID NO: 28134 - DNA, 20 bp, Artificial Sequence
  Description of Artificial Sequence: Synthetic oligonucleotide
  Target: ATXN2; (-) strand; PAM type: NRG; PAM sequence: AAG
atgacattgtattttcctaa

SEQ ID NO: 28135 - DNA, 20 bp, Artificial Sequence
  Description of Artificial Sequence: Synthetic oligonucleotide
  Target: ATXN2; (-) strand; PAM type: NRG; PAM sequence: GAG
tagaagtggatgaatgatta

SEQ ID NO: 28136 - DNA, 20 bp, Artificial Sequence
  Description of Artificial Sequence: Synthetic oligonucleotide
  Target: ATXN2; (-) strand; PAM type: NRG; PAM sequence: TAG
aatagaagtggatgaatgat

SEQ ID NO: 28137 - DNA, 20 bp, Artificial Sequence
  Description of Artificial Sequence: Synthetic oligonucleotide
  Target: ATXN2; (-) strand; PAM type: NRG; PAM sequence: TGG
agtgttttttataatagaag

SEQ ID NO: 28138 - DNA, 20 bp, Artificial Sequence
  Description of Artificial Sequence: Synthetic oligonucleotide
  Target: ATXN2; (-) strand; PAM type: NRG; PAM sequence: AAG
tagagtgttttttataatag

SEQ ID NO: 28139 - DNA, 20 bp, Artificial Sequence
  Description of Artificial Sequence: Synthetic oligonucleotide
  Target: ATXN2; (-) strand; PAM type: NRG; PAM sequence: TAG
agatagagtgttttttataa

SEQ ID NO: 28140 - DNA, 20 bp, Artificial Sequence
  Description of Artificial Sequence: Synthetic oligonucleotide
  Target: ATXN2; (-) strand; PAM type: NRG; PAM sequence: GAG
acatcttgaatggatagata

SEQ ID NO: 28141 - DNA, 20 bp, Artificial Sequence
  Description of Artificial Sequence: Synthetic oligonucleotide
  Target: ATXN2; (-) strand; PAM type: NRG; PAM sequence: TAG
ccacatcttgaatggataga

SEQ ID NO: 28142 - DNA, 20 bp, Artificial Sequence
  Description of Artificial Sequence: Synthetic oligonucleotide
  Target: ATXN2; (-) strand; PAM type: NRG; PAM sequence: TAG
ttttccacatcttgaatgga

SEQ ID NO: 28143 - DNA, 20 bp, Artificial Sequence
  Description of Artificial Sequence: Synthetic oligonucleotide
  Target: ATXN2; (-) strand; PAM type: NRG; PAM sequence: TGG
gtacttttccacatcttgaa

SEQ ID NO: 28144 - DNA, 20 bp, Artificial Sequence
  Description of Artificial Sequence: Synthetic oligonucleotide
  Target: ATXN2; (-) strand; PAM type: NRG; PAM sequence: TAG
tctctgctgttatcatttga

SEQ ID NO: 28145 - DNA, 20 bp, Artificial Sequence
  Description of Artificial Sequence: Synthetic oligonucleotide
  Target: ATXN2; (-) strand; PAM type: NRG; PAM sequence: TAG
gaattggcaactgcctgaaa

SEQ ID NO: 28146 - DNA, 20 bp, Artificial Sequence
  Description of Artificial Sequence: Synthetic oligonucleotide
  Target: ATXN2; (-) strand; PAM type: NRG; PAM sequence: TGG
tcccctttctgtctcagaat

SEQ ID NO: 28147 - DNA, 20 bp, Artificial Sequence
  Description of Artificial Sequence: Synthetic oligonucleotide
  Target: ATXN2; (-) strand; PAM type: NRG; PAM sequence: CAG
tcacagtcccctttctgtct

SEQ ID NO: 28148 - DNA, 20 bp, Artificial Sequence
  Description of Artificial Sequence: Synthetic oligonucleotide
  Target: ATXN2; (-) strand; PAM type: NRG; PAM sequence: CAG
tgctttattttcttgcctca

SEQ ID NO: 28149 - DNA, 20 bp, Artificial Sequence
  Description of Artificial Sequence: Synthetic oligonucleotide
  Target: ATXN2; (-) strand; PAM type: NRG; PAM sequence: AAG
cctgggcaacagaataaaaa

SEQ ID NO: 28150 - DNA, 20 bp, Artificial Sequence
  Description of Artificial Sequence: Synthetic oligonucleotide
  Target: ATXN2; (-) strand; PAM type: NRG; PAM sequence: CAG
ctgcactccagcctgggcaa

SEQ ID NO: 28151 - DNA, 20 bp, Artificial Sequence
  Description of Artificial Sequence: Synthetic oligonucleotide
  Target: ATXN2; (-) strand; PAM type: NRG; PAM sequence: GGG
atgccactgcactccagcct

SEQ ID NO: 28152 - DNA, 20 bp, Artificial Sequence
  Description of Artificial Sequence: Synthetic oligonucleotide
  Target: ATXN2; (-) strand; PAM type: NRG; PAM sequence: TGG
catgccactgcactccagcc

SEQ ID NO: 28153 - DNA, 20 bp, Artificial Sequence
  Description of Artificial Sequence: Synthetic oligonucleotide
  Target: ATXN2; (-) strand; PAM type: NRG; PAM sequence: CAG
gagatcatgccactgcactc

SEQ ID NO: 28154 - DNA, 20 bp, Artificial Sequence
  Description of Artificial Sequence: Synthetic oligonucleotide
  Target: ATXN2; (-) strand; PAM type: NRG; PAM sequence: GAG
acccgggaggcagagattgc

SEQ ID NO: 28155 - DNA, 20 bp, Artificial Sequence
  Description of Artificial Sequence: Synthetic oligonucleotide
  Target: ATXN2; (-) strand; PAM type: NRG; PAM sequence: GAG
tcgcttgaacccgggaggca

SEQ ID NO: 28156 - DNA, 20 bp, Artificial Sequence
  Description of Artificial Sequence: Synthetic oligonucleotide
  Target: ATXN2; (-) strand; PAM type: NRG; PAM sequence: CAG
aatcgcttgaacccgggagg

SEQ ID NO: 28157 - DNA, 20 bp, Artificial Sequence
  Description of Artificial Sequence: Synthetic oligonucleotide
  Target: ATXN2; (-) strand; PAM type: NRG; PAM sequence: AGG
aagaatcgcttgaacccggg

SEQ ID NO: 28158 - DNA, 20 bp, Artificial Sequence
  Description of Artificial Sequence: Synthetic oligonucleotide
  Target: ATXN2; (-) strand; PAM type: NRG; PAM sequence: GAG
gaagaatcgcttgaacccgg

SEQ ID NO: 28159 - DNA, 20 bp, Artificial Sequence
  Description of Artificial Sequence: Synthetic oligonucleotide
  Target: ATXN2; (-) strand; PAM type: NRG; PAM sequence: GGG
cagaagaatcgcttgaaccc

SEQ ID NO: 28160 - DNA, 20 bp, Artificial Sequence
  Description of Artificial Sequence: Synthetic oligonucleotide
  Target: ATXN2; (-) strand; PAM type: NRG; PAM sequence: CGG
gcagaagaatcgcttgaacc

SEQ ID NO: 28161 - DNA, 20 bp, Artificial Sequence
  Description of Artificial Sequence: Synthetic oligonucleotide
  Target: ATXN2; (-) strand; PAM type: NRG; PAM sequence: AAG
ttggggagaggctgaggcag

SEQ ID NO: 28162 - DNA, 20 bp, Artificial Sequence
  Description of Artificial Sequence: Synthetic oligonucleotide
  Target: ATXN2; (-) strand; PAM type: NRG; PAM sequence: CAG
tacttggggagaggctgagg

SEQ ID NO: 28163 - DNA, 20 bp, Artificial Sequence
  Description of Artificial Sequence: Synthetic oligonucleotide
  Target: ATXN2; (-) strand; PAM type: NRG; PAM sequence: AGG
agctacttggggagaggctg

SEQ ID NO: 28164 - DNA, 20 bp, Artificial Sequence
  Description of Artificial Sequence: Synthetic oligonucleotide
  Target: ATXN2; (-) strand; PAM type: NRG; PAM sequence: GAG
cagctacttggggagaggct

SEQ ID NO: 28165 - DNA, 20 bp, Artificial Sequence
  Description of Artificial Sequence: Synthetic oligonucleotide
  Target: ATXN2; (-) strand; PAM type: NRG; PAM sequence: AGG
aatcccagctacttggggag

SEQ ID NO: 28166 - DNA, 20 bp, Artificial Sequence
  Description of Artificial Sequence: Synthetic oligonucleotide
  Target: ATXN2; (-) strand; PAM type: NRG; PAM sequence: GAG
taatcccagctacttgggga

SEQ ID NO: 28167 - DNA, 20 bp, Artificial Sequence
  Description of Artificial Sequence: Synthetic oligonucleotide
  Target: ATXN2; (-) strand; PAM type: NRG; PAM sequence: GAG
tataatcccagctacttggg

SEQ ID NO: 28168 - DNA, 20 bp, Artificial Sequence
  Description of Artificial Sequence: Synthetic oligonucleotide
  Target: ATXN2; (-) strand; PAM type: NRG; PAM sequence: GGG
tctataatcccagctacttg

SEQ ID NO: 28169 - DNA, 20 bp, Artificial Sequence
  Description of Artificial Sequence: Synthetic oligonucleotide
  Target: ATXN2; (-) strand; PAM type: NRG; PAM sequence: GGG
gtctataatcccagctactt

SEQ ID NO: 28170 - DNA, 20 bp, Artificial Sequence
  Description of Artificial Sequence: Synthetic oligonucleotide
  Target: ATXN2; (-) strand; PAM type: NRG; PAM sequence: TGG
tgtctataatcccagctact

SEQ ID NO: 28171 - DNA, 20 bp, Artificial Sequence
  Description of Artificial Sequence: Synthetic oligonucleotide
  Target: ATXN2; (-) strand; PAM type: NRG; PAM sequence: CAG
atggcacatgtctataatcc

SEQ ID NO: 28172 - DNA, 20 bp, Artificial Sequence
  Description of Artificial Sequence: Synthetic oligonucleotide
  Target: ATXN2; (-) strand; PAM type: NRG; PAM sequence: TGG
aaaaaattagcgggacgtga

SEQ ID NO: 28173 - DNA, 20 bp, Artificial Sequence
  Description of Artificial Sequence: Synthetic oligonucleotide
  Target: ATXN2; (-) strand; PAM type: NRG; PAM sequence: GGG
taaaaaagtaaaaaattagc

SEQ ID NO: 28174 - DNA, 20 bp, Artificial Sequence
  Description of Artificial Sequence: Synthetic oligonucleotide
  Target: ATXN2; (-) strand; PAM type: NRG; PAM sequence: CGG
ctaaaaaagtaaaaaattag

SEQ ID NO: 28175 - DNA, 20 bp, Artificial Sequence
  Description of Artificial Sequence: Synthetic oligonucleotide
  Target: ATXN2; (-) strand; PAM type: NRG; PAM sequence: TAG
ttactaaaaaagtaaaaaat

SEQ ID NO: 28176 - DNA, 20 bp, Artificial Sequence
  Description of Artificial Sequence: Synthetic oligonucleotide
  Target: ATXN2; (-) strand; PAM type: NRG; PAM sequence: AAG
aaaccccgtctttactaaaa

SEQ ID NO: 28177 - DNA, 20 bp, Artificial Sequence
  Description of Artificial Sequence: Synthetic oligonucleotide
  Target: ATXN2; (-) strand; PAM type: NRG; PAM sequence: TGG
tcaggagttcgagaccagcc

SEQ ID NO: 28178 - DNA, 20 bp, Artificial Sequence
  Description of Artificial Sequence: Synthetic oligonucleotide
  Target: ATXN2; (-) strand; PAM type: NRG; PAM sequence: CAG
tgaggtcaggagttcgagac

SEQ ID NO: 28179 - DNA, 20 bp, Artificial Sequence
  Description of Artificial Sequence: Synthetic oligonucleotide
  Target: ATXN2; (-) strand; PAM type: NRG; PAM sequence: GAG
tcatttgaggtcaggagttc

SEQ ID NO: 28180 - DNA, 20 bp, Artificial Sequence
  Description of Artificial Sequence: Synthetic oligonucleotide
  Target: ATXN2; (-) strand; PAM type: NRG; PAM sequence: GAG
ggcagatcatttgaggtcag

SEQ ID NO: 28181 - DNA, 20 bp, Artificial Sequence
  Description of Artificial Sequence: Synthetic oligonucleotide
  Target: ATXN2; (-) strand; PAM type: NRG; PAM sequence: AGG
tgggcagatcatttgaggtc

SEQ ID NO: 28182 - DNA, 20 bp, Artificial Sequence
  Description of Artificial Sequence: Synthetic oligonucleotide
  Target: ATXN2; (-) strand; PAM type: NRG; PAM sequence: CAG
gtgggcagatcatttgaggt

SEQ ID NO: 28183 - DNA, 20 bp, Artificial Sequence
  Description of Artificial Sequence: Synthetic oligonucleotide
  Target: ATXN2; (-) strand; PAM type: NRG; PAM sequence: AGG
caaggtgggcagatcatttg

SEQ ID NO: 28184 - DNA, 20 bp, Artificial Sequence
  Description of Artificial Sequence: Synthetic oligonucleotide
  Target: ATXN2; (-) strand; PAM type: NRG; PAM sequence: GAG
ccaaggtgggcagatcattt

SEQ ID NO: 28185 - DNA, 20 bp, Artificial Sequence
  Description of Artificial Sequence: Synthetic oligonucleotide
  Target: ATXN2; (-) strand; PAM type: NRG; PAM sequence: CAG
ctttgggagaccaaggtggg

SEQ ID NO: 28186 - DNA, 20 bp, Artificial Sequence
  Description of Artificial Sequence: Synthetic oligonucleotide
  Target: ATXN2; (-) strand; PAM type: NRG; PAM sequence: GGG
tcactttgggagaccaaggt

SEQ ID NO: 28187 - DNA, 20 bp, Artificial Sequence
  Description of Artificial Sequence: Synthetic oligonucleotide
  Target: ATXN2; (-) strand; PAM type: NRG; PAM sequence: TGG
ctcactttgggagaccaagg

SEQ ID NO: 28188 - DNA, 20 bp, Artificial Sequence
  Description of Artificial Sequence: Synthetic oligonucleotide
  Target: ATXN2; (-) strand; PAM type: NRG; PAM sequence: AGG
aatctcactttgggagacca

SEQ ID NO: 28189 - DNA, 20 bp, Artificial Sequence
  Description of Artificial Sequence: Synthetic oligonucleotide
  Target: ATXN2; (-) strand; PAM type: NRG; PAM sequence: AAG
taatctcactttgggagacc

SEQ ID NO: 28190 - DNA, 20 bp, Artificial Sequence
  Description of Artificial Sequence: Synthetic oligonucleotide
  Target: ATXN2; (-) strand; PAM type: NRG; PAM sequence: GAG
ctcctgtaatctcactttgg

SEQ ID NO: 28191 - DNA, 20 bp, Artificial Sequence
  Description of Artificial Sequence: Synthetic oligonucleotide
  Target: ATXN2; (-) strand; PAM type: NRG; PAM sequence: GGG
cactcctgtaatctcacttt

SEQ ID NO: 28192 - DNA, 20 bp, Artificial Sequence
  Description of Artificial Sequence: Synthetic oligonucleotide
  Target: ATXN2; (-) strand; PAM type: NRG; PAM sequence: TGG
tcactcctgtaatctcactt

SEQ ID NO: 28193 - DNA, 20 bp, Artificial Sequence
  Description of Artificial Sequence: Synthetic oligonucleotide
  Target: ATXN2; (-) strand; PAM type: NRG; PAM sequence: TGG
gctttctaggccaggtgcgg

SEQ ID NO: 28194 - DNA, 20 bp, Artificial Sequence
  Description of Artificial Sequence: Synthetic oligonucleotide
  Target: ATXN2; (-) strand; PAM type: NRG; PAM sequence: CGG
tgtgctttctaggccaggtg

SEQ ID NO: 28195 - DNA, 20 bp, Artificial Sequence
  Description of Artificial Sequence: Synthetic oligonucleotide
  Target: ATXN2; (-) strand; PAM type: NRG; PAM sequence: AGG
gaatttgtgctttctaggcc

SEQ ID NO: 28196 - DNA, 20 bp, Artificial Sequence
  Description of Artificial Sequence: Synthetic oligonucleotide
  Target: ATXN2; (-) strand; PAM type: NRG; PAM sequence: CAG
agaatttgtgctttctaggc

SEQ ID NO: 28197 - DNA, 20 bp, Artificial Sequence
  Description of Artificial Sequence: Synthetic oligonucleotide
  Target: ATXN2; (-) strand; PAM type: NRG; PAM sequence: AGG
cttgagaatttgtgctttct

SEQ ID NO: 28198 - DNA, 20 bp, Artificial Sequence
  Description of Artificial Sequence: Synthetic oligonucleotide
  Target: ATXN2; (-) strand; PAM type: NRG; PAM sequence: TAG
ccttgagaatttgtgctttc

SEQ ID NO: 28199 - DNA, 20 bp, Artificial Sequence
  Description of Artificial Sequence: Synthetic oligonucleotide
  Target: ATXN2; (-) strand; PAM type: NRG; PAM sequence: GAG
tggctctgttctgtggcctt

SEQ ID NO: 28200 - DNA, 20 bp, Artificial Sequence
  Description of Artificial Sequence: Synthetic oligonucleotide
  Target: ATXN2; (-) strand; PAM type: NRG; PAM sequence: TGG
ccaggagtggctctgttctg

SEQ ID NO: 28201 - DNA, 20 bp, Artificial Sequence
  Description of Artificial Sequence: Synthetic oligonucleotide
  Target: ATXN2; (-) strand; PAM type: NRG; PAM sequence: TGG
atgtgatgagatcccaggag

SEQ ID NO: 28202 - DNA, 20 bp, Artificial Sequence
  Description of Artificial Sequence: Synthetic oligonucleotide
  Target: ATXN2; (-) strand; PAM type: NRG; PAM sequence: GAG
ttcatgtgatgagatcccag

SEQ ID NO: 28203 - DNA, 20 bp, Artificial Sequence
  Description of Artificial Sequence: Synthetic oligonucleotide
  Target: ATXN2; (-) strand; PAM type: NRG; PAM sequence: AGG
gtttcatgtgatgagatccc

SEQ ID NO: 28204 - DNA, 20 bp, Artificial Sequence
  Description of Artificial Sequence: Synthetic oligonucleotide
  Target: ATXN2; (-) strand; PAM type: NRG; PAM sequence: CAG
ggtttcatgtgatgagatcc

SEQ ID NO: 28205 - DNA, 20 bp, Artificial Sequence
  Description of Artificial Sequence: Synthetic oligonucleotide
  Target: ATXN2; (-) strand; PAM type: NRG; PAM sequence: GAG
agctatgggtttcatgtgat

SEQ ID NO: 28206 - DNA, 20 bp, Artificial Sequence
  Description of Artificial Sequence: Synthetic oligonucleotide
  Target: ATXN2; (-) strand; PAM type: NRG; PAM sequence: GGG
acagtcagggtgtgagctat

SEQ ID NO: 28207 - DNA, 20 bp, Artificial Sequence
  Description of Artificial Sequence: Synthetic oligonucleotide
  Target: ATXN2; (-) strand; PAM type: NRG; PAM sequence: TGG
gacagtcagggtgtgagcta

SEQ ID NO: 28208 - DNA, 20 bp, Artificial Sequence
  Description of Artificial Sequence: Synthetic oligonucleotide
  Target: ATXN2; (-) strand; PAM type: NRG; PAM sequence: GAG
gctctggacagtcagggtgt

SEQ ID NO: 28209 - DNA, 20 bp, Artificial Sequence
  Description of Artificial Sequence: Synthetic oligonucleotide
  Target: ATXN2; (-) strand; PAM type: NRG; PAM sequence: GGG
ggtgaggctctggacagtca

SEQ ID NO: 28210 - DNA, 20 bp, Artificial Sequence
  Description of Artificial Sequence: Synthetic oligonucleotide
  Target: ATXN2; (-) strand; PAM type: NRG; PAM sequence: AGG
gggtgaggctctggacagtc

SEQ ID NO: 28211 - DNA, 20 bp, Artificial Sequence
  Description of Artificial Sequence: Synthetic oligonucleotide
  Target: ATXN2; (-) strand; PAM type: NRG; PAM sequence: CAG
tgggtgaggctctggacagt

SEQ ID NO: 28212 - DNA, 20 bp, Artificial Sequence
  Description of Artificial Sequence: Synthetic oligonucleotide
  Target: ATXN2; (-) strand; PAM type: NRG; PAM sequence: CAG
agcctgggtgaggctctgga

SEQ ID NO: 28213 - DNA, 20 bp, Artificial Sequence
  Description of Artificial Sequence: Synthetic oligonucleotide
  Target: ATXN2; (-) strand; PAM type: NRG; PAM sequence: TGG
aattagcctgggtgaggctc

SEQ ID NO: 28214 - DNA, 20 bp, Artificial Sequence
  Description of Artificial Sequence: Synthetic oligonucleotide
  Target: ATXN2; (-) strand; PAM type: NRG; PAM sequence: AGG
aattataattagcctgggtg

SEQ ID NO: 28215 - DNA, 20 bp, Artificial Sequence
  Description of Artificial Sequence: Synthetic oligonucleotide
  Target: ATXN2; (-) strand; PAM type: NRG; PAM sequence: GAG
taattataattagcctgggt

SEQ ID NO: 28216 - DNA, 20 bp, Artificial Sequence
  Description of Artificial Sequence: Synthetic oligonucleotide
  Target: ATXN2; (-) strand; PAM type: NRG; PAM sequence: GGG
ggtttaattataattagcct

SEQ ID NO: 28217 - DNA, 20 bp, Artificial Sequence
  Description of Artificial Sequence: Synthetic oligonucleotide
  Target: ATXN2; (-) strand; PAM type: NRG; PAM sequence: TGG
tggtttaattataattagcc

SEQ ID NO: 28218 - DNA, 20 bp, Artificial Sequence
  Description of Artificial Sequence: Synthetic oligonucleotide
  Target: ATXN2; (-) strand; PAM type: NRG; PAM sequence: TAG
gatcctggtttaattataat

SEQ ID NO: 28219 - DNA, 20 bp, Artificial Sequence
  Description of Artificial Sequence: Synthetic oligonucleotide
  Target: ATXN2; (-) strand; PAM type: NRG; PAM sequence: TGG
gttctcacttctagggatcc

SEQ ID NO: 28220 - DNA, 20 bp, Artificial Sequence
  Description of Artificial Sequence: Synthetic oligonucleotide
  Target: ATXN2; (-) strand; PAM type: NRG; PAM sequence: GGG
taaaaatgttctcacttcta

SEQ ID NO: 28221 - DNA, 20 bp, Artificial Sequence
  Description of Artificial Sequence: Synthetic oligonucleotide
  Target: ATXN2; (-) strand; PAM type: NRG; PAM sequence: AGG
ttaaaaatgttctcacttct

SEQ ID NO: 28222 - DNA, 20 bp, Artificial Sequence
  Description of Artificial Sequence: Synthetic oligonucleotide
  Target: ATXN2; (-) strand; PAM type: NRG; PAM sequence: TAG
tttaaaaatgttctcacttc

SEQ ID NO: 28223 - DNA, 20 bp, Artificial Sequence
  Description of Artificial Sequence: Synthetic oligonucleotide
  Target: ATXN2; (-) strand; PAM type: NRG; PAM sequence: GAG
ttcacgtttagtcacctggg

SEQ ID NO: 28224 - DNA, 20 bp, Artificial Sequence
  Description of Artificial Sequence: Synthetic oligonucleotide
  Target: ATXN2; (-) strand; PAM type: NRG; PAM sequence: GGG
ggttcacgtttagtcacctg

SEQ ID NO: 28225 - DNA, 20 bp, Artificial Sequence
  Description of Artificial Sequence: Synthetic oligonucleotide
  Target: ATXN2; (-) strand; PAM type: NRG; PAM sequence: GGG
gggttcacgtttagtcacct

SEQ ID NO: 28226 - DNA, 20 bp, Artificial Sequence
  Description of Artificial Sequence: Synthetic oligonucleotide
  Target: ATXN2; (-) strand; PAM type: NRG; PAM sequence: TGG
tgggttcacgtttagtcacc

SEQ ID NO: 28227 - DNA, 20 bp, Artificial Sequence
  Description of Artificial Sequence: Synthetic oligonucleotide
  Target: ATXN2; (-) strand; PAM type: NRG; PAM sequence: TAG
cttaatgctgggttcacgtt

SEQ ID NO: 28228 - DNA, 20 bp, Artificial Sequence
  Description of Artificial Sequence: Synthetic oligonucleotide
  Target: ATXN2; (-) strand; PAM type: NRG; PAM sequence: GGG
aatcaatgcttcttaatgct

SEQ ID NO: 28229 - DNA, 20 bp, Artificial Sequence
  Description of Artificial Sequence: Synthetic oligonucleotide
  Target: ATXN2; (-) strand; PAM type: NRG; PAM sequence: TGG
taatcaatgcttcttaatgc

SEQ ID NO: 28230 - DNA, 20 bp, Artificial Sequence
  Description of Artificial Sequence: Synthetic oligonucleotide
  Target: ATXN2; (-) strand; PAM type: NRG; PAM sequence: TGG
tcccaaagtaaaggaaggta

SEQ ID NO: 28231 - DNA, 20 bp, Artificial Sequence
  Description of Artificial Sequence: Synthetic oligonucleotide
  Target: ATXN2; (-) strand; PAM type: NRG; PAM sequence: AGG
attactcccaaagtaaagga

SEQ ID NO: 28232 - DNA, 20 bp, Artificial Sequence
  Description of Artificial Sequence: Synthetic oligonucleotide
  Target: ATXN2; (-) strand; PAM type: NRG; PAM sequence: AAG
gattactcccaaagtaaagg

SEQ ID NO: 28233 - DNA, 20 bp, Artificial Sequence
  Description of Artificial Sequence: Synthetic oligonucleotide
  Target: ATXN2; (-) strand; PAM type: NRG; PAM sequence: AGG
tcagattactcccaaagtaa

SEQ ID NO: 28234 - DNA, 20 bp, Artificial Sequence
  Description of Artificial Sequence: Synthetic oligonucleotide
  Target: ATXN2; (-) strand; PAM type: NRG; PAM sequence: AAG
ctcagattactcccaaagta

SEQ ID NO: 28235 - DNA, 20 bp, Artificial Sequence
  Description of Artificial Sequence: Synthetic oligonucleotide
  Target: ATXN2; (-) strand; PAM type: NRG; PAM sequence: AAG
acttactcagattactccca

SEQ ID NO: 28236 - DNA, 20 bp, Artificial Sequence
  Description of Artificial Sequence: Synthetic oligonucleotide
  Target: ATXN2; (-) strand; PAM type: NRG; PAM sequence: CAG
ttttttattagagacttact

SEQ ID NO: 28237 - DNA, 20 bp, Artificial Sequence
  Description of Artificial Sequence: Synthetic oligonucleotide
  Target: ATXN2; (-) strand; PAM type: NRG; PAM sequence: GAG
attttttttattttttatta

SEQ ID NO: 28238 - DNA, 20 bp, Artificial Sequence
  Description of Artificial Sequence: Synthetic oligonucleotide
  Target: ATXN2; (-) strand; PAM type: NRG; PAM sequence: TAG
agattttttttattttttat

SEQ ID NO: 28239 - DNA, 20 bp, Artificial Sequence
  Description of Artificial Sequence: Synthetic oligonucleotide
  Target: ATXN2; (-) strand; PAM type: NRG; PAM sequence: TAG
aaggcatttattactgcatc

SEQ ID NO: 28240 - DNA, 20 bp, Artificial Sequence
  Description of Artificial Sequence: Synthetic oligonucleotide
  Target: ATXN2; (-) strand; PAM type: NRG; PAM sequence: AGG
tttccttaataacaaaatta

SEQ ID NO: 28241 - DNA, 20 bp, Artificial Sequence
  Description of Artificial Sequence: Synthetic oligonucleotide
  Target: ATXN2; (-) strand; PAM type: NRG; PAM sequence: AAG
ttttccttaataacaaaatt

SEQ ID NO: 28242 - DNA, 20 bp, Artificial Sequence
  Description of Artificial Sequence: Synthetic oligonucleotide
  Target: ATXN2; (-) strand; PAM type: NRG; PAM sequence: TGG
accatgttggccaggccgca

SEQ ID NO: 28243 - DNA, 20 bp, Artificial Sequence
  Description of Artificial Sequence: Synthetic oligonucleotide
  Target: ATXN2; (-) strand; PAM type: NRG; PAM sequence: AGG
tgggtttcaccatgttggcc

SEQ ID NO: 28244 - DNA, 20 bp, Artificial Sequence
  Description of Artificial Sequence: Synthetic oligonucleotide
  Target: ATXN2; (-) strand; PAM type: NRG; PAM sequence: CAG
ctgggtttcaccatgttggc

SEQ ID NO: 28245 - DNA, 20 bp, Artificial Sequence
  Description of Artificial Sequence: Synthetic oligonucleotide
  Target: ATXN2; (-) strand; PAM type: NRG; PAM sequence: TGG
cagactgggtttcaccatgt

SEQ ID NO: 28246 - DNA, 20 bp, Artificial Sequence
  Description of Artificial Sequence: Synthetic oligonucleotide
  Target: ATXN2; (-) strand; PAM type: NRG; PAM sequence: GGG
ttgtattcttagtacagact

SEQ ID NO: 28247 - DNA, 20 bp, Artificial Sequence
  Description of Artificial Sequence: Synthetic oligonucleotide
  Target: ATXN2; (-) strand; PAM type: NRG; PAM sequence: TGG
tttgtattcttagtacagac

SEQ ID NO: 28248 - DNA, 20 bp, Artificial Sequence
  Description of Artificial Sequence: Synthetic oligonucleotide
  Target: ATXN2; (-) strand; PAM type: NRG; PAM sequence: CAG
ttttgtttgtattcttagta

SEQ ID NO: 28249 - DNA, 20 bp, Artificial Sequence
  Description of Artificial Sequence: Synthetic oligonucleotide
  Target: ATXN2; (-) strand; PAM type: NRG; PAM sequence: TAG
tttttttttgtttgtattct

SEQ ID NO: 28250 - DNA, 20 bp, Artificial Sequence
  Description of Artificial Sequence: Synthetic oligonucleotide
  Target: ATXN2; (-) strand; PAM type: NRG; PAM sequence: AGG
tcccgagtagctgggattat

SEQ ID NO: 28251 - DNA, 20 bp, Artificial Sequence
  Description of Artificial Sequence: Synthetic oligonucleotide
  Target: ATXN2; (-) strand; PAM type: NRG; PAM sequence: TAG
ctcccgagtagctgggatta

SEQ ID NO: 28252 - DNA, 20 bp, Artificial Sequence
  Description of Artificial Sequence: Synthetic oligonucleotide
  Target: ATXN2; (-) strand; PAM type: NRG; PAM sequence: GGG
cctcagcctcccgagtagct

SEQ ID NO: 28253 - DNA, 20 bp, Artificial Sequence
  Description of Artificial Sequence: Synthetic oligonucleotide
  Target: ATXN2; (-) strand; PAM type: NRG; PAM sequence: TGG
gcctcagcctcccgagtagc

SEQ ID NO: 28254 - DNA, 20 bp, Artificial Sequence
  Description of Artificial Sequence: Synthetic oligonucleotide
  Target: ATXN2; (-) strand; PAM type: NRG; PAM sequence: TAG
tcctgcctcagcctcccgag

SEQ ID NO: 28255 - DNA, 20 bp, Artificial Sequence
  Description of Artificial Sequence: Synthetic oligonucleotide
  Target: ATXN2; (-) strand; PAM type: NRG; PAM sequence: GAG
ttctcctgcctcagcctccc

SEQ ID NO: 28256 - DNA, 20 bp, Artificial Sequence
  Description of Artificial Sequence: Synthetic oligonucleotide
  Target: ATXN2; (-) strand; PAM type: NRG; PAM sequence: CAG
tttaagcgattctcctgcct

SEQ ID NO: 28257 - DNA, 20 bp, Artificial Sequence
  Description of Artificial Sequence: Synthetic oligonucleotide
  Target: ATXN2; (-) strand; PAM type: NRG; PAM sequence: AAG
aacctctgcctcctgggttt

SEQ ID NO: 28258 - DNA, 20 bp, Artificial Sequence
  Description of Artificial Sequence: Synthetic oligonucleotide
  Target: ATXN2; (-) strand; PAM type: NRG; PAM sequence: GGG
cactgcaacctctgcctcct

SEQ ID NO: 28259 - DNA, 20 bp, Artificial Sequence
  Description of Artificial Sequence: Synthetic oligonucleotide
  Target: ATXN2; (-) strand; PAM type: NRG; PAM sequence: TGG
tcactgcaacctctgcctcc

SEQ ID NO: 28260 - DNA, 20 bp, Artificial Sequence
  Description of Artificial Sequence: Synthetic oligonucleotide
  Target: ATXN2; (-) strand; PAM type: NRG; PAM sequence: CGG
ggagtgcagtggtgcgatct

SEQ ID NO: 28261 - DNA, 20 bp, Artificial Sequence
  Description of Artificial Sequence: Synthetic oligonucleotide
  Target: ATXN2; (-) strand; PAM type: NRG; PAM sequence: TGG
tttcccaggctggagtgcag

SEQ ID NO: 28262 - DNA, 20 bp, Artificial Sequence
  Description of Artificial Sequence: Synthetic oligonucleotide
  Target: ATXN2; (-) strand; PAM type: NRG; PAM sequence: CAG
ctatttcccaggctggagtg

SEQ ID NO: 28263 - DNA, 20 bp, Artificial Sequence
  Description of Artificial Sequence: Synthetic oligonucleotide
  Target: ATXN2; (-) strand; PAM type: NRG; PAM sequence: GAG
tcactctatttcccaggctg

SEQ ID NO: 28264 - DNA, 20 bp, Artificial Sequence
  Description of Artificial Sequence: Synthetic oligonucleotide
  Target: ATXN2; (-) strand; PAM type: NRG; PAM sequence: TGG
tctcactctatttcccaggc

SEQ ID NO: 28265 - DNA, 20 bp, Artificial Sequence
  Description of Artificial Sequence: Synthetic oligonucleotide
  Target: ATXN2; (-) strand; PAM type: NRG; PAM sequence: AGG
ggagtctcactctatttccc

SEQ ID NO: 28266 - DNA, 20 bp, Artificial Sequence
  Description of Artificial Sequence: Synthetic oligonucleotide
  Target: ATXN2; (-) strand; PAM type: NRG; PAM sequence: CAG
tggagtctcactctatttcc

SEQ ID NO: 28267 - DNA, 20 bp, Artificial Sequence
  Description of Artificial Sequence: Synthetic oligonucleotide
  Target: ATXN2; (-) strand; PAM type: NRG; PAM sequence: GAG
tttttttttatttcgagatg

SEQ ID NO: 28268 - DNA, 20 bp, Artificial Sequence
  Description of Artificial Sequence: Synthetic oligonucleotide
  Target: ATXN2; (-) strand; PAM type: NRG; PAM sequence: TGG
tttttttttttatttcgaga

SEQ ID NO: 28269 - DNA, 20 bp, Artificial Sequence
  Description of Artificial Sequence: Synthetic oligonucleotide
  Target: ATXN2; (-) strand; PAM type: NRG; PAM sequence: GAG
cttctttttttttttatttc

SEQ ID NO: 28270 - DNA, 20 bp, Artificial Sequence
  Description of Artificial Sequence: Synthetic oligonucleotide
  Target: ATXN2; (-) strand; PAM type: NRG; PAM sequence: TGG
tttagaattattaattggca

SEQ ID NO: 28271 - DNA, 20 bp, Artificial Sequence
  Description of Artificial Sequence: Synthetic oligonucleotide
  Target: ATXN2; (-) strand; PAM type: NRG; PAM sequence: TGG
accattttagaattattaat

SEQ ID NO: 28272 - DNA, 20 bp, Artificial Sequence
  Description of Artificial Sequence: Synthetic oligonucleotide
  Target: ATXN2; (-) strand; PAM type: NRG; PAM sequence: TAG
cagtatggagaaaaccattt

SEQ ID NO: 28273 - DNA, 20 bp, Artificial Sequence
  Description of Artificial Sequence: Synthetic oligonucleotide
  Target: ATXN2; (-) strand; PAM type: NRG; PAM sequence: GAG
taggaagtactatcagtatg

SEQ ID NO: 28274 - DNA, 20 bp, Artificial Sequence
  Description of Artificial Sequence: Synthetic oligonucleotide
  Target: ATXN2; (-) strand; PAM type: NRG; PAM sequence: TGG
attaggaagtactatcagta

SEQ ID NO: 28275 - DNA, 20 bp, Artificial Sequence
  Description of Artificial Sequence: Synthetic oligonucleotide
  Target: ATXN2; (-) strand; PAM type: NRG; PAM sequence: CAG
tattaattaggaagtactat

SEQ ID NO: 28276 - DNA, 20 bp, Artificial Sequence
  Description of Artificial Sequence: Synthetic oligonucleotide
  Target: ATXN2; (-) strand; PAM type: NRG; PAM sequence: AAG
gaagaaaagtattaattagg

SEQ ID NO: 28277 - DNA, 20 bp, Artificial Sequence
  Description of Artificial Sequence: Synthetic oligonucleotide
  Target: ATXN2; (-) strand; PAM type: NRG; PAM sequence: AGG
aaagaagaaaagtattaatt

SEQ ID NO: 28278 - DNA, 20 bp, Artificial Sequence
  Description of Artificial Sequence: Synthetic oligonucleotide
  Target: ATXN2; (-) strand; PAM type: NRG; PAM sequence: TAG
aaaagaagaaaagtattaat

SEQ ID NO: 28279 - DNA, 20 bp, Artificial Sequence
  Description of Artificial Sequence: Synthetic oligonucleotide
  Target: ATXN2; (-) strand; PAM type: NRG; PAM sequence: AAG
cctcttctataaaagaagaa

SEQ ID NO: 28280 - DNA, 20 bp, Artificial Sequence
  Description of Artificial Sequence: Synthetic oligonucleotide
  Target: ATXN2; (-) strand; PAM type: NRG; PAM sequence: AAG
attgccctcttctataaaag

SEQ ID NO: 28281 - DNA, 20 bp, Artificial Sequence
  Description of Artificial Sequence: Synthetic oligonucleotide
  Target: ATXN2; (-) strand; PAM type: NRG; PAM sequence: AAG
gaaattgccctcttctataa

SEQ ID NO: 28282 - DNA, 20 bp, Artificial Sequence
  Description of Artificial Sequence: Synthetic oligonucleotide
  Target: ATXN2; (-) strand; PAM type: NRG; PAM sequence: CAG
ttaagctaagactatccagg

SEQ ID NO: 28283 - DNA, 20 bp, Artificial Sequence
  Description of Artificial Sequence: Synthetic oligonucleotide
  Target: ATXN2; (-) strand; PAM type: NRG; PAM sequence: AGG
ctcttaagctaagactatcc

SEQ ID NO: 28284 - DNA, 20 bp, Artificial Sequence
  Description of Artificial Sequence: Synthetic oligonucleotide
  Target: ATXN2; (-) strand; PAM type: NRG; PAM sequence: CAG
tctcttaagctaagactatc

SEQ ID NO: 28285 - DNA, 20 bp, Artificial Sequence
  Description of Artificial Sequence: Synthetic oligonucleotide
  Target: ATXN2; (-) strand; PAM type: NRG; PAM sequence: AAG
gacatcaggtctcttaagct

SEQ ID NO: 28286 - DNA, 20 bp, Artificial Sequence
  Description of Artificial Sequence: Synthetic oligonucleotide
  Target: ATXN2; (-) strand; PAM type: NRG; PAM sequence: AAG
tttaggacatcaggtctctt

SEQ ID NO: 28287 - DNA, 20 bp, Artificial Sequence
  Description of Artificial Sequence: Synthetic oligonucleotide
  Target: ATXN2; (-) strand; PAM type: NRG; PAM sequence: AGG
agtcatgtgtttaggacatc

SEQ ID NO: 28288 - DNA, 20 bp, Artificial Sequence
  Description of Artificial Sequence: Synthetic oligonucleotide
  Target: ATXN2; (-) strand; PAM type: NRG; PAM sequence: CAG
aagtcatgtgtttaggacat

SEQ ID NO: 28289 - DNA, 20 bp, Artificial Sequence
  Description of Artificial Sequence: Synthetic oligonucleotide
  Target: ATXN2; (-) strand; PAM type: NRG; PAM sequence: AGG
tagtattaagtcatgtgttt

SEQ ID NO: 28290 - DNA, 20 bp, Artificial Sequence
  Description of Artificial Sequence: Synthetic oligonucleotide
  Target: ATXN2; (-) strand; PAM type: NRG; PAM sequence: TAG
atagtattaagtcatgtgtt

SEQ ID NO: 28291 - DNA, 20 bp, Artificial Sequence
  Description of Artificial Sequence: Synthetic oligonucleotide
  Target: ATXN2; (-) strand; PAM type: NRG; PAM sequence: AAG
agtatcctgaaaatagtatt

SEQ ID NO: 28292 - DNA, 20 bp, Artificial Sequence
  Description of Artificial Sequence: Synthetic oligonucleotide
  Target: ATXN2; (-) strand; PAM type: NRG; PAM sequence: TAG
agtgcgtagtatcctgaaaa

SEQ ID NO: 28293 - DNA, 20 bp, Artificial Sequence
  Description of Artificial Sequence: Synthetic oligonucleotide
  Target: ATXN2; (-) strand; PAM type: NRG; PAM sequence: TAG
atacaattgcgtccagtgcg

SEQ ID NO: 28294 - DNA, 20 bp, Artificial Sequence
  Description of Artificial Sequence: Synthetic oligonucleotide
  Target: ATXN2; (-) strand; PAM type: NRG; PAM sequence: CAG
gtgaattatacaattgcgtc

SEQ ID NO: 28295 - DNA, 20 bp, Artificial Sequence
  Description of Artificial Sequence: Synthetic oligonucleotide
  Target: ATXN2; (-) strand; PAM type: NRG; PAM sequence: TAG
tttcaaaacttacagtggtt

SEQ ID NO: 28296 - DNA, 20 bp, Artificial Sequence
  Description of Artificial Sequence: Synthetic oligonucleotide
  Target: ATXN2; (-) strand; PAM type: NRG; PAM sequence: TGG
tcttatttcaaaacttacag

SEQ ID NO: 28297 - DNA, 20 bp, Artificial Sequence
  Description of Artificial Sequence: Synthetic oligonucleotide
  Target: ATXN2; (-) strand; PAM type: NRG; PAM sequence: CAG
gtatcttatttcaaaactta

SEQ ID NO: 28298 - DNA, 20 bp, Artificial Sequence
  Description of Artificial Sequence: Synthetic oligonucleotide
  Target: ATXN2; (-) strand; PAM type: NRG; PAM sequence: AGG
gtgagccaccacgcctgggc

SEQ ID NO: 28299 - DNA, 20 bp, Artificial Sequence
  Description of Artificial Sequence: Synthetic oligonucleotide
  Target: ATXN2; (-) strand; PAM type: NRG; PAM sequence: CAG
cgtgagccaccacgcctggg

SEQ ID NO: 28300 - DNA, 20 bp, Artificial Sequence
  Description of Artificial Sequence: Synthetic oligonucleotide
  Target: ATXN2; (-) strand; PAM type: NRG; PAM sequence: GGG
aggcgtgagccaccacgcct

SEQ ID NO: 28301 - DNA, 20 bp, Artificial Sequence
  Description of Artificial Sequence: Synthetic oligonucleotide
  Target: ATXN2; (-) strand; PAM type: NRG; PAM sequence: TGG
taggcgtgagccaccacgcc

SEQ ID NO: 28302 - DNA, 20 bp, Artificial Sequence
  Description of Artificial Sequence: Synthetic oligonucleotide
  Target: ATXN2; (-) strand; PAM type: NRG; PAM sequence: GAG
agtgctgggattataggcgt

SEQ ID NO: 28303 - DNA, 20 bp, Artificial Sequence
  Description of Artificial Sequence: Synthetic oligonucleotide
  Target: ATXN2; (-) strand; PAM type: NRG; PAM sequence: AGG
tcccagagtgctgggattat

SEQ ID NO: 28304 - DNA, 20 bp, Artificial Sequence
  Description of Artificial Sequence: Synthetic oligonucleotide
  Target: ATXN2; (-) strand; PAM type: NRG; PAM sequence: TAG
ctcccagagtgctgggatta

SEQ ID NO: 28305 - DNA, 20 bp, Artificial Sequence
  Description of Artificial Sequence: Synthetic oligonucleotide
  Target: ATXN2; (-) strand; PAM type: NRG; PAM sequence: GGG
ccttggcctcccagagtgct

SEQ ID NO: 28306 - DNA, 20 bp, Artificial Sequence
  Description of Artificial Sequence: Synthetic oligonucleotide
  Target: ATXN2; (-) strand; PAM type: NRG; PAM sequence: TGG
gccttggcctcccagagtgc

SEQ ID NO: 28307 - DNA, 20 bp, Artificial Sequence
  Description of Artificial Sequence: Synthetic oligonucleotide
  Target: ATXN2; (-) strand; PAM type: NRG; PAM sequence: GAG
cctcctgccttggcctccca

SEQ ID NO: 28308 - DNA, 20 bp, Artificial Sequence
  Description of Artificial Sequence: Synthetic oligonucleotide
  Target: ATXN2; (-) strand; PAM type: NRG; PAM sequence: CAG
atcctcctgccttggcctcc

SEQ ID NO: 28309 - DNA, 20 bp, Artificial Sequence
  Description of Artificial Sequence: Synthetic oligonucleotide
  Target: ATXN2; (-) strand; PAM type: NRG; PAM sequence: TGG
accttgtgatcctcctgcct

SEQ ID NO: 28310 - DNA, 20 bp, Artificial Sequence
  Description of Artificial Sequence: Synthetic oligonucleotide
  Target: ATXN2; (-) strand; PAM type: NRG; PAM sequence: TGG
tttcactatgttggccaggc

SEQ ID NO: 28311 - DNA, 20 bp, Artificial Sequence
  Description of Artificial Sequence: Synthetic oligonucleotide
  Target: ATXN2; (-) strand; PAM type: NRG; PAM sequence: AGG
ggggtttcactatgttggcc

SEQ ID NO: 28312 - DNA, 20 bp, Artificial Sequence
  Description of Artificial Sequence: Synthetic oligonucleotide
  Target: ATXN2; (-) strand; PAM type: NRG; PAM sequence: CAG
cggggtttcactatgttggc

SEQ ID NO: 28313 - DNA, 20 bp, Artificial Sequence
  Description of Artificial Sequence: Synthetic oligonucleotide
  Target: ATXN2; (-) strand; PAM type: NRG; PAM sequence: TGG
gagacggggtttcactatgt

SEQ ID NO: 28314 - DNA, 20 bp, Artificial Sequence
  Description of Artificial Sequence: Synthetic oligonucleotide
  Target: ATXN2; (-) strand; PAM type: NRG; PAM sequence: GGG
ttgtatttttagtagagacg

SEQ ID NO: 28315 - DNA, 20 bp, Artificial Sequence
  Description of Artificial Sequence: Synthetic oligonucleotide
  Target: ATXN2; (-) strand; PAM type: NRG; PAM sequence: GGG
tttgtatttttagtagagac

SEQ ID NO: 28316 - DNA, 20 bp, Artificial Sequence
  Description of Artificial Sequence: Synthetic oligonucleotide
  Target: ATXN2; (-) strand; PAM type: NRG; PAM sequence: CGG
ttttgtatttttagtagaga

SEQ ID NO: 28317 - DNA, 20 bp, Artificial Sequence
  Description of Artificial Sequence: Synthetic oligonucleotide
  Target: ATXN2; (-) strand; PAM type: NRG; PAM sequence: GAG
taatttttgtatttttagta

SEQ ID NO: 28318 - DNA, 20 bp, Artificial Sequence
  Description of Artificial Sequence: Synthetic oligonucleotide
  Target: ATXN2; (-) strand; PAM type: NRG; PAM sequence: TAG
gctaatttttgtatttttag

SEQ ID NO: 28319 - DNA, 20 bp, Artificial Sequence
  Description of Artificial Sequence: Synthetic oligonucleotide
  Target: ATXN2; (-) strand; PAM type: NRG; PAM sequence: TAG
ccggctaatttttgtatttt

SEQ ID NO: 28320 - DNA, 20 bp, Artificial Sequence
  Description of Artificial Sequence: Synthetic oligonucleotide
  Target: ATXN2; (-) strand; PAM type: NRG; PAM sequence: CGG
gaggcatgtgccaccatgcc

SEQ ID NO: 28321 - DNA, 20 bp, Artificial Sequence
  Description of Artificial Sequence: Synthetic oligonucleotide
  Target: ATXN2; (-) strand; PAM type: NRG; PAM sequence: AGG
tcccgagtagctggttactg

SEQ ID NO: 28322 - DNA, 20 bp, Artificial Sequence
  Description of Artificial Sequence: Synthetic oligonucleotide
  Target: ATXN2; (-) strand; PAM type: NRG; PAM sequence: GAG
ctcccgagtagctggttact

SEQ ID NO: 28323 - DNA, 20 bp, Artificial Sequence
  Description of Artificial Sequence: Synthetic oligonucleotide
  Target: ATXN2; (-) strand; PAM type: NRG; PAM sequence: TGG
gcctcagcctcccgagtagc

SEQ ID NO: 28324 - DNA, 20 bp, Artificial Sequence
  Description of Artificial Sequence: Synthetic oligonucleotide
  Target: ATXN2; (-) strand; PAM type: NRG; PAM sequence: TAG
tcttgcctcagcctcccgag

SEQ ID NO: 28325 - DNA, 20 bp, Artificial Sequence
  Description of Artificial Sequence: Synthetic oligonucleotide
  Target: ATXN2; (-) strand; PAM type: NRG; PAM sequence: GAG
ttctcttgcctcagcctccc

SEQ ID NO: 28326 - DNA, 20 bp, Artificial Sequence
  Description of Artificial Sequence: Synthetic oligonucleotide
  Target: ATXN2; (-) strand; PAM type: NRG; PAM sequence: CAG
ttcaagcgattctcttgcct

SEQ ID NO: 28327 - DNA, 20 bp, Artificial Sequence
  Description of Artificial Sequence: Synthetic oligonucleotide
  Target: ATXN2; (-) strand; PAM type: NRG; PAM sequence: AAG
aacctctgcctcctgggttc

SEQ ID NO: 28328 - DNA, 20 bp, Artificial Sequence
  Description of Artificial Sequence: Synthetic oligonucleotide
  Target: ATXN2; (-) strand; PAM type: NRG; PAM sequence: GGG
caccgcaacctctgcctcct

SEQ ID NO: 28329 - DNA, 20 bp, Artificial Sequence
  Description of Artificial Sequence: Synthetic oligonucleotide
  Target: ATXN2; (-) strand; PAM type: NRG; PAM sequence: TGG
tcaccgcaacctctgcctcc

SEQ ID NO: 28330 - DNA, 20 bp, Artificial Sequence
  Description of Artificial Sequence: Synthetic oligonucleotide
  Target: ATXN2; (-) strand; PAM type: NRG; PAM sequence: CGG
ggagtgcagtggcctgatct

SEQ ID NO: 28331 - DNA, 20 bp, Artificial Sequence
  Description of Artificial Sequence: Synthetic oligonucleotide
  Target: ATXN2; (-) strand; PAM type: NRG; PAM sequence: TGG
ttgcccaggctggagtgcag

SEQ ID NO: 28332 - DNA, 20 bp, Artificial Sequence
  Description of Artificial Sequence: Synthetic oligonucleotide
  Target: ATXN2; (-) strand; PAM type: NRG; PAM sequence: CAG
ctgttgcccaggctggagtg

SEQ ID NO: 28333 - DNA, 20 bp, Artificial Sequence
  Description of Artificial Sequence: Synthetic oligonucleotide
  Target: ATXN2; (-) strand; PAM type: NRG; PAM sequence: GAG
tcgctctgttgcccaggctg

SEQ ID NO: 28334 - DNA, 20 bp, Artificial Sequence
  Description of Artificial Sequence: Synthetic oligonucleotide
  Target: ATXN2; (-) strand; PAM type: NRG; PAM sequence: TGG
tttcgctctgttgcccaggc

SEQ ID NO: 28335 - DNA, 20 bp, Artificial Sequence
  Description of Artificial Sequence: Synthetic oligonucleotide
  Target: ATXN2; (-) strand; PAM type: NRG; PAM sequence: AGG
ggagtttcgctctgttgccc

SEQ ID NO: 28336 - DNA, 20 bp, Artificial Sequence
  Description of Artificial Sequence: Synthetic oligonucleotide
  Target: ATXN2; (-) strand; PAM type: NRG; PAM sequence: CAG
cggagtttcgctctgttgcc

SEQ ID NO: 28337 - DNA, 20 bp, Artificial Sequence
  Description of Artificial Sequence: Synthetic oligonucleotide
  Target: ATXN2; (-) strand; PAM type: NRG; PAM sequence: GAG
tttttttttttttggagacg

SEQ ID NO: 28338 - DNA, 20 bp, Artificial Sequence
  Description of Artificial Sequence: Synthetic oligonucleotide
  Target: ATXN2; (-) strand; PAM type: NRG; PAM sequence: CGG
tttttttttttttttggaga

SEQ ID NO: 28339 - DNA, 20 bp, Artificial Sequence
  Description of Artificial Sequence: Synthetic oligonucleotide
  Target: ATXN2; (-) strand; PAM type: NRG; PAM sequence: GAG
tctttttttttttttttttg

SEQ ID NO: 28340 - DNA, 20 bp, Artificial Sequence
  Description of Artificial Sequence: Synthetic oligonucleotide
  Target: ATXN2; (-) strand; PAM type: NRG; PAM sequence: TGG
tctctttttttttttttttt

SEQ ID NO: 28341 - DNA, 20 bp, Artificial Sequence
  Description of Artificial Sequence: Synthetic oligonucleotide
  Target: ATXN2; (-) strand; PAM type: NRG; PAM sequence: AGG
tccactattggagtaatttc

SEQ ID NO: 28342 - DNA, 20 bp, Artificial Sequence
  Description of Artificial Sequence: Synthetic oligonucleotide
  Target: ATXN2; (-) strand; PAM type: NRG; PAM sequence: CAG
atccactattggagtaattt

SEQ ID NO: 28343 - DNA, 20 bp, Artificial Sequence
  Description of Artificial Sequence: Synthetic oligonucleotide
  Target: ATXN2; (-) strand; PAM type: NRG; PAM sequence: GAG
gatgaggacatccactattg

SEQ ID NO: 28344 - DNA, 20 bp, Artificial Sequence
  Description of Artificial Sequence: Synthetic oligonucleotide
  Target: ATXN2; (-) strand; PAM type: NRG; PAM sequence: TGG
ttgatgaggacatccactat

SEQ ID NO: 28345 - DNA, 20 bp, Artificial Sequence
  Description of Artificial Sequence: Synthetic oligonucleotide
  Target: ATXN2; (-) strand; PAM type: NRG; PAM sequence: AGG
caaaattagttttcttgatg

SEQ ID NO: 28346 - DNA, 20 bp, Artificial Sequence
  Description of Artificial Sequence: Synthetic oligonucleotide
  Target: ATXN2; (-) strand; PAM type: NRG; PAM sequence: GAG
acaaaattagttttcttgat

SEQ ID NO: 28347 - DNA, 20 bp, Artificial Sequence
  Description of Artificial Sequence: Synthetic oligonucleotide
  Target: ATXN2; (-) strand; PAM type: NRG; PAM sequence: TAG
tttgctatatattacaaaat

SEQ ID NO: 28348 - DNA, 20 bp, Artificial Sequence
  Description of Artificial Sequence: Synthetic oligonucleotide
  Target: ATXN2; (-) strand; PAM type: NRG; PAM sequence: GGG
cactctactcataaggggat

SEQ ID NO: 28349 - DNA, 20 bp, Artificial Sequence
  Description of Artificial Sequence: Synthetic oligonucleotide
  Target: ATXN2; (-) strand; PAM type: NRG; PAM sequence: TGG
tcactctactcataagggga

SEQ ID NO: 28350 - DNA, 20 bp, Artificial Sequence
  Description of Artificial Sequence: Synthetic oligonucleotide
  Target: ATXN2; (-) strand; PAM type: NRG; PAM sequence: GGG
aatctcactctactcataag

SEQ ID NO: 28351 - DNA, 20 bp, Artificial Sequence
  Description of Artificial Sequence: Synthetic oligonucleotide
  Target: ATXN2; (-) strand; PAM type: NRG; PAM sequence: GGG
aaatctcactctactcataa

SEQ ID NO: 28352 - DNA, 20 bp, Artificial Sequence
  Description of Artificial Sequence: Synthetic oligonucleotide
  Target: ATXN2; (-) strand; PAM type: NRG; PAM sequence: AGG
aaaatctcactctactcata

SEQ ID NO: 28353 - DNA, 20 bp, Artificial Sequence
  Description of Artificial Sequence: Synthetic oligonucleotide
  Target: ATXN2; (-) strand; PAM type: NRG; PAM sequence: AAG
gaaaatctcactctactcat

SEQ ID NO: 28354 - DNA, 20 bp, Artificial Sequence
  Description of Artificial Sequence: Synthetic oligonucleotide
  Target: ATXN2; (-) strand; PAM type: NRG; PAM sequence: GAG
aggcaagaaaatacagatca

SEQ ID NO: 28355 - DNA, 20 bp, Artificial Sequence
  Description of Artificial Sequence: Synthetic oligonucleotide
  Target: ATXN2; (-) strand; PAM type: NRG; PAM sequence: CAG
aaaggcaagaaaatacagat

SEQ ID NO: 28356 - DNA, 20 bp, Artificial Sequence
  Description of Artificial Sequence: Synthetic oligonucleotide
  Target: ATXN2; (-) strand; PAM type: NRG; PAM sequence: CAG
tatagaaaggcaagaaaata

SEQ ID NO: 28357 - DNA, 20 bp, Artificial Sequence
  Description of Artificial Sequence: Synthetic oligonucleotide
  Target: ATXN2; (-) strand; PAM type: NRG; PAM sequence: AAG
ttagttcattatagaaaggc

SEQ ID NO: 28358 - DNA, 20 bp, Artificial Sequence
  Description of Artificial Sequence: Synthetic oligonucleotide
  Target: ATXN2; (-) strand; PAM type: NRG; PAM sequence: AGG
aattttagttcattatagaa

SEQ ID NO: 28359 - DNA, 20 bp, Artificial Sequence
  Description of Artificial Sequence: Synthetic oligonucleotide
  Target: ATXN2; (-) strand; PAM type: NRG; PAM sequence: AAG
taattttagttcattataga

SEQ ID NO: 28360 - DNA, 20 bp, Artificial Sequence
  Description of Artificial Sequence: Synthetic oligonucleotide
  Target: ATXN2; (-) strand; PAM type: NRG; PAM sequence: TAG
cagataattttagttcatta

SEQ ID NO: 28361 - DNA, 20 bp, Artificial Sequence
  Description of Artificial Sequence: Synthetic oligonucleotide
  Target: ATXN2; (-) strand; PAM type: NRG; PAM sequence: TAG
cttcatttctcagataattt

SEQ ID NO: 28362 - DNA, 20 bp, Artificial Sequence
  Description of Artificial Sequence: Synthetic oligonucleotide
  Target: ATXN2; (-) strand; PAM type: NRG; PAM sequence: CAG
tttattagatcttcatttct

SEQ ID NO: 28363 - DNA, 20 bp, Artificial Sequence
  Description of Artificial Sequence: Synthetic oligonucleotide
  Target: ATXN2; (-) strand; PAM type: NRG; PAM sequence: TAG
ttaaatttttattactttat

SEQ ID NO: 28364 - DNA, 20 bp, Artificial Sequence
  Description of Artificial Sequence: Synthetic oligonucleotide
  Target: ATXN2; (-) strand; PAM type: NRG; PAM sequence: TAG
ttactttgagatgtttgtga

SEQ ID NO: 28365 - DNA, 20 bp, Artificial Sequence
  Description of Artificial Sequence: Synthetic oligonucleotide
  Target: ATXN2; (-) strand; PAM type: NRG; PAM sequence: GAG
ggaagagtgaatattacttt

SEQ ID NO: 28366 - DNA, 20 bp, Artificial Sequence
  Description of Artificial Sequence: Synthetic oligonucleotide
  Target: ATXN2; (-) strand; PAM type: NRG; PAM sequence: GAG
gatatttcccaaatgtggaa

SEQ ID NO: 28367 - DNA, 20 bp, Artificial Sequence
  Description of Artificial Sequence: Synthetic oligonucleotide
  Target: ATXN2; (-) strand; PAM type: NRG; PAM sequence: AAG
ttgatatttcccaaatgtgg

SEQ ID NO: 28368 - DNA, 20 bp, Artificial Sequence
  Description of Artificial Sequence: Synthetic oligonucleotide
  Target: ATXN2; (-) strand; PAM type: NRG; PAM sequence: TGG
gaattgatatttcccaaatg

SEQ ID NO: 28369 - DNA, 20 bp, Artificial Sequence
  Description of Artificial Sequence: Synthetic oligonucleotide
  Target: ATXN2; (-) strand; PAM type: NRG; PAM sequence: CGG
ggtcatttaacagccattta

SEQ ID NO: 28370 - DNA, 20 bp, Artificial Sequence
  Description of Artificial Sequence: Synthetic oligonucleotide
  Target: ATXN2; (-) strand; PAM type: NRG; PAM sequence: CAG
ttggataccaggtcatttaa

SEQ ID NO: 28371 - DNA, 20 bp, Artificial Sequence
  Description of Artificial Sequence: Synthetic oligonucleotide
  Target: ATXN2; (-) strand; PAM type: NRG; PAM sequence: AGG
tccctactctattggatacc

SEQ ID NO: 28372 - DNA, 20 bp, Artificial Sequence
  Description of Artificial Sequence: Synthetic oligonucleotide
  Target: ATXN2; (-) strand; PAM type: NRG; PAM sequence: CAG
ttccctactctattggatac

SEQ ID NO: 28373 - DNA, 20 bp, Artificial Sequence
  Description of Artificial Sequence: Synthetic oligonucleotide
  Target: ATXN2; (-) strand; PAM type: NRG; PAM sequence: TGG
aaaaaggttccctactctat

SEQ ID NO: 28374 - DNA, 20 bp, Artificial Sequence
  Description of Artificial Sequence: Synthetic oligonucleotide
  Target: ATXN2; (-) strand; PAM type: NRG; PAM sequence: AGG
attggccacaacaaaaaaaa

SEQ ID NO: 28375 - DNA, 20 bp, Artificial Sequence
  Description of Artificial Sequence: Synthetic oligonucleotide
  Target: ATXN2; (-) strand; PAM type: NRG; PAM sequence: AAG
tattggccacaacaaaaaaa

SEQ ID NO: 28376 - DNA, 20 bp, Artificial Sequence
  Description of Artificial Sequence: Synthetic oligonucleotide
  Target: ATXN2; (-) strand; PAM type: NRG; PAM sequence: TGG
tagcactctggaaagagtat

SEQ ID NO: 28377 - DNA, 20 bp, Artificial Sequence
  Description of Artificial Sequence: Synthetic oligonucleotide
  Target: ATXN2; (-) strand; PAM type: NRG; PAM sequence: GAG
aatacatagcactctggaaa

SEQ ID NO: 28378 - DNA, 20 bp, Artificial Sequence
  Description of Artificial Sequence: Synthetic oligonucleotide
  Target: ATXN2; (-) strand; PAM type: NRG; PAM sequence: AAG
ttaatacatagcactctgga

SEQ ID NO: 28379 - DNA, 20 bp, Artificial Sequence
  Description of Artificial Sequence: Synthetic oligonucleotide
  Target: ATXN2; (-) strand; PAM type: NRG; PAM sequence: TGG
gaatttaatacatagcactc

SEQ ID NO: 28380 - DNA, 20 bp, Artificial Sequence
  Description of Artificial Sequence: Synthetic oligonucleotide
  Target: ATXN2; (-) strand; PAM type: NRG; PAM sequence: TAG
ttttagttgaatttaataca

SEQ ID NO: 28381 - DNA, 20 bp, Artificial Sequence
  Description of Artificial Sequence: Synthetic oligonucleotide
  Target: ATXN2; (-) strand; PAM type: NRG; PAM sequence: TAG
gactttggaagataaaattt

SEQ ID NO: 28382 - DNA, 20 bp, Artificial Sequence
  Description of Artificial Sequence: Synthetic oligonucleotide
  Target: ATXN2; (-) strand; PAM type: NRG; PAM sequence: AAG
aattcaaaaattgactttgg

SEQ ID NO: 28383 - DNA, 20 bp, Artificial Sequence
  Description of Artificial Sequence: Synthetic oligonucleotide
  Target: ATXN2; (-) strand; PAM type: NRG; PAM sequence: TGG
ataaattcaaaaattgactt

SEQ ID NO: 28384 - DNA, 20 bp, Artificial Sequence
  Description of Artificial Sequence: Synthetic oligonucleotide
  Target: ATXN2; (-) strand; PAM type: NRG; PAM sequence: GAG
ttgattttgtttatgtctag

SEQ ID NO: 28385 - DNA, 20 bp, Artificial Sequence
  Description of Artificial Sequence: Synthetic oligonucleotide
  Target: ATXN2; (-) strand; PAM type: NRG; PAM sequence: AGG
agttgattttgtttatgtct

SEQ ID NO: 28386 - DNA, 20 bp, Artificial Sequence
  Description of Artificial Sequence: Synthetic oligonucleotide
  Target: ATXN2; (-) strand; PAM type: NRG; PAM sequence: TAG
gagttgattttgtttatgtc

SEQ ID NO: 28387 - DNA, 20 bp, Artificial Sequence
  Description of Artificial Sequence: Synthetic oligonucleotide
  Target: ATXN2; (-) strand; PAM type: NRG; PAM sequence: GAG
ttttttagctgctacctttg

SEQ ID NO: 28388 - DNA, 20 bp, Artificial Sequence
  Description of Artificial Sequence: Synthetic oligonucleotide
  Target: ATXN2; (-) strand; PAM type: NRG; PAM sequence: TGG
ctttttttagctgctacctt

SEQ ID NO: 28389 - DNA, 20 bp, Artificial Sequence
  Description of Artificial Sequence: Synthetic oligonucleotide
  Target: ATXN2; (-) strand; PAM type: NRG; PAM sequence: TAG
caaggaaacaagtctttttt

SEQ ID NO: 28390 - DNA, 20 bp, Artificial Sequence
  Description of Artificial Sequence: Synthetic oligonucleotide
  Target: ATXN2; (-) strand; PAM type: NRG; PAM sequence: AAG
agcatcccatacaaggaaac

SEQ ID NO: 28391 - DNA, 20 bp, Artificial Sequence
  Description of Artificial Sequence: Synthetic oligonucleotide
  Target: ATXN2; (-) strand; PAM type: NRG; PAM sequence: AGG
ggccttcagcatcccataca

SEQ ID NO: 28392 - DNA, 20 bp, Artificial Sequence
  Description of Artificial Sequence: Synthetic oligonucleotide
  Target: ATXN2; (-) strand; PAM type: NRG; PAM sequence: AAG
aggccttcagcatcccatac

SEQ ID NO: 28393 - DNA, 20 bp, Artificial Sequence
  Description of Artificial Sequence: Synthetic oligonucleotide
  Target: ATXN2; (-) strand; PAM type: NRG; PAM sequence: CAG
tttttgtcttaagaggcctt

SEQ ID NO: 28394 - DNA, 20 bp, Artificial Sequence
  Description of Artificial Sequence: Synthetic oligonucleotide
  Target: ATXN2; (-) strand; PAM type: NRG; PAM sequence: AGG
tcacaactttttgtcttaag

SEQ ID NO: 28395 - DNA, 20 bp, Artificial Sequence
  Description of Artificial Sequence: Synthetic oligonucleotide
  Target: ATXN2; (-) strand; PAM type: NRG; PAM sequence: GAG
ttcacaactttttgtcttaa

SEQ ID NO: 28396 - DNA, 20 bp, Artificial Sequence
  Description of Artificial Sequence: Synthetic oligonucleotide
  Target: ATXN2; (-) strand; PAM type: NRG; PAM sequence: AAG
gattcacaactttttgtctt

SEQ ID NO: 28397 - DNA, 20 bp, Artificial Sequence
  Description of Artificial Sequence: Synthetic oligonucleotide
  Target: ATXN2; (-) strand; PAM type: NRG; PAM sequence: CAG
ttgatatgctgatgaaagca

SEQ ID NO: 28398 - DNA, 20 bp, Artificial Sequence
  Description of Artificial Sequence: Synthetic oligonucleotide
  Target: ATXN2; (-) strand; PAM type: NRG; PAM sequence: AAG
ctgtcttgatatgctgatga

SEQ ID NO: 28399 - DNA, 20 bp, Artificial Sequence
  Description of Artificial Sequence: Synthetic oligonucleotide
  Target: ATXN2; (-) strand; PAM type: NRG; PAM sequence: GGG
tttcagaggctaacagtact

SEQ ID NO: 28400 - DNA, 20 bp, Artificial Sequence
  Description of Artificial Sequence: Synthetic oligonucleotide
  Target: ATXN2; (-) strand; PAM type: NRG; PAM sequence: TGG
ttttcagaggctaacagtac

SEQ ID NO: 28401 - DNA, 20 bp, Artificial Sequence
  Description of Artificial Sequence: Synthetic oligonucleotide
  Target: ATXN2; (-) strand; PAM type: NRG; PAM sequence: CAG
cttgctttttcagaggctaa

SEQ ID NO: 28402 - DNA, 20 bp, Artificial Sequence
  Description of Artificial Sequence: Synthetic oligonucleotide
  Target: ATXN2; (-) strand; PAM type: NRG; PAM sequence: AGG
ctctttgcttgctttttcag

SEQ ID NO: 28403 - DNA, 20 bp, Artificial Sequence
  Description of Artificial Sequence: Synthetic oligonucleotide
  Target: ATXN2; (-) strand; PAM type: NRG; PAM sequence: GAG
tctctttgcttgctttttca

SEQ ID NO: 28404 - DNA, 20 bp, Artificial Sequence
  Description of Artificial Sequence: Synthetic oligonucleotide
  Target: ATXN2; (-) strand; PAM type: NRG; PAM sequence: CAG
tttctctttgcttgcttttt

SEQ ID NO: 28405 - DNA, 20 bp, Artificial Sequence
  Description of Artificial Sequence: Synthetic oligonucleotide
  Target: ATXN2; (-) strand; PAM type: NRG; PAM sequence: GAG
attctttctcttagacttag

SEQ ID NO: 28406 - DNA, 20 bp, Artificial Sequence
  Description of Artificial Sequence: Synthetic oligonucleotide
  Target: ATXN2; (-) strand; PAM type: NRG; PAM sequence: AGG
ggattctttctcttagactt

SEQ ID NO: 28407 - DNA, 20 bp, Artificial Sequence
  Description of Artificial Sequence: Synthetic oligonucleotide
  Target: ATXN2; (-) strand; PAM type: NRG; PAM sequence: TAG
aggattctttctcttagact

SEQ ID NO: 28408 - DNA, 20 bp, Artificial Sequence
  Description of Artificial Sequence: Synthetic oligonucleotide
  Target: ATXN2; (-) strand; PAM type: NRG; PAM sequence: TAG
tataccaggattctttctct

SEQ ID NO: 28409 - DNA, 20 bp, Artificial Sequence
  Description of Artificial Sequence: Synthetic oligonucleotide
  Target: ATXN2; (-) strand; PAM type: NRG; PAM sequence: AGG
cttggaaataataatatacc

SEQ ID NO: 28410 - DNA, 20 bp, Artificial Sequence
  Description of Artificial Sequence: Synthetic oligonucleotide
  Target: ATXN2; (-) strand; PAM type: NRG; PAM sequence: CAG
acttggaaataataatatac

SEQ ID NO: 28411 - DNA, 20 bp, Artificial Sequence
  Description of Artificial Sequence: Synthetic oligonucleotide
  Target: ATXN2; (-) strand; PAM type: NRG; PAM sequence: TGG
gattcttctacactgttact

SEQ ID NO: 28412 - DNA, 20 bp, Artificial Sequence
  Description of Artificial Sequence: Synthetic oligonucleotide
  Target: ATXN2; (-) strand; PAM type: NRG; PAM sequence: GGG
caaaagctgtttttattgtt

SEQ ID NO: 28413 - DNA, 20 bp, Artificial Sequence
  Description of Artificial Sequence: Synthetic oligonucleotide
  Target: ATXN2; (-) strand; PAM type: NRG; PAM sequence: TGG
ccaaaagctgtttttattgt

SEQ ID NO: 28414 - DNA, 20 bp, Artificial Sequence
  Description of Artificial Sequence: Synthetic oligonucleotide
  Target: ATXN2; (-) strand; PAM type: NRG; PAM sequence: AAG
actattcaaatctataccaa

SEQ ID NO: 28415 - DNA, 20 bp, Artificial Sequence
  Description of Artificial Sequence: Synthetic oligonucleotide
  Target: ATXN2; (-) strand; PAM type: NRG; PAM sequence: CAG
ttctgttgtaaattgtagtt

SEQ ID NO: 28416 - DNA, 20 bp, Artificial Sequence
  Description of Artificial Sequence: Synthetic oligonucleotide
  Target: ATXN2; (-) strand; PAM type: NRG; PAM sequence: TAG
cgtaattctgttgtaaattg

SEQ ID NO: 28417 - DNA, 20 bp, Artificial Sequence
  Description of Artificial Sequence: Synthetic oligonucleotide
  Target: ATXN2; (-) strand; PAM type: NRG; PAM sequence: TAG
tttgtatatgccaaattctg

SEQ ID NO: 28418 - DNA, 20 bp, Artificial Sequence
  Description of Artificial Sequence: Synthetic oligonucleotide
  Target: ATXN2; (-) strand; PAM type: NRG; PAM sequence: CGG
catgagccactgcacccagc

SEQ ID NO: 28419 - DNA, 20 bp, Artificial Sequence
  Description of Artificial Sequence: Synthetic oligonucleotide
  Target: ATXN2; (-) strand; PAM type: NRG; PAM sequence: CAG
caggcatgagccactgcacc

SEQ ID NO: 28420 - DNA, 20 bp, Artificial Sequence
  Description of Artificial Sequence: Synthetic oligonucleotide
  Target: ATXN2; (-) strand; PAM type: NRG; PAM sequence: GAG
agtgctggaattacaggcat

SEQ ID NO: 28421 - DNA, 20 bp, Artificial Sequence
  Description of Artificial Sequence: Synthetic oligonucleotide
  Target: ATXN2; (-) strand; PAM type: NRG; PAM sequence: AGG
tcccaaagtgctggaattac

SEQ ID NO: 28422 - DNA, 20 bp, Artificial Sequence
  Description of Artificial Sequence: Synthetic oligonucleotide
  Target: ATXN2; (-) strand; PAM type: NRG; PAM sequence: CAG
ctcccaaagtgctggaatta

SEQ ID NO: 28423 - DNA, 20 bp, Artificial Sequence
  Description of Artificial Sequence: Synthetic oligonucleotide
  Target: ATXN2; (-) strand; PAM type: NRG; PAM sequence: TGG
gcctcggcctcccaaagtgc

SEQ ID NO: 28424 - DNA, 20 bp, Artificial Sequence
  Description of Artificial Sequence: Synthetic oligonucleotide
  Target: ATXN2; (-) strand; PAM type: NRG; PAM sequence: AAG
ccgcccgcctcggcctccca

SEQ ID NO: 28425 - DNA, 20 bp, Artificial Sequence
  Description of Artificial Sequence: Synthetic oligonucleotide
  Target: ATXN2; (-) strand; PAM type: NRG; PAM sequence: CGG
acctcgtgatccgcccgcct

SEQ ID NO: 28426 - DNA, 20 bp, Artificial Sequence
  Description of Artificial Sequence: Synthetic oligonucleotide
  Target: ATXN2; (-) strand; PAM type: NRG; PAM sequence: TGG
tttcaccatgttggccagga

SEQ ID NO: 28427 - DNA, 20 bp, Artificial Sequence
  Description of Artificial Sequence: Synthetic oligonucleotide
  Target: ATXN2; (-) strand; PAM type: NRG; PAM sequence: AGG
agggtttcaccatgttggcc

SEQ ID NO: 28428 - DNA, 20 bp, Artificial Sequence
  Description of Artificial Sequence: Synthetic oligonucleotide
  Target: ATXN2; (-) strand; PAM type: NRG; PAM sequence: CAG
cagggtttcaccatgttggc

SEQ ID NO: 28429 - DNA, 20 bp, Artificial Sequence
  Description of Artificial Sequence: Synthetic oligonucleotide
  Target: ATXN2; (-) strand; PAM type: NRG; PAM sequence: TGG
gagacagggtttcaccatgt

SEQ ID NO: 28430 - DNA, 20 bp, Artificial Sequence
  Description of Artificial Sequence: Synthetic oligonucleotide
  Target: ATXN2; (-) strand; PAM type: NRG; PAM sequence: GGG
ttgtattttttgtagagaca

SEQ ID NO: 28431 - DNA, 20 bp, Artificial Sequence
  Description of Artificial Sequence: Synthetic oligonucleotide
  Target: ATXN2; (-) strand; PAM type: NRG; PAM sequence: AGG
tttgtattttttgtagagac

SEQ ID NO: 28432 - DNA, 20 bp, Artificial Sequence
  Description of Artificial Sequence: Synthetic oligonucleotide
  Target: ATXN2; (-) strand; PAM type: NRG; PAM sequence: CAG
ttttgtattttttgtagaga

SEQ ID NO: 28433 - DNA, 20 bp, Artificial Sequence
  Description of Artificial Sequence: Synthetic oligonucleotide
  Target: ATXN2; (-) strand; PAM type: NRG; PAM sequence: GAG
taatttttgtattttttgta

SEQ ID NO: 28434 - DNA, 20 bp, Artificial Sequence
  Description of Artificial Sequence: Synthetic oligonucleotide
  Target: ATXN2; (-) strand; PAM type: NRG; PAM sequence: TAG
gctaatttttgtattttttg

SEQ ID NO: 28435 - DNA, 20 bp, Artificial Sequence
  Description of Artificial Sequence: Synthetic oligonucleotide
  Target: ATXN2; (-) strand; PAM type: NRG; PAM sequence: AAG
caggcgtgtgccaccacacc

SEQ ID NO: 28436 - DNA, 20 bp, Artificial Sequence
  Description of Artificial Sequence: Synthetic oligonucleotide
  Target: ATXN2; (-) strand; PAM type: NRG; PAM sequence: AGG
tcctgagtagctgggactac

SEQ ID NO: 28437 - DNA, 20 bp, Artificial Sequence
  Description of Artificial Sequence: Synthetic oligonucleotide
  Target: ATXN2; (-) strand; PAM type: NRG; PAM sequence: CAG
ctcctgagtagctgggacta

SEQ ID NO: 28438 - DNA, 20 bp, Artificial Sequence
  Description of Artificial Sequence: Synthetic oligonucleotide
  Target: ATXN2; (-) strand; PAM type: NRG; PAM sequence: GGG
cctcagcctcctgagtagct

SEQ ID NO: 28439 - DNA, 20 bp, Artificial Sequence
  Description of Artificial Sequence: Synthetic oligonucleotide
  Target: ATXN2; (-) strand; PAM type: NRG; PAM sequence: TGG
gcctcagcctcctgagtagc

SEQ ID NO: 28440 - DNA, 20 bp, Artificial Sequence
  Description of Artificial Sequence: Synthetic oligonucleotide
  Target: ATXN2; (-) strand; PAM type: NRG; PAM sequence: TAG
tcctgcctcagcctcctgag

SEQ ID NO: 28441 - DNA, 20 bp, Artificial Sequence
  Description of Artificial Sequence: Synthetic oligonucleotide
  Target: ATXN2; (-) strand; PAM type: NRG; PAM sequence: GAG
ttctcctgcctcagcctcct

SEQ ID NO: 28442 - DNA, 20 bp, Artificial Sequence
  Description of Artificial Sequence: Synthetic oligonucleotide
  Target: ATXN2; (-) strand; PAM type: NRG; PAM sequence: CAG
ttcaagcgattctcctgcct

SEQ ID NO: 28443 - DNA, 20 bp, Artificial Sequence
  Description of Artificial Sequence: Synthetic oligonucleotide
  Target: ATXN2; (-) strand; PAM type: NRG; PAM sequence: AAG
agcctctgcctcccaggttc

SEQ ID NO: 28444 - DNA, 20 bp, Artificial Sequence
  Description of Artificial Sequence: Synthetic oligonucleotide
  Target: ATXN2; (-) strand; PAM type: NRG; PAM sequence: AGG
cactgcagcctctgcctccc

SEQ ID NO: 28445 - DNA, 20 bp, Artificial Sequence
  Description of Artificial Sequence: Synthetic oligonucleotide
  Target: ATXN2; (-) strand; PAM type: NRG; PAM sequence: CAG
tcactgcagcctctgcctcc

SEQ ID NO: 28446 - DNA, 20 bp, Artificial Sequence
  Description of Artificial Sequence: Synthetic oligonucleotide
  Target: ATXN2; (-) strand; PAM type: NRG; PAM sequence: CAG
ggcacgatctcggctcactg

SEQ ID NO: 28447 - DNA, 20 bp, Artificial Sequence
  Description of Artificial Sequence: Synthetic oligonucleotide
  Target: ATXN2; (-) strand; PAM type: NRG; PAM sequence: CGG
ggagtgcagtggcacgatct

SEQ ID NO: 28448 - DNA, 20 bp, Artificial Sequence
  Description of Artificial Sequence: Synthetic oligonucleotide
  Target: ATXN2; (-) strand; PAM type: NRG; PAM sequence: TGG
gtcccctgggtggagtgcag

SEQ ID NO: 28449 - DNA, 20 bp, Artificial Sequence
  Description of Artificial Sequence: Synthetic oligonucleotide
  Target: ATXN2; (-) strand; PAM type: NRG; PAM sequence: CAG
tctgtcccctgggtggagtg

SEQ ID NO: 28450 - DNA, 20 bp, Artificial Sequence
  Description of Artificial Sequence: Synthetic oligonucleotide
  Target: ATXN2; (-) strand; PAM type: NRG; PAM sequence: GAG
cttgttctgtcccctgggtg

SEQ ID NO: 28451 - DNA, 20 bp, Artificial Sequence
  Description of Artificial Sequence: Synthetic oligonucleotide
  Target: ATXN2; (-) strand; PAM type: NRG; PAM sequence: TGG
gtcttgttctgtcccctggg

SEQ ID NO: 28452 - DNA, 20 bp, Artificial Sequence
  Description of Artificial Sequence: Synthetic oligonucleotide
  Target: ATXN2; (-) strand; PAM type: NRG; PAM sequence: GGG
ggagtcttgttctgtcccct

SEQ ID NO: 28453 - DNA, 20 bp, Artificial Sequence
  Description of Artificial Sequence: Synthetic oligonucleotide
  Target: ATXN2; (-) strand; PAM type: NRG; PAM sequence: TGG
cggagtcttgttctgtcccc

SEQ ID NO: 28454 - DNA, 20 bp, Artificial Sequence
  Description of Artificial Sequence: Synthetic oligonucleotide
  Target: ATXN2; (-) strand; PAM type: NRG; PAM sequence: GAG
ttttttttttttttgagacg

SEQ ID NO: 28455 - DNA, 20 bp, Artificial Sequence
  Description of Artificial Sequence: Synthetic oligonucleotide
  Target: ATXN2; (-) strand; PAM type: NRG; PAM sequence: CGG
ttttttttttttttttgaga

SEQ ID NO: 28456 - DNA, 20 bp, Artificial Sequence
  Description of Artificial Sequence: Synthetic oligonucleotide
  Target: ATXN2; (-) strand; PAM type: NRG; PAM sequence: GAG
ttcttttttttttttttttt

SEQ ID NO: 28457 - DNA, 20 bp, Artificial Sequence
  Description of Artificial Sequence: Synthetic oligonucleotide
  Target: ATXN2; (-) strand; PAM type: NRG; PAM sequence: TGG
cttctgggcaatcctgaact

SEQ ID NO: 28458 - DNA, 20 bp, Artificial Sequence
  Description of Artificial Sequence: Synthetic oligonucleotide
  Target: ATXN2; (-) strand; PAM type: NRG; PAM sequence: GGG
acacgttgcaaggcacttct

SEQ ID NO: 28459 - DNA, 20 bp, Artificial Sequence
  Description of Artificial Sequence: Synthetic oligonucleotide
  Target: ATXN2; (-) strand; PAM type: NRG; PAM sequence: TGG
aacacgttgcaaggcacttc

SEQ ID NO: 28460 - DNA, 20 bp, Artificial Sequence
  Description of Artificial Sequence: Synthetic oligonucleotide
  Target: ATXN2; (-) strand; PAM type: NRG; PAM sequence: AGG
gtgttcagtaacacgttgca

SEQ ID NO: 28461 - DNA, 20 bp, Artificial Sequence
  Description of Artificial Sequence: Synthetic oligonucleotide
  Target: ATXN2; (-) strand; PAM type: NRG; PAM sequence: AAG
agtgttcagtaacacgttgc

SEQ ID NO: 28462 - DNA, 20 bp, Artificial Sequence
  Description of Artificial Sequence: Synthetic oligonucleotide
  Target: ATXN2; (-) strand; PAM type: NRG; PAM sequence: CAG
gcaaggcattattgagtgtt

SEQ ID NO: 28463 - DNA, 20 bp, Artificial Sequence
  Description of Artificial Sequence: Synthetic oligonucleotide
  Target: ATXN2; (-) strand; PAM type: NRG; PAM sequence: GAG
ctcatttgcaaggcattatt

SEQ ID NO: 28464 - DNA, 20 bp, Artificial Sequence
  Description of Artificial Sequence: Synthetic oligonucleotide
  Target: ATXN2; (-) strand; PAM type: NRG; PAM sequence: AGG
attcctgttactcatttgca

SEQ ID NO: 28465 - DNA, 20 bp, Artificial Sequence
  Description of Artificial Sequence: Synthetic oligonucleotide
  Target: ATXN2; (-) strand; PAM type: NRG; PAM sequence: AAG
aattcctgttactcatttgc

SEQ ID NO: 28466 - DNA, 20 bp, Artificial Sequence
  Description of Artificial Sequence: Synthetic oligonucleotide
  Target: ATXN2; (-) strand; PAM type: NRG; PAM sequence: GGG
tgtccattgatgaacaaagt

SEQ ID NO: 28467 - DNA, 20 bp, Artificial Sequence
  Description of Artificial Sequence: Synthetic oligonucleotide
  Target: ATXN2; (-) strand; PAM type: NRG; PAM sequence: TGG
gtgtccattgatgaacaaag

SEQ ID NO: 28468 - DNA, 20 bp, Artificial Sequence
  Description of Artificial Sequence: Synthetic oligonucleotide
  Target: ATXN2; (-) strand; PAM type: NRG; PAM sequence: AAG
taagtgtccattgatgaaca

SEQ ID NO: 28469 - DNA, 20 bp, Artificial Sequence
  Description of Artificial Sequence: Synthetic oligonucleotide
  Target: ATXN2; (-) strand; PAM type: NRG; PAM sequence: AAG
taaaaatttagtctcttttt

SEQ ID NO: 28470 - DNA, 20 bp, Artificial Sequence
  Description of Artificial Sequence: Synthetic oligonucleotide
  Target: ATXN2; (-) strand; PAM type: NRG; PAM sequence: TAG
atgtagttatattaaaaatt

SEQ ID NO: 28471 - DNA, 20 bp, Artificial Sequence
  Description of Artificial Sequence: Synthetic oligonucleotide
  Target: ATXN2; (-) strand; PAM type: NRG; PAM sequence: TAG
agaatttaaaagcgattatg

SEQ ID NO: 28472 - DNA, 20 bp, Artificial Sequence
  Description of Artificial Sequence: Synthetic oligonucleotide
  Target: ATXN2; (-) strand; PAM type: NRG; PAM sequence: AAG
acaaggttttgagaatttaa

SEQ ID NO: 28473 - DNA, 20 bp, Artificial Sequence
  Description of Artificial Sequence: Synthetic oligonucleotide
  Target: ATXN2; (-) strand; PAM type: NRG; PAM sequence: GAG
agagtatgagacaaggtttt

SEQ ID NO: 28474 - DNA, 20 bp, Artificial Sequence
  Description of Artificial Sequence: Synthetic oligonucleotide
  Target: ATXN2; (-) strand; PAM type: NRG; PAM sequence: AGG
aatattcagagtatgagaca

SEQ ID NO: 28475 - DNA, 20 bp, Artificial Sequence
  Description of Artificial Sequence: Synthetic oligonucleotide
  Target: ATXN2; (-) strand; PAM type: NRG; PAM sequence: AAG
aaatattcagagtatgagac

SEQ ID NO: 28476 - DNA, 20 bp, Artificial Sequence
  Description of Artificial Sequence: Synthetic oligonucleotide
  Target: ATXN2; (-) strand; PAM type: NRG; PAM sequence: GAG
tttaaaaatattcagagtat

SEQ ID NO: 28477 - DNA, 20 bp, Artificial Sequence
  Description of Artificial Sequence: Synthetic oligonucleotide
  Target: ATXN2; (-) strand; PAM type: NRG; PAM sequence: GAG
acgtattttaaaaatattca

SEQ ID NO: 28478 - DNA, 20 bp, Artificial Sequence
  Description of Artificial Sequence: Synthetic oligonucleotide
  Target: ATXN2; (-) strand; PAM type: NRG; PAM sequence: CAG
atacgtattttaaaaatatt

SEQ ID NO: 28479 - DNA, 20 bp, Artificial Sequence
  Description of Artificial Sequence: Synthetic oligonucleotide
  Target: ATXN2; (-) strand; PAM type: NRG; PAM sequence: TAG
aatgaaaaagggtgaagaag

SEQ ID NO: 28480 - DNA, 20 bp, Artificial Sequence
  Description of Artificial Sequence: Synthetic oligonucleotide
  Target: ATXN2; (-) strand; PAM type: NRG; PAM sequence: AAG
gaaaatgaaaaagggtgaag

SEQ ID NO: 28481 - DNA, 20 bp, Artificial Sequence
  Description of Artificial Sequence: Synthetic oligonucleotide
  Target: ATXN2; (-) strand; PAM type: NRG; PAM sequence: AAG
aatgaaaatgaaaaagggtg

SEQ ID NO: 28482 - DNA, 20 bp, Artificial Sequence
  Description of Artificial Sequence: Synthetic oligonucleotide
  Target: ATXN2; (-) strand; PAM type: NRG; PAM sequence: GGG
tgtctaatgaaaatgaaaaa

SEQ ID NO: 28483 - DNA, 20 bp, Artificial Sequence
  Description of Artificial Sequence: Synthetic oligonucleotide
  Target: ATXN2; (-) strand; PAM type: NRG; PAM sequence: AGG
ttgtctaatgaaaatgaaaa

SEQ ID NO: 28484 - DNA, 20 bp, Artificial Sequence
  Description of Artificial Sequence: Synthetic oligonucleotide
  Target: ATXN2; (-) strand; PAM type: NRG; PAM sequence: AAG
attgtctaatgaaaatgaaa

SEQ ID NO: 28485 - DNA, 20 bp, Artificial Sequence
  Description of Artificial Sequence: Synthetic oligonucleotide
  Target: ATXN2; (-) strand; PAM type: NRG; PAM sequence: TAG
gaaaggtagagaacggttgg

SEQ ID NO: 28486 - DNA, 20 bp, Artificial Sequence
  Description of Artificial Sequence: Synthetic oligonucleotide
  Target: ATXN2; (-) strand; PAM type: NRG; PAM sequence: TGG
gaagaaaggtagagaacggt

SEQ ID NO: 28487 - DNA, 20 bp, Artificial Sequence
  Description of Artificial Sequence: Synthetic oligonucleotide
  Target: ATXN2; (-) strand; PAM type: NRG; PAM sequence: CGG
taaggaagaaaggtagagaa

SEQ ID NO: 28488 - DNA, 20 bp, Artificial Sequence
  Description of Artificial Sequence: Synthetic oligonucleotide
  Target: ATXN2; (-) strand; PAM type: NRG; PAM sequence: GAG
aaggctaaggaagaaaggta

SEQ ID NO: 28489 - DNA, 20 bp, Artificial Sequence
  Description of Artificial Sequence: Synthetic oligonucleotide
  Target: ATXN2; (-) strand; PAM type: NRG; PAM sequence: TAG
ataaggctaaggaagaaagg

SEQ ID NO: 28490 - DNA, 20 bp, Artificial Sequence
  Description of Artificial Sequence: Synthetic oligonucleotide
  Target: ATXN2; (-) strand; PAM type: NRG; PAM sequence: AGG
agtataaggctaaggaagaa

SEQ ID NO: 28491 - DNA, 20 bp, Artificial Sequence
  Description of Artificial Sequence: Synthetic oligonucleotide
  Target: ATXN2; (-) strand; PAM type: NRG; PAM sequence: AAG
aagtataaggctaaggaaga

SEQ ID NO: 28492 - DNA, 20 bp, Artificial Sequence
  Description of Artificial Sequence: Synthetic oligonucleotide
  Target: ATXN2; (-) strand; PAM type: NRG; PAM sequence: AAG
atcaaagtataaggctaagg

SEQ ID NO: 28493 - DNA, 20 bp, Artificial Sequence
  Description of Artificial Sequence: Synthetic oligonucleotide
  Target: ATXN2; (-) strand; PAM type: NRG; PAM sequence: AGG
gaaatcaaagtataaggcta

SEQ ID NO: 28494 - DNA, 20 bp, Artificial Sequence
  Description of Artificial Sequence: Synthetic oligonucleotide
  Target: ATXN2; (-) strand; PAM type: NRG; PAM sequence: AAG
agaaatcaaagtataaggct

SEQ ID NO: 28495 - DNA, 20 bp, Artificial Sequence
  Description of Artificial Sequence: Synthetic oligonucleotide
  Target: ATXN2; (-) strand; PAM type: NRG; PAM sequence: AGG
tggaaagaaatcaaagtata

SEQ ID NO: 28496 - DNA, 20 bp, Artificial Sequence
  Description of Artificial Sequence: Synthetic oligonucleotide
  Target: ATXN2; (-) strand; PAM type: NRG; PAM sequence: AAG
ctggaaagaaatcaaagtat

SEQ ID NO: 28497 - DNA, 20 bp, Artificial Sequence
  Description of Artificial Sequence: Synthetic oligonucleotide
  Target: ATXN2; (-) strand; PAM type: NRG; PAM sequence: AAG
gcaaatctggaaagaaatca

SEQ ID NO: 28498 - DNA, 20 bp, Artificial Sequence
  Description of Artificial Sequence: Synthetic oligonucleotide
  Target: ATXN2; (-) strand; PAM type: NRG; PAM sequence: AAG
gggcatgtggcaaatctgga

SEQ ID NO: 28499 - DNA, 20 bp, Artificial Sequence
  Description of Artificial Sequence: Synthetic oligonucleotide
  Target: ATXN2; (-) strand; PAM type: NRG; PAM sequence: TGG
aagtgggcatgtggcaaatc

SEQ ID NO: 28500 - DNA, 20 bp, Artificial Sequence
  Description of Artificial Sequence: Synthetic oligonucleotide
  Target: ATXN2; (-) strand; PAM type: NRG; PAM sequence: TGG
ttagtttataagtgggcatg

SEQ ID NO: 28501 - DNA, 20 bp, Artificial Sequence
  Description of Artificial Sequence: Synthetic oligonucleotide
  Target: ATXN2; (-) strand; PAM type: NRG; PAM sequence: GGG
caatgctttagtttataagt

SEQ ID NO: 28502 - DNA, 20 bp, Artificial Sequence
  Description of Artificial Sequence: Synthetic oligonucleotide
  Target: ATXN2; (-) strand; PAM type: NRG; PAM sequence: TGG
acaatgctttagtttataag

SEQ ID NO: 28503 - DNA, 20 bp, Artificial Sequence
  Description of Artificial Sequence: Synthetic oligonucleotide
  Target: ATXN2; (-) strand; PAM type: NRG; PAM sequence: AAG
cctacaatgctttagtttat

SEQ ID NO: 28504 - DNA, 20 bp, Artificial Sequence
  Description of Artificial Sequence: Synthetic oligonucleotide
  Target: ATXN2; (-) strand; PAM type: NRG; PAM sequence: TAG
ccatttggcctacaatgctt

SEQ ID NO: 28505 - DNA, 20 bp, Artificial Sequence
  Description of Artificial Sequence: Synthetic oligonucleotide
  Target: ATXN2; (-) strand; PAM type: NRG; PAM sequence: TGG
tgaaaatttcttgtcccatt

SEQ ID NO: 28506 - DNA, 20 bp, Artificial Sequence
  Description of Artificial Sequence: Synthetic oligonucleotide
  Target: ATXN2; (-) strand; PAM type: NRG; PAM sequence: AAG
ttttctacagttttgtggtc

SEQ ID NO: 28507 - DNA, 20 bp, Artificial Sequence
  Description of Artificial Sequence: Synthetic oligonucleotide
  Target: ATXN2; (-) strand; PAM type: NRG; PAM sequence: TGG
aagcattttctacagttttg

SEQ ID NO: 28508 - DNA, 20 bp, Artificial Sequence
  Description of Artificial Sequence: Synthetic oligonucleotide
  Target: ATXN2; (-) strand; PAM type: NRG; PAM sequence: CAG
agtttgtaaagcattttcta

SEQ ID NO: 28509 - DNA, 20 bp, Artificial Sequence
  Description of Artificial Sequence: Synthetic oligonucleotide
  Target: ATXN2; (-) strand; PAM type: NRG; PAM sequence: AAG
tcttaaaaaattagtttgta

SEQ ID NO: 28510 - DNA, 20 bp, Artificial Sequence
  Description of Artificial Sequence: Synthetic oligonucleotide
  Target: ATXN2; (-) strand; PAM type: NRG; PAM sequence: TAG
tttgtgatctcttaaaaaat

SEQ ID NO: 28511 - DNA, 20 bp, Artificial Sequence
  Description of Artificial Sequence: Synthetic oligonucleotide
  Target: ATXN2; (-) strand; PAM type: NRG; PAM sequence: GAG
ctttagagaaaaattaaata

SEQ ID NO: 28512 - DNA, 20 bp, Artificial Sequence
  Description of Artificial Sequence: Synthetic oligonucleotide
  Target: ATXN2; (-) strand; PAM type: NRG; PAM sequence: TAG
aactttagagaaaaattaaa

SEQ ID NO: 28513 - DNA, 20 bp, Artificial Sequence
  Description of Artificial Sequence: Synthetic oligonucleotide
  Target: ATXN2; (-) strand; PAM type: NRG; PAM sequence: GAG
ggaaaacaattagaacttta

SEQ ID NO: 28514 - DNA, 20 bp, Artificial Sequence
  Description of Artificial Sequence: Synthetic oligonucleotide
  Target: ATXN2; (-) strand; PAM type: NRG; PAM sequence: TAG
ttggaaaacaattagaactt

SEQ ID NO: 28515 - DNA, 20 bp, Artificial Sequence
  Description of Artificial Sequence: Synthetic oligonucleotide
  Target: ATXN2; (-) strand; PAM type: NRG; PAM sequence: TAG
catttttgttggaaaacaat

SEQ ID NO: 28516 - DNA, 20 bp, Artificial Sequence
  Description of Artificial Sequence: Synthetic oligonucleotide
  Target: ATXN2; (-) strand; PAM type: NRG; PAM sequence: TGG
gaatgttaatgcatttttgt

SEQ ID NO: 28517 - DNA, 20 bp, Artificial Sequence
  Description of Artificial Sequence: Synthetic oligonucleotide
  Target: ATXN2; (-) strand; PAM type: NRG; PAM sequence: GAG
aggtaattttttagaaaaat

SEQ ID NO: 28518 - DNA, 20 bp, Artificial Sequence
  Description of Artificial Sequence: Synthetic oligonucleotide
  Target: ATXN2; (-) strand; PAM type: NRG; PAM sequence: TAG
gcccaagtaaggtaattttt

SEQ ID NO: 28519 - DNA, 20 bp, Artificial Sequence
  Description of Artificial Sequence: Synthetic oligonucleotide
  Target: ATXN2; (-) strand; PAM type: NRG; PAM sequence: AGG
tttctagaatagcccaagta

SEQ ID NO: 28520 - DNA, 20 bp, Artificial Sequence
  Description of Artificial Sequence: Synthetic oligonucleotide
  Target: ATXN2; (-) strand; PAM type: NRG; PAM sequence: AAG
ctttctagaatagcccaagt

SEQ ID NO: 28521 - DNA, 20 bp, Artificial Sequence
  Description of Artificial Sequence: Synthetic oligonucleotide
  Target: ATXN2; (-) strand; PAM type: NRG; PAM sequence: AAG
tctactttctagaatagccc

SEQ ID NO: 28522 - DNA, 20 bp, Artificial Sequence
  Description of Artificial Sequence: Synthetic oligonucleotide
  Target: ATXN2; (-) strand; PAM type: NRG; PAM sequence: TAG
gaaatatctactttctagaa

SEQ ID NO: 28523 - DNA, 20 bp, Artificial Sequence
  Description of Artificial Sequence: Synthetic oligonucleotide
  Target: ATXN2; (-) strand; PAM type: NRG; PAM sequence: TAG
aaaaagaaatatctactttc

SEQ ID NO: 28524 - DNA, 20 bp, Artificial Sequence
  Description of Artificial Sequence: Synthetic oligonucleotide
  Target: ATXN2; (-) strand; PAM type: NRG; PAM sequence: AAG
aaaaaaaaaaagaaagaaaa

SEQ ID NO: 28525 - DNA, 20 bp, Artificial Sequence
  Description of Artificial Sequence: Synthetic oligonucleotide
  Target: ATXN2; (-) strand; PAM type: NRG; PAM sequence: AAG
ccgtttcaaaaaaaaaaaga

SEQ ID NO: 28526 - DNA, 20 bp, Artificial Sequence
  Description of Artificial Sequence: Synthetic oligonucleotide
  Target: ATXN2; (-) strand; PAM type: NRG; PAM sequence: AAG
gactccgtttcaaaaaaaaa

SEQ ID NO: 28527 - DNA, 20 bp, Artificial Sequence
  Description of Artificial Sequence: Synthetic oligonucleotide
  Target: ATXN2; (-) strand; PAM type: NRG; PAM sequence: AAG
tccagcctgggtgacagagc

SEQ ID NO: 28528 - DNA, 20 bp, Artificial Sequence
  Description of Artificial Sequence: Synthetic oligonucleotide
  Target: ATXN2; (-) strand; PAM type: NRG; PAM sequence: GAG
gcactccagcctgggtgaca

SEQ ID NO: 28529 - DNA, 20 bp, Artificial Sequence
  Description of Artificial Sequence: Synthetic oligonucleotide
  Target: ATXN2; (-) strand; PAM type: NRG; PAM sequence: CAG
ctgcactccagcctgggtga

SEQ ID NO: 28530 - DNA, 20 bp, Artificial Sequence
  Description of Artificial Sequence: Synthetic oligonucleotide
  Target: ATXN2; (-) strand; PAM type: NRG; PAM sequence: GGG
gcaccactgcactccagcct

SEQ ID NO: 28531 - DNA, 20 bp, Artificial Sequence
  Description of Artificial Sequence: Synthetic oligonucleotide
  Target: ATXN2; (-) strand; PAM type: NRG; PAM sequence: TGG
cgcaccactgcactccagcc

SEQ ID NO: 28532 - DNA, 20 bp, Artificial Sequence
  Description of Artificial Sequence: Synthetic oligonucleotide
  Target: ATXN2; (-) strand; PAM type: NRG; PAM sequence: CAG
gataccgcaccactgcactc

SEQ ID NO: 28533 - DNA, 20 bp, Artificial Sequence
  Description of Artificial Sequence: Synthetic oligonucleotide
  Target: ATXN2; (-) strand; PAM type: NRG; PAM sequence: GAG
caggaggcagaggttgcagt

SEQ ID NO: 28534 - DNA, 20 bp, Artificial Sequence
  Description of Artificial Sequence: Synthetic oligonucleotide
  Target: ATXN2; (-) strand; PAM type: NRG; PAM sequence: CAG
aacccaggaggcagaggttg

SEQ ID NO: 28535 - DNA, 20 bp, Artificial Sequence
  Description of Artificial Sequence: Synthetic oligonucleotide
  Target: ATXN2; (-) strand; PAM type: NRG; PAM sequence: AGG
tgcttgaacccaggaggcag

SEQ ID NO: 28536 - DNA, 20 bp, Artificial Sequence
  Description of Artificial Sequence: Synthetic oligonucleotide
  Target: ATXN2; (-) strand; PAM type: NRG; PAM sequence: GAG
ttgcttgaacccaggaggca

SEQ ID NO: 28537 - DNA, 20 bp, Artificial Sequence
  Description of Artificial Sequence: Synthetic oligonucleotide
  Target: ATXN2; (-) strand; PAM type: NRG; PAM sequence: CAG
aattgcttgaacccaggagg

SEQ ID NO: 28538 - DNA, 20 bp, Artificial Sequence
  Description of Artificial Sequence: Synthetic oligonucleotide
  Target: ATXN2; (-) strand; PAM type: NRG; PAM sequence: AGG
cagaattgcttgaacccagg

SEQ ID NO: 28539 - DNA, 20 bp, Artificial Sequence
  Description of Artificial Sequence: Synthetic oligonucleotide
  Target: ATXN2; (-) strand; PAM type: NRG; PAM sequence: GAG
acagaattgcttgaacccag

SEQ ID NO: 28540 - DNA, 20 bp, Artificial Sequence
  Description of Artificial Sequence: Synthetic oligonucleotide
  Target: ATXN2; (-) strand; PAM type: NRG; PAM sequence: AGG
agacagaattgcttgaaccc

SEQ ID NO: 28541 - DNA, 20 bp, Artificial Sequence
  Description of Artificial Sequence: Synthetic oligonucleotide
  Target: ATXN2; (-) strand; PAM type: NRG; PAM sequence: CAG
gagacagaattgcttgaacc

SEQ ID NO: 28542 - DNA, 20 bp, Artificial Sequence
  Description of Artificial Sequence: Synthetic oligonucleotide
  Target: ATXN2; (-) strand; PAM type: NRG; PAM sequence: CAG
agctactagggaggctgaga

SEQ ID NO: 28543 - DNA, 20 bp, Artificial Sequence
  Description of Artificial Sequence: Synthetic oligonucleotide
  Target: ATXN2; (-) strand; PAM type: NRG; PAM sequence: GAG
tcctagctactagggaggct

SEQ ID NO: 28544 - DNA, 20 bp, Artificial Sequence
  Description of Artificial Sequence: Synthetic oligonucleotide
  Target: ATXN2; (-) strand; PAM type: NRG; PAM sequence: AGG
tatagtcctagctactaggg

SEQ ID NO: 28545 - DNA, 20 bp, Artificial Sequence
  Description of Artificial Sequence: Synthetic oligonucleotide
  Target: ATXN2; (-) strand; PAM type: NRG; PAM sequence: GAG
ctatagtcctagctactagg

SEQ ID NO: 28546 - DNA, 20 bp, Artificial Sequence
  Description of Artificial Sequence: Synthetic oligonucleotide
  Target: ATXN2; (-) strand; PAM type: NRG; PAM sequence: GGG
gcctatagtcctagctacta

SEQ ID NO: 28547 - DNA, 20 bp, Artificial Sequence
  Description of Artificial Sequence: Synthetic oligonucleotide
  Target: ATXN2; (-) strand; PAM type: NRG; PAM sequence: AGG
cgcctatagtcctagctact

SEQ ID NO: 28548 - DNA, 20 bp, Artificial Sequence
  Description of Artificial Sequence: Synthetic oligonucleotide
  Target: ATXN2; (-) strand; PAM type: NRG; PAM sequence: TAG
gcgcctatagtcctagctac

SEQ ID NO: 28549 - DNA, 20 bp, Artificial Sequence
  Description of Artificial Sequence: Synthetic oligonucleotide
  Target: ATXN2; (-) strand; PAM type: NRG; PAM sequence: TAG
gtggcgtgcgcctatagtcc

SEQ ID NO: 28550 - DNA, 20 bp, Artificial Sequence
  Description of Artificial Sequence: Synthetic oligonucleotide
  Target: ATXN2; (-) strand; PAM type: NRG; PAM sequence: TAG
tgtgtggtggcgtgcgccta

SEQ ID NO: 28551 - DNA, 20 bp, Artificial Sequence
  Description of Artificial Sequence: Synthetic oligonucleotide
  Target: ATXN2; (-) strand; PAM type: NRG; PAM sequence: TGG
aaatttatttttgtgtgtgg

SEQ ID NO: 28552 - DNA, 20 bp, Artificial Sequence
  Description of Artificial Sequence: Synthetic oligonucleotide
  Target: ATXN2; (-) strand; PAM type: NRG; PAM sequence: TGG
caaaaatttatttttgtgtg

SEQ ID NO: 28553 - DNA, 20 bp, Artificial Sequence
  Description of Artificial Sequence: Synthetic oligonucleotide
  Target: ATXN2; (-) strand; PAM type: NRG; PAM sequence: TGG
cgagaccagcctggccaaca

SEQ ID NO: 28554 - DNA, 20 bp, Artificial Sequence
  Description of Artificial Sequence: Synthetic oligonucleotide
  Target: ATXN2; (-) strand; PAM type: NRG; PAM sequence: TGG
tcaggagttcgagaccagcc

SEQ ID NO: 28555 - DNA, 20 bp, Artificial Sequence
  Description of Artificial Sequence: Synthetic oligonucleotide
  Target: ATXN2; (-) strand; PAM type: NRG; PAM sequence: CAG
tgaggtcaggagttcgagac

SEQ ID NO: 28556 - DNA, 20 bp, Artificial Sequence
  Description of Artificial Sequence: Synthetic oligonucleotide
  Target: ATXN2; (-) strand; PAM type: NRG; PAM sequence: GAG
tcacctgaggtcaggagttc

SEQ ID NO: 28557 - DNA, 20 bp, Artificial Sequence
  Description of Artificial Sequence: Synthetic oligonucleotide
  Target: ATXN2; (-) strand; PAM type: NRG; PAM sequence: GAG
ggtggatcacctgaggtcag

SEQ ID NO: 28558 - DNA, 20 bp, Artificial Sequence
  Description of Artificial Sequence: Synthetic oligonucleotide
  Target: ATXN2; (-) strand; PAM type: NRG; PAM sequence: AGG
cgggtggatcacctgaggtc

SEQ ID NO: 28559 - DNA, 20 bp, Artificial Sequence
  Description of Artificial Sequence: Synthetic oligonucleotide
  Target: ATXN2; (-) strand; PAM type: NRG; PAM sequence: CAG
gcgggtggatcacctgaggt

SEQ ID NO: 28560 - DNA, 20 bp, Artificial Sequence
  Description of Artificial Sequence: Synthetic oligonucleotide
  Target: ATXN2; (-) strand; PAM type: NRG; PAM sequence: AGG
tgaggcgggtggatcacctg

SEQ ID NO: 28561 - DNA, 20 bp, Artificial Sequence
  Description of Artificial Sequence: Synthetic oligonucleotide
  Target: ATXN2; (-) strand; PAM type: NRG; PAM sequence: GAG
ctgaggcgggtggatcacct

SEQ ID NO: 28562 - DNA, 20 bp, Artificial Sequence
  Description of Artificial Sequence: Synthetic oligonucleotide
  Target: ATXN2; (-) strand; PAM type: NRG; PAM sequence: TGG
cttagggaggctgaggcggg

SEQ ID NO: 28563 - DNA, 20 bp, Artificial Sequence
  Description of Artificial Sequence: Synthetic oligonucleotide
  Target: ATXN2; (-) strand; PAM type: NRG; PAM sequence: GGG
gcacttagggaggctgaggc

SEQ ID NO: 28564 - DNA, 20 bp, Artificial Sequence
  Description of Artificial Sequence: Synthetic oligonucleotide
  Target: ATXN2; (-) strand; PAM type: NRG; PAM sequence: CGG
agcacttagggaggctgagg

SEQ ID NO: 28565 - DNA, 20 bp, Artificial Sequence
  Description of Artificial Sequence: Synthetic oligonucleotide
  Target: ATXN2; (-) strand; PAM type: NRG; PAM sequence: AGG
cttagcacttagggaggctg

SEQ ID NO: 28566 - DNA, 20 bp, Artificial Sequence
  Description of Artificial Sequence: Synthetic oligonucleotide
  Target: ATXN2; (-) strand; PAM type: NRG; PAM sequence: GAG
tcttagcacttagggaggct

SEQ ID NO: 28567 - DNA, 20 bp, Artificial Sequence
  Description of Artificial Sequence: Synthetic oligonucleotide
  Target: ATXN2; (-) strand; PAM type: NRG; PAM sequence: AGG
tgtaatcttagcacttaggg

SEQ ID NO: 28568 - DNA, 20 bp, Artificial Sequence
  Description of Artificial Sequence: Synthetic oligonucleotide
  Target: ATXN2; (-) strand; PAM type: NRG; PAM sequence: GAG
ctgtaatcttagcacttagg

SEQ ID NO: 28569 - DNA, 20 bp, Artificial Sequence
  Description of Artificial Sequence: Synthetic oligonucleotide
  Target: ATXN2; (-) strand; PAM type: NRG; PAM sequence: GGG
tcctgtaatcttagcactta

SEQ ID NO: 28570 - DNA, 20 bp, Artificial Sequence
  Description of Artificial Sequence: Synthetic oligonucleotide
  Target: ATXN2; (-) strand; PAM type: NRG; PAM sequence: AGG
ttcctgtaatcttagcactt

SEQ ID NO: 28571 - DNA, 20 bp, Artificial Sequence
  Description of Artificial Sequence: Synthetic oligonucleotide
  Target: ATXN2; (-) strand; PAM type: NRG; PAM sequence: TAG
attcctgtaatcttagcact

SEQ ID NO: 28572 - DNA, 20 bp, Artificial Sequence
  Description of Artificial Sequence: Synthetic oligonucleotide
  Target: ATXN2; (-) strand; PAM type: NRG; PAM sequence: TAG
gcggctcattcctgtaatct

SEQ ID NO: 28573 - DNA, 20 bp, Artificial Sequence
  Description of Artificial Sequence: Synthetic oligonucleotide
  Target: ATXN2; (-) strand; PAM type: NRG; PAM sequence: CGG
aatatctgggctgggtatgg

SEQ ID NO: 28574 - DNA, 20 bp, Artificial Sequence
  Description of Artificial Sequence: Synthetic oligonucleotide
  Target: ATXN2; (-) strand; PAM type: NRG; PAM sequence: TGG
agaaatatctgggctgggta

SEQ ID NO: 28575 - DNA, 20 bp, Artificial Sequence
  Description of Artificial Sequence: Synthetic oligonucleotide
  Target: ATXN2; (-) strand; PAM type: NRG; PAM sequence: GGG
tttaaagaaatatctgggct

SEQ ID NO: 28576 - DNA, 20 bp, Artificial Sequence
  Description of Artificial Sequence: Synthetic oligonucleotide
  Target: ATXN2; (-) strand; PAM type: NRG; PAM sequence: TGG
ttttaaagaaatatctgggc

SEQ ID NO: 28577 - DNA, 20 bp, Artificial Sequence
  Description of Artificial Sequence: Synthetic oligonucleotide
  Target: ATXN2; (-) strand; PAM type: NRG; PAM sequence: GGG
ctttttttaaagaaatatct

SEQ ID NO: 28578 - DNA, 20 bp, Artificial Sequence
  Description of Artificial Sequence: Synthetic oligonucleotide
  Target: ATXN2; (-) strand; PAM type: NRG; PAM sequence: TGG
actttttttaaagaaatatc

SEQ ID NO: 28579 - DNA, 20 bp, Artificial Sequence
  Description of Artificial Sequence: Synthetic oligonucleotide
  Target: ATXN2; (-) strand; PAM type: NRG; PAM sequence: AAG
gatcttacaaacttttttta

SEQ ID NO: 28580 - DNA, 20 bp, Artificial Sequence
  Description of Artificial Sequence: Synthetic oligonucleotide
  Target: ATXN2; (-) strand; PAM type: NRG; PAM sequence: CAG
tattcaagcaaagattttca

SEQ ID NO: 28581 - DNA, 20 bp, Artificial Sequence
  Description of Artificial Sequence: Synthetic oligonucleotide
  Target: ATXN2; (-) strand; PAM type: NRG; PAM sequence: AAG
ttattagatttattcaagca

SEQ ID NO: 28582 - DNA, 20 bp, Artificial Sequence
  Description of Artificial Sequence: Synthetic oligonucleotide
  Target: ATXN2; (-) strand; PAM type: NRG; PAM sequence: AAG
atggtttattagatttattc

SEQ ID NO: 28583 - DNA, 20 bp, Artificial Sequence
  Description of Artificial Sequence: Synthetic oligonucleotide
  Target: ATXN2; (-) strand; PAM type: NRG; PAM sequence: TAG
aaatatgcctcatggtttat

SEQ ID NO: 28584 - DNA, 20 bp, Artificial Sequence
  Description of Artificial Sequence: Synthetic oligonucleotide
  Target: ATXN2; (-) strand; PAM type: NRG; PAM sequence: TGG
gatttcctaaatatgcctca

SEQ ID NO: 28585 - DNA, 20 bp, Artificial Sequence
  Description of Artificial Sequence: Synthetic oligonucleotide
  Target: ATXN2; (-) strand; PAM type: NRG; PAM sequence: GGG
ccagttatgcaaaaagaggt

SEQ ID NO: 28586 - DNA, 20 bp, Artificial Sequence
  Description of Artificial Sequence: Synthetic oligonucleotide
  Target: ATXN2; (-) strand; PAM type: NRG; PAM sequence: TGG
tccagttatgcaaaaagagg

SEQ ID NO: 28587 - DNA, 20 bp, Artificial Sequence
  Description of Artificial Sequence: Synthetic oligonucleotide
  Target: ATXN2; (-) strand; PAM type: NRG; PAM sequence: AGG
gactccagttatgcaaaaag

SEQ ID NO: 28588 - DNA, 20 bp, Artificial Sequence
  Description of Artificial Sequence: Synthetic oligonucleotide
  Target: ATXN2; (-) strand; PAM type: NRG; PAM sequence: GAG
ggactccagttatgcaaaaa

SEQ ID NO: 28589 - DNA, 20 bp, Artificial Sequence
  Description of Artificial Sequence: Synthetic oligonucleotide
  Target: ATXN2; (-) strand; PAM type: NRG; PAM sequence: AAG
atggactccagttatgcaaa

SEQ ID NO: 28590 - DNA, 20 bp, Artificial Sequence
  Description of Artificial Sequence: Synthetic oligonucleotide
  Target: ATXN2; (-) strand; PAM type: NRG; PAM sequence: CAG
cagtttaaagatatggactc

SEQ ID NO: 28591 - DNA, 20 bp, Artificial Sequence
  Description of Artificial Sequence: Synthetic oligonucleotide
  Target: ATXN2; (-) strand; PAM type: NRG; PAM sequence: TGG
tgtggtacagtttaaagata

SEQ ID NO: 28592 - DNA, 20 bp, Artificial Sequence
  Description of Artificial Sequence: Synthetic oligonucleotide
  Target: ATXN2; (-) strand; PAM type: NRG; PAM sequence: AAG
ctttgttgtggtacagttta

SEQ ID NO: 28593 - DNA, 20 bp, Artificial Sequence
  Description of Artificial Sequence: Synthetic oligonucleotide
  Target: ATXN2; (-) strand; PAM type: NRG; PAM sequence: CAG
gttcagactttgttgtggta

SEQ ID NO: 28594 - DNA, 20 bp, Artificial Sequence
  Description of Artificial Sequence: Synthetic oligonucleotide
  Target: ATXN2; (-) strand; PAM type: NRG; PAM sequence: TGG
caaatgttcagactttgttg

SEQ ID NO: 28595 - DNA, 20 bp, Artificial Sequence
  Description of Artificial Sequence: Synthetic oligonucleotide
  Target: ATXN2; (-) strand; PAM type: NRG; PAM sequence: CAG
gagtattttgttcaaatgtt

SEQ ID NO: 28596 - DNA, 20 bp, Artificial Sequence
  Description of Artificial Sequence: Synthetic oligonucleotide
  Target: ATXN2; (-) strand; PAM type: NRG; PAM sequence: GAG
aaacgtgaagaaataatgga

SEQ ID NO: 28597 - DNA, 20 bp, Artificial Sequence
  Description of Artificial Sequence: Synthetic oligonucleotide
  Target: ATXN2; (-) strand; PAM type: NRG; PAM sequence: GAG
cgaaacgtgaagaaataatg

SEQ ID NO: 28598 - DNA, 20 bp, Artificial Sequence
  Description of Artificial Sequence: Synthetic oligonucleotide
  Target: ATXN2; (-) strand; PAM type: NRG; PAM sequence: TGG
gccgaaacgtgaagaaataa

SEQ ID NO: 28599 - DNA, 20 bp, Artificial Sequence
  Description of Artificial Sequence: Synthetic oligonucleotide
  Target: ATXN2; (-) strand; PAM type: NRG; PAM sequence: AAG
cagttcggggccgaaacgtg

SEQ ID NO: 28600 - DNA, 20 bp, Artificial Sequence
  Description of Artificial Sequence: Synthetic oligonucleotide
  Target: ATXN2; (-) strand; PAM type: NRG; PAM sequence: GGG
aaagtacagaatccagttcg

SEQ ID NO: 28601 - DNA, 20 bp, Artificial Sequence
  Description of Artificial Sequence: Synthetic oligonucleotide
  Target: ATXN2; (-) strand; PAM type: NRG; PAM sequence: GGG
aaaagtacagaatccagttc

SEQ ID NO: 28602 - DNA, 20 bp, Artificial Sequence
  Description of Artificial Sequence: Synthetic oligonucleotide
  Target: ATXN2; (-) strand; PAM type: NRG; PAM sequence: CGG
gaaaagtacagaatccagtt

SEQ ID NO: 28603 - DNA, 20 bp, Artificial Sequence
  Description of Artificial Sequence: Synthetic oligonucleotide
  Target: ATXN2; (-) strand; PAM type: NRG; PAM sequence: CAG
catgagaaaagtacagaatc

SEQ ID NO: 28604 - DNA, 20 bp, Artificial Sequence
  Description of Artificial Sequence: Synthetic oligonucleotide
  Target: ATXN2; (-) strand; PAM type: NRG; PAM sequence: CAG
tgccgcacatgagaaaagta

SEQ ID NO: 28605 - DNA, 20 bp, Artificial Sequence
  Description of Artificial Sequence: Synthetic oligonucleotide
  Target: ATXN2; (-) strand; PAM type: NRG; PAM sequence: AAG
cttgatgccgcacatgagaa

SEQ ID NO: 28606 - DNA, 20 bp, Artificial Sequence
  Description of Artificial Sequence: Synthetic oligonucleotide
  Target: ATXN2; (-) strand; PAM type: NRG; PAM sequence: GAG
tggtacttgatgccgcacat

SEQ ID NO: 28607 - DNA, 20 bp, Artificial Sequence
  Description of Artificial Sequence: Synthetic oligonucleotide
  Target: ATXN2; (-) strand; PAM type: NRG; PAM sequence: TGG
tttttcattttagtgtgatt

SEQ ID NO: 28608 - DNA, 20 bp, Artificial Sequence
  Description of Artificial Sequence: Synthetic oligonucleotide
  Target: ATXN2; (-) strand; PAM type: NRG; PAM sequence: TAG
cttacttgtgtttttcattt

SEQ ID NO: 28609 - DNA, 20 bp, Artificial Sequence
  Description of Artificial Sequence: Synthetic oligonucleotide
  Target: ATXN2; (-) strand; PAM type: NRG; PAM sequence: GAG
ttttattttgtaaaggtttg

SEQ ID NO: 28610 - DNA, 20 bp, Artificial Sequence
  Description of Artificial Sequence: Synthetic oligonucleotide
  Target: ATXN2; (-) strand; PAM type: NRG; PAM sequence: TGG
aattttattttgtaaaggtt

SEQ ID NO: 28611 - DNA, 20 bp, Artificial Sequence
  Description of Artificial Sequence: Synthetic oligonucleotide
  Target: ATXN2; (-) strand; PAM type: NRG; PAM sequence: AGG
taacaaattttattttgtaa

SEQ ID NO: 28612 - DNA, 20 bp, Artificial Sequence
  Description of Artificial Sequence: Synthetic oligonucleotide
  Target: ATXN2; (-) strand; PAM type: NRG; PAM sequence: AAG
ctaacaaattttattttgta

SEQ ID NO: 28613 - DNA, 20 bp, Artificial Sequence
  Description of Artificial Sequence: Synthetic oligonucleotide
  Target: ATXN2; (-) strand; PAM type: NRG; PAM sequence: AAG
actggtaccttgatgagcta

SEQ ID NO: 28614 - DNA, 20 bp, Artificial Sequence
  Description of Artificial Sequence: Synthetic oligonucleotide
  Target: ATXN2; (-) strand; PAM type: NRG; PAM sequence: GAG
ataagaactggtaccttgat

SEQ ID NO: 28615 - DNA, 20 bp, Artificial Sequence
  Description of Artificial Sequence: Synthetic oligonucleotide
  Target: ATXN2; (-) strand; PAM type: NRG; PAM sequence: TGG
tgtcaaaggcatataagaac

SEQ ID NO: 28616 - DNA, 20 bp, Artificial Sequence
  Description of Artificial Sequence: Synthetic oligonucleotide
  Target: ATXN2; (-) strand; PAM type: NRG; PAM sequence: AAG
tatttttgtcaaaggcatat

SEQ ID NO: 28617 - DNA, 20 bp, Artificial Sequence
  Description of Artificial Sequence: Synthetic oligonucleotide
  Target: ATXN2; (-) strand; PAM type: NRG; PAM sequence: AGG
cttgagattatttttgtcaa

SEQ ID NO: 28618 - DNA, 20 bp, Artificial Sequence
  Description of Artificial Sequence: Synthetic oligonucleotide
  Target: ATXN2; (-) strand; PAM type: NRG; PAM sequence: AAG
tcttgagattatttttgtca

SEQ ID NO: 28619 - DNA, 20 bp, Artificial Sequence
  Description of Artificial Sequence: Synthetic oligonucleotide
  Target: ATXN2; (-) strand; PAM type: NRG; PAM sequence: GAG
aaaaagggtatgattctctt

SEQ ID NO: 28620 - DNA, 20 bp, Artificial Sequence
  Description of Artificial Sequence: Synthetic oligonucleotide
  Target: ATXN2; (-) strand; PAM type: NRG; PAM sequence: GGG
gatcatatgcctgggaaaaa

SEQ ID NO: 28621 - DNA, 20 bp, Artificial Sequence
  Description of Artificial Sequence: Synthetic oligonucleotide
  Target: ATXN2; (-) strand; PAM type: NRG; PAM sequence: AGG
agatcatatgcctgggaaaa

SEQ ID NO: 28622 - DNA, 20 bp, Artificial Sequence
  Description of Artificial Sequence: Synthetic oligonucleotide
  Target: ATXN2; (-) strand; PAM type: NRG; PAM sequence: AAG
tagatcatatgcctgggaaa

SEQ ID NO: 28623 - DNA, 20 bp, Artificial Sequence
  Description of Artificial Sequence: Synthetic oligonucleotide
  Target: ATXN2; (-) strand; PAM type: NRG; PAM sequence: GGG
ggataatagatcatatgcct

SEQ ID NO: 28624 - DNA, 20 bp, Artificial Sequence
  Description of Artificial Sequence: Synthetic oligonucleotide
  Target: ATXN2; (-) strand; PAM type: NRG; PAM sequence: TGG
tggataatagatcatatgcc

SEQ ID NO: 28625 - DNA, 20 bp, Artificial Sequence
  Description of Artificial Sequence: Synthetic oligonucleotide
  Target: ATXN2; (-) strand; PAM type: NRG; PAM sequence: TAG
ttaaatgatggaatggataa

SEQ ID NO: 28626 - DNA, 20 bp, Artificial Sequence
  Description of Artificial Sequence: Synthetic oligonucleotide
  Target: ATXN2; (-) strand; PAM type: NRG; PAM sequence: TGG
aggatttttaaatgatggaa

SEQ ID NO: 28627 - DNA, 20 bp, Artificial Sequence
  Description of Artificial Sequence: Synthetic oligonucleotide
  Target: ATXN2; (-) strand; PAM type: NRG; PAM sequence: TGG
atatgaggatttttaaatga

SEQ ID NO: 28628 - DNA, 20 bp, Artificial Sequence
  Description of Artificial Sequence: Synthetic oligonucleotide
  Target: ATXN2; (-) strand; PAM type: NRG; PAM sequence: AGG
acaaaaaacatttagatatg

SEQ ID NO: 28629 - DNA, 20 bp, Artificial Sequence
  Description of Artificial Sequence: Synthetic oligonucleotide
  Target: ATXN2; (-) strand; PAM type: NRG; PAM sequence: GAG
aacaaaaaacatttagatat

SEQ ID NO: 28630 - DNA, 20 bp, Artificial Sequence
  Description of Artificial Sequence: Synthetic oligonucleotide
  Target: ATXN2; (-) strand; PAM type: NRG; PAM sequence: TAG
ccatagaaacaaaaaacatt

SEQ ID NO: 28631 - DNA, 20 bp, Artificial Sequence
  Description of Artificial Sequence: Synthetic oligonucleotide
  Target: ATXN2; (-) strand; PAM type: NRG; PAM sequence: TAG
aatgtacttaagacaaacca

SEQ ID NO: 28632 - DNA, 20 bp, Artificial Sequence
  Description of Artificial Sequence: Synthetic oligonucleotide
  Target: ATXN2; (-) strand; PAM type: NRG; PAM sequence: AAG
aaattattattaatgtactt

SEQ ID NO: 28633 - DNA, 20 bp, Artificial Sequence
  Description of Artificial Sequence: Synthetic oligonucleotide
  Target: ATXN2; (-) strand; PAM type: NRG; PAM sequence: TGG
gagctaatagagggatgtgg

SEQ ID NO: 28634 - DNA, 20 bp, Artificial Sequence
  Description of Artificial Sequence: Synthetic oligonucleotide
  Target: ATXN2; (-) strand; PAM type: NRG; PAM sequence: TGG
tgtgagctaatagagggatg

SEQ ID NO: 28635 - DNA, 20 bp, Artificial Sequence
  Description of Artificial Sequence: Synthetic oligonucleotide
  Target: ATXN2; (-) strand; PAM type: NRG; PAM sequence: GGG
aagcattgtgagctaataga

SEQ ID NO: 28636 - DNA, 20 bp, Artificial Sequence
  Description of Artificial Sequence: Synthetic oligonucleotide
  Target: ATXN2; (-) strand; PAM type: NRG; PAM sequence: AGG
taagcattgtgagctaatag

SEQ ID NO: 28637 - DNA, 20 bp, Artificial Sequence
  Description of Artificial Sequence: Synthetic oligonucleotide
  Target: ATXN2; (-) strand; PAM type: NRG; PAM sequence: GAG
ttaagcattgtgagctaata

SEQ ID NO: 28638 - DNA, 20 bp, Artificial Sequence
  Description of Artificial Sequence: Synthetic oligonucleotide
  Target: ATXN2; (-) strand; PAM type: NRG; PAM sequence: TAG
ttttaagcattgtgagctaa

SEQ ID NO: 28639 - DNA, 20 bp, Artificial Sequence
  Description of Artificial Sequence: Synthetic oligonucleotide
  Target: ATXN2; (-) strand; PAM type: NRG; PAM sequence: GAG
caaccatttttaagcattgt

SEQ ID NO: 28640 - DNA, 20 bp, Artificial Sequence
  Description of Artificial Sequence: Synthetic oligonucleotide
  Target: ATXN2; (-) strand; PAM type: NRG; PAM sequence: AAG
aaaatatttcaaccattttt

SEQ ID NO: 28641 - DNA, 20 bp, Artificial Sequence
  Description of Artificial Sequence: Synthetic oligonucleotide
  Target: ATXN2; (-) strand; PAM type: NRG; PAM sequence: AGG
actggtttgtgtaatcagag

SEQ ID NO: 28642 - DNA, 20 bp, Artificial Sequence
  Description of Artificial Sequence: Synthetic oligonucleotide
  Target: ATXN2; (-) strand; PAM type: NRG; PAM sequence: GAG
gactggtttgtgtaatcaga

SEQ ID NO: 28643 - DNA, 20 bp, Artificial Sequence
  Description of Artificial Sequence: Synthetic oligonucleotide
  Target: ATXN2; (-) strand; PAM type: NRG; PAM sequence: GAG
tagactggtttgtgtaatca

SEQ ID NO: 28644 - DNA, 20 bp, Artificial Sequence
  Description of Artificial Sequence: Synthetic oligonucleotide
  Target: ATXN2; (-) strand; PAM type: NRG; PAM sequence: CAG
tatagactggtttgtgtaat

SEQ ID NO: 28645 - DNA, 20 bp, Artificial Sequence
  Description of Artificial Sequence: Synthetic oligonucleotide
  Target: ATXN2; (-) strand; PAM type: NRG; PAM sequence: TGG
atactgattattttatagac

SEQ ID NO: 28646 - DNA, 20 bp, Artificial Sequence
  Description of Artificial Sequence: Synthetic oligonucleotide
  Target: ATXN2; (-) strand; PAM type: NRG; PAM sequence: TAG
ttcaaatactgattatttta

SEQ ID NO: 28647 - DNA, 20 bp, Artificial Sequence
  Description of Artificial Sequence: Synthetic oligonucleotide
  Target: ATXN2; (-) strand; PAM type: NRG; PAM sequence: CAG
ctttgaatgattttacttct

SEQ ID NO: 28648 - DNA, 20 bp, Artificial Sequence
  Description of Artificial Sequence: Synthetic oligonucleotide
  Target: ATXN2; (-) strand; PAM type: NRG; PAM sequence: AAG
agtgttttacctagttttta

SEQ ID NO: 28649 - DNA, 20 bp, Artificial Sequence
  Description of Artificial Sequence: Synthetic oligonucleotide
  Target: ATXN2; (-) strand; PAM type: NRG; PAM sequence: TAG
ttcatagtcagtgttttacc

SEQ ID NO: 28650 - DNA, 20 bp, Artificial Sequence
  Description of Artificial Sequence: Synthetic oligonucleotide
  Target: ATXN2; (-) strand; PAM type: NRG; PAM sequence: CAG
taaaagaacattttcatagt

SEQ ID NO: 28651 - DNA, 20 bp, Artificial Sequence
  Description of Artificial Sequence: Synthetic oligonucleotide
  Target: ATXN2; (-) strand; PAM type: NRG; PAM sequence: TAG
aaagtaaaagaacattttca

SEQ ID NO: 28652 - DNA, 20 bp, Artificial Sequence
  Description of Artificial Sequence: Synthetic oligonucleotide
  Target: ATXN2; (-) strand; PAM type: NRG; PAM sequence: AAG
ttctttttcttacaaagtaa

SEQ ID NO: 28653 - DNA, 20 bp, Artificial Sequence
  Description of Artificial Sequence: Synthetic oligonucleotide
  Target: ATXN2; (-) strand; PAM type: NRG; PAM sequence: AAG
ctttttttctttttcttaca

SEQ ID NO: 28654 - DNA, 20 bp, Artificial Sequence
  Description of Artificial Sequence: Synthetic oligonucleotide
  Target: ATXN2; (-) strand; PAM type: NRG; PAM sequence: AGG
ttttaaaacttacagtccga

SEQ ID NO: 28655 - DNA, 20 bp, Artificial Sequence
  Description of Artificial Sequence: Synthetic oligonucleotide
  Target: ATXN2; (-) strand; PAM type: NRG; PAM sequence: AAG
tttttaaaacttacagtccg

SEQ ID NO: 28656 - DNA, 20 bp, Artificial Sequence
  Description of Artificial Sequence: Synthetic oligonucleotide
  Target: ATXN2; (-) strand; PAM type: NRG; PAM sequence: CAG
gaaggagtttttaaaactta

SEQ ID NO: 28657 - DNA, 20 bp, Artificial Sequence
  Description of Artificial Sequence: Synthetic oligonucleotide
  Target: ATXN2; (-) strand; PAM type: NRG; PAM sequence: GAG
aaatggaggtatatatgaag

SEQ ID NO: 28658 - DNA, 20 bp, Artificial Sequence
  Description of Artificial Sequence: Synthetic oligonucleotide
  Target: ATXN2; (-) strand; PAM type: NRG; PAM sequence: AGG
aaaaatggaggtatatatga

SEQ ID NO: 28659 - DNA, 20 bp, Artificial Sequence
  Description of Artificial Sequence: Synthetic oligonucleotide
  Target: ATXN2; (-) strand; PAM type: NRG; PAM sequence: AAG
gaaaaatggaggtatatatg

SEQ ID NO: 28660 - DNA, 20 bp, Artificial Sequence
  Description of Artificial Sequence: Synthetic oligonucleotide
  Target: ATXN2; (-) strand; PAM type: NRG; PAM sequence: AGG
gaagtacaagtgaaaaatgg

SEQ ID NO: 28661 - DNA, 20 bp, Artificial Sequence
  Description of Artificial Sequence: Synthetic oligonucleotide
  Target: ATXN2; (-) strand; PAM type: NRG; PAM sequence: GAG
tgaagtacaagtgaaaaatg

SEQ ID NO: 28662 - DNA, 20 bp, Artificial Sequence
  Description of Artificial Sequence: Synthetic oligonucleotide
  Target: ATXN2; (-) strand; PAM type: NRG; PAM sequence: TGG
tgtgaagtacaagtgaaaaa

SEQ ID NO: 28663 - DNA, 20 bp, Artificial Sequence
  Description of Artificial Sequence: Synthetic oligonucleotide
  Target: ATXN2; (-) strand; PAM type: NRG; PAM sequence: AAG
gggctccaaatgtgaagtac

SEQ ID NO: 28664 - DNA, 20 bp, Artificial Sequence
  Description of Artificial Sequence: Synthetic oligonucleotide
  Target: ATXN2; (-) strand; PAM type: NRG; PAM sequence: AAG
tttttagggctccaaatgtg

SEQ ID NO: 28665 - DNA, 20 bp, Artificial Sequence
  Description of Artificial Sequence: Synthetic oligonucleotide
  Target: ATXN2; (-) strand; PAM type: NRG; PAM sequence: GGG
aaataaattatatgttttta

SEQ ID NO: 28666 - DNA, 20 bp, Artificial Sequence
  Description of Artificial Sequence: Synthetic oligonucleotide
  Target: ATXN2; (-) strand; PAM type: NRG; PAM sequence: AGG
taaataaattatatgttttt

SEQ ID NO: 28667 - DNA, 20 bp, Artificial Sequence
  Description of Artificial Sequence: Synthetic oligonucleotide
  Target: ATXN2; (-) strand; PAM type: NRG; PAM sequence: TAG
ataaataaattatatgtttt

SEQ ID NO: 28668 - DNA, 20 bp, Artificial Sequence
  Description of Artificial Sequence: Synthetic oligonucleotide
  Target: ATXN2; (-) strand; PAM type: NRG; PAM sequence: TAG
aaatatccctggtgaccggg

SEQ ID NO: 28669 - DNA, 20 bp, Artificial Sequence
  Description of Artificial Sequence: Synthetic oligonucleotide
  Target: ATXN2; (-) strand; PAM type: NRG; PAM sequence: GGG
aacaaatatccctggtgacc

SEQ ID NO: 28670 - DNA, 20 bp, Artificial Sequence
  Description of Artificial Sequence: Synthetic oligonucleotide
  Target: ATXN2; (-) strand; PAM type: NRG; PAM sequence: CGG
aaacaaatatccctggtgac

SEQ ID NO: 28671 - DNA, 20 bp, Artificial Sequence
  Description of Artificial Sequence: Synthetic oligonucleotide
  Target: ATXN2; (-) strand; PAM type: NRG; PAM sequence: TGG
aaaatgaaaacaaatatccc

SEQ ID NO: 28672 - DNA, 20 bp, Artificial Sequence
  Description of Artificial Sequence: Synthetic oligonucleotide
  Target: ATXN2; (-) strand; PAM type: NRG; PAM sequence: AAG
gaagcctgatgaggtataaa

SEQ ID NO: 28673 - DNA, 20 bp, Artificial Sequence
  Description of Artificial Sequence: Synthetic oligonucleotide
  Target: ATXN2; (-) strand; PAM type: NRG; PAM sequence: AGG
atattgaatgaagcctgatg

SEQ ID NO: 28674 - DNA, 20 bp, Artificial Sequence
  Description of Artificial Sequence: Synthetic oligonucleotide
  Target: ATXN2; (-) strand; PAM type: NRG; PAM sequence: GAG
aatattgaatgaagcctgat

SEQ ID NO: 28675 - DNA, 20 bp, Artificial Sequence
  Description of Artificial Sequence: Synthetic oligonucleotide
  Target: ATXN2; (-) strand; PAM type: NRG; PAM sequence: AAG
tgaatacctaatattgaatg

SEQ ID NO: 28676 - DNA, 20 bp, Artificial Sequence
  Description of Artificial Sequence: Synthetic oligonucleotide
  Target: ATXN2; (-) strand; PAM type: NRG; PAM sequence: TAG
aaatttttttattgttttgt

SEQ ID NO: 28677 - DNA, 20 bp, Artificial Sequence
  Description of Artificial Sequence: Synthetic oligonucleotide
  Target: ATXN2; (-) strand; PAM type: NRG; PAM sequence: CAG
cctgaagaatttcaagagtt

SEQ ID NO: 28678 - DNA, 20 bp, Artificial Sequence
  Description of Artificial Sequence: Synthetic oligonucleotide
  Target: ATXN2; (-) strand; PAM type: NRG; PAM sequence: GAG
agcctcctgaagaatttcaa

SEQ ID NO: 28679 - DNA, 20 bp, Artificial Sequence
  Description of Artificial Sequence: Synthetic oligonucleotide
  Target: ATXN2; (-) strand; PAM type: NRG; PAM sequence: AAG
agagcctcctgaagaatttc

SEQ ID NO: 28680 - DNA, 20 bp, Artificial Sequence
  Description of Artificial Sequence: Synthetic oligonucleotide
  Target: ATXN2; (-) strand; PAM type: NRG; PAM sequence: AAG
actctgagtagagcctcctg

SEQ ID NO: 28681 - DNA, 20 bp, Artificial Sequence
  Description of Artificial Sequence: Synthetic oligonucleotide
  Target: ATXN2; (-) strand; PAM type: NRG; PAM sequence: GAG
cgtactgcaaactctgagta

SEQ ID NO: 28682 - DNA, 20 bp, Artificial Sequence
  Description of Artificial Sequence: Synthetic oligonucleotide
  Target: ATXN2; (-) strand; PAM type: NRG; PAM sequence: TAG
ttcgtactgcaaactctgag

SEQ ID NO: 28683 - DNA, 20 bp, Artificial Sequence
  Description of Artificial Sequence: Synthetic oligonucleotide
  Target: ATXN2; (-) strand; PAM type: NRG; PAM sequence: GAG
aaattcgtactgcaaactct

SEQ ID NO: 28684 - DNA, 20 bp, Artificial Sequence
  Description of Artificial Sequence: Synthetic oligonucleotide
  Target: ATXN2; (-) strand; PAM type: NRG; PAM sequence: CAG
gggtcagaaatgtttgactt

SEQ ID NO: 28685 - DNA, 20 bp, Artificial Sequence
  Description of Artificial Sequence: Synthetic oligonucleotide
  Target: ATXN2; (-) strand; PAM type: NRG; PAM sequence: CAG
tcacttaaaatagctggggt

SEQ ID NO: 28686 - DNA, 20 bp, Artificial Sequence
  Description of Artificial Sequence: Synthetic oligonucleotide
  Target: ATXN2; (-) strand; PAM type: NRG; PAM sequence: GGG
tttgtcacttaaaatagctg

SEQ ID NO: 28687 - DNA, 20 bp, Artificial Sequence
  Description of Artificial Sequence: Synthetic oligonucleotide
  Target: ATXN2; (-) strand; PAM type: NRG; PAM sequence: GGG
ttttgtcacttaaaatagct

SEQ ID NO: 28688 - DNA, 20 bp, Artificial Sequence
  Description of Artificial Sequence: Synthetic oligonucleotide
  Target: ATXN2; (-) strand; PAM type: NRG; PAM sequence: TGG
attttgtcacttaaaatagc

SEQ ID NO: 28689 - DNA, 20 bp, Artificial Sequence
  Description of Artificial Sequence: Synthetic oligonucleotide
  Target: ATXN2; (-) strand; PAM type: NRG; PAM sequence: TAG
cattattttgtcacttaaaa

SEQ ID NO: 28690 - DNA, 20 bp, Artificial Sequence
  Description of Artificial Sequence: Synthetic oligonucleotide
  Target: ATXN2; (-) strand; PAM type: NRG; PAM sequence: TAG
tgtgtgtaaaataatgttag

SEQ ID NO: 28691 - DNA, 20 bp, Artificial Sequence
  Description of Artificial Sequence: Synthetic oligonucleotide
  Target: ATXN2; (-) strand; PAM type: NRG; PAM sequence: TAG
ctgtgtgtgtaaaataatgt

SEQ ID NO: 28692 - DNA, 20 bp, Artificial Sequence
  Description of Artificial Sequence: Synthetic oligonucleotide
  Target: ATXN2; (-) strand; PAM type: NRG; PAM sequence: TAG
cccctaccaataacaacaga

SEQ ID NO: 28693 - DNA, 20 bp, Artificial Sequence
  Description of Artificial Sequence: Synthetic oligonucleotide
  Target: ATXN2; (-) strand; PAM type: NRG; PAM sequence: CAG
cagtcccctaccaataacaa

SEQ ID NO: 28694 - DNA, 20 bp, Artificial Sequence
  Description of Artificial Sequence: Synthetic oligonucleotide
  Target: ATXN2; (-) strand; PAM type: NRG; PAM sequence: CAG
tctgaaggaggtcctggaac

SEQ ID NO: 28695 - DNA, 20 bp, Artificial Sequence
  Description of Artificial Sequence: Synthetic oligonucleotide
  Target: ATXN2; (-) strand; PAM type: NRG; PAM sequence: TGG
tcggtatctgaaggaggtcc

SEQ ID NO: 28696 - DNA, 20 bp, Artificial Sequence
  Description of Artificial Sequence: Synthetic oligonucleotide
  Target: ATXN2; (-) strand; PAM type: NRG; PAM sequence: AGG
tgtaattcggtatctgaagg

SEQ ID NO: 28697 - DNA, 20 bp, Artificial Sequence
  Description of Artificial Sequence: Synthetic oligonucleotide
  Target: ATXN2; (-) strand; PAM type: NRG; PAM sequence: GAG
atgtaattcggtatctgaag

SEQ ID NO: 28698 - DNA, 20 bp, Artificial Sequence
  Description of Artificial Sequence: Synthetic oligonucleotide
  Target: ATXN2; (-) strand; PAM type: NRG; PAM sequence: AGG
ttatgtaattcggtatctga

SEQ ID NO: 28699 - DNA, 20 bp, Artificial Sequence
  Description of Artificial Sequence: Synthetic oligonucleotide
  Target: ATXN2; (-) strand; PAM type: NRG; PAM sequence: AAG
attatgtaattcggtatctg

SEQ ID NO: 28700 - DNA, 20 bp, Artificial Sequence
  Description of Artificial Sequence: Synthetic oligonucleotide
  Target: ATXN2; (-) strand; PAM type: NRG; PAM sequence: CGG
gacttaagtattatgtaatt

SEQ ID NO: 28701 - DNA, 20 bp, Artificial Sequence
  Description of Artificial Sequence: Synthetic oligonucleotide
  Target: ATXN2; (-) strand; PAM type: NRG; PAM sequence: AAG
acattttatgtaagtgactt

SEQ ID NO: 28702 - DNA, 20 bp, Artificial Sequence
  Description of Artificial Sequence: Synthetic oligonucleotide
  Target: ATXN2; (-) strand; PAM type: NRG; PAM sequence: AAG
aatactattacattttatgt

SEQ ID NO: 28703 - DNA, 20 bp, Artificial Sequence
  Description of Artificial Sequence: Synthetic oligonucleotide
  Target: ATXN2; (-) strand; PAM type: NRG; PAM sequence: TAG
agtatttgggagaatgtgct

SEQ ID NO: 28704 - DNA, 20 bp, Artificial Sequence
  Description of Artificial Sequence: Synthetic oligonucleotide
  Target: ATXN2; (-) strand; PAM type: NRG; PAM sequence: GAG
ggatagtttaaagtatttgg

SEQ ID NO: 28705 - DNA, 20 bp, Artificial Sequence
  Description of Artificial Sequence: Synthetic oligonucleotide
  Target: ATXN2; (-) strand; PAM type: NRG; PAM sequence: GGG
agggatagtttaaagtattt

SEQ ID NO: 28706 - DNA, 20 bp, Artificial Sequence
  Description of Artificial Sequence: Synthetic oligonucleotide
  Target: ATXN2; (-) strand; PAM type: NRG; PAM sequence: TGG
tagggatagtttaaagtatt

SEQ ID NO: 28707 - DNA, 20 bp, Artificial Sequence
  Description of Artificial Sequence: Synthetic oligonucleotide
  Target: ATXN2; (-) strand; PAM type: NRG; PAM sequence: AAG
agtaatttagggatagttta

SEQ ID NO: 28708 - DNA, 20 bp, Artificial Sequence
  Description of Artificial Sequence: Synthetic oligonucleotide
  Target: ATXN2; (-) strand; PAM type: NRG; PAM sequence: TAG
tattacaagtaatttaggga

SEQ ID NO: 28709 - DNA, 20 bp, Artificial Sequence
  Description of Artificial Sequence: Synthetic oligonucleotide
  Target: ATXN2; (-) strand; PAM type: NRG; PAM sequence: GGG
taggtattacaagtaattta

SEQ ID NO: 28710 - DNA, 20 bp, Artificial Sequence
  Description of Artificial Sequence: Synthetic oligonucleotide
  Target: ATXN2; (-) strand; PAM type: NRG; PAM sequence: AGG
ttaggtattacaagtaattt

SEQ ID NO: 28711 - DNA, 20 bp, Artificial Sequence
  Description of Artificial Sequence: Synthetic oligonucleotide
  Target: ATXN2; (-) strand; PAM type: NRG; PAM sequence: TAG
attaggtattacaagtaatt

SEQ ID NO: 28712 - DNA, 20 bp, Artificial Sequence
  Description of Artificial Sequence: Synthetic oligonucleotide
  Target: ATXN2; (-) strand; PAM type: NRG; PAM sequence: AAG
tacattatattaggtattac

SEQ ID NO: 28713 - DNA, 20 bp, Artificial Sequence
  Description of Artificial Sequence: Synthetic oligonucleotide
  Target: ATXN2; (-) strand; PAM type: NRG; PAM sequence: AGG
catagcatttacattatatt

SEQ ID NO: 28714 - DNA, 20 bp, Artificial Sequence
  Description of Artificial Sequence: Synthetic oligonucleotide
  Target: ATXN2; (-) strand; PAM type: NRG; PAM sequence: TAG
acatagcatttacattatat

SEQ ID NO: 28715 - DNA, 20 bp, Artificial Sequence
  Description of Artificial Sequence: Synthetic oligonucleotide
  Target: ATXN2; (-) strand; PAM type: NRG; PAM sequence: TAG
atacagtatgacaatttaca

SEQ ID NO: 28716 - DNA, 20 bp, Artificial Sequence
  Description of Artificial Sequence: Synthetic oligonucleotide
  Target: ATXN2; (-) strand; PAM type: NRG; PAM sequence: CAG
tcattattcctaaaacaata

SEQ ID NO: 28717 - DNA, 20 bp, Artificial Sequence
  Description of Artificial Sequence: Synthetic oligonucleotide
  Target: ATXN2; (-) strand; PAM type: NRG; PAM sequence: CGG
gcgtctgaaccaaagatgta

SEQ ID NO: 28718 - DNA, 20 bp, Artificial Sequence
  Description of Artificial Sequence: Synthetic oligonucleotide
  Target: ATXN2; (-) strand; PAM type: NRG; PAM sequence: AAG
gcatggttgcgtctgaacca

SEQ ID NO: 28719 - DNA, 20 bp, Artificial Sequence
  Description of Artificial Sequence: Synthetic oligonucleotide
  Target: ATXN2; (-) strand; PAM type: NRG; PAM sequence: TGG
tttttgagaaaaaagaggca

SEQ ID NO: 28720 - DNA, 20 bp, Artificial Sequence
  Description of Artificial Sequence: Synthetic oligonucleotide
  Target: ATXN2; (-) strand; PAM type: NRG; PAM sequence: AGG
ttttttttttgagaaaaaag

SEQ ID NO: 28721 - DNA, 20 bp, Artificial Sequence
  Description of Artificial Sequence: Synthetic oligonucleotide
  Target: ATXN2; (-) strand; PAM type: NRG; PAM sequence: GAG
tttttttttttgagaaaaaa

SEQ ID NO: 28722 - DNA, 20 bp, Artificial Sequence
  Description of Artificial Sequence: Synthetic oligonucleotide
  Target: ATXN2; (-) strand; PAM type: NRG; PAM sequence: AAG
tttttttttttttgagaaaa

SEQ ID NO: 28723 - DNA, 20 bp, Artificial Sequence
  Description of Artificial Sequence: Synthetic oligonucleotide
  Target: ATXN2; (-) strand; PAM type: NRG; PAM sequence: GAG
tttttttttttttttttttt

SEQ ID NO: 28724 - DNA, 20 bp, Artificial Sequence
  Description of Artificial Sequence: Synthetic oligonucleotide
  Target: ATXN2; (-) strand; PAM type: NRG; PAM sequence: CAG
gcctggtcaacagtgccaga

SEQ ID NO: 28725 - DNA, 20 bp, Artificial Sequence
  Description of Artificial Sequence: Synthetic oligonucleotide
  Target: ATXN2; (-) strand; PAM type: NRG; PAM sequence: CAG
ctcagcctggtcaacagtgc

SEQ ID NO: 28726 - DNA, 20 bp, Artificial Sequence
  Description of Artificial Sequence: Synthetic oligonucleotide
  Target: ATXN2; (-) strand; PAM type: NRG; PAM sequence: CAG
cctgcactcagcctggtcaa

SEQ ID NO: 28727 - DNA, 20 bp, Artificial Sequence
  Description of Artificial Sequence: Synthetic oligonucleotide
  Target: ATXN2; (-) strand; PAM type: NRG; PAM sequence: TGG
taatgcccctgcactcagcc

SEQ ID NO: 28728 - DNA, 20 bp, Artificial Sequence
  Description of Artificial Sequence: Synthetic oligonucleotide
  Target: ATXN2; (-) strand; PAM type: NRG; PAM sequence: CAG
tgagataatgcccctgcact

SEQ ID NO: 28729 - DNA, 20 bp, Artificial Sequence
  Description of Artificial Sequence: Synthetic oligonucleotide
  Target: ATXN2; (-) strand; PAM type: NRG; PAM sequence: GAG
ggtggaggtttcactgagct

SEQ ID NO: 28730 - DNA, 20 bp, Artificial Sequence
  Description of Artificial Sequence: Synthetic oligonucleotide
  Target: ATXN2; (-) strand; PAM type: NRG; PAM sequence: GAG
tgggaggtggaggtttcact

SEQ ID NO: 28731 - DNA, 20 bp, Artificial Sequence
  Description of Artificial Sequence: Synthetic oligonucleotide
  Target: ATXN2; (-) strand; PAM type: NRG; PAM sequence: AGG
tgtttgagcctgggaggtgg

SEQ ID NO: 28732 - DNA, 20 bp, Artificial Sequence
  Description of Artificial Sequence: Synthetic oligonucleotide
  Target: ATXN2; (-) strand; PAM type: NRG; PAM sequence: GAG
ttgtttgagcctgggaggtg

SEQ ID NO: 28733 - DNA, 20 bp, Artificial Sequence
  Description of Artificial Sequence: Synthetic oligonucleotide
  Target: ATXN2; (-) strand; PAM type: NRG; PAM sequence: TGG
gattgtttgagcctgggagg

SEQ ID NO: 28734 - DNA, 20 bp, Artificial Sequence
  Description of Artificial Sequence: Synthetic oligonucleotide
  Target: ATXN2; (-) strand; PAM type: NRG; PAM sequence: AGG
gaggattgtttgagcctggg

SEQ ID NO: 28735 - DNA, 20 bp, Artificial Sequence
  Description of Artificial Sequence: Synthetic oligonucleotide
  Target: ATXN2; (-) strand; PAM type: NRG; PAM sequence: GAG
ggaggattgtttgagcctgg

SEQ ID NO: 28736 - DNA, 20 bp, Artificial Sequence
  Description of Artificial Sequence: Synthetic oligonucleotide
  Target: ATXN2; (-) strand; PAM type: NRG; PAM sequence: GGG
tgggaggattgtttgagcct

SEQ ID NO: 28737 - DNA, 20 bp, Artificial Sequence
  Description of Artificial Sequence: Synthetic oligonucleotide
  Target: ATXN2; (-) strand; PAM type: NRG; PAM sequence: TGG
gtgggaggattgtttgagcc

SEQ ID NO: 28738 - DNA, 20 bp, Artificial Sequence
  Description of Artificial Sequence: Synthetic oligonucleotide
  Target: ATXN2; (-) strand; PAM type: NRG; PAM sequence: GAG
ctgacgtgggaggattgttt

SEQ ID NO: 28739 - DNA, 20 bp, Artificial Sequence
  Description of Artificial Sequence: Synthetic oligonucleotide
  Target: ATXN2; (-) strand; PAM type: NRG; PAM sequence: AGG
acttgggaggctgacgtggg

SEQ ID NO: 28740 - DNA, 20 bp, Artificial Sequence
  Description of Artificial Sequence: Synthetic oligonucleotide
  Target: ATXN2; (-) strand; PAM type: NRG; PAM sequence: GAG
gacttgggaggctgacgtgg

SEQ ID NO: 28741 - DNA, 20 bp, Artificial Sequence
  Description of Artificial Sequence: Synthetic oligonucleotide
  Target: ATXN2; (-) strand; PAM type: NRG; PAM sequence: GGG
gtgacttgggaggctgacgt

SEQ ID NO: 28742 - DNA, 20 bp, Artificial Sequence
  Description of Artificial Sequence: Synthetic oligonucleotide
  Target: ATXN2; (-) strand; PAM type: NRG; PAM sequence: TGG
agtgacttgggaggctgacg

SEQ ID NO: 28743 - DNA, 20 bp, Artificial Sequence
  Description of Artificial Sequence: Synthetic oligonucleotide
  Target: ATXN2; (-) strand; PAM type: NRG; PAM sequence: AGG
tgtagtcctagtgacttggg

SEQ ID NO: 28744 - DNA, 20 bp, Artificial Sequence
  Description of Artificial Sequence: Synthetic oligonucleotide
  Target: ATXN2; (-) strand; PAM type: NRG; PAM sequence: GAG
ctgtagtcctagtgacttgg

SEQ ID NO: 28745 - DNA, 20 bp, Artificial Sequence
  Description of Artificial Sequence: Synthetic oligonucleotide
  Target: ATXN2; (-) strand; PAM type: NRG; PAM sequence: GGG
gcctgtagtcctagtgactt

SEQ ID NO: 28746 - DNA, 20 bp, Artificial Sequence
  Description of Artificial Sequence: Synthetic oligonucleotide
  Target: ATXN2; (-) strand; PAM type: NRG; PAM sequence: TGG
tgcctgtagtcctagtgact

SEQ ID NO: 28747 - DNA, 20 bp, Artificial Sequence
  Description of Artificial Sequence: Synthetic oligonucleotide
  Target: ATXN2; (-) strand; PAM type: NRG; PAM sequence: TAG
gtggtacgtgcctgtagtcc

SEQ ID NO: 28748 - DNA, 20 bp, Artificial Sequence
  Description of Artificial Sequence: Synthetic oligonucleotide
  Target: ATXN2; (-) strand; PAM type: NRG; PAM sequence: TAG
aacgtggtggtacgtgcctg

SEQ ID NO: 28749 - DNA, 20 bp, Artificial Sequence
  Description of Artificial Sequence: Synthetic oligonucleotide
  Target: ATXN2; (-) strand; PAM type: NRG; PAM sequence: TGG
aaaaaactagccgaacgtgg

SEQ ID NO: 28750 - DNA, 20 bp, Artificial Sequence
  Description of Artificial Sequence: Synthetic oligonucleotide
  Target: ATXN2; (-) strand; PAM type: NRG; PAM sequence: TGG
gtaaaaaaactagccgaacg

SEQ ID NO: 28751 - DNA, 20 bp, Artificial Sequence
  Description of Artificial Sequence: Synthetic oligonucleotide
  Target: ATXN2; (-) strand; PAM type: NRG; PAM sequence: TAG
tctacaaaaagtaaaaaaac

SEQ ID NO: 28752 - DNA, 20 bp, Artificial Sequence
  Description of Artificial Sequence: Synthetic oligonucleotide
  Target: ATXN2; (-) strand; PAM type: NRG; PAM sequence: AAG
cagaactccgtctctacaaa

SEQ ID NO: 28753 - DNA, 20 bp, Artificial Sequence
  Description of Artificial Sequence: Synthetic oligonucleotide
  Target: ATXN2; (-) strand; PAM type: NRG; PAM sequence: CAG
gaccagcctgggcaacatgg

SEQ ID NO: 28754 - DNA, 20 bp, Artificial Sequence
  Description of Artificial Sequence: Synthetic oligonucleotide
  Target: ATXN2; (-) strand; PAM type: NRG; PAM sequence: TGG
taagaccagcctgggcaaca

SEQ ID NO: 28755 - DNA, 20 bp, Artificial Sequence
  Description of Artificial Sequence: Synthetic oligonucleotide
  Target: ATXN2; (-) strand; PAM type: NRG; PAM sequence: GGG
cacaagtttaagaccagcct

SEQ ID NO: 28756 - DNA, 20 bp, Artificial Sequence
  Description of Artificial Sequence: Synthetic oligonucleotide
  Target: ATXN2; (-) strand; PAM type: NRG; PAM sequence: TGG
tcacaagtttaagaccagcc

SEQ ID NO: 28757 - DNA, 20 bp, Artificial Sequence
  Description of Artificial Sequence: Synthetic oligonucleotide
  Target: ATXN2; (-) strand; PAM type: NRG; PAM sequence: CAG
tgagctcacaagtttaagac

SEQ ID NO: 28758 - DNA, 20 bp, Artificial Sequence
  Description of Artificial Sequence: Synthetic oligonucleotide
  Target: ATXN2; (-) strand; PAM type: NRG; PAM sequence: AAG
tggcttgagctcacaagttt

SEQ ID NO: 28759 - DNA, 20 bp, Artificial Sequence
  Description of Artificial Sequence: Synthetic oligonucleotide
  Target: ATXN2; (-) strand; PAM type: NRG; PAM sequence: AAG
ggcagatggcttgagctcac

SEQ ID NO: 28760 - DNA, 20 bp, Artificial Sequence
  Description of Artificial Sequence: Synthetic oligonucleotide
  Target: ATXN2; (-) strand; PAM type: NRG; PAM sequence: GAG
ttgaggtgggcagatggctt

SEQ ID NO: 28761 - DNA, 20 bp, Artificial Sequence
  Description of Artificial Sequence: Synthetic oligonucleotide
  Target: ATXN2; (-) strand; PAM type: NRG; PAM sequence: TGG
gggagtttgaggtgggcaga

SEQ ID NO: 28762 - DNA, 20 bp, Artificial Sequence
  Description of Artificial Sequence: Synthetic oligonucleotide
  Target: ATXN2; (-) strand; PAM type: NRG; PAM sequence: CAG
ctttgggagtttgaggtggg

SEQ ID NO: 28763 - DNA, 20 bp, Artificial Sequence
  Description of Artificial Sequence: Synthetic oligonucleotide
  Target: ATXN2; (-) strand; PAM type: NRG; PAM sequence: GGG
gcactttgggagtttgaggt

SEQ ID NO: 28764 - DNA, 20 bp, Artificial Sequence
  Description of Artificial Sequence: Synthetic oligonucleotide
  Target: ATXN2; (-) strand; PAM type: NRG; PAM sequence: TGG
agcactttgggagtttgagg

SEQ ID NO: 28765 - DNA, 20 bp, Artificial Sequence
  Description of Artificial Sequence: Synthetic oligonucleotide
  Target: ATXN2; (-) strand; PAM type: NRG; PAM sequence: AGG
cccagcactttgggagtttg

SEQ ID NO: 28766 - DNA, 20 bp, Artificial Sequence
  Description of Artificial Sequence: Synthetic oligonucleotide
  Target: ATXN2; (-) strand; PAM type: NRG; PAM sequence: GAG
tcccagcactttgggagttt

SEQ ID NO: 28767 - DNA, 20 bp, Artificial Sequence
  Description of Artificial Sequence: Synthetic oligonucleotide
  Target: ATXN2; (-) strand; PAM type: NRG; PAM sequence: GAG
ctgtaatcccagcactttgg

SEQ ID NO: 28768 - DNA, 20 bp, Artificial Sequence
  Description of Artificial Sequence: Synthetic oligonucleotide
  Target: ATXN2; (-) strand; PAM type: NRG; PAM sequence: GGG
gcctgtaatcccagcacttt

SEQ ID NO: 28769 - DNA, 20 bp, Artificial Sequence
  Description of Artificial Sequence: Synthetic oligonucleotide
  Target: ATXN2; (-) strand; PAM type: NRG; PAM sequence: TGG
cgcctgtaatcccagcactt

SEQ ID NO: 28770 - DNA, 20 bp, Artificial Sequence
  Description of Artificial Sequence: Synthetic oligonucleotide
  Target: ATXN2; (-) strand; PAM type: NRG; PAM sequence: CAG
gtgactcacgcctgtaatcc

SEQ ID NO: 28771 - DNA, 20 bp, Artificial Sequence
  Description of Artificial Sequence: Synthetic oligonucleotide
  Target: ATXN2; (-) strand; PAM type: NRG; PAM sequence: CAG
tttgttaaaaaggccaggca

SEQ ID NO: 28772 - DNA, 20 bp, Artificial Sequence
  Description of Artificial Sequence: Synthetic oligonucleotide
  Target: ATXN2; (-) strand; PAM type: NRG; PAM sequence: AGG
aaatatttgttaaaaaggcc

SEQ ID NO: 28773 - DNA, 20 bp, Artificial Sequence
  Description of Artificial Sequence: Synthetic oligonucleotide
  Target: ATXN2; (-) strand; PAM type: NRG; PAM sequence: CAG
aaaatatttgttaaaaaggc

SEQ ID NO: 28774 - DNA, 20 bp, Artificial Sequence
  Description of Artificial Sequence: Synthetic oligonucleotide
  Target: ATXN2; (-) strand; PAM type: NRG; PAM sequence: AGG
atcaaaaatatttgttaaaa

SEQ ID NO: 28775 - DNA, 20 bp, Artificial Sequence
  Description of Artificial Sequence: Synthetic oligonucleotide
  Target: ATXN2; (-) strand; PAM type: NRG; PAM sequence: AAG
gatcaaaaatatttgttaaa

SEQ ID NO: 28776 - DNA, 20 bp, Artificial Sequence
  Description of Artificial Sequence: Synthetic oligonucleotide
  Target: ATXN2; (-) strand; PAM type: NRG; PAM sequence: TGG
ttcatggattcagccaacct

SEQ ID NO: 28777 - DNA, 20 bp, Artificial Sequence
  Description of Artificial Sequence: Synthetic oligonucleotide
  Target: ATXN2; (-) strand; PAM type: NRG; PAM sequence: CAG
gggttccatattcatggatt

SEQ ID NO: 28778 - DNA, 20 bp, Artificial Sequence
  Description of Artificial Sequence: Synthetic oligonucleotide
  Target: ATXN2; (-) strand; PAM type: NRG; PAM sequence: TGG
atctgtgggttccatattca

SEQ ID NO: 28779 - DNA, 20 bp, Artificial Sequence
  Description of Artificial Sequence: Synthetic oligonucleotide
  Target: ATXN2; (-) strand; PAM type: NRG; PAM sequence: GGG
agttggtcctctgcatctgt

SEQ ID NO: 28780 - DNA, 20 bp, Artificial Sequence
  Description of Artificial Sequence: Synthetic oligonucleotide
  Target: ATXN2; (-) strand; PAM type: NRG; PAM sequence: TGG
cagttggtcctctgcatctg

SEQ ID NO: 28781 - DNA, 20 bp, Artificial Sequence
  Description of Artificial Sequence: Synthetic oligonucleotide
  Target: ATXN2; (-) strand; PAM type: NRG; PAM sequence: TGG
attcattgtaaaagtacagt

SEQ ID NO: 28782 - DNA, 20 bp, Artificial Sequence
  Description of Artificial Sequence: Synthetic oligonucleotide
  Target: ATXN2; (-) strand; PAM type: NRG; PAM sequence: CAG
tataattcattgtaaaagta

SEQ ID NO: 28783 - DNA, 20 bp, Artificial Sequence
  Description of Artificial Sequence: Synthetic oligonucleotide
  Target: ATXN2; (-) strand; PAM type: NRG; PAM sequence: AAG
tctaatataattcattgtaa

SEQ ID NO: 28784 - DNA, 20 bp, Artificial Sequence
  Description of Artificial Sequence: Synthetic oligonucleotide
  Target: ATXN2; (-) strand; PAM type: NRG; PAM sequence: CAG
agattagaactccttttatc

SEQ ID NO: 28785 - DNA, 20 bp, Artificial Sequence
  Description of Artificial Sequence: Synthetic oligonucleotide
  Target: ATXN2; (-) strand; PAM type: NRG; PAM sequence: TAG
gatgatttagagaaatagat

SEQ ID NO: 28786 - DNA, 20 bp, Artificial Sequence
  Description of Artificial Sequence: Synthetic oligonucleotide
  Target: ATXN2; (-) strand; PAM type: NRG; PAM sequence: TAG
gtcaggatgatttagagaaa

SEQ ID NO: 28787 - DNA, 20 bp, Artificial Sequence
  Description of Artificial Sequence: Synthetic oligonucleotide
  Target: ATXN2; (-) strand; PAM type: NRG; PAM sequence: GAG
tgtttagtcaggatgattta

SEQ ID NO: 28788 - DNA, 20 bp, Artificial Sequence
  Description of Artificial Sequence: Synthetic oligonucleotide
  Target: ATXN2; (-) strand; PAM type: NRG; PAM sequence: TAG
catgtttagtcaggatgatt

SEQ ID NO: 28789 - DNA, 20 bp, Artificial Sequence
  Description of Artificial Sequence: Synthetic oligonucleotide
  Target: ATXN2; (-) strand; PAM type: NRG; PAM sequence: AGG
tgcttagatcatgtttagtc

SEQ ID NO: 28790 - DNA, 20 bp, Artificial Sequence
  Description of Artificial Sequence: Synthetic oligonucleotide
  Target: ATXN2; (-) strand; PAM type: NRG; PAM sequence: CAG
ttgcttagatcatgtttagt

SEQ ID NO: 28791 - DNA, 20 bp, Artificial Sequence
  Description of Artificial Sequence: Synthetic oligonucleotide
  Target: ATXN2; (-) strand; PAM type: NRG; PAM sequence: TAG
aacattgcttagatcatgtt

SEQ ID NO: 28792 - DNA, 20 bp, Artificial Sequence
  Description of Artificial Sequence: Synthetic oligonucleotide
  Target: ATXN2; (-) strand; PAM type: NRG; PAM sequence: TAG
attgtcaaagtaacattgct

SEQ ID NO: 28793 - DNA, 20 bp, Artificial Sequence
  Description of Artificial Sequence: Synthetic oligonucleotide
  Target: ATXN2; (-) strand; PAM type: NRG; PAM sequence: AAG
atgtggataaatgattgtca

SEQ ID NO: 28794 - DNA, 20 bp, Artificial Sequence
  Description of Artificial Sequence: Synthetic oligonucleotide
  Target: ATXN2; (-) strand; PAM type: NRG; PAM sequence: TGG
aattccatgaagttaaaatg

SEQ ID NO: 28795 - DNA, 20 bp, Artificial Sequence
  Description of Artificial Sequence: Synthetic oligonucleotide
  Target: ATXN2; (-) strand; PAM type: NRG; PAM sequence: AAG
tagaataaagtaattccatg

SEQ ID NO: 28796 - DNA, 20 bp, Artificial Sequence
  Description of Artificial Sequence: Synthetic oligonucleotide
  Target: ATXN2; (-) strand; PAM type: NRG; PAM sequence: AAG
actgccttgggggtagaata

SEQ ID NO: 28797 - DNA, 20 bp, Artificial Sequence
  Description of Artificial Sequence: Synthetic oligonucleotide
  Target: ATXN2; (-) strand; PAM type: NRG; PAM sequence: TAG
gggataaactgccttggggg

SEQ ID NO: 28798 - DNA, 20 bp, Artificial Sequence
  Description of Artificial Sequence: Synthetic oligonucleotide
  Target: ATXN2; (-) strand; PAM type: NRG; PAM sequence: GGG
ttggggataaactgccttgg

SEQ ID NO: 28799 - DNA, 20 bp, Artificial Sequence
  Description of Artificial Sequence: Synthetic oligonucleotide
  Target: ATXN2; (-) strand; PAM type: NRG; PAM sequence: GGG
attggggataaactgccttg

SEQ ID NO: 28800 - DNA, 20 bp, Artificial Sequence
  Description of Artificial Sequence: Synthetic oligonucleotide
  Target: ATXN2; (-) strand; PAM type: NRG; PAM sequence: GGG
tattggggataaactgcctt

SEQ ID NO: 28801 - DNA, 20 bp, Artificial Sequence
  Description of Artificial Sequence: Synthetic oligonucleotide
  Target: ATXN2; (-) strand; PAM type: NRG; PAM sequence: TGG
ttattggggataaactgcct

SEQ ID NO: 28802 - DNA, 20 bp, Artificial Sequence
  Description of Artificial Sequence: Synthetic oligonucleotide
  Target: ATXN2; (-) strand; PAM type: NRG; PAM sequence: GGG
tgtaagttattagattattg

SEQ ID NO: 28803 - DNA, 20 bp, Artificial Sequence
  Description of Artificial Sequence: Synthetic oligonucleotide
  Target: ATXN2; (-) strand; PAM type: NRG; PAM sequence: GGG
ttgtaagttattagattatt

SEQ ID NO: 28804 - DNA, 20 bp, Artificial Sequence
  Description of Artificial Sequence: Synthetic oligonucleotide
  Target: ATXN2; (-) strand; PAM type: NRG; PAM sequence: TGG
gttgtaagttattagattat

SEQ ID NO: 28805 - DNA, 20 bp, Artificial Sequence
  Description of Artificial Sequence: Synthetic oligonucleotide
  Target: ATXN2; (-) strand; PAM type: NRG; PAM sequence: TAG
catcagttgttgtaagttat

SEQ ID NO: 28806 - DNA, 20 bp, Artificial Sequence
  Description of Artificial Sequence: Synthetic oligonucleotide
  Target: ATXN2; (-) strand; PAM type: NRG; PAM sequence: AAG
atacttacatcagttgttgt

SEQ ID NO: 28807 - DNA, 20 bp, Artificial Sequence
  Description of Artificial Sequence: Synthetic oligonucleotide
  Target: ATXN2; (-) strand; PAM type: NRG; PAM sequence: CAG
gatggttcatatacttacat

SEQ ID NO: 28808 - DNA, 20 bp, Artificial Sequence
  Description of Artificial Sequence: Synthetic oligonucleotide
  Target: ATXN2; (-) strand; PAM type: NRG; PAM sequence: TGG
aatctatgcaaatatgagga

SEQ ID NO: 28809 - DNA, 20 bp, Artificial Sequence
  Description of Artificial Sequence: Synthetic oligonucleotide
  Target: ATXN2; (-) strand; PAM type: NRG; PAM sequence: AGG
atggaatctatgcaaatatg

SEQ ID NO: 28810 - DNA, 20 bp, Artificial Sequence
  Description of Artificial Sequence: Synthetic oligonucleotide
  Target: ATXN2; (-) strand; PAM type: NRG; PAM sequence: GAG
gatggaatctatgcaaatat

SEQ ID NO: 28811 - DNA, 20 bp, Artificial Sequence
  Description of Artificial Sequence: Synthetic oligonucleotide
  Target: ATXN2; (-) strand; PAM type: NRG; PAM sequence: TGG
atattccagatttcttttga

SEQ ID NO: 28812 - DNA, 20 bp, Artificial Sequence
  Description of Artificial Sequence: Synthetic oligonucleotide
  Target: ATXN2; (-) strand; PAM type: NRG; PAM sequence: CAG
tttttttttttttaatattc

SEQ ID NO: 28813 - DNA, 20 bp, Artificial Sequence
  Description of Artificial Sequence: Synthetic oligonucleotide
  Target: ATXN2; (-) strand; PAM type: NRG; PAM sequence: TAG
cagtttgtactaatttctaa

SEQ ID NO: 28814 - DNA, 20 bp, Artificial Sequence
  Description of Artificial Sequence: Synthetic oligonucleotide
  Target: ATXN2; (-) strand; PAM type: NRG; PAM sequence: CAG
cattttagatgaggaagatt

SEQ ID NO: 28815 - DNA, 20 bp, Artificial Sequence
  Description of Artificial Sequence: Synthetic oligonucleotide
  Target: ATXN2; (-) strand; PAM type: NRG; PAM sequence: AAG
cccaagcattttagatgagg

SEQ ID NO: 28816 - DNA, 20 bp, Artificial Sequence
  Description of Artificial Sequence: Synthetic oligonucleotide
  Target: ATXN2; (-) strand; PAM type: NRG; PAM sequence: AGG
ggtcccaagcattttagatg

SEQ ID NO: 28817 - DNA, 20 bp, Artificial Sequence
  Description of Artificial Sequence: Synthetic oligonucleotide
  Target: ATXN2; (-) strand; PAM type: NRG; PAM sequence: GAG
tggtcccaagcattttagat

SEQ ID NO: 28818 - DNA, 20 bp, Artificial Sequence
  Description of Artificial Sequence: Synthetic oligonucleotide
  Target: ATXN2; (-) strand; PAM type: NRG; PAM sequence: TAG
acttctggtcccaagcattt

SEQ ID NO: 28819 - DNA, 20 bp, Artificial Sequence
  Description of Artificial Sequence: Synthetic oligonucleotide
  Target: ATXN2; (-) strand; PAM type: NRG; PAM sequence: AAG
tctaaaatacttctggtccc

SEQ ID NO: 28820 - DNA, 20 bp, Artificial Sequence
  Description of Artificial Sequence: Synthetic oligonucleotide
  Target: ATXN2; (-) strand; PAM type: NRG; PAM sequence: TGG
tccgcagtctaaaatacttc

SEQ ID NO: 28821 - DNA, 20 bp, Artificial Sequence
  Description of Artificial Sequence: Synthetic oligonucleotide
  Target: ATXN2; (-) strand; PAM type: NRG; PAM sequence: CAG
ccaaatccgaaaaaaatccg

SEQ ID NO: 28822 - DNA, 20 bp, Artificial Sequence
  Description of Artificial Sequence: Synthetic oligonucleotide
  Target: ATXN2; (-) strand; PAM type: NRG; PAM sequence: AAG
attagggatgttcaagcact

SEQ ID NO: 28823 - DNA, 20 bp, Artificial Sequence
  Description of Artificial Sequence: Synthetic oligonucleotide
  Target: ATXN2; (-) strand; PAM type: NRG; PAM sequence: AAG
attttgaattagggatgttc

SEQ ID NO: 28824 - DNA, 20 bp, Artificial Sequence
  Description of Artificial Sequence: Synthetic oligonucleotide
  Target: ATXN2; (-) strand; PAM type: NRG; PAM sequence: GGG
aaatttcatattttgaatta

SEQ ID NO: 28825 - DNA, 20 bp, Artificial Sequence
  Description of Artificial Sequence: Synthetic oligonucleotide
  Target: ATXN2; (-) strand; PAM type: NRG; PAM sequence: AGG
aaaatttcatattttgaatt

SEQ ID NO: 28826 - DNA, 20 bp, Artificial Sequence
  Description of Artificial Sequence: Synthetic oligonucleotide
  Target: ATXN2; (-) strand; PAM type: NRG; PAM sequence: TAG
caaaatttcatattttgaat

SEQ ID NO: 28827 - DNA, 20 bp, Artificial Sequence
  Description of Artificial Sequence: Synthetic oligonucleotide
  Target: ATXN2; (-) strand; PAM type: NRG; PAM sequence: CGG
acaggctgagcatccctaat

SEQ ID NO: 28828 - DNA, 20 bp, Artificial Sequence
  Description of Artificial Sequence: Synthetic oligonucleotide
  Target: ATXN2; (-) strand; PAM type: NRG; PAM sequence: GAG
tgcaaatgtaaatacaggct

SEQ ID NO: 28829 - DNA, 20 bp, Artificial Sequence
  Description of Artificial Sequence: Synthetic oligonucleotide
  Target: ATXN2; (-) strand; PAM type: NRG; PAM sequence: AGG
ttatatgcaaatgtaaatac

SEQ ID NO: 28830 - DNA, 20 bp, Artificial Sequence
  Description of Artificial Sequence: Synthetic oligonucleotide
  Target: ATXN2; (-) strand; PAM type: NRG; PAM sequence: CAG
tttatatgcaaatgtaaata

SEQ ID NO: 28831 - DNA, 20 bp, Artificial Sequence
  Description of Artificial Sequence: Synthetic oligonucleotide
  Target: ATXN2; (-) strand; PAM type: NRG; PAM sequence: TAG
ttgcaacaaataataaacgt

SEQ ID NO: 28832 - DNA, 20 bp, Artificial Sequence
  Description of Artificial Sequence: Synthetic oligonucleotide
  Target: ATXN2; (-) strand; PAM type: NRG; PAM sequence: AAG
aatcttcccttaatacatgt

SEQ ID NO: 28833 - DNA, 20 bp, Artificial Sequence
  Description of Artificial Sequence: Synthetic oligonucleotide
  Target: ATXN2; (-) strand; PAM type: NRG; PAM sequence: AAG
gttccttctgttctctatgg

SEQ ID NO: 28834 - DNA, 20 bp, Artificial Sequence
  Description of Artificial Sequence: Synthetic oligonucleotide
  Target: ATXN2; (-) strand; PAM type: NRG; PAM sequence: TGG
tctgttccttctgttctcta

SEQ ID NO: 28835 - DNA, 20 bp, Artificial Sequence
  Description of Artificial Sequence: Synthetic oligonucleotide
  Target: ATXN2; (-) strand; PAM type: NRG; PAM sequence: TGG
ttagtcaaaacaccattagt

SEQ ID NO: 28836 - DNA, 20 bp, Artificial Sequence
  Description of Artificial Sequence: Synthetic oligonucleotide
  Target: ATXN2; (-) strand; PAM type: NRG; PAM sequence: TAG
atgtttagtcaaaacaccat

SEQ ID NO: 28837 - DNA, 20 bp, Artificial Sequence
  Description of Artificial Sequence: Synthetic oligonucleotide
  Target: ATXN2; (-) strand; PAM type: NRG; PAM sequence: TAG
ttgcttttttatgtcatgtt

SEQ ID NO: 28838 - DNA, 20 bp, Artificial Sequence
  Description of Artificial Sequence: Synthetic oligonucleotide
  Target: ATXN2; (-) strand; PAM type: NRG; PAM sequence: AAG
gtgtccttcctcctctatgg

SEQ ID NO: 28839 - DNA, 20 bp, Artificial Sequence
  Description of Artificial Sequence: Synthetic oligonucleotide
  Target: ATXN2; (-) strand; PAM type: NRG; PAM sequence: TGG
tttgtgtccttcctcctcta

SEQ ID NO: 28840 - DNA, 20 bp, Artificial Sequence
  Description of Artificial Sequence: Synthetic oligonucleotide
  Target: ATXN2; (-) strand; PAM type: NRG; PAM sequence: CGG
tgatttgtcttccatcctta

SEQ ID NO: 28841 - DNA, 20 bp, Artificial Sequence
  Description of Artificial Sequence: Synthetic oligonucleotide
  Target: ATXN2; (-) strand; PAM type: NRG; PAM sequence: CAG
aaatccctcaaatcactttt

SEQ ID NO: 28842 - DNA, 20 bp, Artificial Sequence
  Description of Artificial Sequence: Synthetic oligonucleotide
  Target: ATXN2; (-) strand; PAM type: NRG; PAM sequence: CAG
ccacaatcaagttaatagaa

SEQ ID NO: 28843 - DNA, 20 bp, Artificial Sequence
  Description of Artificial Sequence: Synthetic oligonucleotide
  Target: ATXN2; (-) strand; PAM type: NRG; PAM sequence: TAG
taccaccacaatcaagttaa

SEQ ID NO: 28844 - DNA, 20 bp, Artificial Sequence
  Description of Artificial Sequence: Synthetic oligonucleotide
  Target: ATXN2; (-) strand; PAM type: NRG; PAM sequence: AAG
gtgtaactaccaccacaatc

SEQ ID NO: 28845 - DNA, 20 bp, Artificial Sequence
  Description of Artificial Sequence: Synthetic oligonucleotide
  Target: ATXN2; (-) strand; PAM type: NRG; PAM sequence: CAG
ttttaacaattgcatacaat

SEQ ID NO: 28846 - DNA, 20 bp, Artificial Sequence
  Description of Artificial Sequence: Synthetic oligonucleotide
  Target: ATXN2; (-) strand; PAM type: NRG; PAM sequence: GAG
ttcttagggtacatttctgt

SEQ ID NO: 28847 - DNA, 20 bp, Artificial Sequence
  Description of Artificial Sequence: Synthetic oligonucleotide
  Target: ATXN2; (-) strand; PAM type: NRG; PAM sequence: GGG
tttatacttcacccttctta

SEQ ID NO: 28848 - DNA, 20 bp, Artificial Sequence
  Description of Artificial Sequence: Synthetic oligonucleotide
  Target: ATXN2; (-) strand; PAM type: NRG; PAM sequence: AGG
atttatacttcacccttctt

SEQ ID NO: 28849 - DNA, 20 bp, Artificial Sequence
  Description of Artificial Sequence: Synthetic oligonucleotide
  Target: ATXN2; (-) strand; PAM type: NRG; PAM sequence: TAG
tatttatacttcacccttct

SEQ ID NO: 28850 - DNA, 20 bp, Artificial Sequence
  Description of Artificial Sequence: Synthetic oligonucleotide
  Target: ATXN2; (-) strand; PAM type: NRG; PAM sequence: TGG
tcttctatgaaggtatgacc

SEQ ID NO: 28851 - DNA, 20 bp, Artificial Sequence
  Description of Artificial Sequence: Synthetic oligonucleotide
  Target: ATXN2; (-) strand; PAM type: NRG; PAM sequence: AGG
tagtcagggttcttctatga

SEQ ID NO: 28852 - DNA, 20 bp, Artificial Sequence
  Description of Artificial Sequence: Synthetic oligonucleotide
  Target: ATXN2; (-) strand; PAM type: NRG; PAM sequence: AAG
ctagtcagggttcttctatg

SEQ ID NO: 28853 - DNA, 20 bp, Artificial Sequence
  Description of Artificial Sequence: Synthetic oligonucleotide
  Target: ATXN2; (-) strand; PAM type: NRG; PAM sequence: GGG
atgctgggagaacctagtca

SEQ ID NO: 28854 - DNA, 20 bp, Artificial Sequence
  Description of Artificial Sequence: Synthetic oligonucleotide
  Target: ATXN2; (-) strand; PAM type: NRG; PAM sequence: AGG
tatgctgggagaacctagtc

SEQ ID NO: 28855 - DNA, 20 bp, Artificial Sequence
  Description of Artificial Sequence: Synthetic oligonucleotide
  Target: ATXN2; (-) strand; PAM type: NRG; PAM sequence: CAG
atatgctgggagaacctagt

SEQ ID NO: 28856 - DNA, 20 bp, Artificial Sequence
  Description of Artificial Sequence: Synthetic oligonucleotide
  Target: ATXN2; (-) strand; PAM type: NRG; PAM sequence: TAG
gctgatatgctgggagaacc

SEQ ID NO: 28857 - DNA, 20 bp, Artificial Sequence
  Description of Artificial Sequence: Synthetic oligonucleotide
  Target: ATXN2; (-) strand; PAM type: NRG; PAM sequence: GAG
cactgatgctgatatgctgg

SEQ ID NO: 28858 - DNA, 20 bp, Artificial Sequence
  Description of Artificial Sequence: Synthetic oligonucleotide
  Target: ATXN2; (-) strand; PAM type: NRG; PAM sequence: GGG
gtcactgatgctgatatgct

SEQ ID NO: 28859 - DNA, 20 bp, Artificial Sequence
  Description of Artificial Sequence: Synthetic oligonucleotide
  Target: ATXN2; (-) strand; PAM type: NRG; PAM sequence: TGG
tgtcactgatgctgatatgc

SEQ ID NO: 28860 - DNA, 20 bp, Artificial Sequence
  Description of Artificial Sequence: Synthetic oligonucleotide
  Target: ATXN2; (-) strand; PAM type: NRG; PAM sequence: AAG
tagtgtggttgatcagactt

SEQ ID NO: 28861 - DNA, 20 bp, Artificial Sequence
  Description of Artificial Sequence: Synthetic oligonucleotide
  Target: ATXN2; (-) strand; PAM type: NRG; PAM sequence: CAG
tatggagtagtgtggttgat

SEQ ID NO: 28862 - DNA, 20 bp, Artificial Sequence
  Description of Artificial Sequence: Synthetic oligonucleotide
  Target: ATXN2; (-) strand; PAM type: NRG; PAM sequence: TGG
ggtagtaatatggagtagtg

SEQ ID NO: 28863 - DNA, 20 bp, Artificial Sequence
  Description of Artificial Sequence: Synthetic oligonucleotide
  Target: ATXN2; (-) strand; PAM type: NRG; PAM sequence: TAG
tatatggtagtaatatggag

SEQ ID NO: 28864 - DNA, 20 bp, Artificial Sequence
  Description of Artificial Sequence: Synthetic oligonucleotide
  Target: ATXN2; (-) strand; PAM type: NRG; PAM sequence: GAG
acgtatatggtagtaatatg

SEQ ID NO: 28865 - DNA, 20 bp, Artificial Sequence
  Description of Artificial Sequence: Synthetic oligonucleotide
  Target: ATXN2; (-) strand; PAM type: NRG; PAM sequence: TGG
acacgtatatggtagtaata

SEQ ID NO: 28866 - DNA, 20 bp, Artificial Sequence
  Description of Artificial Sequence: Synthetic oligonucleotide
  Target: ATXN2; (-) strand; PAM type: NRG; PAM sequence: TAG
gaagatatacacgtatatgg

SEQ ID NO: 28867 - DNA, 20 bp, Artificial Sequence
  Description of Artificial Sequence: Synthetic oligonucleotide
  Target: ATXN2; (-) strand; PAM type: NRG; PAM sequence: TGG
caggaagatatacacgtata

SEQ ID NO: 28868 - DNA, 20 bp, Artificial Sequence
  Description of Artificial Sequence: Synthetic oligonucleotide
  Target: ATXN2; (-) strand; PAM type: NRG; PAM sequence: AAG
attgttttacaagaatcagg

SEQ ID NO: 28869 - DNA, 20 bp, Artificial Sequence
  Description of Artificial Sequence: Synthetic oligonucleotide
  Target: ATXN2; (-) strand; PAM type: NRG; PAM sequence: AGG
tagattgttttacaagaatc

SEQ ID NO: 28870 - DNA, 20 bp, Artificial Sequence
  Description of Artificial Sequence: Synthetic oligonucleotide
  Target: ATXN2; (-) strand; PAM type: NRG; PAM sequence: CAG
ttagattgttttacaagaat

SEQ ID NO: 28871 - DNA, 20 bp, Artificial Sequence
  Description of Artificial Sequence: Synthetic oligonucleotide
  Target: ATXN2; (-) strand; PAM type: NRG; PAM sequence: AAG
cctttattagattgttttac

SEQ ID NO: 28872 - DNA, 20 bp, Artificial Sequence
  Description of Artificial Sequence: Synthetic oligonucleotide
  Target: ATXN2; (-) strand; PAM type: NRG; PAM sequence: TAG
ttttgagactttgcctttat

SEQ ID NO: 28873 - DNA, 20 bp, Artificial Sequence
  Description of Artificial Sequence: Synthetic oligonucleotide
  Target: ATXN2; (-) strand; PAM type: NRG; PAM sequence: GAG
agaagctatcacaaattttt

SEQ ID NO: 28874 - DNA, 20 bp, Artificial Sequence
  Description of Artificial Sequence: Synthetic oligonucleotide
  Target: ATXN2; (-) strand; PAM type: NRG; PAM sequence: AAG
tgatggaagaaataaatgag

SEQ ID NO: 28875 - DNA, 20 bp, Artificial Sequence
  Description of Artificial Sequence: Synthetic oligonucleotide
  Target: ATXN2; (-) strand; PAM type: NRG; PAM sequence: GAG
acatgatggaagaaataaat

SEQ ID NO: 28876 - DNA, 20 bp, Artificial Sequence
  Description of Artificial Sequence: Synthetic oligonucleotide
  Target: ATXN2; (-) strand; PAM type: NRG; PAM sequence: AAG
ctataagtcccacatgatgg

SEQ ID NO: 28877 - DNA, 20 bp, Artificial Sequence
  Description of Artificial Sequence: Synthetic oligonucleotide
  Target: ATXN2; (-) strand; PAM type: NRG; PAM sequence: TGG
aaactataagtcccacatga

SEQ ID NO: 28878 - DNA, 20 bp, Artificial Sequence
  Description of Artificial Sequence: Synthetic oligonucleotide
  Target: ATXN2; (-) strand; PAM type: NRG; PAM sequence: AAG
acatgaagggcagaaactat

SEQ ID NO: 28879 - DNA, 20 bp, Artificial Sequence
  Description of Artificial Sequence: Synthetic oligonucleotide
  Target: ATXN2; (-) strand; PAM type: NRG; PAM sequence: CAG
attgaaccggacatgaaggg

SEQ ID NO: 28880 - DNA, 20 bp, Artificial Sequence
  Description of Artificial Sequence: Synthetic oligonucleotide
  Target: ATXN2; (-) strand; PAM type: NRG; PAM sequence: GGG
gaaattgaaccggacatgaa

SEQ ID NO: 28881 - DNA, 20 bp, Artificial Sequence
  Description of Artificial Sequence: Synthetic oligonucleotide
  Target: ATXN2; (-) strand; PAM type: NRG; PAM sequence: AGG
tgaaattgaaccggacatga

SEQ ID NO: 28882 - DNA, 20 bp, Artificial Sequence
  Description of Artificial Sequence: Synthetic oligonucleotide
  Target: ATXN2; (-) strand; PAM type: NRG; PAM sequence: AAG
atgaaattgaaccggacatg

SEQ ID NO: 28883 - DNA, 20 bp, Artificial Sequence
  Description of Artificial Sequence: Synthetic oligonucleotide
  Target: ATXN2; (-) strand; PAM type: NRG; PAM sequence: CGG
tgttatcaatgaaattgaac

SEQ ID NO: 28884 - DNA, 20 bp, Artificial Sequence
  Description of Artificial Sequence: Synthetic oligonucleotide
  Target: ATXN2; (-) strand; PAM type: NRG; PAM sequence: TGG
ggctttctggtcttaaattt

SEQ ID NO: 28885 - DNA, 20 bp, Artificial Sequence
  Description of Artificial Sequence: Synthetic oligonucleotide
  Target: ATXN2; (-) strand; PAM type: NRG; PAM sequence: TGG
atttttctcctttggctttc

SEQ ID NO: 28886 - DNA, 20 bp, Artificial Sequence
  Description of Artificial Sequence: Synthetic oligonucleotide
  Target: ATXN2; (-) strand; PAM type: NRG; PAM sequence: TGG
ctgctttcatttttctcctt

SEQ ID NO: 28887 - DNA, 20 bp, Artificial Sequence
  Description of Artificial Sequence: Synthetic oligonucleotide
  Target: ATXN2; (-) strand; PAM type: NRG; PAM sequence: GAG
caccaagagtggagtctgca

SEQ ID NO: 28888 - DNA, 20 bp, Artificial Sequence
  Description of Artificial Sequence: Synthetic oligonucleotide
  Target: ATXN2; (-) strand; PAM type: NRG; PAM sequence: CAG
aacaccaagagtggagtctg

SEQ ID NO: 28889 - DNA, 20 bp, Artificial Sequence
  Description of Artificial Sequence: Synthetic oligonucleotide
  Target: ATXN2; (-) strand; PAM type: NRG; PAM sequence: GAG
tacgtagaacaccaagagtg

SEQ ID NO: 28890 - DNA, 20 bp, Artificial Sequence
  Description of Artificial Sequence: Synthetic oligonucleotide
  Target: ATXN2; (-) strand; PAM type: NRG; PAM sequence: TGG
gatacgtagaacaccaagag

SEQ ID NO: 28891 - DNA, 20 bp, Artificial Sequence
  Description of Artificial Sequence: Synthetic oligonucleotide
  Target: ATXN2; (-) strand; PAM type: NRG; PAM sequence: GAG
aaagatacgtagaacaccaa

SEQ ID NO: 28892 - DNA, 20 bp, Artificial Sequence
  Description of Artificial Sequence: Synthetic oligonucleotide
  Target: ATXN2; (-) strand; PAM type: NRG; PAM sequence: AAG
caaaagatacgtagaacacc

SEQ ID NO: 28893 - DNA, 20 bp, Artificial Sequence
  Description of Artificial Sequence: Synthetic oligonucleotide
  Target: ATXN2; (-) strand; PAM type: NRG; PAM sequence: TAG
aaaaacctccaaaagatacg

SEQ ID NO: 28894 - DNA, 20 bp, Artificial Sequence
  Description of Artificial Sequence: Synthetic oligonucleotide
  Target: ATXN2; (-) strand; PAM type: NRG; PAM sequence: AAG
tctaagtgaaaaacctccaa

SEQ ID NO: 28895 - DNA, 20 bp, Artificial Sequence
  Description of Artificial Sequence: Synthetic oligonucleotide
  Target: ATXN2; (-) strand; PAM type: NRG; PAM sequence: AAG
aaatgactaagtgcaaatct

SEQ ID NO: 28896 - DNA, 20 bp, Artificial Sequence
  Description of Artificial Sequence: Synthetic oligonucleotide
  Target: ATXN2; (-) strand; PAM type: NRG; PAM sequence: AAG
ttgttcttttctaaatgact

SEQ ID NO: 28897 - DNA, 20 bp, Artificial Sequence
  Description of Artificial Sequence: Synthetic oligonucleotide
  Target: ATXN2; (-) strand; PAM type: NRG; PAM sequence: AAG
tcacgtgtaataacaagaac

SEQ ID NO: 28898 - DNA, 20 bp, Artificial Sequence
  Description of Artificial Sequence: Synthetic oligonucleotide
  Target: ATXN2; (-) strand; PAM type: NRG; PAM sequence: AAG
tttttgtcacgtgtaataac

SEQ ID NO: 28899 - DNA, 20 bp, Artificial Sequence
  Description of Artificial Sequence: Synthetic oligonucleotide
  Target: ATXN2; (-) strand; PAM type: NRG; PAM sequence: TAG
caaaccatatcatttgtaaa

SEQ ID NO: 28900 - DNA, 20 bp, Artificial Sequence
  Description of Artificial Sequence: Synthetic oligonucleotide
  Target: ATXN2; (-) strand; PAM type: NRG; PAM sequence: CAG
ataagatttgggtggggaca

SEQ ID NO: 28901 - DNA, 20 bp, Artificial Sequence
  Description of Artificial Sequence: Synthetic oligonucleotide
  Target: ATXN2; (-) strand; PAM type: NRG; PAM sequence: GGG
ttaaagataagatttgggtg

SEQ ID NO: 28902 - DNA, 20 bp, Artificial Sequence
  Description of Artificial Sequence: Synthetic oligonucleotide
  Target: ATXN2; (-) strand; PAM type: NRG; PAM sequence: GGG
attaaagataagatttgggt

SEQ ID NO: 28903 - DNA, 20 bp, Artificial Sequence
  Description of Artificial Sequence: Synthetic oligonucleotide
  Target: ATXN2; (-) strand; PAM type: NRG; PAM sequence: TGG
aattaaagataagatttggg

SEQ ID NO: 28904 - DNA, 20 bp, Artificial Sequence
  Description of Artificial Sequence: Synthetic oligonucleotide
  Target: ATXN2; (-) strand; PAM type: NRG; PAM sequence: GGG
tataattaaagataagattt

SEQ ID NO: 28905 - DNA, 20 bp, Artificial Sequence
  Description of Artificial Sequence: Synthetic oligonucleotide
  Target: ATXN2; (-) strand; PAM type: NRG; PAM sequence: TGG
ttataattaaagataagatt

SEQ ID NO: 28906 - DNA, 20 bp, Artificial Sequence
  Description of Artificial Sequence: Synthetic oligonucleotide
  Target: ATXN2; (-) strand; PAM type: NRG; PAM sequence: AAG
gaattattataattaaagat

SEQ ID NO: 28907 - DNA, 20 bp, Artificial Sequence
  Description of Artificial Sequence: Synthetic oligonucleotide
  Target: ATXN2; (-) strand; PAM type: NRG; PAM sequence: AAG
cacgagaattattataatta

SEQ ID NO: 28908 - DNA, 20 bp, Artificial Sequence
  Description of Artificial Sequence: Synthetic oligonucleotide
  Target: ATXN2; (-) strand; PAM type: NRG; PAM sequence: GAG
tggtcttgcccttgacacac

SEQ ID NO: 28909 - DNA, 20 bp, Artificial Sequence
  Description of Artificial Sequence: Synthetic oligonucleotide
  Target: ATXN2; (-) strand; PAM type: NRG; PAM sequence: TGG
atgattcagttatctccacc

SEQ ID NO: 28910 - DNA, 20 bp, Artificial Sequence
  Description of Artificial Sequence: Synthetic oligonucleotide
  Target: ATXN2; (-) strand; PAM type: NRG; PAM sequence: CAG
gggaaactgcccccatgatt

SEQ ID NO: 28911 - DNA, 20 bp, Artificial Sequence
  Description of Artificial Sequence: Synthetic oligonucleotide
  Target: ATXN2; (-) strand; PAM type: NRG; PAM sequence: GGG
ctatcatgagagcagcgtag

SEQ ID NO: 28912 - DNA, 20 bp, Artificial Sequence
  Description of Artificial Sequence: Synthetic oligonucleotide
  Target: ATXN2; (-) strand; PAM type: NRG; PAM sequence: GGG
actatcatgagagcagcgta

SEQ ID NO: 28913 - DNA, 20 bp, Artificial Sequence
  Description of Artificial Sequence: Synthetic oligonucleotide
  Target: ATXN2; (-) strand; PAM type: NRG; PAM sequence: AGG
cactatcatgagagcagcgt

SEQ ID NO: 28914 - DNA, 20 bp, Artificial Sequence
  Description of Artificial Sequence: Synthetic oligonucleotide
  Target: ATXN2; (-) strand; PAM type: NRG; PAM sequence: TAG
tcactatcatgagagcagcg

SEQ ID NO: 28915 - DNA, 20 bp, Artificial Sequence
  Description of Artificial Sequence: Synthetic oligonucleotide
  Target: ATXN2; (-) strand; PAM type: NRG; PAM sequence: CAG
ctcactcactatcatgagag

SEQ ID NO: 28916 - DNA, 20 bp, Artificial Sequence
  Description of Artificial Sequence: Synthetic oligonucleotide
  Target: ATXN2; (-) strand; PAM type: NRG; PAM sequence: GAG
gaactcactcactatcatga

SEQ ID NO: 28917 - DNA, 20 bp, Artificial Sequence
  Description of Artificial Sequence: Synthetic oligonucleotide
  Target: ATXN2; (-) strand; PAM type: NRG; PAM sequence: GAG
gagaactcactcactatcat

SEQ ID NO: 28918 - DNA, 20 bp, Artificial Sequence
  Description of Artificial Sequence: Synthetic oligonucleotide
  Target: ATXN2; (-) strand; PAM type: NRG; PAM sequence: GAG
ataaaaccatcagatctcct

SEQ ID NO: 28919 - DNA, 20 bp, Artificial Sequence
  Description of Artificial Sequence: Synthetic oligonucleotide
  Target: ATXN2; (-) strand; PAM type: NRG; PAM sequence: CAG
aaagccccttataaaaccat

SEQ ID NO: 28920 - DNA, 20 bp, Artificial Sequence
  Description of Artificial Sequence: Synthetic oligonucleotide
  Target: ATXN2; (-) strand; PAM type: NRG; PAM sequence: AAG
agtgctgagcaaagcaggga

SEQ ID NO: 28921 - DNA, 20 bp, Artificial Sequence
  Description of Artificial Sequence: Synthetic oligonucleotide
  Target: ATXN2; (-) strand; PAM type: NRG; PAM sequence: GGG
gagaagtgctgagcaaagca

SEQ ID NO: 28922 - DNA, 20 bp, Artificial Sequence
  Description of Artificial Sequence: Synthetic oligonucleotide
  Target: ATXN2; (-) strand; PAM type: NRG; PAM sequence: AGG
agagaagtgctgagcaaagc

SEQ ID NO: 28923 - DNA, 20 bp, Artificial Sequence
  Description of Artificial Sequence: Synthetic oligonucleotide
  Target: ATXN2; (-) strand; PAM type: NRG; PAM sequence: CAG
gagagaagtgctgagcaaag

SEQ ID NO: 28924 - DNA, 20 bp, Artificial Sequence
  Description of Artificial Sequence: Synthetic oligonucleotide
  Target: ATXN2; (-) strand; PAM type: NRG; PAM sequence: AAG
ggagagagaagtgctgagca

SEQ ID NO: 28925 - DNA, 20 bp, Artificial Sequence
  Description of Artificial Sequence: Synthetic oligonucleotide
  Target: ATXN2; (-) strand; PAM type: NRG; PAM sequence: GAG
cgacaggagagagaagtgct

SEQ ID NO: 28926 - DNA, 20 bp, Artificial Sequence
  Description of Artificial Sequence: Synthetic oligonucleotide
  Target: ATXN2; (-) strand; PAM type: NRG; PAM sequence: AAG
cacatagcgacaggagagag

SEQ ID NO: 28927 - DNA, 20 bp, Artificial Sequence
  Description of Artificial Sequence: Synthetic oligonucleotide
  Target: ATXN2; (-) strand; PAM type: NRG; PAM sequence: GAG
cttcacatagcgacaggaga

SEQ ID NO: 28928 - DNA, 20 bp, Artificial Sequence
  Description of Artificial Sequence: Synthetic oligonucleotide
  Target: ATXN2; (-) strand; PAM type: NRG; PAM sequence: GAG
ttcttcacatagcgacagga

SEQ ID NO: 28929 - DNA, 20 bp, Artificial Sequence
  Description of Artificial Sequence: Synthetic oligonucleotide
  Target: ATXN2; (-) strand; PAM type: NRG; PAM sequence: GAG
ccttcttcacatagcgacag

SEQ ID NO: 28930 - DNA, 20 bp, Artificial Sequence
  Description of Artificial Sequence: Synthetic oligonucleotide
  Target: ATXN2; (-) strand; PAM type: NRG; PAM sequence: AGG
atccttcttcacatagcgac

SEQ ID NO: 28931 - DNA, 20 bp, Artificial Sequence
  Description of Artificial Sequence: Synthetic oligonucleotide
  Target: ATXN2; (-) strand; PAM type: NRG; PAM sequence: CAG
catccttcttcacatagcga

SEQ ID NO: 28932 - DNA, 20 bp, Artificial Sequence
  Description of Artificial Sequence: Synthetic oligonucleotide
  Target: ATXN2; (-) strand; PAM type: NRG; PAM sequence: TAG
caaacacatccttcttcaca

SEQ ID NO: 28933 - DNA, 20 bp, Artificial Sequence
  Description of Artificial Sequence: Synthetic oligonucleotide
  Target: ATXN2; (-) strand; PAM type: NRG; PAM sequence: AAG
tacaatcatggtggaagggg

SEQ ID NO: 28934 - DNA, 20 bp, Artificial Sequence
  Description of Artificial Sequence: Synthetic oligonucleotide
  Target: ATXN2; (-) strand; PAM type: NRG; PAM sequence: GGG
acttacaatcatggtggaag

SEQ ID NO: 28935 - DNA, 20 bp, Artificial Sequence
  Description of Artificial Sequence: Synthetic oligonucleotide
  Target: ATXN2; (-) strand; PAM type: NRG; PAM sequence: GGG
aacttacaatcatggtggaa

SEQ ID NO: 28936 - DNA, 20 bp, Artificial Sequence
  Description of Artificial Sequence: Synthetic oligonucleotide
  Target: ATXN2; (-) strand; PAM type: NRG; PAM sequence: AGG
aaacttacaatcatggtgga

SEQ ID NO: 28937 - DNA, 20 bp, Artificial Sequence
  Description of Artificial Sequence: Synthetic oligonucleotide
  Target: ATXN2; (-) strand; PAM type: NRG; PAM sequence: AAG
gaaacttacaatcatggtgg

SEQ ID NO: 28938 - DNA, 20 bp, Artificial Sequence
  Description of Artificial Sequence: Synthetic oligonucleotide
  Target: ATXN2; (-) strand; PAM type: NRG; PAM sequence: TGG
caggaaacttacaatcatgg

SEQ ID NO: 28939 - DNA, 20 bp, Artificial Sequence
  Description of Artificial Sequence: Synthetic oligonucleotide
  Target: ATXN2; (-) strand; PAM type: NRG; PAM sequence: TGG
cctcaggaaacttacaatca

SEQ ID NO: 28940 - DNA, 20 bp, Artificial Sequence
  Description of Artificial Sequence: Synthetic oligonucleotide
  Target: ATXN2; (-) strand; PAM type: NRG; PAM sequence: AGG
tgcattgctggggaggcctc

SEQ ID NO: 28941 - DNA, 20 bp, Artificial Sequence
  Description of Artificial Sequence: Synthetic oligonucleotide
  Target: ATXN2; (-) strand; PAM type: NRG; PAM sequence: CAG
ctgcattgctggggaggcct

SEQ ID NO: 28942 - DNA, 20 bp, Artificial Sequence
  Description of Artificial Sequence: Synthetic oligonucleotide
  Target: ATXN2; (-) strand; PAM type: NRG; PAM sequence: AGG
catgctctgcattgctgggg

SEQ ID NO: 28943 - DNA, 20 bp, Artificial Sequence
  Description of Artificial Sequence: Synthetic oligonucleotide
  Target: ATXN2; (-) strand; PAM type: NRG; PAM sequence: GAG
tcatgctctgcattgctggg

SEQ ID NO: 28944 - DNA, 20 bp, Artificial Sequence
  Description of Artificial Sequence: Synthetic oligonucleotide
  Target: ATXN2; (-) strand; PAM type: NRG; PAM sequence: GGG
actcatgctctgcattgctg

SEQ ID NO: 28945 - DNA, 20 bp, Artificial Sequence
  Description of Artificial Sequence: Synthetic oligonucleotide
  Target: ATXN2; (-) strand; PAM type: NRG; PAM sequence: GGG
gactcatgctctgcattgct

SEQ ID NO: 28946 - DNA, 20 bp, Artificial Sequence
  Description of Artificial Sequence: Synthetic oligonucleotide
  Target: ATXN2; (-) strand; PAM type: NRG; PAM sequence: TGG
tgactcatgctctgcattgc

SEQ ID NO: 28947 - DNA, 20 bp, Artificial Sequence
  Description of Artificial Sequence: Synthetic oligonucleotide
  Target: ATXN2; (-) strand; PAM type: NRG; PAM sequence: AGG
gggtaatttataaaggaaag

SEQ ID NO: 28948 - DNA, 20 bp, Artificial Sequence
  Description of Artificial Sequence: Synthetic oligonucleotide
  Target: ATXN2; (-) strand; PAM type: NRG; PAM sequence: GAG
tgggtaatttataaaggaaa

SEQ ID NO: 28949 - DNA, 20 bp, Artificial Sequence
  Description of Artificial Sequence: Synthetic oligonucleotide
  Target: ATXN2; (-) strand; PAM type: NRG; PAM sequence: AAG
actgggtaatttataaagga

SEQ ID NO: 28950 - DNA, 20 bp, Artificial Sequence
  Description of Artificial Sequence: Synthetic oligonucleotide
  Target: ATXN2; (-) strand; PAM type: NRG; PAM sequence: AGG
taagactgggtaatttataa

SEQ ID NO: 28951 - DNA, 20 bp, Artificial Sequence
  Description of Artificial Sequence: Synthetic oligonucleotide
  Target: ATXN2; (-) strand; PAM type: NRG; PAM sequence: AAG
ctaagactgggtaatttata

SEQ ID NO: 28952 - DNA, 20 bp, Artificial Sequence
  Description of Artificial Sequence: Synthetic oligonucleotide
  Target: ATXN2; (-) strand; PAM type: NRG; PAM sequence: GGG
ataaagatatacctaagact

SEQ ID NO: 28953 - DNA, 20 bp, Artificial Sequence
  Description of Artificial Sequence: Synthetic oligonucleotide
  Target: ATXN2; (-) strand; PAM type: NRG; PAM sequence: TGG
aataaagatatacctaagac

SEQ ID NO: 28954 - DNA, 20 bp, Artificial Sequence
  Description of Artificial Sequence: Synthetic oligonucleotide
  Target: ATXN2; (-) strand; PAM type: NRG; PAM sequence: AAG
ctgctaataaagatatacct

SEQ ID NO: 28955 - DNA, 20 bp, Artificial Sequence
  Description of Artificial Sequence: Synthetic oligonucleotide
  Target: ATXN2; (-) strand; PAM type: NRG; PAM sequence: AAG
ccattcttacactgctaata

SEQ ID NO: 28956 - DNA, 20 bp, Artificial Sequence
  Description of Artificial Sequence: Synthetic oligonucleotide
  Target: ATXN2; (-) strand; PAM type: NRG; PAM sequence: TAG
tgtacaattacttgttgtat

SEQ ID NO: 28957 - DNA, 20 bp, Artificial Sequence
  Description of Artificial Sequence: Synthetic oligonucleotide
  Target: ATXN2; (-) strand; PAM type: NRG; PAM sequence: TAG
tgactgtttaagtatgttat

SEQ ID NO: 28958 - DNA, 20 bp, Artificial Sequence
  Description of Artificial Sequence: Synthetic oligonucleotide
  Target: ATXN2; (-) strand; PAM type: NRG; PAM sequence: AAG
catagataacttgactgttt

SEQ ID NO: 28959 - DNA, 20 bp, Artificial Sequence
  Description of Artificial Sequence: Synthetic oligonucleotide
  Target: ATXN2; (-) strand; PAM type: NRG; PAM sequence: TAG
ccttcttttgaattttgtca

SEQ ID NO: 28960 - DNA, 20 bp, Artificial Sequence
  Description of Artificial Sequence: Synthetic oligonucleotide
  Target: ATXN2; (-) strand; PAM type: NRG; PAM sequence: AAG
cagaccaaatgccaaggcaa

SEQ ID NO: 28961 - DNA, 20 bp, Artificial Sequence
  Description of Artificial Sequence: Synthetic oligonucleotide
  Target: ATXN2; (-) strand; PAM type: NRG; PAM sequence: AGG
taaccacagaccaaatgcca

SEQ ID NO: 28962 - DNA, 20 bp, Artificial Sequence
  Description of Artificial Sequence: Synthetic oligonucleotide
  Target: ATXN2; (-) strand; PAM type: NRG; PAM sequence: AAG
ctaaccacagaccaaatgcc

SEQ ID NO: 28963 - DNA, 20 bp, Artificial Sequence
  Description of Artificial Sequence: Synthetic oligonucleotide
  Target: ATXN2; (-) strand; PAM type: NRG; PAM sequence: CAG
taaaacatgatctctaacca

SEQ ID NO: 28964 - DNA, 20 bp, Artificial Sequence
  Description of Artificial Sequence: Synthetic oligonucleotide
  Target: ATXN2; (-) strand; PAM type: NRG; PAM sequence: TAG
tacttattggggaaaattag

SEQ ID NO: 28965 - DNA, 20 bp, Artificial Sequence
  Description of Artificial Sequence: Synthetic oligonucleotide
  Target: ATXN2; (-) strand; PAM type: NRG; PAM sequence: TAG
tgttacttattggggaaaat

SEQ ID NO: 28966 - DNA, 20 bp, Artificial Sequence
  Description of Artificial Sequence: Synthetic oligonucleotide
  Target: ATXN2; (-) strand; PAM type: NRG; PAM sequence: GGG
aactttaatgttacttattg

SEQ ID NO: 28967 - DNA, 20 bp, Artificial Sequence
  Description of Artificial Sequence: Synthetic oligonucleotide
  Target: ATXN2; (-) strand; PAM type: NRG; PAM sequence: GGG
taactttaatgttacttatt

SEQ ID NO: 28968 - DNA, 20 bp, Artificial Sequence
  Description of Artificial Sequence: Synthetic oligonucleotide
  Target: ATXN2; (-) strand; PAM type: NRG; PAM sequence: TGG
gtaactttaatgttacttat

SEQ ID NO: 28969 - DNA, 20 bp, Artificial Sequence
  Description of Artificial Sequence: Synthetic oligonucleotide
  Target: ATXN2; (-) strand; PAM type: NRG; PAM sequence: GAG
ggactgcctcagtctacggt

SEQ ID NO: 28970 - DNA, 20 bp, Artificial Sequence
  Description of Artificial Sequence: Synthetic oligonucleotide
  Target: ATXN2; (-) strand; PAM type: NRG; PAM sequence: CGG
caaaggactgcctcagtcta

SEQ ID NO: 28971 - DNA, 20 bp, Artificial Sequence
  Description of Artificial Sequence: Synthetic oligonucleotide
  Target: ATXN2; (-) strand; PAM type: NRG; PAM sequence: CAG
acagtaacaaaggactgcct

SEQ ID NO: 28972 - DNA, 20 bp, Artificial Sequence
  Description of Artificial Sequence: Synthetic oligonucleotide
  Target: ATXN2; (-) strand; PAM type: NRG; PAM sequence: AGG
agaggtcgaaacagtaacaa

SEQ ID NO: 28973 - DNA, 20 bp, Artificial Sequence
  Description of Artificial Sequence: Synthetic oligonucleotide
  Target: ATXN2; (-) strand; PAM type: NRG; PAM sequence: AAG
cagaggtcgaaacagtaaca

SEQ ID NO: 28974 - DNA, 20 bp, Artificial Sequence
  Description of Artificial Sequence: Synthetic oligonucleotide
  Target: ATXN2; (-) strand; PAM type: NRG; PAM sequence: CAG
aatcttttcagaggtcgaaa

SEQ ID NO: 28975 - DNA, 20 bp, Artificial Sequence
  Description of Artificial Sequence: Synthetic oligonucleotide
  Target: ATXN2; (-) strand; PAM type: NRG; PAM sequence: AGG
ataatatttaatcttttcag

SEQ ID NO: 28976 - DNA, 20 bp, Artificial Sequence
  Description of Artificial Sequence: Synthetic oligonucleotide
  Target: ATXN2; (-) strand; PAM type: NRG; PAM sequence: GAG
aataatatttaatcttttca

SEQ ID NO: 28977 - DNA, 20 bp, Artificial Sequence
  Description of Artificial Sequence: Synthetic oligonucleotide
  Target: ATXN2; (-) strand; PAM type: NRG; PAM sequence: CAG
aaaataatatttaatctttt

SEQ ID NO: 28978 - DNA, 20 bp, Artificial Sequence
  Description of Artificial Sequence: Synthetic oligonucleotide
  Target: ATXN2; (-) strand; PAM type: NRG; PAM sequence: TAG
gaaatatttttcagcttatt

SEQ ID NO: 28979 - DNA, 20 bp, Artificial Sequence
  Description of Artificial Sequence: Synthetic oligonucleotide
  Target: ATXN2; (-) strand; PAM type: NRG; PAM sequence: CAG
ttaagtttggaaatattttt

SEQ ID NO: 28980 - DNA, 20 bp, Artificial Sequence
  Description of Artificial Sequence: Synthetic oligonucleotide
  Target: ATXN2; (-) strand; PAM type: NRG; PAM sequence: TGG
atggaattatattttaagtt

SEQ ID NO: 28981 - DNA, 20 bp, Artificial Sequence
  Description of Artificial Sequence: Synthetic oligonucleotide
  Target: ATXN2; (-) strand; PAM type: NRG; PAM sequence: AAG
tttgaatggaattatatttt

SEQ ID NO: 28982 - DNA, 20 bp, Artificial Sequence
  Description of Artificial Sequence: Synthetic oligonucleotide
  Target: ATXN2; (-) strand; PAM type: NRG; PAM sequence: TGG
tagcctctcctttatttgaa

SEQ ID NO: 28983 - DNA, 20 bp, Artificial Sequence
  Description of Artificial Sequence: Synthetic oligonucleotide
  Target: ATXN2; (-) strand; PAM type: NRG; PAM sequence: TAG
aggtgagctctccccacaga

SEQ ID NO: 28984 - DNA, 20 bp, Artificial Sequence
  Description of Artificial Sequence: Synthetic oligonucleotide
  Target: ATXN2; (-) strand; PAM type: NRG; PAM sequence: CAG
tattaggtgagctctcccca

SEQ ID NO: 28985 - DNA, 20 bp, Artificial Sequence
  Description of Artificial Sequence: Synthetic oligonucleotide
  Target: ATXN2; (-) strand; PAM type: NRG; PAM sequence: GAG
ctttagacttaatattaggt

SEQ ID NO: 28986 - DNA, 20 bp, Artificial Sequence
  Description of Artificial Sequence: Synthetic oligonucleotide
  Target: ATXN2; (-) strand; PAM type: NRG; PAM sequence: AGG
tagcctttagacttaatatt

SEQ ID NO: 28987 - DNA, 20 bp, Artificial Sequence
  Description of Artificial Sequence: Synthetic oligonucleotide
  Target: ATXN2; (-) strand; PAM type: NRG; PAM sequence: TAG
gtagcctttagacttaatat

SEQ ID NO: 28988 - DNA, 20 bp, Artificial Sequence
  Description of Artificial Sequence: Synthetic oligonucleotide
  Target: ATXN2; (-) strand; PAM type: NRG; PAM sequence: TAG
agccatccttaggtagcctt

SEQ ID NO: 28989 - DNA, 20 bp, Artificial Sequence
  Description of Artificial Sequence: Synthetic oligonucleotide
  Target: ATXN2; (-) strand; PAM type: NRG; PAM sequence: TAG
taggtagagccatccttagg

SEQ ID NO: 28990 - DNA, 20 bp, Artificial Sequence
  Description of Artificial Sequence: Synthetic oligonucleotide
  Target: ATXN2; (-) strand; PAM type: NRG; PAM sequence: AGG
gcataggtagagccatcctt

SEQ ID NO: 28991 - DNA, 20 bp, Artificial Sequence
  Description of Artificial Sequence: Synthetic oligonucleotide
  Target: ATXN2; (-) strand; PAM type: NRG; PAM sequence: TAG
tgcataggtagagccatcct

SEQ ID NO: 28992 - DNA, 20 bp, Artificial Sequence
  Description of Artificial Sequence: Synthetic oligonucleotide
  Target: ATXN2; (-) strand; PAM type: NRG; PAM sequence: GAG
aggcaagcagtgcataggta

SEQ ID NO: 28993 - DNA, 20 bp, Artificial Sequence
  Description of Artificial Sequence: Synthetic oligonucleotide
  Target: ATXN2; (-) strand; PAM type: NRG; PAM sequence: TAG
ccaggcaagcagtgcatagg

SEQ ID NO: 28994 - DNA, 20 bp, Artificial Sequence
  Description of Artificial Sequence: Synthetic oligonucleotide
  Target: ATXN2; (-) strand; PAM type: NRG; PAM sequence: AGG
tctccaggcaagcagtgcat

SEQ ID NO: 28995 - DNA, 20 bp, Artificial Sequence
  Description of Artificial Sequence: Synthetic oligonucleotide
  Target: ATXN2; (-) strand; PAM type: NRG; PAM sequence: TAG
gtctccaggcaagcagtgca

SEQ ID NO: 28996 - DNA, 20 bp, Artificial Sequence
  Description of Artificial Sequence: Synthetic oligonucleotide
  Target: ATXN2; (-) strand; PAM type: NRG; PAM sequence: CAG
gttgtgggtctccaggcaag

SEQ ID NO: 28997 - DNA, 20 bp, Artificial Sequence
  Description of Artificial Sequence: Synthetic oligonucleotide
  Target: ATXN2; (-) strand; PAM type: NRG; PAM sequence: AAG
cctgttgtgggtctccaggc

SEQ ID NO: 28998 - DNA, 20 bp, Artificial Sequence
  Description of Artificial Sequence: Synthetic oligonucleotide
  Target: ATXN2; (-) strand; PAM type: NRG; PAM sequence: AGG
cctacctgttgtgggtctcc

SEQ ID NO: 28999 - DNA, 20 bp, Artificial Sequence
  Description of Artificial Sequence: Synthetic oligonucleotide
  Target: ATXN2; (-) strand; PAM type: NRG; PAM sequence: CAG
ccctacctgttgtgggtctc

SEQ ID NO: 29000 - DNA, 20 bp, Artificial Sequence
  Description of Artificial Sequence: Synthetic oligonucleotide
  Target: ATXN2; (-) strand; PAM type: NRG; PAM sequence: GGG
ctatgacccctacctgttgt

SEQ ID NO: 29001 - DNA, 20 bp, Artificial Sequence
  Description of Artificial Sequence: Synthetic oligonucleotide
  Target: ATXN2; (-) strand; PAM type: NRG; PAM sequence: TGG
tctatgacccctacctgttg

SEQ ID NO: 29002 - DNA, 20 bp, Artificial Sequence
  Description of Artificial Sequence: Synthetic oligonucleotide
  Target: ATXN2; (-) strand; PAM type: NRG; PAM sequence: TAG
tgatgaagtttgattatttc

SEQ ID NO: 29003 - DNA, 20 bp, Artificial Sequence
  Description of Artificial Sequence: Synthetic oligonucleotide
  Target: ATXN2; (-) strand; PAM type: NRG; PAM sequence: AAG
ttatttatttgattttgatg

SEQ ID NO: 29004 - DNA, 20 bp, Artificial Sequence
  Description of Artificial Sequence: Synthetic oligonucleotide
  Target: ATXN2; (-) strand; PAM type: NRG; PAM sequence: AGG
attagtttttttcttccagt

SEQ ID NO: 29005 - DNA, 20 bp, Artificial Sequence
  Description of Artificial Sequence: Synthetic oligonucleotide
  Target: ATXN2; (-) strand; PAM type: NRG; PAM sequence: TAG
cattagtttttttcttccag

SEQ ID NO: 29006 - DNA, 20 bp, Artificial Sequence
  Description of Artificial Sequence: Synthetic oligonucleotide
  Target: ATXN2; (-) strand; PAM type: NRG; PAM sequence: CAG
tagcattagtttttttcttc

SEQ ID NO: 29007 - DNA, 20 bp, Artificial Sequence
  Description of Artificial Sequence: Synthetic oligonucleotide
  Target: ATXN2; (-) strand; PAM type: NRG; PAM sequence: TAG
tattaatttacgtttagcat

SEQ ID NO: 29008 - DNA, 20 bp, Artificial Sequence
  Description of Artificial Sequence: Synthetic oligonucleotide
  Target: ATXN2; (-) strand; PAM type: NRG; PAM sequence: TAG
aattattattaatttacgtt

SEQ ID NO: 29009 - DNA, 20 bp, Artificial Sequence
  Description of Artificial Sequence: Synthetic oligonucleotide
  Target: ATXN2; (-) strand; PAM type: NRG; PAM sequence: TGG
agaggtgcatgccacatgcc

SEQ ID NO: 29010 - DNA, 20 bp, Artificial Sequence
  Description of Artificial Sequence: Synthetic oligonucleotide
  Target: ATXN2; (-) strand; PAM type: NRG; PAM sequence: AGG
tcctgagtagctaggactag

SEQ ID NO: 29011 - DNA, 20 bp, Artificial Sequence
  Description of Artificial Sequence: Synthetic oligonucleotide
  Target: ATXN2; (-) strand; PAM type: NRG; PAM sequence: GAG
ctcctgagtagctaggacta

SEQ ID NO: 29012 - DNA, 20 bp, Artificial Sequence
  Description of Artificial Sequence: Synthetic oligonucleotide
  Target: ATXN2; (-) strand; PAM type: NRG; PAM sequence: TAG
gcctcctgagtagctaggac

SEQ ID NO: 29013 - DNA, 20 bp, Artificial Sequence
  Description of Artificial Sequence: Synthetic oligonucleotide
  Target: ATXN2; (-) strand; PAM type: NRG; PAM sequence: AGG
cctcagcctcctgagtagct

SEQ ID NO: 29014 - DNA, 20 bp, Artificial Sequence
  Description of Artificial Sequence: Synthetic oligonucleotide
  Target: ATXN2; (-) strand; PAM type: NRG; PAM sequence: TAG
gcctcagcctcctgagtagc

SEQ ID NO: 29015 - DNA, 20 bp, Artificial Sequence
  Description of Artificial Sequence: Synthetic oligonucleotide
  Target: ATXN2; (-) strand; PAM type: NRG; PAM sequence: TAG
tcctgcctcagcctcctgag

SEQ ID NO: 29016 - DNA, 20 bp, Artificial Sequence
  Description of Artificial Sequence: Synthetic oligonucleotide
  Target: ATXN2; (-) strand; PAM type: NRG; PAM sequence: GAG
tgatcctgcctcagcctcct

SEQ ID NO: 29017 - DNA, 20 bp, Artificial Sequence
  Description of Artificial Sequence: Synthetic oligonucleotide
  Target: ATXN2; (-) strand; PAM type: NRG; PAM sequence: CAG
ggactctggtgatcctgcct

SEQ ID NO: 29018 - DNA, 20 bp, Artificial Sequence
  Description of Artificial Sequence: Synthetic oligonucleotide
  Target: ATXN2; (-) strand; PAM type: NRG; PAM sequence: TGG
agcctcagactcctggactc

SEQ ID NO: 29019 - DNA, 20 bp, Artificial Sequence
  Description of Artificial Sequence: Synthetic oligonucleotide
  Target: ATXN2; (-) strand; PAM type: NRG; PAM sequence: TGG
ctactgcagcctcagactcc

SEQ ID NO: 29020 - DNA, 20 bp, Artificial Sequence
  Description of Artificial Sequence: Synthetic oligonucleotide
  Target: ATXN2; (-) strand; PAM type: NRG; PAM sequence: CAG
atcgtagcctactgcagcct

SEQ ID NO: 29021 - DNA, 20 bp, Artificial Sequence
  Description of Artificial Sequence: Synthetic oligonucleotide
  Target: ATXN2; (-) strand; PAM type: NRG; PAM sequence: CAG
ggaatgatcgtagcctactg

SEQ ID NO: 29022 - DNA, 20 bp, Artificial Sequence
  Description of Artificial Sequence: Synthetic oligonucleotide
  Target: ATXN2; (-) strand; PAM type: NRG; PAM sequence: TAG
agactgcagtggaatgatcg

SEQ ID NO: 29023 - DNA, 20 bp, Artificial Sequence
  Description of Artificial Sequence: Synthetic oligonucleotide
  Target: ATXN2; (-) strand; PAM type: NRG; PAM sequence: TGG
tcgcccaggctagactgcag

SEQ ID NO: 29024 - DNA, 20 bp, Artificial Sequence
  Description of Artificial Sequence: Synthetic oligonucleotide
  Target: ATXN2; (-) strand; PAM type: NRG; PAM sequence: CAG
ttgtcgcccaggctagactg

SEQ ID NO: 29025 - DNA, 20 bp, Artificial Sequence
  Description of Artificial Sequence: Synthetic oligonucleotide
  Target: ATXN2; (-) strand; PAM type: NRG; PAM sequence: TAG
tcttgctttgtcgcccaggc

SEQ ID NO: 29026 - DNA, 20 bp, Artificial Sequence
  Description of Artificial Sequence: Synthetic oligonucleotide
  Target: ATXN2; (-) strand; PAM type: NRG; PAM sequence: AGG
agagtcttgctttgtcgccc

SEQ ID NO: 29027 - DNA, 20 bp, Artificial Sequence
  Description of Artificial Sequence: Synthetic oligonucleotide
  Target: ATXN2; (-) strand; PAM type: NRG; PAM sequence: CAG
cagagtcttgctttgtcgcc

SEQ ID NO: 29028 - DNA, 20 bp, Artificial Sequence
  Description of Artificial Sequence: Synthetic oligonucleotide
  Target: ATXN2; (-) strand; PAM type: NRG; PAM sequence: GAG
aagattattatttagagaca

SEQ ID NO: 29029 - DNA, 20 bp, Artificial Sequence
  Description of Artificial Sequence: Synthetic oligonucleotide
  Target: ATXN2; (-) strand; PAM type: NRG; PAM sequence: CAG
taaagattattatttagaga

SEQ ID NO: 29030 - DNA, 20 bp, Artificial Sequence
  Description of Artificial Sequence: Synthetic oligonucleotide
  Target: ATXN2; (-) strand; PAM type: NRG; PAM sequence: GAG
ggagtaaagattattattta

SEQ ID NO: 29031 - DNA, 20 bp, Artificial Sequence
  Description of Artificial Sequence: Synthetic oligonucleotide
  Target: ATXN2; (-) strand; PAM type: NRG; PAM sequence: TAG
tgggagtaaagattattatt

SEQ ID NO: 29032 - DNA, 20 bp, Artificial Sequence
  Description of Artificial Sequence: Synthetic oligonucleotide
  Target: ATXN2; (-) strand; PAM type: NRG; PAM sequence: AAG
gattggttactttgggagta

SEQ ID NO: 29033 - DNA, 20 bp, Artificial Sequence
  Description of Artificial Sequence: Synthetic oligonucleotide
  Target: ATXN2; (-) strand; PAM type: NRG; PAM sequence: GAG
acagtgattggttactttgg

SEQ ID NO: 29034 - DNA, 20 bp, Artificial Sequence
  Description of Artificial Sequence: Synthetic oligonucleotide
  Target: ATXN2; (-) strand; PAM type: NRG; PAM sequence: GGG
taacagtgattggttacttt

SEQ ID NO: 29035 - DNA, 20 bp, Artificial Sequence
  Description of Artificial Sequence: Synthetic oligonucleotide
  Target: ATXN2; (-) strand; PAM type: NRG; PAM sequence: TGG
ataacagtgattggttactt

SEQ ID NO: 29036 - DNA, 20 bp, Artificial Sequence
  Description of Artificial Sequence: Synthetic oligonucleotide
  Target: ATXN2; (-) strand; PAM type: NRG; PAM sequence: TGG
tagctctttataacagtgat

SEQ ID NO: 29037 - DNA, 20 bp, Artificial Sequence
  Description of Artificial Sequence: Synthetic oligonucleotide
  Target: ATXN2; (-) strand; PAM type: NRG; PAM sequence: CAG
ttctgaatagctctttataa

SEQ ID NO: 29038 - DNA, 20 bp, Artificial Sequence
  Description of Artificial Sequence: Synthetic oligonucleotide
  Target: ATXN2; (-) strand; PAM type: NRG; PAM sequence: TAG
atccgtgttttgcttctgaa

SEQ ID NO: 29039 - DNA, 20 bp, Artificial Sequence
  Description of Artificial Sequence: Synthetic oligonucleotide
  Target: ATXN2; (-) strand; PAM type: NRG; PAM sequence: AAG
tcatctgtgttggttaaatc

SEQ ID NO: 29040 - DNA, 20 bp, Artificial Sequence
  Description of Artificial Sequence: Synthetic oligonucleotide
  Target: ATXN2; (-) strand; PAM type: NRG; PAM sequence: TGG
ttggtgtcagtcatctgtgt

SEQ ID NO: 29041 - DNA, 20 bp, Artificial Sequence
  Description of Artificial Sequence: Synthetic oligonucleotide
  Target: ATXN2; (-) strand; PAM type: NRG; PAM sequence: CAG
tatgggaagtgacttggtgt

SEQ ID NO: 29042 - DNA, 20 bp, Artificial Sequence
  Description of Artificial Sequence: Synthetic oligonucleotide
  Target: ATXN2; (-) strand; PAM type: NRG; PAM sequence: TGG
gagaaatatgggaagtgact

SEQ ID NO: 29043 - DNA, 20 bp, Artificial Sequence
  Description of Artificial Sequence: Synthetic oligonucleotide
  Target: ATXN2; (-) strand; PAM type: NRG; PAM sequence: AAG
agatgggggagaaatatggg

SEQ ID NO: 29044 - DNA, 20 bp, Artificial Sequence
  Description of Artificial Sequence: Synthetic oligonucleotide
  Target: ATXN2; (-) strand; PAM type: NRG; PAM sequence: GGG
tatagatgggggagaaatat

SEQ ID NO: 29045 - DNA, 20 bp, Artificial Sequence
  Description of Artificial Sequence: Synthetic oligonucleotide
  Target: ATXN2; (-) strand; PAM type: NRG; PAM sequence: TGG
ttatagatgggggagaaata

SEQ ID NO: 29046 - DNA, 20 bp, Artificial Sequence
  Description of Artificial Sequence: Synthetic oligonucleotide
  Target: ATXN2; (-) strand; PAM type: NRG; PAM sequence: GAG
tttttcttttatagatgggg

SEQ ID NO: 29047 - DNA, 20 bp, Artificial Sequence
  Description of Artificial Sequence: Synthetic oligonucleotide
  Target: ATXN2; (-) strand; PAM type: NRG; PAM sequence: GGG
tgtttttcttttatagatgg

SEQ ID NO: 29048 - DNA, 20 bp, Artificial Sequence
  Description of Artificial Sequence: Synthetic oligonucleotide
  Target: ATXN2; (-) strand; PAM type: NRG; PAM sequence: GGG
ctgtttttcttttatagatg

SEQ ID NO: 29049 - DNA, 20 bp, Artificial Sequence
  Description of Artificial Sequence: Synthetic oligonucleotide
  Target: ATXN2; (-) strand; PAM type: NRG; PAM sequence: GGG
cctgtttttcttttatagat

SEQ ID NO: 29050 - DNA, 20 bp, Artificial Sequence
  Description of Artificial Sequence: Synthetic oligonucleotide
  Target: ATXN2; (-) strand; PAM type: NRG; PAM sequence: TGG
acctgtttttcttttataga

SEQ ID NO: 29051 - DNA, 20 bp, Artificial Sequence
  Description of Artificial Sequence: Synthetic oligonucleotide
  Target: ATXN2; (-) strand; PAM type: NRG; PAM sequence: TAG
tatgacctgtttttctttta

SEQ ID NO: 29052 - DNA, 20 bp, Artificial Sequence
  Description of Artificial Sequence: Synthetic oligonucleotide
  Target: ATXN2; (-) strand; PAM type: NRG; PAM sequence: CGG
caggcatgagccactgcgcc

SEQ ID NO: 29053 - DNA, 20 bp, Artificial Sequence
  Description of Artificial Sequence: Synthetic oligonucleotide
  Target: ATXN2; (-) strand; PAM type: NRG; PAM sequence: GAG
agtgctgggattacaggcat

SEQ ID NO: 29054 - DNA, 20 bp, Artificial Sequence
  Description of Artificial Sequence: Synthetic oligonucleotide
  Target: ATXN2; (-) strand; PAM type: NRG; PAM sequence: AGG
tcccaaagtgctgggattac

SEQ ID NO: 29055 - DNA, 20 bp, Artificial Sequence
  Description of Artificial Sequence: Synthetic oligonucleotide
  Target: ATXN2; (-) strand; PAM type: NRG; PAM sequence: CAG
ctcccaaagtgctgggatta

SEQ ID NO: 29056 - DNA, 20 bp, Artificial Sequence
  Description of Artificial Sequence: Synthetic oligonucleotide
  Target: ATXN2; (-) strand; PAM type: NRG; PAM sequence: GGG
cctctgcctcccaaagtgct

SEQ ID NO: 29057 - DNA, 20 bp, Artificial Sequence
  Description of Artificial Sequence: Synthetic oligonucleotide
  Target: ATXN2; (-) strand; PAM type: NRG; PAM sequence: TGG
acctctgcctcccaaagtgc

SEQ ID NO: 29058 - DNA, 20 bp, Artificial Sequence
  Description of Artificial Sequence: Synthetic oligonucleotide
  Target: ATXN2; (-) strand; PAM type: NRG; PAM sequence: AAG
ctgcccacctctgcctccca

SEQ ID NO: 29059 - DNA, 20 bp, Artificial Sequence
  Description of Artificial Sequence: Synthetic oligonucleotide
  Target: ATXN2; (-) strand; PAM type: NRG; PAM sequence: TGG
tttcactgtgttagccagga

SEQ ID NO: 29060 - DNA, 20 bp, Artificial Sequence
  Description of Artificial Sequence: Synthetic oligonucleotide
  Target: ATXN2; (-) strand; PAM type: NRG; PAM sequence: AGG
ggggtttcactgtgttagcc

SEQ ID NO: 29061 - DNA, 20 bp, Artificial Sequence
  Description of Artificial Sequence: Synthetic oligonucleotide
  Target: ATXN2; (-) strand; PAM type: NRG; PAM sequence: CAG
tggggtttcactgtgttagc

SEQ ID NO: 29062 - DNA, 20 bp, Artificial Sequence
  Description of Artificial Sequence: Synthetic oligonucleotide
  Target: ATXN2; (-) strand; PAM type: NRG; PAM sequence: TAG
gagatggggtttcactgtgt

SEQ ID NO: 29063 - DNA, 20 bp, Artificial Sequence
  Description of Artificial Sequence: Synthetic oligonucleotide
  Target: ATXN2; (-) strand; PAM type: NRG; PAM sequence: GGG
ttttattcttagtagagatg

SEQ ID NO: 29064 - DNA, 20 bp, Artificial Sequence
  Description of Artificial Sequence: Synthetic oligonucleotide
  Target: ATXN2; (-) strand; PAM type: NRG; PAM sequence: GGG
tttttattcttagtagagat

SEQ ID NO: 29065 - DNA, 20 bp, Artificial Sequence
  Description of Artificial Sequence: Synthetic oligonucleotide
  Target: ATXN2; (-) strand; PAM type: NRG; PAM sequence: TGG
ttttttattcttagtagaga

SEQ ID NO: 29066 - DNA, 20 bp, Artificial Sequence
  Description of Artificial Sequence: Synthetic oligonucleotide
  Target: ATXN2; (-) strand; PAM type: NRG; PAM sequence: GAG
taatttttttattcttagta

SEQ ID NO: 29067 - DNA, 20 bp, Artificial Sequence
  Description of Artificial Sequence: Synthetic oligonucleotide
  Target: ATXN2; (-) strand; PAM type: NRG; PAM sequence: TAG
gctaatttttttattcttag

SEQ ID NO: 29068 - DNA, 20 bp, Artificial Sequence
  Description of Artificial Sequence: Synthetic oligonucleotide
  Target: ATXN2; (-) strand; PAM type: NRG; PAM sequence: TAG
ctggctaatttttttattct

SEQ ID NO: 29069 - DNA, 20 bp, Artificial Sequence
  Description of Artificial Sequence: Synthetic oligonucleotide
  Target: ATXN2; (-) strand; PAM type: NRG; PAM sequence: TGG
caggcgcatgccaccacacc

SEQ ID NO: 29070 - DNA, 20 bp, Artificial Sequence
  Description of Artificial Sequence: Synthetic oligonucleotide
  Target: ATXN2; (-) strand; PAM type: NRG; PAM sequence: AGG
tccctagtagctgggactac

SEQ ID NO: 29071 - DNA, 20 bp, Artificial Sequence
  Description of Artificial Sequence: Synthetic oligonucleotide
  Target: ATXN2; (-) strand; PAM type: NRG; PAM sequence: CAG
ctccctagtagctgggacta

SEQ ID NO: 29072 - DNA, 20 bp, Artificial Sequence
  Description of Artificial Sequence: Synthetic oligonucleotide
  Target: ATXN2; (-) strand; PAM type: NRG; PAM sequence: GGG
cctcagcctccctagtagct

SEQ ID NO: 29073 - DNA, 20 bp, Artificial Sequence
  Description of Artificial Sequence: Synthetic oligonucleotide
  Target: ATXN2; (-) strand; PAM type: NRG; PAM sequence: TGG
gcctcagcctccctagtagc

SEQ ID NO: 29074 - DNA, 20 bp, Artificial Sequence
  Description of Artificial Sequence: Synthetic oligonucleotide
  Target: ATXN2; (-) strand; PAM type: NRG; PAM sequence: TAG
ttctgcctcagcctccctag

SEQ ID NO: 29075 - DNA, 20 bp, Artificial Sequence
  Description of Artificial Sequence: Synthetic oligonucleotide
  Target: ATXN2; (-) strand; PAM type: NRG; PAM sequence: TAG
ttcttctgcctcagcctccc

SEQ ID NO: 29076 - DNA, 20 bp, Artificial Sequence
  Description of Artificial Sequence: Synthetic oligonucleotide
  Target: ATXN2; (-) strand; PAM type: NRG; PAM sequence: CAG
ttcaggcgattcttctgcct

SEQ ID NO: 29077 - DNA, 20 bp, Artificial Sequence
  Description of Artificial Sequence: Synthetic oligonucleotide
  Target: ATXN2; (-) strand; PAM type: NRG; PAM sequence: AGG
aacctccacctcccaggttc

SEQ ID NO: 29078 - DNA, 20 bp, Artificial Sequence
  Description of Artificial Sequence: Synthetic oligonucleotide
  Target: ATXN2; (-) strand; PAM type: NRG; PAM sequence: CAG
caacctccacctcccaggtt

SEQ ID NO: 29079 - DNA, 20 bp, Artificial Sequence
  Description of Artificial Sequence: Synthetic oligonucleotide
  Target: ATXN2; (-) strand; PAM type: NRG; PAM sequence: AGG
cactgcaacctccacctccc

SEQ ID NO: 29080 - DNA, 20 bp, Artificial Sequence
  Description of Artificial Sequence: Synthetic oligonucleotide
  Target: ATXN2; (-) strand; PAM type: NRG; PAM sequence: CAG
tcactgcaacctccacctcc

SEQ ID NO: 29081 - DNA, 20 bp, Artificial Sequence
  Description of Artificial Sequence: Synthetic oligonucleotide
  Target: ATXN2; (-) strand; PAM type: NRG; PAM sequence: CAG
ggagtacaatggggcggtct

SEQ ID NO: 29082 - DNA, 20 bp, Artificial Sequence
  Description of Artificial Sequence: Synthetic oligonucleotide
  Target: ATXN2; (-) strand; PAM type: NRG; PAM sequence: CGG
ccggctggagtacaatgggg

SEQ ID NO: 29083 - DNA, 20 bp, Artificial Sequence
  Description of Artificial Sequence: Synthetic oligonucleotide
  Target: ATXN2; (-) strand; PAM type: NRG; PAM sequence: GGG
accccggctggagtacaatg

SEQ ID NO: 29084 - DNA, 20 bp, Artificial Sequence
  Description of Artificial Sequence: Synthetic oligonucleotide
  Target: ATXN2; (-) strand; PAM type: NRG; PAM sequence: GGG
caccccggctggagtacaat

SEQ ID NO: 29085 - DNA, 20 bp, Artificial Sequence
  Description of Artificial Sequence: Synthetic oligonucleotide
  Target: ATXN2; (-) strand; PAM type: NRG; PAM sequence: TGG
tcaccccggctggagtacaa

SEQ ID NO: 29086 - DNA, 20 bp, Artificial Sequence
  Description of Artificial Sequence: Synthetic oligonucleotide
  Target: ATXN2; (-) strand; PAM type: NRG; PAM sequence: GAG
ttgctctgtcaccccggctg

SEQ ID NO: 29087 - DNA, 20 bp, Artificial Sequence
  Description of Artificial Sequence: Synthetic oligonucleotide
  Target: ATXN2; (-) strand; PAM type: NRG; PAM sequence: TGG
tcttgctctgtcaccccggc

SEQ ID NO: 29088 - DNA, 20 bp, Artificial Sequence
  Description of Artificial Sequence: Synthetic oligonucleotide
  Target: ATXN2; (-) strand; PAM type: NRG; PAM sequence: CGG
agagtcttgctctgtcaccc

SEQ ID NO: 29089 - DNA, 20 bp, Artificial Sequence
  Description of Artificial Sequence: Synthetic oligonucleotide
  Target: ATXN2; (-) strand; PAM type: NRG; PAM sequence: GAG
ctttttttttttttgagaca

SEQ ID NO: 29090 - DNA, 20 bp, Artificial Sequence
  Description of Artificial Sequence: Synthetic oligonucleotide
  Target: ATXN2; (-) strand; PAM type: NRG; PAM sequence: CAG
ttctttttttttttttgaga

SEQ ID NO: 29091 - DNA, 20 bp, Artificial Sequence
  Description of Artificial Sequence: Synthetic oligonucleotide
  Target: ATXN2; (-) strand; PAM type: NRG; PAM sequence: GAG
ttctttcttttttttttttt

SEQ ID NO: 29092 - DNA, 20 bp, Artificial Sequence
  Description of Artificial Sequence: Synthetic oligonucleotide
  Target: ATXN2; (-) strand; PAM type: NRG; PAM sequence: CAG
tttcagtttttttttttctg

SEQ ID NO: 29093 - DNA, 20 bp, Artificial Sequence
  Description of Artificial Sequence: Synthetic oligonucleotide
  Target: ATXN2; (-) strand; PAM type: NRG; PAM sequence: CAG
tgaatgatttagcttatttt

SEQ ID NO: 29094 - DNA, 20 bp, Artificial Sequence
  Description of Artificial Sequence: Synthetic oligonucleotide
  Target: ATXN2; (-) strand; PAM type: NRG; PAM sequence: TAG
tgaaagtgctttgaatgatt

SEQ ID NO: 29095 - DNA, 20 bp, Artificial Sequence
  Description of Artificial Sequence: Synthetic oligonucleotide
  Target: ATXN2; (-) strand; PAM type: NRG; PAM sequence: AAG
cgcatattatttagaaatga

SEQ ID NO: 29096 - DNA, 20 bp, Artificial Sequence
  Description of Artificial Sequence: Synthetic oligonucleotide
  Target: ATXN2; (-) strand; PAM type: NRG; PAM sequence: TAG
acatatagacgcatattatt

SEQ ID NO: 29097 - DNA, 20 bp, Artificial Sequence
  Description of Artificial Sequence: Synthetic oligonucleotide
  Target: ATXN2; (-) strand; PAM type: NRG; PAM sequence: TAG
gttacaacgatccacacata

SEQ ID NO: 29098 - DNA, 20 bp, Artificial Sequence
  Description of Artificial Sequence: Synthetic oligonucleotide
  Target: ATXN2; (-) strand; PAM type: NRG; PAM sequence: AGG
gggagagagttggcaaggaa

SEQ ID NO: 29099 - DNA, 20 bp, Artificial Sequence
  Description of Artificial Sequence: Synthetic oligonucleotide
  Target: ATXN2; (-) strand; PAM type: NRG; PAM sequence: AAG
agggagagagttggcaagga

SEQ ID NO: 29100 - DNA, 20 bp, Artificial Sequence
  Description of Artificial Sequence: Synthetic oligonucleotide
  Target: ATXN2; (-) strand; PAM type: NRG; PAM sequence: AGG
tctgagggagagagttggca

SEQ ID NO: 29101 - DNA, 20 bp, Artificial Sequence
  Description of Artificial Sequence: Synthetic oligonucleotide
  Target: ATXN2; (-) strand; PAM type: NRG; PAM sequence: AAG
ttctgagggagagagttggc

SEQ ID NO: 29102 - DNA, 20 bp, Artificial Sequence
  Description of Artificial Sequence: Synthetic oligonucleotide
  Target: ATXN2; (-) strand; PAM type: NRG; PAM sequence: TGG
tcttttctgagggagagagt

SEQ ID NO: 29103 - DNA, 20 bp, Artificial Sequence
  Description of Artificial Sequence: Synthetic oligonucleotide
  Target: ATXN2; (-) strand; PAM type: NRG; PAM sequence: GAG
tgcatcttttctgagggaga

SEQ ID NO: 29104 - DNA, 20 bp, Artificial Sequence
  Description of Artificial Sequence: Synthetic oligonucleotide
  Target: ATXN2; (-) strand; PAM type: NRG; PAM sequence: GAG
actgcatcttttctgaggga

SEQ ID NO: 29105 - DNA, 20 bp, Artificial Sequence
  Description of Artificial Sequence: Synthetic oligonucleotide
  Target: ATXN2; (-) strand; PAM type: NRG; PAM sequence: GAG
gtactgcatcttttctgagg

SEQ ID NO: 29106 - DNA, 20 bp, Artificial Sequence
  Description of Artificial Sequence: Synthetic oligonucleotide
  Target: ATXN2; (-) strand; PAM type: NRG; PAM sequence: GGG
gtgtactgcatcttttctga

SEQ ID NO: 29107 - DNA, 20 bp, Artificial Sequence
  Description of Artificial Sequence: Synthetic oligonucleotide
  Target: ATXN2; (-) strand; PAM type: NRG; PAM sequence: AGG
tgtgtactgcatcttttctg

SEQ ID NO: 29108 - DNA, 20 bp, Artificial Sequence
  Description of Artificial Sequence: Synthetic oligonucleotide
  Target: ATXN2; (-) strand; PAM type: NRG; PAM sequence: GAG
ttgtgtactgcatcttttct

SEQ ID NO: 29109 - DNA, 20 bp, Artificial Sequence
  Description of Artificial Sequence: Synthetic oligonucleotide
  Target: ATXN2; (-) strand; PAM type: NRG; PAM sequence: CAG
tagaattcatctttacttga

SEQ ID NO: 29110 - DNA, 20 bp, Artificial Sequence
  Description of Artificial Sequence: Synthetic oligonucleotide
  Target: ATXN2; (-) strand; PAM type: NRG; PAM sequence: TAG
ttctataattcacttgaaaa

SEQ ID NO: 29111 - DNA, 20 bp, Artificial Sequence
  Description of Artificial Sequence: Synthetic oligonucleotide
  Target: ATXN2; (-) strand; PAM type: NRG; PAM sequence: AGG
ttttcagtggaataagcttt

SEQ ID NO: 29112 - DNA, 20 bp, Artificial Sequence
  Description of Artificial Sequence: Synthetic oligonucleotide
  Target: ATXN2; (-) strand; PAM type: NRG; PAM sequence: TAG
tttttcagtggaataagctt

SEQ ID NO: 29113 - DNA, 20 bp, Artificial Sequence
  Description of Artificial Sequence: Synthetic oligonucleotide
  Target: ATXN2; (-) strand; PAM type: NRG; PAM sequence: AAG
ctaatctttttcagtggaat

SEQ ID NO: 29114 - DNA, 20 bp, Artificial Sequence
  Description of Artificial Sequence: Synthetic oligonucleotide
  Target: ATXN2; (-) strand; PAM type: NRG; PAM sequence: TGG
aggggcctaatctttttcag

SEQ ID NO: 29115 - DNA, 20 bp, Artificial Sequence
  Description of Artificial Sequence: Synthetic oligonucleotide
  Target: ATXN2; (-) strand; PAM type: NRG; PAM sequence: CAG
ctaaggggcctaatcttttt

SEQ ID NO: 29116 - DNA, 20 bp, Artificial Sequence
  Description of Artificial Sequence: Synthetic oligonucleotide
  Target: ATXN2; (-) strand; PAM type: NRG; PAM sequence: GGG
tgttttttaattattctaag

SEQ ID NO: 29117 - DNA, 20 bp, Artificial Sequence
  Description of Artificial Sequence: Synthetic oligonucleotide
  Target: ATXN2; (-) strand; PAM type: NRG; PAM sequence: GGG
atgttttttaattattctaa

SEQ ID NO: 29118 - DNA, 20 bp, Artificial Sequence
  Description of Artificial Sequence: Synthetic oligonucleotide
  Target: ATXN2; (-) strand; PAM type: NRG; PAM sequence: AGG
gatgttttttaattattcta

SEQ ID NO: 29119 - DNA, 20 bp, Artificial Sequence
  Description of Artificial Sequence: Synthetic oligonucleotide
  Target: ATXN2; (-) strand; PAM type: NRG; PAM sequence: AAG
tgatgttttttaattattct

SEQ ID NO: 29120 - DNA, 20 bp, Artificial Sequence
  Description of Artificial Sequence: Synthetic oligonucleotide
  Target: ATXN2; (-) strand; PAM type: NRG; PAM sequence: GAG
ttgtcatgactaatgtttat

SEQ ID NO: 29121 - DNA, 20 bp, Artificial Sequence
  Description of Artificial Sequence: Synthetic oligonucleotide
  Target: ATXN2; (-) strand; PAM type: NRG; PAM sequence: CAG
attttattaaaatgagattc

SEQ ID NO: 29122 - DNA, 20 bp, Artificial Sequence
  Description of Artificial Sequence: Synthetic oligonucleotide
  Target: ATXN2; (-) strand; PAM type: NRG; PAM sequence: GAG
tgtgattattttattaaaat

SEQ ID NO: 29123 - DNA, 20 bp, Artificial Sequence
  Description of Artificial Sequence: Synthetic oligonucleotide
  Target: ATXN2; (-) strand; PAM type: NRG; PAM sequence: GAG
aatgttttgaattttggctt

SEQ ID NO: 29124 - DNA, 20 bp, Artificial Sequence
  Description of Artificial Sequence: Synthetic oligonucleotide
  Target: ATXN2; (-) strand; PAM type: NRG; PAM sequence: TGG
tccttgaatgttttgaattt

SEQ ID NO: 29125 - DNA, 20 bp, Artificial Sequence
  Description of Artificial Sequence: Synthetic oligonucleotide
  Target: ATXN2; (-) strand; PAM type: NRG; PAM sequence: TGG
agtcgtgttactagactttt

SEQ ID NO: 29126 - DNA, 20 bp, Artificial Sequence
  Description of Artificial Sequence: Synthetic oligonucleotide
  Target: ATXN2; (-) strand; PAM type: NRG; PAM sequence: TAG
ggatcgaccagtcgtgttac

SEQ ID NO: 29127 - DNA, 20 bp, Artificial Sequence
  Description of Artificial Sequence: Synthetic oligonucleotide
  Target: ATXN2; (-) strand; PAM type: NRG; PAM sequence: CAG
gtactcttctagggatcgac

SEQ ID NO: 29128 - DNA, 20 bp, Artificial Sequence
  Description of Artificial Sequence: Synthetic oligonucleotide
  Target: ATXN2; (-) strand; PAM type: NRG; PAM sequence: GGG
atgttaagagtactcttcta

SEQ ID NO: 29129 - DNA, 20 bp, Artificial Sequence
  Description of Artificial Sequence: Synthetic oligonucleotide
  Target: ATXN2; (-) strand; PAM type: NRG; PAM sequence: AGG
aatgttaagagtactcttct

SEQ ID NO: 29130 - DNA, 20 bp, Artificial Sequence
  Description of Artificial Sequence: Synthetic oligonucleotide
  Target: ATXN2; (-) strand; PAM type: NRG; PAM sequence: TAG
gaatgttaagagtactcttc

SEQ ID NO: 29131 - DNA, 20 bp, Artificial Sequence
  Description of Artificial Sequence: Synthetic oligonucleotide
  Target: ATXN2; (-) strand; PAM type: NRG; PAM sequence: GAG
gactggcctcagaatgttaa

SEQ ID NO: 29132 - DNA, 20 bp, Artificial Sequence
  Description of Artificial Sequence: Synthetic oligonucleotide
  Target: ATXN2; (-) strand; PAM type: NRG; PAM sequence: AAG
aggactggcctcagaatgtt

SEQ ID NO: 29133 - DNA, 20 bp, Artificial Sequence
  Description of Artificial Sequence: Synthetic oligonucleotide
  Target: ATXN2; (-) strand; PAM type: NRG; PAM sequence: CAG
gaccaagctaggactggcct

SEQ ID NO: 29134 - DNA, 20 bp, Artificial Sequence
  Description of Artificial Sequence: Synthetic oligonucleotide
  Target: ATXN2; (-) strand; PAM type: NRG; PAM sequence: TGG
gttggagaccaagctaggac

SEQ ID NO: 29135 - DNA, 20 bp, Artificial Sequence
  Description of Artificial Sequence: Synthetic oligonucleotide
  Target: ATXN2; (-) strand; PAM type: NRG; PAM sequence: AGG
acagagttggagaccaagct

SEQ ID NO: 29136 - DNA, 20 bp, Artificial Sequence
  Description of Artificial Sequence: Synthetic oligonucleotide
  Target: ATXN2; (-) strand; PAM type: NRG; PAM sequence: TAG
gacagagttggagaccaagc

SEQ ID NO: 29137 - DNA, 20 bp, Artificial Sequence
  Description of Artificial Sequence: Synthetic oligonucleotide
  Target: ATXN2; (-) strand; PAM type: NRG; PAM sequence: AAG
aagtgacagagttggagacc

SEQ ID NO: 29138 - DNA, 20 bp, Artificial Sequence
  Description of Artificial Sequence: Synthetic oligonucleotide
  Target: ATXN2; (-) strand; PAM type: NRG; PAM sequence: GAG
gaggaaaagtgacagagttg

SEQ ID NO: 29139 - DNA, 20 bp, Artificial Sequence
  Description of Artificial Sequence: Synthetic oligonucleotide
  Target: ATXN2; (-) strand; PAM type: NRG; PAM sequence: TGG
gtgaggaaaagtgacagagt

SEQ ID NO: 29140 - DNA, 20 bp, Artificial Sequence
  Description of Artificial Sequence: Synthetic oligonucleotide
  Target: ATXN2; (-) strand; PAM type: NRG; PAM sequence: GAG
gaaagtgaggaaaagtgaca

SEQ ID NO: 29141 - DNA, 20 bp, Artificial Sequence
  Description of Artificial Sequence: Synthetic oligonucleotide
  Target: ATXN2; (-) strand; PAM type: NRG; PAM sequence: CAG
aagaaagtgaggaaaagtga

SEQ ID NO: 29142 - DNA, 20 bp, Artificial Sequence
  Description of Artificial Sequence: Synthetic oligonucleotide
  Target: ATXN2; (-) strand; PAM type: NRG; PAM sequence: AAG
tgagagaagaaagtgaggaa

SEQ ID NO: 29143 - DNA, 20 bp, Artificial Sequence
  Description of Artificial Sequence: Synthetic oligonucleotide
  Target: ATXN2; (-) strand; PAM type: NRG; PAM sequence: AGG
ctggatgagagaagaaagtg

SEQ ID NO: 29144 - DNA, 20 bp, Artificial Sequence
  Description of Artificial Sequence: Synthetic oligonucleotide
  Target: ATXN2; (-) strand; PAM type: NRG; PAM sequence: GAG
tctggatgagagaagaaagt

SEQ ID NO: 29145 - DNA, 20 bp, Artificial Sequence
  Description of Artificial Sequence: Synthetic oligonucleotide
  Target: ATXN2; (-) strand; PAM type: NRG; PAM sequence: AAG
gttttctggatgagagaaga

SEQ ID NO: 29146 - DNA, 20 bp, Artificial Sequence
  Description of Artificial Sequence: Synthetic oligonucleotide
  Target: ATXN2; (-) strand; PAM type: NRG; PAM sequence: AAG
cattgttttctggatgagag

SEQ ID NO: 29147 - DNA, 20 bp, Artificial Sequence
  Description of Artificial Sequence: Synthetic oligonucleotide
  Target: ATXN2; (-) strand; PAM type: NRG; PAM sequence: GAG
gtccattgttttctggatga

SEQ ID NO: 29148 - DNA, 20 bp, Artificial Sequence
  Description of Artificial Sequence: Synthetic oligonucleotide
  Target: ATXN2; (-) strand; PAM type: NRG; PAM sequence: GAG
aagtccattgttttctggat

SEQ ID NO: 29149 - DNA, 20 bp, Artificial Sequence
  Description of Artificial Sequence: Synthetic oligonucleotide
  Target: ATXN2; (-) strand; PAM type: NRG; PAM sequence: TGG
aattcaagtccattgttttc

SEQ ID NO: 29150 - DNA, 20 bp, Artificial Sequence
  Description of Artificial Sequence: Synthetic oligonucleotide
  Target: ATXN2; (-) strand; PAM type: NRG; PAM sequence: AAG
tcctagatgtcatttaattc

SEQ ID NO: 29151 - DNA, 20 bp, Artificial Sequence
  Description of Artificial Sequence: Synthetic oligonucleotide
  Target: ATXN2; (-) strand; PAM type: NRG; PAM sequence: TAG
gttagaaatgaaaggaatcc

SEQ ID NO: 29152 - DNA, 20 bp, Artificial Sequence
  Description of Artificial Sequence: Synthetic oligonucleotide
  Target: ATXN2; (-) strand; PAM type: NRG; PAM sequence: AGG
attagaatgttagaaatgaa

SEQ ID NO: 29153 - DNA, 20 bp, Artificial Sequence
  Description of Artificial Sequence: Synthetic oligonucleotide
  Target: ATXN2; (-) strand; PAM type: NRG; PAM sequence: AAG
aattagaatgttagaaatga

SEQ ID NO: 29154 - DNA, 20 bp, Artificial Sequence
  Description of Artificial Sequence: Synthetic oligonucleotide
  Target: ATXN2; (-) strand; PAM type: NRG; PAM sequence: TAG
cagttacagaattagaatgt

SEQ ID NO: 29155 - DNA, 20 bp, Artificial Sequence
  Description of Artificial Sequence: Synthetic oligonucleotide
  Target: ATXN2; (-) strand; PAM type: NRG; PAM sequence: TAG
gaggcaaacagttacagaat

SEQ ID NO: 29156 - DNA, 20 bp, Artificial Sequence
  Description of Artificial Sequence: Synthetic oligonucleotide
  Target: ATXN2; (-) strand; PAM type: NRG; PAM sequence: CAG
atgtttgaggcaaacagtta

SEQ ID NO: 29157 - DNA, 20 bp, Artificial Sequence
  Description of Artificial Sequence: Synthetic oligonucleotide
  Target: ATXN2; (-) strand; PAM type: NRG; PAM sequence: CAG
tgtgccatgtttgaggcaaa

SEQ ID NO: 29158 - DNA, 20 bp, Artificial Sequence
  Description of Artificial Sequence: Synthetic oligonucleotide
  Target: ATXN2; (-) strand; PAM type: NRG; PAM sequence: AGG
ttatctctgtgccatgtttg

SEQ ID NO: 29159 - DNA, 20 bp, Artificial Sequence
  Description of Artificial Sequence: Synthetic oligonucleotide
  Target: ATXN2; (-) strand; PAM type: NRG; PAM sequence: GAG
tttatctctgtgccatgttt

SEQ ID NO: 29160 - DNA, 20 bp, Artificial Sequence
  Description of Artificial Sequence: Synthetic oligonucleotide
  Target: ATXN2; (-) strand; PAM type: NRG; PAM sequence: AGG
agtcatattccttagacttc

SEQ ID NO: 29161 - DNA, 20 bp, Artificial Sequence
  Description of Artificial Sequence: Synthetic oligonucleotide
  Target: ATXN2; (-) strand; PAM type: NRG; PAM sequence: CAG
tagtcatattccttagactt

SEQ ID NO: 29162 - DNA, 20 bp, Artificial Sequence
  Description of Artificial Sequence: Synthetic oligonucleotide
  Target: ATXN2; (-) strand; PAM type: NRG; PAM sequence: TAG
aaattattagtcatattcct

SEQ ID NO: 29163 - DNA, 20 bp, Artificial Sequence
  Description of Artificial Sequence: Synthetic oligonucleotide
  Target: ATXN2; (-) strand; PAM type: NRG; PAM sequence: TAG
atctataaaagataaattat

SEQ ID NO: 29164 - DNA, 20 bp, Artificial Sequence
  Description of Artificial Sequence: Synthetic oligonucleotide
  Target: ATXN2; (-) strand; PAM type: NRG; PAM sequence: AAG
ttttgtagtaagatctataa

SEQ ID NO: 29165 - DNA, 20 bp, Artificial Sequence
  Description of Artificial Sequence: Synthetic oligonucleotide
  Target: ATXN2; (-) strand; PAM type: NRG; PAM sequence: AAG
atggtgtctggttttgtagt

SEQ ID NO: 29166 - DNA, 20 bp, Artificial Sequence
  Description of Artificial Sequence: Synthetic oligonucleotide
  Target: ATXN2; (-) strand; PAM type: NRG; PAM sequence: TAG
tagtatggtgtctggttttg

SEQ ID NO: 29167 - DNA, 20 bp, Artificial Sequence
  Description of Artificial Sequence: Synthetic oligonucleotide
  Target: ATXN2; (-) strand; PAM type: NRG; PAM sequence: TGG
gaagtacttagtatggtgtc

SEQ ID NO: 29168 - DNA, 20 bp, Artificial Sequence
  Description of Artificial Sequence: Synthetic oligonucleotide
  Target: ATXN2; (-) strand; PAM type: NRG; PAM sequence: TGG
tgcatgtgaagtacttagta

SEQ ID NO: 29169 - DNA, 20 bp, Artificial Sequence
  Description of Artificial Sequence: Synthetic oligonucleotide
  Target: ATXN2; (-) strand; PAM type: NRG; PAM sequence: TAG
catgttgcatgtgaagtact

SEQ ID NO: 29170 - DNA, 20 bp, Artificial Sequence
  Description of Artificial Sequence: Synthetic oligonucleotide
  Target: ATXN2; (-) strand; PAM type: NRG; PAM sequence: AAG
gattagacatgttgcatgtg

SEQ ID NO: 29171 - DNA, 20 bp, Artificial Sequence
  Description of Artificial Sequence: Synthetic oligonucleotide
  Target: ATXN2; (-) strand; PAM type: NRG; PAM sequence: TAG
gtaaagtagaggtgatagat

SEQ ID NO: 29172 - DNA, 20 bp, Artificial Sequence
  Description of Artificial Sequence: Synthetic oligonucleotide
  Target: ATXN2; (-) strand; PAM type: NRG; PAM sequence: TAG
cacctgtaaagtagaggtga

SEQ ID NO: 29173 - DNA, 20 bp, Artificial Sequence
  Description of Artificial Sequence: Synthetic oligonucleotide
  Target: ATXN2; (-) strand; PAM type: NRG; PAM sequence: AGG
tttcctcacctgtaaagtag

SEQ ID NO: 29174 - DNA, 20 bp, Artificial Sequence
  Description of Artificial Sequence: Synthetic oligonucleotide
  Target: ATXN2; (-) strand; PAM type: NRG; PAM sequence: GAG
gtttcctcacctgtaaagta

SEQ ID NO: 29175 - DNA, 20 bp, Artificial Sequence
  Description of Artificial Sequence: Synthetic oligonucleotide
  Target: ATXN2; (-) strand; PAM type: NRG; PAM sequence: TAG
cagtttcctcacctgtaaag

SEQ ID NO: 29176 - DNA, 20 bp, Artificial Sequence
  Description of Artificial Sequence: Synthetic oligonucleotide
  Target: ATXN2; (-) strand; PAM type: NRG; PAM sequence: AAG
gttcagtttcctcacctgta

SEQ ID NO: 29177 - DNA, 20 bp, Artificial Sequence
  Description of Artificial Sequence: Synthetic oligonucleotide
  Target: ATXN2; (-) strand; PAM type: NRG; PAM sequence: CAG
gatacttgactgctgaggtt

SEQ ID NO: 29178 - DNA, 20 bp, Artificial Sequence
  Description of Artificial Sequence: Synthetic oligonucleotide
  Target: ATXN2; (-) strand; PAM type: NRG; PAM sequence: AGG
gtcaagatacttgactgctg

SEQ ID NO: 29179 - DNA, 20 bp, Artificial Sequence
  Description of Artificial Sequence: Synthetic oligonucleotide
  Target: ATXN2; (-) strand; PAM type: NRG; PAM sequence: GAG
ggtcaagatacttgactgct

SEQ ID NO: 29180 - DNA, 20 bp, Artificial Sequence
  Description of Artificial Sequence: Synthetic oligonucleotide
  Target: ATXN2; (-) strand; PAM type: NRG; PAM sequence: AAG
tgaactggatgattttggtc

SEQ ID NO: 29181 - DNA, 20 bp, Artificial Sequence
  Description of Artificial Sequence: Synthetic oligonucleotide
  Target: ATXN2; (-) strand; PAM type: NRG; PAM sequence: TGG
gctcatgaactggatgattt

SEQ ID NO: 29182 - DNA, 20 bp, Artificial Sequence
  Description of Artificial Sequence: Synthetic oligonucleotide
  Target: ATXN2; (-) strand; PAM type: NRG; PAM sequence: TGG
cagctctactgctcatgaac

SEQ ID NO: 29183 - DNA, 20 bp, Artificial Sequence
  Description of Artificial Sequence: Synthetic oligonucleotide
  Target: ATXN2; (-) strand; PAM type: NRG; PAM sequence: CAG
gatacacctggtttaaatac

SEQ ID NO: 29184 - DNA, 20 bp, Artificial Sequence
  Description of Artificial Sequence: Synthetic oligonucleotide
  Target: ATXN2; (-) strand; PAM type: NRG; PAM sequence: TGG
gacgtggaatcagatacacc

SEQ ID NO: 29185 - DNA, 20 bp, Artificial Sequence
  Description of Artificial Sequence: Synthetic oligonucleotide
  Target: ATXN2; (-) strand; PAM type: NRG; PAM sequence: CAG
gaaaaacttagacgtggaat

SEQ ID NO: 29186 - DNA, 20 bp, Artificial Sequence
  Description of Artificial Sequence: Synthetic oligonucleotide
  Target: ATXN2; (-) strand; PAM type: NRG; PAM sequence: TGG
aggaatgaaaaacttagacg

SEQ ID NO: 29187 - DNA, 20 bp, Artificial Sequence
  Description of Artificial Sequence: Synthetic oligonucleotide
  Target: ATXN2; (-) strand; PAM type: NRG; PAM sequence: TAG
taacctaggaatgaaaaact

SEQ ID NO: 29188 - DNA, 20 bp, Artificial Sequence
  Description of Artificial Sequence: Synthetic oligonucleotide
  Target: ATXN2; (-) strand; PAM type: NRG; PAM sequence: AGG
ccagagaggcagcataacct

SEQ ID NO: 29189 - DNA, 20 bp, Artificial Sequence
  Description of Artificial Sequence: Synthetic oligonucleotide
  Target: ATXN2; (-) strand; PAM type: NRG; PAM sequence: TAG
tccagagaggcagcataacc

SEQ ID NO: 29190 - DNA, 20 bp, Artificial Sequence
  Description of Artificial Sequence: Synthetic oligonucleotide
  Target: ATXN2; (-) strand; PAM type: NRG; PAM sequence: CAG
gtgatacagttccagagagg

SEQ ID NO: 29191 - DNA, 20 bp, Artificial Sequence
  Description of Artificial Sequence: Synthetic oligonucleotide
  Target: ATXN2; (-) strand; PAM type: NRG; PAM sequence: AGG
cttgtgatacagttccagag

SEQ ID NO: 29192 - DNA, 20 bp, Artificial Sequence
  Description of Artificial Sequence: Synthetic oligonucleotide
  Target: ATXN2; (-) strand; PAM type: NRG; PAM sequence: GAG
ccttgtgatacagttccaga

SEQ ID NO: 29193 - DNA, 20 bp, Artificial Sequence
  Description of Artificial Sequence: Synthetic oligonucleotide
  Target: ATXN2; (-) strand; PAM type: NRG; PAM sequence: GAG
ttccttgtgatacagttcca

SEQ ID NO: 29194 - DNA, 20 bp, Artificial Sequence
  Description of Artificial Sequence: Synthetic oligonucleotide
  Target: ATXN2; (-) strand; PAM type: NRG; PAM sequence: CAG
tattccttgtgatacagttc

SEQ ID NO: 29195 - DNA, 20 bp, Artificial Sequence
  Description of Artificial Sequence: Synthetic oligonucleotide
  Target: ATXN2; (-) strand; PAM type: NRG; PAM sequence: CAG
gtagtttattccttgtgata

SEQ ID NO: 29196 - DNA, 20 bp, Artificial Sequence
  Description of Artificial Sequence: Synthetic oligonucleotide
  Target: ATXN2; (-) strand; PAM type: NRG; PAM sequence: TAG
agaatttttgttaggcgagg

SEQ ID NO: 29197 - DNA, 20 bp, Artificial Sequence
  Description of Artificial Sequence: Synthetic oligonucleotide
  Target: ATXN2; (-) strand; PAM type: NRG; PAM sequence: AGG
catagaatttttgttaggcg

SEQ ID NO: 29198 - DNA, 20 bp, Artificial Sequence
  Description of Artificial Sequence: Synthetic oligonucleotide
  Target: ATXN2; (-) strand; PAM type: NRG; PAM sequence: GAG
gcatagaatttttgttaggc

SEQ ID NO: 29199 - DNA, 20 bp, Artificial Sequence
  Description of Artificial Sequence: Synthetic oligonucleotide
  Target: ATXN2; (-) strand; PAM type: NRG; PAM sequence: AGG
aaaagcatagaatttttgtt

SEQ ID NO: 29200 - DNA, 20 bp, Artificial Sequence
  Description of Artificial Sequence: Synthetic oligonucleotide
  Target: ATXN2; (-) strand; PAM type: NRG; PAM sequence: TAG
aaaaagcatagaatttttgt

SEQ ID NO: 29201 - DNA, 20 bp, Artificial Sequence
  Description of Artificial Sequence: Synthetic oligonucleotide
  Target: ATXN2; (-) strand; PAM type: NRG; PAM sequence: TAG
aaatgatgtttgaaaaagca

SEQ ID NO: 29202 - DNA, 20 bp, Artificial Sequence
  Description of Artificial Sequence: Synthetic oligonucleotide
  Target: ATXN2; (-) strand; PAM type: NRG; PAM sequence: AAG
aattcaaatgatgtttgaaa

SEQ ID NO: 29203 - DNA, 20 bp, Artificial Sequence
  Description of Artificial Sequence: Synthetic oligonucleotide
  Target: ATXN2; (-) strand; PAM type: NRG; PAM sequence: AAG
agccttcatgtacagactat

SEQ ID NO: 29204 - DNA, 20 bp, Artificial Sequence
  Description of Artificial Sequence: Synthetic oligonucleotide
  Target: ATXN2; (-) strand; PAM type: NRG; PAM sequence: CAG
ggcattttagccttcatgta

SEQ ID NO: 29205 - DNA, 20 bp, Artificial Sequence
  Description of Artificial Sequence: Synthetic oligonucleotide
  Target: ATXN2; (-) strand; PAM type: NRG; PAM sequence: TAG
taagtaagatttaggcattt

SEQ ID NO: 29206 - DNA, 20 bp, Artificial Sequence
  Description of Artificial Sequence: Synthetic oligonucleotide
  Target: ATXN2; (-) strand; PAM type: NRG; PAM sequence: AGG
catcgttctaagtaagattt

SEQ ID NO: 29207 - DNA, 20 bp, Artificial Sequence
  Description of Artificial Sequence: Synthetic oligonucleotide
  Target: ATXN2; (-) strand; PAM type: NRG; PAM sequence: TAG
tcatcgttctaagtaagatt

SEQ ID NO: 29208 - DNA, 20 bp, Artificial Sequence
  Description of Artificial Sequence: Synthetic oligonucleotide
  Target: ATXN2; (-) strand; PAM type: NRG; PAM sequence: AAG
accagatcatcgttctaagt

SEQ ID NO: 29209 - DNA, 20 bp, Artificial Sequence
  Description of Artificial Sequence: Synthetic oligonucleotide
  Target: ATXN2; (-) strand; PAM type: NRG; PAM sequence: AAG
ggataccagatcatcgttct

SEQ ID NO: 29210 - DNA, 20 bp, Artificial Sequence
  Description of Artificial Sequence: Synthetic oligonucleotide
  Target: ATXN2; (-) strand; PAM type: NRG; PAM sequence: CAG
ctcagcagccaccaggatac

SEQ ID NO: 29211 - DNA, 20 bp, Artificial Sequence
  Description of Artificial Sequence: Synthetic oligonucleotide
  Target: ATXN2; (-) strand; PAM type: NRG; PAM sequence: AGG
ttggcatctcagcagccacc

SEQ ID NO: 29212 - DNA, 20 bp, Artificial Sequence
  Description of Artificial Sequence: Synthetic oligonucleotide
  Target: ATXN2; (-) strand; PAM type: NRG; PAM sequence: CAG
cttggcatctcagcagccac

SEQ ID NO: 29213 - DNA, 20 bp, Artificial Sequence
  Description of Artificial Sequence: Synthetic oligonucleotide
  Target: ATXN2; (-) strand; PAM type: NRG; PAM sequence: CAG
tttgtaacttggcatctcag

SEQ ID NO: 29214 - DNA, 20 bp, Artificial Sequence
  Description of Artificial Sequence: Synthetic oligonucleotide
  Target: ATXN2; (-) strand; PAM type: NRG; PAM sequence: CAG
ggttttgtaacttggcatct

SEQ ID NO: 29215 - DNA, 20 bp, Artificial Sequence
  Description of Artificial Sequence: Synthetic oligonucleotide
  Target: ATXN2; (-) strand; PAM type: NRG; PAM sequence: TGG
ttgttcaaggttttgtaact

SEQ ID NO: 29216 - DNA, 20 bp, Artificial Sequence
  Description of Artificial Sequence: Synthetic oligonucleotide
  Target: ATXN2; (-) strand; PAM type: NRG; PAM sequence: AGG
cagttcgtggcatttgttca

SEQ ID NO: 29217 - DNA, 20 bp, Artificial Sequence
  Description of Artificial Sequence: Synthetic oligonucleotide
  Target: ATXN2; (-) strand; PAM type: NRG; PAM sequence: AAG
acagttcgtggcatttgttc

SEQ ID NO: 29218 - DNA, 20 bp, Artificial Sequence
  Description of Artificial Sequence: Synthetic oligonucleotide
  Target: ATXN2; (-) strand; PAM type: NRG; PAM sequence: TGG
atgagtttaaggacagttcg

SEQ ID NO: 29219 - DNA, 20 bp, Artificial Sequence
  Description of Artificial Sequence: Synthetic oligonucleotide
  Target: ATXN2; (-) strand; PAM type: NRG; PAM sequence: CAG
aggccatatgagtttaagga

SEQ ID NO: 29220 - DNA, 20 bp, Artificial Sequence
  Description of Artificial Sequence: Synthetic oligonucleotide
  Target: ATXN2; (-) strand; PAM type: NRG; PAM sequence: AGG
agggaggccatatgagttta

SEQ ID NO: 29221 - DNA, 20 bp, Artificial Sequence
  Description of Artificial Sequence: Synthetic oligonucleotide
  Target: ATXN2; (-) strand; PAM type: NRG; PAM sequence: AAG
tagggaggccatatgagttt

SEQ ID NO: 29222 - DNA, 20 bp, Artificial Sequence
  Description of Artificial Sequence: Synthetic oligonucleotide
  Target: ATXN2; (-) strand; PAM type: NRG; PAM sequence: GAG
gctttgtagggaggccatat

SEQ ID NO: 29223 - DNA, 20 bp, Artificial Sequence
  Description of Artificial Sequence: Synthetic oligonucleotide
  Target: ATXN2; (-) strand; PAM type: NRG; PAM sequence: AGG
ttttatatagctttgtaggg

SEQ ID NO: 29224 - DNA, 20 bp, Artificial Sequence
  Description of Artificial Sequence: Synthetic oligonucleotide
  Target: ATXN2; (-) strand; PAM type: NRG; PAM sequence: GAG
cttttatatagctttgtagg

SEQ ID NO: 29225 - DNA, 20 bp, Artificial Sequence
  Description of Artificial Sequence: Synthetic oligonucleotide
  Target: ATXN2; (-) strand; PAM type: NRG; PAM sequence: GGG
gtcttttatatagctttgta

SEQ ID NO: 29226 - DNA, 20 bp, Artificial Sequence
  Description of Artificial Sequence: Synthetic oligonucleotide
  Target: ATXN2; (-) strand; PAM type: NRG; PAM sequence: AGG
agtcttttatatagctttgt

SEQ ID NO: 29227 - DNA, 20 bp, Artificial Sequence
  Description of Artificial Sequence: Synthetic oligonucleotide
  Target: ATXN2; (-) strand; PAM type: NRG; PAM sequence: TAG
aagtcttttatatagctttg

SEQ ID NO: 29228 - DNA, 20 bp, Artificial Sequence
  Description of Artificial Sequence: Synthetic oligonucleotide
  Target: ATXN2; (-) strand; PAM type: NRG; PAM sequence: TAG
atgtttttaagtcttttata

SEQ ID NO: 29229 - DNA, 20 bp, Artificial Sequence
  Description of Artificial Sequence: Synthetic oligonucleotide
  Target: ATXN2; (-) strand; PAM type: NRG; PAM sequence: AAG
ttaaaggggattatgttttt

SEQ ID NO: 29230 - DNA, 20 bp, Artificial Sequence
  Description of Artificial Sequence: Synthetic oligonucleotide
  Target: ATXN2; (-) strand; PAM type: NRG; PAM sequence: GGG
acagtgtgacttatttaaag

SEQ ID NO: 29231 - DNA, 20 bp, Artificial Sequence
  Description of Artificial Sequence: Synthetic oligonucleotide
  Target: ATXN2; (-) strand; PAM type: NRG; PAM sequence: GGG
aacagtgtgacttatttaaa

SEQ ID NO: 29232 - DNA, 20 bp, Artificial Sequence
  Description of Artificial Sequence: Synthetic oligonucleotide
  Target: ATXN2; (-) strand; PAM type: NRG; PAM sequence: AGG
gaacagtgtgacttatttaa

SEQ ID NO: 29233 - DNA, 20 bp, Artificial Sequence
  Description of Artificial Sequence: Synthetic oligonucleotide
  Target: ATXN2; (-) strand; PAM type: NRG; PAM sequence: AAG
agaacagtgtgacttattta

SEQ ID NO: 29234 - DNA, 20 bp, Artificial Sequence
  Description of Artificial Sequence: Synthetic oligonucleotide
  Target: ATXN2; (-) strand; PAM type: NRG; PAM sequence: CAG
cacataatcactaaaaagaa

SEQ ID NO: 29235 - DNA, 20 bp, Artificial Sequence
  Description of Artificial Sequence: Synthetic oligonucleotide
  Target: ATXN2; (-) strand; PAM type: NRG; PAM sequence: AAG
gtaaccacataatcactaaa

SEQ ID NO: 29236 - DNA, 20 bp, Artificial Sequence
  Description of Artificial Sequence: Synthetic oligonucleotide
  Target: ATXN2; (-) strand; PAM type: NRG; PAM sequence: AAG
caattactttttattagtca

SEQ ID NO: 29237 - DNA, 20 bp, Artificial Sequence
  Description of Artificial Sequence: Synthetic oligonucleotide
  Target: ATXN2; (-) strand; PAM type: NRG; PAM sequence: TAG
gtcaaacaattactttttat

SEQ ID NO: 29238 - DNA, 20 bp, Artificial Sequence
  Description of Artificial Sequence: Synthetic oligonucleotide
  Target: ATXN2; (-) strand; PAM type: NRG; PAM sequence: TGG
gttcttttgagtaaactcca

SEQ ID NO: 29239 - DNA, 20 bp, Artificial Sequence
  Description of Artificial Sequence: Synthetic oligonucleotide
  Target: ATXN2; (-) strand; PAM type: NRG; PAM sequence: GAG
gttgaatgattcgttctttt

SEQ ID NO: 29240 - DNA, 20 bp, Artificial Sequence
  Description of Artificial Sequence: Synthetic oligonucleotide
  Target: ATXN2; (-) strand; PAM type: NRG; PAM sequence: TGG
tttatatgataatattttcc

SEQ ID NO: 29241 - DNA, 20 bp, Artificial Sequence
  Description of Artificial Sequence: Synthetic oligonucleotide
  Target: ATXN2; (-) strand; PAM type: NRG; PAM sequence: TGG
catagatcagtggaaattag

SEQ ID NO: 29242 - DNA, 20 bp, Artificial Sequence
  Description of Artificial Sequence: Synthetic oligonucleotide
  Target: ATXN2; (-) strand; PAM type: NRG; PAM sequence: TAG
tgtcatagatcagtggaaat

SEQ ID NO: 29243 - DNA, 20 bp, Artificial Sequence
  Description of Artificial Sequence: Synthetic oligonucleotide
  Target: ATXN2; (-) strand; PAM type: NRG; PAM sequence: TGG
ccaaccgtgtcatagatcag

SEQ ID NO: 29244 - DNA, 20 bp, Artificial Sequence
  Description of Artificial Sequence: Synthetic oligonucleotide
  Target: ATXN2; (-) strand; PAM type: NRG; PAM sequence: CAG
tgtccaaccgtgtcatagat

SEQ ID NO: 29245 - DNA, 20 bp, Artificial Sequence
  Description of Artificial Sequence: Synthetic oligonucleotide
  Target: ATXN2; (-) strand; PAM type: NRG; PAM sequence: TAG
ttgggtgtccaaccgtgtca

SEQ ID NO: 29246 - DNA, 20 bp, Artificial Sequence
  Description of Artificial Sequence: Synthetic oligonucleotide
  Target: ATXN2; (-) strand; PAM type: NRG; PAM sequence: GGG
gatatgctaacattcctgtt

SEQ ID NO: 29247 - DNA, 20 bp, Artificial Sequence
  Description of Artificial Sequence: Synthetic oligonucleotide
  Target: ATXN2; (-) strand; PAM type: NRG; PAM sequence: TGG
cgatatgctaacattcctgt

SEQ ID NO: 29248 - DNA, 20 bp, Artificial Sequence
  Description of Artificial Sequence: Synthetic oligonucleotide
  Target: ATXN2; (-) strand; PAM type: NRG; PAM sequence: GAG
ttagacttcagtggatttca

SEQ ID NO: 29249 - DNA, 20 bp, Artificial Sequence
  Description of Artificial Sequence: Synthetic oligonucleotide
  Target: ATXN2; (-) strand; PAM type: NRG; PAM sequence: CAG
atttagacttcagtggattt

SEQ ID NO: 29250 - DNA, 20 bp, Artificial Sequence
  Description of Artificial Sequence: Synthetic oligonucleotide
  Target: ATXN2; (-) strand; PAM type: NRG; PAM sequence: TGG
aacaagaatttagacttcag

SEQ ID NO: 29251 - DNA, 20 bp, Artificial Sequence
  Description of Artificial Sequence: Synthetic oligonucleotide
  Target: ATXN2; (-) strand; PAM type: NRG; PAM sequence: CAG
agaaacaagaatttagactt

SEQ ID NO: 29252 - DNA, 20 bp, Artificial Sequence
  Description of Artificial Sequence: Synthetic oligonucleotide
  Target: ATXN2; (-) strand; PAM type: NRG; PAM sequence: TAG
tacaaaaagaaacaagaatt

SEQ ID NO: 29253 - DNA, 20 bp, Artificial Sequence
  Description of Artificial Sequence: Synthetic oligonucleotide
  Target: ATXN2; (-) strand; PAM type: NRG; PAM sequence: AAG
gaatggatacaaaaagaaac

SEQ ID NO: 29254 - DNA, 20 bp, Artificial Sequence
  Description of Artificial Sequence: Synthetic oligonucleotide
  Target: ATXN2; (-) strand; PAM type: NRG; PAM sequence: AAG
ataacttgaatggatacaaa

SEQ ID NO: 29255 - DNA, 20 bp, Artificial Sequence
  Description of Artificial Sequence: Synthetic oligonucleotide
  Target: ATXN2; (-) strand; PAM type: NRG; PAM sequence: TGG
aaagtaaagcataacttgaa

SEQ ID NO: 29256 - DNA, 20 bp, Artificial Sequence
  Description of Artificial Sequence: Synthetic oligonucleotide
  Target: ATXN2; (-) strand; PAM type: NRG; PAM sequence: AAG
taatgaaaagattaaaagta

SEQ ID NO: 29257 - DNA, 20 bp, Artificial Sequence
  Description of Artificial Sequence: Synthetic oligonucleotide
  Target: ATXN2; (-) strand; PAM type: NRG; PAM sequence: AAG
gatactaatgaaaagattaa

SEQ ID NO: 29258 - DNA, 20 bp, Artificial Sequence
  Description of Artificial Sequence: Synthetic oligonucleotide
  Target: ATXN2; (-) strand; PAM type: NRG; PAM sequence: AAG
tggtttgagatactaatgaa

SEQ ID NO: 29259 - DNA, 20 bp, Artificial Sequence
  Description of Artificial Sequence: Synthetic oligonucleotide
  Target: ATXN2; (-) strand; PAM type: NRG; PAM sequence: GAG
aatagtaaaatatttggttt

SEQ ID NO: 29260 - DNA, 20 bp, Artificial Sequence
  Description of Artificial Sequence: Synthetic oligonucleotide
  Target: ATXN2; (-) strand; PAM type: NRG; PAM sequence: TGG
atattaaatagtaaaatatt

SEQ ID NO: 29261 - DNA, 20 bp, Artificial Sequence
  Description of Artificial Sequence: Synthetic oligonucleotide
  Target: ATXN2; (-) strand; PAM type: NRG; PAM sequence: TAG
gtatttgttactatattaaa

SEQ ID NO: 29262 - DNA, 20 bp, Artificial Sequence
  Description of Artificial Sequence: Synthetic oligonucleotide
  Target: ATXN2; (-) strand; PAM type: NRG; PAM sequence: CAG
ggcctttgtttattgcggtt

SEQ ID NO: 29263 - DNA, 20 bp, Artificial Sequence
  Description of Artificial Sequence: Synthetic oligonucleotide
  Target: ATXN2; (-) strand; PAM type: NRG; PAM sequence: CGG
ctcttggcctttgtttattg

SEQ ID NO: 29264 - DNA, 20 bp, Artificial Sequence
  Description of Artificial Sequence: Synthetic oligonucleotide
  Target: ATXN2; (-) strand; PAM type: NRG; PAM sequence: TGG
ttaggtctaaaatatgctct

SEQ ID NO: 29265 - DNA, 20 bp, Artificial Sequence
  Description of Artificial Sequence: Synthetic oligonucleotide
  Target: ATXN2; (-) strand; PAM type: NRG; PAM sequence: AGG
atctaatcataaatatactt

SEQ ID NO: 29266 - DNA, 20 bp, Artificial Sequence
  Description of Artificial Sequence: Synthetic oligonucleotide
  Target: ATXN2; (-) strand; PAM type: NRG; PAM sequence: TAG
tatctaatcataaatatact

SEQ ID NO: 29267 - DNA, 20 bp, Artificial Sequence
  Description of Artificial Sequence: Synthetic oligonucleotide
  Target: ATXN2; (-) strand; PAM type: NRG; PAM sequence: TAG
aagcatagagtcctggatat

SEQ ID NO: 29268 - DNA, 20 bp, Artificial Sequence
  Description of Artificial Sequence: Synthetic oligonucleotide
  Target: ATXN2; (-) strand; PAM type: NRG; PAM sequence: TGG
ctattaaaagcatagagtcc

SEQ ID NO: 29269 - DNA, 20 bp, Artificial Sequence
  Description of Artificial Sequence: Synthetic oligonucleotide
  Target: ATXN2; (-) strand; PAM type: NRG; PAM sequence: GAG
tggcaactattaaaagcata

SEQ ID NO: 29270 - DNA, 20 bp, Artificial Sequence
  Description of Artificial Sequence: Synthetic oligonucleotide
  Target: ATXN2; (-) strand; PAM type: NRG; PAM sequence: TAG
tttggcaactattaaaagca

SEQ ID NO: 29271 - DNA, 20 bp, Artificial Sequence
  Description of Artificial Sequence: Synthetic oligonucleotide
  Target: ATXN2; (-) strand; PAM type: NRG; PAM sequence: AAG
tcatatttggcaactattaa

SEQ ID NO: 29272 - DNA, 20 bp, Artificial Sequence
  Description of Artificial Sequence: Synthetic oligonucleotide
  Target: ATXN2; (-) strand; PAM type: NRG; PAM sequence: TGG
tcacacttgaatttcatatt

SEQ ID NO: 29273 - DNA, 20 bp, Artificial Sequence
  Description of Artificial Sequence: Synthetic oligonucleotide
  Target: ATXN2; (-) strand; PAM type: NRG; PAM sequence: AAG
attaatttgactggcatttt

SEQ ID NO: 29274 - DNA, 20 bp, Artificial Sequence
  Description of Artificial Sequence: Synthetic oligonucleotide
  Target: ATXN2; (-) strand; PAM type: NRG; PAM sequence: TGG
tttctttatattaatttgac

SEQ ID NO: 29275 - DNA, 20 bp, Artificial Sequence
  Description of Artificial Sequence: Synthetic oligonucleotide
  Target: ATXN2; (-) strand; PAM type: NRG; PAM sequence: CAG
caagcatgagctaccacatt

SEQ ID NO: 29276 - DNA, 20 bp, Artificial Sequence
  Description of Artificial Sequence: Synthetic oligonucleotide
  Target: ATXN2; (-) strand; PAM type: NRG; PAM sequence: GAG
agtgctgggattacaagcat

SEQ ID NO: 29277 - DNA, 20 bp, Artificial Sequence
  Description of Artificial Sequence: Synthetic oligonucleotide
  Target: ATXN2; (-) strand; PAM type: NRG; PAM sequence: AAG
tcctaaagtgctgggattac

SEQ ID NO: 29278 - DNA, 20 bp, Artificial Sequence
  Description of Artificial Sequence: Synthetic oligonucleotide
  Target: ATXN2; (-) strand; PAM type: NRG; PAM sequence: GGG
cctcagcctcctaaagtgct

SEQ ID NO: 29279 - DNA, 20 bp, Artificial Sequence
  Description of Artificial Sequence: Synthetic oligonucleotide
  Target: ATXN2; (-) strand; PAM type: NRG; PAM sequence: TGG
gcctcagcctcctaaagtgc

SEQ ID NO: 29280 - DNA, 20 bp, Artificial Sequence
  Description of Artificial Sequence: Synthetic oligonucleotide
  Target: ATXN2; (-) strand; PAM type: NRG; PAM sequence: AAG
cctcctgcctcagcctccta

SEQ ID NO: 29281 - DNA, 20 bp, Artificial Sequence
  Description of Artificial Sequence: Synthetic oligonucleotide
  Target: ATXN2; (-) strand; PAM type: NRG; PAM sequence: CAG
ctcaagtgatcctcctgcct

SEQ ID NO: 29282 - DNA, 20 bp, Artificial Sequence
  Description of Artificial Sequence: Synthetic oligonucleotide
  Target: ATXN2; (-) strand; PAM type: NRG; PAM sequence: AAG
gatctcaaactccggcactc

SEQ ID NO: 29283 - DNA, 20 bp, Artificial Sequence
  Description of Artificial Sequence: Synthetic oligonucleotide
  Target: ATXN2; (-) strand; PAM type: NRG; PAM sequence: CGG
cccagactgatctcaaactc

SEQ ID NO: 29284 - DNA, 20 bp, Artificial Sequence
  Description of Artificial Sequence: Synthetic oligonucleotide
  Target: ATXN2; (-) strand; PAM type: NRG; PAM sequence: CAG
cagggttttgctttgttgcc

SEQ ID NO: 29285 - DNA, 20 bp, Artificial Sequence
  Description of Artificial Sequence: Synthetic oligonucleotide
  Target: ATXN2; (-) strand; PAM type: NRG; PAM sequence: GGG
ttttattttttgtagaaaca

SEQ ID NO: 29286 - DNA, 20 bp, Artificial Sequence
  Description of Artificial Sequence: Synthetic oligonucleotide
  Target: ATXN2; (-) strand; PAM type: NRG; PAM sequence: AGG
tttttattttttgtagaaac

SEQ ID NO: 29287 - DNA, 20 bp, Artificial Sequence
  Description of Artificial Sequence: Synthetic oligonucleotide
  Target: ATXN2; (-) strand; PAM type: NRG; PAM sequence: CAG
ttttttattttttgtagaaa

SEQ ID NO: 29288 - DNA, 20 bp, Artificial Sequence
  Description of Artificial Sequence: Synthetic oligonucleotide
  Target: ATXN2; (-) strand; PAM type: NRG; PAM sequence: TAG
ggctagttttttattttttg

SEQ ID NO: 29289 - DNA, 20 bp, Artificial Sequence
  Description of Artificial Sequence: Synthetic oligonucleotide
  Target: ATXN2; (-) strand; PAM type: NRG; PAM sequence: TAG
cgtgtgccaccatgcctggc

SEQ ID NO: 29290 - DNA, 20 bp, Artificial Sequence
  Description of Artificial Sequence: Synthetic oligonucleotide
  Target: ATXN2; (-) strand; PAM type: NRG; PAM sequence: TGG
caggcgtgtgccaccatgcc

SEQ ID NO: 29291 - DNA, 20 bp, Artificial Sequence
  Description of Artificial Sequence: Synthetic oligonucleotide
  Target: ATXN2; (-) strand; PAM type: NRG; PAM sequence: AGG
taccaagtagcggggaccac

SEQ ID NO: 29292 - DNA, 20 bp, Artificial Sequence
  Description of Artificial Sequence: Synthetic oligonucleotide
  Target: ATXN2; (-) strand; PAM type: NRG; PAM sequence: CAG
ctaccaagtagcggggacca

SEQ ID NO: 29293 - DNA, 20 bp, Artificial Sequence
  Description of Artificial Sequence: Synthetic oligonucleotide
  Target: ATXN2; (-) strand; PAM type: NRG; PAM sequence: GGG
cctcaccctaccaagtagcg

SEQ ID NO: 29294 - DNA, 20 bp, Artificial Sequence
  Description of Artificial Sequence: Synthetic oligonucleotide
  Target: ATXN2; (-) strand; PAM type: NRG; PAM sequence: GGG
acctcaccctaccaagtagc

SEQ ID NO: 29295 - DNA, 20 bp, Artificial Sequence
  Description of Artificial Sequence: Synthetic oligonucleotide
  Target: ATXN2; (-) strand; PAM type: NRG; PAM sequence: CGG
cacctcaccctaccaagtag

SEQ ID NO: 29296 - DNA, 20 bp, Artificial Sequence
  Description of Artificial Sequence: Synthetic oligonucleotide
  Target: ATXN2; (-) strand; PAM type: NRG; PAM sequence: TAG
tcccacctcaccctaccaag

SEQ ID NO: 29297 - DNA, 20 bp, Artificial Sequence
  Description of Artificial Sequence: Synthetic oligonucleotide
  Target: ATXN2; (-) strand; PAM type: NRG; PAM sequence: AAG
tcctcccacctcaccctacc

SEQ ID NO: 29298 - DNA, 20 bp, Artificial Sequence
  Description of Artificial Sequence: Synthetic oligonucleotide
  Target: ATXN2; (-) strand; PAM type: NRG; PAM sequence: AAG
tgtcttgacctcctgggctc

SEQ ID NO: 29299 - DNA, 20 bp, Artificial Sequence
  Description of Artificial Sequence: Synthetic oligonucleotide
  Target: ATXN2; (-) strand; PAM type: NRG; PAM sequence: GGG
cactgctgtcttgacctcct

SEQ ID NO: 29300 - DNA, 20 bp, Artificial Sequence
  Description of Artificial Sequence: Synthetic oligonucleotide
  Target: ATXN2; (-) strand; PAM type: NRG; PAM sequence: TGG
tcactgctgtcttgacctcc

SEQ ID NO: 29301 - DNA, 20 bp, Artificial Sequence
  Description of Artificial Sequence: Synthetic oligonucleotide
  Target: ATXN2; (-) strand; PAM type: NRG; PAM sequence: CAG
ggagtgcagtggcataatca

SEQ ID NO: 29302 - DNA, 20 bp, Artificial Sequence
  Description of Artificial Sequence: Synthetic oligonucleotide
  Target: ATXN2; (-) strand; PAM type: NRG; PAM sequence: TGG
tcaccaatgctggagtgcag

SEQ ID NO: 29303 - DNA, 20 bp, Artificial Sequence
  Description of Artificial Sequence: Synthetic oligonucleotide
  Target: ATXN2; (-) strand; PAM type: NRG; PAM sequence: CAG
ctgtcaccaatgctggagtg

SEQ ID NO: 29304 - DNA, 20 bp, Artificial Sequence
  Description of Artificial Sequence: Synthetic oligonucleotide
  Target: ATXN2; (-) strand; PAM type: NRG; PAM sequence: GAG
ttgctctgtcaccaatgctg

SEQ ID NO: 29305 - DNA, 20 bp, Artificial Sequence
  Description of Artificial Sequence: Synthetic oligonucleotide
  Target: ATXN2; (-) strand; PAM type: NRG; PAM sequence: TGG
ttttgctctgtcaccaatgc

SEQ ID NO: 29306 - DNA, 20 bp, Artificial Sequence
  Description of Artificial Sequence: Synthetic oligonucleotide
  Target: ATXN2; (-) strand; PAM type: NRG; PAM sequence: GGG
gttaattattttttgagaca

SEQ ID NO: 29307 - DNA, 20 bp, Artificial Sequence
  Description of Artificial Sequence: Synthetic oligonucleotide
  Target: ATXN2; (-) strand; PAM type: NRG; PAM sequence: AGG
agttaattattttttgagac

SEQ ID NO: 29308 - DNA, 20 bp, Artificial Sequence
  Description of Artificial Sequence: Synthetic oligonucleotide
  Target: ATXN2; (-) strand; PAM type: NRG; PAM sequence: CAG
tagttaattattttttgaga

SEQ ID NO: 29309 - DNA, 20 bp, Artificial Sequence
  Description of Artificial Sequence: Synthetic oligonucleotide
  Target: ATXN2; (-) strand; PAM type: NRG; PAM sequence: GAG
tatttagttaattatttttt

SEQ ID NO: 29310 - DNA, 20 bp, Artificial Sequence
  Description of Artificial Sequence: Synthetic oligonucleotide
  Target: ATXN2; (-) strand; PAM type: NRG; PAM sequence: TAG
ccttctgtattattattatt

SEQ ID NO: 29311 - DNA, 20 bp, Artificial Sequence
  Description of Artificial Sequence: Synthetic oligonucleotide
  Target: ATXN2; (-) strand; PAM type: NRG; PAM sequence: CAG
cacccagctttaatagttat

SEQ ID NO: 29312 - DNA, 20 bp, Artificial Sequence
  Description of Artificial Sequence: Synthetic oligonucleotide
  Target: ATXN2; (-) strand; PAM type: NRG; PAM sequence: TAG
cacctatcacccagctttaa

SEQ ID NO: 29313 - DNA, 20 bp, Artificial Sequence
  Description of Artificial Sequence: Synthetic oligonucleotide
  Target: ATXN2; (-) strand; PAM type: NRG; PAM sequence: CAG
acccctgcacacctatcacc

SEQ ID NO: 29314 - DNA, 20 bp, Artificial Sequence
  Description of Artificial Sequence: Synthetic oligonucleotide
  Target: ATXN2; (-) strand; PAM type: NRG; PAM sequence: AAG
tgaaagtagacagaatggta

SEQ ID NO: 29315 - DNA, 20 bp, Artificial Sequence
  Description of Artificial Sequence: Synthetic oligonucleotide
  Target: ATXN2; (-) strand; PAM type: NRG; PAM sequence: TGG
ttgtgtgaaagtagacagaa

SEQ ID NO: 29316 - DNA, 20 bp, Artificial Sequence
  Description of Artificial Sequence: Synthetic oligonucleotide
  Target: ATXN2; (-) strand; PAM type: NRG; PAM sequence: CAG
ggaaattgtgtgaaagtaga

SEQ ID NO: 29317 - DNA, 20 bp, Artificial Sequence
  Description of Artificial Sequence: Synthetic oligonucleotide
  Target: ATXN2; (-) strand; PAM type: NRG; PAM sequence: TAG
taagggaaattgtgtgaaag

SEQ ID NO: 29318 - DNA, 20 bp, Artificial Sequence
  Description of Artificial Sequence: Synthetic oligonucleotide
  Target: ATXN2; (-) strand; PAM type: NRG; PAM sequence: AAG
ttttaagggaaattgtgtga

SEQ ID NO: 29319 - DNA, 20 bp, Artificial Sequence
  Description of Artificial Sequence: Synthetic oligonucleotide
  Target: ATXN2; (-) strand; PAM type: NRG; PAM sequence: GGG
gtgcttttttttttttttaa

SEQ ID NO: 29320 - DNA, 20 bp, Artificial Sequence
  Description of Artificial Sequence: Synthetic oligonucleotide
  Target: ATXN2; (-) strand; PAM type: NRG; PAM sequence: AGG
ggtgctttttttttttttta

SEQ ID NO: 29321 - DNA, 20 bp, Artificial Sequence
  Description of Artificial Sequence: Synthetic oligonucleotide
  Target: ATXN2; (-) strand; PAM type: NRG; PAM sequence: AAG
aggtgctttttttttttttt

SEQ ID NO: 29322 - DNA, 20 bp, Artificial Sequence
  Description of Artificial Sequence: Synthetic oligonucleotide
  Target: ATXN2; (-) strand; PAM type: NRG; PAM sequence: AGG
tgtatcacatcagaagcaga

SEQ ID NO: 29323 - DNA, 20 bp, Artificial Sequence
  Description of Artificial Sequence: Synthetic oligonucleotide
  Target: ATXN2; (-) strand; PAM type: NRG; PAM sequence: AAG
ttgtatcacatcagaagcag

SEQ ID NO: 29324 - DNA, 20 bp, Artificial Sequence
  Description of Artificial Sequence: Synthetic oligonucleotide
  Target: ATXN2; (-) strand; PAM type: NRG; PAM sequence: CAG
ctattgtatcacatcagaag

SEQ ID NO: 29325 - DNA, 20 bp, Artificial Sequence
  Description of Artificial Sequence: Synthetic oligonucleotide
  Target: ATXN2; (-) strand; PAM type: NRG; PAM sequence: AAG
atcctattgtatcacatcag

SEQ ID NO: 29326 - DNA, 20 bp, Artificial Sequence
  Description of Artificial Sequence: Synthetic oligonucleotide
  Target: ATXN2; (-) strand; PAM type: NRG; PAM sequence: CAG
tctatcctattgtatcacat

SEQ ID NO: 29327 - DNA, 20 bp, Artificial Sequence
  Description of Artificial Sequence: Synthetic oligonucleotide
  Target: ATXN2; (-) strand; PAM type: NRG; PAM sequence: AGG
gtagatctgtaaacttgatt

SEQ ID NO: 29328 - DNA, 20 bp, Artificial Sequence
  Description of Artificial Sequence: Synthetic oligonucleotide
  Target: ATXN2; (-) strand; PAM type: NRG; PAM sequence: TAG
ggtagatctgtaaacttgat

SEQ ID NO: 29329 - DNA, 20 bp, Artificial Sequence
  Description of Artificial Sequence: Synthetic oligonucleotide
  Target: ATXN2; (-) strand; PAM type: NRG; PAM sequence: TAG
taatgtttctcgtaaactgg

SEQ ID NO: 29330 - DNA, 20 bp, Artificial Sequence
  Description of Artificial Sequence: Synthetic oligonucleotide
  Target: ATXN2; (-) strand; PAM type: NRG; PAM sequence: TGG
tcttaatgtttctcgtaaac

SEQ ID NO: 29331 - DNA, 20 bp, Artificial Sequence
  Description of Artificial Sequence: Synthetic oligonucleotide
  Target: ATXN2; (-) strand; PAM type: NRG; PAM sequence: CAG
tgtgaggaacctcatggtat

SEQ ID NO: 29332 - DNA, 20 bp, Artificial Sequence
  Description of Artificial Sequence: Synthetic oligonucleotide
  Target: ATXN2; (-) strand; PAM type: NRG; PAM sequence: TGG
ttaaactgtgaggaacctca

SEQ ID NO: 29333 - DNA, 20 bp, Artificial Sequence
  Description of Artificial Sequence: Synthetic oligonucleotide
  Target: ATXN2; (-) strand; PAM type: NRG; PAM sequence: AGG
cattctggatttaaactgtg

SEQ ID NO: 29334 - DNA, 20 bp, Artificial Sequence
  Description of Artificial Sequence: Synthetic oligonucleotide
  Target: ATXN2; (-) strand; PAM type: NRG; PAM sequence: GAG
gcattctggatttaaactgt

SEQ ID NO: 29335 - DNA, 20 bp, Artificial Sequence
  Description of Artificial Sequence: Synthetic oligonucleotide
  Target: ATXN2; (-) strand; PAM type: NRG; PAM sequence: TGG
atgttgcatttactgcattc

SEQ ID NO: 29336 - DNA, 20 bp, Artificial Sequence
  Description of Artificial Sequence: Synthetic oligonucleotide
  Target: ATXN2; (-) strand; PAM type: NRG; PAM sequence: CAG
gacagagtgagactctgtct

SEQ ID NO: 29337 - DNA, 20 bp, Artificial Sequence
  Description of Artificial Sequence: Synthetic oligonucleotide
  Target: ATXN2; (-) strand; PAM type: NRG; PAM sequence: GAG
ctccagcctggcgacagagt

SEQ ID NO: 29338 - DNA, 20 bp, Artificial Sequence
  Description of Artificial Sequence: Synthetic oligonucleotide
  Target: ATXN2; (-) strand; PAM type: NRG; PAM sequence: GAG
tgcactccagcctggcgaca

SEQ ID NO: 29339 - DNA, 20 bp, Artificial Sequence
  Description of Artificial Sequence: Synthetic oligonucleotide
  Target: ATXN2; (-) strand; PAM type: NRG; PAM sequence: CAG
actgcactccagcctggcga

SEQ ID NO: 29340 - DNA, 20 bp, Artificial Sequence
  Description of Artificial Sequence: Synthetic oligonucleotide
  Target: ATXN2; (-) strand; PAM type: NRG; PAM sequence: TGG
cgtgccactgcactccagcc

SEQ ID NO: 29341 - DNA, 20 bp, Artificial Sequence
  Description of Artificial Sequence: Synthetic oligonucleotide
  Target: ATXN2; (-) strand; PAM type: NRG; PAM sequence: CAG
aagatcgtgccactgcactc

SEQ ID NO: 29342 - DNA, 20 bp, Artificial Sequence
  Description of Artificial Sequence: Synthetic oligonucleotide
  Target: ATXN2; (-) strand; PAM type: NRG; PAM sequence: AAG
ggcggaggttgcagtgagcc

SEQ ID NO: 29343 - DNA, 20 bp, Artificial Sequence
  Description of Artificial Sequence: Synthetic oligonucleotide
  Target: ATXN2; (-) strand; PAM type: NRG; PAM sequence: GAG
tgggaggcggaggttgcagt

SEQ ID NO: 29344 - DNA, 20 bp, Artificial Sequence
  Description of Artificial Sequence: Synthetic oligonucleotide
  Target: ATXN2; (-) strand; PAM type: NRG; PAM sequence: CAG
tacctgggaggcggaggttg

SEQ ID NO: 29345 - DNA, 20 bp, Artificial Sequence
  Description of Artificial Sequence: Synthetic oligonucleotide
  Target: ATXN2; (-) strand; PAM type: NRG; PAM sequence: AGG
cctagctacctgggaggcgg

SEQ ID NO: 29346 - DNA, 20 bp, Artificial Sequence
  Description of Artificial Sequence: Synthetic oligonucleotide
  Target: ATXN2; (-) strand; PAM type: NRG; PAM sequence: GAG
tcctagctacctgggaggcg

SEQ ID NO: 29347 - DNA, 20 bp, Artificial Sequence
  Description of Artificial Sequence: Synthetic oligonucleotide
  Target: ATXN2; (-) strand; PAM type: NRG; PAM sequence: CGG
agtcctagctacctgggagg

SEQ ID NO: 29348 - DNA, 20 bp, Artificial Sequence
  Description of Artificial Sequence: Synthetic oligonucleotide
  Target: ATXN2; (-) strand; PAM type: NRG; PAM sequence: AGG
tgtagtcctagctacctggg

SEQ ID NO: 29349 - DNA, 20 bp, Artificial Sequence
  Description of Artificial Sequence: Synthetic oligonucleotide
  Target: ATXN2; (-) strand; PAM type: NRG; PAM sequence: GAG
ctgtagtcctagctacctgg

SEQ ID NO: 29350 - DNA, 20 bp, Artificial Sequence
  Description of Artificial Sequence: Synthetic oligonucleotide
  Target: ATXN2; (-) strand; PAM type: NRG; PAM sequence: GGG
acctgtagtcctagctacct

SEQ ID NO: 29351 - DNA, 20 bp, Artificial Sequence
  Description of Artificial Sequence: Synthetic oligonucleotide
  Target: ATXN2; (-) strand; PAM type: NRG; PAM sequence: TGG
tacctgtagtcctagctacc

SEQ ID NO: 29352 - DNA, 20 bp, Artificial Sequence
  Description of Artificial Sequence: Synthetic oligonucleotide
  Target: ATXN2; (-) strand; PAM type: NRG; PAM sequence: TAG
gtgacgcgtacctgtagtcc

SEQ ID NO: 29353 - DNA, 20 bp, Artificial Sequence
  Description of Artificial Sequence: Synthetic oligonucleotide
  Target: ATXN2; (-) strand; PAM type: NRG; PAM sequence: TAG
ggcatggtgacgcgtacctg

SEQ ID NO: 29354 - DNA, 20 bp, Artificial Sequence
  Description of Artificial Sequence: Synthetic oligonucleotide
  Target: ATXN2; (-) strand; PAM type: NRG; PAM sequence: TGG
atacaaaaattatctgggca

SEQ ID NO: 29355 - DNA, 20 bp, Artificial Sequence
  Description of Artificial Sequence: Synthetic oligonucleotide
  Target: ATXN2; (-) strand; PAM type: NRG; PAM sequence: GGG
taagaatacaaaaattatct

SEQ ID NO: 29356 - DNA, 20 bp, Artificial Sequence
  Description of Artificial Sequence: Synthetic oligonucleotide
  Target: ATXN2; (-) strand; PAM type: NRG; PAM sequence: TGG
ctaagaatacaaaaattatc

SEQ ID NO: 29357 - DNA, 20 bp, Artificial Sequence
  Description of Artificial Sequence: Synthetic oligonucleotide
  Target: ATXN2; (-) strand; PAM type: NRG; PAM sequence: AAG
ggtgaaaccccgtctctact

SEQ ID NO: 29358 - DNA, 20 bp, Artificial Sequence
  Description of Artificial Sequence: Synthetic oligonucleotide
  Target: ATXN2; (-) strand; PAM type: NRG; PAM sequence: TGG
caagaccatcctggccaaca

SEQ ID NO: 29359 - DNA, 20 bp, Artificial Sequence
  Description of Artificial Sequence: Synthetic oligonucleotide
  Target: ATXN2; (-) strand; PAM type: NRG; PAM sequence: TGG
ttaagagatcaagaccatcc

SEQ ID NO: 29360 - DNA, 20 bp, Artificial Sequence
  Description of Artificial Sequence: Synthetic oligonucleotide
  Target: ATXN2; (-) strand; PAM type: NRG; PAM sequence: AAG
gatcacaaggttaagagatc

SEQ ID NO: 29361 - DNA, 20 bp, Artificial Sequence
  Description of Artificial Sequence: Synthetic oligonucleotide
  Target: ATXN2; (-) strand; PAM type: NRG; PAM sequence: GAG
tgggtggatcacaaggttaa

SEQ ID NO: 29362 - DNA, 20 bp, Artificial Sequence
  Description of Artificial Sequence: Synthetic oligonucleotide
  Target: ATXN2; (-) strand; PAM type: NRG; PAM sequence: AAG
ggtgggtggatcacaaggtt

SEQ ID NO: 29363 - DNA, 20 bp, Artificial Sequence
  Description of Artificial Sequence: Synthetic oligonucleotide
  Target: ATXN2; (-) strand; PAM type: NRG; PAM sequence: AGG
gctgaggtgggtggatcaca

SEQ ID NO: 29364 - DNA, 20 bp, Artificial Sequence
  Description of Artificial Sequence: Synthetic oligonucleotide
  Target: ATXN2; (-) strand; PAM type: NRG; PAM sequence: AAG
ggctgaggtgggtggatcac

SEQ ID NO: 29365 - DNA, 20 bp, Artificial Sequence
  Description of Artificial Sequence: Synthetic oligonucleotide
  Target: ATXN2; (-) strand; PAM type: NRG; PAM sequence: TGG
ctttgggaggctgaggtggg

SEQ ID NO: 29366 - DNA, 20 bp, Artificial Sequence
  Description of Artificial Sequence: Synthetic oligonucleotide
  Target: ATXN2; (-) strand; PAM type: NRG; PAM sequence: GGG
gcactttgggaggctgaggt

SEQ ID NO: 29367 - DNA, 20 bp, Artificial Sequence
  Description of Artificial Sequence: Synthetic oligonucleotide
  Target: ATXN2; (-) strand; PAM type: NRG; PAM sequence: TGG
agcactttgggaggctgagg

SEQ ID NO: 29368 - DNA, 20 bp, Artificial Sequence
  Description of Artificial Sequence: Synthetic oligonucleotide
  Target: ATXN2; (-) strand; PAM type: NRG; PAM sequence: AGG
cccagcactttgggaggctg

SEQ ID NO: 29369 - DNA, 20 bp, Artificial Sequence
  Description of Artificial Sequence: Synthetic oligonucleotide
  Target: ATXN2; (-) strand; PAM type: NRG; PAM sequence: GAG
tcccagcactttgggaggct

SEQ ID NO: 29370 - DNA, 20 bp, Artificial Sequence
  Description of Artificial Sequence: Synthetic oligonucleotide
  Target: ATXN2; (-) strand; PAM type: NRG; PAM sequence: AGG
tgtaatcccagcactttggg

SEQ ID NO: 29371 - DNA, 20 bp, Artificial Sequence
  Description of Artificial Sequence: Synthetic oligonucleotide
  Target: ATXN2; (-) strand; PAM type: NRG; PAM sequence: GAG
ctgtaatcccagcactttgg

SEQ ID NO: 29372 - DNA, 20 bp, Artificial Sequence
  Description of Artificial Sequence: Synthetic oligonucleotide
  Target: ATXN2; (-) strand; PAM type: NRG; PAM sequence: GGG
gcctgtaatcccagcacttt

SEQ ID NO: 29373 - DNA, 20 bp, Artificial Sequence
  Description of Artificial Sequence: Synthetic oligonucleotide
  Target: ATXN2; (-) strand; PAM type: NRG; PAM sequence: TGG
cgcctgtaatcccagcactt

SEQ ID NO: 29374 - DNA, 20 bp, Artificial Sequence
  Description of Artificial Sequence: Synthetic oligonucleotide
  Target: ATXN2; (-) strand; PAM type: NRG; PAM sequence: CAG
gtagctcacgcctgtaatcc

SEQ ID NO: 29375 - DNA, 20 bp, Artificial Sequence
  Description of Artificial Sequence: Synthetic oligonucleotide
  Target: ATXN2; (-) strand; PAM type: NRG; PAM sequence: TAG
tcatctttggccgggcgtgg

SEQ ID NO: 29376 - DNA, 20 bp, Artificial Sequence
  Description of Artificial Sequence: Synthetic oligonucleotide
  Target: ATXN2; (-) strand; PAM type: NRG; PAM sequence: TGG
ccgtcatctttggccgggcg

SEQ ID NO: 29377 - DNA, 20 bp, Artificial Sequence
  Description of Artificial Sequence: Synthetic oligonucleotide
  Target: ATXN2; (-) strand; PAM type: NRG; PAM sequence: GGG
ttaaaccgtcatctttggcc

SEQ ID NO: 29378 - DNA, 20 bp, Artificial Sequence
  Description of Artificial Sequence: Synthetic oligonucleotide
  Target: ATXN2; (-) strand; PAM type: NRG; PAM sequence: CGG
gttaaaccgtcatctttggc

SEQ ID NO: 29379 - DNA, 20 bp, Artificial Sequence
  Description of Artificial Sequence: Synthetic oligonucleotide
  Target: ATXN2; (-) strand; PAM type: NRG; PAM sequence: TGG
atttgttaaaccgtcatctt

SEQ ID NO: 29380 - DNA, 20 bp, Artificial Sequence
  Description of Artificial Sequence: Synthetic oligonucleotide
  Target: ATXN2; (-) strand; PAM type: NRG; PAM sequence: AAG
atatgtattttaaaattcat

SEQ ID NO: 29381 - DNA, 20 bp, Artificial Sequence
  Description of Artificial Sequence: Synthetic oligonucleotide
  Target: ATXN2; (-) strand; PAM type: NRG; PAM sequence: TGG
caggccttagccaccacacc

SEQ ID NO: 29382 - DNA, 20 bp, Artificial Sequence
  Description of Artificial Sequence: Synthetic oligonucleotide
  Target: ATXN2; (-) strand; PAM type: NRG; PAM sequence: TAG
agtgctgggattacaggcct

SEQ ID NO: 29383 - DNA, 20 bp, Artificial Sequence
  Description of Artificial Sequence: Synthetic oligonucleotide
  Target: ATXN2; (-) strand; PAM type: NRG; PAM sequence: AGG
tcccaaagtgctgggattac

SEQ ID NO: 29384 - DNA, 20 bp, Artificial Sequence
  Description of Artificial Sequence: Synthetic oligonucleotide
  Target: ATXN2; (-) strand; PAM type: NRG; PAM sequence: CAG
ctcccaaagtgctgggatta

SEQ ID NO: 29385 - DNA, 20 bp, Artificial Sequence
  Description of Artificial Sequence: Synthetic oligonucleotide
  Target: ATXN2; (-) strand; PAM type: NRG; PAM sequence: GGG
cctcggcctcccaaagtgct

SEQ ID NO: 29386 - DNA, 20 bp, Artificial Sequence
  Description of Artificial Sequence: Synthetic oligonucleotide
  Target: ATXN2; (-) strand; PAM type: NRG; PAM sequence: TGG
acctcggcctcccaaagtgc

SEQ ID NO: 29387 - DNA, 20 bp, Artificial Sequence
  Description of Artificial Sequence: Synthetic oligonucleotide
  Target: ATXN2; (-) strand; PAM type: NRG; PAM sequence: AAG
ccacccacctcggcctccca

SEQ ID NO: 29388 - DNA, 20 bp, Artificial Sequence
  Description of Artificial Sequence: Synthetic oligonucleotide
  Target: ATXN2; (-) strand; PAM type: NRG; PAM sequence: CGG
agctcgtgatccacccacct

SEQ ID NO: 29389 - DNA, 20 bp, Artificial Sequence
  Description of Artificial Sequence: Synthetic oligonucleotide
  Target: ATXN2; (-) strand; PAM type: NRG; PAM sequence: GAG
caggctggtcttgaacttct

SEQ ID NO: 29390 - DNA, 20 bp, Artificial Sequence
  Description of Artificial Sequence: Synthetic oligonucleotide
  Target: ATXN2; (-) strand; PAM type: NRG; PAM sequence: TGG
tttcaccatattggtcaggc

SEQ ID NO: 29391 - DNA, 20 bp, Artificial Sequence
  Description of Artificial Sequence: Synthetic oligonucleotide
  Target: ATXN2; (-) strand; PAM type: NRG; PAM sequence: AGG
ggggtttcaccatattggtc

SEQ ID NO: 29392 - DNA, 20 bp, Artificial Sequence
  Description of Artificial Sequence: Synthetic oligonucleotide
  Target: ATXN2; (-) strand; PAM type: NRG; PAM sequence: CAG
cggggtttcaccatattggt

SEQ ID NO: 29393 - DNA, 20 bp, Artificial Sequence
  Description of Artificial Sequence: Synthetic oligonucleotide
  Target: ATXN2; (-) strand; PAM type: NRG; PAM sequence: TGG
gaaacggggtttcaccatat

SEQ ID NO: 29394 - DNA, 20 bp, Artificial Sequence
  Description of Artificial Sequence: Synthetic oligonucleotide
  Target: ATXN2; (-) strand; PAM type: NRG; PAM sequence: GGG
ttctatttttagtagaaacg

SEQ ID NO: 29395 - DNA, 20 bp, Artificial Sequence
  Description of Artificial Sequence: Synthetic oligonucleotide
  Target: ATXN2; (-) strand; PAM type: NRG; PAM sequence: GGG
tttctatttttagtagaaac

SEQ ID NO: 29396 - DNA, 20 bp, Artificial Sequence
  Description of Artificial Sequence: Synthetic oligonucleotide
  Target: ATXN2; (-) strand; PAM type: NRG; PAM sequence: CGG
ttttctatttttagtagaaa

SEQ ID NO: 29397 - DNA, 20 bp, Artificial Sequence
  Description of Artificial Sequence: Synthetic oligonucleotide
  Target: ATXN2; (-) strand; PAM type: NRG; PAM sequence: TAG
gctaatttttctatttttag

SEQ ID NO: 29398 - DNA, 20 bp, Artificial Sequence
  Description of Artificial Sequence: Synthetic oligonucleotide
  Target: ATXN2; (-) strand; PAM type: NRG; PAM sequence: TAG
ctggctaatttttctatttt

SEQ ID NO: 29399 - DNA, 20 bp, Artificial Sequence
  Description of Artificial Sequence: Synthetic oligonucleotide
  Target: ATXN2; (-) strand; PAM type: NRG; PAM sequence: TGG
caggtgtgcaccaccacgcc

SEQ ID NO: 29400 - DNA, 20 bp, Artificial Sequence
  Description of Artificial Sequence: Synthetic oligonucleotide
  Target: ATXN2; (-) strand; PAM type: NRG; PAM sequence: AGG
ccccaaatatctgggattac

SEQ ID NO: 29401 - DNA, 20 bp, Artificial Sequence
  Description of Artificial Sequence: Synthetic oligonucleotide
  Target: ATXN2; (-) strand; PAM type: NRG; PAM sequence: CAG
tccccaaatatctgggatta

SEQ ID NO: 29402 - DNA, 20 bp, Artificial Sequence
  Description of Artificial Sequence: Synthetic oligonucleotide
  Target: ATXN2; (-) strand; PAM type: NRG; PAM sequence: GGG
ctcagcctccccaaatatct

SEQ ID NO: 29403 - DNA, 20 bp, Artificial Sequence
  Description of Artificial Sequence: Synthetic oligonucleotide
  Target: ATXN2; (-) strand; PAM type: NRG; PAM sequence: TGG
tctcagcctccccaaatatc

SEQ ID NO: 29404 - DNA, 20 bp, Artificial Sequence
  Description of Artificial Sequence: Synthetic oligonucleotide
  Target: ATXN2; (-) strand; PAM type: NRG; PAM sequence: CAG
ttcaagtgattctctggtct

SEQ ID NO: 29405 - DNA, 20 bp, Artificial Sequence
  Description of Artificial Sequence: Synthetic oligonucleotide
  Target: ATXN2; (-) strand; PAM type: NRG; PAM sequence: TGG
cccgggttcaagtgattctc

SEQ ID NO: 29406 - DNA, 20 bp, Artificial Sequence
  Description of Artificial Sequence: Synthetic oligonucleotide
  Target: ATXN2; (-) strand; PAM type: NRG; PAM sequence: AAG
aacctccacttcccgggttc

SEQ ID NO: 29407 - DNA, 20 bp, Artificial Sequence
  Description of Artificial Sequence: Synthetic oligonucleotide
  Target: ATXN2; (-) strand; PAM type: NRG; PAM sequence: GGG
cactggaacctccacttccc

SEQ ID NO: 29408 - DNA, 20 bp, Artificial Sequence
  Description of Artificial Sequence: Synthetic oligonucleotide
  Target: ATXN2; (-) strand; PAM type: NRG; PAM sequence: CGG
tcactggaacctccacttcc

SEQ ID NO: 29409 - DNA, 20 bp, Artificial Sequence
  Description of Artificial Sequence: Synthetic oligonucleotide
  Target: ATXN2; (-) strand; PAM type: NRG; PAM sequence: TGG
gtggcacgatctcggctcac

SEQ ID NO: 29410 - DNA, 20 bp, Artificial Sequence
  Description of Artificial Sequence: Synthetic oligonucleotide
  Target: ATXN2; (-) strand; PAM type: NRG; PAM sequence: CGG
ggagtgcagtggcacgatct

SEQ ID NO: 29411 - DNA, 20 bp, Artificial Sequence
  Description of Artificial Sequence: Synthetic oligonucleotide
  Target: ATXN2; (-) strand; PAM type: NRG; PAM sequence: TGG
tcgcccaggctggagtgcag

SEQ ID NO: 29412 - DNA, 20 bp, Artificial Sequence
  Description of Artificial Sequence: Synthetic oligonucleotide
  Target: ATXN2; (-) strand; PAM type: NRG; PAM sequence: CAG
ctgtcgcccaggctggagtg

SEQ ID NO: 29413 - DNA, 20 bp, Artificial Sequence
  Description of Artificial Sequence: Synthetic oligonucleotide
  Target: ATXN2; (-) strand; PAM type: NRG; PAM sequence: GAG
ttgctctgtcgcccaggctg

SEQ ID NO: 29414 - DNA, 20 bp, Artificial Sequence
  Description of Artificial Sequence: Synthetic oligonucleotide
  Target: ATXN2; (-) strand; PAM type: NRG; PAM sequence: TGG
tcttgctctgtcgcccaggc

SEQ ID NO: 29415 - DNA, 20 bp, Artificial Sequence
  Description of Artificial Sequence: Synthetic oligonucleotide
  Target: ATXN2; (-) strand; PAM type: NRG; PAM sequence: AGG
atagtcttgctctgtcgccc

SEQ ID NO: 29416 - DNA, 20 bp, Artificial Sequence
  Description of Artificial Sequence: Synthetic oligonucleotide
  Target: ATXN2; (-) strand; PAM type: NRG; PAM sequence: CAG
gatagtcttgctctgtcgcc

SEQ ID NO: 29417 - DNA, 20 bp, Artificial Sequence
  Description of Artificial Sequence: Synthetic oligonucleotide
  Target: ATXN2; (-) strand; PAM type: NRG; PAM sequence: TAG
tttttttttgttttttgaga

SEQ ID NO: 29418 - DNA, 20 bp, Artificial Sequence
  Description of Artificial Sequence: Synthetic oligonucleotide
  Target: ATXN2; (-) strand; PAM type: NRG; PAM sequence: GAG
tttttttttttttgtttttt

SEQ ID NO: 29419 - DNA, 20 bp, Artificial Sequence
  Description of Artificial Sequence: Synthetic oligonucleotide
  Target: ATXN2; (-) strand; PAM type: NRG; PAM sequence: TAG
ttaagtgttttttttttttg

SEQ ID NO: 29420 - DNA, 20 bp, Artificial Sequence
  Description of Artificial Sequence: Synthetic oligonucleotide
  Target: ATXN2; (-) strand; PAM type: NRG; PAM sequence: AAG
ttaacaattttaagtgtatt

SEQ ID NO: 29421 - DNA, 20 bp, Artificial Sequence
  Description of Artificial Sequence: Synthetic oligonucleotide
  Target: ATXN2; (-) strand; PAM type: NRG; PAM sequence: AAG
tataccattttaacaatttt

SEQ ID NO: 29422 - DNA, 20 bp, Artificial Sequence
  Description of Artificial Sequence: Synthetic oligonucleotide
  Target: ATXN2; (-) strand; PAM type: NRG; PAM sequence: AAG
cctaaattatggtgcaatat

SEQ ID NO: 29423 - DNA, 20 bp, Artificial Sequence
  Description of Artificial Sequence: Synthetic oligonucleotide
  Target: ATXN2; (-) strand; PAM type: NRG; PAM sequence: TGG
gttttttttctcctaaatta

SEQ ID NO: 29424 - DNA, 20 bp, Artificial Sequence
  Description of Artificial Sequence: Synthetic oligonucleotide
  Target: ATXN2; (-) strand; PAM type: NRG; PAM sequence: GAG
tttctttgggaagagattgt

SEQ ID NO: 29425 - DNA, 20 bp, Artificial Sequence
  Description of Artificial Sequence: Synthetic oligonucleotide
  Target: ATXN2; (-) strand; PAM type: NRG; PAM sequence: GAG
aaatgaaatttctttgggaa

SEQ ID NO: 29426 - DNA, 20 bp, Artificial Sequence
  Description of Artificial Sequence: Synthetic oligonucleotide
  Target: ATXN2; (-) strand; PAM type: NRG; PAM sequence: AAG
gcaaatgaaatttctttggg

SEQ ID NO: 29427 - DNA, 20 bp, Artificial Sequence
  Description of Artificial Sequence: Synthetic oligonucleotide
  Target: ATXN2; (-) strand; PAM type: NRG; PAM sequence: GGG
gttgcaaatgaaatttcttt

SEQ ID NO: 29428 - DNA, 20 bp, Artificial Sequence
  Description of Artificial Sequence: Synthetic oligonucleotide
  Target: ATXN2; (-) strand; PAM type: NRG; PAM sequence: TGG
tgttgcaaatgaaatttctt

SEQ ID NO: 29429 - DNA, 20 bp, Artificial Sequence
  Description of Artificial Sequence: Synthetic oligonucleotide
  Target: ATXN2; (-) strand; PAM type: NRG; PAM sequence: AAG
ctcctaccaagtgcctttga

SEQ ID NO: 29430 - DNA, 20 bp, Artificial Sequence
  Description of Artificial Sequence: Synthetic oligonucleotide
  Target: ATXN2; (-) strand; PAM type: NRG; PAM sequence: AAG
ccaatgattctcctcctacc

SEQ ID NO: 29431 - DNA, 20 bp, Artificial Sequence
  Description of Artificial Sequence: Synthetic oligonucleotide
  Target: ATXN2; (-) strand; PAM type: NRG; PAM sequence: TAG
caaactagacaactacaatt

SEQ ID NO: 29432 - DNA, 20 bp, Artificial Sequence
  Description of Artificial Sequence: Synthetic oligonucleotide
  Target: ATXN2; (-) strand; PAM type: NRG; PAM sequence: TAG
cctagttctggccaccaaac

SEQ ID NO: 29433 - DNA, 20 bp, Artificial Sequence
  Description of Artificial Sequence: Synthetic oligonucleotide
  Target: ATXN2; (-) strand; PAM type: NRG; PAM sequence: TGG
cagctctctttccctagttc

SEQ ID NO: 29434 - DNA, 20 bp, Artificial Sequence
  Description of Artificial Sequence: Synthetic oligonucleotide
  Target: ATXN2; (-) strand; PAM type: NRG; PAM sequence: TAG
tcctcccagctctctttccc

SEQ ID NO: 29435 - DNA, 20 bp, Artificial Sequence
  Description of Artificial Sequence: Synthetic oligonucleotide
  Target: ATXN2; (-) strand; PAM type: NRG; PAM sequence: CAG
aatccacagaggagtcctcc

SEQ ID NO: 29436 - DNA, 20 bp, Artificial Sequence
  Description of Artificial Sequence: Synthetic oligonucleotide
  Target: ATXN2; (-) strand; PAM type: NRG; PAM sequence: GAG
atttgttccaatccacagag

SEQ ID NO: 29437 - DNA, 20 bp, Artificial Sequence
  Description of Artificial Sequence: Synthetic oligonucleotide
  Target: ATXN2; (-) strand; PAM type: NRG; PAM sequence: AGG
aaatttgttccaatccacag

SEQ ID NO: 29438 - DNA, 20 bp, Artificial Sequence
  Description of Artificial Sequence: Synthetic oligonucleotide
  Target: ATXN2; (-) strand; PAM type: NRG; PAM sequence: GAG
gaaatttgttccaatccaca

SEQ ID NO: 29439 - DNA, 20 bp, Artificial Sequence
  Description of Artificial Sequence: Synthetic oligonucleotide
  Target: ATXN2; (-) strand; PAM type: NRG; PAM sequence: CAG
ttgaaatttgttccaatcca

SEQ ID NO: 29440 - DNA, 20 bp, Artificial Sequence
  Description of Artificial Sequence: Synthetic oligonucleotide
  Target: ATXN2; (-) strand; PAM type: NRG; PAM sequence: CAG
gaagggatagtttctgagat

SEQ ID NO: 29441 - DNA, 20 bp, Artificial Sequence
  Description of Artificial Sequence: Synthetic oligonucleotide
  Target: ATXN2; (-) strand; PAM type: NRG; PAM sequence: GAG
tctttgaagggatagtttct

SEQ ID NO: 29442 - DNA, 20 bp, Artificial Sequence
  Description of Artificial Sequence: Synthetic oligonucleotide
  Target: ATXN2; (-) strand; PAM type: NRG; PAM sequence: TAG
tttgcgcttctttgaaggga

SEQ ID NO: 29443 - DNA, 20 bp, Artificial Sequence
  Description of Artificial Sequence: Synthetic oligonucleotide
  Target: ATXN2; (-) strand; PAM type: NRG; PAM sequence: GGG
caaatttgcgcttctttgaa

SEQ ID NO: 29444 - DNA, 20 bp, Artificial Sequence
  Description of Artificial Sequence: Synthetic oligonucleotide
  Target: ATXN2; (-) strand; PAM type: NRG; PAM sequence: AGG
tcaaatttgcgcttctttga

SEQ ID NO: 29445 - DNA, 20 bp, Artificial Sequence
  Description of Artificial Sequence: Synthetic oligonucleotide
  Target: ATXN2; (-) strand; PAM type: NRG; PAM sequence: AAG
atcaaatttgcgcttctttg

SEQ ID NO: 29446 - DNA, 20 bp, Artificial Sequence
  Description of Artificial Sequence: Synthetic oligonucleotide
  Target: ATXN2; (-) strand; PAM type: NRG; PAM sequence: CAG
tttgggcctaaactgctcca

SEQ ID NO: 29447 - DNA, 20 bp, Artificial Sequence
  Description of Artificial Sequence: Synthetic oligonucleotide
  Target: ATXN2; (-) strand; PAM type: NRG; PAM sequence: GGG
attgttttccgtggagcttt

SEQ ID NO: 29448 - DNA, 20 bp, Artificial Sequence
  Description of Artificial Sequence: Synthetic oligonucleotide
  Target: ATXN2; (-) strand; PAM type: NRG; PAM sequence: TGG
cattgttttccgtggagctt

SEQ ID NO: 29449 - DNA, 20 bp, Artificial Sequence
  Description of Artificial Sequence: Synthetic oligonucleotide
  Target: ATXN2; (-) strand; PAM type: NRG; PAM sequence: GAG
ggcctgcattgttttccgtg

SEQ ID NO: 29450 - DNA, 20 bp, Artificial Sequence
  Description of Artificial Sequence: Synthetic oligonucleotide
  Target: ATXN2; (-) strand; PAM type: NRG; PAM sequence: TGG
agggcctgcattgttttccg

SEQ ID NO: 29451 - DNA, 20 bp, Artificial Sequence
  Description of Artificial Sequence: Synthetic oligonucleotide
  Target: ATXN2; (-) strand; PAM type: NRG; PAM sequence: GGG
gtgaaatctgcagatatgga

SEQ ID NO: 29452 - DNA, 20 bp, Artificial Sequence
  Description of Artificial Sequence: Synthetic oligonucleotide
  Target: ATXN2; (-) strand; PAM type: NRG; PAM sequence: AGG
tgtgaaatctgcagatatgg

SEQ ID NO: 29453 - DNA, 20 bp, Artificial Sequence
  Description of Artificial Sequence: Synthetic oligonucleotide
  Target: ATXN2; (-) strand; PAM type: NRG; PAM sequence: GAG
atgtgaaatctgcagatatg

SEQ ID NO: 29454 - DNA, 20 bp, Artificial Sequence
  Description of Artificial Sequence: Synthetic oligonucleotide
  Target: ATXN2; (-) strand; PAM type: NRG; PAM sequence: TGG
ggatgtgaaatctgcagata

SEQ ID NO: 29455 - DNA, 20 bp, Artificial Sequence
  Description of Artificial Sequence: Synthetic oligonucleotide
  Target: ATXN2; (-) strand; PAM type: NRG; PAM sequence: CAG
atctgaggatgtgaaatctg

SEQ ID NO: 29456 - DNA, 20 bp, Artificial Sequence
  Description of Artificial Sequence: Synthetic oligonucleotide
  Target: ATXN2; (-) strand; PAM type: NRG; PAM sequence: AGG
atctcgagtgattgaatctg

SEQ ID NO: 29457 - DNA, 20 bp, Artificial Sequence
  Description of Artificial Sequence: Synthetic oligonucleotide
  Target: ATXN2; (-) strand; PAM type: NRG; PAM sequence: GAG
aatctcgagtgattgaatct

SEQ ID NO: 29458 - DNA, 20 bp, Artificial Sequence
  Description of Artificial Sequence: Synthetic oligonucleotide
  Target: ATXN2; (-) strand; PAM type: NRG; PAM sequence: GAG
ttttaagtgtttttaatctc

SEQ ID NO: 29459 - DNA, 20 bp, Artificial Sequence
  Description of Artificial Sequence: Synthetic oligonucleotide
  Target: ATXN2; (-) strand; PAM type: NRG; PAM sequence: AAG
tttttattgtatttattttt

SEQ ID NO: 29460 - DNA, 20 bp, Artificial Sequence
  Description of Artificial Sequence: Synthetic oligonucleotide
  Target: ATXN2; (-) strand; PAM type: NRG; PAM sequence: TAG
tggtgtaaacactaggtaaa

SEQ ID NO: 29461 - DNA, 20 bp, Artificial Sequence
  Description of Artificial Sequence: Synthetic oligonucleotide
  Target: ATXN2; (-) strand; PAM type: NRG; PAM sequence: AGG
cctaatatggtgtaaacact

SEQ ID NO: 29462 - DNA, 20 bp, Artificial Sequence
  Description of Artificial Sequence: Synthetic oligonucleotide
  Target: ATXN2; (-) strand; PAM type: NRG; PAM sequence: TAG
acctaatatggtgtaaacac

SEQ ID NO: 29463 - DNA, 20 bp, Artificial Sequence
  Description of Artificial Sequence: Synthetic oligonucleotide
  Target: ATXN2; (-) strand; PAM type: NRG; PAM sequence: TGG
attacttataatacctaata

SEQ ID NO: 29464 - DNA, 20 bp, Artificial Sequence
  Description of Artificial Sequence: Synthetic oligonucleotide
  Target: ATXN2; (-) strand; PAM type: NRG; PAM sequence: TAG
cctgtatgctttgtcatttc

SEQ ID NO: 29465 - DNA, 20 bp, Artificial Sequence
  Description of Artificial Sequence: Synthetic oligonucleotide
  Target: ATXN2; (-) strand; PAM type: NRG; PAM sequence: CGG
ggcacagtatttgcatatac

SEQ ID NO: 29466 - DNA, 20 bp, Artificial Sequence
  Description of Artificial Sequence: Synthetic oligonucleotide
  Target: ATXN2; (-) strand; PAM type: NRG; PAM sequence: CAG
tagtccctcataaaatggca

SEQ ID NO: 29467 - DNA, 20 bp, Artificial Sequence
  Description of Artificial Sequence: Synthetic oligonucleotide
  Target: ATXN2; (-) strand; PAM type: NRG; PAM sequence: TGG
tgctctagtccctcataaaa

SEQ ID NO: 29468 - DNA, 20 bp, Artificial Sequence
  Description of Artificial Sequence: Synthetic oligonucleotide
  Target: ATXN2; (-) strand; PAM type: NRG; PAM sequence: TAG
ataaaaatttatggatgctc

SEQ ID NO: 29469 - DNA, 20 bp, Artificial Sequence
  Description of Artificial Sequence: Synthetic oligonucleotide
  Target: ATXN2; (-) strand; PAM type: NRG; PAM sequence: TGG
ccgttggatataaaaattta

SEQ ID NO: 29470 - DNA, 20 bp, Artificial Sequence
  Description of Artificial Sequence: Synthetic oligonucleotide
  Target: ATXN2; (-) strand; PAM type: NRG; PAM sequence: TGG
tggtcccaggacccccccgt

SEQ ID NO: 29471 - DNA, 20 bp, Artificial Sequence
  Description of Artificial Sequence: Synthetic oligonucleotide
  Target: ATXN2; (-) strand; PAM type: NRG; PAM sequence: AGG
gtccttgggggattggtccc

SEQ ID NO: 29472 - DNA, 20 bp, Artificial Sequence
  Description of Artificial Sequence: Synthetic oligonucleotide
  Target: ATXN2; (-) strand; PAM type: NRG; PAM sequence: CAG
tgtccttgggggattggtcc

SEQ ID NO: 29473 - DNA, 20 bp, Artificial Sequence
  Description of Artificial Sequence: Synthetic oligonucleotide
  Target: ATXN2; (-) strand; PAM type: NRG; PAM sequence: TGG
tcttggtgtccttgggggat

SEQ ID NO: 29474 - DNA, 20 bp, Artificial Sequence
  Description of Artificial Sequence: Synthetic oligonucleotide
  Target: ATXN2; (-) strand; PAM type: NRG; PAM sequence: GGG
tcatttcttggtgtccttgg

SEQ ID NO: 29475 - DNA, 20 bp, Artificial Sequence
  Description of Artificial Sequence: Synthetic oligonucleotide
  Target: ATXN2; (-) strand; PAM type: NRG; PAM sequence: GGG
gtcatttcttggtgtccttg

SEQ ID NO: 29476 - DNA, 20 bp, Artificial Sequence
  Description of Artificial Sequence: Synthetic oligonucleotide
  Target: ATXN2; (-) strand; PAM type: NRG; PAM sequence: GGG
agtcatttcttggtgtcctt

SEQ ID NO: 29477 - DNA, 20 bp, Artificial Sequence
  Description of Artificial Sequence: Synthetic oligonucleotide
  Target: ATXN2; (-) strand; PAM type: NRG; PAM sequence: TGG
tagtcatttcttggtgtcct

SEQ ID NO: 29478 - DNA, 20 bp, Artificial Sequence
  Description of Artificial Sequence: Synthetic oligonucleotide
  Target: ATXN2; (-) strand; PAM type: NRG; PAM sequence: TGG
gatgctgtgtagtcatttct

SEQ ID NO: 29479 - DNA, 20 bp, Artificial Sequence
  Description of Artificial Sequence: Synthetic oligonucleotide
  Target: ATXN2; (-) strand; PAM type: NRG; PAM sequence: TAG
aattactaggtgatgctgtg

SEQ ID NO: 29480 - DNA, 20 bp, Artificial Sequence
  Description of Artificial Sequence: Synthetic oligonucleotide
  Target: ATXN2; (-) strand; PAM type: NRG; PAM sequence: AGG
gttaagctacactaattact

SEQ ID NO: 29481 - DNA, 20 bp, Artificial Sequence
  Description of Artificial Sequence: Synthetic oligonucleotide
  Target: ATXN2; (-) strand; PAM type: NRG; PAM sequence: TAG
tgttaagctacactaattac

SEQ ID NO: 29482 - DNA, 20 bp, Artificial Sequence
  Description of Artificial Sequence: Synthetic oligonucleotide
  Target: ATXN2; (-) strand; PAM type: NRG; PAM sequence: AAG
cctgactgtacccagctgtt

SEQ ID NO: 29483 - DNA, 20 bp, Artificial Sequence
  Description of Artificial Sequence: Synthetic oligonucleotide
  Target: ATXN2; (-) strand; PAM type: NRG; PAM sequence: CAG
tctcttttcctgactgtacc

SEQ ID NO: 29484 - DNA, 20 bp, Artificial Sequence
  Description of Artificial Sequence: Synthetic oligonucleotide
  Target: ATXN2; (-) strand; PAM type: NRG; PAM sequence: TGG
gaatcacagtgattttggca

SEQ ID NO: 29485 - DNA, 20 bp, Artificial Sequence
  Description of Artificial Sequence: Synthetic oligonucleotide
  Target: ATXN2; (-) strand; PAM type: NRG; PAM sequence: TGG
ctctagaatcacagtgattt

SEQ ID NO: 29486 - DNA, 20 bp, Artificial Sequence
  Description of Artificial Sequence: Synthetic oligonucleotide
  Target: ATXN2; (-) strand; PAM type: NRG; PAM sequence: CAG
ctaccatcactctagaatca

SEQ ID NO: 29487 - DNA, 20 bp, Artificial Sequence
  Description of Artificial Sequence: Synthetic oligonucleotide
  Target: ATXN2; (-) strand; PAM type: NRG; PAM sequence: TAG
gggtatgcctaccatcactc

SEQ ID NO: 29488 - DNA, 20 bp, Artificial Sequence
  Description of Artificial Sequence: Synthetic oligonucleotide
  Target: ATXN2; (-) strand; PAM type: NRG; PAM sequence: GGG
ttttcttgggatgcagcctt

SEQ ID NO: 29489 - DNA, 20 bp, Artificial Sequence
  Description of Artificial Sequence: Synthetic oligonucleotide
  Target: ATXN2; (-) strand; PAM type: NRG; PAM sequence: TGG
gttttcttgggatgcagcct

SEQ ID NO: 29490 - DNA, 20 bp, Artificial Sequence
  Description of Artificial Sequence: Synthetic oligonucleotide
  Target: ATXN2; (-) strand; PAM type: NRG; PAM sequence: CAG
atgctagttttcttgggatg

SEQ ID NO: 29491 - DNA, 20 bp, Artificial Sequence
  Description of Artificial Sequence: Synthetic oligonucleotide
  Target: ATXN2; (-) strand; PAM type: NRG; PAM sequence: GGG
cgtctgatgctagttttctt

SEQ ID NO: 29492 - DNA, 20 bp, Artificial Sequence
  Description of Artificial Sequence: Synthetic oligonucleotide
  Target: ATXN2; (-) strand; PAM type: NRG; PAM sequence: TGG
acgtctgatgctagttttct

SEQ ID NO: 29493 - DNA, 20 bp, Artificial Sequence
  Description of Artificial Sequence: Synthetic oligonucleotide
  Target: ATXN2; (-) strand; PAM type: NRG; PAM sequence: TAG
cagtgtgacacgtctgatgc

SEQ ID NO: 29494 - DNA, 20 bp, Artificial Sequence
  Description of Artificial Sequence: Synthetic oligonucleotide
  Target: ATXN2; (-) strand; PAM type: NRG; PAM sequence: CAG
atccttcttccctccctgta

SEQ ID NO: 29495 - DNA, 20 bp, Artificial Sequence
  Description of Artificial Sequence: Synthetic oligonucleotide
  Target: ATXN2; (-) strand; PAM type: NRG; PAM sequence: TAG
aatgactggctgaatgattt

SEQ ID NO: 29496 - DNA, 20 bp, Artificial Sequence
  Description of Artificial Sequence: Synthetic oligonucleotide
  Target: ATXN2; (-) strand; PAM type: NRG; PAM sequence: TGG
ttgcttatttgtctaatgac

SEQ ID NO: 29497 - DNA, 20 bp, Artificial Sequence
  Description of Artificial Sequence: Synthetic oligonucleotide
  Target: ATXN2; (-) strand; PAM type: NRG; PAM sequence: TGG
tagcctatggttgggggtgg

SEQ ID NO: 29498 - DNA, 20 bp, Artificial Sequence
  Description of Artificial Sequence: Synthetic oligonucleotide
  Target: ATXN2; (-) strand; PAM type: NRG; PAM sequence: TGG
cattagcctatggttggggg

SEQ ID NO: 29499 - DNA, 20 bp, Artificial Sequence
  Description of Artificial Sequence: Synthetic oligonucleotide
  Target: ATXN2; (-) strand; PAM type: NRG; PAM sequence: GGG
cctcattagcctatggttgg

SEQ ID NO: 29500 - DNA, 20 bp, Artificial Sequence
  Description of Artificial Sequence: Synthetic oligonucleotide
  Target: ATXN2; (-) strand; PAM type: NRG; PAM sequence: GGG
acctcattagcctatggttg

SEQ ID NO: 29501 - DNA, 20 bp, Artificial Sequence
  Description of Artificial Sequence: Synthetic oligonucleotide
  Target: ATXN2; (-) strand; PAM type: NRG; PAM sequence: GGG
tacctcattagcctatggtt

SEQ ID NO: 29502 - DNA, 20 bp, Artificial Sequence
  Description of Artificial Sequence: Synthetic oligonucleotide
  Target: ATXN2; (-) strand; PAM type: NRG; PAM sequence: TGG
atacctcattagcctatggt

SEQ ID NO: 29503 - DNA, 20 bp, Artificial Sequence
  Description of Artificial Sequence: Synthetic oligonucleotide
  Target: ATXN2; (-) strand; PAM type: NRG; PAM sequence: TGG
ctggatacctcattagccta

SEQ ID NO: 29504 - DNA, 20 bp, Artificial Sequence
  Description of Artificial Sequence: Synthetic oligonucleotide
  Target: ATXN2; (-) strand; PAM type: NRG; PAM sequence: TAG
agtaactctggatacctcat

SEQ ID NO: 29505 - DNA, 20 bp, Artificial Sequence
  Description of Artificial Sequence: Synthetic oligonucleotide
  Target: ATXN2; (-) strand; PAM type: NRG; PAM sequence: TGG
tttaagtaatgtagtaactc

SEQ ID NO: 29506 - DNA, 20 bp, Artificial Sequence
  Description of Artificial Sequence: Synthetic oligonucleotide
  Target: ATXN2; (-) strand; PAM type: NRG; PAM sequence: TAG
actggacattttaagtaatg

SEQ ID NO: 29507 - DNA, 20 bp, Artificial Sequence
  Description of Artificial Sequence: Synthetic oligonucleotide
  Target: ATXN2; (-) strand; PAM type: NRG; PAM sequence: AAG
tgttgaaaactggacatttt

SEQ ID NO: 29508 - DNA, 20 bp, Artificial Sequence
  Description of Artificial Sequence: Synthetic oligonucleotide
  Target: ATXN2; (-) strand; PAM type: NRG; PAM sequence: TGG
ttttttttgttgttgaaaac

SEQ ID NO: 29509 - DNA, 20 bp, Artificial Sequence
  Description of Artificial Sequence: Synthetic oligonucleotide
  Target: ATXN2; (-) strand; PAM type: NRG; PAM sequence: TAG
ggttatactttcctgtgtct

SEQ ID NO: 29510 - DNA, 20 bp, Artificial Sequence
  Description of Artificial Sequence: Synthetic oligonucleotide
  Target: ATXN2; (-) strand; PAM type: NRG; PAM sequence: GGG
acttctttttccagtgggtg

SEQ ID NO: 29511 - DNA, 20 bp, Artificial Sequence
  Description of Artificial Sequence: Synthetic oligonucleotide
  Target: ATXN2; (-) strand; PAM type: NRG; PAM sequence: GGG
tacttctttttccagtgggt

SEQ ID NO: 29512 - DNA, 20 bp, Artificial Sequence
  Description of Artificial Sequence: Synthetic oligonucleotide
  Target: ATXN2; (-) strand; PAM type: NRG; PAM sequence: TGG
ctacttctttttccagtggg

SEQ ID NO: 29513 - DNA, 20 bp, Artificial Sequence
  Description of Artificial Sequence: Synthetic oligonucleotide
  Target: ATXN2; (-) strand; PAM type: NRG; PAM sequence: GGG
tgcctacttctttttccagt

SEQ ID NO: 29514 - DNA, 20 bp, Artificial Sequence
  Description of Artificial Sequence: Synthetic oligonucleotide
  Target: ATXN2; (-) strand; PAM type: NRG; PAM sequence: TGG
ttgcctacttctttttccag

SEQ ID NO: 29515 - DNA, 20 bp, Artificial Sequence
  Description of Artificial Sequence: Synthetic oligonucleotide
  Target: ATXN2; (-) strand; PAM type: NRG; PAM sequence: CAG
ctattgcctacttctttttc

SEQ ID NO: 29516 - DNA, 20 bp, Artificial Sequence
  Description of Artificial Sequence: Synthetic oligonucleotide
  Target: ATXN2; (-) strand; PAM type: NRG; PAM sequence: AAG
agtcagacatctggttatac

SEQ ID NO: 29517 - DNA, 20 bp, Artificial Sequence
  Description of Artificial Sequence: Synthetic oligonucleotide
  Target: ATXN2; (-) strand; PAM type: NRG; PAM sequence: TGG
ttcttattaagtcagacatc

SEQ ID NO: 29518 - DNA, 20 bp, Artificial Sequence
  Description of Artificial Sequence: Synthetic oligonucleotide
  Target: ATXN2; (-) strand; PAM type: NRG; PAM sequence: CAG
ttttgaaattcttattaagt

SEQ ID NO: 29519 - DNA, 20 bp, Artificial Sequence
  Description of Artificial Sequence: Synthetic oligonucleotide
  Target: ATXN2; (-) strand; PAM type: NRG; PAM sequence: AAG
ccacttttgaaattcttatt

SEQ ID NO: 29520 - DNA, 20 bp, Artificial Sequence
  Description of Artificial Sequence: Synthetic oligonucleotide
  Target: ATXN2; (-) strand; PAM type: NRG; PAM sequence: TAG
tcgttcttaaaacatgttta

SEQ ID NO: 29521 - DNA, 20 bp, Artificial Sequence
  Description of Artificial Sequence: Synthetic oligonucleotide
  Target: ATXN2; (-) strand; PAM type: NRG; PAM sequence: TGG
ttcttttactgcattaatta

SEQ ID NO: 29522 - DNA, 20 bp, Artificial Sequence
  Description of Artificial Sequence: Synthetic oligonucleotide
  Target: ATXN2; (-) strand; PAM type: NRG; PAM sequence: TGG
caggcgtgagtcagggcgcc

SEQ ID NO: 29523 - DNA, 20 bp, Artificial Sequence
  Description of Artificial Sequence: Synthetic oligonucleotide
  Target: ATXN2; (-) strand; PAM type: NRG; PAM sequence: GGG
gggattacaggcgtgagtca

SEQ ID NO: 29524 - DNA, 20 bp, Artificial Sequence
  Description of Artificial Sequence: Synthetic oligonucleotide
  Target: ATXN2; (-) strand; PAM type: NRG; PAM sequence: AGG
tgggattacaggcgtgagtc

SEQ ID NO: 29525 - DNA, 20 bp, Artificial Sequence
  Description of Artificial Sequence: Synthetic oligonucleotide
  Target: ATXN2; (-) strand; PAM type: NRG; PAM sequence: CAG
ctgggattacaggcgtgagt

SEQ ID NO: 29526 - DNA, 20 bp, Artificial Sequence
  Description of Artificial Sequence: Synthetic oligonucleotide
  Target: ATXN2; (-) strand; PAM type: NRG; PAM sequence: GAG
agtgctgggattacaggcgt

SEQ ID NO: 29527 - DNA, 20 bp, Artificial Sequence
  Description of Artificial Sequence: Synthetic oligonucleotide
  Target: ATXN2; (-) strand; PAM type: NRG; PAM sequence: AGG
tcctggagtgctgggattac

SEQ ID NO: 29528 - DNA, 20 bp, Artificial Sequence
  Description of Artificial Sequence: Synthetic oligonucleotide
  Target: ATXN2; (-) strand; PAM type: NRG; PAM sequence: CAG
ctcctggagtgctgggatta

SEQ ID NO: 29529 - DNA, 20 bp, Artificial Sequence
  Description of Artificial Sequence: Synthetic oligonucleotide
  Target: ATXN2; (-) strand; PAM type: NRG; PAM sequence: GGG
ccttggcctcctggagtgct

SEQ ID NO: 29530 - DNA, 20 bp, Artificial Sequence
  Description of Artificial Sequence: Synthetic oligonucleotide
  Target: ATXN2; (-) strand; PAM type: NRG; PAM sequence: TGG
gccttggcctcctggagtgc

SEQ ID NO: 29531 - DNA, 20 bp, Artificial Sequence
  Description of Artificial Sequence: Synthetic oligonucleotide
  Target: ATXN2; (-) strand; PAM type: NRG; PAM sequence: GAG
cagcccgccttggcctcctg

SEQ ID NO: 29532 - DNA, 20 bp, Artificial Sequence
  Description of Artificial Sequence: Synthetic oligonucleotide
  Target: ATXN2; (-) strand; PAM type: NRG; PAM sequence: TGG
ttcagcccgccttggcctcc

SEQ ID NO: 29533 - DNA, 20 bp, Artificial Sequence
  Description of Artificial Sequence: Synthetic oligonucleotide
  Target: ATXN2; (-) strand; PAM type: NRG; PAM sequence: TGG
gatggggtttcagcccgcct

SEQ ID NO: 29534 - DNA, 20 bp, Artificial Sequence
  Description of Artificial Sequence: Synthetic oligonucleotide
  Target: ATXN2; (-) strand; PAM type: NRG; PAM sequence: CAG
ttttagtagagatggggttt

SEQ ID NO: 29535 - DNA, 20 bp, Artificial Sequence
  Description of Artificial Sequence: Synthetic oligonucleotide
  Target: ATXN2; (-) strand; PAM type: NRG; PAM sequence: GGG
ttgtatttttagtagagatg

SEQ ID NO: 29536 - DNA, 20 bp, Artificial Sequence
  Description of Artificial Sequence: Synthetic oligonucleotide
  Target: ATXN2; (-) strand; PAM type: NRG; PAM sequence: GGG
tttgtatttttagtagagat

SEQ ID NO: 29537 - DNA, 20 bp, Artificial Sequence
  Description of Artificial Sequence: Synthetic oligonucleotide
  Target: ATXN2; (-) strand; PAM type: NRG; PAM sequence: TGG
ttttgtatttttagtagaga

SEQ ID NO: 29538 - DNA, 20 bp, Artificial Sequence
  Description of Artificial Sequence: Synthetic oligonucleotide
  Target: ATXN2; (-) strand; PAM type: NRG; PAM sequence: GAG
ttgtttttgtatttttagta

SEQ ID NO: 29539 - DNA, 20 bp, Artificial Sequence
  Description of Artificial Sequence: Synthetic oligonucleotide
  Target: ATXN2; (-) strand; PAM type: NRG; PAM sequence: TAG
ttttgtttttgtatttttag

SEQ ID NO: 29540 - DNA, 20 bp, Artificial Sequence
  Description of Artificial Sequence: Synthetic oligonucleotide
  Target: ATXN2; (-) strand; PAM type: NRG; PAM sequence: TAG
taattttgtttttgtatttt

SEQ ID NO: 29541 - DNA, 20 bp, Artificial Sequence
  Description of Artificial Sequence: Synthetic oligonucleotide
  Target: ATXN2; (-) strand; PAM type: NRG; PAM sequence: TGG
caggtgcctgccaccacgcc

SEQ ID NO: 29542 - DNA, 20 bp, Artificial Sequence
  Description of Artificial Sequence: Synthetic oligonucleotide
  Target: ATXN2; (-) strand; PAM type: NRG; PAM sequence: AGG
tcctgagtagctgggactac

SEQ ID NO: 29543 - DNA, 20 bp, Artificial Sequence
  Description of Artificial Sequence: Synthetic oligonucleotide
  Target: ATXN2; (-) strand; PAM type: NRG; PAM sequence: CAG
ctcctgagtagctgggacta

SEQ ID NO: 29544 - DNA, 20 bp, Artificial Sequence
  Description of Artificial Sequence: Synthetic oligonucleotide
  Target: ATXN2; (-) strand; PAM type: NRG; PAM sequence: GGG
ccttagcctcctgagtagct

SEQ ID NO: 29545 - DNA, 20 bp, Artificial Sequence
  Description of Artificial Sequence: Synthetic oligonucleotide
  Target: ATXN2; (-) strand; PAM type: NRG; PAM sequence: TGG
gccttagcctcctgagtagc

SEQ ID NO: 29546 - DNA, 20 bp, Artificial Sequence
  Description of Artificial Sequence: Synthetic oligonucleotide
  Target: ATXN2; (-) strand; PAM type: NRG; PAM sequence: TAG
tcctgccttagcctcctgag

SEQ ID NO: 29547 - DNA, 20 bp, Artificial Sequence
  Description of Artificial Sequence: Synthetic oligonucleotide
  Target: ATXN2; (-) strand; PAM type: NRG; PAM sequence: GAG
ttgtcctgccttagcctcct

SEQ ID NO: 29548 - DNA, 20 bp, Artificial Sequence
  Description of Artificial Sequence: Synthetic oligonucleotide
  Target: ATXN2; (-) strand; PAM type: NRG; PAM sequence: TAG
ttcacaccattgtcctgcct

SEQ ID NO: 29549 - DNA, 20 bp, Artificial Sequence
  Description of Artificial Sequence: Synthetic oligonucleotide
  Target: ATXN2; (-) strand; PAM type: NRG; PAM sequence: AAG
cactgcaagctccgcctccc

SEQ ID NO: 29550 - DNA, 20 bp, Artificial Sequence
  Description of Artificial Sequence: Synthetic oligonucleotide
  Target: ATXN2; (-) strand; PAM type: NRG; PAM sequence: AAG
gcacaatctcggctcactgc

SEQ ID NO: 29551 - DNA, 20 bp, Artificial Sequence
  Description of Artificial Sequence: Synthetic oligonucleotide
  Target: ATXN2; (-) strand; PAM type: NRG; PAM sequence: CGG
ggagtgcagtggcacaatct

SEQ ID NO: 29552 - DNA, 20 bp, Artificial Sequence
  Description of Artificial Sequence: Synthetic oligonucleotide
  Target: ATXN2; (-) strand; PAM type: NRG; PAM sequence: TGG
ttgcccaggctggagtgcag

SEQ ID NO: 29553 - DNA, 20 bp, Artificial Sequence
  Description of Artificial Sequence: Synthetic oligonucleotide
  Target: ATXN2; (-) strand; PAM type: NRG; PAM sequence: CAG
gtattgcccaggctggagtg

SEQ ID NO: 29554 - DNA, 20 bp, Artificial Sequence
  Description of Artificial Sequence: Synthetic oligonucleotide
  Target: ATXN2; (-) strand; PAM type: NRG; PAM sequence: GAG
tcgctgtattgcccaggctg

SEQ ID NO: 29555 - DNA, 20 bp, Artificial Sequence
  Description of Artificial Sequence: Synthetic oligonucleotide
  Target: ATXN2; (-) strand; PAM type: NRG; PAM sequence: TGG
tctcgctgtattgcccaggc

SEQ ID NO: 29556 - DNA, 20 bp, Artificial Sequence
  Description of Artificial Sequence: Synthetic oligonucleotide
  Target: ATXN2; (-) strand; PAM type: NRG; PAM sequence: AGG
ggagtctcgctgtattgccc

SEQ ID NO: 29557 - DNA, 20 bp, Artificial Sequence
  Description of Artificial Sequence: Synthetic oligonucleotide
  Target: ATXN2; (-) strand; PAM type: NRG; PAM sequence: CAG
cggagtctcgctgtattgcc

SEQ ID NO: 29558 - DNA, 20 bp, Artificial Sequence
  Description of Artificial Sequence: Synthetic oligonucleotide
  Target: ATXN2; (-) strand; PAM type: NRG; PAM sequence: GAG
tattttttttttttgaggcg

SEQ ID NO: 29559 - DNA, 20 bp, Artificial Sequence
  Description of Artificial Sequence: Synthetic oligonucleotide
  Target: ATXN2; (-) strand; PAM type: NRG; PAM sequence: CGG
tttattttttttttttgagg

SEQ ID NO: 29560 - DNA, 20 bp, Artificial Sequence
  Description of Artificial Sequence: Synthetic oligonucleotide
  Target: ATXN2; (-) strand; PAM type: NRG; PAM sequence: AGG
tcatttattttttttttttg

SEQ ID NO: 29561 - DNA, 20 bp, Artificial Sequence
  Description of Artificial Sequence: Synthetic oligonucleotide
  Target: ATXN2; (-) strand; PAM type: NRG; PAM sequence: GAG
ttcatttatttttttttttt

SEQ ID NO: 29562 - DNA, 20 bp, Artificial Sequence
  Description of Artificial Sequence: Synthetic oligonucleotide
  Target: ATXN2; (-) strand; PAM type: NRG; PAM sequence: GAG
tgagccaccatgcccggcca

SEQ ID NO: 29563 - DNA, 20 bp, Artificial Sequence
  Description of Artificial Sequence: Synthetic oligonucleotide
  Target: ATXN2; (-) strand; PAM type: NRG; PAM sequence: CAG
catgagccaccatgcccggc

SEQ ID NO: 29564 - DNA, 20 bp, Artificial Sequence
  Description of Artificial Sequence: Synthetic oligonucleotide
  Target: ATXN2; (-) strand; PAM type: NRG; PAM sequence: CGG
aaggcatgagccaccatgcc

SEQ ID NO: 29565 - DNA, 20 bp, Artificial Sequence
  Description of Artificial Sequence: Synthetic oligonucleotide
  Target: ATXN2; (-) strand; PAM type: NRG; PAM sequence: GAG
aagtgctgggattaaggcat

SEQ ID NO: 29566 - DNA, 20 bp, Artificial Sequence
  Description of Artificial Sequence: Synthetic oligonucleotide
  Target: ATXN2; (-) strand; PAM type: NRG; PAM sequence: AGG
ctcccaaagtgctgggatta

SEQ ID NO: 29567 - DNA, 20 bp, Artificial Sequence
  Description of Artificial Sequence: Synthetic oligonucleotide
  Target: ATXN2; (-) strand; PAM type: NRG; PAM sequence: AAG
cctcccaaagtgctgggatt

SEQ ID NO: 29568 - DNA, 20 bp, Artificial Sequence
  Description of Artificial Sequence: Synthetic oligonucleotide
  Target: ATXN2; (-) strand; PAM type: NRG; PAM sequence: GGG
ccttggcctcccaaagtgct

SEQ ID NO: 29569 - DNA, 20 bp, Artificial Sequence
  Description of Artificial Sequence: Synthetic oligonucleotide
  Target: ATXN2; (-) strand; PAM type: NRG; PAM sequence: TGG
gccttggcctcccaaagtgc

SEQ ID NO: 29570 - DNA, 20 bp, Artificial Sequence
  Description of Artificial Sequence: Synthetic oligonucleotide
  Target: ATXN2; (-) strand; PAM type: NRG; PAM sequence: AAG
ccacctgccttggcctccca

SEQ ID NO: 29571 - DNA, 20 bp, Artificial Sequence
  Description of Artificial Sequence: Synthetic oligonucleotide
  Target: ATXN2; (-) strand; PAM type: NRG; PAM sequence: TGG
ctcaggtgatccacctgcct

SEQ ID NO: 29572 - DNA, 20 bp, Artificial Sequence
  Description of Artificial Sequence: Synthetic oligonucleotide
  Target: ATXN2; (-) strand; PAM type: NRG; PAM sequence: AGG
ggtcttgaacctctgacctc

SEQ ID NO: 29573 - DNA, 20 bp, Artificial Sequence
  Description of Artificial Sequence: Synthetic oligonucleotide
  Target: ATXN2; (-) strand; PAM type: NRG; PAM sequence: CAG
tggtcttgaacctctgacct

SEQ ID NO: 29574 - DNA, 20 bp, Artificial Sequence
  Description of Artificial Sequence: Synthetic oligonucleotide
  Target: ATXN2; (-) strand; PAM type: NRG; PAM sequence: TGG
gtttgagcatgttgccaggc

SEQ ID NO: 29575 - DNA, 20 bp, Artificial Sequence
  Description of Artificial Sequence: Synthetic oligonucleotide
  Target: ATXN2; (-) strand; PAM type: NRG; PAM sequence: AGG
tggagtttgagcatgttgcc

SEQ ID NO: 29576 - DNA, 20 bp, Artificial Sequence
  Description of Artificial Sequence: Synthetic oligonucleotide
  Target: ATXN2; (-) strand; PAM type: NRG; PAM sequence: CAG
atggagtttgagcatgttgc

SEQ ID NO: 29577 - DNA, 20 bp, Artificial Sequence
  Description of Artificial Sequence: Synthetic oligonucleotide
  Target: ATXN2; (-) strand; PAM type: NRG; PAM sequence: GAG
atctagtagtgatggagttt

SEQ ID NO: 29578 - DNA, 20 bp, Artificial Sequence
  Description of Artificial Sequence: Synthetic oligonucleotide
  Target: ATXN2; (-) strand; PAM type: NRG; PAM sequence: GAG
ttgtatatctagtagtgatg

SEQ ID NO: 29579 - DNA, 20 bp, Artificial Sequence
  Description of Artificial Sequence: Synthetic oligonucleotide
  Target: ATXN2; (-) strand; PAM type: NRG; PAM sequence: TGG
ttttgtatatctagtagtga

SEQ ID NO: 29580 - DNA, 20 bp, Artificial Sequence
  Description of Artificial Sequence: Synthetic oligonucleotide
  Target: ATXN2; (-) strand; PAM type: NRG; PAM sequence: TAG
ctaattttttgtatatctag

SEQ ID NO: 29581 - DNA, 20 bp, Artificial Sequence
  Description of Artificial Sequence: Synthetic oligonucleotide
  Target: ATXN2; (-) strand; PAM type: NRG; PAM sequence: TAG
tggctaattttttgtatatc

SEQ ID NO: 29582 - DNA, 20 bp, Artificial Sequence
  Description of Artificial Sequence: Synthetic oligonucleotide
  Target: ATXN2; (-) strand; PAM type: NRG; PAM sequence: TGG
taggcgcctgccaccatgcc

SEQ ID NO: 29583 - DNA, 20 bp, Artificial Sequence
  Description of Artificial Sequence: Synthetic oligonucleotide
  Target: ATXN2; (-) strand; PAM type: NRG; PAM sequence: AGG
tcctgaatagttgggattat

SEQ ID NO: 29584 - DNA, 20 bp, Artificial Sequence
  Description of Artificial Sequence: Synthetic oligonucleotide
  Target: ATXN2; (-) strand; PAM type: NRG; PAM sequence: TAG
ctcctgaatagttgggatta

SEQ ID NO: 29585 - DNA, 20 bp, Artificial Sequence
  Description of Artificial Sequence: Synthetic oligonucleotide
  Target: ATXN2; (-) strand; PAM type: NRG; PAM sequence: GGG
ccacctcctcctgaatagtt

SEQ ID NO: 29586 - DNA, 20 bp, Artificial Sequence
  Description of Artificial Sequence: Synthetic oligonucleotide
  Target: ATXN2; (-) strand; PAM type: NRG; PAM sequence: TGG
gccacctcctcctgaatagt

SEQ ID NO: 29587 - DNA, 20 bp, Artificial Sequence
  Description of Artificial Sequence: Synthetic oligonucleotide
  Target: ATXN2; (-) strand; PAM type: NRG; PAM sequence: TAG
ctcagccacctcctcctgaa

SEQ ID NO: 29588 - DNA, 20 bp, Artificial Sequence
  Description of Artificial Sequence: Synthetic oligonucleotide
  Target: ATXN2; (-) strand; PAM type: NRG; PAM sequence: CAG
ttcaagccgttctcctccct

SEQ ID NO: 29589 - DNA, 20 bp, Artificial Sequence
  Description of Artificial Sequence: Synthetic oligonucleotide
  Target: ATXN2; (-) strand; PAM type: NRG; PAM sequence: AAG
agcctccacctcctgggttc

SEQ ID NO: 29590 - DNA, 20 bp, Artificial Sequence
  Description of Artificial Sequence: Synthetic oligonucleotide
  Target: ATXN2; (-) strand; PAM type: NRG; PAM sequence: GGG
cactgcagcctccacctcct

SEQ ID NO: 29591 - DNA, 20 bp, Artificial Sequence
  Description of Artificial Sequence: Synthetic oligonucleotide
  Target: ATXN2; (-) strand; PAM type: NRG; PAM sequence: TGG
tcactgcagcctccacctcc

SEQ ID NO: 29592 - DNA, 20 bp, Artificial Sequence
  Description of Artificial Sequence: Synthetic oligonucleotide
  Target: ATXN2; (-) strand; PAM type: NRG; PAM sequence: CAG
ggtgccatctcggctcactg

SEQ ID NO: 29593 - DNA, 20 bp, Artificial Sequence
  Description of Artificial Sequence: Synthetic oligonucleotide
  Target: ATXN2; (-) strand; PAM type: NRG; PAM sequence: CGG
ggagtacagtggtgccatct

SEQ ID NO: 29594 - DNA, 20 bp, Artificial Sequence
  Description of Artificial Sequence: Synthetic oligonucleotide
  Target: ATXN2; (-) strand; PAM type: NRG; PAM sequence: TGG
ttgcccaagctggagtacag

SEQ ID NO: 29595 - DNA, 20 bp, Artificial Sequence
  Description of Artificial Sequence: Synthetic oligonucleotide
  Target: ATXN2; (-) strand; PAM type: NRG; PAM sequence: CAG
ttgttgcccaagctggagta

SEQ ID NO: 29596 - DNA, 20 bp, Artificial Sequence
  Description of Artificial Sequence: Synthetic oligonucleotide
  Target: ATXN2; (-) strand; PAM type: NRG; PAM sequence: GAG
tgctcttgttgcccaagctg

SEQ ID NO: 29597 - DNA, 20 bp, Artificial Sequence
  Description of Artificial Sequence: Synthetic oligonucleotide
  Target: ATXN2; (-) strand; PAM type: NRG; PAM sequence: TGG
tttgctcttgttgcccaagc

SEQ ID NO: 29598 - DNA, 20 bp, Artificial Sequence
  Description of Artificial Sequence: Synthetic oligonucleotide
  Target: ATXN2; (-) strand; PAM type: NRG; PAM sequence: AAG
gaggtttgctcttgttgccc

SEQ ID NO: 29599 - DNA, 20 bp, Artificial Sequence
  Description of Artificial Sequence: Synthetic oligonucleotide
  Target: ATXN2; (-) strand; PAM type: NRG; PAM sequence: AGG
tttttttttctttgagacgg

SEQ ID NO: 29600 - DNA, 20 bp, Artificial Sequence
  Description of Artificial Sequence: Synthetic oligonucleotide
  Target: ATXN2; (-) strand; PAM type: NRG; PAM sequence: GAG
atttttttttctttgagacg

SEQ ID NO: 29601 - DNA, 20 bp, Artificial Sequence
  Description of Artificial Sequence: Synthetic oligonucleotide
  Target: ATXN2; (-) strand; PAM type: NRG; PAM sequence: CGG
tgatttttttttctttgaga

SEQ ID NO: 29602 - DNA, 20 bp, Artificial Sequence
  Description of Artificial Sequence: Synthetic oligonucleotide
  Target: ATXN2; (-) strand; PAM type: NRG; PAM sequence: GAG
tttatgatttttttttcttt

SEQ ID NO: 29603 - DNA, 20 bp, Artificial Sequence
  Description of Artificial Sequence: Synthetic oligonucleotide
  Target: ATXN2; (-) strand; PAM type: NRG; PAM sequence: TAG
caagtgagtatttgcttatg

SEQ ID NO: 29604 - DNA, 20 bp, Artificial Sequence
  Description of Artificial Sequence: Synthetic oligonucleotide
  Target: ATXN2; (-) strand; PAM type: NRG; PAM sequence: GAG
gccactgtgcccagccaagt

SEQ ID NO: 29605 - DNA, 20 bp, Artificial Sequence
  Description of Artificial Sequence: Synthetic oligonucleotide
  Target: ATXN2; (-) strand; PAM type: NRG; PAM sequence: AAG
gtgagccactgtgcccagcc

SEQ ID NO: 29606 - DNA, 20 bp, Artificial Sequence
  Description of Artificial Sequence: Synthetic oligonucleotide
  Target: ATXN2; (-) strand; PAM type: NRG; PAM sequence: CAG
tgagtgtgagccactgtgcc

SEQ ID NO: 29607 - DNA, 20 bp, Artificial Sequence
  Description of Artificial Sequence: Synthetic oligonucleotide
  Target: ATXN2; (-) strand; PAM type: NRG; PAM sequence: GAG
agtggtgggattatgagtgt

SEQ ID NO: 29608 - DNA, 20 bp, Artificial Sequence
  Description of Artificial Sequence: Synthetic oligonucleotide
  Target: ATXN2; (-) strand; PAM type: NRG; PAM sequence: GAG
tcttgaagtggtgggattat

SEQ ID NO: 29609 - DNA, 20 bp, Artificial Sequence
  Description of Artificial Sequence: Synthetic oligonucleotide
  Target: ATXN2; (-) strand; PAM type: NRG; PAM sequence: GGG
ccttggcctcttgaagtggt

SEQ ID NO: 29610 - DNA, 20 bp, Artificial Sequence
  Description of Artificial Sequence: Synthetic oligonucleotide
  Target: ATXN2; (-) strand; PAM type: NRG; PAM sequence: TGG
gccttggcctcttgaagtgg

SEQ ID NO: 29611 - DNA, 20 bp, Artificial Sequence
  Description of Artificial Sequence: Synthetic oligonucleotide
  Target: ATXN2; (-) strand; PAM type: NRG; PAM sequence: TGG
cccgccttggcctcttgaag

SEQ ID NO: 29612 - DNA, 20 bp, Artificial Sequence
  Description of Artificial Sequence: Synthetic oligonucleotide
  Target: ATXN2; (-) strand; PAM type: NRG; PAM sequence: AAG
ccacccgccttggcctcttg

SEQ ID NO: 29613 - DNA, 20 bp, Artificial Sequence
  Description of Artificial Sequence: Synthetic oligonucleotide
  Target: ATXN2; (-) strand; PAM type: NRG; PAM sequence: TGG
ttcaggtgatccacccgcct

SEQ ID NO: 29614 - DNA, 20 bp, Artificial Sequence
  Description of Artificial Sequence: Synthetic oligonucleotide
  Target: ATXN2; (-) strand; PAM type: NRG; PAM sequence: AGG
ggtcttgaactcctgacttc

SEQ ID NO: 29615 - DNA, 20 bp, Artificial Sequence
  Description of Artificial Sequence: Synthetic oligonucleotide
  Target: ATXN2; (-) strand; PAM type: NRG; PAM sequence: CAG
tggtcttgaactcctgactt

SEQ ID NO: 29616 - DNA, 20 bp, Artificial Sequence
  Description of Artificial Sequence: Synthetic oligonucleotide
  Target: ATXN2; (-) strand; PAM type: NRG; PAM sequence: TGG
tttcaccatgttggctaggc

SEQ ID NO: 29617 - DNA, 20 bp, Artificial Sequence
  Description of Artificial Sequence: Synthetic oligonucleotide
  Target: ATXN2; (-) strand; PAM type: NRG; PAM sequence: AGG
ggagtttcaccatgttggct

SEQ ID NO: 29618 - DNA, 20 bp, Artificial Sequence
  Description of Artificial Sequence: Synthetic oligonucleotide
  Target: ATXN2; (-) strand; PAM type: NRG; PAM sequence: TAG
tggagtttcaccatgttggc

SEQ ID NO: 29619 - DNA, 20 bp, Artificial Sequence
  Description of Artificial Sequence: Synthetic oligonucleotide
  Target: ATXN2; (-) strand; PAM type: NRG; PAM sequence: TGG
gaggtggagtttcaccatgt

SEQ ID NO: 29620 - DNA, 20 bp, Artificial Sequence
  Description of Artificial Sequence: Synthetic oligonucleotide
  Target: ATXN2; (-) strand; PAM type: NRG; PAM sequence: GAG
ttatagttttagtagaggtg

SEQ ID NO: 29621 - DNA, 20 bp, Artificial Sequence
  Description of Artificial Sequence: Synthetic oligonucleotide
  Target: ATXN2; (-) strand; PAM type: NRG; PAM sequence: TGG
ttttatagttttagtagagg

SEQ ID NO: 29622 - DNA, 20 bp, Artificial Sequence
  Description of Artificial Sequence: Synthetic oligonucleotide
  Target: ATXN2; (-) strand; PAM type: NRG; PAM sequence: AGG
aatttttatagttttagtag

SEQ ID NO: 29623 - DNA, 20 bp, Artificial Sequence
  Description of Artificial Sequence: Synthetic oligonucleotide
  Target: ATXN2; (-) strand; PAM type: NRG; PAM sequence: GAG
taatttttatagttttagta

SEQ ID NO: 29624 - DNA, 20 bp, Artificial Sequence
  Description of Artificial Sequence: Synthetic oligonucleotide
  Target: ATXN2; (-) strand; PAM type: NRG; PAM sequence: TAG
gctaatttttatagttttag

SEQ ID NO: 29625 - DNA, 20 bp, Artificial Sequence
  Description of Artificial Sequence: Synthetic oligonucleotide
  Target: ATXN2; (-) strand; PAM type: NRG; PAM sequence: TAG
gtggctaatttttatagttt

SEQ ID NO: 29626 - DNA, 20 bp, Artificial Sequence
  Description of Artificial Sequence: Synthetic oligonucleotide
  Target: ATXN2; (-) strand; PAM type: NRG; PAM sequence: TAG
ccacacgtggctaattttta

SEQ ID NO: 29627 - DNA, 20 bp, Artificial Sequence
  Description of Artificial Sequence: Synthetic oligonucleotide
  Target: ATXN2; (-) strand; PAM type: NRG; PAM sequence: TGG
cagacatgtgccaccacacg

SEQ ID NO: 29628 - DNA, 20 bp, Artificial Sequence
  Description of Artificial Sequence: Synthetic oligonucleotide
  Target: ATXN2; (-) strand; PAM type: NRG; PAM sequence: CAG
ctcccaagtagctgggatta

SEQ ID NO: 29629 - DNA, 20 bp, Artificial Sequence
  Description of Artificial Sequence: Synthetic oligonucleotide
  Target: ATXN2; (-) strand; PAM type: NRG; PAM sequence: GGG
cctcagcctcccaagtagct

SEQ ID NO: 29630 - DNA, 20 bp, Artificial Sequence
  Description of Artificial Sequence: Synthetic oligonucleotide
  Target: ATXN2; (-) strand; PAM type: NRG; PAM sequence: TGG
gcctcagcctcccaagtagc

SEQ ID NO: 29631 - DNA, 20 bp, Artificial Sequence
  Description of Artificial Sequence: Synthetic oligonucleotide
  Target: ATXN2; (-) strand; PAM type: NRG; PAM sequence: TAG
ttgtgcctcagcctcccaag

SEQ ID NO: 29632 - DNA, 20 bp, Artificial Sequence
  Description of Artificial Sequence: Synthetic oligonucleotide
  Target: ATXN2; (-) strand; PAM type: NRG; PAM sequence: AAG
ttcttgtgcctcagcctccc

SEQ ID NO: 29633 - DNA, 20 bp, Artificial Sequence
  Description of Artificial Sequence: Synthetic oligonucleotide
  Target: ATXN2; (-) strand; PAM type: NRG; PAM sequence: CAG
ttcaagcaattcttgtgcct

SEQ ID NO: 29634 - DNA, 20 bp, Artificial Sequence
  Description of Artificial Sequence: Synthetic oligonucleotide
  Target: ATXN2; (-) strand; PAM type: NRG; PAM sequence: AAG
gaactccgcctcctgagttc

SEQ ID NO: 29635 - DNA, 20 bp, Artificial Sequence
  Description of Artificial Sequence: Synthetic oligonucleotide
  Target: ATXN2; (-) strand; PAM type: NRG; PAM sequence: GAG
tggcatgaactccgcctcct

SEQ ID NO: 29636 - DNA, 20 bp, Artificial Sequence
  Description of Artificial Sequence: Synthetic oligonucleotide
  Target: ATXN2; (-) strand; PAM type: NRG; PAM sequence: TGG
tcacccaggctgcattgcag

SEQ ID NO: 29637 - DNA, 20 bp, Artificial Sequence
  Description of Artificial Sequence: Synthetic oligonucleotide
  Target: ATXN2; (-) strand; PAM type: NRG; PAM sequence: CAG
ctgtcacccaggctgcattg

SEQ ID NO: 29638 - DNA, 20 bp, Artificial Sequence
  Description of Artificial Sequence: Synthetic oligonucleotide
  Target: ATXN2; (-) strand; PAM type: NRG; PAM sequence: AGG
ggagtcttgctctgtcaccc

SEQ ID NO: 29639 - DNA, 20 bp, Artificial Sequence
  Description of Artificial Sequence: Synthetic oligonucleotide
  Target: ATXN2; (-) strand; PAM type: NRG; PAM sequence: CAG
cggagtcttgctctgtcacc

SEQ ID NO: 29640 - DNA, 20 bp, Artificial Sequence
  Description of Artificial Sequence: Synthetic oligonucleotide
  Target: ATXN2; (-) strand; PAM type: NRG; PAM sequence: GAG
tcaaaaaaaacagaaagacg

SEQ ID NO: 29641 - DNA, 20 bp, Artificial Sequence
  Description of Artificial Sequence: Synthetic oligonucleotide
  Target: ATXN2; (-) strand; PAM type: NRG; PAM sequence: CGG
tctcaaaaaaaacagaaaga

SEQ ID NO: 29642 - DNA, 20 bp, Artificial Sequence
  Description of Artificial Sequence: Synthetic oligonucleotide
  Target: ATXN2; (-) strand; PAM type: NRG; PAM sequence: AAG
tctgtctcaaaaaaaacaga

SEQ ID NO: 29643 - DNA, 20 bp, Artificial Sequence
  Description of Artificial Sequence: Synthetic oligonucleotide
  Target: ATXN2; (-) strand; PAM type: NRG; PAM sequence: CAG
agactctgtctcaaaaaaaa

SEQ ID NO: 29644 - DNA, 20 bp, Artificial Sequence
  Description of Artificial Sequence: Synthetic oligonucleotide
  Target: ATXN2; (-) strand; PAM type: NRG; PAM sequence: TAG
tccagcctgagcgacagagg

SEQ ID NO: 29645 - DNA, 20 bp, Artificial Sequence
  Description of Artificial Sequence: Synthetic oligonucleotide
  Target: ATXN2; (-) strand; PAM type: NRG; PAM sequence: AGG
cactccagcctgagcgacag

SEQ ID NO: 29646 - DNA, 20 bp, Artificial Sequence
  Description of Artificial Sequence: Synthetic oligonucleotide
  Target: ATXN2; (-) strand; PAM type: NRG; PAM sequence: GAG
gcactccagcctgagcgaca

SEQ ID NO: 29647 - DNA, 20 bp, Artificial Sequence
  Description of Artificial Sequence: Synthetic oligonucleotide
  Target: ATXN2; (-) strand; PAM type: NRG; PAM sequence: CAG
ctgcactccagcctgagcga

SEQ ID NO: 29648 - DNA, 20 bp, Artificial Sequence
  Description of Artificial Sequence: Synthetic oligonucleotide
  Target: ATXN2; (-) strand; PAM type: NRG; PAM sequence: GAG
atgccactgcactccagcct

SEQ ID NO: 29649 - DNA, 20 bp, Artificial Sequence
  Description of Artificial Sequence: Synthetic oligonucleotide
  Target: ATXN2; (-) strand; PAM type: NRG; PAM sequence: CAG
aagatcatgccactgcactc

SEQ ID NO: 29650 - DNA, 20 bp, Artificial Sequence
  Description of Artificial Sequence: Synthetic oligonucleotide
  Target: ATXN2; (-) strand; PAM type: NRG; PAM sequence: AAG
ggtggaggttgcagtgagtc

SEQ ID NO: 29651 - DNA, 20 bp, Artificial Sequence
  Description of Artificial Sequence: Synthetic oligonucleotide
  Target: ATXN2; (-) strand; PAM type: NRG; PAM sequence: GAG
caggaggtggaggttgcagt

SEQ ID NO: 29652 - DNA, 20 bp, Artificial Sequence
  Description of Artificial Sequence: Synthetic oligonucleotide
  Target: ATXN2; (-) strand; PAM type: NRG; PAM sequence: CAG
aacccaggaggtggaggttg

SEQ ID NO: 29653 - DNA, 20 bp, Artificial Sequence
  Description of Artificial Sequence: Synthetic oligonucleotide
  Target: ATXN2; (-) strand; PAM type: NRG; PAM sequence: AGG
tgcttgaacccaggaggtgg

SEQ ID NO: 29654 - DNA, 20 bp, Artificial Sequence
  Description of Artificial Sequence: Synthetic oligonucleotide
  Target: ATXN2; (-) strand; PAM type: NRG; PAM sequence: GAG
ttgcttgaacccaggaggtg

SEQ ID NO: 29655 - DNA, 20 bp, Artificial Sequence
  Description of Artificial Sequence: Synthetic oligonucleotide
  Target: ATXN2; (-) strand; PAM type: NRG; PAM sequence: TGG
aattgcttgaacccaggagg

SEQ ID NO: 29656 - DNA, 20 bp, Artificial Sequence
  Description of Artificial Sequence: Synthetic oligonucleotide
  Target: ATXN2; (-) strand; PAM type: NRG; PAM sequence: AGG
gagaattgcttgaacccagg

SEQ ID NO: 29657 - DNA, 20 bp, Artificial Sequence
  Description of Artificial Sequence: Synthetic oligonucleotide
  Target: ATXN2; (-) strand; PAM type: NRG; PAM sequence: GAG
ggagaattgcttgaacccag

SEQ ID NO: 29658 - DNA, 20 bp, Artificial Sequence
  Description of Artificial Sequence: Synthetic oligonucleotide
  Target: ATXN2; (-) strand; PAM type: NRG; PAM sequence: AGG
caggagaattgcttgaaccc

SEQ ID NO: 29659 - DNA, 20 bp, Artificial Sequence
  Description of Artificial Sequence: Synthetic oligonucleotide
  Target: ATXN2; (-) strand; PAM type: NRG; PAM sequence: CAG
gcaggagaattgcttgaacc

SEQ ID NO: 29660 - DNA, 20 bp, Artificial Sequence
  Description of Artificial Sequence: Synthetic oligonucleotide
  Target: ATXN2; (-) strand; PAM type: NRG; PAM sequence: GAG
tactcgggaggctgaggcag

SEQ ID NO: 29661 - DNA, 20 bp, Artificial Sequence
  Description of Artificial Sequence: Synthetic oligonucleotide
  Target: ATXN2; (-) strand; PAM type: NRG; PAM sequence: AGG
gctactcgggaggctgaggc

SEQ ID NO: 29662 - DNA, 20 bp, Artificial Sequence
  Description of Artificial Sequence: Synthetic oligonucleotide
  Target: ATXN2; (-) strand; PAM type: NRG; PAM sequence: CAG
agctactcgggaggctgagg

SEQ ID NO: 29663 - DNA, 20 bp, Artificial Sequence
  Description of Artificial Sequence: Synthetic oligonucleotide
  Target: ATXN2; (-) strand; PAM type: NRG; PAM sequence: AGG
cccagctactcgggaggctg

SEQ ID NO: 29664 - DNA, 20 bp, Artificial Sequence
  Description of Artificial Sequence: Synthetic oligonucleotide
  Target: ATXN2; (-) strand; PAM type: NRG; PAM sequence: GAG
tcccagctactcgggaggct

SEQ ID NO: 29665 - DNA, 20 bp, Artificial Sequence
  Description of Artificial Sequence: Synthetic oligonucleotide
  Target: ATXN2; (-) strand; PAM type: NRG; PAM sequence: AGG
tgtagtcccagctactcggg

SEQ ID NO: 29666 - DNA, 20 bp, Artificial Sequence
  Description of Artificial Sequence: Synthetic oligonucleotide
  Target: ATXN2; (-) strand; PAM type: NRG; PAM sequence: GAG
ctgtagtcccagctactcgg

SEQ ID NO: 29667 - DNA, 20 bp, Artificial Sequence
  Description of Artificial Sequence: Synthetic oligonucleotide
  Target: ATXN2; (-) strand; PAM type: NRG; PAM sequence: GGG
gcctgtagtcccagctactc

SEQ ID NO: 29668 - DNA, 20 bp, Artificial Sequence
  Description of Artificial Sequence: Synthetic oligonucleotide
  Target: ATXN2; (-) strand; PAM type: NRG; PAM sequence: CGG
cgcctgtagtcccagctact

SEQ ID NO: 29669 - DNA, 20 bp, Artificial Sequence
  Description of Artificial Sequence: Synthetic oligonucleotide
  Target: ATXN2; (-) strand; PAM type: NRG; PAM sequence: CAG
gtggcacacgcctgtagtcc

SEQ ID NO: 29670 - DNA, 20 bp, Artificial Sequence
  Description of Artificial Sequence: Synthetic oligonucleotide
  Target: ATXN2; (-) strand; PAM type: NRG; PAM sequence: TAG
ggcatggtggcacacgcctg

SEQ ID NO: 29671 - DNA, 20 bp, Artificial Sequence
  Description of Artificial Sequence: Synthetic oligonucleotide
  Target: ATXN2; (-) strand; PAM type: NRG; PAM sequence: TGG
aaaaaattaactgggcatgg

SEQ ID NO: 29672 - DNA, 20 bp, Artificial Sequence
  Description of Artificial Sequence: Synthetic oligonucleotide
  Target: ATXN2; (-) strand; PAM type: NRG; PAM sequence: TGG
tacaaaaaattaactgggca

SEQ ID NO: 29673 - DNA, 20 bp, Artificial Sequence
  Description of Artificial Sequence: Synthetic oligonucleotide
  Target: ATXN2; (-) strand; PAM type: NRG; PAM sequence: GGG
aaaaatacaaaaaattaact

SEQ ID NO: 29674 - DNA, 20 bp, Artificial Sequence
  Description of Artificial Sequence: Synthetic oligonucleotide
  Target: ATXN2; (-) strand; PAM type: NRG; PAM sequence: TGG
taaaaatacaaaaaattaac

SEQ ID NO: 29675 - DNA, 20 bp, Artificial Sequence
  Description of Artificial Sequence: Synthetic oligonucleotide
  Target: ATXN2; (-) strand; PAM type: NRG; PAM sequence: TGG
cgagaccatcctggctaaca

SEQ ID NO: 29676 - DNA, 20 bp, Artificial Sequence
  Description of Artificial Sequence: Synthetic oligonucleotide
  Target: ATXN2; (-) strand; PAM type: NRG; PAM sequence: TGG
tcaggagatcgagaccatcc

SEQ ID NO: 29677 - DNA, 20 bp, Artificial Sequence
  Description of Artificial Sequence: Synthetic oligonucleotide
  Target: ATXN2; (-) strand; PAM type: NRG; PAM sequence: GAG
gatcaagaggtcaggagatc

SEQ ID NO: 29678 - DNA, 20 bp, Artificial Sequence
  Description of Artificial Sequence: Synthetic oligonucleotide
  Target: ATXN2; (-) strand; PAM type: NRG; PAM sequence: GAG
tgggtggatcaagaggtcag

SEQ ID NO: 29679 - DNA, 20 bp, Artificial Sequence
  Description of Artificial Sequence: Synthetic oligonucleotide
  Target: ATXN2; (-) strand; PAM type: NRG; PAM sequence: AGG
ggtgggtggatcaagaggtc

SEQ ID NO: 29680 - DNA, 20 bp, Artificial Sequence
  Description of Artificial Sequence: Synthetic oligonucleotide
  Target: ATXN2; (-) strand; PAM type: NRG; PAM sequence: CAG
aggtgggtggatcaagaggt

SEQ ID NO: 29681 - DNA, 20 bp, Artificial Sequence
  Description of Artificial Sequence: Synthetic oligonucleotide
  Target: ATXN2; (-) strand; PAM type: NRG; PAM sequence: AGG
gccgaggtgggtggatcaag

SEQ ID NO: 29682 - DNA, 20 bp, Artificial Sequence
  Description of Artificial Sequence: Synthetic oligonucleotide
  Target: ATXN2; (-) strand; PAM type: NRG; PAM sequence: GAG
ggccgaggtgggtggatcaa

SEQ ID NO: 29683 - DNA, 20 bp, Artificial Sequence
  Description of Artificial Sequence: Synthetic oligonucleotide
  Target: ATXN2; (-) strand; PAM type: NRG; PAM sequence: AAG
aaggccgaggtgggtggatc

SEQ ID NO: 29684 - DNA, 20 bp, Artificial Sequence
  Description of Artificial Sequence: Synthetic oligonucleotide
  Target: ATXN2; (-) strand; PAM type: NRG; PAM sequence: TGG
ctttggaaggccgaggtggg

SEQ ID NO: 29685 - DNA, 20 bp, Artificial Sequence
  Description of Artificial Sequence: Synthetic oligonucleotide
  Target: ATXN2; (-) strand; PAM type: NRG; PAM sequence: GGG
gcactttggaaggccgaggt

SEQ ID NO: 29686 - DNA, 20 bp, Artificial Sequence
  Description of Artificial Sequence: Synthetic oligonucleotide
  Target: ATXN2; (-) strand; PAM type: NRG; PAM sequence: TGG
agcactttggaaggccgagg

SEQ ID NO: 29687 - DNA, 20 bp, Artificial Sequence
  Description of Artificial Sequence: Synthetic oligonucleotide
  Target: ATXN2; (-) strand; PAM type: NRG; PAM sequence: AGG
cccagcactttggaaggccg

SEQ ID NO: 29688 - DNA, 20 bp, Artificial Sequence
  Description of Artificial Sequence: Synthetic oligonucleotide
  Target: ATXN2; (-) strand; PAM type: NRG; PAM sequence: GAG
tcccagcactttggaaggcc

SEQ ID NO: 29689 - DNA, 20 bp, Artificial Sequence
  Description of Artificial Sequence: Synthetic oligonucleotide
  Target: ATXN2; (-) strand; PAM type: NRG; PAM sequence: AGG
tgtaatcccagcactttgga

SEQ ID NO: 29690 - DNA, 20 bp, Artificial Sequence
  Description of Artificial Sequence: Synthetic oligonucleotide
  Target: ATXN2; (-) strand; PAM type: NRG; PAM sequence: AAG
ctgtaatcccagcactttgg

SEQ ID NO: 29691 - DNA, 20 bp, Artificial Sequence
  Description of Artificial Sequence: Synthetic oligonucleotide
  Target: ATXN2; (-) strand; PAM type: NRG; PAM sequence: TGG
cacctgtaatcccagcactt

SEQ ID NO: 29692 - DNA, 20 bp, Artificial Sequence
  Description of Artificial Sequence: Synthetic oligonucleotide
  Target: ATXN2; (-) strand; PAM type: NRG; PAM sequence: CAG
gtggctcacacctgtaatcc

SEQ ID NO: 29693 - DNA, 20 bp, Artificial Sequence
  Description of Artificial Sequence: Synthetic oligonucleotide
  Target: ATXN2; (-) strand; PAM type: NRG; PAM sequence: TGG
agtctcgaggccgggcgcag

SEQ ID NO: 29694 - DNA, 20 bp, Artificial Sequence
  Description of Artificial Sequence: Synthetic oligonucleotide
  Target: ATXN2; (-) strand; PAM type: NRG; PAM sequence: CAG
tggagtctcgaggccgggcg

SEQ ID NO: 29695 - DNA, 20 bp, Artificial Sequence
  Description of Artificial Sequence: Synthetic oligonucleotide
  Target: ATXN2; (-) strand; PAM type: NRG; PAM sequence: GGG
taaggtggagtctcgaggcc

SEQ ID NO: 29696 - DNA, 20 bp, Artificial Sequence
  Description of Artificial Sequence: Synthetic oligonucleotide
  Target: ATXN2; (-) strand; PAM type: NRG; PAM sequence: CGG
ttaaggtggagtctcgaggc

SEQ ID NO: 29697 - DNA, 20 bp, Artificial Sequence
  Description of Artificial Sequence: Synthetic oligonucleotide
  Target: ATXN2; (-) strand; PAM type: NRG; PAM sequence: AGG
ttttttaaggtggagtctcg

SEQ ID NO: 29698 - DNA, 20 bp, Artificial Sequence
  Description of Artificial Sequence: Synthetic oligonucleotide
  Target: ATXN2; (-) strand; PAM type: NRG; PAM sequence: GAG
tttttttaaggtggagtctc

SEQ ID NO: 29699 - DNA, 20 bp, Artificial Sequence
  Description of Artificial Sequence: Synthetic oligonucleotide
  Target: ATXN2; (-) strand; PAM type: NRG; PAM sequence: GAG
ctttttttttttttaaggtg

SEQ ID NO: 29700 - DNA, 20 bp, Artificial Sequence
  Description of Artificial Sequence: Synthetic oligonucleotide
  Target: ATXN2; (-) strand; PAM type: NRG; PAM sequence: TGG
ttctttttttttttttaagg

SEQ ID NO: 29701 - DNA, 20 bp, Artificial Sequence
  Description of Artificial Sequence: Synthetic oligonucleotide
  Target: ATXN2; (-) strand; PAM type: NRG; PAM sequence: AGG
attttcttttttttttttta

SEQ ID NO: 29702 - DNA, 20 bp, Artificial Sequence
  Description of Artificial Sequence: Synthetic oligonucleotide
  Target: ATXN2; (-) strand; PAM type: NRG; PAM sequence: AAG
tattttcttttttttttttt

SEQ ID NO: 29703 - DNA, 20 bp, Artificial Sequence
  Description of Artificial Sequence: Synthetic oligonucleotide
  Target: ATXN2; (-) strand; PAM type: NRG; PAM sequence: AAG
catgagccattgtacctggc

SEQ ID NO: 29704 - DNA, 20 bp, Artificial Sequence
  Description of Artificial Sequence: Synthetic oligonucleotide
  Target: ATXN2; (-) strand; PAM type: NRG; PAM sequence: TGG
caggcatgagccattgtacc

SEQ ID NO: 29705 - DNA, 20 bp, Artificial Sequence
  Description of Artificial Sequence: Synthetic oligonucleotide
  Target: ATXN2; (-) strand; PAM type: NRG; PAM sequence: GAG
ttagttggcattacaggcat

SEQ ID NO: 29706 - DNA, 20 bp, Artificial Sequence
  Description of Artificial Sequence: Synthetic oligonucleotide
  Target: ATXN2; (-) strand; PAM type: NRG; PAM sequence: AGG
tctggattagttggcattac

SEQ ID NO: 29707 - DNA, 20 bp, Artificial Sequence
  Description of Artificial Sequence: Synthetic oligonucleotide
  Target: ATXN2; (-) strand; PAM type: NRG; PAM sequence: CAG
ctctggattagttggcatta

SEQ ID NO: 29708 - DNA, 20 bp, Artificial Sequence
  Description of Artificial Sequence: Synthetic oligonucleotide
  Target: ATXN2; (-) strand; PAM type: NRG; PAM sequence: TGG
gcctcagcctctggattagt

SEQ ID NO: 29709 - DNA, 20 bp, Artificial Sequence
  Description of Artificial Sequence: Synthetic oligonucleotide
  Target: ATXN2; (-) strand; PAM type: NRG; PAM sequence: TAG
ttctgcctcagcctctggat

SEQ ID NO: 29710 - DNA, 20 bp, Artificial Sequence
  Description of Artificial Sequence: Synthetic oligonucleotide
  Target: ATXN2; (-) strand; PAM type: NRG; PAM sequence: TGG
ggtccttctgcctcagcctc

SEQ ID NO: 29711 - DNA, 20 bp, Artificial Sequence
  Description of Artificial Sequence: Synthetic oligonucleotide
  Target: ATXN2; (-) strand; PAM type: NRG; PAM sequence: CAG
cttaagtggtccttctgcct

SEQ ID NO: 29712 - DNA, 20 bp, Artificial Sequence
  Description of Artificial Sequence: Synthetic oligonucleotide
  Target: ATXN2; (-) strand; PAM type: NRG; PAM sequence: TGG
cttgaactccgggtcttaag

SEQ ID NO: 29713 - DNA, 20 bp, Artificial Sequence
  Description of Artificial Sequence: Synthetic oligonucleotide
  Target: ATXN2; (-) strand; PAM type: NRG; PAM sequence: AAG
ggtcttgaactccgggtctt

SEQ ID NO: 29714 - DNA, 20 bp, Artificial Sequence
  Description of Artificial Sequence: Synthetic oligonucleotide
  Target: ATXN2; (-) strand; PAM type: NRG; PAM sequence: GGG
tcaggatggtcttgaactcc

SEQ ID NO: 29715 - DNA, 20 bp, Artificial Sequence
  Description of Artificial Sequence: Synthetic oligonucleotide
  Target: ATXN2; (-) strand; PAM type: NRG; PAM sequence: CGG
ctcaggatggtcttgaactc

SEQ ID NO: 29716 - DNA, 20 bp, Artificial Sequence
  Description of Artificial Sequence: Synthetic oligonucleotide
  Target: ATXN2; (-) strand; PAM type: NRG; PAM sequence: TGG
tcttgcgaagttgctcagga

SEQ ID NO: 29717 - DNA, 20 bp, Artificial Sequence
  Description of Artificial Sequence: Synthetic oligonucleotide
  Target: ATXN2; (-) strand; PAM type: NRG; PAM sequence: AGG
ggggtcttgcgaagttgctc

SEQ ID NO: 29718 - DNA, 20 bp, Artificial Sequence
  Description of Artificial Sequence: Synthetic oligonucleotide
  Target: ATXN2; (-) strand; PAM type: NRG; PAM sequence: CAG
tggggtcttgcgaagttgct

SEQ ID NO: 29719 - DNA, 20 bp, Artificial Sequence
  Description of Artificial Sequence: Synthetic oligonucleotide
  Target: ATXN2; (-) strand; PAM type: NRG; PAM sequence: AAG
tttagagatggggtcttgcg

SEQ ID NO: 29720 - DNA, 20 bp, Artificial Sequence
  Description of Artificial Sequence: Synthetic oligonucleotide
  Target: ATXN2; (-) strand; PAM type: NRG; PAM sequence: GGG
ttaaaactattttagagatg

SEQ ID NO: 29721 - DNA, 20 bp, Artificial Sequence
  Description of Artificial Sequence: Synthetic oligonucleotide
  Target: ATXN2; (-) strand; PAM type: NRG; PAM sequence: GGG
tttaaaactattttagagat

SEQ ID NO: 29722 - DNA, 20 bp, Artificial Sequence
  Description of Artificial Sequence: Synthetic oligonucleotide
  Target: ATXN2; (-) strand; PAM type: NRG; PAM sequence: TGG
ttttaaaactattttagaga

SEQ ID NO: 29723 - DNA, 20 bp, Artificial Sequence
  Description of Artificial Sequence: Synthetic oligonucleotide
  Target: ATXN2; (-) strand; PAM type: NRG; PAM sequence: GAG
tgttttttaaaactatttta

SEQ ID NO: 29724 - DNA, 20 bp, Artificial Sequence
  Description of Artificial Sequence: Synthetic oligonucleotide
  Target: ATXN2; (-) strand; PAM type: NRG; PAM sequence: TAG
actgttttttaaaactattt

SEQ ID NO: 29725 - DNA, 20 bp, Artificial Sequence
  Description of Artificial Sequence: Synthetic oligonucleotide
  Target: ATXN2; (-) strand; PAM type: NRG; PAM sequence: AGG
ccatctgtagctgggactac

SEQ ID NO: 29726 - DNA, 20 bp, Artificial Sequence
  Description of Artificial Sequence: Synthetic oligonucleotide
  Target: ATXN2; (-) strand; PAM type: NRG; PAM sequence: CAG
cccatctgtagctgggacta

SEQ ID NO: 29727 - DNA, 20 bp, Artificial Sequence
  Description of Artificial Sequence: Synthetic oligonucleotide
  Target: ATXN2; (-) strand; PAM type: NRG; PAM sequence: GGG
tgaacctcccatctgtagct

SEQ ID NO: 29728 - DNA, 20 bp, Artificial Sequence
  Description of Artificial Sequence: Synthetic oligonucleotide
  Target: ATXN2; (-) strand; PAM type: NRG; PAM sequence: TGG
gtgaacctcccatctgtagc

SEQ ID NO: 29729 - DNA, 20 bp, Artificial Sequence
  Description of Artificial Sequence: Synthetic oligonucleotide
  Target: ATXN2; (-) strand; PAM type: NRG; PAM sequence: TAG
tcaagtgaacctcccatctg

SEQ ID NO: 29730 - DNA, 20 bp, Artificial Sequence
  Description of Artificial Sequence: Synthetic oligonucleotide
  Target: ATXN2; (-) strand; PAM type: NRG; PAM sequence: AAG
agcctcaaactcctgggctc

SEQ ID NO: 29731 - DNA, 20 bp, Artificial Sequence
  Description of Artificial Sequence: Synthetic oligonucleotide
  Target: ATXN2; (-) strand; PAM type: NRG; PAM sequence: GGG
cactgcagcctcaaactcct

SEQ ID NO: 29732 - DNA, 20 bp, Artificial Sequence
  Description of Artificial Sequence: Synthetic oligonucleotide
  Target: ATXN2; (-) strand; PAM type: NRG; PAM sequence: TGG
tcactgcagcctcaaactcc

SEQ ID NO: 29733 - DNA, 20 bp, Artificial Sequence
  Description of Artificial Sequence: Synthetic oligonucleotide
  Target: ATXN2; (-) strand; PAM type: NRG; PAM sequence: CAG
ggcatgatgatagttcactg

SEQ ID NO: 29734 - DNA, 20 bp, Artificial Sequence
  Description of Artificial Sequence: Synthetic oligonucleotide
  Target: ATXN2; (-) strand; PAM type: NRG; PAM sequence: TAG
ggagtgcagtggcatgatga

SEQ ID NO: 29735 - DNA, 20 bp, Artificial Sequence
  Description of Artificial Sequence: Synthetic oligonucleotide
  Target: ATXN2; (-) strand; PAM type: NRG; PAM sequence: TGG
tcaccaaggctggagtgcag

SEQ ID NO: 29736 - DNA, 20 bp, Artificial Sequence
  Description of Artificial Sequence: Synthetic oligonucleotide
  Target: ATXN2; (-) strand; PAM type: NRG; PAM sequence: CAG
ttgtcaccaaggctggagtg

SEQ ID NO: 29737 - DNA, 20 bp, Artificial Sequence
  Description of Artificial Sequence: Synthetic oligonucleotide
  Target: ATXN2; (-) strand; PAM type: NRG; PAM sequence: GAG
ctgctttgtcaccaaggctg

SEQ ID NO: 29738 - DNA, 20 bp, Artificial Sequence
  Description of Artificial Sequence: Synthetic oligonucleotide
  Target: ATXN2; (-) strand; PAM type: NRG; PAM sequence: TGG
tcctgctttgtcaccaaggc

SEQ ID NO: 29739 - DNA, 20 bp, Artificial Sequence
  Description of Artificial Sequence: Synthetic oligonucleotide
  Target: ATXN2; (-) strand; PAM type: NRG; PAM sequence: AGG
agagtcctgctttgtcacca

SEQ ID NO: 29740 - DNA, 20 bp, Artificial Sequence
  Description of Artificial Sequence: Synthetic oligonucleotide
  Target: ATXN2; (-) strand; PAM type: NRG; PAM sequence: AAG
tagagtcctgctttgtcacc

SEQ ID NO: 29741 - DNA, 20 bp, Artificial Sequence
  Description of Artificial Sequence: Synthetic oligonucleotide
  Target: ATXN2; (-) strand; PAM type: NRG; PAM sequence: GAG
tttttctcttttaagagata

SEQ ID NO: 29742 - DNA, 20 bp, Artificial Sequence
  Description of Artificial Sequence: Synthetic oligonucleotide
  Target: ATXN2; (-) strand; PAM type: NRG; PAM sequence: TAG
tctttttctcttttaagaga

SEQ ID NO: 29743 - DNA, 20 bp, Artificial Sequence
  Description of Artificial Sequence: Synthetic oligonucleotide
  Target: ATXN2; (-) strand; PAM type: NRG; PAM sequence: GAG
gccttctttttctcttttaa

SEQ ID NO: 29744 - DNA, 20 bp, Artificial Sequence
  Description of Artificial Sequence: Synthetic oligonucleotide
  Target: ATXN2; (-) strand; PAM type: NRG; PAM sequence: AAG
aggccttctttttctctttt

SEQ ID NO: 29745 - DNA, 20 bp, Artificial Sequence
  Description of Artificial Sequence: Synthetic oligonucleotide
  Target: ATXN2; (-) strand; PAM type: NRG; PAM sequence: AGG
caggcgtgagctgccacacc

SEQ ID NO: 29746 - DNA, 20 bp, Artificial Sequence
  Description of Artificial Sequence: Synthetic oligonucleotide
  Target: ATXN2; (-) strand; PAM type: NRG; PAM sequence: CAG
acaggcgtgagctgccacac

SEQ ID NO: 29747 - DNA, 20 bp, Artificial Sequence
  Description of Artificial Sequence: Synthetic oligonucleotide
  Target: ATXN2; (-) strand; PAM type: NRG; PAM sequence: GAG
agtgctaggattacaggcgt

SEQ ID NO: 29748 - DNA, 20 bp, Artificial Sequence
  Description of Artificial Sequence: Synthetic oligonucleotide
  Target: ATXN2; (-) strand; PAM type: NRG; PAM sequence: AGG
tcccagagtgctaggattac

SEQ ID NO: 29749 - DNA, 20 bp, Artificial Sequence
  Description of Artificial Sequence: Synthetic oligonucleotide
  Target: ATXN2; (-) strand; PAM type: NRG; PAM sequence: CAG
ctcccagagtgctaggatta

SEQ ID NO: 29750 - DNA, 20 bp, Artificial Sequence
  Description of Artificial Sequence: Synthetic oligonucleotide
  Target: ATXN2; (-) strand; PAM type: NRG; PAM sequence: AGG
cctcagcctcccagagtgct

SEQ ID NO: 29751 - DNA, 20 bp, Artificial Sequence
  Description of Artificial Sequence: Synthetic oligonucleotide
  Target: ATXN2; (-) strand; PAM type: NRG; PAM sequence: TAG
acctcagcctcccagagtgc

SEQ ID NO: 29752 - DNA, 20 bp, Artificial Sequence
  Description of Artificial Sequence: Synthetic oligonucleotide
  Target: ATXN2; (-) strand; PAM type: NRG; PAM sequence: GAG
ccacccacctcagcctccca

SEQ ID NO: 29753 - DNA, 20 bp, Artificial Sequence
  Description of Artificial Sequence: Synthetic oligonucleotide
  Target: ATXN2; (-) strand; PAM type: NRG; PAM sequence: CAG
atccacccacctcagcctcc

SEQ ID NO: 29754 - DNA, 20 bp, Artificial Sequence
  Description of Artificial Sequence: Synthetic oligonucleotide
  Target: ATXN2; (-) strand; PAM type: NRG; PAM sequence: CAG
ctcaggtgatccacccacct

SEQ ID NO: 29755 - DNA, 20 bp, Artificial Sequence
  Description of Artificial Sequence: Synthetic oligonucleotide
  Target: ATXN2; (-) strand; PAM type: NRG; PAM sequence: AGG
ggtctccaactcccgacctc

SEQ ID NO: 29756 - DNA, 20 bp, Artificial Sequence
  Description of Artificial Sequence: Synthetic oligonucleotide
  Target: ATXN2; (-) strand; PAM type: NRG; PAM sequence: CAG
tggtctccaactcccgacct

SEQ ID NO: 29757 - DNA, 20 bp, Artificial Sequence
  Description of Artificial Sequence: Synthetic oligonucleotide
  Target: ATXN2; (-) strand; PAM type: NRG; PAM sequence: TGG
tttttccatgttggtcaggc

SEQ ID NO: 29758 - DNA, 20 bp, Artificial Sequence
  Description of Artificial Sequence: Synthetic oligonucleotide
  Target: ATXN2; (-) strand; PAM type: NRG; PAM sequence: AGG
aggatttttccatgttggtc

SEQ ID NO: 29759 - DNA, 20 bp, Artificial Sequence
  Description of Artificial Sequence: Synthetic oligonucleotide
  Target: ATXN2; (-) strand; PAM type: NRG; PAM sequence: CAG
caggatttttccatgttggt

SEQ ID NO: 29760 - DNA, 20 bp, Artificial Sequence
  Description of Artificial Sequence: Synthetic oligonucleotide
  Target: ATXN2; (-) strand; PAM type: NRG; PAM sequence: TGG
gagacaggatttttccatgt

SEQ ID NO: 29761 - DNA, 20 bp, Artificial Sequence
  Description of Artificial Sequence: Synthetic oligonucleotide
  Target: ATXN2; (-) strand; PAM type: NRG; PAM sequence: AGG
tttgtatgttcagtagagac

SEQ ID NO: 29762 - DNA, 20 bp, Artificial Sequence
  Description of Artificial Sequence: Synthetic oligonucleotide
  Target: ATXN2; (-) strand; PAM type: NRG; PAM sequence: CAG
ttttgtatgttcagtagaga

SEQ ID NO: 29763 - DNA, 20 bp, Artificial Sequence
  Description of Artificial Sequence: Synthetic oligonucleotide
  Target: ATXN2; (-) strand; PAM type: NRG; PAM sequence: GAG
ctaattttgtatgttcagta

SEQ ID NO: 29764 - DNA, 20 bp, Artificial Sequence
  Description of Artificial Sequence: Synthetic oligonucleotide
  Target: ATXN2; (-) strand; PAM type: NRG; PAM sequence: TAG
ggctaattttgtatgttcag

SEQ ID NO: 29765 - DNA, 20 bp, Artificial Sequence
  Description of Artificial Sequence: Synthetic oligonucleotide
  Target: ATXN2; (-) strand; PAM type: NRG; PAM sequence: CAG
cctggctaattttgtatgtt

SEQ ID NO: 29766 - DNA, 20 bp, Artificial Sequence
  Description of Artificial Sequence: Synthetic oligonucleotide
  Target: ATXN2; (-) strand; PAM type: NRG; PAM sequence: TGG
cagacatgcgccaccactcc

SEQ ID NO: 29767 - DNA, 20 bp, Artificial Sequence
  Description of Artificial Sequence: Synthetic oligonucleotide
  Target: ATXN2; (-) strand; PAM type: NRG; PAM sequence: CAG
ctcccgagtagctgggatta

SEQ ID NO: 29768 - DNA, 20 bp, Artificial Sequence
  Description of Artificial Sequence: Synthetic oligonucleotide
  Target: ATXN2; (-) strand; PAM type: NRG; PAM sequence: GGG
cgtcagcctcccgagtagct

SEQ ID NO: 29769 - DNA, 20 bp, Artificial Sequence
  Description of Artificial Sequence: Synthetic oligonucleotide
  Target: ATXN2; (-) strand; PAM type: NRG; PAM sequence: TGG
gcgtcagcctcccgagtagc

SEQ ID NO: 29770 - DNA, 20 bp, Artificial Sequence
  Description of Artificial Sequence: Synthetic oligonucleotide
  Target: ATXN2; (-) strand; PAM type: NRG; PAM sequence: TAG
tcctgcgtcagcctcccgag

SEQ ID NO: 29771 - DNA, 20 bp, Artificial Sequence
  Description of Artificial Sequence: Synthetic oligonucleotide
  Target: ATXN2; (-) strand; PAM type: NRG; PAM sequence: GAG
ttctcctgcgtcagcctccc

SEQ ID NO: 29772 - DNA, 20 bp, Artificial Sequence
  Description of Artificial Sequence: Synthetic oligonucleotide
  Target: ATXN2; (-) strand; PAM type: NRG; PAM sequence: CAG
ttcaagcagttctcctgcgt

SEQ ID NO: 29773 - DNA, 20 bp, Artificial Sequence
  Description of Artificial Sequence: Synthetic oligonucleotide
  Target: ATXN2; (-) strand; PAM type: NRG; PAM sequence: CAG
ctctgcctcccgggttcaag

SEQ ID NO: 29774 - DNA, 20 bp, Artificial Sequence
  Description of Artificial Sequence: Synthetic oligonucleotide
  Target: ATXN2; (-) strand; PAM type: NRG; PAM sequence: AAG
aacctctgcctcccgggttc

SEQ ID NO: 29775 - DNA, 20 bp, Artificial Sequence
  Description of Artificial Sequence: Synthetic oligonucleotide
  Target: ATXN2; (-) strand; PAM type: NRG; PAM sequence: GGG
cactgcaacctctgcctccc

SEQ ID NO: 29776 - DNA, 20 bp, Artificial Sequence
  Description of Artificial Sequence: Synthetic oligonucleotide
  Target: ATXN2; (-) strand; PAM type: NRG; PAM sequence: CGG
tcactgcaacctctgcctcc

SEQ ID NO: 29777 - DNA, 20 bp, Artificial Sequence
  Description of Artificial Sequence: Synthetic oligonucleotide
  Target: ATXN2; (-) strand; PAM type: NRG; PAM sequence: TGG
ggagtgcggtggcctgatct

SEQ ID NO: 29778 - DNA, 20 bp, Artificial Sequence
  Description of Artificial Sequence: Synthetic oligonucleotide
  Target: ATXN2; (-) strand; PAM type: NRG; PAM sequence: TGG
ttgcccaggctggagtgcgg

SEQ ID NO: 29779 - DNA, 20 bp, Artificial Sequence
  Description of Artificial Sequence: Synthetic oligonucleotide
  Target: ATXN2; (-) strand; PAM type: NRG; PAM sequence: CGG
ttattgcccaggctggagtg

SEQ ID NO: 29780 - DNA, 20 bp, Artificial Sequence
  Description of Artificial Sequence: Synthetic oligonucleotide
  Target: ATXN2; (-) strand; PAM type: NRG; PAM sequence: GAG
cgctcttattgcccaggctg

SEQ ID NO: 29781 - DNA, 20 bp, Artificial Sequence
  Description of Artificial Sequence: Synthetic oligonucleotide
  Target: ATXN2; (-) strand; PAM type: NRG; PAM sequence: TGG
ttcgctcttattgcccaggc

SEQ ID NO: 29782 - DNA, 20 bp, Artificial Sequence
  Description of Artificial Sequence: Synthetic oligonucleotide
  Target: ATXN2; (-) strand; PAM type: NRG; PAM sequence: AGG
gagtttcgctcttattgccc

SEQ ID NO: 29783 - DNA, 20 bp, Artificial Sequence
  Description of Artificial Sequence: Synthetic oligonucleotide
  Target: ATXN2; (-) strand; PAM type: NRG; PAM sequence: CAG
ggagtttcgctcttattgcc

SEQ ID NO: 29784 - DNA, 20 bp, Artificial Sequence
  Description of Artificial Sequence: Synthetic oligonucleotide
  Target: ATXN2; (-) strand; PAM type: NRG; PAM sequence: GAG
ttttttttttttttgagatg

SEQ ID NO: 29785 - DNA, 20 bp, Artificial Sequence
  Description of Artificial Sequence: Synthetic oligonucleotide
  Target: ATXN2; (-) strand; PAM type: NRG; PAM sequence: TGG
ttttttttttttttttgaga

SEQ ID NO: 29786 - DNA, 20 bp, Artificial Sequence
  Description of Artificial Sequence: Synthetic oligonucleotide
  Target: ATXN2; (-) strand; PAM type: NRG; PAM sequence: GAG
tttttttttttttttttttt

SEQ ID NO: 29787 - DNA, 20 bp, Artificial Sequence
  Description of Artificial Sequence: Synthetic oligonucleotide
  Target: ATXN2; (-) strand; PAM type: NRG; PAM sequence: TAG
tttactatggtgttaccaag

SEQ ID NO: 29788 - DNA, 20 bp, Artificial Sequence
  Description of Artificial Sequence: Synthetic oligonucleotide
  Target: ATXN2; (-) strand; PAM type: NRG; PAM sequence: AAG
ttatttactatggtgttacc

SEQ ID NO: 29789 - DNA, 20 bp, Artificial Sequence
  Description of Artificial Sequence: Synthetic oligonucleotide
  Target: ATXN2; (-) strand; PAM type: NRG; PAM sequence: TGG
cctgaaacagttatttacta

SEQ ID NO: 29790 - DNA, 20 bp, Artificial Sequence
  Description of Artificial Sequence: Synthetic oligonucleotide
  Target: ATXN2; (-) strand; PAM type: NRG; PAM sequence: CAG
gtggacacttttgcctgaaa

SEQ ID NO: 29791 - DNA, 20 bp, Artificial Sequence
  Description of Artificial Sequence: Synthetic oligonucleotide
  Target: ATXN2; (-) strand; PAM type: NRG; PAM sequence: TGG
cttactatatttagcttctg

SEQ ID NO: 29792 - DNA, 20 bp, Artificial Sequence
  Description of Artificial Sequence: Synthetic oligonucleotide
  Target: ATXN2; (-) strand; PAM type: NRG; PAM sequence: TAG
ctactttcccttactatatt

SEQ ID NO: 29793 - DNA, 20 bp, Artificial Sequence
  Description of Artificial Sequence: Synthetic oligonucleotide
  Target: ATXN2; (-) strand; PAM type: NRG; PAM sequence: TGG
tcttgtggggagttactttg

SEQ ID NO: 29794 - DNA, 20 bp, Artificial Sequence
  Description of Artificial Sequence: Synthetic oligonucleotide
  Target: ATXN2; (-) strand; PAM type: NRG; PAM sequence: GAG
tttcatcagtatcttgtggg

SEQ ID NO: 29795 - DNA, 20 bp, Artificial Sequence
  Description of Artificial Sequence: Synthetic oligonucleotide
  Target: ATXN2; (-) strand; PAM type: NRG; PAM sequence: GGG
catttcatcagtatcttgtg

SEQ ID NO: 29796 - DNA, 20 bp, Artificial Sequence
  Description of Artificial Sequence: Synthetic oligonucleotide
  Target: ATXN2; (-) strand; PAM type: NRG; PAM sequence: GGG
tcatttcatcagtatcttgt

SEQ ID NO: 29797 - DNA, 20 bp, Artificial Sequence
  Description of Artificial Sequence: Synthetic oligonucleotide
  Target: ATXN2; (-) strand; PAM type: NRG; PAM sequence: TGG
gtcatttcatcagtatcttg

SEQ ID NO: 29798 - DNA, 20 bp, Artificial Sequence
  Description of Artificial Sequence: Synthetic oligonucleotide
  Target: ATXN2; (-) strand; PAM type: NRG; PAM sequence: CAG
ttttcacttggtcatttcat

SEQ ID NO: 29799 - DNA, 20 bp, Artificial Sequence
  Description of Artificial Sequence: Synthetic oligonucleotide
  Target: ATXN2; (-) strand; PAM type: NRG; PAM sequence: TGG
ctataaagttatttttcact

SEQ ID NO: 29800 - DNA, 20 bp, Artificial Sequence
  Description of Artificial Sequence: Synthetic oligonucleotide
  Target: ATXN2; (-) strand; PAM type: NRG; PAM sequence: AAG
tactaagtttcttcactata

SEQ ID NO: 29801 - DNA, 20 bp, Artificial Sequence
  Description of Artificial Sequence: Synthetic oligonucleotide
  Target: ATXN2; (-) strand; PAM type: NRG; PAM sequence: AAG
tggttagagttgtgtctact

SEQ ID NO: 29802 - DNA, 20 bp, Artificial Sequence
  Description of Artificial Sequence: Synthetic oligonucleotide
  Target: ATXN2; (-) strand; PAM type: NRG; PAM sequence: GAG
taactttgatcacttggtta

SEQ ID NO: 29803 - DNA, 20 bp, Artificial Sequence
  Description of Artificial Sequence: Synthetic oligonucleotide
  Target: ATXN2; (-) strand; PAM type: NRG; PAM sequence: TAG
gttaactttgatcacttggt

SEQ ID NO: 29804 - DNA, 20 bp, Artificial Sequence
  Description of Artificial Sequence: Synthetic oligonucleotide
  Target: ATXN2; (-) strand; PAM type: NRG; PAM sequence: TGG
ggttgttaactttgatcact

SEQ ID NO: 29805 - DNA, 20 bp, Artificial Sequence
  Description of Artificial Sequence: Synthetic oligonucleotide
  Target: ATXN2; (-) strand; PAM type: NRG; PAM sequence: GGG
atatatttatcccattactg

SEQ ID NO: 29806 - DNA, 20 bp, Artificial Sequence
  Description of Artificial Sequence: Synthetic oligonucleotide
  Target: ATXN2; (-) strand; PAM type: NRG; PAM sequence: GGG
tatatatttatcccattact

SEQ ID NO: 29807 - DNA, 20 bp, Artificial Sequence
  Description of Artificial Sequence: Synthetic oligonucleotide
  Target: ATXN2; (-) strand; PAM type: NRG; PAM sequence: TGG
gtatatatttatcccattac

SEQ ID NO: 29808 - DNA, 20 bp, Artificial Sequence
  Description of Artificial Sequence: Synthetic oligonucleotide
  Target: ATXN2; (-) strand; PAM type: NRG; PAM sequence: AAG
tctcattgcatgatatcaga

SEQ ID NO: 29809 - DNA, 20 bp, Artificial Sequence
  Description of Artificial Sequence: Synthetic oligonucleotide
  Target: ATXN2; (-) strand; PAM type: NRG; PAM sequence: CAG
tttttctcattgcatgatat

SEQ ID NO: 29810 - DNA, 20 bp, Artificial Sequence
  Description of Artificial Sequence: Synthetic oligonucleotide
  Target: ATXN2; (-) strand; PAM type: NRG; PAM sequence: CAG
tatttttggcaggaatacaa

SEQ ID NO: 29811 - DNA, 20 bp, Artificial Sequence
  Description of Artificial Sequence: Synthetic oligonucleotide
  Target: ATXN2; (-) strand; PAM type: NRG; PAM sequence: AGG
ttcagatatttatttttggc

SEQ ID NO: 29812 - DNA, 20 bp, Artificial Sequence
  Description of Artificial Sequence: Synthetic oligonucleotide
  Target: ATXN2; (-) strand; PAM type: NRG; PAM sequence: CAG
attcagatatttatttttgg

SEQ ID NO: 29813 - DNA, 20 bp, Artificial Sequence
  Description of Artificial Sequence: Synthetic oligonucleotide
  Target: ATXN2; (-) strand; PAM type: NRG; PAM sequence: TGG
tagattcagatatttatttt

SEQ ID NO: 29814 - DNA, 20 bp, Artificial Sequence
  Description of Artificial Sequence: Synthetic oligonucleotide
  Target: ATXN2; (-) strand; PAM type: NRG; PAM sequence: CAG
ggtttccttatgattagatt

SEQ ID NO: 29815 - DNA, 20 bp, Artificial Sequence
  Description of Artificial Sequence: Synthetic oligonucleotide
  Target: ATXN2; (-) strand; PAM type: NRG; PAM sequence: TAG
atctgaggtttccttatgat

SEQ ID NO: 29816 - DNA, 20 bp, Artificial Sequence
  Description of Artificial Sequence: Synthetic oligonucleotide
  Target: ATXN2; (-) strand; PAM type: NRG; PAM sequence: AGG
cctcaactagggtttatctg

SEQ ID NO: 29817 - DNA, 20 bp, Artificial Sequence
  Description of Artificial Sequence: Synthetic oligonucleotide
  Target: ATXN2; (-) strand; PAM type: NRG; PAM sequence: GAG
ccctcaactagggtttatct

SEQ ID NO: 29818 - DNA, 20 bp, Artificial Sequence
  Description of Artificial Sequence: Synthetic oligonucleotide
  Target: ATXN2; (-) strand; PAM type: NRG; PAM sequence: GGG
tgtagactgtccctcaacta

SEQ ID NO: 29819 - DNA, 20 bp, Artificial Sequence
  Description of Artificial Sequence: Synthetic oligonucleotide
  Target: ATXN2; (-) strand; PAM type: NRG; PAM sequence: AGG
ttgtagactgtccctcaact

SEQ ID NO: 29820 - DNA, 20 bp, Artificial Sequence
  Description of Artificial Sequence: Synthetic oligonucleotide
  Target: ATXN2; (-) strand; PAM type: NRG; PAM sequence: TAG
tttgtagactgtccctcaac

SEQ ID NO: 29821 - DNA, 20 bp, Artificial Sequence
  Description of Artificial Sequence: Synthetic oligonucleotide
  Target: ATXN2; (-) strand; PAM type: NRG; PAM sequence: TAG
gaagattacaggttattttg

SEQ ID NO: 29822 - DNA, 20 bp, Artificial Sequence
  Description of Artificial Sequence: Synthetic oligonucleotide
  Target: ATXN2; (-) strand; PAM type: NRG; PAM sequence: AGG
ttgacacttttgaagattac

SEQ ID NO: 29823 - DNA, 20 bp, Artificial Sequence
  Description of Artificial Sequence: Synthetic oligonucleotide
  Target: ATXN2; (-) strand; PAM type: NRG; PAM sequence: CAG
cttgacacttttgaagatta

SEQ ID NO: 29824 - DNA, 20 bp, Artificial Sequence
  Description of Artificial Sequence: Synthetic oligonucleotide
  Target: ATXN2; (-) strand; PAM type: NRG; PAM sequence: AAG
tttatgacttgacacttttg

SEQ ID NO: 29825 - DNA, 20 bp, Artificial Sequence
  Description of Artificial Sequence: Synthetic oligonucleotide
  Target: ATXN2; (-) strand; PAM type: NRG; PAM sequence: CAG
tggtctcctttaatccaaag

SEQ ID NO: 29826 - DNA, 20 bp, Artificial Sequence
  Description of Artificial Sequence: Synthetic oligonucleotide
  Target: ATXN2; (-) strand; PAM type: NRG; PAM sequence: AAG
ctttggtctcctttaatcca

SEQ ID NO: 29827 - DNA, 20 bp, Artificial Sequence
  Description of Artificial Sequence: Synthetic oligonucleotide
  Target: ATXN2; (-) strand; PAM type: NRG; PAM sequence: TGG
cttcggttatcatgtatctt

SEQ ID NO: 29828 - DNA, 20 bp, Artificial Sequence
  Description of Artificial Sequence: Synthetic oligonucleotide
  Target: ATXN2; (-) strand; PAM type: NRG; PAM sequence: CGG
caatccaggattgttacctt

SEQ ID NO: 29829 - DNA, 20 bp, Artificial Sequence
  Description of Artificial Sequence: Synthetic oligonucleotide
  Target: ATXN2; (-) strand; PAM type: NRG; PAM sequence: AGG
ctctgtccaagaaccaatcc

SEQ ID NO: 29830 - DNA, 20 bp, Artificial Sequence
  Description of Artificial Sequence: Synthetic oligonucleotide
  Target: ATXN2; (-) strand; PAM type: NRG; PAM sequence: CAG
cctctgtccaagaaccaatc

SEQ ID NO: 29831 - DNA, 20 bp, Artificial Sequence
  Description of Artificial Sequence: Synthetic oligonucleotide
  Target: ATXN2; (-) strand; PAM type: NRG; PAM sequence: AAG
cgtatttactccctctgtcc

SEQ ID NO: 29832 - DNA, 20 bp, Artificial Sequence
  Description of Artificial Sequence: Synthetic oligonucleotide
  Target: ATXN2; (-) strand; PAM type: NRG; PAM sequence: TGG
atatattctacatatatatg

SEQ ID NO: 29833 - DNA, 20 bp, Artificial Sequence
  Description of Artificial Sequence: Synthetic oligonucleotide
  Target: ATXN2; (-) strand; PAM type: NRG; PAM sequence: CAG
acatttttctggtcaagaac

SEQ ID NO: 29834 - DNA, 20 bp, Artificial Sequence
  Description of Artificial Sequence: Synthetic oligonucleotide
  Target: ATXN2; (-) strand; PAM type: NRG; PAM sequence: AAG
aaatcaacatttttctggtc

SEQ ID NO: 29835 - DNA, 20 bp, Artificial Sequence
  Description of Artificial Sequence: Synthetic oligonucleotide
  Target: ATXN2; (-) strand; PAM type: NRG; PAM sequence: TGG
tcaacaaatcaacatttttc

SEQ ID NO: 29836 - DNA, 20 bp, Artificial Sequence
  Description of Artificial Sequence: Synthetic oligonucleotide
  Target: ATXN2; (-) strand; PAM type: NRG; PAM sequence: TAG
tcaaactgttattctgttta

SEQ ID NO: 29837 - DNA, 20 bp, Artificial Sequence
  Description of Artificial Sequence: Synthetic oligonucleotide
  Target: ATXN2; (-) strand; PAM type: NRG; PAM sequence: AGG
acagtacagttgtcaaaata

SEQ ID NO: 29838 - DNA, 20 bp, Artificial Sequence
  Description of Artificial Sequence: Synthetic oligonucleotide
  Target: ATXN2; (-) strand; PAM type: NRG; PAM sequence: AAG
cacagtacagttgtcaaaat

SEQ ID NO: 29839 - DNA, 20 bp, Artificial Sequence
  Description of Artificial Sequence: Synthetic oligonucleotide
  Target: ATXN2; (-) strand; PAM type: NRG; PAM sequence: CAG
tctatttcaaaaccacagta

SEQ ID NO: 29840 - DNA, 20 bp, Artificial Sequence
  Description of Artificial Sequence: Synthetic oligonucleotide
  Target: ATXN2; (-) strand; PAM type: NRG; PAM sequence: CAG
ggcattctatttcaaaacca

SEQ ID NO: 29841 - DNA, 20 bp, Artificial Sequence
  Description of Artificial Sequence: Synthetic oligonucleotide
  Target: ATXN2; (-) strand; PAM type: NRG; PAM sequence: GGG
cttgtatgtactaataacaa

SEQ ID NO: 29842 - DNA, 20 bp, Artificial Sequence
  Description of Artificial Sequence: Synthetic oligonucleotide
  Target: ATXN2; (-) strand; PAM type: NRG; PAM sequence: AGG
acttgtatgtactaataaca

SEQ ID NO: 29843 - DNA, 20 bp, Artificial Sequence
  Description of Artificial Sequence: Synthetic oligonucleotide
  Target: ATXN2; (-) strand; PAM type: NRG; PAM sequence: AAG
aacttgtatgtactaataac

SEQ ID NO: 29844 - DNA, 20 bp, Artificial Sequence
  Description of Artificial Sequence: Synthetic oligonucleotide
  Target: ATXN2; (-) strand; PAM type: NRG; PAM sequence: TAG
tgagagacatgatgcctctt

SEQ ID NO: 29845 - DNA, 20 bp, Artificial Sequence
  Description of Artificial Sequence: Synthetic oligonucleotide
  Target: ATXN2; (-) strand; PAM type: NRG; PAM sequence: GAG
aattcttattaaacatatga

SEQ ID NO: 29846 - DNA, 20 bp, Artificial Sequence
  Description of Artificial Sequence: Synthetic oligonucleotide
  Target: ATXN2; (-) strand; PAM type: NRG; PAM sequence: GAG
aaaattcttattaaacatat

SEQ ID NO: 29847 - DNA, 20 bp, Artificial Sequence
  Description of Artificial Sequence: Synthetic oligonucleotide
  Target: ATXN2; (-) strand; PAM type: NRG; PAM sequence: AAG
gtattggtaattgtatatgt

SEQ ID NO: 29848 - DNA, 20 bp, Artificial Sequence
  Description of Artificial Sequence: Synthetic oligonucleotide
  Target: ATXN2; (-) strand; PAM type: NRG; PAM sequence: TGG
ccttaacattttctctgtat

SEQ ID NO: 29849 - DNA, 20 bp, Artificial Sequence
  Description of Artificial Sequence: Synthetic oligonucleotide
  Target: ATXN2; (-) strand; PAM type: NRG; PAM sequence: AAG
atatctcacctgtattcttc

SEQ ID NO: 29850 - DNA, 20 bp, Artificial Sequence
  Description of Artificial Sequence: Synthetic oligonucleotide
  Target: ATXN2; (-) strand; PAM type: NRG; PAM sequence: AAG
aaaattgcaaagatattata

SEQ ID NO: 29851 - DNA, 20 bp, Artificial Sequence
  Description of Artificial Sequence: Synthetic oligonucleotide
  Target: ATXN2; (-) strand; PAM type: NRG; PAM sequence: AAG
agacttttagaaaaattgca

SEQ ID NO: 29852 - DNA, 20 bp, Artificial Sequence
  Description of Artificial Sequence: Synthetic oligonucleotide
  Target: ATXN2; (-) strand; PAM type: NRG; PAM sequence: TAG
taaacataattttagacttt

SEQ ID NO: 29853 - DNA, 20 bp, Artificial Sequence
  Description of Artificial Sequence: Synthetic oligonucleotide
  Target: ATXN2; (-) strand; PAM type: NRG; PAM sequence: TAG
attttacttaaacataattt

SEQ ID NO: 29854 - DNA, 20 bp, Artificial Sequence
  Description of Artificial Sequence: Synthetic oligonucleotide
  Target: ATXN2; (-) strand; PAM type: NRG; PAM sequence: TAG
ttaacaaatcacatcactta

SEQ ID NO: 29855 - DNA, 20 bp, Artificial Sequence
  Description of Artificial Sequence: Synthetic oligonucleotide
  Target: ATXN2; (-) strand; PAM type: NRG; PAM sequence: GAG
cttggacaatgcattaaata

SEQ ID NO: 29856 - DNA, 20 bp, Artificial Sequence
  Description of Artificial Sequence: Synthetic oligonucleotide
  Target: ATXN2; (-) strand; PAM type: NRG; PAM sequence: TAG
gccttggacaatgcattaaa

SEQ ID NO: 29857 - DNA, 20 bp, Artificial Sequence
  Description of Artificial Sequence: Synthetic oligonucleotide
  Target: ATXN2; (-) strand; PAM type: NRG; PAM sequence: TGG
ttattatttaaaaaatgcct

SEQ ID NO: 29858 - DNA, 20 bp, Artificial Sequence
  Description of Artificial Sequence: Synthetic oligonucleotide
  Target: ATXN2; (-) strand; PAM type: NRG; PAM sequence: AAG
tttcaaggctgagtaggatt

SEQ ID NO: 29859 - DNA, 20 bp, Artificial Sequence
  Description of Artificial Sequence: Synthetic oligonucleotide
  Target: ATXN2; (-) strand; PAM type: NRG; PAM sequence: AGG
tttgagtttcaaggctgagt

SEQ ID NO: 29860 - DNA, 20 bp, Artificial Sequence
  Description of Artificial Sequence: Synthetic oligonucleotide
  Target: ATXN2; (-) strand; PAM type: NRG; PAM sequence: TAG
atttgagtttcaaggctgag

SEQ ID NO: 29861 - DNA, 20 bp, Artificial Sequence
  Description of Artificial Sequence: Synthetic oligonucleotide
  Target: ATXN2; (-) strand; PAM type: NRG; PAM sequence: GAG
ggcatttgagtttcaaggct

SEQ ID NO: 29862 - DNA, 20 bp, Artificial Sequence
  Description of Artificial Sequence: Synthetic oligonucleotide
  Target: ATXN2; (-) strand; PAM type: NRG; PAM sequence: AGG
aagatggcatttgagtttca

SEQ ID NO: 29863 - DNA, 20 bp, Artificial Sequence
  Description of Artificial Sequence: Synthetic oligonucleotide
  Target: ATXN2; (-) strand; PAM type: NRG; PAM sequence: AAG
aaagatggcatttgagtttc

SEQ ID NO: 29864 - DNA, 20 bp, Artificial Sequence
  Description of Artificial Sequence: Synthetic oligonucleotide
  Target: ATXN2; (-) strand; PAM type: NRG; PAM sequence: GAG
ttcctgaaaagatggcattt

SEQ ID NO: 29865 - DNA, 20 bp, Artificial Sequence
  Description of Artificial Sequence: Synthetic oligonucleotide
  Target: ATXN2; (-) strand; PAM type: NRG; PAM sequence: TGG
aggaagacttcctgaaaaga

SEQ ID NO: 29866 - DNA, 20 bp, Artificial Sequence
  Description of Artificial Sequence: Synthetic oligonucleotide
  Target: ATXN2; (-) strand; PAM type: NRG; PAM sequence: AAG
tcgaaggaagacttcctgaa

SEQ ID NO: 29867 - DNA, 20 bp, Artificial Sequence
  Description of Artificial Sequence: Synthetic oligonucleotide
  Target: ATXN2; (-) strand; PAM type: NRG; PAM sequence: AAG
ttgattgagataatcgaagg

SEQ ID NO: 29868 - DNA, 20 bp, Artificial Sequence
  Description of Artificial Sequence: Synthetic oligonucleotide
  Target: ATXN2; (-) strand; PAM type: NRG; PAM sequence: AGG
tatttgattgagataatcga

SEQ ID NO: 29869 - DNA, 20 bp, Artificial Sequence
  Description of Artificial Sequence: Synthetic oligonucleotide
  Target: ATXN2; (-) strand; PAM type: NRG; PAM sequence: AAG
atatttgattgagataatcg

SEQ ID NO: 29870 - DNA, 20 bp, Artificial Sequence
  Description of Artificial Sequence: Synthetic oligonucleotide
  Target: ATXN2; (-) strand; PAM type: NRG; PAM sequence: GAG
acagcatcgtatatttgatt

SEQ ID NO: 29871 - DNA, 20 bp, Artificial Sequence
  Description of Artificial Sequence: Synthetic oligonucleotide
  Target: ATXN2; (-) strand; PAM type: NRG; PAM sequence: CAG
ctaaactggagagttgaaaa

SEQ ID NO: 29872 - DNA, 20 bp, Artificial Sequence
  Description of Artificial Sequence: Synthetic oligonucleotide
  Target: ATXN2; (-) strand; PAM type: NRG; PAM sequence: GAG
taatacagatctaaactgga

SEQ ID NO: 29873 - DNA, 20 bp, Artificial Sequence
  Description of Artificial Sequence: Synthetic oligonucleotide
  Target: ATXN2; (-) strand; PAM type: NRG; PAM sequence: GAG
tataatacagatctaaactg

SEQ ID NO: 29874 - DNA, 20 bp, Artificial Sequence
  Description of Artificial Sequence: Synthetic oligonucleotide
  Target: ATXN2; (-) strand; PAM type: NRG; PAM sequence: TGG
attataatacagatctaaac

SEQ ID NO: 29875 - DNA, 20 bp, Artificial Sequence
  Description of Artificial Sequence: Synthetic oligonucleotide
  Target: ATXN2; (-) strand; PAM type: NRG; PAM sequence: CAG
atacactagtaattataata

SEQ ID NO: 29876 - DNA, 20 bp, Artificial Sequence
  Description of Artificial Sequence: Synthetic oligonucleotide
  Target: ATXN2; (-) strand; PAM type: NRG; PAM sequence: TAG
tgggtatatgacagatacac

SEQ ID NO: 29877 - DNA, 20 bp, Artificial Sequence
  Description of Artificial Sequence: Synthetic oligonucleotide
  Target: ATXN2; (-) strand; PAM type: NRG; PAM sequence: CAG
cctgagtagtgggtatatga

SEQ ID NO: 29878 - DNA, 20 bp, Artificial Sequence
  Description of Artificial Sequence: Synthetic oligonucleotide
  Target: ATXN2; (-) strand; PAM type: NRG; PAM sequence: GGG
aggtgatggtcctgagtagt

SEQ ID NO: 29879 - DNA, 20 bp, Artificial Sequence
  Description of Artificial Sequence: Synthetic oligonucleotide
  Target: ATXN2; (-) strand; PAM type: NRG; PAM sequence: TGG
caggtgatggtcctgagtag

SEQ ID NO: 29880 - DNA, 20 bp, Artificial Sequence
  Description of Artificial Sequence: Synthetic oligonucleotide
  Target: ATXN2; (-) strand; PAM type: NRG; PAM sequence: TAG
ggtcaggtgatggtcctgag

SEQ ID NO: 29881 - DNA, 20 bp, Artificial Sequence
  Description of Artificial Sequence: Synthetic oligonucleotide
  Target: ATXN2; (-) strand; PAM type: NRG; PAM sequence: GAG
tatggtcaggtgatggtcct

SEQ ID NO: 29882 - DNA, 20 bp, Artificial Sequence
  Description of Artificial Sequence: Synthetic oligonucleotide
  Target: ATXN2; (-) strand; PAM type: NRG; PAM sequence: TGG
agcataatatggtcaggtga

SEQ ID NO: 29883 - DNA, 20 bp, Artificial Sequence
  Description of Artificial Sequence: Synthetic oligonucleotide
  Target: ATXN2; (-) strand; PAM type: NRG; PAM sequence: AGG
cacagaagcataatatggtc

SEQ ID NO: 29884 - DNA, 20 bp, Artificial Sequence
  Description of Artificial Sequence: Synthetic oligonucleotide
  Target: ATXN2; (-) strand; PAM type: NRG; PAM sequence: CAG
tcacagaagcataatatggt

SEQ ID NO: 29885 - DNA, 20 bp, Artificial Sequence
  Description of Artificial Sequence: Synthetic oligonucleotide
  Target: ATXN2; (-) strand; PAM type: NRG; PAM sequence: TGG
attttcacagaagcataata

SEQ ID NO: 29886 - DNA, 20 bp, Artificial Sequence
  Description of Artificial Sequence: Synthetic oligonucleotide
  Target: ATXN2; (-) strand; PAM type: NRG; PAM sequence: AAG
tcattttctgattttcacag

SEQ ID NO: 29887 - DNA, 20 bp, Artificial Sequence
  Description of Artificial Sequence: Synthetic oligonucleotide
  Target: ATXN2; (-) strand; PAM type: NRG; PAM sequence: CAG
gcatcattttctgattttca

SEQ ID NO: 29888 - DNA, 20 bp, Artificial Sequence
  Description of Artificial Sequence: Synthetic oligonucleotide
  Target: ATXN2; (-) strand; PAM type: NRG; PAM sequence: AGG
gggctatgaccccctggaag

SEQ ID NO: 29889 - DNA, 20 bp, Artificial Sequence
  Description of Artificial Sequence: Synthetic oligonucleotide
  Target: ATXN2; (-) strand; PAM type: NRG; PAM sequence: GAG
ggggctatgaccccctggaa

SEQ ID NO: 29890 - DNA, 20 bp, Artificial Sequence
  Description of Artificial Sequence: Synthetic oligonucleotide
  Target: ATXN2; (-) strand; PAM type: NRG; PAM sequence: AAG
gtggggctatgaccccctgg

SEQ ID NO: 29891 - DNA, 20 bp, Artificial Sequence
  Description of Artificial Sequence: Synthetic oligonucleotide
  Target: ATXN2; (-) strand; PAM type: NRG; PAM sequence: TGG
aatgtggggctatgaccccc

SEQ ID NO: 29892 - DNA, 20 bp, Artificial Sequence
  Description of Artificial Sequence: Synthetic oligonucleotide
  Target: ATXN2; (-) strand; PAM type: NRG; PAM sequence: GGG
acactgttttgtctaatgtg

SEQ ID NO: 29893 - DNA, 20 bp, Artificial Sequence
  Description of Artificial Sequence: Synthetic oligonucleotide
  Target: ATXN2; (-) strand; PAM type: NRG; PAM sequence: GGG
cacactgttttgtctaatgt

SEQ ID NO: 29894 - DNA, 20 bp, Artificial Sequence
  Description of Artificial Sequence: Synthetic oligonucleotide
  Target: ATXN2; (-) strand; PAM type: NRG; PAM sequence: TGG
ccacactgttttgtctaatg

SEQ ID NO: 29895 - DNA, 20 bp, Artificial Sequence
  Description of Artificial Sequence: Synthetic oligonucleotide
  Target: ATXN2; (-) strand; PAM type: NRG; PAM sequence: AAG
accttcttttaattttcaca

SEQ ID NO: 29896 - DNA, 20 bp, Artificial Sequence
  Description of Artificial Sequence: Synthetic oligonucleotide
  Target: ATXN2; (-) strand; PAM type: NRG; PAM sequence: TGG
gggctatatctatgtgcttc

SEQ ID NO: 29897 - DNA, 20 bp, Artificial Sequence
  Description of Artificial Sequence: Synthetic oligonucleotide
  Target: ATXN2; (-) strand; PAM type: NRG; PAM sequence: GGG
gccacacaatgtgcctttgg

SEQ ID NO: 29898 - DNA, 20 bp, Artificial Sequence
  Description of Artificial Sequence: Synthetic oligonucleotide
  Target: ATXN2; (-) strand; PAM type: NRG; PAM sequence: GGG
ggccacacaatgtgcctttg

SEQ ID NO: 29899 - DNA, 20 bp, Artificial Sequence
  Description of Artificial Sequence: Synthetic oligonucleotide
  Target: ATXN2; (-) strand; PAM type: NRG; PAM sequence: GGG
tggccacacaatgtgccttt

SEQ ID NO: 29900 - DNA, 20 bp, Artificial Sequence
  Description of Artificial Sequence: Synthetic oligonucleotide
  Target: ATXN2; (-) strand; PAM type: NRG; PAM sequence: TGG
ttggccacacaatgtgcctt

SEQ ID NO: 29901 - DNA, 20 bp, Artificial Sequence
  Description of Artificial Sequence: Synthetic oligonucleotide
  Target: ATXN2; (-) strand; PAM type: NRG; PAM sequence: TGG
ttgaaatcaaggtgtttctt

SEQ ID NO: 29902 - DNA, 20 bp, Artificial Sequence
  Description of Artificial Sequence: Synthetic oligonucleotide
  Target: ATXN2; (-) strand; PAM type: NRG; PAM sequence: AGG
gtgaatggatgttgaaatca

SEQ ID NO: 29903 - DNA, 20 bp, Artificial Sequence
  Description of Artificial Sequence: Synthetic oligonucleotide
  Target: ATXN2; (-) strand; PAM type: NRG; PAM sequence: AAG
tgtgaatggatgttgaaatc

SEQ ID NO: 29904 - DNA, 20 bp, Artificial Sequence
  Description of Artificial Sequence: Synthetic oligonucleotide
  Target: ATXN2; (-) strand; PAM type: NRG; PAM sequence: TGG
agttcctgaccaagtgtgaa

SEQ ID NO: 29905 - DNA, 20 bp, Artificial Sequence
  Description of Artificial Sequence: Synthetic oligonucleotide
  Target: ATXN2; (-) strand; PAM type: NRG; PAM sequence: AAG
ttgtccaagagttcctgacc

SEQ ID NO: 29906 - DNA, 20 bp, Artificial Sequence
  Description of Artificial Sequence: Synthetic oligonucleotide
  Target: ATXN2; (-) strand; PAM type: NRG; PAM sequence: GAG
ttaggttttcatttgtccaa

SEQ ID NO: 29907 - DNA, 20 bp, Artificial Sequence
  Description of Artificial Sequence: Synthetic oligonucleotide
  Target: ATXN2; (-) strand; PAM type: NRG; PAM sequence: AAG
tgttaggttttcatttgtcc

SEQ ID NO: 29908 - DNA, 20 bp, Artificial Sequence
  Description of Artificial Sequence: Synthetic oligonucleotide
  Target: ATXN2; (-) strand; PAM type: NRG; PAM sequence: AGG
ttttgccaagcttggttgtt

SEQ ID NO: 29909 - DNA, 20 bp, Artificial Sequence
  Description of Artificial Sequence: Synthetic oligonucleotide
  Target: ATXN2; (-) strand; PAM type: NRG; PAM sequence: TAG
cttttgccaagcttggttgt

SEQ ID NO: 29910 - DNA, 20 bp, Artificial Sequence
  Description of Artificial Sequence: Synthetic oligonucleotide
  Target: ATXN2; (-) strand; PAM type: NRG; PAM sequence: TGG
aaagatacttttgccaagct

SEQ ID NO: 29911 - DNA, 20 bp, Artificial Sequence
  Description of Artificial Sequence: Synthetic oligonucleotide
  Target: ATXN2; (-) strand; PAM type: NRG; PAM sequence: AAG
ggtagaaagatacttttgcc

SEQ ID NO: 29912 - DNA, 20 bp, Artificial Sequence
  Description of Artificial Sequence: Synthetic oligonucleotide
  Target: ATXN2; (-) strand; PAM type: NRG; PAM sequence: AAG
ctaattttggtagtggtaga

SEQ ID NO: 29913 - DNA, 20 bp, Artificial Sequence
  Description of Artificial Sequence: Synthetic oligonucleotide
  Target: ATXN2; (-) strand; PAM type: NRG; PAM sequence: TAG
tctgctaattttggtagtgg

SEQ ID NO: 29914 - DNA, 20 bp, Artificial Sequence
  Description of Artificial Sequence: Synthetic oligonucleotide
  Target: ATXN2; (-) strand; PAM type: NRG; PAM sequence: TGG
tcctctgctaattttggtag

SEQ ID NO: 29915 - DNA, 20 bp, Artificial Sequence
  Description of Artificial Sequence: Synthetic oligonucleotide
  Target: ATXN2; (-) strand; PAM type: NRG; PAM sequence: TAG
gattcctctgctaattttgg

SEQ ID NO: 29916 - DNA, 20 bp, Artificial Sequence
  Description of Artificial Sequence: Synthetic oligonucleotide
  Target: ATXN2; (-) strand; PAM type: NRG; PAM sequence: TGG
catgattcctctgctaattt

SEQ ID NO: 29917 - DNA, 20 bp, Artificial Sequence
  Description of Artificial Sequence: Synthetic oligonucleotide
  Target: ATXN2; (-) strand; PAM type: NRG; PAM sequence: AGG
tactcagtgtgtatcatatg

SEQ ID NO: 29918 - DNA, 20 bp, Artificial Sequence
  Description of Artificial Sequence: Synthetic oligonucleotide
  Target: ATXN2; (-) strand; PAM type: NRG; PAM sequence: GAG
ttactcagtgtgtatcatat

SEQ ID NO: 29919 - DNA, 20 bp, Artificial Sequence
  Description of Artificial Sequence: Synthetic oligonucleotide
  Target: ATXN2; (-) strand; PAM type: NRG; PAM sequence: CAG
taattcattaggtatttact

SEQ ID NO: 29920 - DNA, 20 bp, Artificial Sequence
  Description of Artificial Sequence: Synthetic oligonucleotide
  Target: ATXN2; (-) strand; PAM type: NRG; PAM sequence: AGG
gattgggctgttaattcatt

SEQ ID NO: 29921 - DNA, 20 bp, Artificial Sequence
  Description of Artificial Sequence: Synthetic oligonucleotide
  Target: ATXN2; (-) strand; PAM type: NRG; PAM sequence: TAG
tgattgggctgttaattcat

SEQ ID NO: 29922 - DNA, 20 bp, Artificial Sequence
  Description of Artificial Sequence: Synthetic oligonucleotide
  Target: ATXN2; (-) strand; PAM type: NRG; PAM sequence: GGG
ttctttcccttgttctgatt

SEQ ID NO: 29923 - DNA, 20 bp, Artificial Sequence
  Description of Artificial Sequence: Synthetic oligonucleotide
  Target: ATXN2; (-) strand; PAM type: NRG; PAM sequence: TGG
tttctttcccttgttctgat

SEQ ID NO: 29924 - DNA, 20 bp, Artificial Sequence
  Description of Artificial Sequence: Synthetic oligonucleotide
  Target: ATXN2; (-) strand; PAM type: NRG; PAM sequence: AAG
attgatagctttgaaatgga

SEQ ID NO: 29925 - DNA, 20 bp, Artificial Sequence
  Description of Artificial Sequence: Synthetic oligonucleotide
  Target: ATXN2; (-) strand; PAM type: NRG; PAM sequence: TGG
aaagattgatagctttgaaa

SEQ ID NO: 29926 - DNA, 20 bp, Artificial Sequence
  Description of Artificial Sequence: Synthetic oligonucleotide
  Target: ATXN2; (-) strand; PAM type: NRG; PAM sequence: TAG
acccctgatttaaagattga

SEQ ID NO: 29927 - DNA, 20 bp, Artificial Sequence
  Description of Artificial Sequence: Synthetic oligonucleotide
  Target: ATXN2; (-) strand; PAM type: NRG; PAM sequence: AAG
gtgtcctgacccctgattta

SEQ ID NO: 29928 - DNA, 20 bp, Artificial Sequence
  Description of Artificial Sequence: Synthetic oligonucleotide
  Target: ATXN2; (-) strand; PAM type: NRG; PAM sequence: TAG
ccaaaacaggttgtgggctg

SEQ ID NO: 29929 - DNA, 20 bp, Artificial Sequence
  Description of Artificial Sequence: Synthetic oligonucleotide
  Target: ATXN2; (-) strand; PAM type: NRG; PAM sequence: GGG
gccagaccaaaacaggttgt

SEQ ID NO: 29930 - DNA, 20 bp, Artificial Sequence
  Description of Artificial Sequence: Synthetic oligonucleotide
  Target: ATXN2; (-) strand; PAM type: NRG; PAM sequence: TGG
agccagaccaaaacaggttg

SEQ ID NO: 29931 - DNA, 20 bp, Artificial Sequence
  Description of Artificial Sequence: Synthetic oligonucleotide
  Target: ATXN2; (-) strand; PAM type: NRG; PAM sequence: AGG
cccagaagccagaccaaaac

SEQ ID NO: 29932 - DNA, 20 bp, Artificial Sequence
  Description of Artificial Sequence: Synthetic oligonucleotide
  Target: ATXN2; (-) strand; PAM type: NRG; PAM sequence: CAG
gcccagaagccagaccaaaa

SEQ ID NO: 29933 - DNA, 20 bp, Artificial Sequence
  Description of Artificial Sequence: Synthetic oligonucleotide
  Target: ATXN2; (-) strand; PAM type: NRG; PAM sequence: CAG
atcattcttagcccagaagc

SEQ ID NO: 29934 - DNA, 20 bp, Artificial Sequence
  Description of Artificial Sequence: Synthetic oligonucleotide
  Target: ATXN2; (-) strand; PAM type: NRG; PAM sequence: AAG
aaaaatcattcttagcccag

SEQ ID NO: 29935 - DNA, 20 bp, Artificial Sequence
  Description of Artificial Sequence: Synthetic oligonucleotide
  Target: ATXN2; (-) strand; PAM type: NRG; PAM sequence: CAG
cataaaaatcattcttagcc

SEQ ID NO: 29936 - DNA, 20 bp, Artificial Sequence
  Description of Artificial Sequence: Synthetic oligonucleotide
  Target: ATXN2; (-) strand; PAM type: NRG; PAM sequence: TAG
aggaacataaaaatcattct

SEQ ID NO: 29937 - DNA, 20 bp, Artificial Sequence
  Description of Artificial Sequence: Synthetic oligonucleotide
  Target: ATXN2; (-) strand; PAM type: NRG; PAM sequence: AGG
tttaccataagcaactcttg

SEQ ID NO: 29938 - DNA, 20 bp, Artificial Sequence
  Description of Artificial Sequence: Synthetic oligonucleotide
  Target: ATXN2; (-) strand; PAM type: NRG; PAM sequence: GAG
ttttaccataagcaactctt

SEQ ID NO: 29939 - DNA, 20 bp, Artificial Sequence
  Description of Artificial Sequence: Synthetic oligonucleotide
  Target: ATXN2; (-) strand; PAM type: NRG; PAM sequence: AAG
cctcaaattccttttaccat

SEQ ID NO: 29940 - DNA, 20 bp, Artificial Sequence
  Description of Artificial Sequence: Synthetic oligonucleotide
  Target: ATXN2; (-) strand; PAM type: NRG; PAM sequence: TAG
ttttaggctctagggccata

SEQ ID NO: 29941 - DNA, 20 bp, Artificial Sequence
  Description of Artificial Sequence: Synthetic oligonucleotide
  Target: ATXN2; (-) strand; PAM type: NRG; PAM sequence: GGG
aataagtattttaggctcta

SEQ ID NO: 29942 - DNA, 20 bp, Artificial Sequence
  Description of Artificial Sequence: Synthetic oligonucleotide
  Target: ATXN2; (-) strand; PAM type: NRG; PAM sequence: AGG
taataagtattttaggctct

SEQ ID NO: 29943 - DNA, 20 bp, Artificial Sequence
  Description of Artificial Sequence: Synthetic oligonucleotide
  Target: ATXN2; (-) strand; PAM type: NRG; PAM sequence: TAG
gtaataagtattttaggctc

SEQ ID NO: 29944 - DNA, 20 bp, Artificial Sequence
  Description of Artificial Sequence: Synthetic oligonucleotide
  Target: ATXN2; (-) strand; PAM type: NRG; PAM sequence: AGG
tctcaggtaataagtatttt

SEQ ID NO: 29945 - DNA, 20 bp, Artificial Sequence
  Description of Artificial Sequence: Synthetic oligonucleotide
  Target: ATXN2; (-) strand; PAM type: NRG; PAM sequence: TAG
gtctcaggtaataagtattt

SEQ ID NO: 29946 - DNA, 20 bp, Artificial Sequence
  Description of Artificial Sequence: Synthetic oligonucleotide
  Target: ATXN2; (-) strand; PAM type: NRG; PAM sequence: AAG
tatgtaaagtctcaggtaat

SEQ ID NO: 29947 - DNA, 20 bp, Artificial Sequence
  Description of Artificial Sequence: Synthetic oligonucleotide
  Target: ATXN2; (-) strand; PAM type: NRG; PAM sequence: AGG
aactttttatgtaaagtctc

SEQ ID NO: 29948 - DNA, 20 bp, Artificial Sequence
  Description of Artificial Sequence: Synthetic oligonucleotide
  Target: ATXN2; (-) strand; PAM type: NRG; PAM sequence: CAG
aaactttttatgtaaagtct

SEQ ID NO: 29949 - DNA, 20 bp, Artificial Sequence
  Description of Artificial Sequence: Synthetic oligonucleotide
  Target: ATXN2; (-) strand; PAM type: NRG; PAM sequence: AAG
atgggcaaactttttatgta

SEQ ID NO: 29950 - DNA, 20 bp, Artificial Sequence
  Description of Artificial Sequence: Synthetic oligonucleotide
  Target: ATXN2; (-) strand; PAM type: NRG; PAM sequence: GGG
tttttcttcagtgtgaggat

SEQ ID NO: 29951 - DNA, 20 bp, Artificial Sequence
  Description of Artificial Sequence: Synthetic oligonucleotide
  Target: ATXN2; (-) strand; PAM type: NRG; PAM sequence: TGG
ttttttcttcagtgtgagga

SEQ ID NO: 29952 - DNA, 20 bp, Artificial Sequence
  Description of Artificial Sequence: Synthetic oligonucleotide
  Target: ATXN2; (-) strand; PAM type: NRG; PAM sequence: AGG
ttttttttttcttcagtgtg

SEQ ID NO: 29953 - DNA, 20 bp, Artificial Sequence
  Description of Artificial Sequence: Synthetic oligonucleotide
  Target: ATXN2; (-) strand; PAM type: NRG; PAM sequence: GAG
tttttttttttcttcagtgt

SEQ ID NO: 29954 - DNA, 20 bp, Artificial Sequence
  Description of Artificial Sequence: Synthetic oligonucleotide
  Target: ATXN2; (-) strand; PAM type: NRG; PAM sequence: CAG
gctatgtttttttttttctt

SEQ ID NO: 29955 - DNA, 20 bp, Artificial Sequence
  Description of Artificial Sequence: Synthetic oligonucleotide
  Target: ATXN2; (-) strand; PAM type: NRG; PAM sequence: CAG
taattgttgtattgctgttg

SEQ ID NO: 29956 - DNA, 20 bp, Artificial Sequence
  Description of Artificial Sequence: Synthetic oligonucleotide
  Target: ATXN2; (-) strand; PAM type: NRG; PAM sequence: TGG
acaggctgcacctctgcacc

SEQ ID NO: 29957 - DNA, 20 bp, Artificial Sequence
  Description of Artificial Sequence: Synthetic oligonucleotide
  Target: ATXN2; (-) strand; PAM type: NRG; PAM sequence: AGG
ttttgagtagctgagactac

SEQ ID NO: 29958 - DNA, 20 bp, Artificial Sequence
  Description of Artificial Sequence: Synthetic oligonucleotide
  Target: ATXN2; (-) strand; PAM type: NRG; PAM sequence: CAG
cttttgagtagctgagacta

SEQ ID NO: 29959 - DNA, 20 bp, Artificial Sequence
  Description of Artificial Sequence: Synthetic oligonucleotide
  Target: ATXN2; (-) strand; PAM type: NRG; PAM sequence: GAG
cctgagccttttgagtagct

SEQ ID NO: 29960 - DNA, 20 bp, Artificial Sequence
  Description of Artificial Sequence: Synthetic oligonucleotide
  Target: ATXN2; (-) strand; PAM type: NRG; PAM sequence: TAG
tctcacctgagccttttgag

SEQ ID NO: 29961 - DNA, 20 bp, Artificial Sequence
  Description of Artificial Sequence: Synthetic oligonucleotide
  Target: ATXN2; (-) strand; PAM type: NRG; PAM sequence: GAG
tcctctcacctgagcctttt

SEQ ID NO: 29962 - DNA, 20 bp, Artificial Sequence
  Description of Artificial Sequence: Synthetic oligonucleotide
  Target: ATXN2; (-) strand; PAM type: NRG; PAM sequence: GAG
ctcaagcgatcctctcacct

SEQ ID NO: 29963 - DNA, 20 bp, Artificial Sequence
  Description of Artificial Sequence: Synthetic oligonucleotide
  Target: ATXN2; (-) strand; PAM type: NRG; PAM sequence: AAG
ggcctttaattcctgggctc

SEQ ID NO: 29964 - DNA, 20 bp, Artificial Sequence
  Description of Artificial Sequence: Synthetic oligonucleotide
  Target: ATXN2; (-) strand; PAM type: NRG; PAM sequence: GGG
cagactggcctttaattcct

SEQ ID NO: 29965 - DNA, 20 bp, Artificial Sequence
  Description of Artificial Sequence: Synthetic oligonucleotide
  Target: ATXN2; (-) strand; PAM type: NRG; PAM sequence: TGG
ccagactggcctttaattcc

SEQ ID NO: 29966 - DNA, 20 bp, Artificial Sequence
  Description of Artificial Sequence: Synthetic oligonucleotide
  Target: ATXN2; (-) strand; PAM type: NRG; PAM sequence: TGG
tcttgtaacgttgcccagac

SEQ ID NO: 29967 - DNA, 20 bp, Artificial Sequence
  Description of Artificial Sequence: Synthetic oligonucleotide
  Target: ATXN2; (-) strand; PAM type: NRG; PAM sequence: CAG
cagggtcttgtaacgttgcc

SEQ ID NO: 29968 - DNA, 20 bp, Artificial Sequence
  Description of Artificial Sequence: Synthetic oligonucleotide
  Target: ATXN2; (-) strand; PAM type: NRG; PAM sequence: GGG
ctttcagtttttaaaagaca

SEQ ID NO: 29969 - DNA, 20 bp, Artificial Sequence
  Description of Artificial Sequence: Synthetic oligonucleotide
  Target: ATXN2; (-) strand; PAM type: NRG; PAM sequence: AGG
tctttcagtttttaaaagac

SEQ ID NO: 29970 - DNA, 20 bp, Artificial Sequence
  Description of Artificial Sequence: Synthetic oligonucleotide
  Target: ATXN2; (-) strand; PAM type: NRG; PAM sequence: CAG
atctttcagtttttaaaaga

SEQ ID NO: 29971 - DNA, 20 bp, Artificial Sequence
  Description of Artificial Sequence: Synthetic oligonucleotide
  Target: ATXN2; (-) strand; PAM type: NRG; PAM sequence: AAG
ctttatctttcagtttttaa

SEQ ID NO: 29972 - DNA, 20 bp, Artificial Sequence
  Description of Artificial Sequence: Synthetic oligonucleotide
  Target: ATXN2; (-) strand; PAM type: NRG; PAM sequence: CAG
taataaacaactttatcttt

SEQ ID NO: 29973 - DNA, 20 bp, Artificial Sequence
  Description of Artificial Sequence: Synthetic oligonucleotide
  Target: ATXN2; (-) strand; PAM type: NRG; PAM sequence: TAG
gaaatgcccccatgcagaag

SEQ ID NO: 29974 - DNA, 20 bp, Artificial Sequence
  Description of Artificial Sequence: Synthetic oligonucleotide
  Target: ATXN2; (-) strand; PAM type: NRG; PAM sequence: AAG
ccagaaatgcccccatgcag

SEQ ID NO: 29975 - DNA, 20 bp, Artificial Sequence
  Description of Artificial Sequence: Synthetic oligonucleotide
  Target: ATXN2; (-) strand; PAM type: NRG; PAM sequence: CAG
ttaccagaaatgcccccatg

SEQ ID NO: 29976 - DNA, 20 bp, Artificial Sequence
  Description of Artificial Sequence: Synthetic oligonucleotide
  Target: ATXN2; (-) strand; PAM type: NRG; PAM sequence: CAG
gcaggttttccagtctttac

SEQ ID NO: 29977 - DNA, 20 bp, Artificial Sequence
  Description of Artificial Sequence: Synthetic oligonucleotide
  Target: ATXN2; (-) strand; PAM type: NRG; PAM sequence: CAG
aatttgtctagcaggttttc

SEQ ID NO: 29978 - DNA, 20 bp, Artificial Sequence
  Description of Artificial Sequence: Synthetic oligonucleotide
  Target: ATXN2; (-) strand; PAM type: NRG; PAM sequence: AGG
tcttacagaatttgtctagc

SEQ ID NO: 29979 - DNA, 20 bp, Artificial Sequence
  Description of Artificial Sequence: Synthetic oligonucleotide
  Target: ATXN2; (-) strand; PAM type: NRG; PAM sequence: CAG
ctcttacagaatttgtctag

SEQ ID NO: 29980 - DNA, 20 bp, Artificial Sequence
  Description of Artificial Sequence: Synthetic oligonucleotide
  Target: ATXN2; (-) strand; PAM type: NRG; PAM sequence: TAG
cagctcttacagaatttgtc

SEQ ID NO: 29981 - DNA, 20 bp, Artificial Sequence
  Description of Artificial Sequence: Synthetic oligonucleotide
  Target: ATXN2; (-) strand; PAM type: NRG; PAM sequence: CAG
ctggagtgttgcagctctta

SEQ ID NO: 29982 - DNA, 20 bp, Artificial Sequence
  Description of Artificial Sequence: Synthetic oligonucleotide
  Target: ATXN2; (-) strand; PAM type: NRG; PAM sequence: CAG
aaagaagtactggagtgttg

SEQ ID NO: 29983 - DNA, 20 bp, Artificial Sequence
  Description of Artificial Sequence: Synthetic oligonucleotide
  Target: ATXN2; (-) strand; PAM type: NRG; PAM sequence: GAG
aaaagagaaaagaagtactg

SEQ ID NO: 29984 - DNA, 20 bp, Artificial Sequence
  Description of Artificial Sequence: Synthetic oligonucleotide
  Target: ATXN2; (-) strand; PAM type: NRG; PAM sequence: TGG
acaaaagagaaaagaagtac

SEQ ID NO: 29985 - DNA, 20 bp, Artificial Sequence
  Description of Artificial Sequence: Synthetic oligonucleotide
  Target: ATXN2; (-) strand; PAM type: NRG; PAM sequence: AAG
atctctacaaaagagaaaag

SEQ ID NO: 29986 - DNA, 20 bp, Artificial Sequence
  Description of Artificial Sequence: Synthetic oligonucleotide
  Target: ATXN2; (-) strand; PAM type: NRG; PAM sequence: AAG
cccatctctacaaaagagaa

SEQ ID NO: 29987 - DNA, 20 bp, Artificial Sequence
  Description of Artificial Sequence: Synthetic oligonucleotide
  Target: ATXN2; (-) strand; PAM type: NRG; PAM sequence: GAG
gcgaccccatctctacaaaa

SEQ ID NO: 29988 - DNA, 20 bp, Artificial Sequence
  Description of Artificial Sequence: Synthetic oligonucleotide
  Target: ATXN2; (-) strand; PAM type: NRG; PAM sequence: AAG
gtgcgaccccatctctacaa

SEQ ID NO: 29989 - DNA, 20 bp, Artificial Sequence
  Description of Artificial Sequence: Synthetic oligonucleotide
  Target: ATXN2; (-) strand; PAM type: NRG; PAM sequence: TAG
ggagaccagcttgggcaata

SEQ ID NO: 29990 - DNA, 20 bp, Artificial Sequence
  Description of Artificial Sequence: Synthetic oligonucleotide
  Target: ATXN2; (-) strand; PAM type: NRG; PAM sequence: GGG
caggagctggagaccagctt

SEQ ID NO: 29991 - DNA, 20 bp, Artificial Sequence
  Description of Artificial Sequence: Synthetic oligonucleotide
  Target: ATXN2; (-) strand; PAM type: NRG; PAM sequence: TGG
tcaggagctggagaccagct

SEQ ID NO: 29992 - DNA, 20 bp, Artificial Sequence
  Description of Artificial Sequence: Synthetic oligonucleotide
  Target: ATXN2; (-) strand; PAM type: NRG; PAM sequence: CAG
tgagttcaggagctggagac

SEQ ID NO: 29993 - DNA, 20 bp, Artificial Sequence
  Description of Artificial Sequence: Synthetic oligonucleotide
  Target: ATXN2; (-) strand; PAM type: NRG; PAM sequence: GAG
tcacttgagttcaggagctg

SEQ ID NO: 29994 - DNA, 20 bp, Artificial Sequence
  Description of Artificial Sequence: Synthetic oligonucleotide
  Target: ATXN2; (-) strand; PAM type: NRG; PAM sequence: TGG
gatcacttgagttcaggagc

SEQ ID NO: 29995 - DNA, 20 bp, Artificial Sequence
  Description of Artificial Sequence: Synthetic oligonucleotide
  Target: ATXN2; (-) strand; PAM type: NRG; PAM sequence: GAG
ggaggatcacttgagttcag

SEQ ID NO: 29996 - DNA, 20 bp, Artificial Sequence
  Description of Artificial Sequence: Synthetic oligonucleotide
  Target: ATXN2; (-) strand; PAM type: NRG; PAM sequence: AGG
taggaggatcacttgagttc

SEQ ID NO: 29997 - DNA, 20 bp, Artificial Sequence
  Description of Artificial Sequence: Synthetic oligonucleotide
  Target: ATXN2; (-) strand; PAM type: NRG; PAM sequence: CAG
gtaggaggatcacttgagtt

SEQ ID NO: 29998 - DNA, 20 bp, Artificial Sequence
  Description of Artificial Sequence: Synthetic oligonucleotide
  Target: ATXN2; (-) strand; PAM type: NRG; PAM sequence: GAG
ctgaggtaggaggatcactt

SEQ ID NO: 29999 - DNA, 20 bp, Artificial Sequence
  Description of Artificial Sequence: Synthetic oligonucleotide
  Target: ATXN2; (-) strand; PAM type: NRG; PAM sequence: AGG
ctttgggaggctgaggtagg

SEQ ID NO: 30000 - DNA, 20 bp, Artificial Sequence
  Description of Artificial Sequence: Synthetic oligonucleotide
  Target: ATXN2; (-) strand; PAM type: NRG; PAM sequence: GAG
actttgggaggctgaggtag

SEQ ID NO: 30001 - DNA, 20 bp, Artificial Sequence
  Description of Artificial Sequence: Synthetic oligonucleotide
  Target: ATXN2; (-) strand; PAM type: NRG; PAM sequence: AGG
gcactttgggaggctgaggt

SEQ ID NO: 30002 - DNA, 20 bp, Artificial Sequence
  Description of Artificial Sequence: Synthetic oligonucleotide
  Target: ATXN2; (-) strand; PAM type: NRG; PAM sequence: TAG
agcactttgggaggctgagg

SEQ ID NO: 30003 - DNA, 20 bp, Artificial Sequence
  Description of Artificial Sequence: Synthetic oligonucleotide
  Target: ATXN2; (-) strand; PAM type: NRG; PAM sequence: AGG
cccagcactttgggaggctg

SEQ ID NO: 30004 - DNA, 20 bp, Artificial Sequence
  Description of Artificial Sequence: Synthetic oligonucleotide
  Target: ATXN2; (-) strand; PAM type: NRG; PAM sequence: GAG
tcccagcactttgggaggct

SEQ ID NO: 30005 - DNA, 20 bp, Artificial Sequence
  Description of Artificial Sequence: Synthetic oligonucleotide
  Target: ATXN2; (-) strand; PAM type: NRG; PAM sequence: AGG
tgtaatcccagcactttggg

SEQ ID NO: 30006 - DNA, 20 bp, Artificial Sequence
  Description of Artificial Sequence: Synthetic oligonucleotide
  Target: ATXN2; (-) strand; PAM type: NRG; PAM sequence: GAG
ctgtaatcccagcactttgg

SEQ ID NO: 30007 - DNA, 20 bp, Artificial Sequence
  Description of Artificial Sequence: Synthetic oligonucleotide
  Target: ATXN2; (-) strand; PAM type: NRG; PAM sequence: GGG
gcctgtaatcccagcacttt

SEQ ID NO: 30008 - DNA, 20 bp, Artificial Sequence
  Description of Artificial Sequence: Synthetic oligonucleotide
  Target: ATXN2; (-) strand; PAM type: NRG; PAM sequence: TGG
tgcctgtaatcccagcactt

SEQ ID NO: 30009 - DNA, 20 bp, Artificial Sequence
  Description of Artificial Sequence: Synthetic oligonucleotide
  Target: ATXN2; (-) strand; PAM type: NRG; PAM sequence: CAG
gtgtcttatgcctgtaatcc

SEQ ID NO: 30010 - DNA, 20 bp, Artificial Sequence
  Description of Artificial Sequence: Synthetic oligonucleotide
  Target: ATXN2; (-) strand; PAM type: NRG; PAM sequence: TGG
gaagtactggaggctaggca

SEQ ID NO: 30011 - DNA, 20 bp, Artificial Sequence
  Description of Artificial Sequence: Synthetic oligonucleotide
  Target: ATXN2; (-) strand; PAM type: NRG; PAM sequence: AGG
ttttagaagtactggaggct

SEQ ID NO: 30012 - DNA, 20 bp, Artificial Sequence
  Description of Artificial Sequence: Synthetic oligonucleotide
  Target: ATXN2; (-) strand; PAM type: NRG; PAM sequence: TAG
attttagaagtactggaggc

SEQ ID NO: 30013 - DNA, 20 bp, Artificial Sequence
  Description of Artificial Sequence: Synthetic oligonucleotide
  Target: ATXN2; (-) strand; PAM type: NRG; PAM sequence: AGG
gtttattttagaagtactgg

SEQ ID NO: 30014 - DNA, 20 bp, Artificial Sequence
  Description of Artificial Sequence: Synthetic oligonucleotide
  Target: ATXN2; (-) strand; PAM type: NRG; PAM sequence: GAG
agtttattttagaagtactg

SEQ ID NO: 30015 - DNA, 20 bp, Artificial Sequence
  Description of Artificial Sequence: Synthetic oligonucleotide
  Target: ATXN2; (-) strand; PAM type: NRG; PAM sequence: TGG
gcagtttattttagaagtac

SEQ ID NO: 30016 - DNA, 20 bp, Artificial Sequence
  Description of Artificial Sequence: Synthetic oligonucleotide
  Target: ATXN2; (-) strand; PAM type: NRG; PAM sequence: AAG
tatccagcagtttattttag

SEQ ID NO: 30017 - DNA, 20 bp, Artificial Sequence
  Description of Artificial Sequence: Synthetic oligonucleotide
  Target: ATXN2; (-) strand; PAM type: NRG; PAM sequence: TAG
tgctatccagcagtttattt

SEQ ID NO: 30018 - DNA, 20 bp, Artificial Sequence
  Description of Artificial Sequence: Synthetic oligonucleotide
  Target: ATXN2; (-) strand; PAM type: NRG; PAM sequence: CAG
aataatttaatgctatccag

SEQ ID NO: 30019 - DNA, 20 bp, Artificial Sequence
  Description of Artificial Sequence: Synthetic oligonucleotide
  Target: ATXN2; (-) strand; PAM type: NRG; PAM sequence: CAG
gaaaataatttaatgctatc

SEQ ID NO: 30020 - DNA, 20 bp, Artificial Sequence
  Description of Artificial Sequence: Synthetic oligonucleotide
  Target: ATXN2; (-) strand; PAM type: NRG; PAM sequence: GGG
attacttaaaggagaatatg

SEQ ID NO: 30021 - DNA, 20 bp, Artificial Sequence
  Description of Artificial Sequence: Synthetic oligonucleotide
  Target: ATXN2; (-) strand; PAM type: NRG; PAM sequence: GGG
cattacttaaaggagaatat

SEQ ID NO: 30022 - DNA, 20 bp, Artificial Sequence
  Description of Artificial Sequence: Synthetic oligonucleotide
  Target: ATXN2; (-) strand; PAM type: NRG; PAM sequence: TGG
gcattacttaaaggagaata

SEQ ID NO: 30023 - DNA, 20 bp, Artificial Sequence
  Description of Artificial Sequence: Synthetic oligonucleotide
  Target: ATXN2; (-) strand; PAM type: NRG; PAM sequence: GAG
atataaagcattacttaaag

SEQ ID NO: 30024 - DNA, 20 bp, Artificial Sequence
  Description of Artificial Sequence: Synthetic oligonucleotide
  Target: ATXN2; (-) strand; PAM type: NRG; PAM sequence: AGG
taatataaagcattacttaa

SEQ ID NO: 30025 - DNA, 20 bp, Artificial Sequence
  Description of Artificial Sequence: Synthetic oligonucleotide
  Target: ATXN2; (-) strand; PAM type: NRG; PAM sequence: AAG
ttaatataaagcattactta

SEQ ID NO: 30026 - DNA, 20 bp, Artificial Sequence
  Description of Artificial Sequence: Synthetic oligonucleotide
  Target: ATXN2; (-) strand; PAM type: NRG; PAM sequence: AAG
caacctcaaattttaatata

SEQ ID NO: 30027 - DNA, 20 bp, Artificial Sequence
  Description of Artificial Sequence: Synthetic oligonucleotide
  Target: ATXN2; (-) strand; PAM type: NRG; PAM sequence: TGG
acgttttttttttcagtagg

SEQ ID NO: 30028 - DNA, 20 bp, Artificial Sequence
  Description of Artificial Sequence: Synthetic oligonucleotide
  Target: ATXN2; (-) strand; PAM type: NRG; PAM sequence: AGG
aatacgttttttttttcagt

SEQ ID NO: 30029 - DNA, 20 bp, Artificial Sequence
  Description of Artificial Sequence: Synthetic oligonucleotide
  Target: ATXN2; (-) strand; PAM type: NRG; PAM sequence: TAG
aaatacgttttttttttcag

SEQ ID NO: 30030 - DNA, 20 bp, Artificial Sequence
  Description of Artificial Sequence: Synthetic oligonucleotide
  Target: ATXN2; (-) strand; PAM type: NRG; PAM sequence: CAG
gtaaaatacgtttttttttt

SEQ ID NO: 30031 - DNA, 20 bp, Artificial Sequence
  Description of Artificial Sequence: Synthetic oligonucleotide
  Target: ATXN2; (-) strand; PAM type: NRG; PAM sequence: TAG
tattgccatcacatgtacac

SEQ ID NO: 30032 - DNA, 20 bp, Artificial Sequence
  Description of Artificial Sequence: Synthetic oligonucleotide
  Target: ATXN2; (-) strand; PAM type: NRG; PAM sequence: AGG
aagcaaagcagaataaaatg

SEQ ID NO: 30033 - DNA, 20 bp, Artificial Sequence
  Description of Artificial Sequence: Synthetic oligonucleotide
  Target: ATXN2; (-) strand; PAM type: NRG; PAM sequence: GAG
aaagcaaagcagaataaaat

SEQ ID NO: 30034 - DNA, 20 bp, Artificial Sequence
  Description of Artificial Sequence: Synthetic oligonucleotide
  Target: ATXN2; (-) strand; PAM type: NRG; PAM sequence: CAG
tgaatttcaataaagcaaag

SEQ ID NO: 30035 - DNA, 20 bp, Artificial Sequence
  Description of Artificial Sequence: Synthetic oligonucleotide
  Target: ATXN2; (-) strand; PAM type: NRG; PAM sequence: AAG
ctgtgaatttcaataaagca

SEQ ID NO: 30036 - DNA, 20 bp, Artificial Sequence
  Description of Artificial Sequence: Synthetic oligonucleotide
  Target: ATXN2; (-) strand; PAM type: NRG; PAM sequence: AAG
agcatctgtgaatttcaata

SEQ ID NO: 30037 - DNA, 20 bp, Artificial Sequence
  Description of Artificial Sequence: Synthetic oligonucleotide
  Target: ATXN2; (-) strand; PAM type: NRG; PAM sequence: CAG
cggtcagcttgtcaaaaatg

SEQ ID NO: 30038 - DNA, 20 bp, Artificial Sequence
  Description of Artificial Sequence: Synthetic oligonucleotide
  Target: ATXN2; (-) strand; PAM type: NRG; PAM sequence: CAG
tcggggtttccacagacggt

SEQ ID NO: 30039 - DNA, 20 bp, Artificial Sequence
  Description of Artificial Sequence: Synthetic oligonucleotide
  Target: ATXN2; (-) strand; PAM type: NRG; PAM sequence: CGG
cgactcggggtttccacaga

SEQ ID NO: 30040 - DNA, 20 bp, Artificial Sequence
  Description of Artificial Sequence: Synthetic oligonucleotide
  Target: ATXN2; (-) strand; PAM type: NRG; PAM sequence: CAG
tgcccgactcggggtttcca

SEQ ID NO: 30041 - DNA, 20 bp, Artificial Sequence
  Description of Artificial Sequence: Synthetic oligonucleotide
  Target: ATXN2; (-) strand; PAM type: NRG; PAM sequence: GGG
taatggacttgcccgactcg

SEQ ID NO: 30042 - DNA, 20 bp, Artificial Sequence
  Description of Artificial Sequence: Synthetic oligonucleotide
  Target: ATXN2; (-) strand; PAM type: NRG; PAM sequence: GGG
ctaatggacttgcccgactc

SEQ ID NO: 30043 - DNA, 20 bp, Artificial Sequence
  Description of Artificial Sequence: Synthetic oligonucleotide
  Target: ATXN2; (-) strand; PAM type: NRG; PAM sequence: CGG
actaatggacttgcccgact

SEQ ID NO: 30044 - DNA, 20 bp, Artificial Sequence
  Description of Artificial Sequence: Synthetic oligonucleotide
  Target: ATXN2; (-) strand; PAM type: NRG; PAM sequence: TGG
tactggaaatacggcactaa

SEQ ID NO: 30045 - DNA, 20 bp, Artificial Sequence
  Description of Artificial Sequence: Synthetic oligonucleotide
  Target: ATXN2; (-) strand; PAM type: NRG; PAM sequence: CGG
agcacatgttactggaaata

SEQ ID NO: 30046 - DNA, 20 bp, Artificial Sequence
  Description of Artificial Sequence: Synthetic oligonucleotide
  Target: ATXN2; (-) strand; PAM type: NRG; PAM sequence: TGG
gcaaagagagcacatgttac

SEQ ID NO: 30047 - DNA, 20 bp, Artificial Sequence
  Description of Artificial Sequence: Synthetic oligonucleotide
  Target: ATXN2; (-) strand; PAM type: NRG; PAM sequence: GAG
atgtgacacaggcgcaaaga

SEQ ID NO: 30048 - DNA, 20 bp, Artificial Sequence
  Description of Artificial Sequence: Synthetic oligonucleotide
  Target: ATXN2; (-) strand; PAM type: NRG; PAM sequence: GAG
gaatgtgacacaggcgcaaa

SEQ ID NO: 30049 - DNA, 20 bp, Artificial Sequence
  Description of Artificial Sequence: Synthetic oligonucleotide
  Target: ATXN2; (-) strand; PAM type: NRG; PAM sequence: AAG
gagaatgtgacacaggcgca

SEQ ID NO: 30050 - DNA, 20 bp, Artificial Sequence
  Description of Artificial Sequence: Synthetic oligonucleotide
  Target: ATXN2; (-) strand; PAM type: NRG; PAM sequence: AGG
gatttatgagaatgtgacac

SEQ ID NO: 30051 - DNA, 20 bp, Artificial Sequence
  Description of Artificial Sequence: Synthetic oligonucleotide
  Target: ATXN2; (-) strand; PAM type: NRG; PAM sequence: CAG
agatttatgagaatgtgaca

SEQ ID NO: 30052 - DNA, 20 bp, Artificial Sequence
  Description of Artificial Sequence: Synthetic oligonucleotide
  Target: ATXN2; (-) strand; PAM type: NRG; PAM sequence: GAG
gaaaatattgtgagatttat

SEQ ID NO: 30053 - DNA, 20 bp, Artificial Sequence
  Description of Artificial Sequence: Synthetic oligonucleotide
  Target: ATXN2; (-) strand; PAM type: NRG; PAM sequence: GAG
gaaaagtttgaaaatattgt

SEQ ID NO: 30054 - DNA, 20 bp, Artificial Sequence
  Description of Artificial Sequence: Synthetic oligonucleotide
  Target: ATXN2; (-) strand; PAM type: NRG; PAM sequence: AAG
cgtatacaataatagtggaa

SEQ ID NO: 30055 - DNA, 20 bp, Artificial Sequence
  Description of Artificial Sequence: Synthetic oligonucleotide
  Target: ATXN2; (-) strand; PAM type: NRG; PAM sequence: TGG
tataacgtatacaataatag

SEQ ID NO: 30056 - DNA, 20 bp, Artificial Sequence
  Description of Artificial Sequence: Synthetic oligonucleotide
  Target: ATXN2; (-) strand; PAM type: NRG; PAM sequence: TAG
tactataacgtatacaataa

SEQ ID NO: 30057 - DNA, 20 bp, Artificial Sequence
  Description of Artificial Sequence: Synthetic oligonucleotide
  Target: ATXN2; (-) strand; PAM type: NRG; PAM sequence: CAG
tgtaaaatacaatctgatta

SEQ ID NO: 30058 - DNA, 20 bp, Artificial Sequence
  Description of Artificial Sequence: Synthetic oligonucleotide
  Target: ATXN2; (-) strand; PAM type: NRG; PAM sequence: CAG
ctgattacagattactataa

SEQ ID NO: 30059 - DNA, 20 bp, Artificial Sequence
  Description of Artificial Sequence: Synthetic oligonucleotide
  Target: ATXN2; (-) strand; PAM type: NRG; PAM sequence: CAG
acatcaacgattactgatta

SEQ ID NO: 30060 - DNA, 20 bp, Artificial Sequence
  Description of Artificial Sequence: Synthetic oligonucleotide
  Target: ATXN2; (-) strand; PAM type: NRG; PAM sequence: GGG
tggtgccttaaaagaaatca

SEQ ID NO: 30061 - DNA, 20 bp, Artificial Sequence
  Description of Artificial Sequence: Synthetic oligonucleotide
  Target: ATXN2; (-) strand; PAM type: NRG; PAM sequence: AGG
gtggtgccttaaaagaaatc

SEQ ID NO: 30062 - DNA, 20 bp, Artificial Sequence
  Description of Artificial Sequence: Synthetic oligonucleotide
  Target: ATXN2; (-) strand; PAM type: NRG; PAM sequence: CAG
tgtggtgccttaaaagaaat

SEQ ID NO: 30063 - DNA, 20 bp, Artificial Sequence
  Description of Artificial Sequence: Synthetic oligonucleotide
  Target: ATXN2; (-) strand; PAM type: NRG; PAM sequence: AAG
gaccgtttgtggtgccttaa

SEQ ID NO: 30064 - DNA, 20 bp, Artificial Sequence
  Description of Artificial Sequence: Synthetic oligonucleotide
  Target: ATXN2; (-) strand; PAM type: NRG; PAM sequence: TGG
tgtcttatatggaccgtttg

SEQ ID NO: 30065 - DNA, 20 bp, Artificial Sequence
  Description of Artificial Sequence: Synthetic oligonucleotide
  Target: ATXN2; (-) strand; PAM type: NRG; PAM sequence: TGG
attaagattgctgtcttata

SEQ ID NO: 30066 - DNA, 20 bp, Artificial Sequence
  Description of Artificial Sequence: Synthetic oligonucleotide
  Target: ATXN2; (-) strand; PAM type: NRG; PAM sequence: AAG
cataacacacaacatttatt

SEQ ID NO: 30067 - DNA, 20 bp, Artificial Sequence
  Description of Artificial Sequence: Synthetic oligonucleotide
  Target: ATXN2; (-) strand; PAM type: NRG; PAM sequence: TAG
ctgactgctggttcgtggag

SEQ ID NO: 30068 - DNA, 20 bp, Artificial Sequence
  Description of Artificial Sequence: Synthetic oligonucleotide
  Target: ATXN2; (-) strand; PAM type: NRG; PAM sequence: GAG
aagctgactgctggttcgtg

SEQ ID NO: 30069 - DNA, 20 bp, Artificial Sequence
  Description of Artificial Sequence: Synthetic oligonucleotide
  Target: ATXN2; (-) strand; PAM type: NRG; PAM sequence: TGG
acaagctgactgctggttcg

SEQ ID NO: 30070 - DNA, 20 bp, Artificial Sequence
  Description of Artificial Sequence: Synthetic oligonucleotide
  Target: ATXN2; (-) strand; PAM type: NRG; PAM sequence: TGG
aagagagacaagctgactgc

SEQ ID NO: 30071 - DNA, 20 bp, Artificial Sequence
  Description of Artificial Sequence: Synthetic oligonucleotide
  Target: ATXN2; (-) strand; PAM type: NRG; PAM sequence: AAG
gcacgaggagaaagagagac

SEQ ID NO: 30072 - DNA, 20 bp, Artificial Sequence
  Description of Artificial Sequence: Synthetic oligonucleotide
  Target: ATXN2; (-) strand; PAM type: NRG; PAM sequence: GAG
gagaggcacgaggagaaaga

SEQ ID NO: 30073 - DNA, 20 bp, Artificial Sequence
  Description of Artificial Sequence: Synthetic oligonucleotide
  Target: ATXN2; (-) strand; PAM type: NRG; PAM sequence: GAG
tagagaggcacgaggagaaa

SEQ ID NO: 30074 - DNA, 20 bp, Artificial Sequence
  Description of Artificial Sequence: Synthetic oligonucleotide
  Target: ATXN2; (-) strand; PAM type: NRG; PAM sequence: AAG
aatagagaggcacgaggaga

SEQ ID NO: 30075 - DNA, 20 bp, Artificial Sequence
  Description of Artificial Sequence: Synthetic oligonucleotide
  Target: ATXN2; (-) strand; PAM type: NRG; PAM sequence: GAG
agggaatagagaggcacgag

SEQ ID NO: 30076 - DNA, 20 bp, Artificial Sequence
  Description of Artificial Sequence: Synthetic oligonucleotide
  Target: ATXN2; (-) strand; PAM type: NRG; PAM sequence: AGG
tcagggaatagagaggcacg

SEQ ID NO: 30077 - DNA, 20 bp, Artificial Sequence
  Description of Artificial Sequence: Synthetic oligonucleotide
  Target: ATXN2; (-) strand; PAM type: NRG; PAM sequence: GAG
ctcagggaatagagaggcac

SEQ ID NO: 30078 - DNA, 20 bp, Artificial Sequence
  Description of Artificial Sequence: Synthetic oligonucleotide
  Target: ATXN2; (-) strand; PAM type: NRG; PAM sequence: AGG
ttatatctcagggaatagag

SEQ ID NO: 30079 - DNA, 20 bp, Artificial Sequence
  Description of Artificial Sequence: Synthetic oligonucleotide
  Target: ATXN2; (-) strand; PAM type: NRG; PAM sequence: GAG
gttatatctcagggaataga

SEQ ID NO: 30080 - DNA, 20 bp, Artificial Sequence
  Description of Artificial Sequence: Synthetic oligonucleotide
  Target: ATXN2; (-) strand; PAM type: NRG; PAM sequence: GAG
ttgttatatctcagggaata

SEQ ID NO: 30081 - DNA, 20 bp, Artificial Sequence
  Description of Artificial Sequence: Synthetic oligonucleotide
  Target: ATXN2; (-) strand; PAM type: NRG; PAM sequence: TAG
tattgttatatctcagggaa

SEQ ID NO: 30082 - DNA, 20 bp, Artificial Sequence
  Description of Artificial Sequence: Synthetic oligonucleotide
  Target: ATXN2; (-) strand; PAM type: NRG; PAM sequence: GGG
ttcaatattgttatatctca

SEQ ID NO: 30083 - DNA, 20 bp, Artificial Sequence
  Description of Artificial Sequence: Synthetic oligonucleotide
  Target: ATXN2; (-) strand; PAM type: NRG; PAM sequence: AGG
tttcaatattgttatatctc

SEQ ID NO: 30084 - DNA, 20 bp, Artificial Sequence
  Description of Artificial Sequence: Synthetic oligonucleotide
  Target: ATXN2; (-) strand; PAM type: NRG; PAM sequence: CAG
atttcaatattgttatatct

SEQ ID NO: 30085 - DNA, 20 bp, Artificial Sequence
  Description of Artificial Sequence: Synthetic oligonucleotide
  Target: ATXN2; (-) strand; PAM type: NRG; PAM sequence: TGG
gccactatgcctggcctaat

SEQ ID NO: 30086 - DNA, 20 bp, Artificial Sequence
  Description of Artificial Sequence: Synthetic oligonucleotide
  Target: ATXN2; (-) strand; PAM type: NRG; PAM sequence: TGG
taggtgtgagccactatgcc

SEQ ID NO: 30087 - DNA, 20 bp, Artificial Sequence
  Description of Artificial Sequence: Synthetic oligonucleotide
  Target: ATXN2; (-) strand; PAM type: NRG; PAM sequence: GAG
agtgctgggattgtaggtgt

SEQ ID NO: 30088 - DNA, 20 bp, Artificial Sequence
  Description of Artificial Sequence: Synthetic oligonucleotide
  Target: ATXN2; (-) strand; PAM type: NRG; PAM sequence: AGG
tcccaaagtgctgggattgt

SEQ ID NO: 30089 - DNA, 20 bp, Artificial Sequence
  Description of Artificial Sequence: Synthetic oligonucleotide
  Target: ATXN2; (-) strand; PAM type: NRG; PAM sequence: TAG
ctcccaaagtgctgggattg

SEQ ID NO: 30090 - DNA, 20 bp, Artificial Sequence
  Description of Artificial Sequence: Synthetic oligonucleotide
  Target: ATXN2; (-) strand; PAM type: NRG; PAM sequence: GGG
ccttggcctcccaaagtgct

SEQ ID NO: 30091 - DNA, 20 bp, Artificial Sequence
  Description of Artificial Sequence: Synthetic oligonucleotide
  Target: ATXN2; (-) strand; PAM type: NRG; PAM sequence: TGG
gccttggcctcccaaagtgc

SEQ ID NO: 30092 - DNA, 20 bp, Artificial Sequence
  Description of Artificial Sequence: Synthetic oligonucleotide
  Target: ATXN2; (-) strand; PAM type: NRG; PAM sequence: AAG
ccacctgccttggcctccca

SEQ ID NO: 30093 - DNA, 20 bp, Artificial Sequence
  Description of Artificial Sequence: Synthetic oligonucleotide
  Target: ATXN2; (-) strand; PAM type: NRG; PAM sequence: TGG
ttcaagtgatccacctgcct

SEQ ID NO: 30094 - DNA, 20 bp, Artificial Sequence
  Description of Artificial Sequence: Synthetic oligonucleotide
  Target: ATXN2; (-) strand; PAM type: NRG; PAM sequence: AAG
gggctcgaactcctggcttc

SEQ ID NO: 30095 - DNA, 20 bp, Artificial Sequence
  Description of Artificial Sequence: Synthetic oligonucleotide
  Target: ATXN2; (-) strand; PAM type: NRG; PAM sequence: TGG
ccaggctgggctcgaactcc

SEQ ID NO: 30096 - DNA, 20 bp, Artificial Sequence
  Description of Artificial Sequence: Synthetic oligonucleotide
  Target: ATXN2; (-) strand; PAM type: NRG; PAM sequence: GGG
ttcacgatgttggccaggct

SEQ ID NO: 30097 - DNA, 20 bp, Artificial Sequence
  Description of Artificial Sequence: Synthetic oligonucleotide
  Target: ATXN2; (-) strand; PAM type: NRG; PAM sequence: TGG
tttcacgatgttggccaggc

SEQ ID NO: 30098 - DNA, 20 bp, Artificial Sequence
  Description of Artificial Sequence: Synthetic oligonucleotide
  Target: ATXN2; (-) strand; PAM type: NRG; PAM sequence: AGG
ggggtttcacgatgttggcc

SEQ ID NO: 30099 - DNA, 20 bp, Artificial Sequence
  Description of Artificial Sequence: Synthetic oligonucleotide
  Target: ATXN2; (-) strand; PAM type: NRG; PAM sequence: CAG
tggggtttcacgatgttggc

SEQ ID NO: 30100 - DNA, 20 bp, Artificial Sequence
  Description of Artificial Sequence: Synthetic oligonucleotide
  Target: ATXN2; (-) strand; PAM type: NRG; PAM sequence: TGG
gagatggggtttcacgatgt

SEQ ID NO: 30101 - DNA, 20 bp, Artificial Sequence
  Description of Artificial Sequence: Synthetic oligonucleotide
  Target: ATXN2; (-) strand; PAM type: NRG; PAM sequence: GGG
ttgtatttttagtagagatg

SEQ ID NO: 30102 - DNA, 20 bp, Artificial Sequence
  Description of Artificial Sequence: Synthetic oligonucleotide
  Target: ATXN2; (-) strand; PAM type: NRG; PAM sequence: GGG
tttgtatttttagtagagat

SEQ ID NO: 30103 - DNA, 20 bp, Artificial Sequence
  Description of Artificial Sequence: Synthetic oligonucleotide
  Target: ATXN2; (-) strand; PAM type: NRG; PAM sequence: TGG
ttttgtatttttagtagaga

SEQ ID NO: 30104 - DNA, 20 bp, Artificial Sequence
  Description of Artificial Sequence: Synthetic oligonucleotide
  Target: ATXN2; (-) strand; PAM type: NRG; PAM sequence: GAG
taatttttgtatttttagta

SEQ ID NO: 30105 - DNA, 20 bp, Artificial Sequence
  Description of Artificial Sequence: Synthetic oligonucleotide
  Target: ATXN2; (-) strand; PAM type: NRG; PAM sequence: TAG
gctaatttttgtatttttag

SEQ ID NO: 30106 - DNA, 20 bp, Artificial Sequence
  Description of Artificial Sequence: Synthetic oligonucleotide
  Target: ATXN2; (-) strand; PAM type: NRG; PAM sequence: TAG
ctggctaatttttgtatttt

SEQ ID NO: 30107 - DNA, 20 bp, Artificial Sequence
  Description of Artificial Sequence: Synthetic oligonucleotide
  Target: ATXN2; (-) strand; PAM type: NRG; PAM sequence: TGG
caggcgcccaccaccacgtc

SEQ ID NO: 30108 - DNA, 20 bp, Artificial Sequence
  Description of Artificial Sequence: Synthetic oligonucleotide
  Target: ATXN2; (-) strand; PAM type: NRG; PAM sequence: AGG
tactgagtagctgggattac

SEQ ID NO: 30109 - DNA, 20 bp, Artificial Sequence
  Description of Artificial Sequence: Synthetic oligonucleotide
  Target: ATXN2; (-) strand; PAM type: NRG; PAM sequence: CAG
ttactgagtagctgggatta

SEQ ID NO: 30110 - DNA, 20 bp, Artificial Sequence
  Description of Artificial Sequence: Synthetic oligonucleotide
  Target: ATXN2; (-) strand; PAM type: NRG; PAM sequence: GGG
cctcagcttactgagtagct

SEQ ID NO: 30111 - DNA, 20 bp, Artificial Sequence
  Description of Artificial Sequence: Synthetic oligonucleotide
  Target: ATXN2; (-) strand; PAM type: NRG; PAM sequence: TGG
gcctcagcttactgagtagc

SEQ ID NO: 30112 - DNA, 20 bp, Artificial Sequence
  Description of Artificial Sequence: Synthetic oligonucleotide
  Target: ATXN2; (-) strand; PAM type: NRG; PAM sequence: TAG
tcgtgcctcagcttactgag

SEQ ID NO: 30113 - DNA, 20 bp, Artificial Sequence
  Description of Artificial Sequence: Synthetic oligonucleotide
  Target: ATXN2; (-) strand; PAM type: NRG; PAM sequence: GAG
ttctcgtgcctcagcttact

SEQ ID NO: 30114 - DNA, 20 bp, Artificial Sequence
  Description of Artificial Sequence: Synthetic oligonucleotide
  Target: ATXN2; (-) strand; PAM type: NRG; PAM sequence: CAG
ttcaagcaattctcgtgcct

SEQ ID NO: 30115 - DNA, 20 bp, Artificial Sequence
  Description of Artificial Sequence: Synthetic oligonucleotide
  Target: ATXN2; (-) strand; PAM type: NRG; PAM sequence: AAG
atcctacaactctgaggttc

SEQ ID NO: 30116 - DNA, 20 bp, Artificial Sequence
  Description of Artificial Sequence: Synthetic oligonucleotide
  Target: ATXN2; (-) strand; PAM type: NRG; PAM sequence: AGG
cagtgcatcctacaactctg

SEQ ID NO: 30117 - DNA, 20 bp, Artificial Sequence
  Description of Artificial Sequence: Synthetic oligonucleotide
  Target: ATXN2; (-) strand; PAM type: NRG; PAM sequence: GAG
tcagtgcatcctacaactct

SEQ ID NO: 30118 - DNA, 20 bp, Artificial Sequence
  Description of Artificial Sequence: Synthetic oligonucleotide
  Target: ATXN2; (-) strand; PAM type: NRG; PAM sequence: CAG
gcagtggcatgatctcagct

SEQ ID NO: 30119 - DNA, 20 bp, Artificial Sequence
  Description of Artificial Sequence: Synthetic oligonucleotide
  Target: ATXN2; (-) strand; PAM type: NRG; PAM sequence: CAG
ggagtgcagtggcatgatct

SEQ ID NO: 30120 - DNA, 20 bp, Artificial Sequence
  Description of Artificial Sequence: Synthetic oligonucleotide
  Target: ATXN2; (-) strand; PAM type: NRG; PAM sequence: TGG
tttcccagcgtggagtgcag

SEQ ID NO: 30121 - DNA, 20 bp, Artificial Sequence
  Description of Artificial Sequence: Synthetic oligonucleotide
  Target: ATXN2; (-) strand; PAM type: NRG; PAM sequence: CAG
ctgtttcccagcgtggagtg

SEQ ID NO: 30122 - DNA, 20 bp, Artificial Sequence
  Description of Artificial Sequence: Synthetic oligonucleotide
  Target: ATXN2; (-) strand; PAM type: NRG; PAM sequence: GAG
tcactctgtttcccagcgtg

SEQ ID NO: 30123 - DNA, 20 bp, Artificial Sequence
  Description of Artificial Sequence: Synthetic oligonucleotide
  Target: ATXN2; (-) strand; PAM type: NRG; PAM sequence: TGG
tctcactctgtttcccagcg

SEQ ID NO: 30124 - DNA, 20 bp, Artificial Sequence
  Description of Artificial Sequence: Synthetic oligonucleotide
  Target: ATXN2; (-) strand; PAM type: NRG; PAM sequence: CAG
cagaatctcactctgtttcc

SEQ ID NO: 30125 - DNA, 20 bp, Artificial Sequence
  Description of Artificial Sequence: Synthetic oligonucleotide
  Target: ATXN2; (-) strand; PAM type: NRG; PAM sequence: CAG
ttttttttttttttttgaga

SEQ ID NO: 30126 - DNA, 20 bp, Artificial Sequence
  Description of Artificial Sequence: Synthetic oligonucleotide
  Target: ATXN2; (-) strand; PAM type: NRG; PAM sequence: GAG
gtaatttttttttttttttt

SEQ ID NO: 30127 - DNA, 20 bp, Artificial Sequence
  Description of Artificial Sequence: Synthetic oligonucleotide
  Target: ATXN2; (-) strand; PAM type: NRG; PAM sequence: AAG
catagctttttgtcaatgag

SEQ ID NO: 30128 - DNA, 20 bp, Artificial Sequence
  Description of Artificial Sequence: Synthetic oligonucleotide
  Target: ATXN2; (-) strand; PAM type: NRG; PAM sequence: GAG
catcatagctttttgtcaat

SEQ ID NO: 30129 - DNA, 20 bp, Artificial Sequence
  Description of Artificial Sequence: Synthetic oligonucleotide
  Target: ATXN2; (-) strand; PAM type: NRG; PAM sequence: TAG
gtccttgtacattcccatca

SEQ ID NO: 30130 - DNA, 20 bp, Artificial Sequence
  Description of Artificial Sequence: Synthetic oligonucleotide
  Target: ATXN2; (-) strand; PAM type: NRG; PAM sequence: CAG
tggactgattcttgtgttag

SEQ ID NO: 30131 - DNA, 20 bp, Artificial Sequence
  Description of Artificial Sequence: Synthetic oligonucleotide
  Target: ATXN2; (-) strand; PAM type: NRG; PAM sequence: TAG
ctatggactgattcttgtgt

SEQ ID NO: 30132 - DNA, 20 bp, Artificial Sequence
  Description of Artificial Sequence: Synthetic oligonucleotide
  Target: ATXN2; (-) strand; PAM type: NRG; PAM sequence: TGG
atcccttgatccctgggcta

SEQ ID NO: 30133 - DNA, 20 bp, Artificial Sequence
  Description of Artificial Sequence: Synthetic oligonucleotide
  Target: ATXN2; (-) strand; PAM type: NRG; PAM sequence: GGG
aaaattatcccttgatccct

SEQ ID NO: 30134 - DNA, 20 bp, Artificial Sequence
  Description of Artificial Sequence: Synthetic oligonucleotide
  Target: ATXN2; (-) strand; PAM type: NRG; PAM sequence: TGG
caaaattatcccttgatccc

SEQ ID NO: 30135 - DNA, 20 bp, Artificial Sequence
  Description of Artificial Sequence: Synthetic oligonucleotide
  Target: ATXN2; (-) strand; PAM type: NRG; PAM sequence: TGG
gccgtatttcttaaataaaa

SEQ ID NO: 30136 - DNA, 20 bp, Artificial Sequence
  Description of Artificial Sequence: Synthetic oligonucleotide
  Target: ATXN2; (-) strand; PAM type: NRG; PAM sequence: CGG
caggcgtgagccaccgcgcc

SEQ ID NO: 30137 - DNA, 20 bp, Artificial Sequence
  Description of Artificial Sequence: Synthetic oligonucleotide
  Target: ATXN2; (-) strand; PAM type: NRG; PAM sequence: GAG
agtgttgagattacaggcgt

SEQ ID NO: 30138 - DNA, 20 bp, Artificial Sequence
  Description of Artificial Sequence: Synthetic oligonucleotide
  Target: ATXN2; (-) strand; PAM type: NRG; PAM sequence: AGG
ttccgaagtgttgagattac

SEQ ID NO: 30139 - DNA, 20 bp, Artificial Sequence
  Description of Artificial Sequence: Synthetic oligonucleotide
  Target: ATXN2; (-) strand; PAM type: NRG; PAM sequence: CAG
cttccgaagtgttgagatta

SEQ ID NO: 30140 - DNA, 20 bp, Artificial Sequence
  Description of Artificial Sequence: Synthetic oligonucleotide
  Target: ATXN2; (-) strand; PAM type: NRG; PAM sequence: GAG
cctcggccttccgaagtgtt

SEQ ID NO: 30141 - DNA, 20 bp, Artificial Sequence
  Description of Artificial Sequence: Synthetic oligonucleotide
  Target: ATXN2; (-) strand; PAM type: NRG; PAM sequence: AAG
ctgcctgcctcggccttccg

SEQ ID NO: 30142 - DNA, 20 bp, Artificial Sequence
  Description of Artificial Sequence: Synthetic oligonucleotide
  Target: ATXN2; (-) strand; PAM type: NRG; PAM sequence: CGG
ctcaggtgatctgcctgcct

SEQ ID NO: 30143 - DNA, 20 bp, Artificial Sequence
  Description of Artificial Sequence: Synthetic oligonucleotide
  Target: ATXN2; (-) strand; PAM type: NRG; PAM sequence: AGG
ggtcttgaactcccgatctc

SEQ ID NO: 30144 - DNA, 20 bp, Artificial Sequence
  Description of Artificial Sequence: Synthetic oligonucleotide
  Target: ATXN2; (-) strand; PAM type: NRG; PAM sequence: CAG
tggtcttgaactcccgatct

SEQ ID NO: 30145 - DNA, 20 bp, Artificial Sequence
  Description of Artificial Sequence: Synthetic oligonucleotide
  Target: ATXN2; (-) strand; PAM type: NRG; PAM sequence: TGG
tttctccatgttggtcaggc

SEQ ID NO: 30146 - DNA, 20 bp, Artificial Sequence
  Description of Artificial Sequence: Synthetic oligonucleotide
  Target: ATXN2; (-) strand; PAM type: NRG; PAM sequence: AGG
ggggtttctccatgttggtc

SEQ ID NO: 30147 - DNA, 20 bp, Artificial Sequence
  Description of Artificial Sequence: Synthetic oligonucleotide
  Target: ATXN2; (-) strand; PAM type: NRG; PAM sequence: CAG
cggggtttctccatgttggt

SEQ ID NO: 30148 - DNA, 20 bp, Artificial Sequence
  Description of Artificial Sequence: Synthetic oligonucleotide
  Target: ATXN2; (-) strand; PAM type: NRG; PAM sequence: TGG
gaggcggggtttctccatgt

SEQ ID NO: 30149 - DNA, 20 bp, Artificial Sequence
  Description of Artificial Sequence: Synthetic oligonucleotide
  Target: ATXN2; (-) strand; PAM type: NRG; PAM sequence: GGG
ttgtatttttagtagaggcg

SEQ ID NO: 30150 - DNA, 20 bp, Artificial Sequence
  Description of Artificial Sequence: Synthetic oligonucleotide
  Target: ATXN2; (-) strand; PAM type: NRG; PAM sequence: GGG
tttgtatttttagtagaggc

SEQ ID NO: 30151 - DNA, 20 bp, Artificial Sequence
  Description of Artificial Sequence: Synthetic oligonucleotide
  Target: ATXN2; (-) strand; PAM type: NRG; PAM sequence: CGG
ttttgtatttttagtagagg

SEQ ID NO: 30152 - DNA, 20 bp, Artificial Sequence
  Description of Artificial Sequence: Synthetic oligonucleotide
  Target: ATXN2; (-) strand; PAM type: NRG; PAM sequence: AGG
taattttgtatttttagtag

SEQ ID NO: 30153 - DNA, 20 bp, Artificial Sequence
  Description of Artificial Sequence: Synthetic oligonucleotide
  Target: ATXN2; (-) strand; PAM type: NRG; PAM sequence: GAG
ctaattttgtatttttagta

SEQ ID NO: 30154 - DNA, 20 bp, Artificial Sequence
  Description of Artificial Sequence: Synthetic oligonucleotide
  Target: ATXN2; (-) strand; PAM type: NRG; PAM sequence: TAG
acctaattttgtatttttag

SEQ ID NO: 30155 - DNA, 20 bp, Artificial Sequence
  Description of Artificial Sequence: Synthetic oligonucleotide
  Target: ATXN2; (-) strand; PAM type: NRG; PAM sequence: TAG
cccacctaattttgtatttt

SEQ ID NO: 30156 - DNA, 20 bp, Artificial Sequence
  Description of Artificial Sequence: Synthetic oligonucleotide
  Target: ATXN2; (-) strand; PAM type: NRG; PAM sequence: AGG
tcctgagtagctgggattac

SEQ ID NO: 30157 - DNA, 20 bp, Artificial Sequence
  Description of Artificial Sequence: Synthetic oligonucleotide
  Target: ATXN2; (-) strand; PAM type: NRG; PAM sequence: CAG
ctcctgagtagctgggatta

SEQ ID NO: 30158 - DNA, 20 bp, Artificial Sequence
  Description of Artificial Sequence: Synthetic oligonucleotide
  Target: ATXN2; (-) strand; PAM type: NRG; PAM sequence: GGG
cctcagcctcctgagtagct

SEQ ID NO: 30159 - DNA, 20 bp, Artificial Sequence
  Description of Artificial Sequence: Synthetic oligonucleotide
  Target: ATXN2; (-) strand; PAM type: NRG; PAM sequence: TGG
gcctcagcctcctgagtagc

SEQ ID NO: 30160 - DNA, 20 bp, Artificial Sequence
  Description of Artificial Sequence: Synthetic oligonucleotide
  Target: ATXN2; (-) strand; PAM type: NRG; PAM sequence: TAG
tcctgcctcagcctcctgag

SEQ ID NO: 30161 - DNA, 20 bp, Artificial Sequence
  Description of Artificial Sequence: Synthetic oligonucleotide
  Target: ATXN2; (-) strand; PAM type: NRG; PAM sequence: GAG
ttctcctgcctcagcctcct

SEQ ID NO: 30162 - DNA, 20 bp, Artificial Sequence
  Description of Artificial Sequence: Synthetic oligonucleotide
  Target: ATXN2; (-) strand; PAM type: NRG; PAM sequence: CAG
ttcaagcaattctcctgcct

SEQ ID NO: 30163 - DNA, 20 bp, Artificial Sequence
  Description of Artificial Sequence: Synthetic oligonucleotide
  Target: ATXN2; (-) strand; PAM type: NRG; PAM sequence: AAG
aacctccgcctcccgggttc

SEQ ID NO: 30164 - DNA, 20 bp, Artificial Sequence
  Description of Artificial Sequence: Synthetic oligonucleotide
  Target: ATXN2; (-) strand; PAM type: NRG; PAM sequence: GGG
caccgcaacctccgcctccc

SEQ ID NO: 30165 - DNA, 20 bp, Artificial Sequence
  Description of Artificial Sequence: Synthetic oligonucleotide
  Target: ATXN2; (-) strand; PAM type: NRG; PAM sequence: CGG
tcaccgcaacctccgcctcc

SEQ ID NO: 30166 - DNA, 20 bp, Artificial Sequence
  Description of Artificial Sequence: Synthetic oligonucleotide
  Target: ATXN2; (-) strand; PAM type: NRG; PAM sequence: CGG
agtgcagtggcatgctatct

SEQ ID NO: 30167 - DNA, 20 bp, Artificial Sequence
  Description of Artificial Sequence: Synthetic oligonucleotide
  Target: ATXN2; (-) strand; PAM type: NRG; PAM sequence: TGG
tcacccaggctggagtgcag

SEQ ID NO: 30168 - DNA, 20 bp, Artificial Sequence
  Description of Artificial Sequence: Synthetic oligonucleotide
  Target: ATXN2; (-) strand; PAM type: NRG; PAM sequence: CAG
ttgtcacccaggctggagtg

SEQ ID NO: 30169 - DNA, 20 bp, Artificial Sequence
  Description of Artificial Sequence: Synthetic oligonucleotide
  Target: ATXN2; (-) strand; PAM type: NRG; PAM sequence: GAG
tgctcttgtcacccaggctg

SEQ ID NO: 30170 - DNA, 20 bp, Artificial Sequence
  Description of Artificial Sequence: Synthetic oligonucleotide
  Target: ATXN2; (-) strand; PAM type: NRG; PAM sequence: TGG
tttgctcttgtcacccaggc

SEQ ID NO: 30171 - DNA, 20 bp, Artificial Sequence
  Description of Artificial Sequence: Synthetic oligonucleotide
  Target: ATXN2; (-) strand; PAM type: NRG; PAM sequence: AGG
tttttttgctcttgtcaccc

SEQ ID NO: 30172 - DNA, 20 bp, Artificial Sequence
  Description of Artificial Sequence: Synthetic oligonucleotide
  Target: ATXN2; (-) strand; PAM type: NRG; PAM sequence: CAG
ttttttttgctcttgtcacc

SEQ ID NO: 30173 - DNA, 20 bp, Artificial Sequence
  Description of Artificial Sequence: Synthetic oligonucleotide
  Target: ATXN2; (-) strand; PAM type: NRG; PAM sequence: GAG
ttttctttttttttgagatg

SEQ ID NO: 30174 - DNA, 20 bp, Artificial Sequence
  Description of Artificial Sequence: Synthetic oligonucleotide
  Target: ATXN2; (-) strand; PAM type: NRG; PAM sequence: TGG
ttttttctttttttttgaga

SEQ ID NO: 30175 - DNA, 20 bp, Artificial Sequence
  Description of Artificial Sequence: Synthetic oligonucleotide
  Target: ATXN2; (-) strand; PAM type: NRG; PAM sequence: GAG
ttttttttttcttttttttt

SEQ ID NO: 30176 - DNA, 20 bp, Artificial Sequence
  Description of Artificial Sequence: Synthetic oligonucleotide
  Target: ATXN2; (-) strand; PAM type: NRG; PAM sequence: CAG
gaatggcagtagtagcctta

SEQ ID NO: 30177 - DNA, 20 bp, Artificial Sequence
  Description of Artificial Sequence: Synthetic oligonucleotide
  Target: ATXN2; (-) strand; PAM type: NRG; PAM sequence: TAG
atggctatgaatggcagtag

SEQ ID NO: 30178 - DNA, 20 bp, Artificial Sequence
  Description of Artificial Sequence: Synthetic oligonucleotide
  Target: ATXN2; (-) strand; PAM type: NRG; PAM sequence: TAG
agaatggctatgaatggcag

SEQ ID NO: 30179 - DNA, 20 bp, Artificial Sequence
  Description of Artificial Sequence: Synthetic oligonucleotide
  Target: ATXN2; (-) strand; PAM type: NRG; PAM sequence: CAG
cagagaatggctatgaatgg

SEQ ID NO: 30180 - DNA, 20 bp, Artificial Sequence
  Description of Artificial Sequence: Synthetic oligonucleotide
  Target: ATXN2; (-) strand; PAM type: NRG; PAM sequence: TGG
catcagagaatggctatgaa

SEQ ID NO: 30181 - DNA, 20 bp, Artificial Sequence
  Description of Artificial Sequence: Synthetic oligonucleotide
  Target: ATXN2; (-) strand; PAM type: NRG; PAM sequence: TGG
tttattttgccatcagagaa

SEQ ID NO: 30182 - DNA, 20 bp, Artificial Sequence
  Description of Artificial Sequence: Synthetic oligonucleotide
  Target: ATXN2; (-) strand; PAM type: NRG; PAM sequence: GAG
ttcaatttattttgccatca

SEQ ID NO: 30183 - DNA, 20 bp, Artificial Sequence
  Description of Artificial Sequence: Synthetic oligonucleotide
  Target: ATXN2; (-) strand; PAM type: NRG; PAM sequence: CAG
ttttcaatttattttgccat

SEQ ID NO: 30184 - DNA, 20 bp, Artificial Sequence
  Description of Artificial Sequence: Synthetic oligonucleotide
  Target: ATXN2; (-) strand; PAM type: NRG; PAM sequence: AAG
aatggtgaatactttttaga

SEQ ID NO: 30185 - DNA, 20 bp, Artificial Sequence
  Description of Artificial Sequence: Synthetic oligonucleotide
  Target: ATXN2; (-) strand; PAM type: NRG; PAM sequence: TAG
ctagaatggtgaatactttt

SEQ ID NO: 30186 - DNA, 20 bp, Artificial Sequence
  Description of Artificial Sequence: Synthetic oligonucleotide
  Target: ATXN2; (-) strand; PAM type: NRG; PAM sequence: TGG
attctcagtggcatctagaa

SEQ ID NO: 30187 - DNA, 20 bp, Artificial Sequence
  Description of Artificial Sequence: Synthetic oligonucleotide
  Target: ATXN2; (-) strand; PAM type: NRG; PAM sequence: TAG
atggcattctcagtggcatc

SEQ ID NO: 30188 - DNA, 20 bp, Artificial Sequence
  Description of Artificial Sequence: Synthetic oligonucleotide
  Target: ATXN2; (-) strand; PAM type: NRG; PAM sequence: TGG
ctcatggatggcattctcag

SEQ ID NO: 30189 - DNA, 20 bp, Artificial Sequence
  Description of Artificial Sequence: Synthetic oligonucleotide
  Target: ATXN2; (-) strand; PAM type: NRG; PAM sequence: CAG
atgctcatggatggcattct

SEQ ID NO: 30190 - DNA, 20 bp, Artificial Sequence
  Description of Artificial Sequence: Synthetic oligonucleotide
  Target: ATXN2; (-) strand; PAM type: NRG; PAM sequence: TGG
cctcctcccatgctcatgga

SEQ ID NO: 30191 - DNA, 20 bp, Artificial Sequence
  Description of Artificial Sequence: Synthetic oligonucleotide
  Target: ATXN2; (-) strand; PAM type: NRG; PAM sequence: TGG
ttaacctcctcccatgctca

SEQ ID NO: 30192 - DNA, 20 bp, Artificial Sequence
  Description of Artificial Sequence: Synthetic oligonucleotide
  Target: ATXN2; (-) strand; PAM type: NRG; PAM sequence: AAG
ttaaaaaaaaaaaaaaagaa

SEQ ID NO: 30193 - DNA, 20 bp, Artificial Sequence
  Description of Artificial Sequence: Synthetic oligonucleotide
  Target: ATXN2; (-) strand; PAM type: NRG; PAM sequence: AAG
ctatcttaaaaaaaaaaaaa

SEQ ID NO: 30194 - DNA, 20 bp, Artificial Sequence
  Description of Artificial Sequence: Synthetic oligonucleotide
  Target: ATXN2; (-) strand; PAM type: NRG; PAM sequence: GAG
cactccagcctgggcaacag

SEQ ID NO: 30195 - DNA, 20 bp, Artificial Sequence
  Description of Artificial Sequence: Synthetic oligonucleotide
  Target: ATXN2; (-) strand; PAM type: NRG; PAM sequence: AGG
tgcactccagcctgggcaac

SEQ ID NO: 30196 - DNA, 20 bp, Artificial Sequence
  Description of Artificial Sequence: Synthetic oligonucleotide
  Target: ATXN2; (-) strand; PAM type: NRG; PAM sequence: CAG
ttgcactccagcctgggcaa

SEQ ID NO: 30197 - DNA, 20 bp, Artificial Sequence
  Description of Artificial Sequence: Synthetic oligonucleotide
  Target: ATXN2; (-) strand; PAM type: NRG; PAM sequence: GGG
gtgcccttgcactccagcct

SEQ ID NO: 30198 - DNA, 20 bp, Artificial Sequence
  Description of Artificial Sequence: Synthetic oligonucleotide
  Target: ATXN2; (-) strand; PAM type: NRG; PAM sequence: TGG
tgtgcccttgcactccagcc

SEQ ID NO: 30199 - DNA, 20 bp, Artificial Sequence
  Description of Artificial Sequence: Synthetic oligonucleotide
  Target: ATXN2; (-) strand; PAM type: NRG; PAM sequence: CAG
gagattgtgcccttgcactc

SEQ ID NO: 30200 - DNA, 20 bp, Artificial Sequence
  Description of Artificial Sequence: Synthetic oligonucleotide
  Target: ATXN2; (-) strand; PAM type: NRG; PAM sequence: GAG
ggtggaggttgcagtgagtt

SEQ ID NO: 30201 - DNA, 20 bp, Artificial Sequence
  Description of Artificial Sequence: Synthetic oligonucleotide
  Target: ATXN2; (-) strand; PAM type: NRG; PAM sequence: GAG
tgggaggtggaggttgcagt

SEQ ID NO: 30202 - DNA, 20 bp, Artificial Sequence
  Description of Artificial Sequence: Synthetic oligonucleotide
  Target: ATXN2; (-) strand; PAM type: NRG; PAM sequence: CAG
aacctgggaggtggaggttg

SEQ ID NO: 30203 - DNA, 20 bp, Artificial Sequence
  Description of Artificial Sequence: Synthetic oligonucleotide
  Target: ATXN2; (-) strand; PAM type: NRG; PAM sequence: AGG
cgcttgaacctgggaggtgg

SEQ ID NO: 30204 - DNA, 20 bp, Artificial Sequence
  Description of Artificial Sequence: Synthetic oligonucleotide
  Target: ATXN2; (-) strand; PAM type: NRG; PAM sequence: GAG
tcgcttgaacctgggaggtg

SEQ ID NO: 30205 - DNA, 20 bp, Artificial Sequence
  Description of Artificial Sequence: Synthetic oligonucleotide
  Target: ATXN2; (-) strand; PAM type: NRG; PAM sequence: TGG
aatcgcttgaacctgggagg

SEQ ID NO: 30206 - DNA, 20 bp, Artificial Sequence
  Description of Artificial Sequence: Synthetic oligonucleotide
  Target: ATXN2; (-) strand; PAM type: NRG; PAM sequence: AGG
gagaatcgcttgaacctggg

SEQ ID NO: 30207 - DNA, 20 bp, Artificial Sequence
  Description of Artificial Sequence: Synthetic oligonucleotide
  Target: ATXN2; (-) strand; PAM type: NRG; PAM sequence: GAG
ggagaatcgcttgaacctgg

SEQ ID NO: 30208 - DNA, 20 bp, Artificial Sequence
  Description of Artificial Sequence: Synthetic oligonucleotide
  Target: ATXN2; (-) strand; PAM type: NRG; PAM sequence: GGG
caggagaatcgcttgaacct

SEQ ID NO: 30209 - DNA, 20 bp, Artificial Sequence
  Description of Artificial Sequence: Synthetic oligonucleotide
  Target: ATXN2; (-) strand; PAM type: NRG; PAM sequence: TGG
gcaggagaatcgcttgaacc

SEQ ID NO: 30210 - DNA, 20 bp, Artificial Sequence
  Description of Artificial Sequence: Synthetic oligonucleotide
  Target: ATXN2; (-) strand; PAM type: NRG; PAM sequence: GAG
tacttgggagactgaggcag

SEQ ID NO: 30211 - DNA, 20 bp, Artificial Sequence
  Description of Artificial Sequence: Synthetic oligonucleotide
  Target: ATXN2; (-) strand; PAM type: NRG; PAM sequence: AGG
gctacttgggagactgaggc

SEQ ID NO: 30212 - DNA, 20 bp, Artificial Sequence
  Description of Artificial Sequence: Synthetic oligonucleotide
  Target: ATXN2; (-) strand; PAM type: NRG; PAM sequence: CAG
agctacttgggagactgagg

SEQ ID NO: 30213 - DNA, 20 bp, Artificial Sequence
  Description of Artificial Sequence: Synthetic oligonucleotide
  Target: ATXN2; (-) strand; PAM type: NRG; PAM sequence: AGG
cccagctacttgggagactg

SEQ ID NO: 30214 - DNA, 20 bp, Artificial Sequence
  Description of Artificial Sequence: Synthetic oligonucleotide
  Target: ATXN2; (-) strand; PAM type: NRG; PAM sequence: GAG
tcccagctacttgggagact

SEQ ID NO: 30215 - DNA, 20 bp, Artificial Sequence
  Description of Artificial Sequence: Synthetic oligonucleotide
  Target: ATXN2; (-) strand; PAM type: NRG; PAM sequence: GAG
ctataatcccagctacttgg

SEQ ID NO: 30216 - DNA, 20 bp, Artificial Sequence
  Description of Artificial Sequence: Synthetic oligonucleotide
  Target: ATXN2; (-) strand; PAM type: NRG; PAM sequence: GGG
gcctataatcccagctactt

SEQ ID NO: 30217 - DNA, 20 bp, Artificial Sequence
  Description of Artificial Sequence: Synthetic oligonucleotide
  Target: ATXN2; (-) strand; PAM type: NRG; PAM sequence: TGG
cgcctataatcccagctact

SEQ ID NO: 30218 - DNA, 20 bp, Artificial Sequence
  Description of Artificial Sequence: Synthetic oligonucleotide
  Target: ATXN2; (-) strand; PAM type: NRG; PAM sequence: CAG
gtggcgggcgcctataatcc

SEQ ID NO: 30219 - DNA, 20 bp, Artificial Sequence
  Description of Artificial Sequence: Synthetic oligonucleotide
  Target: ATXN2; (-) strand; PAM type: NRG; PAM sequence: GGG
attagcggggatgtggtggc

SEQ ID NO: 30220 - DNA, 20 bp, Artificial Sequence
  Description of Artificial Sequence: Synthetic oligonucleotide
  Target: ATXN2; (-) strand; PAM type: NRG; PAM sequence: CGG
aattagcggggatgtggtgg

SEQ ID NO: 30221 - DNA, 20 bp, Artificial Sequence
  Description of Artificial Sequence: Synthetic oligonucleotide
  Target: ATXN2; (-) strand; PAM type: NRG; PAM sequence: TGG
aaaaattagcggggatgtgg

SEQ ID NO: 30222 - DNA, 20 bp, Artificial Sequence
  Description of Artificial Sequence: Synthetic oligonucleotide
  Target: ATXN2; (-) strand; PAM type: NRG; PAM sequence: TGG
tacaaaaattagcggggatg

SEQ ID NO: 30223 - DNA, 20 bp, Artificial Sequence
  Description of Artificial Sequence: Synthetic oligonucleotide
  Target: ATXN2; (-) strand; PAM type: NRG; PAM sequence: GGG
taaaaatacaaaaattagcg

SEQ ID NO: 30224 - DNA, 20 bp, Artificial Sequence
  Description of Artificial Sequence: Synthetic oligonucleotide
  Target: ATXN2; (-) strand; PAM type: NRG; PAM sequence: GGG
ctaaaaatacaaaaattagc

SEQ ID NO: 30225 - DNA, 20 bp, Artificial Sequence
  Description of Artificial Sequence: Synthetic oligonucleotide
  Target: ATXN2; (-) strand; PAM type: NRG; PAM sequence: CGG
actaaaaatacaaaaattag

SEQ ID NO: 30226 - DNA, 20 bp, Artificial Sequence
  Description of Artificial Sequence: Synthetic oligonucleotide
  Target: ATXN2; (-) strand; PAM type: NRG; PAM sequence: TAG
tctactaaaaatacaaaaat

SEQ ID NO: 30227 - DNA, 20 bp, Artificial Sequence
  Description of Artificial Sequence: Synthetic oligonucleotide
  Target: ATXN2; (-) strand; PAM type: NRG; PAM sequence: TGG
caagaccagtctggcaaacg

SEQ ID NO: 30228 - DNA, 20 bp, Artificial Sequence
  Description of Artificial Sequence: Synthetic oligonucleotide
  Target: ATXN2; (-) strand; PAM type: NRG; PAM sequence: TGG
tcaggagttcaagaccagtc

SEQ ID NO: 30229 - DNA, 20 bp, Artificial Sequence
  Description of Artificial Sequence: Synthetic oligonucleotide
  Target: ATXN2; (-) strand; PAM type: NRG; PAM sequence: CAG
tgaagtcaggagttcaagac

SEQ ID NO: 30230 - DNA, 20 bp, Artificial Sequence
  Description of Artificial Sequence: Synthetic oligonucleotide
  Target: ATXN2; (-) strand; PAM type: NRG; PAM sequence: AAG
tcacctgaagtcaggagttc

SEQ ID NO: 30231 - DNA, 20 bp, Artificial Sequence
  Description of Artificial Sequence: Synthetic oligonucleotide
  Target: ATXN2; (-) strand; PAM type: NRG; PAM sequence: GAG
ggcggatcacctgaagtcag

SEQ ID NO: 30232 - DNA, 20 bp, Artificial Sequence
  Description of Artificial Sequence: Synthetic oligonucleotide
  Target: ATXN2; (-) strand; PAM type: NRG; PAM sequence: AGG
agggcggatcacctgaagtc

SEQ ID NO: 30233 - DNA, 20 bp, Artificial Sequence
  Description of Artificial Sequence: Synthetic oligonucleotide
  Target: ATXN2; (-) strand; PAM type: NRG; PAM sequence: CAG
gagggcggatcacctgaagt

SEQ ID NO: 30234 - DNA, 20 bp, Artificial Sequence
  Description of Artificial Sequence: Synthetic oligonucleotide
  Target: ATXN2; (-) strand; PAM type: NRG; PAM sequence: AAG
caaggagggcggatcacctg

SEQ ID NO: 30235 - DNA, 20 bp, Artificial Sequence
  Description of Artificial Sequence: Synthetic oligonucleotide
  Target: ATXN2; (-) strand; PAM type: NRG; PAM sequence: CGG
ctttgggaggccaaggaggg

SEQ ID NO: 30236 - DNA, 20 bp, Artificial Sequence
  Description of Artificial Sequence: Synthetic oligonucleotide
  Target: ATXN2; (-) strand; PAM type: NRG; PAM sequence: GGG
gtactttgggaggccaagga

SEQ ID NO: 30237 - DNA, 20 bp, Artificial Sequence
  Description of Artificial Sequence: Synthetic oligonucleotide
  Target: ATXN2; (-) strand; PAM type: NRG; PAM sequence: AGG
agtactttgggaggccaagg

SEQ ID NO: 30238 - DNA, 20 bp, Artificial Sequence
  Description of Artificial Sequence: Synthetic oligonucleotide
  Target: ATXN2; (-) strand; PAM type: NRG; PAM sequence: GAG
cagtactttgggaggccaag

SEQ ID NO: 30239 - DNA, 20 bp, Artificial Sequence
  Description of Artificial Sequence: Synthetic oligonucleotide
  Target: ATXN2; (-) strand; PAM type: NRG; PAM sequence: AGG
cccagtactttgggaggcca

SEQ ID NO: 30240 - DNA, 20 bp, Artificial Sequence
  Description of Artificial Sequence: Synthetic oligonucleotide
  Target: ATXN2; (-) strand; PAM type: NRG; PAM sequence: AAG
tcccagtactttgggaggcc

SEQ ID NO: 30241 - DNA, 20 bp, Artificial Sequence
  Description of Artificial Sequence: Synthetic oligonucleotide
  Target: ATXN2; (-) strand; PAM type: NRG; PAM sequence: AGG
tgtaatcccagtactttggg

SEQ ID NO: 30242 - DNA, 20 bp, Artificial Sequence
  Description of Artificial Sequence: Synthetic oligonucleotide
  Target: ATXN2; (-) strand; PAM type: NRG; PAM sequence: GAG
ctgtaatcccagtactttgg

SEQ ID NO: 30243 - DNA, 20 bp, Artificial Sequence
  Description of Artificial Sequence: Synthetic oligonucleotide
  Target: ATXN2; (-) strand; PAM type: NRG; PAM sequence: GGG
gcctgtaatcccagtacttt

SEQ ID NO: 30244 - DNA, 20 bp, Artificial Sequence
  Description of Artificial Sequence: Synthetic oligonucleotide
  Target: ATXN2; (-) strand; PAM type: NRG; PAM sequence: TGG
tgcctgtaatcccagtactt

SEQ ID NO: 30245 - DNA, 20 bp, Artificial Sequence
  Description of Artificial Sequence: Synthetic oligonucleotide
  Target: ATXN2; (-) strand; PAM type: NRG; PAM sequence: CAG
gtggctcatgcctgtaatcc

SEQ ID NO: 30246 - DNA, 20 bp, Artificial Sequence
  Description of Artificial Sequence: Synthetic oligonucleotide
  Target: ATXN2; (-) strand; PAM type: NRG; PAM sequence: TGG
aatttcctggttgggcacgg

SEQ ID NO: 30247 - DNA, 20 bp, Artificial Sequence
  Description of Artificial Sequence: Synthetic oligonucleotide
  Target: ATXN2; (-) strand; PAM type: NRG; PAM sequence: CGG
agcaatttcctggttgggca

SEQ ID NO: 30248 - DNA, 20 bp, Artificial Sequence
  Description of Artificial Sequence: Synthetic oligonucleotide
  Target: ATXN2; (-) strand; PAM type: NRG; PAM sequence: GGG
ttagaagcaatttcctggtt

SEQ ID NO: 30249 - DNA, 20 bp, Artificial Sequence
  Description of Artificial Sequence: Synthetic oligonucleotide
  Target: ATXN2; (-) strand; PAM type: NRG; PAM sequence: TGG
attagaagcaatttcctggt

SEQ ID NO: 30250 - DNA, 20 bp, Artificial Sequence
  Description of Artificial Sequence: Synthetic oligonucleotide
  Target: ATXN2; (-) strand; PAM type: NRG; PAM sequence: TGG
gagtattagaagcaatttcc

SEQ ID NO: 30251 - DNA, 20 bp, Artificial Sequence
  Description of Artificial Sequence: Synthetic oligonucleotide
  Target: ATXN2; (-) strand; PAM type: NRG; PAM sequence: AAG
aaatcattcatgagtattag

SEQ ID NO: 30252 - DNA, 20 bp, Artificial Sequence
  Description of Artificial Sequence: Synthetic oligonucleotide
  Target: ATXN2; (-) strand; PAM type: NRG; PAM sequence: TAG
tcaaaatcattcatgagtat

SEQ ID NO: 30253 - DNA, 20 bp, Artificial Sequence
  Description of Artificial Sequence: Synthetic oligonucleotide
  Target: ATXN2; (-) strand; PAM type: NRG; PAM sequence: GAG
aacccctcaaaatcattcat

SEQ ID NO: 30254 - DNA, 20 bp, Artificial Sequence
  Description of Artificial Sequence: Synthetic oligonucleotide
  Target: ATXN2; (-) strand; PAM type: NRG; PAM sequence: AAG
tgcagttacttgctctactg

SEQ ID NO: 30255 - DNA, 20 bp, Artificial Sequence
  Description of Artificial Sequence: Synthetic oligonucleotide
  Target: ATXN2; (-) strand; PAM type: NRG; PAM sequence: CAG
ttgcttttttaccacatctg

SEQ ID NO: 30256 - DNA, 20 bp, Artificial Sequence
  Description of Artificial Sequence: Synthetic oligonucleotide
  Target: ATXN2; (-) strand; PAM type: NRG; PAM sequence: TAG
tctgaccccacttctaattt

SEQ ID NO: 30257 - DNA, 20 bp, Artificial Sequence
  Description of Artificial Sequence: Synthetic oligonucleotide
  Target: ATXN2; (-) strand; PAM type: NRG; PAM sequence: CAG
atcatgagattgcagcaatt

SEQ ID NO: 30258 - DNA, 20 bp, Artificial Sequence
  Description of Artificial Sequence: Synthetic oligonucleotide
  Target: ATXN2; (-) strand; PAM type: NRG; PAM sequence: CAG
caagttttatcatgagattg

SEQ ID NO: 30259 - DNA, 20 bp, Artificial Sequence
  Description of Artificial Sequence: Synthetic oligonucleotide
  Target: ATXN2; (-) strand; PAM type: NRG; PAM sequence: GAG
atctattcaagttttatcat

SEQ ID NO: 30260 - DNA, 20 bp, Artificial Sequence
  Description of Artificial Sequence: Synthetic oligonucleotide
  Target: ATXN2; (-) strand; PAM type: NRG; PAM sequence: AAG
aagcaacacctcatctattc

SEQ ID NO: 30261 - DNA, 20 bp, Artificial Sequence
  Description of Artificial Sequence: Synthetic oligonucleotide
  Target: ATXN2; (-) strand; PAM type: NRG; PAM sequence: AAG
tttctttgcttatccatgag

SEQ ID NO: 30262 - DNA, 20 bp, Artificial Sequence
  Description of Artificial Sequence: Synthetic oligonucleotide
  Target: ATXN2; (-) strand; PAM type: NRG; PAM sequence: GAG
cactttctttgcttatccat

SEQ ID NO: 30263 - DNA, 20 bp, Artificial Sequence
  Description of Artificial Sequence: Synthetic oligonucleotide
  Target: ATXN2; (-) strand; PAM type: NRG; PAM sequence: AAG
ccaggtgtagattccatctt

SEQ ID NO: 30264 - DNA, 20 bp, Artificial Sequence
  Description of Artificial Sequence: Synthetic oligonucleotide
  Target: ATXN2; (-) strand; PAM type: NRG; PAM sequence: TAG
cacagcagcttcaccaggtg

SEQ ID NO: 30265 - DNA, 20 bp, Artificial Sequence
  Description of Artificial Sequence: Synthetic oligonucleotide
  Target: ATXN2; (-) strand; PAM type: NRG; PAM sequence: AGG
gtgctcacagcagcttcacc

SEQ ID NO: 30266 - DNA, 20 bp, Artificial Sequence
  Description of Artificial Sequence: Synthetic oligonucleotide
  Target: ATXN2; (-) strand; PAM type: NRG; PAM sequence: CAG
agtgctcacagcagcttcac

SEQ ID NO: 30267 - DNA, 20 bp, Artificial Sequence
  Description of Artificial Sequence: Synthetic oligonucleotide
  Target: ATXN2; (-) strand; PAM type: NRG; PAM sequence: CAG
catttcaacagtgctcacag

SEQ ID NO: 30268 - DNA, 20 bp, Artificial Sequence
  Description of Artificial Sequence: Synthetic oligonucleotide
  Target: ATXN2; (-) strand; PAM type: NRG; PAM sequence: CAG
tgtcatttcaacagtgctca

SEQ ID NO: 30269 - DNA, 20 bp, Artificial Sequence
  Description of Artificial Sequence: Synthetic oligonucleotide
  Target: ATXN2; (-) strand; PAM type: NRG; PAM sequence: CAG
atcttttgttgtcatttcaa

SEQ ID NO: 30270 - DNA, 20 bp, Artificial Sequence
  Description of Artificial Sequence: Synthetic oligonucleotide
  Target: ATXN2; (-) strand; PAM type: NRG; PAM sequence: TGG
caccacgcccggcctgtttc

SEQ ID NO: 30271 - DNA, 20 bp, Artificial Sequence
  Description of Artificial Sequence: Synthetic oligonucleotide
  Target: ATXN2; (-) strand; PAM type: NRG; PAM sequence: CGG
caagtgtgagccaccacgcc

SEQ ID NO: 30272 - DNA, 20 bp, Artificial Sequence
  Description of Artificial Sequence: Synthetic oligonucleotide
  Target: ATXN2; (-) strand; PAM type: NRG; PAM sequence: GAG
agtgctgggattacaagtgt

SEQ ID NO: 30273 - DNA, 20 bp, Artificial Sequence
  Description of Artificial Sequence: Synthetic oligonucleotide
  Target: ATXN2; (-) strand; PAM type: NRG; PAM sequence: AAG
tcgcaaagtgctgggattac

SEQ ID NO: 30274 - DNA, 20 bp, Artificial Sequence
  Description of Artificial Sequence: Synthetic oligonucleotide
  Target: ATXN2; (-) strand; PAM type: NRG; PAM sequence: GGG
cctcaacttcgcaaagtgct

SEQ ID NO: 30275 - DNA, 20 bp, Artificial Sequence
  Description of Artificial Sequence: Synthetic oligonucleotide
  Target: ATXN2; (-) strand; PAM type: NRG; PAM sequence: TGG
gcctcaacttcgcaaagtgc

SEQ ID NO: 30276 - DNA, 20 bp, Artificial Sequence
  Description of Artificial Sequence: Synthetic oligonucleotide
  Target: ATXN2; (-) strand; PAM type: NRG; PAM sequence: AAG
ctgcccgcctcaacttcgca

SEQ ID NO: 30277 - DNA, 20 bp, Artificial Sequence
  Description of Artificial Sequence: Synthetic oligonucleotide
  Target: ATXN2; (-) strand; PAM type: NRG; PAM sequence: TGG
tgaggctggtcttgaactcc

SEQ ID NO: 30278 - DNA, 20 bp, Artificial Sequence
  Description of Artificial Sequence: Synthetic oligonucleotide
  Target: ATXN2; (-) strand; PAM type: NRG; PAM sequence: TGG
tttcaccatattggtgaggc

SEQ ID NO: 30279 - DNA, 20 bp, Artificial Sequence
  Description of Artificial Sequence: Synthetic oligonucleotide
  Target: ATXN2; (-) strand; PAM type: NRG; PAM sequence: AGG
ggggtttcaccatattggtg

SEQ ID NO: 30280 - DNA, 20 bp, Artificial Sequence
  Description of Artificial Sequence: Synthetic oligonucleotide
  Target: ATXN2; (-) strand; PAM type: NRG; PAM sequence: GAG
cggggtttcaccatattggt

SEQ ID NO: 30281 - DNA, 20 bp, Artificial Sequence
  Description of Artificial Sequence: Synthetic oligonucleotide
  Target: ATXN2; (-) strand; PAM type: NRG; PAM sequence: TGG
gagacggggtttcaccatat

SEQ ID NO: 30282 - DNA, 20 bp, Artificial Sequence
  Description of Artificial Sequence: Synthetic oligonucleotide
  Target: ATXN2; (-) strand; PAM type: NRG; PAM sequence: GGG
ttgtatttttagtagagacg

SEQ ID NO: 30283 - DNA, 20 bp, Artificial Sequence
  Description of Artificial Sequence: Synthetic oligonucleotide
  Target: ATXN2; (-) strand; PAM type: NRG; PAM sequence: GGG
tttgtatttttagtagagac

SEQ ID NO: 30284 - DNA, 20 bp, Artificial Sequence
  Description of Artificial Sequence: Synthetic oligonucleotide
  Target: ATXN2; (-) strand; PAM type: NRG; PAM sequence: CGG
ttttgtatttttagtagaga

SEQ ID NO: 30285 - DNA, 20 bp, Artificial Sequence
  Description of Artificial Sequence: Synthetic oligonucleotide
  Target: ATXN2; (-) strand; PAM type: NRG; PAM sequence: GAG
taatttttgtatttttagta

SEQ ID NO: 30286 - DNA, 20 bp, Artificial Sequence
  Description of Artificial Sequence: Synthetic oligonucleotide
  Target: ATXN2; (-) strand; PAM type: NRG; PAM sequence: TAG
gctaatttttgtatttttag

SEQ ID NO: 30287 - DNA, 20 bp, Artificial Sequence
  Description of Artificial Sequence: Synthetic oligonucleotide
  Target: ATXN2; (-) strand; PAM type: NRG; PAM sequence: TAG
caggctaatttttgtatttt

SEQ ID NO: 30288 - DNA, 20 bp, Artificial Sequence
  Description of Artificial Sequence: Synthetic oligonucleotide
  Target: ATXN2; (-) strand; PAM type: NRG; PAM sequence: AGG
caggtgcatgccaccacgcc

SEQ ID NO: 30289 - DNA, 20 bp, Artificial Sequence
  Description of Artificial Sequence: Synthetic oligonucleotide
  Target: ATXN2; (-) strand; PAM type: NRG; PAM sequence: CAG
acaggtgcatgccaccacgc

SEQ ID NO: 30290 - DNA, 20 bp, Artificial Sequence
  Description of Artificial Sequence: Synthetic oligonucleotide
  Target: ATXN2; (-) strand; PAM type: NRG; PAM sequence: AGG
tcctgagtatctgggactac

SEQ ID NO: 30291 - DNA, 20 bp, Artificial Sequence
  Description of Artificial Sequence: Synthetic oligonucleotide
  Target: ATXN2; (-) strand; PAM type: NRG; PAM sequence: CAG
ctcctgagtatctgggacta

SEQ ID NO: 30292 - DNA, 20 bp, Artificial Sequence
  Description of Artificial Sequence: Synthetic oligonucleotide
  Target: ATXN2; (-) strand; PAM type: NRG; PAM sequence: GGG
cctcagcctcctgagtatct

SEQ ID NO: 30293 - DNA, 20 bp, Artificial Sequence
  Description of Artificial Sequence: Synthetic oligonucleotide
  Target: ATXN2; (-) strand; PAM type: NRG; PAM sequence: TGG
gcctcagcctcctgagtatc

SEQ ID NO: 30294 - DNA, 20 bp, Artificial Sequence
  Description of Artificial Sequence: Synthetic oligonucleotide
  Target: ATXN2; (-) strand; PAM type: NRG; PAM sequence: GAG
ttctcctgcctcagcctcct

SEQ ID NO: 30295 - DNA, 20 bp, Artificial Sequence
  Description of Artificial Sequence: Synthetic oligonucleotide
  Target: ATXN2; (-) strand; PAM type: NRG; PAM sequence: CAG
ttcaagtgattctcctgcct

SEQ ID NO: 30296 - DNA, 20 bp, Artificial Sequence
  Description of Artificial Sequence: Synthetic oligonucleotide
  Target: ATXN2; (-) strand; PAM type: NRG; PAM sequence: AAG
aacctctgccttccgggttc

SEQ ID NO: 30297 - DNA, 20 bp, Artificial Sequence
  Description of Artificial Sequence: Synthetic oligonucleotide
  Target: ATXN2; (-) strand; PAM type: NRG; PAM sequence: GGG
tactgcaacctctgccttcc

SEQ ID NO: 30298 - DNA, 20 bp, Artificial Sequence
  Description of Artificial Sequence: Synthetic oligonucleotide
  Target: ATXN2; (-) strand; PAM type: NRG; PAM sequence: CGG
ttactgcaacctctgccttc

SEQ ID NO: 30299 - DNA, 20 bp, Artificial Sequence
  Description of Artificial Sequence: Synthetic oligonucleotide
  Target: ATXN2; (-) strand; PAM type: NRG; PAM sequence: CAG
ggagtgcagtggctcaatct

SEQ ID NO: 30300 - DNA, 20 bp, Artificial Sequence
  Description of Artificial Sequence: Synthetic oligonucleotide
  Target: ATXN2; (-) strand; PAM type: NRG; PAM sequence: TGG
tctcccaggctggagtgcag

SEQ ID NO: 30301 - DNA, 20 bp, Artificial Sequence
  Description of Artificial Sequence: Synthetic oligonucleotide
  Target: ATXN2; (-) strand; PAM type: NRG; PAM sequence: CAG
ctgtctcccaggctggagtg

SEQ ID NO: 30302 - DNA, 20 bp, Artificial Sequence
  Description of Artificial Sequence: Synthetic oligonucleotide
  Target: ATXN2; (-) strand; PAM type: NRG; PAM sequence: GAG
tcgctctgtctcccaggctg

SEQ ID NO: 30303 - DNA, 20 bp, Artificial Sequence
  Description of Artificial Sequence: Synthetic oligonucleotide
  Target: ATXN2; (-) strand; PAM type: NRG; PAM sequence: TGG
tctcgctctgtctcccaggc

SEQ ID NO: 30304 - DNA, 20 bp, Artificial Sequence
  Description of Artificial Sequence: Synthetic oligonucleotide
  Target: ATXN2; (-) strand; PAM type: NRG; PAM sequence: AGG
ggggtctcgctctgtctccc

SEQ ID NO: 30305 - DNA, 20 bp, Artificial Sequence
  Description of Artificial Sequence: Synthetic oligonucleotide
  Target: ATXN2; (-) strand; PAM type: NRG; PAM sequence: CAG
tggggtctcgctctgtctcc

SEQ ID NO: 30306 - DNA, 20 bp, Artificial Sequence
  Description of Artificial Sequence: Synthetic oligonucleotide
  Target: ATXN2; (-) strand; PAM type: NRG; PAM sequence: GGG
tcttttttttttttgaaatg

SEQ ID NO: 30307 - DNA, 20 bp, Artificial Sequence
  Description of Artificial Sequence: Synthetic oligonucleotide
  Target: ATXN2; (-) strand; PAM type: NRG; PAM sequence: GGG
ttcttttttttttttgaaat

SEQ ID NO: 30308 - DNA, 20 bp, Artificial Sequence
  Description of Artificial Sequence: Synthetic oligonucleotide
  Target: ATXN2; (-) strand; PAM type: NRG; PAM sequence: TGG
gttcttttttttttttgaaa

SEQ ID NO: 30309 - DNA, 20 bp, Artificial Sequence
  Description of Artificial Sequence: Synthetic oligonucleotide
  Target: ATXN2; (-) strand; PAM type: NRG; PAM sequence: TGG
gtgccaggccatttcatttt

SEQ ID NO: 30310 - DNA, 20 bp, Artificial Sequence
  Description of Artificial Sequence: Synthetic oligonucleotide
  Target: ATXN2; (-) strand; PAM type: NRG; PAM sequence: AGG
caggcatgagccactgtgcc

SEQ ID NO: 30311 - DNA, 20 bp, Artificial Sequence
  Description of Artificial Sequence: Synthetic oligonucleotide
  Target: ATXN2; (-) strand; PAM type: NRG; PAM sequence: CAG
acaggcatgagccactgtgc

SEQ ID NO: 30312 - DNA, 20 bp, Artificial Sequence
  Description of Artificial Sequence: Synthetic oligonucleotide
  Target: ATXN2; (-) strand; PAM type: NRG; PAM sequence: GAG
agtgctgggactacaggcat

SEQ ID NO: 30313 - DNA, 20 bp, Artificial Sequence
  Description of Artificial Sequence: Synthetic oligonucleotide
  Target: ATXN2; (-) strand; PAM type: NRG; PAM sequence: AGG
tcccaaagtgctgggactac

SEQ ID NO: 30314 - DNA, 20 bp, Artificial Sequence
  Description of Artificial Sequence: Synthetic oligonucleotide
  Target: ATXN2; (-) strand; PAM type: NRG; PAM sequence: CAG
ctcccaaagtgctgggacta

SEQ ID NO: 30315 - DNA, 20 bp, Artificial Sequence
  Description of Artificial Sequence: Synthetic oligonucleotide
  Target: ATXN2; (-) strand; PAM type: NRG; PAM sequence: GGG
ccttggtctcccaaagtgct

SEQ ID NO: 30316 - DNA, 20 bp, Artificial Sequence
  Description of Artificial Sequence: Synthetic oligonucleotide
  Target: ATXN2; (-) strand; PAM type: NRG; PAM sequence: TGG
gccttggtctcccaaagtgc

SEQ ID NO: 30317 - DNA, 20 bp, Artificial Sequence
  Description of Artificial Sequence: Synthetic oligonucleotide
  Target: ATXN2; (-) strand; PAM type: NRG; PAM sequence: AAG
ctgcccgccttggtctccca

SEQ ID NO: 30318 - DNA, 20 bp, Artificial Sequence
  Description of Artificial Sequence: Synthetic oligonucleotide
  Target: ATXN2; (-) strand; PAM type: NRG; PAM sequence: TGG
ctcaggtgatctgcccgcct

SEQ ID NO: 30319 - DNA, 20 bp, Artificial Sequence
  Description of Artificial Sequence: Synthetic oligonucleotide
  Target: ATXN2; (-) strand; PAM type: NRG; PAM sequence: AGG
ggtctcgaattcctgacctc

SEQ ID NO: 30320 - DNA, 20 bp, Artificial Sequence
  Description of Artificial Sequence: Synthetic oligonucleotide
  Target: ATXN2; (-) strand; PAM type: NRG; PAM sequence: CAG
tggtctcgaattcctgacct

SEQ ID NO: 30321 - DNA, 20 bp, Artificial Sequence
  Description of Artificial Sequence: Synthetic oligonucleotide
  Target: ATXN2; (-) strand; PAM type: NRG; PAM sequence: TGG
tttcaccatattggccaggc

SEQ ID NO: 30322 - DNA, 20 bp, Artificial Sequence
  Description of Artificial Sequence: Synthetic oligonucleotide
  Target: ATXN2; (-) strand; PAM type: NRG; PAM sequence: AGG
ggggtttcaccatattggcc

SEQ ID NO: 30323 - DNA, 20 bp, Artificial Sequence
  Description of Artificial Sequence: Synthetic oligonucleotide
  Target: ATXN2; (-) strand; PAM type: NRG; PAM sequence: CAG
tggggtttcaccatattggc

SEQ ID NO: 30324 - DNA, 20 bp, Artificial Sequence
  Description of Artificial Sequence: Synthetic oligonucleotide
  Target: ATXN2; (-) strand; PAM type: NRG; PAM sequence: TGG
gagatggggtttcaccatat

SEQ ID NO: 30325 - DNA, 20 bp, Artificial Sequence
  Description of Artificial Sequence: Synthetic oligonucleotide
  Target: ATXN2; (-) strand; PAM type: NRG; PAM sequence: GGG
ttatatttttagtagagatg

SEQ ID NO: 30326 - DNA, 20 bp, Artificial Sequence
  Description of Artificial Sequence: Synthetic oligonucleotide
  Target: ATXN2; (-) strand; PAM type: NRG; PAM sequence: GGG
tttatatttttagtagagat

SEQ ID NO: 30327 - DNA, 20 bp, Artificial Sequence
  Description of Artificial Sequence: Synthetic oligonucleotide
  Target: ATXN2; (-) strand; PAM type: NRG; PAM sequence: TGG
ttttatatttttagtagaga

SEQ ID NO: 30328 - DNA, 20 bp, Artificial Sequence
  Description of Artificial Sequence: Synthetic oligonucleotide
  Target: ATXN2; (-) strand; PAM type: NRG; PAM sequence: GAG
taatttttatatttttagta

SEQ ID NO: 30329 - DNA, 20 bp, Artificial Sequence
  Description of Artificial Sequence: Synthetic oligonucleotide
  Target: ATXN2; (-) strand; PAM type: NRG; PAM sequence: TAG
gctaatttttatatttttag

SEQ ID NO: 30330 - DNA, 20 bp, Artificial Sequence
  Description of Artificial Sequence: Synthetic oligonucleotide
  Target: ATXN2; (-) strand; PAM type: NRG; PAM sequence: TAG
ccggctaatttttatatttt

SEQ ID NO: 30331 - DNA, 20 bp, Artificial Sequence
  Description of Artificial Sequence: Synthetic oligonucleotide
  Target: ATXN2; (-) strand; PAM type: NRG; PAM sequence: CGG
tgggtgcacgccaccatacc

SEQ ID NO: 30332 - DNA, 20 bp, Artificial Sequence
  Description of Artificial Sequence: Synthetic oligonucleotide
  Target: ATXN2; (-) strand; PAM type: NRG; PAM sequence: GGG
tcatgagtagctggggccat

SEQ ID NO: 30333 - DNA, 20 bp, Artificial Sequence
  Description of Artificial Sequence: Synthetic oligonucleotide
  Target: ATXN2; (-) strand; PAM type: NRG; PAM sequence: TGG
ctcatgagtagctggggcca

SEQ ID NO: 30334 - DNA, 20 bp, Artificial Sequence
  Description of Artificial Sequence: Synthetic oligonucleotide
  Target: ATXN2; (-) strand; PAM type: NRG; PAM sequence: GGG
gtcagcctcatgagtagctg

SEQ ID NO: 30335 - DNA, 20 bp, Artificial Sequence
  Description of Artificial Sequence: Synthetic oligonucleotide
  Target: ATXN2; (-) strand; PAM type: NRG; PAM sequence: GGG
tgtcagcctcatgagtagct

SEQ ID NO: 30336 - DNA, 20 bp, Artificial Sequence
  Description of Artificial Sequence: Synthetic oligonucleotide
  Target: ATXN2; (-) strand; PAM type: NRG; PAM sequence: TGG
gtgtcagcctcatgagtagc

SEQ ID NO: 30337 - DNA, 20 bp, Artificial Sequence
  Description of Artificial Sequence: Synthetic oligonucleotide
  Target: ATXN2; (-) strand; PAM type: NRG; PAM sequence: TAG
tcttgtgtcagcctcatgag

SEQ ID NO: 30338 - DNA, 20 bp, Artificial Sequence
  Description of Artificial Sequence: Synthetic oligonucleotide
  Target: ATXN2; (-) strand; PAM type: NRG; PAM sequence: GAG
ttctcttgtgtcagcctcat

SEQ ID NO: 30339 - DNA, 20 bp, Artificial Sequence
  Description of Artificial Sequence: Synthetic oligonucleotide
  Target: ATXN2; (-) strand; PAM type: NRG; PAM sequence: CAG
ttgaagcgattctcttgtgt

SEQ ID NO: 30340 - DNA, 20 bp, Artificial Sequence
  Description of Artificial Sequence: Synthetic oligonucleotide
  Target: ATXN2; (-) strand; PAM type: NRG; PAM sequence: AAG
aacctctgcctcctgagttg

SEQ ID NO: 30341 - DNA, 20 bp, Artificial Sequence
  Description of Artificial Sequence: Synthetic oligonucleotide
  Target: ATXN2; (-) strand; PAM type: NRG; PAM sequence: GAG
cactgcaacctctgcctcct

SEQ ID NO: 30342 - DNA, 20 bp, Artificial Sequence
  Description of Artificial Sequence: Synthetic oligonucleotide
  Target: ATXN2; (-) strand; PAM type: NRG; PAM sequence: CGG
ggagtgcagtggcccaatct

SEQ ID NO: 30343 - DNA, 20 bp, Artificial Sequence
  Description of Artificial Sequence: Synthetic oligonucleotide
  Target: ATXN2; (-) strand; PAM type: NRG; PAM sequence: TGG
ttgcccaggctggagtgcag

SEQ ID NO: 30344 - DNA, 20 bp, Artificial Sequence
  Description of Artificial Sequence: Synthetic oligonucleotide
  Target: ATXN2; (-) strand; PAM type: NRG; PAM sequence: CAG
ctgttgcccaggctggagtg

SEQ ID NO: 30345 - DNA, 20 bp, Artificial Sequence
  Description of Artificial Sequence: Synthetic oligonucleotide
  Target: ATXN2; (-) strand; PAM type: NRG; PAM sequence: GAG
acagtctgttgcccaggctg

SEQ ID NO: 30346 - DNA, 20 bp, Artificial Sequence
  Description of Artificial Sequence: Synthetic oligonucleotide
  Target: ATXN2; (-) strand; PAM type: NRG; PAM sequence: TGG
agacagtctgttgcccaggc

SEQ ID NO: 30347 - DNA, 20 bp, Artificial Sequence
  Description of Artificial Sequence: Synthetic oligonucleotide
  Target: ATXN2; (-) strand; PAM type: NRG; PAM sequence: AGG
tttgagacagtctgttgccc

SEQ ID NO: 30348 - DNA, 20 bp, Artificial Sequence
  Description of Artificial Sequence: Synthetic oligonucleotide
  Target: ATXN2; (-) strand; PAM type: NRG; PAM sequence: CAG
ttttgagacagtctgttgcc

SEQ ID NO: 30349 - DNA, 20 bp, Artificial Sequence
  Description of Artificial Sequence: Synthetic oligonucleotide
  Target: ATXN2; (-) strand; PAM type: NRG; PAM sequence: CAG
tttattttatttttttgaga

SEQ ID NO: 30350 - DNA, 20 bp, Artificial Sequence
  Description of Artificial Sequence: Synthetic oligonucleotide
  Target: ATXN2; (-) strand; PAM type: NRG; PAM sequence: GAG
tacatttattttattttttt

SEQ ID NO: 30351 - DNA, 20 bp, Artificial Sequence
  Description of Artificial Sequence: Synthetic oligonucleotide
  Target: ATXN2; (-) strand; PAM type: NRG; PAM sequence: CAG
aagtaacacagtgaataaga

SEQ ID NO: 30352 - DNA, 20 bp, Artificial Sequence
  Description of Artificial Sequence: Synthetic oligonucleotide
  Target: ATXN2; (-) strand; PAM type: NRG; PAM sequence: AAG
aattaagtaacacagtgaat

SEQ ID NO: 30353 - DNA, 20 bp, Artificial Sequence
  Description of Artificial Sequence: Synthetic oligonucleotide
  Target: ATXN2; (-) strand; PAM type: NRG; PAM sequence: CAG
tgcttgttaattaagtaaca

SEQ ID NO: 30354 - DNA, 20 bp, Artificial Sequence
  Description of Artificial Sequence: Synthetic oligonucleotide
  Target: ATXN2; (-) strand; PAM type: NRG; PAM sequence: AAG
tattgttttgcttgttaatt

SEQ ID NO: 30355 - DNA, 20 bp, Artificial Sequence
  Description of Artificial Sequence: Synthetic oligonucleotide
  Target: ATXN2; (-) strand; PAM type: NRG; PAM sequence: TAG
tttcagttatcaggatgtgt

SEQ ID NO: 30356 - DNA, 20 bp, Artificial Sequence
  Description of Artificial Sequence: Synthetic oligonucleotide
  Target: ATXN2; (-) strand; PAM type: NRG; PAM sequence: AGG
tttaatgtttttcagttatc

SEQ ID NO: 30357 - DNA, 20 bp, Artificial Sequence
  Description of Artificial Sequence: Synthetic oligonucleotide
  Target: ATXN2; (-) strand; PAM type: NRG; PAM sequence: CAG
atttaatgtttttcagttat

SEQ ID NO: 30358 - DNA, 20 bp, Artificial Sequence
  Description of Artificial Sequence: Synthetic oligonucleotide
  Target: ATXN2; (-) strand; PAM type: NRG; PAM sequence: CAG
ttagattatttaatgttttt

SEQ ID NO: 30359 - DNA, 20 bp, Artificial Sequence
  Description of Artificial Sequence: Synthetic oligonucleotide
  Target: ATXN2; (-) strand; PAM type: NRG; PAM sequence: TAG
atggaaggtaattttattct

SEQ ID NO: 30360 - DNA, 20 bp, Artificial Sequence
  Description of Artificial Sequence: Synthetic oligonucleotide
  Target: ATXN2; (-) strand; PAM type: NRG; PAM sequence: AGG
gttgttgaaacaataatgga

SEQ ID NO: 30361 - DNA, 20 bp, Artificial Sequence
  Description of Artificial Sequence: Synthetic oligonucleotide
  Target: ATXN2; (-) strand; PAM type: NRG; PAM sequence: AAG
agttgttgaaacaataatgg

SEQ ID NO: 30362 - DNA, 20 bp, Artificial Sequence
  Description of Artificial Sequence: Synthetic oligonucleotide
  Target: ATXN2; (-) strand; PAM type: NRG; PAM sequence: TGG
cccagttgttgaaacaataa

SEQ ID NO: 30363 - DNA, 20 bp, Artificial Sequence
  Description of Artificial Sequence: Synthetic oligonucleotide
  Target: ATXN2; (-) strand; PAM type: NRG; PAM sequence: CAG
ccactgcgcccggcctcccc

SEQ ID NO: 30364 - DNA, 20 bp, Artificial Sequence
  Description of Artificial Sequence: Synthetic oligonucleotide
  Target: ATXN2; (-) strand; PAM type: NRG; PAM sequence: CGG
caggtgtgagccactgcgcc

SEQ ID NO: 30365 - DNA, 20 bp, Artificial Sequence
  Description of Artificial Sequence: Synthetic oligonucleotide
  Target: ATXN2; (-) strand; PAM type: NRG; PAM sequence: GAG
agtgccgggattacaggtgt

SEQ ID NO: 30366 - DNA, 20 bp, Artificial Sequence
  Description of Artificial Sequence: Synthetic oligonucleotide
  Target: ATXN2; (-) strand; PAM type: NRG; PAM sequence: AGG
tcccaaagtgccgggattac

SEQ ID NO: 30367 - DNA, 20 bp, Artificial Sequence
  Description of Artificial Sequence: Synthetic oligonucleotide
  Target: ATXN2; (-) strand; PAM type: NRG; PAM sequence: CAG
ctcccaaagtgccgggatta

SEQ ID NO: 30368 - DNA, 20 bp, Artificial Sequence
  Description of Artificial Sequence: Synthetic oligonucleotide
  Target: ATXN2; (-) strand; PAM type: NRG; PAM sequence: GGG
cctcagcctcccaaagtgcc

SEQ ID NO: 30369 - DNA, 20 bp, Artificial Sequence
  Description of Artificial Sequence: Synthetic oligonucleotide
  Target: ATXN2; (-) strand; PAM type: NRG; PAM sequence: CGG
gcctcagcctcccaaagtgc

SEQ ID NO: 30370 - DNA, 20 bp, Artificial Sequence
  Description of Artificial Sequence: Synthetic oligonucleotide
  Target: ATXN2; (-) strand; PAM type: NRG; PAM sequence: AAG
ccacctgcctcagcctccca

SEQ ID NO: 30371 - DNA, 20 bp, Artificial Sequence
  Description of Artificial Sequence: Synthetic oligonucleotide
  Target: ATXN2; (-) strand; PAM type: NRG; PAM sequence: CAG
ctcagataatccacctgcct

SEQ ID NO: 30372 - DNA, 20 bp, Artificial Sequence
  Description of Artificial Sequence: Synthetic oligonucleotide
  Target: ATXN2; (-) strand; PAM type: NRG; PAM sequence: CAG
tggtcttgagttcctgacct

SEQ ID NO: 30373 - DNA, 20 bp, Artificial Sequence
  Description of Artificial Sequence: Synthetic oligonucleotide
  Target: ATXN2; (-) strand; PAM type: NRG; PAM sequence: GAG
atgttggcaaggctggtctt

SEQ ID NO: 30374 - DNA, 20 bp, Artificial Sequence
  Description of Artificial Sequence: Synthetic oligonucleotide
  Target: ATXN2; (-) strand; PAM type: NRG; PAM sequence: TGG
tttcaccatgttggcaaggc

SEQ ID NO: 30375 - DNA, 20 bp, Artificial Sequence
  Description of Artificial Sequence: Synthetic oligonucleotide
  Target: ATXN2; (-) strand; PAM type: NRG; PAM sequence: AGG
gggatttcaccatgttggca

SEQ ID NO: 30376 - DNA, 20 bp, Artificial Sequence
  Description of Artificial Sequence: Synthetic oligonucleotide
  Target: ATXN2; (-) strand; PAM type: NRG; PAM sequence: AAG
ggggatttcaccatgttggc

SEQ ID NO: 30377 - DNA, 20 bp, Artificial Sequence
  Description of Artificial Sequence: Synthetic oligonucleotide
  Target: ATXN2; (-) strand; PAM type: NRG; PAM sequence: TGG
gagaggggatttcaccatgt

SEQ ID NO: 30378 - DNA, 20 bp, Artificial Sequence
  Description of Artificial Sequence: Synthetic oligonucleotide
  Target: ATXN2; (-) strand; PAM type: NRG; PAM sequence: GGG
tttgtatttttatttgagag

SEQ ID NO: 30379 - DNA, 20 bp, Artificial Sequence
  Description of Artificial Sequence: Synthetic oligonucleotide
  Target: ATXN2; (-) strand; PAM type: NRG; PAM sequence: GGG
ttttgtatttttatttgaga

SEQ ID NO: 30380 - DNA, 20 bp, Artificial Sequence
  Description of Artificial Sequence: Synthetic oligonucleotide
  Target: ATXN2; (-) strand; PAM type: NRG; PAM sequence: AGG
tttttgtatttttatttgag

SEQ ID NO: 30381 - DNA, 20 bp, Artificial Sequence
  Description of Artificial Sequence: Synthetic oligonucleotide
  Target: ATXN2; (-) strand; PAM type: NRG; PAM sequence: GAG
atttttgtatttttatttga

SEQ ID NO: 30382 - DNA, 20 bp, Artificial Sequence
  Description of Artificial Sequence: Synthetic oligonucleotide
  Target: ATXN2; (-) strand; PAM type: NRG; PAM sequence: GAG
taatttttgtatttttattt

SEQ ID NO: 30383 - DNA, 20 bp, Artificial Sequence
  Description of Artificial Sequence: Synthetic oligonucleotide
  Target: ATXN2; (-) strand; PAM type: NRG; PAM sequence: CGG
caggcatgtgccaccacgcc

SEQ ID NO: 30384 - DNA, 20 bp, Artificial Sequence
  Description of Artificial Sequence: Synthetic oligonucleotide
  Target: ATXN2; (-) strand; PAM type: NRG; PAM sequence: AGG
tcctgagtagctgggattac

SEQ ID NO: 30385 - DNA, 20 bp, Artificial Sequence
  Description of Artificial Sequence: Synthetic oligonucleotide
  Target: ATXN2; (-) strand; PAM type: NRG; PAM sequence: CAG
ctcctgagtagctgggatta

SEQ ID NO: 30386 - DNA, 20 bp, Artificial Sequence
  Description of Artificial Sequence: Synthetic oligonucleotide
  Target: ATXN2; (-) strand; PAM type: NRG; PAM sequence: GGG
cctcagcctcctgagtagct

SEQ ID NO: 30387 - DNA, 20 bp, Artificial Sequence
  Description of Artificial Sequence: Synthetic oligonucleotide
  Target: ATXN2; (-) strand; PAM type: NRG; PAM sequence: TGG
gcctcagcctcctgagtagc

SEQ ID NO: 30388 - DNA, 20 bp, Artificial Sequence
  Description of Artificial Sequence: Synthetic oligonucleotide
  Target: ATXN2; (-) strand; PAM type: NRG; PAM sequence: TAG
tcctgcctcagcctcctgag

SEQ ID NO: 30389 - DNA, 20 bp, Artificial Sequence
  Description of Artificial Sequence: Synthetic oligonucleotide
  Target: ATXN2; (-) strand; PAM type: NRG; PAM sequence: GAG
ttctcctgcctcagcctcct

SEQ ID NO: 30390 - DNA, 20 bp, Artificial Sequence
  Description of Artificial Sequence: Synthetic oligonucleotide
  Target: ATXN2; (-) strand; PAM type: NRG; PAM sequence: CAG
ttcaagcgattctcctgcct

SEQ ID NO: 30391 - DNA, 20 bp, Artificial Sequence
  Description of Artificial Sequence: Synthetic oligonucleotide
  Target: ATXN2; (-) strand; PAM type: NRG; PAM sequence: AAG
aacctctgcttcctgggttc

SEQ ID NO: 30392 - DNA, 20 bp, Artificial Sequence
  Description of Artificial Sequence: Synthetic oligonucleotide
  Target: ATXN2; (-) strand; PAM type: NRG; PAM sequence: GGG
tactgcaacctctgcttcct

SEQ ID NO: 30393 - DNA, 20 bp, Artificial Sequence
  Description of Artificial Sequence: Synthetic oligonucleotide
  Target: ATXN2; (-) strand; PAM type: NRG; PAM sequence: TGG
ttactgcaacctctgcttcc

SEQ ID NO: 30394 - DNA, 20 bp, Artificial Sequence
  Description of Artificial Sequence: Synthetic oligonucleotide
  Target: ATXN2; (-) strand; PAM type: NRG; PAM sequence: TGG
ggagtgcattgtcgtgatat

SEQ ID NO: 30395 - DNA, 20 bp, Artificial Sequence
  Description of Artificial Sequence: Synthetic oligonucleotide
  Target: ATXN2; (-) strand; PAM type: NRG; PAM sequence: GAG
tcactgtgtcactcaggctg

SEQ ID NO: 30396 - DNA, 20 bp, Artificial Sequence
  Description of Artificial Sequence: Synthetic oligonucleotide
  Target: ATXN2; (-) strand; PAM type: NRG; PAM sequence: TGG
tctcactgtgtcactcaggc

SEQ ID NO: 30397 - DNA, 20 bp, Artificial Sequence
  Description of Artificial Sequence: Synthetic oligonucleotide
  Target: ATXN2; (-) strand; PAM type: NRG; PAM sequence: AGG
agagtctcactgtgtcactc

SEQ ID NO: 30398 - DNA, 20 bp, Artificial Sequence
  Description of Artificial Sequence: Synthetic oligonucleotide
  Target: ATXN2; (-) strand; PAM type: NRG; PAM sequence: CAG
cagagtctcactgtgtcact

SEQ ID NO: 30399 - DNA, 20 bp, Artificial Sequence
  Description of Artificial Sequence: Synthetic oligonucleotide
  Target: ATXN2; (-) strand; PAM type: NRG; PAM sequence: GAG
tgttttttgtttttgagaca

SEQ ID NO: 30400 - DNA, 20 bp, Artificial Sequence
  Description of Artificial Sequence: Synthetic oligonucleotide
  Target: ATXN2; (-) strand; PAM type: NRG; PAM sequence: CAG
tttgttttttgtttttgaga

SEQ ID NO: 30401 - DNA, 20 bp, Artificial Sequence
  Description of Artificial Sequence: Synthetic oligonucleotide
  Target: ATXN2; (-) strand; PAM type: NRG; PAM sequence: GAG
ttgttttgttttttgttttt

SEQ ID NO: 30402 - DNA, 20 bp, Artificial Sequence
  Description of Artificial Sequence: Synthetic oligonucleotide
  Target: ATXN2; (-) strand; PAM type: NRG; PAM sequence: CAG
gattgcatgttttttctccc

SEQ ID NO: 30403 - DNA, 20 bp, Artificial Sequence
  Description of Artificial Sequence: Synthetic oligonucleotide
  Target: ATXN2; (-) strand; PAM type: NRG; PAM sequence: GAG
gtatggtgacagtaccaata

SEQ ID NO: 30404 - DNA, 20 bp, Artificial Sequence
  Description of Artificial Sequence: Synthetic oligonucleotide
  Target: ATXN2; (-) strand; PAM type: NRG; PAM sequence: TAG
ttgtatggtgacagtaccaa

SEQ ID NO: 30405 - DNA, 20 bp, Artificial Sequence
  Description of Artificial Sequence: Synthetic oligonucleotide
  Target: ATXN2; (-) strand; PAM type: NRG; PAM sequence: CAG
ataattatattgtatggtga

SEQ ID NO: 30406 - DNA, 20 bp, Artificial Sequence
  Description of Artificial Sequence: Synthetic oligonucleotide
  Target: ATXN2; (-) strand; PAM type: NRG; PAM sequence: TGG
agctctataattatattgta

SEQ ID NO: 30407 - DNA, 20 bp, Artificial Sequence
  Description of Artificial Sequence: Synthetic oligonucleotide
  Target: ATXN2; (-) strand; PAM type: NRG; PAM sequence: AAG
gtgaaaaataaaaagacatg

SEQ ID NO: 30408 - DNA, 20 bp, Artificial Sequence
  Description of Artificial Sequence: Synthetic oligonucleotide
  Target: ATXN2; (-) strand; PAM type: NRG; PAM sequence: AAG
gcagaatggtgaaaaataaa

SEQ ID NO: 30409 - DNA, 20 bp, Artificial Sequence
  Description of Artificial Sequence: Synthetic oligonucleotide
  Target: ATXN2; (-) strand; PAM type: NRG; PAM sequence: TGG
atggtgatggatgagcagaa

SEQ ID NO: 30410 - DNA, 20 bp, Artificial Sequence
  Description of Artificial Sequence: Synthetic oligonucleotide
  Target: ATXN2; (-) strand; PAM type: NRG; PAM sequence: CAG
gaaaaatggtgatggatgag

SEQ ID NO: 30411 - DNA, 20 bp, Artificial Sequence
  Description of Artificial Sequence: Synthetic oligonucleotide
  Target: ATXN2; (-) strand; PAM type: NRG; PAM sequence: GAG
gttgaaaaatggtgatggat

SEQ ID NO: 30412 - DNA, 20 bp, Artificial Sequence
  Description of Artificial Sequence: Synthetic oligonucleotide
  Target: ATXN2; (-) strand; PAM type: NRG; PAM sequence: TGG
ggagtgttgaaaaatggtga

SEQ ID NO: 30413 - DNA, 20 bp, Artificial Sequence
  Description of Artificial Sequence: Synthetic oligonucleotide
  Target: ATXN2; (-) strand; PAM type: NRG; PAM sequence: TGG
agaggaggagtgttgaaaaa

SEQ ID NO: 30414 - DNA, 20 bp, Artificial Sequence
  Description of Artificial Sequence: Synthetic oligonucleotide
  Target: ATXN2; (-) strand; PAM type: NRG; PAM sequence: GAG
ctgaaggacatatagaggag

SEQ ID NO: 30415 - DNA, 20 bp, Artificial Sequence
  Description of Artificial Sequence: Synthetic oligonucleotide
  Target: ATXN2; (-) strand; PAM type: NRG; PAM sequence: AGG
tactgaaggacatatagagg

SEQ ID NO: 30416 - DNA, 20 bp, Artificial Sequence
  Description of Artificial Sequence: Synthetic oligonucleotide
  Target: ATXN2; (-) strand; PAM type: NRG; PAM sequence: GAG
ctactgaaggacatatagag

SEQ ID NO: 30417 - DNA, 20 bp, Artificial Sequence
  Description of Artificial Sequence: Synthetic oligonucleotide
  Target: ATXN2; (-) strand; PAM type: NRG; PAM sequence: AGG
aactactgaaggacatatag

SEQ ID NO: 30418 - DNA, 20 bp, Artificial Sequence
  Description of Artificial Sequence: Synthetic oligonucleotide
  Target: ATXN2; (-) strand; PAM type: NRG; PAM sequence: GAG
aaactactgaaggacatata

SEQ ID NO: 30419 - DNA, 20 bp, Artificial Sequence
  Description of Artificial Sequence: Synthetic oligonucleotide
  Target: ATXN2; (-) strand; PAM type: NRG; PAM sequence: TAG
agaaactactgaaggacata

SEQ ID NO: 30420 - DNA, 20 bp, Artificial Sequence
  Description of Artificial Sequence: Synthetic oligonucleotide
  Target: ATXN2; (-) strand; PAM type: NRG; PAM sequence: AGG
atagcattagaaactactga

SEQ ID NO: 30421 - DNA, 20 bp, Artificial Sequence
  Description of Artificial Sequence: Synthetic oligonucleotide
  Target: ATXN2; (-) strand; PAM type: NRG; PAM sequence: AAG
aatagcattagaaactactg

SEQ ID NO: 30422 - DNA, 20 bp, Artificial Sequence
  Description of Artificial Sequence: Synthetic oligonucleotide
  Target: ATXN2; (-) strand; PAM type: NRG; PAM sequence: TAG
aggtcttgttgaaatagcat

SEQ ID NO: 30423 - DNA, 20 bp, Artificial Sequence
  Description of Artificial Sequence: Synthetic oligonucleotide
  Target: ATXN2; (-) strand; PAM type: NRG; PAM sequence: TAG
ttacccaggtcttgttgaaa

SEQ ID NO: 30424 - DNA, 20 bp, Artificial Sequence
  Description of Artificial Sequence: Synthetic oligonucleotide
  Target: ATXN2; (-) strand; PAM type: NRG; PAM sequence: AGG
tataaaaaaatctgttaccc

SEQ ID NO: 30425 - DNA, 20 bp, Artificial Sequence
  Description of Artificial Sequence: Synthetic oligonucleotide
  Target: ATXN2; (-) strand; PAM type: NRG; PAM sequence: CAG
atataaaaaaatctgttacc

SEQ ID NO: 30426 - DNA, 20 bp, Artificial Sequence
  Description of Artificial Sequence: Synthetic oligonucleotide
  Target: ATXN2; (-) strand; PAM type: NRG; PAM sequence: TGG
ccagtctgattctagaaacc

SEQ ID NO: 30427 - DNA, 20 bp, Artificial Sequence
  Description of Artificial Sequence: Synthetic oligonucleotide
  Target: ATXN2; (-) strand; PAM type: NRG; PAM sequence: TAG
ctatacaaccagtctgattc

SEQ ID NO: 30428 - DNA, 20 bp, Artificial Sequence
  Description of Artificial Sequence: Synthetic oligonucleotide
  Target: ATXN2; (-) strand; PAM type: NRG; PAM sequence: CAG
attagttacttctatacaac

SEQ ID NO: 30429 - DNA, 20 bp, Artificial Sequence
  Description of Artificial Sequence: Synthetic oligonucleotide
  Target: ATXN2; (-) strand; PAM type: NRG; PAM sequence: TAG
acccttatgccaaagaaaat

SEQ ID NO: 30430 - DNA, 20 bp, Artificial Sequence
  Description of Artificial Sequence: Synthetic oligonucleotide
  Target: ATXN2; (-) strand; PAM type: NRG; PAM sequence: AAG
tatgtggtacccttatgcca

SEQ ID NO: 30431 - DNA, 20 bp, Artificial Sequence
  Description of Artificial Sequence: Synthetic oligonucleotide
  Target: ATXN2; (-) strand; PAM type: NRG; PAM sequence: TGG
ggaagggggttagaggtatg

SEQ ID NO: 30432 - DNA, 20 bp, Artificial Sequence
  Description of Artificial Sequence: Synthetic oligonucleotide
  Target: ATXN2; (-) strand; PAM type: NRG; PAM sequence: AGG
ttttactggaagggggttag

SEQ ID NO: 30433 - DNA, 20 bp, Artificial Sequence
  Description of Artificial Sequence: Synthetic oligonucleotide
  Target: ATXN2; (-) strand; PAM type: NRG; PAM sequence: GAG
gttttactggaagggggtta

SEQ ID NO: 30434 - DNA, 20 bp, Artificial Sequence
  Description of Artificial Sequence: Synthetic oligonucleotide
  Target: ATXN2; (-) strand; PAM type: NRG; PAM sequence: TAG
cagttttactggaagggggt

SEQ ID NO: 30435 - DNA, 20 bp, Artificial Sequence
  Description of Artificial Sequence: Synthetic oligonucleotide
  Target: ATXN2; (-) strand; PAM type: NRG; PAM sequence: GGG
cttacagttttactggaagg

SEQ ID NO: 30436 - DNA, 20 bp, Artificial Sequence
  Description of Artificial Sequence: Synthetic oligonucleotide
  Target: ATXN2; (-) strand; PAM type: NRG; PAM sequence: GGG
tcttacagttttactggaag

SEQ ID NO: 30437 - DNA, 20 bp, Artificial Sequence
  Description of Artificial Sequence: Synthetic oligonucleotide
  Target: ATXN2; (-) strand; PAM type: NRG; PAM sequence: GGG
ttcttacagttttactggaa

SEQ ID NO: 30438 - DNA, 20 bp, Artificial Sequence
  Description of Artificial Sequence: Synthetic oligonucleotide
  Target: ATXN2; (-) strand; PAM type: NRG; PAM sequence: AGG
attcttacagttttactgga

SEQ ID NO: 30439 - DNA, 20 bp, Artificial Sequence
  Description of Artificial Sequence: Synthetic oligonucleotide
  Target: ATXN2; (-) strand; PAM type: NRG; PAM sequence: AAG
cattcttacagttttactgg

SEQ ID NO: 30440 - DNA, 20 bp, Artificial Sequence
  Description of Artificial Sequence: Synthetic oligonucleotide
  Target: ATXN2; (-) strand; PAM type: NRG; PAM sequence: TGG
gagcattcttacagttttac

SEQ ID NO: 30441 - DNA, 20 bp, Artificial Sequence
  Description of Artificial Sequence: Synthetic oligonucleotide
  Target: ATXN2; (-) strand; PAM type: NRG; PAM sequence: CAG
tggagggaagagcattctta

SEQ ID NO: 30442 - DNA, 20 bp, Artificial Sequence
  Description of Artificial Sequence: Synthetic oligonucleotide
  Target: ATXN2; (-) strand; PAM type: NRG; PAM sequence: GAG
atgtgaatagctggagggaa

SEQ ID NO: 30443 - DNA, 20 bp, Artificial Sequence
  Description of Artificial Sequence: Synthetic oligonucleotide
  Target: ATXN2; (-) strand; PAM type: NRG; PAM sequence: AAG
ccatgtgaatagctggaggg

SEQ ID NO: 30444 - DNA, 20 bp, Artificial Sequence
  Description of Artificial Sequence: Synthetic oligonucleotide
  Target: ATXN2; (-) strand; PAM type: NRG; PAM sequence: GGG
cagccatgtgaatagctgga

SEQ ID NO: 30445 - DNA, 20 bp, Artificial Sequence
  Description of Artificial Sequence: Synthetic oligonucleotide
  Target: ATXN2; (-) strand; PAM type: NRG; PAM sequence: AGG
gcagccatgtgaatagctgg

SEQ ID NO: 30446 - DNA, 20 bp, Artificial Sequence
  Description of Artificial Sequence: Synthetic oligonucleotide
  Target: ATXN2; (-) strand; PAM type: NRG; PAM sequence: GAG
ggcagccatgtgaatagctg

SEQ ID NO: 30447 - DNA, 20 bp, Artificial Sequence
  Description of Artificial Sequence: Synthetic oligonucleotide
  Target: ATXN2; (-) strand; PAM type: NRG; PAM sequence: TGG
ggggcagccatgtgaatagc

SEQ ID NO: 30448 - DNA, 20 bp, Artificial Sequence
  Description of Artificial Sequence: Synthetic oligonucleotide
  Target: ATXN2; (-) strand; PAM type: NRG; PAM sequence: TAG
gaaaggggcagccatgtgaa

SEQ ID NO: 30449 - DNA, 20 bp, Artificial Sequence
  Description of Artificial Sequence: Synthetic oligonucleotide
  Target: ATXN2; (-) strand; PAM type: NRG; PAM sequence: CAG
ggtaactaacaagaaagggg

SEQ ID NO: 30450 - DNA, 20 bp, Artificial Sequence
  Description of Artificial Sequence: Synthetic oligonucleotide
  Target: ATXN2; (-) strand; PAM type: NRG; PAM sequence: GGG
gttggtaactaacaagaaag

SEQ ID NO: 30451 - DNA, 20 bp, Artificial Sequence
  Description of Artificial Sequence: Synthetic oligonucleotide
  Target: ATXN2; (-) strand; PAM type: NRG; PAM sequence: GGG
agttggtaactaacaagaaa

SEQ ID NO: 30452 - DNA, 20 bp, Artificial Sequence
  Description of Artificial Sequence: Synthetic oligonucleotide
  Target: ATXN2; (-) strand; PAM type: NRG; PAM sequence: AGG
aagttggtaactaacaagaa

SEQ ID NO: 30453 - DNA, 20 bp, Artificial Sequence
  Description of Artificial Sequence: Synthetic oligonucleotide
  Target: ATXN2; (-) strand; PAM type: NRG; PAM sequence: AAG
taagttggtaactaacaaga

SEQ ID NO: 30454 - DNA, 20 bp, Artificial Sequence
  Description of Artificial Sequence: Synthetic oligonucleotide
  Target: ATXN2; (-) strand; PAM type: NRG; PAM sequence: AAG
catttaagttggtaactaac

SEQ ID NO: 30455 - DNA, 20 bp, Artificial Sequence
  Description of Artificial Sequence: Synthetic oligonucleotide
  Target: ATXN2; (-) strand; PAM type: NRG; PAM sequence: TGG
tcaggaggtgacatttaagt

SEQ ID NO: 30456 - DNA, 20 bp, Artificial Sequence
  Description of Artificial Sequence: Synthetic oligonucleotide
  Target: ATXN2; (-) strand; PAM type: NRG; PAM sequence: AAG
tctttcaggaggtgacattt

SEQ ID NO: 30457 - DNA, 20 bp, Artificial Sequence
  Description of Artificial Sequence: Synthetic oligonucleotide
  Target: ATXN2; (-) strand; PAM type: NRG; PAM sequence: AGG
ttgagaaggcttctttcagg

SEQ ID NO: 30458 - DNA, 20 bp, Artificial Sequence
  Description of Artificial Sequence: Synthetic oligonucleotide
  Target: ATXN2; (-) strand; PAM type: NRG; PAM sequence: GAG
tttgagaaggcttctttcag

SEQ ID NO: 30459 - DNA, 20 bp, Artificial Sequence
  Description of Artificial Sequence: Synthetic oligonucleotide
  Target: ATXN2; (-) strand; PAM type: NRG; PAM sequence: AGG
agtttgagaaggcttctttc

SEQ ID NO: 30460 - DNA, 20 bp, Artificial Sequence
  Description of Artificial Sequence: Synthetic oligonucleotide
  Target: ATXN2; (-) strand; PAM type: NRG; PAM sequence: CAG
tagtttgagaaggcttcttt

SEQ ID NO: 30461 - DNA, 20 bp, Artificial Sequence
  Description of Artificial Sequence: Synthetic oligonucleotide
  Target: ATXN2; (-) strand; PAM type: NRG; PAM sequence: AGG
gtagagggggtagtttgaga

SEQ ID NO: 30462 - DNA, 20 bp, Artificial Sequence
  Description of Artificial Sequence: Synthetic oligonucleotide
  Target: ATXN2; (-) strand; PAM type: NRG; PAM sequence: AAG
tgtagagggggtagtttgag

SEQ ID NO: 30463 - DNA, 20 bp, Artificial Sequence
  Description of Artificial Sequence: Synthetic oligonucleotide
  Target: ATXN2; (-) strand; PAM type: NRG; PAM sequence: GAG
tgctgtagagggggtagttt

SEQ ID NO: 30464 - DNA, 20 bp, Artificial Sequence
  Description of Artificial Sequence: Synthetic oligonucleotide
  Target: ATXN2; (-) strand; PAM type: NRG; PAM sequence: TAG
gggagctgctgtagaggggg

SEQ ID NO: 30465 - DNA, 20 bp, Artificial Sequence
  Description of Artificial Sequence: Synthetic oligonucleotide
  Target: ATXN2; (-) strand; PAM type: NRG; PAM sequence: GGG
ttggggagctgctgtagagg

SEQ ID NO: 30466 - DNA, 20 bp, Artificial Sequence
  Description of Artificial Sequence: Synthetic oligonucleotide
  Target: ATXN2; (-) strand; PAM type: NRG; PAM sequence: GGG
gttggggagctgctgtagag

SEQ ID NO: 30467 - DNA, 20 bp, Artificial Sequence
  Description of Artificial Sequence: Synthetic oligonucleotide
  Target: ATXN2; (-) strand; PAM type: NRG; PAM sequence: GGG
agttggggagctgctgtaga

SEQ ID NO: 30468 - DNA, 20 bp, Artificial Sequence
  Description of Artificial Sequence: Synthetic oligonucleotide
  Target: ATXN2; (-) strand; PAM type: NRG; PAM sequence: AGG
tagttggggagctgctgtag

SEQ ID NO: 30469 - DNA, 20 bp, Artificial Sequence
  Description of Artificial Sequence: Synthetic oligonucleotide
  Target: ATXN2; (-) strand; PAM type: NRG; PAM sequence: GAG
atagttggggagctgctgta

SEQ ID NO: 30470 - DNA, 20 bp, Artificial Sequence
  Description of Artificial Sequence: Synthetic oligonucleotide
  Target: ATXN2; (-) strand; PAM type: NRG; PAM sequence: TAG
taatagttggggagctgctg

SEQ ID NO: 30471 - DNA, 20 bp, Artificial Sequence
  Description of Artificial Sequence: Synthetic oligonucleotide
  Target: ATXN2; (-) strand; PAM type: NRG; PAM sequence: GAG
gggtagacataatagttggg

SEQ ID NO: 30472 - DNA, 20 bp, Artificial Sequence
  Description of Artificial Sequence: Synthetic oligonucleotide
  Target: ATXN2; (-) strand; PAM type: NRG; PAM sequence: GGG
acgggtagacataatagttg

SEQ ID NO: 30473 - DNA, 20 bp, Artificial Sequence
  Description of Artificial Sequence: Synthetic oligonucleotide
  Target: ATXN2; (-) strand; PAM type: NRG; PAM sequence: GGG
aacgggtagacataatagtt

SEQ ID NO: 30474 - DNA, 20 bp, Artificial Sequence
  Description of Artificial Sequence: Synthetic oligonucleotide
  Target: ATXN2; (-) strand; PAM type: NRG; PAM sequence: TGG
aaacgggtagacataatagt

SEQ ID NO: 30475 - DNA, 20 bp, Artificial Sequence
  Description of Artificial Sequence: Synthetic oligonucleotide
  Target: ATXN2; (-) strand; PAM type: NRG; PAM sequence: TAG
attaaaacgggtagacataa

SEQ ID NO: 30476 - DNA, 20 bp, Artificial Sequence
  Description of Artificial Sequence: Synthetic oligonucleotide
  Target: ATXN2; (-) strand; PAM type: NRG; PAM sequence: TAG
tacttaagtattaaaacggg

SEQ ID NO: 30477 - DNA, 20 bp, Artificial Sequence
  Description of Artificial Sequence: Synthetic oligonucleotide
  Target: ATXN2; (-) strand; PAM type: NRG; PAM sequence: GGG
agttacttaagtattaaaac

SEQ ID NO: 30478 - DNA, 20 bp, Artificial Sequence
  Description of Artificial Sequence: Synthetic oligonucleotide
  Target: ATXN2; (-) strand; PAM type: NRG; PAM sequence: CGG
tagttacttaagtattaaaa

SEQ ID NO: 30479 - DNA, 20 bp, Artificial Sequence
  Description of Artificial Sequence: Synthetic oligonucleotide
  Target: ATXN2; (-) strand; PAM type: NRG; PAM sequence: AAG
gtactaaatattagttactt

SEQ ID NO: 30480 - DNA, 20 bp, Artificial Sequence
  Description of Artificial Sequence: Synthetic oligonucleotide
  Target: ATXN2; (-) strand; PAM type: NRG; PAM sequence: TAG
ctaactgatgtactaaatat

SEQ ID NO: 30481 - DNA, 20 bp, Artificial Sequence
  Description of Artificial Sequence: Synthetic oligonucleotide
  Target: ATXN2; (-) strand; PAM type: NRG; PAM sequence: TAG
ggaacttgatttctagattt

SEQ ID NO: 30482 - DNA, 20 bp, Artificial Sequence
  Description of Artificial Sequence: Synthetic oligonucleotide
  Target: ATXN2; (-) strand; PAM type: NRG; PAM sequence: TAG
aagaggtggaacttgatttc

SEQ ID NO: 30483 - DNA, 20 bp, Artificial Sequence
  Description of Artificial Sequence: Synthetic oligonucleotide
  Target: ATXN2; (-) strand; PAM type: NRG; PAM sequence: TGG
agtgagttaaccttaagagg

SEQ ID NO: 30484 - DNA, 20 bp, Artificial Sequence
  Description of Artificial Sequence: Synthetic oligonucleotide
  Target: ATXN2; (-) strand; PAM type: NRG; PAM sequence: AGG
ctaagtgagttaaccttaag

SEQ ID NO: 30485 - DNA, 20 bp, Artificial Sequence
  Description of Artificial Sequence: Synthetic oligonucleotide
  Target: ATXN2; (-) strand; PAM type: NRG; PAM sequence: GAG
cctaagtgagttaaccttaa

SEQ ID NO: 30486 - DNA, 20 bp, Artificial Sequence
  Description of Artificial Sequence: Synthetic oligonucleotide
  Target: ATXN2; (-) strand; PAM type: NRG; PAM sequence: AAG
cacctaagtgagttaacctt

SEQ ID NO: 30487 - DNA, 20 bp, Artificial Sequence
  Description of Artificial Sequence: Synthetic oligonucleotide
  Target: ATXN2; (-) strand; PAM type: NRG; PAM sequence: GAG
acaaaatgactcacctaagt

SEQ ID NO: 30488 - DNA, 20 bp, Artificial Sequence
  Description of Artificial Sequence: Synthetic oligonucleotide
  Target: ATXN2; (-) strand; PAM type: NRG; PAM sequence: AAG
aagaacaaaatgactcacct

SEQ ID NO: 30489 - DNA, 20 bp, Artificial Sequence
  Description of Artificial Sequence: Synthetic oligonucleotide
  Target: ATXN2; (-) strand; PAM type: NRG; PAM sequence: AAG
aacaagaagtctgaaattgg

SEQ ID NO: 30490 - DNA, 20 bp, Artificial Sequence
  Description of Artificial Sequence: Synthetic oligonucleotide
  Target: ATXN2; (-) strand; PAM type: NRG; PAM sequence: TGG
aacaacaagaagtctgaaat

SEQ ID NO: 30491 - DNA, 20 bp, Artificial Sequence
  Description of Artificial Sequence: Synthetic oligonucleotide
  Target: ATXN2; (-) strand; PAM type: NRG; PAM sequence: AAG
ataatgtaaacaacaacaag

SEQ ID NO: 30492 - DNA, 20 bp, Artificial Sequence
  Description of Artificial Sequence: Synthetic oligonucleotide
  Target: ATXN2; (-) strand; PAM type: NRG; PAM sequence: AAG
ataataatgtaaacaacaac

SEQ ID NO: 30493 - DNA, 20 bp, Artificial Sequence
  Description of Artificial Sequence: Synthetic oligonucleotide
  Target: ATXN2; (-) strand; PAM type: NRG; PAM sequence: AGG
aaatattcaatacgtggtat

SEQ ID NO: 30494 - DNA, 20 bp, Artificial Sequence
  Description of Artificial Sequence: Synthetic oligonucleotide
  Target: ATXN2; (-) strand; PAM type: NRG; PAM sequence: TAG
aaaatattcaatacgtggta

SEQ ID NO: 30495 - DNA, 20 bp, Artificial Sequence
  Description of Artificial Sequence: Synthetic oligonucleotide
  Target: ATXN2; (-) strand; PAM type: NRG; PAM sequence: TGG
gggagaaaatattcaatacg

SEQ ID NO: 30496 - DNA, 20 bp, Artificial Sequence
  Description of Artificial Sequence: Synthetic oligonucleotide
  Target: ATXN2; (-) strand; PAM type: NRG; PAM sequence: GAG
atttgactcaactttttagg

SEQ ID NO: 30497 - DNA, 20 bp, Artificial Sequence
  Description of Artificial Sequence: Synthetic oligonucleotide
  Target: ATXN2; (-) strand; PAM type: NRG; PAM sequence: GGG
tcatttgactcaacttttta

SEQ ID NO: 30498 - DNA, 20 bp, Artificial Sequence
  Description of Artificial Sequence: Synthetic oligonucleotide
  Target: ATXN2; (-) strand; PAM type: NRG; PAM sequence: AGG
ctcatttgactcaacttttt

SEQ ID NO: 30499 - DNA, 20 bp, Artificial Sequence
  Description of Artificial Sequence: Synthetic oligonucleotide
  Target: ATXN2; (-) strand; PAM type: NRG; PAM sequence: TAG
cctcatttgactcaactttt

SEQ ID NO: 30500 - DNA, 20 bp, Artificial Sequence
  Description of Artificial Sequence: Synthetic oligonucleotide
  Target: ATXN2; (-) strand; PAM type: NRG; PAM sequence: TGG
tcactgtgtttgggttgtca

SEQ ID NO: 30501 - DNA, 20 bp, Artificial Sequence
  Description of Artificial Sequence: Synthetic oligonucleotide
  Target: ATXN2; (-) strand; PAM type: NRG; PAM sequence: GGG
actctagcttcactgtgttt

SEQ ID NO: 30502 - DNA, 20 bp, Artificial Sequence
  Description of Artificial Sequence: Synthetic oligonucleotide
  Target: ATXN2; (-) strand; PAM type: NRG; PAM sequence: TGG
aactctagcttcactgtgtt

SEQ ID NO: 30503 - DNA, 20 bp, Artificial Sequence
  Description of Artificial Sequence: Synthetic oligonucleotide
  Target: ATXN2; (-) strand; PAM type: NRG; PAM sequence: TAG
aaacaaaacaaaaaaaactc

SEQ ID NO: 30504 - DNA, 20 bp, Artificial Sequence
  Description of Artificial Sequence: Synthetic oligonucleotide
  Target: ATXN2; (-) strand; PAM type: NRG; PAM sequence: CAG
ttagagttgccttcccacct

SEQ ID NO: 30505 - DNA, 20 bp, Artificial Sequence
  Description of Artificial Sequence: Synthetic oligonucleotide
  Target: ATXN2; (-) strand; PAM type: NRG; PAM sequence: GAG
agttgttctgtgtgaattta

SEQ ID NO: 30506 - DNA, 20 bp, Artificial Sequence
  Description of Artificial Sequence: Synthetic oligonucleotide
  Target: ATXN2; (-) strand; PAM type: NRG; PAM sequence: TAG
gcagttgttctgtgtgaatt

SEQ ID NO: 30507 - DNA, 20 bp, Artificial Sequence
  Description of Artificial Sequence: Synthetic oligonucleotide
  Target: ATXN2; (-) strand; PAM type: NRG; PAM sequence: CAG
atatgaccggattaatctgg

SEQ ID NO: 30508 - DNA, 20 bp, Artificial Sequence
  Description of Artificial Sequence: Synthetic oligonucleotide
  Target: ATXN2; (-) strand; PAM type: NRG; PAM sequence: TGG
attatatgaccggattaatc

SEQ ID NO: 30509 - DNA, 20 bp, Artificial Sequence
  Description of Artificial Sequence: Synthetic oligonucleotide
  Target: ATXN2; (-) strand; PAM type: NRG; PAM sequence: CGG
atcctagatgattatatgac

SEQ ID NO: 30510 - DNA, 20 bp, Artificial Sequence
  Description of Artificial Sequence: Synthetic oligonucleotide
  Target: ATXN2; (-) strand; PAM type: NRG; PAM sequence: TAG
ttgttttgaaacaatgatcc

SEQ ID NO: 30511 - DNA, 20 bp, Artificial Sequence
  Description of Artificial Sequence: Synthetic oligonucleotide
  Target: ATXN2; (-) strand; PAM type: NRG; PAM sequence: TGG
gatattagttcttgtgtgaa

SEQ ID NO: 30512 - DNA, 20 bp, Artificial Sequence
  Description of Artificial Sequence: Synthetic oligonucleotide
  Target: ATXN2; (-) strand; PAM type: NRG; PAM sequence: TAG
caagcaattaatgctgatat

SEQ ID NO: 30513 - DNA, 20 bp, Artificial Sequence
  Description of Artificial Sequence: Synthetic oligonucleotide
  Target: ATXN2; (-) strand; PAM type: NRG; PAM sequence: AAG
tggagccggaatttgaaccc

SEQ ID NO: 30514 - DNA, 20 bp, Artificial Sequence
  Description of Artificial Sequence: Synthetic oligonucleotide
  Target: ATXN2; (-) strand; PAM type: NRG; PAM sequence: CGG
gagctgagaagtgatggagc

SEQ ID NO: 30515 - DNA, 20 bp, Artificial Sequence
  Description of Artificial Sequence: Synthetic oligonucleotide
  Target: ATXN2; (-) strand; PAM type: NRG; PAM sequence: GAG
cacagagctgagaagtgatg

SEQ ID NO: 30516 - DNA, 20 bp, Artificial Sequence
  Description of Artificial Sequence: Synthetic oligonucleotide
  Target: ATXN2; (-) strand; PAM type: NRG; PAM sequence: TGG
gccacagagctgagaagtga

SEQ ID NO: 30517 - DNA, 20 bp, Artificial Sequence
  Description of Artificial Sequence: Synthetic oligonucleotide
  Target: ATXN2; (-) strand; PAM type: NRG; PAM sequence: AAG
attaaggccacagagctgag

SEQ ID NO: 30518 - DNA, 20 bp, Artificial Sequence
  Description of Artificial Sequence: Synthetic oligonucleotide
  Target: ATXN2; (-) strand; PAM type: NRG; PAM sequence: GAG
aggattaaggccacagagct

SEQ ID NO: 30519 - DNA, 20 bp, Artificial Sequence
  Description of Artificial Sequence: Synthetic oligonucleotide
  Target: ATXN2; (-) strand; PAM type: NRG; PAM sequence: GAG
gtcacaggattaaggccaca

SEQ ID NO: 30520 - DNA, 20 bp, Artificial Sequence
  Description of Artificial Sequence: Synthetic oligonucleotide
  Target: ATXN2; (-) strand; PAM type: NRG; PAM sequence: CAG
aagtcacaggattaaggcca

SEQ ID NO: 30521 - DNA, 20 bp, Artificial Sequence
  Description of Artificial Sequence: Synthetic oligonucleotide
  Target: ATXN2; (-) strand; PAM type: NRG; PAM sequence: AGG
gagctgaagtcacaggatta

SEQ ID NO: 30522 - DNA, 20 bp, Artificial Sequence
  Description of Artificial Sequence: Synthetic oligonucleotide
  Target: ATXN2; (-) strand; PAM type: NRG; PAM sequence: AAG
agagctgaagtcacaggatt

SEQ ID NO: 30523 - DNA, 20 bp, Artificial Sequence
  Description of Artificial Sequence: Synthetic oligonucleotide
  Target: ATXN2; (-) strand; PAM type: NRG; PAM sequence: AGG
acacagagagctgaagtcac

SEQ ID NO: 30524 - DNA, 20 bp, Artificial Sequence
  Description of Artificial Sequence: Synthetic oligonucleotide
  Target: ATXN2; (-) strand; PAM type: NRG; PAM sequence: CAG
aacacagagagctgaagtca

SEQ ID NO: 30525 - DNA, 20 bp, Artificial Sequence
  Description of Artificial Sequence: Synthetic oligonucleotide
  Target: ATXN2; (-) strand; PAM type: NRG; PAM sequence: AAG
aattgaaacacagagagctg

SEQ ID NO: 30526 - DNA, 20 bp, Artificial Sequence
  Description of Artificial Sequence: Synthetic oligonucleotide
  Target: ATXN2; (-) strand; PAM type: NRG; PAM sequence: GAG
tgttgaaattgaaacacaga

SEQ ID NO: 30527 - DNA, 20 bp, Artificial Sequence
  Description of Artificial Sequence: Synthetic oligonucleotide
  Target: ATXN2; (-) strand; PAM type: NRG; PAM sequence: GAG
gatgttgaaattgaaacaca

SEQ ID NO: 30528 - DNA, 20 bp, Artificial Sequence
  Description of Artificial Sequence: Synthetic oligonucleotide
  Target: ATXN2; (-) strand; PAM type: NRG; PAM sequence: CAG
tagatgttgaaattgaaaca

SEQ ID NO: 30529 - DNA, 20 bp, Artificial Sequence
  Description of Artificial Sequence: Synthetic oligonucleotide
  Target: ATXN2; (-) strand; PAM type: NRG; PAM sequence: TAG
ctattttcatcttcatttca

SEQ ID NO: 30530 - DNA, 20 bp, Artificial Sequence
  Description of Artificial Sequence: Synthetic oligonucleotide
  Target: ATXN2; (-) strand; PAM type: NRG; PAM sequence: AGG
ctattttttttcttttgaga

SEQ ID NO: 30531 - DNA, 20 bp, Artificial Sequence
  Description of Artificial Sequence: Synthetic oligonucleotide
  Target: ATXN2; (-) strand; PAM type: NRG; PAM sequence: AAG
actattttttttcttttgag

SEQ ID NO: 30532 - DNA, 20 bp, Artificial Sequence
  Description of Artificial Sequence: Synthetic oligonucleotide
  Target: ATXN2; (-) strand; PAM type: NRG; PAM sequence: GAG
gatactattttttttctttt

SEQ ID NO: 30533 - DNA, 20 bp, Artificial Sequence
  Description of Artificial Sequence: Synthetic oligonucleotide
  Target: ATXN2; (-) strand; PAM type: NRG; PAM sequence: AAG
aatttccacaaccttatgaa

SEQ ID NO: 30534 - DNA, 20 bp, Artificial Sequence
  Description of Artificial Sequence: Synthetic oligonucleotide
  Target: ATXN2; (-) strand; PAM type: NRG; PAM sequence: TGG
tttaagctatgcgatctgta

SEQ ID NO: 30535 - DNA, 20 bp, Artificial Sequence
  Description of Artificial Sequence: Synthetic oligonucleotide
  Target: ATXN2; (-) strand; PAM type: NRG; PAM sequence: AAG
aacataccaggcactgtttt

SEQ ID NO: 30536 - DNA, 20 bp, Artificial Sequence
  Description of Artificial Sequence: Synthetic oligonucleotide
  Target: ATXN2; (-) strand; PAM type: NRG; PAM sequence: AGG
taaacacttaataacatacc

SEQ ID NO: 30537 - DNA, 20 bp, Artificial Sequence
  Description of Artificial Sequence: Synthetic oligonucleotide
  Target: ATXN2; (-) strand; PAM type: NRG; PAM sequence: CAG
ttaaacacttaataacatac

SEQ ID NO: 30538 - DNA, 20 bp, Artificial Sequence
  Description of Artificial Sequence: Synthetic oligonucleotide
  Target: ATXN2; (-) strand; PAM type: NRG; PAM sequence: CAG
gaaataattatattagctag

SEQ ID NO: 30539 - DNA, 20 bp, Artificial Sequence
  Description of Artificial Sequence: Synthetic oligonucleotide
  Target: ATXN2; (-) strand; PAM type: NRG; PAM sequence: TAG
gaggaaataattatattagc

SEQ ID NO: 30540 - DNA, 20 bp, Artificial Sequence
  Description of Artificial Sequence: Synthetic oligonucleotide
  Target: ATXN2; (-) strand; PAM type: NRG; PAM sequence: TAG
atatgaggaaataattatat

SEQ ID NO: 30541 - DNA, 20 bp, Artificial Sequence
  Description of Artificial Sequence: Synthetic oligonucleotide
  Target: ATXN2; (-) strand; PAM type: NRG; PAM sequence: AGG
ctagtgtatgctggaatatg

SEQ ID NO: 30542 - DNA, 20 bp, Artificial Sequence
  Description of Artificial Sequence: Synthetic oligonucleotide
  Target: ATXN2; (-) strand; PAM type: NRG; PAM sequence: GAG
tctagtgtatgctggaatat

SEQ ID NO: 30543 - DNA, 20 bp, Artificial Sequence
  Description of Artificial Sequence: Synthetic oligonucleotide
  Target: ATXN2; (-) strand; PAM type: NRG; PAM sequence: TGG
tttactactctagtgtatgc

SEQ ID NO: 30544 - DNA, 20 bp, Artificial Sequence
  Description of Artificial Sequence: Synthetic oligonucleotide
  Target: ATXN2; (-) strand; PAM type: NRG; PAM sequence: TAG
ttttttctcctttactactc

SEQ ID NO: 30545 - DNA, 20 bp, Artificial Sequence
  Description of Artificial Sequence: Synthetic oligonucleotide
  Target: ATXN2; (-) strand; PAM type: NRG; PAM sequence: TGG
caggtgtgggccactgcgac

SEQ ID NO: 30546 - DNA, 20 bp, Artificial Sequence
  Description of Artificial Sequence: Synthetic oligonucleotide
  Target: ATXN2; (-) strand; PAM type: NRG; PAM sequence: GGG
agtgctgggattgcaggtgt

SEQ ID NO: 30547 - DNA, 20 bp, Artificial Sequence
  Description of Artificial Sequence: Synthetic oligonucleotide
  Target: ATXN2; (-) strand; PAM type: NRG; PAM sequence: TGG
gagtgctgggattgcaggtg

SEQ ID NO: 30548 - DNA, 20 bp, Artificial Sequence
  Description of Artificial Sequence: Synthetic oligonucleotide
  Target: ATXN2; (-) strand; PAM type: NRG; PAM sequence: AGG
tcccagagtgctgggattgc

SEQ ID NO: 30549 - DNA, 20 bp, Artificial Sequence
  Description of Artificial Sequence: Synthetic oligonucleotide
  Target: ATXN2; (-) strand; PAM type: NRG; PAM sequence: CAG
ctcccagagtgctgggattg

SEQ ID NO: 30550 - DNA, 20 bp, Artificial Sequence
  Description of Artificial Sequence: Synthetic oligonucleotide
  Target: ATXN2; (-) strand; PAM type: NRG; PAM sequence: GGG
ccttggcctcccagagtgct

SEQ ID NO: 30551 - DNA, 20 bp, Artificial Sequence
  Description of Artificial Sequence: Synthetic oligonucleotide
  Target: ATXN2; (-) strand; PAM type: NRG; PAM sequence: TGG
accttggcctcccagagtgc

SEQ ID NO: 30552 - DNA, 20 bp, Artificial Sequence
  Description of Artificial Sequence: Synthetic oligonucleotide
  Target: ATXN2; (-) strand; PAM type: NRG; PAM sequence: GAG
ggactcaccttggcctccca

SEQ ID NO: 30553 - DNA, 20 bp, Artificial Sequence
  Description of Artificial Sequence: Synthetic oligonucleotide
  Target: ATXN2; (-) strand; PAM type: NRG; PAM sequence: CAG
ctggactcaccttggcctcc

SEQ ID NO: 30554 - DNA, 20 bp, Artificial Sequence
  Description of Artificial Sequence: Synthetic oligonucleotide
  Target: ATXN2; (-) strand; PAM type: NRG; PAM sequence: TGG
tcaaattcctggactcacct

SEQ ID NO: 30555 - DNA, 20 bp, Artificial Sequence
  Description of Artificial Sequence: Synthetic oligonucleotide
  Target: ATXN2; (-) strand; PAM type: NRG; PAM sequence: TGG
ccaggctggtctcaaattcc

SEQ ID NO: 30556 - DNA, 20 bp, Artificial Sequence
  Description of Artificial Sequence: Synthetic oligonucleotide
  Target: ATXN2; (-) strand; PAM type: NRG; PAM sequence: TGG
tttcgccatgttgtccaggc

SEQ ID NO: 30557 - DNA, 20 bp, Artificial Sequence
  Description of Artificial Sequence: Synthetic oligonucleotide
  Target: ATXN2; (-) strand; PAM type: NRG; PAM sequence: AGG
gagatttcgccatgttgtcc

SEQ ID NO: 30558 - DNA, 20 bp, Artificial Sequence
  Description of Artificial Sequence: Synthetic oligonucleotide
  Target: ATXN2; (-) strand; PAM type: NRG; PAM sequence: CAG
cgagatttcgccatgttgtc

SEQ ID NO: 30559 - DNA, 20 bp, Artificial Sequence
  Description of Artificial Sequence: Synthetic oligonucleotide
  Target: ATXN2; (-) strand; PAM type: NRG; PAM sequence: GAG
ttaaaactttctgtagagac

SEQ ID NO: 30560 - DNA, 20 bp, Artificial Sequence
  Description of Artificial Sequence: Synthetic oligonucleotide
  Target: ATXN2; (-) strand; PAM type: NRG; PAM sequence: GAG
aatttttaaaactttctgta

SEQ ID NO: 30561 - DNA, 20 bp, Artificial Sequence
  Description of Artificial Sequence: Synthetic oligonucleotide
  Target: ATXN2; (-) strand; PAM type: NRG; PAM sequence: TAG
ctaatttttaaaactttctg

SEQ ID NO: 30562 - DNA, 20 bp, Artificial Sequence
  Description of Artificial Sequence: Synthetic oligonucleotide
  Target: ATXN2; (-) strand; PAM type: NRG; PAM sequence: GAG
gtaactggaactgtaggcat

SEQ ID NO: 30563 - DNA, 20 bp, Artificial Sequence
  Description of Artificial Sequence: Synthetic oligonucleotide
  Target: ATXN2; (-) strand; PAM type: NRG; PAM sequence: AGG
tcccaagtaactggaactgt

SEQ ID NO: 30564 - DNA, 20 bp, Artificial Sequence
  Description of Artificial Sequence: Synthetic oligonucleotide
  Target: ATXN2; (-) strand; PAM type: NRG; PAM sequence: TAG
ctcccaagtaactggaactg

SEQ ID NO: 30565 - DNA, 20 bp, Artificial Sequence
  Description of Artificial Sequence: Synthetic oligonucleotide
  Target: ATXN2; (-) strand; PAM type: NRG; PAM sequence: TGG
cacctcagctcccaagtaac

SEQ ID NO: 30566 - DNA, 20 bp, Artificial Sequence
  Description of Artificial Sequence: Synthetic oligonucleotide
  Target: ATXN2; (-) strand; PAM type: NRG; PAM sequence: AAG
atcctcccacctcagctccc

SEQ ID NO: 30567 - DNA, 20 bp, Artificial Sequence
  Description of Artificial Sequence: Synthetic oligonucleotide
  Target: ATXN2; (-) strand; PAM type: NRG; PAM sequence: CAG
cttaagtgatcctcccacct

SEQ ID NO: 30568 - DNA, 20 bp, Artificial Sequence
  Description of Artificial Sequence: Synthetic oligonucleotide
  Target: ATXN2; (-) strand; PAM type: NRG; PAM sequence: AAG
agcctcgacttcctgggctt

SEQ ID NO: 30569 - DNA, 20 bp, Artificial Sequence
  Description of Artificial Sequence: Synthetic oligonucleotide
  Target: ATXN2; (-) strand; PAM type: NRG; PAM sequence: GGG
cactgcagcctcgacttcct

SEQ ID NO: 30570 - DNA, 20 bp, Artificial Sequence
  Description of Artificial Sequence: Synthetic oligonucleotide
  Target: ATXN2; (-) strand; PAM type: NRG; PAM sequence: TGG
tcactgcagcctcgacttcc

SEQ ID NO: 30571 - DNA, 20 bp, Artificial Sequence
  Description of Artificial Sequence: Synthetic oligonucleotide
  Target: ATXN2; (-) strand; PAM type: NRG; PAM sequence: CAG
ggcatgatcctggctcactg

SEQ ID NO: 30572 - DNA, 20 bp, Artificial Sequence
  Description of Artificial Sequence: Synthetic oligonucleotide
  Target: ATXN2; (-) strand; PAM type: NRG; PAM sequence: TGG
ggagtccagtggcatgatcc

SEQ ID NO: 30573 - DNA, 20 bp, Artificial Sequence
  Description of Artificial Sequence: Synthetic oligonucleotide
  Target: ATXN2; (-) strand; PAM type: NRG; PAM sequence: TGG
tcactcaggctggagtccag

SEQ ID NO: 30574 - DNA, 20 bp, Artificial Sequence
  Description of Artificial Sequence: Synthetic oligonucleotide
  Target: ATXN2; (-) strand; PAM type: NRG; PAM sequence: CAG
ctgtcactcaggctggagtc

SEQ ID NO: 30575 - DNA, 20 bp, Artificial Sequence
  Description of Artificial Sequence: Synthetic oligonucleotide
  Target: ATXN2; (-) strand; PAM type: NRG; PAM sequence: GAG
tcgctctgtcactcaggctg

SEQ ID NO: 30576 - DNA, 20 bp, Artificial Sequence
  Description of Artificial Sequence: Synthetic oligonucleotide
  Target: ATXN2; (-) strand; PAM type: NRG; PAM sequence: TGG
tctcgctctgtcactcaggc

SEQ ID NO: 30577 - DNA, 20 bp, Artificial Sequence
  Description of Artificial Sequence: Synthetic oligonucleotide
  Target: ATXN2; (-) strand; PAM type: NRG; PAM sequence: AGG
agggtctcgctctgtcactc

SEQ ID NO: 30578 - DNA, 20 bp, Artificial Sequence
  Description of Artificial Sequence: Synthetic oligonucleotide
  Target: ATXN2; (-) strand; PAM type: NRG; PAM sequence: CAG
cagggtctcgctctgtcact

SEQ ID NO: 30579 - DNA, 20 bp, Artificial Sequence
  Description of Artificial Sequence: Synthetic oligonucleotide
  Target: ATXN2; (-) strand; PAM type: NRG; PAM sequence: GGG
ggtggtggtgttttaagaca

SEQ ID NO: 30580 - DNA, 20 bp, Artificial Sequence
  Description of Artificial Sequence: Synthetic oligonucleotide
  Target: ATXN2; (-) strand; PAM type: NRG; PAM sequence: AGG
tggtggtggtgttttaagac

SEQ ID NO: 30581 - DNA, 20 bp, Artificial Sequence
  Description of Artificial Sequence: Synthetic oligonucleotide
  Target: ATXN2; (-) strand; PAM type: NRG; PAM sequence: CAG
gtggtggtggtgttttaaga

SEQ ID NO: 30582 - DNA, 20 bp, Artificial Sequence
  Description of Artificial Sequence: Synthetic oligonucleotide
  Target: ATXN2; (-) strand; PAM type: NRG; PAM sequence: AAG
ggtggtggtggtggtgtttt

SEQ ID NO: 30583 - DNA, 20 bp, Artificial Sequence
  Description of Artificial Sequence: Synthetic oligonucleotide
  Target: ATXN2; (-) strand; PAM type: NRG; PAM sequence: TGG
gaagagtgtggtggtggtgg

SEQ ID NO: 30584 - DNA, 20 bp, Artificial Sequence
  Description of Artificial Sequence: Synthetic oligonucleotide
  Target: ATXN2; (-) strand; PAM type: NRG; PAM sequence: TGG
tatgaagagtgtggtggtgg

SEQ ID NO: 30585 - DNA, 20 bp, Artificial Sequence
  Description of Artificial Sequence: Synthetic oligonucleotide
  Target: ATXN2; (-) strand; PAM type: NRG; PAM sequence: TGG
tcatatgaagagtgtggtgg

SEQ ID NO: 30586 - DNA, 20 bp, Artificial Sequence
  Description of Artificial Sequence: Synthetic oligonucleotide
  Target: ATXN2; (-) strand; PAM type: NRG; PAM sequence: TGG
acttcatatgaagagtgtgg

SEQ ID NO: 30587 - DNA, 20 bp, Artificial Sequence
  Description of Artificial Sequence: Synthetic oligonucleotide
  Target: ATXN2; (-) strand; PAM type: NRG; PAM sequence: TGG
aaaacttcatatgaagagtg

SEQ ID NO: 30588 - DNA, 20 bp, Artificial Sequence
  Description of Artificial Sequence: Synthetic oligonucleotide
  Target: ATXN2; (-) strand; PAM type: NRG; PAM sequence: GAG
ggggtaaaacttcatatgaa

SEQ ID NO: 30589 - DNA, 20 bp, Artificial Sequence
  Description of Artificial Sequence: Synthetic oligonucleotide
  Target: ATXN2; (-) strand; PAM type: NRG; PAM sequence: AAG
aaggggtaaaacttcatatg

SEQ ID NO: 30590 - DNA, 20 bp, Artificial Sequence
  Description of Artificial Sequence: Synthetic oligonucleotide
  Target: ATXN2; (-) strand; PAM type: NRG; PAM sequence: GGG
aaggggtaaaggcactgaag

SEQ ID NO: 30591 - DNA, 20 bp, Artificial Sequence
  Description of Artificial Sequence: Synthetic oligonucleotide
  Target: ATXN2; (-) strand; PAM type: NRG; PAM sequence: GGG
caaggggtaaaggcactgaa

SEQ ID NO: 30592 - DNA, 20 bp, Artificial Sequence
  Description of Artificial Sequence: Synthetic oligonucleotide
  Target: ATXN2; (-) strand; PAM type: NRG; PAM sequence: AGG
tcaaggggtaaaggcactga

SEQ ID NO: 30593 - DNA, 20 bp, Artificial Sequence
  Description of Artificial Sequence: Synthetic oligonucleotide
  Target: ATXN2; (-) strand; PAM type: NRG; PAM sequence: AAG
ctcaaggggtaaaggcactg

SEQ ID NO: 30594 - DNA, 20 bp, Artificial Sequence
  Description of Artificial Sequence: Synthetic oligonucleotide
  Target: ATXN2; (-) strand; PAM type: NRG; PAM sequence: AGG
tagagggactcaaggggtaa

SEQ ID NO: 30595 - DNA, 20 bp, Artificial Sequence
  Description of Artificial Sequence: Synthetic oligonucleotide
  Target: ATXN2; (-) strand; PAM type: NRG; PAM sequence: AAG
ctagagggactcaaggggta

SEQ ID NO: 30596 - DNA, 20 bp, Artificial Sequence
  Description of Artificial Sequence: Synthetic oligonucleotide
  Target: ATXN2; (-) strand; PAM type: NRG; PAM sequence: GGG
tttctctagagggactcaag

SEQ ID NO: 30597 - DNA, 20 bp, Artificial Sequence
  Description of Artificial Sequence: Synthetic oligonucleotide
  Target: ATXN2; (-) strand; PAM type: NRG; PAM sequence: GGG
ctttctctagagggactcaa

SEQ ID NO: 30598 - DNA, 20 bp, Artificial Sequence
  Description of Artificial Sequence: Synthetic oligonucleotide
  Target: ATXN2; (-) strand; PAM type: NRG; PAM sequence: AGG
cctttctctagagggactca

SEQ ID NO: 30599 - DNA, 20 bp, Artificial Sequence
  Description of Artificial Sequence: Synthetic oligonucleotide
  Target: ATXN2; (-) strand; PAM type: NRG; PAM sequence: AAG
ccctttctctagagggactc

SEQ ID NO: 30600 - DNA, 20 bp, Artificial Sequence
  Description of Artificial Sequence: Synthetic oligonucleotide
  Target: ATXN2; (-) strand; PAM type: NRG; PAM sequence: GGG
cttttatccctttctctaga

SEQ ID NO: 30601 - DNA, 20 bp, Artificial Sequence
  Description of Artificial Sequence: Synthetic oligonucleotide
  Target: ATXN2; (-) strand; PAM type: NRG; PAM sequence: AGG
ccttttatccctttctctag

SEQ ID NO: 30602 - DNA, 20 bp, Artificial Sequence
  Description of Artificial Sequence: Synthetic oligonucleotide
  Target: ATXN2; (-) strand; PAM type: NRG; PAM sequence: GAG
gccttttatccctttctcta

SEQ ID NO: 30603 - DNA, 20 bp, Artificial Sequence
  Description of Artificial Sequence: Synthetic oligonucleotide
  Target: ATXN2; (-) strand; PAM type: NRG; PAM sequence: TAG
aagccttttatccctttctc

SEQ ID NO: 30604 - DNA, 20 bp, Artificial Sequence
  Description of Artificial Sequence: Synthetic oligonucleotide
  Target: ATXN2; (-) strand; PAM type: NRG; PAM sequence: AAG
ttgttcatggcttcatgacc

SEQ ID NO: 30605 - DNA, 20 bp, Artificial Sequence
  Description of Artificial Sequence: Synthetic oligonucleotide
  Target: ATXN2; (-) strand; PAM type: NRG; PAM sequence: TGG
aggttggatctagttgttca

SEQ ID NO: 30606 - DNA, 20 bp, Artificial Sequence
  Description of Artificial Sequence: Synthetic oligonucleotide
  Target: ATXN2; (-) strand; PAM type: NRG; PAM sequence: TAG
tggtgtgtctaggttggatc

SEQ ID NO: 30607 - DNA, 20 bp, Artificial Sequence
  Description of Artificial Sequence: Synthetic oligonucleotide
  Target: ATXN2; (-) strand; PAM type: NRG; PAM sequence: TGG
attttttggtgtgtctaggt

SEQ ID NO: 30608 - DNA, 20 bp, Artificial Sequence
  Description of Artificial Sequence: Synthetic oligonucleotide
  Target: ATXN2; (-) strand; PAM type: NRG; PAM sequence: AGG
ttggattttttggtgtgtct

SEQ ID NO: 30609 - DNA, 20 bp, Artificial Sequence
  Description of Artificial Sequence: Synthetic oligonucleotide
  Target: ATXN2; (-) strand; PAM type: NRG; PAM sequence: TAG
tttggattttttggtgtgtc

SEQ ID NO: 30610 - DNA, 20 bp, Artificial Sequence
  Description of Artificial Sequence: Synthetic oligonucleotide
  Target: ATXN2; (-) strand; PAM type: NRG; PAM sequence: TGG
cctgagttgtttggattttt

SEQ ID NO: 30611 - DNA, 20 bp, Artificial Sequence
  Description of Artificial Sequence: Synthetic oligonucleotide
  Target: ATXN2; (-) strand; PAM type: NRG; PAM sequence: TGG
ccttttctacctgagttgtt

SEQ ID NO: 30612 - DNA, 20 bp, Artificial Sequence
  Description of Artificial Sequence: Synthetic oligonucleotide
  Target: ATXN2; (-) strand; PAM type: NRG; PAM sequence: GAG
cctaagatccttttctacct

SEQ ID NO: 30613 - DNA, 20 bp, Artificial Sequence
  Description of Artificial Sequence: Synthetic oligonucleotide
  Target: ATXN2; (-) strand; PAM type: NRG; PAM sequence: AAG
cagcatgggactagagccct

SEQ ID NO: 30614 - DNA, 20 bp, Artificial Sequence
  Description of Artificial Sequence: Synthetic oligonucleotide
  Target: ATXN2; (-) strand; PAM type: NRG; PAM sequence: GAG
tcttggacagcatgggacta

SEQ ID NO: 30615 - DNA, 20 bp, Artificial Sequence
  Description of Artificial Sequence: Synthetic oligonucleotide
  Target: ATXN2; (-) strand; PAM type: NRG; PAM sequence: TAG
tctcttggacagcatgggac

SEQ ID NO: 30616 - DNA, 20 bp, Artificial Sequence
  Description of Artificial Sequence: Synthetic oligonucleotide
  Target: ATXN2; (-) strand; PAM type: NRG; PAM sequence: GGG
aaagttctcttggacagcat

SEQ ID NO: 30617 - DNA, 20 bp, Artificial Sequence
  Description of Artificial Sequence: Synthetic oligonucleotide
  Target: ATXN2; (-) strand; PAM type: NRG; PAM sequence: TGG
caaagttctcttggacagca

SEQ ID NO: 30618 - DNA, 20 bp, Artificial Sequence
  Description of Artificial Sequence: Synthetic oligonucleotide
  Target: ATXN2; (-) strand; PAM type: NRG; PAM sequence: CAG
ttgtacaaagttctcttgga

SEQ ID NO: 30619 - DNA, 20 bp, Artificial Sequence
  Description of Artificial Sequence: Synthetic oligonucleotide
  Target: ATXN2; (-) strand; PAM type: NRG; PAM sequence: TGG
atcattgtacaaagttctct

SEQ ID NO: 30620 - DNA, 20 bp, Artificial Sequence
  Description of Artificial Sequence: Synthetic oligonucleotide
  Target: ATXN2; (-) strand; PAM type: NRG; PAM sequence: AAG
gacatcttcatcattgtaca

SEQ ID NO: 30621 - DNA, 20 bp, Artificial Sequence
  Description of Artificial Sequence: Synthetic oligonucleotide
  Target: ATXN2; (-) strand; PAM type: NRG; PAM sequence: AGG
aatattggacagcatgacat

SEQ ID NO: 30622 - DNA, 20 bp, Artificial Sequence
  Description of Artificial Sequence: Synthetic oligonucleotide
  Target: ATXN2; (-) strand; PAM type: NRG; PAM sequence: TAG
caatattggacagcatgaca

SEQ ID NO: 30623 - DNA, 20 bp, Artificial Sequence
  Description of Artificial Sequence: Synthetic oligonucleotide
  Target: ATXN2; (-) strand; PAM type: NRG; PAM sequence: CAG
ctaatggctgcaatattgga

SEQ ID NO: 30624 - DNA, 20 bp, Artificial Sequence
  Description of Artificial Sequence: Synthetic oligonucleotide
  Target: ATXN2; (-) strand; PAM type: NRG; PAM sequence: TGG
gtgcctaatggctgcaatat

SEQ ID NO: 30625 - DNA, 20 bp, Artificial Sequence
  Description of Artificial Sequence: Synthetic oligonucleotide
  Target: ATXN2; (-) strand; PAM type: NRG; PAM sequence: TGG
tagctgccacatgtgcctaa

SEQ ID NO: 30626 - DNA, 20 bp, Artificial Sequence
  Description of Artificial Sequence: Synthetic oligonucleotide
  Target: ATXN2; (-) strand; PAM type: NRG; PAM sequence: TAG
ctaatcgtatttcaagtgct

SEQ ID NO: 30627 - DNA, 20 bp, Artificial Sequence
  Description of Artificial Sequence: Synthetic oligonucleotide
  Target: ATXN2; (-) strand; PAM type: NRG; PAM sequence: AAG
agccatactaatcgtatttc

SEQ ID NO: 30628 - DNA, 20 bp, Artificial Sequence
  Description of Artificial Sequence: Synthetic oligonucleotide
  Target: ATXN2; (-) strand; PAM type: NRG; PAM sequence: CAG
atttaaatatttcagttcct

SEQ ID NO: 30629 - DNA, 20 bp, Artificial Sequence
  Description of Artificial Sequence: Synthetic oligonucleotide
  Target: ATXN2; (-) strand; PAM type: NRG; PAM sequence: CAG
tgattaaaatttaaatattt

SEQ ID NO: 30630 - DNA, 20 bp, Artificial Sequence
  Description of Artificial Sequence: Synthetic oligonucleotide
  Target: ATXN2; (-) strand; PAM type: NRG; PAM sequence: TGG
attgtggctacttccacaca

SEQ ID NO: 30631 - DNA, 20 bp, Artificial Sequence
  Description of Artificial Sequence: Synthetic oligonucleotide
  Target: ATXN2; (-) strand; PAM type: NRG; PAM sequence: TGG
atgggcactgtccagtattg

SEQ ID NO: 30632 - DNA, 20 bp, Artificial Sequence
  Description of Artificial Sequence: Synthetic oligonucleotide
  Target: ATXN2; (-) strand; PAM type: NRG; PAM sequence: CAG
agatgggaatgggcactgtc

SEQ ID NO: 30633 - DNA, 20 bp, Artificial Sequence
  Description of Artificial Sequence: Synthetic oligonucleotide
  Target: ATXN2; (-) strand; PAM type: NRG; PAM sequence: GGG
gaactcgagaagatgggaat

SEQ ID NO: 30634 - DNA, 20 bp, Artificial Sequence
  Description of Artificial Sequence: Synthetic oligonucleotide
  Target: ATXN2; (-) strand; PAM type: NRG; PAM sequence: TGG
agaactcgagaagatgggaa

SEQ ID NO: 30635 - DNA, 20 bp, Artificial Sequence
  Description of Artificial Sequence: Synthetic oligonucleotide
  Target: ATXN2; (-) strand; PAM type: NRG; PAM sequence: GGG
tctggagaactcgagaagat

SEQ ID NO: 30636 - DNA, 20 bp, Artificial Sequence
  Description of Artificial Sequence: Synthetic oligonucleotide
  Target: ATXN2; (-) strand; PAM type: NRG; PAM sequence: TGG
gtctggagaactcgagaaga

SEQ ID NO: 30637 - DNA, 20 bp, Artificial Sequence
  Description of Artificial Sequence: Synthetic oligonucleotide
  Target: ATXN2; (-) strand; PAM type: NRG; PAM sequence: AAG
tactgtctggagaactcgag

SEQ ID NO: 30638 - DNA, 20 bp, Artificial Sequence
  Description of Artificial Sequence: Synthetic oligonucleotide
  Target: ATXN2; (-) strand; PAM type: NRG; PAM sequence: GAG
gcttactgtctggagaactc

SEQ ID NO: 30639 - DNA, 20 bp, Artificial Sequence
  Description of Artificial Sequence: Synthetic oligonucleotide
  Target: ATXN2; (-) strand; PAM type: NRG; PAM sequence: GAG
agggggtggcttactgtctg

SEQ ID NO: 30640 - DNA, 20 bp, Artificial Sequence
  Description of Artificial Sequence: Synthetic oligonucleotide
  Target: ATXN2; (-) strand; PAM type: NRG; PAM sequence: TGG
gaagggggtggcttactgtc

SEQ ID NO: 30641 - DNA, 20 bp, Artificial Sequence
  Description of Artificial Sequence: Synthetic oligonucleotide
  Target: ATXN2; (-) strand; PAM type: NRG; PAM sequence: TGG
atgaatgccgtggaaggggg

SEQ ID NO: 30642 - DNA, 20 bp, Artificial Sequence
  Description of Artificial Sequence: Synthetic oligonucleotide
  Target: ATXN2; (-) strand; PAM type: NRG; PAM sequence: GGG
gatatgaatgccgtggaagg

SEQ ID NO: 30643 - DNA, 20 bp, Artificial Sequence
  Description of Artificial Sequence: Synthetic oligonucleotide
  Target: ATXN2; (-) strand; PAM type: NRG; PAM sequence: GGG
tgatatgaatgccgtggaag

SEQ ID NO: 30644 - DNA, 20 bp, Artificial Sequence
  Description of Artificial Sequence: Synthetic oligonucleotide
  Target: ATXN2; (-) strand; PAM type: NRG; PAM sequence: GGG
gtgatatgaatgccgtggaa

SEQ ID NO: 30645 - DNA, 20 bp, Artificial Sequence
  Description of Artificial Sequence: Synthetic oligonucleotide
  Target: ATXN2; (-) strand; PAM type: NRG; PAM sequence: AGG
ggtgatatgaatgccgtgga

SEQ ID NO: 30646 - DNA, 20 bp, Artificial Sequence
  Description of Artificial Sequence: Synthetic oligonucleotide
  Target: ATXN2; (-) strand; PAM type: NRG; PAM sequence: AAG
aggtgatatgaatgccgtgg

SEQ ID NO: 30647 - DNA, 20 bp, Artificial Sequence
  Description of Artificial Sequence: Synthetic oligonucleotide
  Target: ATXN2; (-) strand; PAM type: NRG; PAM sequence: TGG
cagaggtgatatgaatgccg

SEQ ID NO: 30648 - DNA, 20 bp, Artificial Sequence
  Description of Artificial Sequence: Synthetic oligonucleotide
  Target: ATXN2; (-) strand; PAM type: NRG; PAM sequence: AGG
attcttggtgcataagtcag

SEQ ID NO: 30649 - DNA, 20 bp, Artificial Sequence
  Description of Artificial Sequence: Synthetic oligonucleotide
  Target: ATXN2; (-) strand; PAM type: NRG; PAM sequence: GAG
cattcttggtgcataagtca

SEQ ID NO: 30650 - DNA, 20 bp, Artificial Sequence
  Description of Artificial Sequence: Synthetic oligonucleotide
  Target: ATXN2; (-) strand; PAM type: NRG; PAM sequence: CAG
agcattcttggtgcataagt

SEQ ID NO: 30651 - DNA, 20 bp, Artificial Sequence
  Description of Artificial Sequence: Synthetic oligonucleotide
  Target: ATXN2; (-) strand; PAM type: NRG; PAM sequence: AAG
aggaagcattcttggtgcat

SEQ ID NO: 30652 - DNA, 20 bp, Artificial Sequence
  Description of Artificial Sequence: Synthetic oligonucleotide
  Target: ATXN2; (-) strand; PAM type: NRG; PAM sequence: TGG
ttcctgtcaggaagcattct

SEQ ID NO: 30653 - DNA, 20 bp, Artificial Sequence
  Description of Artificial Sequence: Synthetic oligonucleotide
  Target: ATXN2; (-) strand; PAM type: NRG; PAM sequence: AAG
gacttgagtttcctgtcagg

SEQ ID NO: 30654 - DNA, 20 bp, Artificial Sequence
  Description of Artificial Sequence: Synthetic oligonucleotide
  Target: ATXN2; (-) strand; PAM type: NRG; PAM sequence: AGG
agagacttgagtttcctgtc

SEQ ID NO: 30655 - DNA, 20 bp, Artificial Sequence
  Description of Artificial Sequence: Synthetic oligonucleotide
  Target: ATXN2; (-) strand; PAM type: NRG; PAM sequence: CAG
gagagacttgagtttcctgt

SEQ ID NO: 30656 - DNA, 20 bp, Artificial Sequence
  Description of Artificial Sequence: Synthetic oligonucleotide
  Target: ATXN2; (-) strand; PAM type: NRG; PAM sequence: GAG
tagatcgttgggagagactt

SEQ ID NO: 30657 - DNA, 20 bp, Artificial Sequence
  Description of Artificial Sequence: Synthetic oligonucleotide
  Target: ATXN2; (-) strand; PAM type: NRG; PAM sequence: GAG
caacgggtagatcgttggga

SEQ ID NO: 30658 - DNA, 20 bp, Artificial Sequence
  Description of Artificial Sequence: Synthetic oligonucleotide
  Target: ATXN2; (-) strand; PAM type: NRG; PAM sequence: GAG
agcaacgggtagatcgttgg

SEQ ID NO: 30659 - DNA, 20 bp, Artificial Sequence
  Description of Artificial Sequence: Synthetic oligonucleotide
  Target: ATXN2; (-) strand; PAM type: NRG; PAM sequence: GGG
tgagcaacgggtagatcgtt

SEQ ID NO: 30660 - DNA, 20 bp, Artificial Sequence
  Description of Artificial Sequence: Synthetic oligonucleotide
  Target: ATXN2; (-) strand; PAM type: NRG; PAM sequence: TGG
atgagcaacgggtagatcgt

SEQ ID NO: 30661 - DNA, 20 bp, Artificial Sequence
  Description of Artificial Sequence: Synthetic oligonucleotide
  Target: ATXN2; (-) strand; PAM type: NRG; PAM sequence: TAG
ataagtttatgagcaacggg

SEQ ID NO: 30662 - DNA, 20 bp, Artificial Sequence
  Description of Artificial Sequence: Synthetic oligonucleotide
  Target: ATXN2; (-) strand; PAM type: NRG; PAM sequence: GGG
gggataagtttatgagcaac

SEQ ID NO: 30663 - DNA, 20 bp, Artificial Sequence
  Description of Artificial Sequence: Synthetic oligonucleotide
  Target: ATXN2; (-) strand; PAM type: NRG; PAM sequence: CGG
agggataagtttatgagcaa

SEQ ID NO: 30664 - DNA, 20 bp, Artificial Sequence
  Description of Artificial Sequence: Synthetic oligonucleotide
  Target: ATXN2; (-) strand; PAM type: NRG; PAM sequence: GAG
ccagaaagggataagtttat

SEQ ID NO: 30665 - DNA, 20 bp, Artificial Sequence
  Description of Artificial Sequence: Synthetic oligonucleotide
  Target: ATXN2; (-) strand; PAM type: NRG; PAM sequence: AAG
tgtggcctccagaaagggat

SEQ ID NO: 30666 - DNA, 20 bp, Artificial Sequence
  Description of Artificial Sequence: Synthetic oligonucleotide
  Target: ATXN2; (-) strand; PAM type: NRG; PAM sequence: GGG
tgttttgtggcctccagaaa

SEQ ID NO: 30667 - DNA, 20 bp, Artificial Sequence
  Description of Artificial Sequence: Synthetic oligonucleotide
  Target: ATXN2; (-) strand; PAM type: NRG; PAM sequence: AGG
ttgttttgtggcctccagaa

SEQ ID NO: 30668 - DNA, 20 bp, Artificial Sequence
  Description of Artificial Sequence: Synthetic oligonucleotide
  Target: ATXN2; (-) strand; PAM type: NRG; PAM sequence: AAG
attgttttgtggcctccaga

SEQ ID NO: 30669 - DNA, 20 bp, Artificial Sequence
  Description of Artificial Sequence: Synthetic oligonucleotide
  Target: ATXN2; (-) strand; PAM type: NRG; PAM sequence: CAG
tacaattgttttgtggcctc

SEQ ID NO: 30670 - DNA, 20 bp, Artificial Sequence
  Description of Artificial Sequence: Synthetic oligonucleotide
  Target: ATXN2; (-) strand; PAM type: NRG; PAM sequence: TGG
aggggaatacaattgttttg

SEQ ID NO: 30671 - DNA, 20 bp, Artificial Sequence
  Description of Artificial Sequence: Synthetic oligonucleotide
  Target: ATXN2; (-) strand; PAM type: NRG; PAM sequence: GGG
ccactgatagtcttttgaag

SEQ ID NO: 30672 - DNA, 20 bp, Artificial Sequence
  Description of Artificial Sequence: Synthetic oligonucleotide
  Target: ATXN2; (-) strand; PAM type: NRG; PAM sequence: GGG
tccactgatagtcttttgaa

SEQ ID NO: 30673 - DNA, 20 bp, Artificial Sequence
  Description of Artificial Sequence: Synthetic oligonucleotide
  Target: ATXN2; (-) strand; PAM type: NRG; PAM sequence: AGG
ctccactgatagtcttttga

SEQ ID NO: 30674 - DNA, 20 bp, Artificial Sequence
  Description of Artificial Sequence: Synthetic oligonucleotide
  Target: ATXN2; (-) strand; PAM type: NRG; PAM sequence: AAG
cctccactgatagtcttttg

SEQ ID NO: 30675 - DNA, 20 bp, Artificial Sequence
  Description of Artificial Sequence: Synthetic oligonucleotide
  Target: ATXN2; (-) strand; PAM type: NRG; PAM sequence: TAG
actcccctctcctccactga

SEQ ID NO: 30676 - DNA, 20 bp, Artificial Sequence
  Description of Artificial Sequence: Synthetic oligonucleotide
  Target: ATXN2; (-) strand; PAM type: NRG; PAM sequence: CAG
gtaaatggccaacgttgttt

SEQ ID NO: 30677 - DNA, 20 bp, Artificial Sequence
  Description of Artificial Sequence: Synthetic oligonucleotide
  Target: ATXN2; (-) strand; PAM type: NRG; PAM sequence: TGG
ctttagcagttatcagtaaa

SEQ ID NO: 30678 - DNA, 20 bp, Artificial Sequence
  Description of Artificial Sequence: Synthetic oligonucleotide
  Target: ATXN2; (-) strand; PAM type: NRG; PAM sequence: CAG
cactcagctttagcagttat

SEQ ID NO: 30679 - DNA, 20 bp, Artificial Sequence
  Description of Artificial Sequence: Synthetic oligonucleotide
  Target: ATXN2; (-) strand; PAM type: NRG; PAM sequence: CAG
tacctgtcactcagctttag

SEQ ID NO: 30680 - DNA, 20 bp, Artificial Sequence
  Description of Artificial Sequence: Synthetic oligonucleotide
  Target: ATXN2; (-) strand; PAM type: NRG; PAM sequence: TAG
atgtacctgtcactcagctt

SEQ ID NO: 30681 - DNA, 20 bp, Artificial Sequence
  Description of Artificial Sequence: Synthetic oligonucleotide
  Target: ATXN2; (-) strand; PAM type: NRG; PAM sequence: CAG
aatcttatgtacctgtcact

SEQ ID NO: 30682 - DNA, 20 bp, Artificial Sequence
  Description of Artificial Sequence: Synthetic oligonucleotide
  Target: ATXN2; (-) strand; PAM type: NRG; PAM sequence: TGG
gtatttagaaagagaacagc

SEQ ID NO: 30683 - DNA, 20 bp, Artificial Sequence
  Description of Artificial Sequence: Synthetic oligonucleotide
  Target: ATXN2; (-) strand; PAM type: NRG; PAM sequence: CAG
caacgtatttagaaagagaa

SEQ ID NO: 30684 - DNA, 20 bp, Artificial Sequence
  Description of Artificial Sequence: Synthetic oligonucleotide
  Target: ATXN2; (-) strand; PAM type: NRG; PAM sequence: GAG
aatttcaacgtatttagaaa

SEQ ID NO: 30685 - DNA, 20 bp, Artificial Sequence
  Description of Artificial Sequence: Synthetic oligonucleotide
  Target: ATXN2; (-) strand; PAM type: NRG; PAM sequence: AAG
aaaatttcaacgtatttaga

SEQ ID NO: 30686 - DNA, 20 bp, Artificial Sequence
  Description of Artificial Sequence: Synthetic oligonucleotide
  Target: ATXN2; (-) strand; PAM type: NRG; PAM sequence: TAG
atgtaaaatttcaacgtatt

SEQ ID NO: 30687 - DNA, 20 bp, Artificial Sequence
  Description of Artificial Sequence: Synthetic oligonucleotide
  Target: ATXN2; (-) strand; PAM type: NRG; PAM sequence: AGG
gcttaaagtaaacgctaata

SEQ ID NO: 30688 - DNA, 20 bp, Artificial Sequence
  Description of Artificial Sequence: Synthetic oligonucleotide
  Target: ATXN2; (-) strand; PAM type: NRG; PAM sequence: AAG
agcttaaagtaaacgctaat

SEQ ID NO: 30689 - DNA, 20 bp, Artificial Sequence
  Description of Artificial Sequence: Synthetic oligonucleotide
  Target: ATXN2; (-) strand; PAM type: NRG; PAM sequence: AAG
tagaaaatgaaatgagctta

SEQ ID NO: 30690 - DNA, 20 bp, Artificial Sequence
  Description of Artificial Sequence: Synthetic oligonucleotide
  Target: ATXN2; (-) strand; PAM type: NRG; PAM sequence: GAG
tttcagttagaaaatgaaat

SEQ ID NO: 30691 - DNA, 20 bp, Artificial Sequence
  Description of Artificial Sequence: Synthetic oligonucleotide
  Target: ATXN2; (-) strand; PAM type: NRG; PAM sequence: TAG
ttggaagaatatgtttcagt

SEQ ID NO: 30692 - DNA, 20 bp, Artificial Sequence
  Description of Artificial Sequence: Synthetic oligonucleotide
  Target: ATXN2; (-) strand; PAM type: NRG; PAM sequence: CAG
acatttggaagaatatgttt

SEQ ID NO: 30693 - DNA, 20 bp, Artificial Sequence
  Description of Artificial Sequence: Synthetic oligonucleotide
  Target: ATXN2; (-) strand; PAM type: NRG; PAM sequence: AAG
aagtaaggaaacacatttgg

SEQ ID NO: 30694 - DNA, 20 bp, Artificial Sequence
  Description of Artificial Sequence: Synthetic oligonucleotide
  Target: ATXN2; (-) strand; PAM type: NRG; PAM sequence: TGG
tgaaagtaaggaaacacatt

SEQ ID NO: 30695 - DNA, 20 bp, Artificial Sequence
  Description of Artificial Sequence: Synthetic oligonucleotide
  Target: ATXN2; (-) strand; PAM type: NRG; PAM sequence: AGG
gggggtcctcactgaaagta

SEQ ID NO: 30696 - DNA, 20 bp, Artificial Sequence
  Description of Artificial Sequence: Synthetic oligonucleotide
  Target: ATXN2; (-) strand; PAM type: NRG; PAM sequence: AAG
agggggtcctcactgaaagt

SEQ ID NO: 30697 - DNA, 20 bp, Artificial Sequence
  Description of Artificial Sequence: Synthetic oligonucleotide
  Target: ATXN2; (-) strand; PAM type: NRG; PAM sequence: AAG
ttggagggggtcctcactga

SEQ ID NO: 30698 - DNA, 20 bp, Artificial Sequence
  Description of Artificial Sequence: Synthetic oligonucleotide
  Target: ATXN2; (-) strand; PAM type: NRG; PAM sequence: GGG
tgtgatagaagaattggagg

SEQ ID NO: 30699 - DNA, 20 bp, Artificial Sequence
  Description of Artificial Sequence: Synthetic oligonucleotide
  Target: ATXN2; (-) strand; PAM type: NRG; PAM sequence: GGG
gtgtgatagaagaattggag

SEQ ID NO: 30700 - DNA, 20 bp, Artificial Sequence
  Description of Artificial Sequence: Synthetic oligonucleotide
  Target: ATXN2; (-) strand; PAM type: NRG; PAM sequence: GGG
agtgtgatagaagaattgga

SEQ ID NO: 30701 - DNA, 20 bp, Artificial Sequence
  Description of Artificial Sequence: Synthetic oligonucleotide
  Target: ATXN2; (-) strand; PAM type: NRG; PAM sequence: AGG
cagtgtgatagaagaattgg

SEQ ID NO: 30702 - DNA, 20 bp, Artificial Sequence
  Description of Artificial Sequence: Synthetic oligonucleotide
  Target: ATXN2; (-) strand; PAM type: NRG; PAM sequence: GAG
acagtgtgatagaagaattg

SEQ ID NO: 30703 - DNA, 20 bp, Artificial Sequence
  Description of Artificial Sequence: Synthetic oligonucleotide
  Target: ATXN2; (-) strand; PAM type: NRG; PAM sequence: TGG
tcacagtgtgatagaagaat

SEQ ID NO: 30704 - DNA, 20 bp, Artificial Sequence
  Description of Artificial Sequence: Synthetic oligonucleotide
  Target: ATXN2; (-) strand; PAM type: NRG; PAM sequence: AAG
tttggttcacagtgtgatag

SEQ ID NO: 30705 - DNA, 20 bp, Artificial Sequence
  Description of Artificial Sequence: Synthetic oligonucleotide
  Target: ATXN2; (-) strand; PAM type: NRG; PAM sequence: TAG
aaatttggttcacagtgtga

SEQ ID NO: 30706 - DNA, 20 bp, Artificial Sequence
  Description of Artificial Sequence: Synthetic oligonucleotide
  Target: ATXN2; (-) strand; PAM type: NRG; PAM sequence: CAG
tgtagaaaaaatttggttca

SEQ ID NO: 30707 - DNA, 20 bp, Artificial Sequence
  Description of Artificial Sequence: Synthetic oligonucleotide
  Target: ATXN2; (-) strand; PAM type: NRG; PAM sequence: TGG
tggtgtatgtagaaaaaatt

SEQ ID NO: 30708 - DNA, 20 bp, Artificial Sequence
  Description of Artificial Sequence: Synthetic oligonucleotide
  Target: ATXN2; (-) strand; PAM type: NRG; PAM sequence: TAG
tgctatacacatggtgtatg

SEQ ID NO: 30709 - DNA, 20 bp, Artificial Sequence
  Description of Artificial Sequence: Synthetic oligonucleotide
  Target: ATXN2; (-) strand; PAM type: NRG; PAM sequence: TGG
tacagggattgctatacaca

SEQ ID NO: 30710 - DNA, 20 bp, Artificial Sequence
  Description of Artificial Sequence: Synthetic oligonucleotide
  Target: ATXN2; (-) strand; PAM type: NRG; PAM sequence: GGG
agagtttgtgctaaagtaca

SEQ ID NO: 30711 - DNA, 20 bp, Artificial Sequence
  Description of Artificial Sequence: Synthetic oligonucleotide
  Target: ATXN2; (-) strand; PAM type: NRG; PAM sequence: AGG
aagagtttgtgctaaagtac

SEQ ID NO: 30712 - DNA, 20 bp, Artificial Sequence
  Description of Artificial Sequence: Synthetic oligonucleotide
  Target: ATXN2; (-) strand; PAM type: NRG; PAM sequence: CAG
gaagagtttgtgctaaagta

SEQ ID NO: 30713 - DNA, 20 bp, Artificial Sequence
  Description of Artificial Sequence: Synthetic oligonucleotide
  Target: ATXN2; (-) strand; PAM type: NRG; PAM sequence: AAG
ggcgggaagagtttgtgcta

SEQ ID NO: 30714 - DNA, 20 bp, Artificial Sequence
  Description of Artificial Sequence: Synthetic oligonucleotide
  Target: ATXN2; (-) strand; PAM type: NRG; PAM sequence: GAG
gaggaagttccaggcgggaa

SEQ ID NO: 30715 - DNA, 20 bp, Artificial Sequence
  Description of Artificial Sequence: Synthetic oligonucleotide
  Target: ATXN2; (-) strand; PAM type: NRG; PAM sequence: AAG
aggaggaagttccaggcggg

SEQ ID NO: 30716 - DNA, 20 bp, Artificial Sequence
  Description of Artificial Sequence: Synthetic oligonucleotide
  Target: ATXN2; (-) strand; PAM type: NRG; PAM sequence: GGG
gagaggaggaagttccaggc

SEQ ID NO: 30717 - DNA, 20 bp, Artificial Sequence
  Description of Artificial Sequence: Synthetic oligonucleotide
  Target: ATXN2; (-) strand; PAM type: NRG; PAM sequence: CGG
agagaggaggaagttccagg

SEQ ID NO: 30718 - DNA, 20 bp, Artificial Sequence
  Description of Artificial Sequence: Synthetic oligonucleotide
  Target: ATXN2; (-) strand; PAM type: NRG; PAM sequence: AGG
tgaagagaggaggaagttcc

SEQ ID NO: 30719 - DNA, 20 bp, Artificial Sequence
  Description of Artificial Sequence: Synthetic oligonucleotide
  Target: ATXN2; (-) strand; PAM type: NRG; PAM sequence: CAG
atgaagagaggaggaagttc

SEQ ID NO: 30720 - DNA, 20 bp, Artificial Sequence
  Description of Artificial Sequence: Synthetic oligonucleotide
  Target: ATXN2; (-) strand; PAM type: NRG; PAM sequence: AAG
aaggccatgaagagaggagg

SEQ ID NO: 30721 - DNA, 20 bp, Artificial Sequence
  Description of Artificial Sequence: Synthetic oligonucleotide
  Target: ATXN2; (-) strand; PAM type: NRG; PAM sequence: AGG
agtaaggccatgaagagagg

SEQ ID NO: 30722 - DNA, 20 bp, Artificial Sequence
  Description of Artificial Sequence: Synthetic oligonucleotide
  Target: ATXN2; (-) strand; PAM type: NRG; PAM sequence: GAG
cagtaaggccatgaagagag

SEQ ID NO: 30723 - DNA, 20 bp, Artificial Sequence
  Description of Artificial Sequence: Synthetic oligonucleotide
  Target: ATXN2; (-) strand; PAM type: NRG; PAM sequence: AGG
ttcagtaaggccatgaagag

SEQ ID NO: 30724 - DNA, 20 bp, Artificial Sequence
  Description of Artificial Sequence: Synthetic oligonucleotide
  Target: ATXN2; (-) strand; PAM type: NRG; PAM sequence: GAG
tttcagtaaggccatgaaga

SEQ ID NO: 30725 - DNA, 20 bp, Artificial Sequence
  Description of Artificial Sequence: Synthetic oligonucleotide
  Target: ATXN2; (-) strand; PAM type: NRG; PAM sequence: GAG
gttttcagtaaggccatgaa

SEQ ID NO: 30726 - DNA, 20 bp, Artificial Sequence
  Description of Artificial Sequence: Synthetic oligonucleotide
  Target: ATXN2; (-) strand; PAM type: NRG; PAM sequence: AAG
cagttttcagtaaggccatg

SEQ ID NO: 30727 - DNA, 20 bp, Artificial Sequence
  Description of Artificial Sequence: Synthetic oligonucleotide
  Target: ATXN2; (-) strand; PAM type: NRG; PAM sequence: AGG
aagataagcagttttcagta

SEQ ID NO: 30728 - DNA, 20 bp, Artificial Sequence
  Description of Artificial Sequence: Synthetic oligonucleotide
  Target: ATXN2; (-) strand; PAM type: NRG; PAM sequence: AAG
gaagataagcagttttcagt

SEQ ID NO: 30729 - DNA, 20 bp, Artificial Sequence
  Description of Artificial Sequence: Synthetic oligonucleotide
  Target: ATXN2; (-) strand; PAM type: NRG; PAM sequence: CAG
caaggaagataagcagtttt

SEQ ID NO: 30730 - DNA, 20 bp, Artificial Sequence
  Description of Artificial Sequence: Synthetic oligonucleotide
  Target: ATXN2; (-) strand; PAM type: NRG; PAM sequence: CAG
ggatcttcaaggaagataag

SEQ ID NO: 30731 - DNA, 20 bp, Artificial Sequence
  Description of Artificial Sequence: Synthetic oligonucleotide
  Target: ATXN2; (-) strand; PAM type: NRG; PAM sequence: AAG
gatggatcttcaaggaagat

SEQ ID NO: 30732 - DNA, 20 bp, Artificial Sequence
  Description of Artificial Sequence: Synthetic oligonucleotide
  Target: ATXN2; (-) strand; PAM type: NRG; PAM sequence: AAG
gttgagatggatcttcaagg

SEQ ID NO: 30733 - DNA, 20 bp, Artificial Sequence
  Description of Artificial Sequence: Synthetic oligonucleotide
  Target: ATXN2; (-) strand; PAM type: NRG; PAM sequence: AGG
agagttgagatggatcttca

SEQ ID NO: 30734 - DNA, 20 bp, Artificial Sequence
  Description of Artificial Sequence: Synthetic oligonucleotide
  Target: ATXN2; (-) strand; PAM type: NRG; PAM sequence: AAG
gagagttgagatggatcttc

SEQ ID NO: 30735 - DNA, 20 bp, Artificial Sequence
  Description of Artificial Sequence: Synthetic oligonucleotide
  Target: ATXN2; (-) strand; PAM type: NRG; PAM sequence: TGG
caaaataatgagagttgaga

SEQ ID NO: 30736 - DNA, 20 bp, Artificial Sequence
  Description of Artificial Sequence: Synthetic oligonucleotide
  Target: ATXN2; (-) strand; PAM type: NRG; PAM sequence: GAG
gcttcaaaataatgagagtt

SEQ ID NO: 30737 - DNA, 20 bp, Artificial Sequence
  Description of Artificial Sequence: Synthetic oligonucleotide
  Target: ATXN2; (-) strand; PAM type: NRG; PAM sequence: GAG
aaagggcttcaaaataatga

SEQ ID NO: 30738 - DNA, 20 bp, Artificial Sequence
  Description of Artificial Sequence: Synthetic oligonucleotide
  Target: ATXN2; (-) strand; PAM type: NRG; PAM sequence: GAG
aaaaagggcttcaaaataat

SEQ ID NO: 30739 - DNA, 20 bp, Artificial Sequence
  Description of Artificial Sequence: Synthetic oligonucleotide
  Target: ATXN2; (-) strand; PAM type: NRG; PAM sequence: GGG
gggtgggcagtgaagaaaaa

SEQ ID NO: 30740 - DNA, 20 bp, Artificial Sequence
  Description of Artificial Sequence: Synthetic oligonucleotide
  Target: ATXN2; (-) strand; PAM type: NRG; PAM sequence: AGG
tgggtgggcagtgaagaaaa

SEQ ID NO: 30741 - DNA, 20 bp, Artificial Sequence
  Description of Artificial Sequence: Synthetic oligonucleotide
  Target: ATXN2; (-) strand; PAM type: NRG; PAM sequence: AAG
atgggtgggcagtgaagaaa

SEQ ID NO: 30742 - DNA, 20 bp, Artificial Sequence
  Description of Artificial Sequence: Synthetic oligonucleotide
  Target: ATXN2; (-) strand; PAM type: NRG; PAM sequence: AAG
actgccatgggtgggcagtg

SEQ ID NO: 30743 - DNA, 20 bp, Artificial Sequence
  Description of Artificial Sequence: Synthetic oligonucleotide
  Target: ATXN2; (-) strand; PAM type: NRG; PAM sequence: CAG
aggggactgccatgggtggg

SEQ ID NO: 30744 - DNA, 20 bp, Artificial Sequence
  Description of Artificial Sequence: Synthetic oligonucleotide
  Target: ATXN2; (-) strand; PAM type: NRG; PAM sequence: GGG
gggaggggactgccatgggt

SEQ ID NO: 30745 - DNA, 20 bp, Artificial Sequence
  Description of Artificial Sequence: Synthetic oligonucleotide
  Target: ATXN2; (-) strand; PAM type: NRG; PAM sequence: TGG
tgggaggggactgccatggg

SEQ ID NO: 30746 - DNA, 20 bp, Artificial Sequence
  Description of Artificial Sequence: Synthetic oligonucleotide
  Target: ATXN2; (-) strand; PAM type: NRG; PAM sequence: GGG
cactgggaggggactgccat

SEQ ID NO: 30747 - DNA, 20 bp, Artificial Sequence
  Description of Artificial Sequence: Synthetic oligonucleotide
  Target: ATXN2; (-) strand; PAM type: NRG; PAM sequence: TGG
gcactgggaggggactgcca

SEQ ID NO: 30748 - DNA, 20 bp, Artificial Sequence
  Description of Artificial Sequence: Synthetic oligonucleotide
  Target: ATXN2; (-) strand; PAM type: NRG; PAM sequence: GGG
taaattggtagcactgggag

SEQ ID NO: 30749 - DNA, 20 bp, Artificial Sequence
  Description of Artificial Sequence: Synthetic oligonucleotide
  Target: ATXN2; (-) strand; PAM type: NRG; PAM sequence: GGG
ttaaattggtagcactggga

SEQ ID NO: 30750 - DNA, 20 bp, Artificial Sequence
  Description of Artificial Sequence: Synthetic oligonucleotide
  Target: ATXN2; (-) strand; PAM type: NRG; PAM sequence: AGG
tttaaattggtagcactggg

SEQ ID NO: 30751 - DNA, 20 bp, Artificial Sequence
  Description of Artificial Sequence: Synthetic oligonucleotide
  Target: ATXN2; (-) strand; PAM type: NRG; PAM sequence: GAG
gtttaaattggtagcactgg

SEQ ID NO: 30752 - DNA, 20 bp, Artificial Sequence
  Description of Artificial Sequence: Synthetic oligonucleotide
  Target: ATXN2; (-) strand; PAM type: NRG; PAM sequence: GGG
tagtttaaattggtagcact

SEQ ID NO: 30753 - DNA, 20 bp, Artificial Sequence
  Description of Artificial Sequence: Synthetic oligonucleotide
  Target: ATXN2; (-) strand; PAM type: NRG; PAM sequence: TGG
atagtttaaattggtagcac

SEQ ID NO: 30754 - DNA, 20 bp, Artificial Sequence
  Description of Artificial Sequence: Synthetic oligonucleotide
  Target: ATXN2; (-) strand; PAM type: NRG; PAM sequence: TAG
atgcagatagtttaaattgg

SEQ ID NO: 30755 - DNA, 20 bp, Artificial Sequence
  Description of Artificial Sequence: Synthetic oligonucleotide
  Target: ATXN2; (-) strand; PAM type: NRG; PAM sequence: TGG
ggcatgcagatagtttaaat

SEQ ID NO: 30756 - DNA, 20 bp, Artificial Sequence
  Description of Artificial Sequence: Synthetic oligonucleotide
  Target: ATXN2; (-) strand; PAM type: NRG; PAM sequence: TAG
agagaaggcaggcatgcaga

SEQ ID NO: 30757 - DNA, 20 bp, Artificial Sequence
  Description of Artificial Sequence: Synthetic oligonucleotide
  Target: ATXN2; (-) strand; PAM type: NRG; PAM sequence: CAG
tagtagagaaggcaggcatg

SEQ ID NO: 30758 - DNA, 20 bp, Artificial Sequence
  Description of Artificial Sequence: Synthetic oligonucleotide
  Target: ATXN2; (-) strand; PAM type: NRG; PAM sequence: AGG
cccagtgtagtagagaaggc

SEQ ID NO: 30759 - DNA, 20 bp, Artificial Sequence
  Description of Artificial Sequence: Synthetic oligonucleotide
  Target: ATXN2; (-) strand; PAM type: NRG; PAM sequence: CAG
acccagtgtagtagagaagg

SEQ ID NO: 30760 - DNA, 20 bp, Artificial Sequence
  Description of Artificial Sequence: Synthetic oligonucleotide
  Target: ATXN2; (-) strand; PAM type: NRG; PAM sequence: AGG
gttacccagtgtagtagaga

SEQ ID NO: 30761 - DNA, 20 bp, Artificial Sequence
  Description of Artificial Sequence: Synthetic oligonucleotide
  Target: ATXN2; (-) strand; PAM type: NRG; PAM sequence: AAG
ggttacccagtgtagtagag

SEQ ID NO: 30762 - DNA, 20 bp, Artificial Sequence
  Description of Artificial Sequence: Synthetic oligonucleotide
  Target: ATXN2; (-) strand; PAM type: NRG; PAM sequence: GAG
ccaggttacccagtgtagta

SEQ ID NO: 30763 - DNA, 20 bp, Artificial Sequence
  Description of Artificial Sequence: Synthetic oligonucleotide
  Target: ATXN2; (-) strand; PAM type: NRG; PAM sequence: TAG
ttccaggttacccagtgtag

SEQ ID NO: 30764 - DNA, 20 bp, Artificial Sequence
  Description of Artificial Sequence: Synthetic oligonucleotide
  Target: ATXN2; (-) strand; PAM type: NRG; PAM sequence: TAG
tgcttccaggttacccagtg

SEQ ID NO: 30765 - DNA, 20 bp, Artificial Sequence
  Description of Artificial Sequence: Synthetic oligonucleotide
  Target: ATXN2; (-) strand; PAM type: NRG; PAM sequence: CAG
atctctgcttccaggttacc

SEQ ID NO: 30766 - DNA, 20 bp, Artificial Sequence
  Description of Artificial Sequence: Synthetic oligonucleotide
  Target: ATXN2; (-) strand; PAM type: NRG; PAM sequence: AGG
gaaacattatctctgcttcc

SEQ ID NO: 30767 - DNA, 20 bp, Artificial Sequence
  Description of Artificial Sequence: Synthetic oligonucleotide
  Target: ATXN2; (-) strand; PAM type: NRG; PAM sequence: CAG
tgaaacattatctctgcttc

SEQ ID NO: 30768 - DNA, 20 bp, Artificial Sequence
  Description of Artificial Sequence: Synthetic oligonucleotide
  Target: ATXN2; (-) strand; PAM type: NRG; PAM sequence: AAG
gtcagactaggacagagaca

SEQ ID NO: 30769 - DNA, 20 bp, Artificial Sequence
  Description of Artificial Sequence: Synthetic oligonucleotide
  Target: ATXN2; (-) strand; PAM type: NRG; PAM sequence: GAG
gatgctgtcagactaggaca

SEQ ID NO: 30770 - DNA, 20 bp, Artificial Sequence
  Description of Artificial Sequence: Synthetic oligonucleotide
  Target: ATXN2; (-) strand; PAM type: NRG; PAM sequence: CAG
ttgatgctgtcagactagga

SEQ ID NO: 30771 - DNA, 20 bp, Artificial Sequence
  Description of Artificial Sequence: Synthetic oligonucleotide
  Target: ATXN2; (-) strand; PAM type: NRG; PAM sequence: AGG
acatttgatgctgtcagact

SEQ ID NO: 30772 - DNA, 20 bp, Artificial Sequence
  Description of Artificial Sequence: Synthetic oligonucleotide
  Target: ATXN2; (-) strand; PAM type: NRG; PAM sequence: TAG
cacatttgatgctgtcagac

SEQ ID NO: 30773 - DNA, 20 bp, Artificial Sequence
  Description of Artificial Sequence: Synthetic oligonucleotide
  Target: ATXN2; (-) strand; PAM type: NRG; PAM sequence: CAG
cattacacatttgatgctgt

SEQ ID NO: 30774 - DNA, 20 bp, Artificial Sequence
  Description of Artificial Sequence: Synthetic oligonucleotide
  Target: ATXN2; (-) strand; PAM type: NRG; PAM sequence: AAG
ctacagtttagcgtttcatt

SEQ ID NO: 30775 - DNA, 20 bp, Artificial Sequence
  Description of Artificial Sequence: Synthetic oligonucleotide
  Target: ATXN2; (-) strand; PAM type: NRG; PAM sequence: TAG
cagtatgaatggctacagtt

SEQ ID NO: 30776 - DNA, 20 bp, Artificial Sequence
  Description of Artificial Sequence: Synthetic oligonucleotide
  Target: ATXN2; (-) strand; PAM type: NRG; PAM sequence: CAG
tagtacagtatgaatggcta

SEQ ID NO: 30777 - DNA, 20 bp, Artificial Sequence
  Description of Artificial Sequence: Synthetic oligonucleotide
  Target: ATXN2; (-) strand; PAM type: NRG; PAM sequence: TGG
ttggggtagtacagtatgaa

SEQ ID NO: 30778 - DNA, 20 bp, Artificial Sequence
  Description of Artificial Sequence: Synthetic oligonucleotide
  Target: ATXN2; (-) strand; PAM type: NRG; PAM sequence: CAG
ttgatgggcttggggtagta

SEQ ID NO: 30779 - DNA, 20 bp, Artificial Sequence
  Description of Artificial Sequence: Synthetic oligonucleotide
  Target: ATXN2; (-) strand; PAM type: NRG; PAM sequence: TAG
tggtattgatgggcttgggg

SEQ ID NO: 30780 - DNA, 20 bp, Artificial Sequence
  Description of Artificial Sequence: Synthetic oligonucleotide
  Target: ATXN2; (-) strand; PAM type: NRG; PAM sequence: GGG
aagtggtattgatgggcttg

SEQ ID NO: 30781 - DNA, 20 bp, Artificial Sequence
  Description of Artificial Sequence: Synthetic oligonucleotide
  Target: ATXN2; (-) strand; PAM type: NRG; PAM sequence: GGG
aaagtggtattgatgggctt

SEQ ID NO: 30782 - DNA, 20 bp, Artificial Sequence
  Description of Artificial Sequence: Synthetic oligonucleotide
  Target: ATXN2; (-) strand; PAM type: NRG; PAM sequence: TGG
aaaagtggtattgatgggct

SEQ ID NO: 30783 - DNA, 20 bp, Artificial Sequence
  Description of Artificial Sequence: Synthetic oligonucleotide
  Target: ATXN2; (-) strand; PAM type: NRG; PAM sequence: GGG
ggttgaaaagtggtattgat

SEQ ID NO: 30784 - DNA, 20 bp, Artificial Sequence
  Description of Artificial Sequence: Synthetic oligonucleotide
  Target: ATXN2; (-) strand; PAM type: NRG; PAM sequence: TGG
aggttgaaaagtggtattga

SEQ ID NO: 30785 - DNA, 20 bp, Artificial Sequence
  Description of Artificial Sequence: Synthetic oligonucleotide
  Target: ATXN2; (-) strand; PAM type: NRG; PAM sequence: TGG
agcaagttaaggttgaaaag

SEQ ID NO: 30786 - DNA, 20 bp, Artificial Sequence
  Description of Artificial Sequence: Synthetic oligonucleotide
  Target: ATXN2; (-) strand; PAM type: NRG; PAM sequence: AAG
accagcaagttaaggttgaa

SEQ ID NO: 30787 - DNA, 20 bp, Artificial Sequence
  Description of Artificial Sequence: Synthetic oligonucleotide
  Target: ATXN2; (-) strand; PAM type: NRG; PAM sequence: AGG
gaaactacaccagcaagtta

SEQ ID NO: 30788 - DNA, 20 bp, Artificial Sequence
  Description of Artificial Sequence: Synthetic oligonucleotide
  Target: ATXN2; (-) strand; PAM type: NRG; PAM sequence: AAG
agaaactacaccagcaagtt

SEQ ID NO: 30789 - DNA, 20 bp, Artificial Sequence
  Description of Artificial Sequence: Synthetic oligonucleotide
  Target: ATXN2; (-) strand; PAM type: NRG; PAM sequence: AAG
ccagtagaaactacaccagc

SEQ ID NO: 30790 - DNA, 20 bp, Artificial Sequence
  Description of Artificial Sequence: Synthetic oligonucleotide
  Target: ATXN2; (-) strand; PAM type: NRG; PAM sequence: CAG
gaaaccagtagaaactacac

SEQ ID NO: 30791 - DNA, 20 bp, Artificial Sequence
  Description of Artificial Sequence: Synthetic oligonucleotide
  Target: ATXN2; (-) strand; PAM type: NRG; PAM sequence: TAG
ttagcatgtttggaaaccag

SEQ ID NO: 30792 - DNA, 20 bp, Artificial Sequence
  Description of Artificial Sequence: Synthetic oligonucleotide
  Target: ATXN2; (-) strand; PAM type: NRG; PAM sequence: CAG
ttattagcatgtttggaaac

SEQ ID NO: 30793 - DNA, 20 bp, Artificial Sequence
  Description of Artificial Sequence: Synthetic oligonucleotide
  Target: ATXN2; (-) strand; PAM type: NRG; PAM sequence: TGG
gctgttcttattagcatgtt

SEQ ID NO: 30794 - DNA, 20 bp, Artificial Sequence
  Description of Artificial Sequence: Synthetic oligonucleotide
  Target: ATXN2; (-) strand; PAM type: NRG; PAM sequence: TAG
taacttttagctgttcttat

SEQ ID NO: 30795 - DNA, 20 bp, Artificial Sequence
  Description of Artificial Sequence: Synthetic oligonucleotide
  Target: ATXN2; (-) strand; PAM type: NRG; PAM sequence: TAG
aataagtgctcagtaacttt

SEQ ID NO: 30796 - DNA, 20 bp, Artificial Sequence
  Description of Artificial Sequence: Synthetic oligonucleotide
  Target: ATXN2; (-) strand; PAM type: NRG; PAM sequence: CAG
cctggcaagtaataagtgct

SEQ ID NO: 30797 - DNA, 20 bp, Artificial Sequence
  Description of Artificial Sequence: Synthetic oligonucleotide
  Target: ATXN2; (-) strand; PAM type: NRG; PAM sequence: AAG
agcaatgcctggcaagtaat

SEQ ID NO: 30798 - DNA, 20 bp, Artificial Sequence
  Description of Artificial Sequence: Synthetic oligonucleotide
  Target: ATXN2; (-) strand; PAM type: NRG; PAM sequence: AAG
cgcttaaagcaatgcctggc

SEQ ID NO: 30799 - DNA, 20 bp, Artificial Sequence
  Description of Artificial Sequence: Synthetic oligonucleotide
  Target: ATXN2; (-) strand; PAM type: NRG; PAM sequence: TGG
aacacgcttaaagcaatgcc

SEQ ID NO: 30800 - DNA, 20 bp, Artificial Sequence
  Description of Artificial Sequence: Synthetic oligonucleotide
  Target: ATXN2; (-) strand; PAM type: NRG; PAM sequence: AAG
ttaaacatgtaacacgctta

SEQ ID NO: 30801 - DNA, 20 bp, Artificial Sequence
  Description of Artificial Sequence: Synthetic oligonucleotide
  Target: ATXN2; (-) strand; PAM type: NRG; PAM sequence: AGG
ctgtaaaaaggggatggaag

SEQ ID NO: 30802 - DNA, 20 bp, Artificial Sequence
  Description of Artificial Sequence: Synthetic oligonucleotide
  Target: ATXN2; (-) strand; PAM type: NRG; PAM sequence: GAG
cctgtaaaaaggggatggaa

SEQ ID NO: 30803 - DNA, 20 bp, Artificial Sequence
  Description of Artificial Sequence: Synthetic oligonucleotide
  Target: ATXN2; (-) strand; PAM type: NRG; PAM sequence: AAG
cccctgtaaaaaggggatgg

SEQ ID NO: 30804 - DNA, 20 bp, Artificial Sequence
  Description of Artificial Sequence: Synthetic oligonucleotide
  Target: ATXN2; (-) strand; PAM type: NRG; PAM sequence: TGG
cttcccctgtaaaaagggga

SEQ ID NO: 30805 - DNA, 20 bp, Artificial Sequence
  Description of Artificial Sequence: Synthetic oligonucleotide
  Target: ATXN2; (-) strand; PAM type: NRG; PAM sequence: GGG
gtttcttcccctgtaaaaag

SEQ ID NO: 30806 - DNA, 20 bp, Artificial Sequence
  Description of Artificial Sequence: Synthetic oligonucleotide
  Target: ATXN2; (-) strand; PAM type: NRG; PAM sequence: GGG
agtttcttcccctgtaaaaa

SEQ ID NO: 30807 - DNA, 20 bp, Artificial Sequence
  Description of Artificial Sequence: Synthetic oligonucleotide
  Target: ATXN2; (-) strand; PAM type: NRG; PAM sequence: AGG
aagtttcttcccctgtaaaa

SEQ ID NO: 30808 - DNA, 20 bp, Artificial Sequence
  Description of Artificial Sequence: Synthetic oligonucleotide
  Target: ATXN2; (-) strand; PAM type: NRG; PAM sequence: AAG
taagtttcttcccctgtaaa

SEQ ID NO: 30809 - DNA, 20 bp, Artificial Sequence
  Description of Artificial Sequence: Synthetic oligonucleotide
  Target: ATXN2; (-) strand; PAM type: NRG; PAM sequence: AAG
agttattttcacttatgctt

SEQ ID NO: 30810 - DNA, 20 bp, Artificial Sequence
  Description of Artificial Sequence: Synthetic oligonucleotide
  Target: ATXN2; (-) strand; PAM type: NRG; PAM sequence: AAG
catacttcgtgatgtaaggc

SEQ ID NO: 30811 - DNA, 20 bp, Artificial Sequence
  Description of Artificial Sequence: Synthetic oligonucleotide
  Target: ATXN2; (-) strand; PAM type: NRG; PAM sequence: AGG
ccttcatacttcgtgatgta

SEQ ID NO: 30812 - DNA, 20 bp, Artificial Sequence
  Description of Artificial Sequence: Synthetic oligonucleotide
  Target: ATXN2; (-) strand; PAM type: NRG; PAM sequence: AAG
tccttcatacttcgtgatgt

SEQ ID NO: 30813 - DNA, 20 bp, Artificial Sequence
  Description of Artificial Sequence: Synthetic oligonucleotide
  Target: ATXN2; (-) strand; PAM type: NRG; PAM sequence: TAG
aggagcagggactttacaat

SEQ ID NO: 30814 - DNA, 20 bp, Artificial Sequence
  Description of Artificial Sequence: Synthetic oligonucleotide
  Target: ATXN2; (-) strand; PAM type: NRG; PAM sequence: GGG
ccttgttgtacacaggagca

SEQ ID NO: 30815 - DNA, 20 bp, Artificial Sequence
  Description of Artificial Sequence: Synthetic oligonucleotide
  Target: ATXN2; (-) strand; PAM type: NRG; PAM sequence: AGG
tccttgttgtacacaggagc

SEQ ID NO: 30816 - DNA, 20 bp, Artificial Sequence
  Description of Artificial Sequence: Synthetic oligonucleotide
  Target: ATXN2; (-) strand; PAM type: NRG; PAM sequence: CAG
ttccttgttgtacacaggag

SEQ ID NO: 30817 - DNA, 20 bp, Artificial Sequence
  Description of Artificial Sequence: Synthetic oligonucleotide
  Target: ATXN2; (-) strand; PAM type: NRG; PAM sequence: GAG
gtcttccttgttgtacacag

SEQ ID NO: 30818 - DNA, 20 bp, Artificial Sequence
  Description of Artificial Sequence: Synthetic oligonucleotide
  Target: ATXN2; (-) strand; PAM type: NRG; PAM sequence: AGG
ttgtcttccttgttgtacac

SEQ ID NO: 30819 - DNA, 20 bp, Artificial Sequence
  Description of Artificial Sequence: Synthetic oligonucleotide
  Target: ATXN2; (-) strand; PAM type: NRG; PAM sequence: CAG
tttgtcttccttgttgtaca

SEQ ID NO: 30820 - DNA, 20 bp, Artificial Sequence
  Description of Artificial Sequence: Synthetic oligonucleotide
  Target: ATXN2; (-) strand; PAM type: NRG; PAM sequence: GAG
gggatttgaagcttgcattt

SEQ ID NO: 30821 - DNA, 20 bp, Artificial Sequence
  Description of Artificial Sequence: Synthetic oligonucleotide
  Target: ATXN2; (-) strand; PAM type: NRG; PAM sequence: AAG
aatctgaattttgggatttg

SEQ ID NO: 30822 - DNA, 20 bp, Artificial Sequence
  Description of Artificial Sequence: Synthetic oligonucleotide
  Target: ATXN2; (-) strand; PAM type: NRG; PAM sequence: GGG
ctttcccaaatctgaatttt

SEQ ID NO: 30823 - DNA, 20 bp, Artificial Sequence
  Description of Artificial Sequence: Synthetic oligonucleotide
  Target: ATXN2; (-) strand; PAM type: NRG; PAM sequence: TGG
cctttcccaaatctgaattt

SEQ ID NO: 30824 - DNA, 20 bp, Artificial Sequence
  Description of Artificial Sequence: Synthetic oligonucleotide
  Target: ATXN2; (-) strand; PAM type: NRG; PAM sequence: TGG
tacaggtcagtattcctatt

SEQ ID NO: 30825 - DNA, 20 bp, Artificial Sequence
  Description of Artificial Sequence: Synthetic oligonucleotide
  Target: ATXN2; (-) strand; PAM type: NRG; PAM sequence: CAG
tactttttctttttacaggt

SEQ ID NO: 30826 - DNA, 20 bp, Artificial Sequence
  Description of Artificial Sequence: Synthetic oligonucleotide
  Target: ATXN2; (-) strand; PAM type: NRG; PAM sequence: AGG
aagttactttttctttttac

SEQ ID NO: 30827 - DNA, 20 bp, Artificial Sequence
  Description of Artificial Sequence: Synthetic oligonucleotide
  Target: ATXN2; (-) strand; PAM type: NRG; PAM sequence: CAG
aaagttactttttcttttta

SEQ ID NO: 30828 - DNA, 20 bp, Artificial Sequence
  Description of Artificial Sequence: Synthetic oligonucleotide
  Target: ATXN2; (-) strand; PAM type: NRG; PAM sequence: AAG
tgttttgtggagaatgccta

SEQ ID NO: 30829 - DNA, 20 bp, Artificial Sequence
  Description of Artificial Sequence: Synthetic oligonucleotide
  Target: ATXN2; (-) strand; PAM type: NRG; PAM sequence: GAG
ttccctcacactgttttgtg

SEQ ID NO: 30830 - DNA, 20 bp, Artificial Sequence
  Description of Artificial Sequence: Synthetic oligonucleotide
  Target: ATXN2; (-) strand; PAM type: NRG; PAM sequence: TGG
ttttccctcacactgttttg

SEQ ID NO: 30831 - DNA, 20 bp, Artificial Sequence
  Description of Artificial Sequence: Synthetic oligonucleotide
  Target: ATXN2; (-) strand; PAM type: NRG; PAM sequence: AAG
ctataaattacaagaataaa

SEQ ID NO: 30832 - DNA, 20 bp, Artificial Sequence
  Description of Artificial Sequence: Synthetic oligonucleotide
  Target: ATXN2; (-) strand; PAM type: NRG; PAM sequence: AAG
agtagcttactataaattac

SEQ ID NO: 30833 - DNA, 20 bp, Artificial Sequence
  Description of Artificial Sequence: Synthetic oligonucleotide
  Target: ATXN2; (-) strand; PAM type: NRG; PAM sequence: TAG
ttagctttcttattcagtag

SEQ ID NO: 30834 - DNA, 20 bp, Artificial Sequence
  Description of Artificial Sequence: Synthetic oligonucleotide
  Target: ATXN2; (-) strand; PAM type: NRG; PAM sequence: TAG
aagttagctttcttattcag

SEQ ID NO: 30835 - DNA, 20 bp, Artificial Sequence
  Description of Artificial Sequence: Synthetic oligonucleotide
  Target: ATXN2; (-) strand; PAM type: NRG; PAM sequence: CAG
tacaagttagctttcttatt

SEQ ID NO: 30836 - DNA, 20 bp, Artificial Sequence
  Description of Artificial Sequence: Synthetic oligonucleotide
  Target: ATXN2; (-) strand; PAM type: NRG; PAM sequence: TAG
taactttgtctagtacaagt

SEQ ID NO: 30837 - DNA, 20 bp, Artificial Sequence
  Description of Artificial Sequence: Synthetic oligonucleotide
  Target: ATXN2; (-) strand; PAM type: NRG; PAM sequence: AAG
aacttaactttgtctagtac

SEQ ID NO: 30838 - DNA, 20 bp, Artificial Sequence
  Description of Artificial Sequence: Synthetic oligonucleotide
  Target: ATXN2; (-) strand; PAM type: NRG; PAM sequence: TAG
ctgtagaacttaactttgtc

SEQ ID NO: 30839 - DNA, 20 bp, Artificial Sequence
  Description of Artificial Sequence: Synthetic oligonucleotide
  Target: ATXN2; (-) strand; PAM type: NRG; PAM sequence: TAG
taataattaaaaacttcctg

SEQ ID NO: 30840 - DNA, 20 bp, Artificial Sequence
  Description of Artificial Sequence: Synthetic oligonucleotide
  Target: ATXN2; (-) strand; PAM type: NRG; PAM sequence: TAG
catacttaccctttaagatc

SEQ ID NO: 30841 - DNA, 20 bp, Artificial Sequence
  Description of Artificial Sequence: Synthetic oligonucleotide
  Target: ATXN2; (-) strand; PAM type: NRG; PAM sequence: AAG
gatcctcatacttacccttt

SEQ ID NO: 30842 - DNA, 20 bp, Artificial Sequence
  Description of Artificial Sequence: Synthetic oligonucleotide
  Target: ATXN2; (-) strand; PAM type: NRG; PAM sequence: GAG
ccatcattgttctgccattc

SEQ ID NO: 30843 - DNA, 20 bp, Artificial Sequence
  Description of Artificial Sequence: Synthetic oligonucleotide
  Target: ATXN2; (-) strand; PAM type: NRG; PAM sequence: CAG
gcttgtggaggtccagtgcc

SEQ ID NO: 30844 - DNA, 20 bp, Artificial Sequence
  Description of Artificial Sequence: Synthetic oligonucleotide
  Target: ATXN2; (-) strand; PAM type: NRG; PAM sequence: CAG
cctcactgcttgtggaggtc

SEQ ID NO: 30845 - DNA, 20 bp, Artificial Sequence
  Description of Artificial Sequence: Synthetic oligonucleotide
  Target: ATXN2; (-) strand; PAM type: NRG; PAM sequence: AGG
tccttcctcactgcttgtgg

SEQ ID NO: 30846 - DNA, 20 bp, Artificial Sequence
  Description of Artificial Sequence: Synthetic oligonucleotide
  Target: ATXN2; (-) strand; PAM type: NRG; PAM sequence: GAG
ctccttcctcactgcttgtg

SEQ ID NO: 30847 - DNA, 20 bp, Artificial Sequence
  Description of Artificial Sequence: Synthetic oligonucleotide
  Target: ATXN2; (-) strand; PAM type: NRG; PAM sequence: TGG
gtctccttcctcactgcttg

SEQ ID NO: 30848 - DNA, 20 bp, Artificial Sequence
  Description of Artificial Sequence: Synthetic oligonucleotide
  Target: ATXN2; (-) strand; PAM type: NRG; PAM sequence: TGG
gacctccatttaaatcaaga

SEQ ID NO: 30849 - DNA, 20 bp, Artificial Sequence
  Description of Artificial Sequence: Synthetic oligonucleotide
  Target: ATXN2; (-) strand; PAM type: NRG; PAM sequence: AAG
atatgacctccatttaaatc

SEQ ID NO: 30850 - DNA, 20 bp, Artificial Sequence
  Description of Artificial Sequence: Synthetic oligonucleotide
  Target: ATXN2; (-) strand; PAM type: NRG; PAM sequence: TAG
gggcatttgctgacccctaa

SEQ ID NO: 30851 - DNA, 20 bp, Artificial Sequence
  Description of Artificial Sequence: Synthetic oligonucleotide
  Target: ATXN2; (-) strand; PAM type: NRG; PAM sequence: GGG
gccatgtgaaaataggccat

SEQ ID NO: 30852 - DNA, 20 bp, Artificial Sequence
  Description of Artificial Sequence: Synthetic oligonucleotide
  Target: ATXN2; (-) strand; PAM type: NRG; PAM sequence: TGG
agccatgtgaaaataggcca

SEQ ID NO: 30853 - DNA, 20 bp, Artificial Sequence
  Description of Artificial Sequence: Synthetic oligonucleotide
  Target: ATXN2; (-) strand; PAM type: NRG; PAM sequence: AGG
gctttaagccatgtgaaaat

SEQ ID NO: 30854 - DNA, 20 bp, Artificial Sequence
  Description of Artificial Sequence: Synthetic oligonucleotide
  Target: ATXN2; (-) strand; PAM type: NRG; PAM sequence: TAG
agctttaagccatgtgaaaa

SEQ ID NO: 30855 - DNA, 20 bp, Artificial Sequence
  Description of Artificial Sequence: Synthetic oligonucleotide
  Target: ATXN2; (-) strand; PAM type: NRG; PAM sequence: AAG
taaaaaatattctgagcttt

SEQ ID NO: 30856 - DNA, 20 bp, Artificial Sequence
  Description of Artificial Sequence: Synthetic oligonucleotide
  Target: ATXN2; (-) strand; PAM type: NRG; PAM sequence: GAG
tacagtgtaaaaaatattct

SEQ ID NO: 30857 - DNA, 20 bp, Artificial Sequence
  Description of Artificial Sequence: Synthetic oligonucleotide
  Target: ATXN2; (-) strand; PAM type: NRG; PAM sequence: CAG
cctgacctaaaagctcttta

SEQ ID NO: 30858 - DNA, 20 bp, Artificial Sequence
  Description of Artificial Sequence: Synthetic oligonucleotide
  Target: ATXN2; (-) strand; PAM type: NRG; PAM sequence: AAG
agccaccgtgcctgacctaa

SEQ ID NO: 30859 - DNA, 20 bp, Artificial Sequence
  Description of Artificial Sequence: Synthetic oligonucleotide
  Target: ATXN2; (-) strand; PAM type: NRG; PAM sequence: GAG
agtgctgggattacaggtgt

SEQ ID NO: 30860 - DNA, 20 bp, Artificial Sequence
  Description of Artificial Sequence: Synthetic oligonucleotide
  Target: ATXN2; (-) strand; PAM type: NRG; PAM sequence: AGG
tcccaaagtgctgggattac

SEQ ID NO: 30861 - DNA, 20 bp, Artificial Sequence
  Description of Artificial Sequence: Synthetic oligonucleotide
  Target: ATXN2; (-) strand; PAM type: NRG; PAM sequence: CAG
ctcccaaagtgctgggatta

SEQ ID NO: 30862 - DNA, 20 bp, Artificial Sequence
  Description of Artificial Sequence: Synthetic oligonucleotide
  Target: ATXN2; (-) strand; PAM type: NRG; PAM sequence: GGG
cctctgcctcccaaagtgct

SEQ ID NO: 30863 - DNA, 20 bp, Artificial Sequence
  Description of Artificial Sequence: Synthetic oligonucleotide
  Target: ATXN2; (-) strand; PAM type: NRG; PAM sequence: TGG
acctctgcctcccaaagtgc

SEQ ID NO: 30864 - DNA, 20 bp, Artificial Sequence
  Description of Artificial Sequence: Synthetic oligonucleotide
  Target: ATXN2; (-) strand; PAM type: NRG; PAM sequence: AAG
ctgcccacctctgcctccca

SEQ ID NO: 30865 - DNA, 20 bp, Artificial Sequence
  Description of Artificial Sequence: Synthetic oligonucleotide
  Target: ATXN2; (-) strand; PAM type: NRG; PAM sequence: AGG
caggctggtctcctgatctc

SEQ ID NO: 30866 - DNA, 20 bp, Artificial Sequence
  Description of Artificial Sequence: Synthetic oligonucleotide
  Target: ATXN2; (-) strand; PAM type: NRG; PAM sequence: CAG
ccaggctggtctcctgatct

SEQ ID NO: 30867 - DNA, 20 bp, Artificial Sequence
  Description of Artificial Sequence: Synthetic oligonucleotide
  Target: ATXN2; (-) strand; PAM type: NRG; PAM sequence: TGG
tttcgccacattggccaggc

SEQ ID NO: 30868 - DNA, 20 bp, Artificial Sequence
  Description of Artificial Sequence: Synthetic oligonucleotide
  Target: ATXN2; (-) strand; PAM type: NRG; PAM sequence: AGG
ggggtttcgccacattggcc

SEQ ID NO: 30869 - DNA, 20 bp, Artificial Sequence
  Description of Artificial Sequence: Synthetic oligonucleotide
  Target: ATXN2; (-) strand; PAM type: NRG; PAM sequence: CAG
tggggtttcgccacattggc

SEQ ID NO: 30870 - DNA, 20 bp, Artificial Sequence
  Description of Artificial Sequence: Synthetic oligonucleotide
  Target: ATXN2; (-) strand; PAM type: NRG; PAM sequence: TGG
aagatggggtttcgccacat

SEQ ID NO: 30871 - DNA, 20 bp, Artificial Sequence
  Description of Artificial Sequence: Synthetic oligonucleotide
  Target: ATXN2; (-) strand; PAM type: NRG; PAM sequence: GGG
ttgtatttttagtaaagatg

SEQ ID NO: 30872 - DNA, 20 bp, Artificial Sequence
  Description of Artificial Sequence: Synthetic oligonucleotide
  Target: ATXN2; (-) strand; PAM type: NRG; PAM sequence: GGG
tttgtatttttagtaaagat

SEQ ID NO: 30873 - DNA, 20 bp, Artificial Sequence
  Description of Artificial Sequence: Synthetic oligonucleotide
  Target: ATXN2; (-) strand; PAM type: NRG; PAM sequence: TGG
ttttgtatttttagtaaaga

SEQ ID NO: 30874 - DNA, 20 bp, Artificial Sequence
  Description of Artificial Sequence: Synthetic oligonucleotide
  Target: ATXN2; (-) strand; PAM type: NRG; PAM sequence: AAG
taatttttgtatttttagta

SEQ ID NO: 30875 - DNA, 20 bp, Artificial Sequence
  Description of Artificial Sequence: Synthetic oligonucleotide
  Target: ATXN2; (-) strand; PAM type: NRG; PAM sequence: TAG
ccagctaatttttgtatttt

SEQ ID NO: 30876 - DNA, 20 bp, Artificial Sequence
  Description of Artificial Sequence: Synthetic oligonucleotide
  Target: ATXN2; (-) strand; PAM type: NRG; PAM sequence: CAG
caggcacatgctgccacgcc

SEQ ID NO: 30877 - DNA, 20 bp, Artificial Sequence
  Description of Artificial Sequence: Synthetic oligonucleotide
  Target: ATXN2; (-) strand; PAM type: NRG; PAM sequence: AGG
tcccgagtaactgggattac

SEQ ID NO: 30878 - DNA, 20 bp, Artificial Sequence
  Description of Artificial Sequence: Synthetic oligonucleotide
  Target: ATXN2; (-) strand; PAM type: NRG; PAM sequence: CAG
ttcccgagtaactgggatta

SEQ ID NO: 30879 - DNA, 20 bp, Artificial Sequence
  Description of Artificial Sequence: Synthetic oligonucleotide
  Target: ATXN2; (-) strand; PAM type: NRG; PAM sequence: GGG
tctcagcttcccgagtaact

SEQ ID NO: 30880 - DNA, 20 bp, Artificial Sequence
  Description of Artificial Sequence: Synthetic oligonucleotide
  Target: ATXN2; (-) strand; PAM type: NRG; PAM sequence: TGG
gtctcagcttcccgagtaac

SEQ ID NO: 30881 - DNA, 20 bp, Artificial Sequence
  Description of Artificial Sequence: Synthetic oligonucleotide
  Target: ATXN2; (-) strand; PAM type: NRG; PAM sequence: GAG
ttctcctgtctcagcttccc

SEQ ID NO: 30882 - DNA, 20 bp, Artificial Sequence
  Description of Artificial Sequence: Synthetic oligonucleotide
  Target: ATXN2; (-) strand; PAM type: NRG; PAM sequence: CAG
ttcaggcgattctcctgtct

SEQ ID NO: 30883 - DNA, 20 bp, Artificial Sequence
  Description of Artificial Sequence: Synthetic oligonucleotide
  Target: ATXN2; (-) strand; PAM type: NRG; PAM sequence: AGG
aacctctgcctcctgggttc

SEQ ID NO: 30884 - DNA, 20 bp, Artificial Sequence
  Description of Artificial Sequence: Synthetic oligonucleotide
  Target: ATXN2; (-) strand; PAM type: NRG; PAM sequence: CAG
caacctctgcctcctgggtt

SEQ ID NO: 30885 - DNA, 20 bp, Artificial Sequence
  Description of Artificial Sequence: Synthetic oligonucleotide
  Target: ATXN2; (-) strand; PAM type: NRG; PAM sequence: GGG
cactgcaacctctgcctcct

SEQ ID NO: 30886 - DNA, 20 bp, Artificial Sequence
  Description of Artificial Sequence: Synthetic oligonucleotide
  Target: ATXN2; (-) strand; PAM type: NRG; PAM sequence: TGG
tcactgcaacctctgcctcc

SEQ ID NO: 30887 - DNA, 20 bp, Artificial Sequence
  Description of Artificial Sequence: Synthetic oligonucleotide
  Target: ATXN2; (-) strand; PAM type: NRG; PAM sequence: TGG
ggagtgcagtggtgcaatct

SEQ ID NO: 30888 - DNA, 20 bp, Artificial Sequence
  Description of Artificial Sequence: Synthetic oligonucleotide
  Target: ATXN2; (-) strand; PAM type: NRG; PAM sequence: TGG
ttgctcaggctggagtgcag

SEQ ID NO: 30889 - DNA, 20 bp, Artificial Sequence
  Description of Artificial Sequence: Synthetic oligonucleotide
  Target: ATXN2; (-) strand; PAM type: NRG; PAM sequence: CAG
gtgttgctcaggctggagtg

SEQ ID NO: 30890 - DNA, 20 bp, Artificial Sequence
  Description of Artificial Sequence: Synthetic oligonucleotide
  Target: ATXN2; (-) strand; PAM type: NRG; PAM sequence: GAG
ttgctgtgttgctcaggctg

SEQ ID NO: 30891 - DNA, 20 bp, Artificial Sequence
  Description of Artificial Sequence: Synthetic oligonucleotide
  Target: ATXN2; (-) strand; PAM type: NRG; PAM sequence: TGG
tcttgctgtgttgctcaggc

SEQ ID NO: 30892 - DNA, 20 bp, Artificial Sequence
  Description of Artificial Sequence: Synthetic oligonucleotide
  Target: ATXN2; (-) strand; PAM type: NRG; PAM sequence: AGG
agagtcttgctgtgttgctc

SEQ ID NO: 30893 - DNA, 20 bp, Artificial Sequence
  Description of Artificial Sequence: Synthetic oligonucleotide
  Target: ATXN2; (-) strand; PAM type: NRG; PAM sequence: CAG
cagagtcttgctgtgttgct

SEQ ID NO: 30894 - DNA, 20 bp, Artificial Sequence
  Description of Artificial Sequence: Synthetic oligonucleotide
  Target: ATXN2; (-) strand; PAM type: NRG; PAM sequence: GAG
ttttttttttttttgagaca

SEQ ID NO: 30895 - DNA, 20 bp, Artificial Sequence
  Description of Artificial Sequence: Synthetic oligonucleotide
  Target: ATXN2; (-) strand; PAM type: NRG; PAM sequence: CAG
ctttttttttttttttgaga

SEQ ID NO: 30896 - DNA, 20 bp, Artificial Sequence
  Description of Artificial Sequence: Synthetic oligonucleotide
  Target: ATXN2; (-) strand; PAM type: NRG; PAM sequence: GAG
gccccttttttttttttttt

SEQ ID NO: 30897 - DNA, 20 bp, Artificial Sequence
  Description of Artificial Sequence: Synthetic oligonucleotide
  Target: ATXN2; (-) strand; PAM type: NRG; PAM sequence: AAG
gttttctttacatattttaa

SEQ ID NO: 30898 - DNA, 20 bp, Artificial Sequence
  Description of Artificial Sequence: Synthetic oligonucleotide
  Target: ATXN2; (-) strand; PAM type: NRG; PAM sequence: CAG
taggctttgcagtccatata

SEQ ID NO: 30899 - DNA, 20 bp, Artificial Sequence
  Description of Artificial Sequence: Synthetic oligonucleotide
  Target: ATXN2; (-) strand; PAM type: NRG; PAM sequence: CAG
agtaaatattttaggctttg

SEQ ID NO: 30900 - DNA, 20 bp, Artificial Sequence
  Description of Artificial Sequence: Synthetic oligonucleotide
  Target: ATXN2; (-) strand; PAM type: NRG; PAM sequence: AGG
agcccgatagtaaatatttt

SEQ ID NO: 30901 - DNA, 20 bp, Artificial Sequence
  Description of Artificial Sequence: Synthetic oligonucleotide
  Target: ATXN2; (-) strand; PAM type: NRG; PAM sequence: TAG
cagcccgatagtaaatattt

SEQ ID NO: 30902 - DNA, 20 bp, Artificial Sequence
  Description of Artificial Sequence: Synthetic oligonucleotide
  Target: ATXN2; (-) strand; PAM type: NRG; PAM sequence: TAG
aaccaccgtgcccagcccga

SEQ ID NO: 30903 - DNA, 20 bp, Artificial Sequence
  Description of Artificial Sequence: Synthetic oligonucleotide
  Target: ATXN2; (-) strand; PAM type: NRG; PAM sequence: CAG
ccagtgtgaaccaccgtgcc

SEQ ID NO: 30904 - DNA, 20 bp, Artificial Sequence
  Description of Artificial Sequence: Synthetic oligonucleotide
  Target: ATXN2; (-) strand; PAM type: NRG; PAM sequence: CAG
tcccaaagtgctgggattac

SEQ ID NO: 30905 - DNA, 20 bp, Artificial Sequence
  Description of Artificial Sequence: Synthetic oligonucleotide
  Target: ATXN2; (-) strand; PAM type: NRG; PAM sequence: GGG
ctgcggcctcccaaagtgct

SEQ ID NO: 30906 - DNA, 20 bp, Artificial Sequence
  Description of Artificial Sequence: Synthetic oligonucleotide
  Target: ATXN2; (-) strand; PAM type: NRG; PAM sequence: TGG
gctgcggcctcccaaagtgc

SEQ ID NO: 30907 - DNA, 20 bp, Artificial Sequence
  Description of Artificial Sequence: Synthetic oligonucleotide
  Target: ATXN2; (-) strand; PAM type: NRG; PAM sequence: AAG
ccacctgctgcggcctccca

SEQ ID NO: 30908 - DNA, 20 bp, Artificial Sequence
  Description of Artificial Sequence: Synthetic oligonucleotide
  Target: ATXN2; (-) strand; PAM type: NRG; PAM sequence: CGG
ctcaggtgatccacctgctg

SEQ ID NO: 30909 - DNA, 20 bp, Artificial Sequence
  Description of Artificial Sequence: Synthetic oligonucleotide
  Target: ATXN2; (-) strand; PAM type: NRG; PAM sequence: AGG
ggtctcgaactcctgacctc

SEQ ID NO: 30910 - DNA, 20 bp, Artificial Sequence
  Description of Artificial Sequence: Synthetic oligonucleotide
  Target: ATXN2; (-) strand; PAM type: NRG; PAM sequence: CAG
tggtctcgaactcctgacct

SEQ ID NO: 30911 - DNA, 20 bp, Artificial Sequence
  Description of Artificial Sequence: Synthetic oligonucleotide
  Target: ATXN2; (-) strand; PAM type: NRG; PAM sequence: TGG
tttcaccattttggtcaggc

SEQ ID NO: 30912 - DNA, 20 bp, Artificial Sequence
  Description of Artificial Sequence: Synthetic oligonucleotide
  Target: ATXN2; (-) strand; PAM type: NRG; PAM sequence: AGG
ggggtttcaccattttggtc

SEQ ID NO: 30913 - DNA, 20 bp, Artificial Sequence
  Description of Artificial Sequence: Synthetic oligonucleotide
  Target: ATXN2; (-) strand; PAM type: NRG; PAM sequence: CAG
gggggtttcaccattttggt

SEQ ID NO: 30914 - DNA, 20 bp, Artificial Sequence
  Description of Artificial Sequence: Synthetic oligonucleotide
  Target: ATXN2; (-) strand; PAM type: NRG; PAM sequence: TGG
agatgggggtttcaccattt

SEQ ID NO: 30915 - DNA, 20 bp, Artificial Sequence
  Description of Artificial Sequence: Synthetic oligonucleotide
  Target: ATXN2; (-) strand; PAM type: NRG; PAM sequence: GGG
tttgtatttagtagagatgg

SEQ ID NO: 30916 - DNA, 20 bp, Artificial Sequence
  Description of Artificial Sequence: Synthetic oligonucleotide
  Target: ATXN2; (-) strand; PAM type: NRG; PAM sequence: GGG
ctttgtatttagtagagatg

SEQ ID NO: 30917 - DNA, 20 bp, Artificial Sequence
  Description of Artificial Sequence: Synthetic oligonucleotide
  Target: ATXN2; (-) strand; PAM type: NRG; PAM sequence: GGG
tctttgtatttagtagagat

SEQ ID NO: 30918 - DNA, 20 bp, Artificial Sequence
  Description of Artificial Sequence: Synthetic oligonucleotide
  Target: ATXN2; (-) strand; PAM type: NRG; PAM sequence: TGG
ttctttgtatttagtagaga

SEQ ID NO: 30919 - DNA, 20 bp, Artificial Sequence
  Description of Artificial Sequence: Synthetic oligonucleotide
  Target: ATXN2; (-) strand; PAM type: NRG; PAM sequence: GAG
taatttctttgtatttagta

SEQ ID NO: 30920 - DNA, 20 bp, Artificial Sequence
  Description of Artificial Sequence: Synthetic oligonucleotide
  Target: ATXN2; (-) strand; PAM type: NRG; PAM sequence: TAG
gctaatttctttgtatttag

SEQ ID NO: 30921 - DNA, 20 bp, Artificial Sequence
  Description of Artificial Sequence: Synthetic oligonucleotide
  Target: ATXN2; (-) strand; PAM type: NRG; PAM sequence: TAG
tcggctaatttctttgtatt

SEQ ID NO: 30922 - DNA, 20 bp, Artificial Sequence
  Description of Artificial Sequence: Synthetic oligonucleotide
  Target: ATXN2; (-) strand; PAM type: NRG; PAM sequence: CGG
taggcatgtgccaccacgct

SEQ ID NO: 30923 - DNA, 20 bp, Artificial Sequence
  Description of Artificial Sequence: Synthetic oligonucleotide
  Target: ATXN2; (-) strand; PAM type: NRG; PAM sequence: AGG
tctcaagtagctggggttat

SEQ ID NO: 30924 - DNA, 20 bp, Artificial Sequence
  Description of Artificial Sequence: Synthetic oligonucleotide
  Target: ATXN2; (-) strand; PAM type: NRG; PAM sequence: TAG
ctctcaagtagctggggtta

SEQ ID NO: 30925 - DNA, 20 bp, Artificial Sequence
  Description of Artificial Sequence: Synthetic oligonucleotide
  Target: ATXN2; (-) strand; PAM type: NRG; PAM sequence: GGG
ctcagcctctcaagtagctg

SEQ ID NO: 30926 - DNA, 20 bp, Artificial Sequence
  Description of Artificial Sequence: Synthetic oligonucleotide
  Target: ATXN2; (-) strand; PAM type: NRG; PAM sequence: GGG
cctcagcctctcaagtagct

SEQ ID NO: 30927 - DNA, 20 bp, Artificial Sequence
  Description of Artificial Sequence: Synthetic oligonucleotide
  Target: ATXN2; (-) strand; PAM type: NRG; PAM sequence: TGG
gcctcagcctctcaagtagc

SEQ ID NO: 30928 - DNA, 20 bp, Artificial Sequence
  Description of Artificial Sequence: Synthetic oligonucleotide
  Target: ATXN2; (-) strand; PAM type: NRG; PAM sequence: TAG
tcctgcctcagcctctcaag

SEQ ID NO: 30929 - DNA, 20 bp, Artificial Sequence
  Description of Artificial Sequence: Synthetic oligonucleotide
  Target: ATXN2; (-) strand; PAM type: NRG; PAM sequence: AAG
ttctcctgcctcagcctctc

SEQ ID NO: 30930 - DNA, 20 bp, Artificial Sequence
  Description of Artificial Sequence: Synthetic oligonucleotide
  Target: ATXN2; (-) strand; PAM type: NRG; PAM sequence: CAG
ttcaagtgattctcctgcct

SEQ ID NO: 30931 - DNA, 20 bp, Artificial Sequence
  Description of Artificial Sequence: Synthetic oligonucleotide
  Target: ATXN2; (-) strand; PAM type: NRG; PAM sequence: AAG
aacctctgcctcccaggttc

SEQ ID NO: 30932 - DNA, 20 bp, Artificial Sequence
  Description of Artificial Sequence: Synthetic oligonucleotide
  Target: ATXN2; (-) strand; PAM type: NRG; PAM sequence: AGG
cactgcaacctctgcctccc

SEQ ID NO: 30933 - DNA, 20 bp, Artificial Sequence
  Description of Artificial Sequence: Synthetic oligonucleotide
  Target: ATXN2; (-) strand; PAM type: NRG; PAM sequence: CAG
tcactgcaacctctgcctcc

SEQ ID NO: 30934 - DNA, 20 bp, Artificial Sequence
  Description of Artificial Sequence: Synthetic oligonucleotide
  Target: ATXN2; (-) strand; PAM type: NRG; PAM sequence: TGG
ggagtgcaatggtgccatct

SEQ ID NO: 30935 - DNA, 20 bp, Artificial Sequence
  Description of Artificial Sequence: Synthetic oligonucleotide
  Target: ATXN2; (-) strand; PAM type: NRG; PAM sequence: TGG
tcacccaggctggagtgcaa

SEQ ID NO: 30936 - DNA, 20 bp, Artificial Sequence
  Description of Artificial Sequence: Synthetic oligonucleotide
  Target: ATXN2; (-) strand; PAM type: NRG; PAM sequence: GAG
tgctcttgtcacccaggctg

SEQ ID NO: 30937 - DNA, 20 bp, Artificial Sequence
  Description of Artificial Sequence: Synthetic oligonucleotide
  Target: ATXN2; (-) strand; PAM type: NRG; PAM sequence: TGG
tttgctcttgtcacccaggc

SEQ ID NO: 30938 - DNA, 20 bp, Artificial Sequence
  Description of Artificial Sequence: Synthetic oligonucleotide
  Target: ATXN2; (-) strand; PAM type: NRG; PAM sequence: AGG
gagttttgctcttgtcaccc

SEQ ID NO: 30939 - DNA, 20 bp, Artificial Sequence
  Description of Artificial Sequence: Synthetic oligonucleotide
  Target: ATXN2; (-) strand; PAM type: NRG; PAM sequence: CAG
ggagttttgctcttgtcacc

SEQ ID NO: 30940 - DNA, 20 bp, Artificial Sequence
  Description of Artificial Sequence: Synthetic oligonucleotide
  Target: ATXN2; (-) strand; PAM type: NRG; PAM sequence: GAG
tgttttttttttttgagatg

SEQ ID NO: 30941 - DNA, 20 bp, Artificial Sequence
  Description of Artificial Sequence: Synthetic oligonucleotide
  Target: ATXN2; (-) strand; PAM type: NRG; PAM sequence: TGG
tttgttttttttttttgaga

SEQ ID NO: 30942 - DNA, 20 bp, Artificial Sequence
  Description of Artificial Sequence: Synthetic oligonucleotide
  Target: ATXN2; (-) strand; PAM type: NRG; PAM sequence: GAG
taaatttgtttttttttttt

SEQ ID NO: 30943 - DNA, 20 bp, Artificial Sequence
  Description of Artificial Sequence: Synthetic oligonucleotide
  Target: ATXN2; (-) strand; PAM type: NRG; PAM sequence: TAG
aaacttcgtaaagggccaga

SEQ ID NO: 30944 - DNA, 20 bp, Artificial Sequence
  Description of Artificial Sequence: Synthetic oligonucleotide
  Target: ATXN2; (-) strand; PAM type: NRG; PAM sequence: CAG
tgtcaaacttcgtaaagggc

SEQ ID NO: 30945 - DNA, 20 bp, Artificial Sequence
  Description of Artificial Sequence: Synthetic oligonucleotide
  Target: ATXN2; (-) strand; PAM type: NRG; PAM sequence: GGG
ggcctgtcaaacttcgtaaa

SEQ ID NO: 30946 - DNA, 20 bp, Artificial Sequence
  Description of Artificial Sequence: Synthetic oligonucleotide
  Target: ATXN2; (-) strand; PAM type: NRG; PAM sequence: AGG
aggcctgtcaaacttcgtaa

SEQ ID NO: 30947 - DNA, 20 bp, Artificial Sequence
  Description of Artificial Sequence: Synthetic oligonucleotide
  Target: ATXN2; (-) strand; PAM type: NRG; PAM sequence: AAG
aaggcctgtcaaacttcgta

SEQ ID NO: 30948 - DNA, 20 bp, Artificial Sequence
  Description of Artificial Sequence: Synthetic oligonucleotide
  Target: ATXN2; (-) strand; PAM type: NRG; PAM sequence: AGG
gctttctatgacctaatcca

SEQ ID NO: 30949 - DNA, 20 bp, Artificial Sequence
  Description of Artificial Sequence: Synthetic oligonucleotide
  Target: ATXN2; (-) strand; PAM type: NRG; PAM sequence: AAG
agctttctatgacctaatcc

SEQ ID NO: 30950 - DNA, 20 bp, Artificial Sequence
  Description of Artificial Sequence: Synthetic oligonucleotide
  Target: ATXN2; (-) strand; PAM type: NRG; PAM sequence: AAG
cctgagggagtctaccttca

SEQ ID NO: 30951 - DNA, 20 bp, Artificial Sequence
  Description of Artificial Sequence: Synthetic oligonucleotide
  Target: ATXN2; (-) strand; PAM type: NRG; PAM sequence: GAG
ccctattcccaagcctgagg

SEQ ID NO: 30952 - DNA, 20 bp, Artificial Sequence
  Description of Artificial Sequence: Synthetic oligonucleotide
  Target: ATXN2; (-) strand; PAM type: NRG; PAM sequence: GGG
caccctattcccaagcctga

SEQ ID NO: 30953 - DNA, 20 bp, Artificial Sequence
  Description of Artificial Sequence: Synthetic oligonucleotide
  Target: ATXN2; (-) strand; PAM type: NRG; PAM sequence: AGG
tcaccctattcccaagcctg

SEQ ID NO: 30954 - DNA, 20 bp, Artificial Sequence
  Description of Artificial Sequence: Synthetic oligonucleotide
  Target: ATXN2; (-) strand; PAM type: NRG; PAM sequence: GAG
atcaccctattcccaagcct

SEQ ID NO: 30955 - DNA, 20 bp, Artificial Sequence
  Description of Artificial Sequence: Synthetic oligonucleotide
  Target: ATXN2; (-) strand; PAM type: NRG; PAM sequence: AAG
ttaaaaatcaccctattccc

SEQ ID NO: 30956 - DNA, 20 bp, Artificial Sequence
  Description of Artificial Sequence: Synthetic oligonucleotide
  Target: ATXN2; (-) strand; PAM type: NRG; PAM sequence: GGG
acttcaactctacttgtgtt

SEQ ID NO: 30957 - DNA, 20 bp, Artificial Sequence
  Description of Artificial Sequence: Synthetic oligonucleotide
  Target: ATXN2; (-) strand; PAM type: NRG; PAM sequence: TGG
gacttcaactctacttgtgt

SEQ ID NO: 30958 - DNA, 20 bp, Artificial Sequence
  Description of Artificial Sequence: Synthetic oligonucleotide
  Target: ATXN2; (-) strand; PAM type: NRG; PAM sequence: TAG
cctagcctaccttttgctgt

SEQ ID NO: 30959 - DNA, 20 bp, Artificial Sequence
  Description of Artificial Sequence: Synthetic oligonucleotide
  Target: ATXN2; (-) strand; PAM type: NRG; PAM sequence: TAG
ttttatccatgggtttaacc

SEQ ID NO: 30960 - DNA, 20 bp, Artificial Sequence
  Description of Artificial Sequence: Synthetic oligonucleotide
  Target: ATXN2; (-) strand; PAM type: NRG; PAM sequence: GGG
gatacattaattttatccat

SEQ ID NO: 30961 - DNA, 20 bp, Artificial Sequence
  Description of Artificial Sequence: Synthetic oligonucleotide
  Target: ATXN2; (-) strand; PAM type: NRG; PAM sequence: TGG
cgatacattaattttatcca

SEQ ID NO: 30962 - DNA, 20 bp, Artificial Sequence
  Description of Artificial Sequence: Synthetic oligonucleotide
  Target: ATXN2; (-) strand; PAM type: NRG; PAM sequence: AGG
ttgggccaaacaatatcagg

SEQ ID NO: 30963 - DNA, 20 bp, Artificial Sequence
  Description of Artificial Sequence: Synthetic oligonucleotide
  Target: ATXN2; (-) strand; PAM type: NRG; PAM sequence: GAG
tttgggccaaacaatatcag

SEQ ID NO: 30964 - DNA, 20 bp, Artificial Sequence
  Description of Artificial Sequence: Synthetic oligonucleotide
  Target: ATXN2; (-) strand; PAM type: NRG; PAM sequence: AGG
tatttgggccaaacaatatc

SEQ ID NO: 30965 - DNA, 20 bp, Artificial Sequence
  Description of Artificial Sequence: Synthetic oligonucleotide
  Target: ATXN2; (-) strand; PAM type: NRG; PAM sequence: CAG
ttatttgggccaaacaatat

SEQ ID NO: 30966 - DNA, 20 bp, Artificial Sequence
  Description of Artificial Sequence: Synthetic oligonucleotide
  Target: ATXN2; (-) strand; PAM type: NRG; PAM sequence: GGG
ggctatgctgttatttattt

SEQ ID NO: 30967 - DNA, 20 bp, Artificial Sequence
  Description of Artificial Sequence: Synthetic oligonucleotide
  Target: ATXN2; (-) strand; PAM type: NRG; PAM sequence: TGG
tggctatgctgttatttatt

SEQ ID NO: 30968 - DNA, 20 bp, Artificial Sequence
  Description of Artificial Sequence: Synthetic oligonucleotide
  Target: ATXN2; (-) strand; PAM type: NRG; PAM sequence: TGG
tgtgactttaggcaaattct

SEQ ID NO: 30969 - DNA, 20 bp, Artificial Sequence
  Description of Artificial Sequence: Synthetic oligonucleotide
  Target: ATXN2; (-) strand; PAM type: NRG; PAM sequence: AGG
ttcctttcctctgtgacttt

SEQ ID NO: 30970 - DNA, 20 bp, Artificial Sequence
  Description of Artificial Sequence: Synthetic oligonucleotide
  Target: ATXN2; (-) strand; PAM type: NRG; PAM sequence: TAG
attcctttcctctgtgactt

SEQ ID NO: 30971 - DNA, 20 bp, Artificial Sequence
  Description of Artificial Sequence: Synthetic oligonucleotide
  Target: ATXN2; (-) strand; PAM type: NRG; PAM sequence: GAG
ggaaggaatataatagttga

SEQ ID NO: 30972 - DNA, 20 bp, Artificial Sequence
  Description of Artificial Sequence: Synthetic oligonucleotide
  Target: ATXN2; (-) strand; PAM type: NRG; PAM sequence: GAG
agggaaggaatataatagtt

SEQ ID NO: 30973 - DNA, 20 bp, Artificial Sequence
  Description of Artificial Sequence: Synthetic oligonucleotide
  Target: ATXN2; (-) strand; PAM type: NRG; PAM sequence: TAG
tccagagggaaggaatataa

SEQ ID NO: 30974 - DNA, 20 bp, Artificial Sequence
  Description of Artificial Sequence: Synthetic oligonucleotide
  Target: ATXN2; (-) strand; PAM type: NRG; PAM sequence: AGG
atgttagtcttccagaggga

SEQ ID NO: 30975 - DNA, 20 bp, Artificial Sequence
  Description of Artificial Sequence: Synthetic oligonucleotide
  Target: ATXN2; (-) strand; PAM type: NRG; PAM sequence: AAG
catgttagtcttccagaggg

SEQ ID NO: 30976 - DNA, 20 bp, Artificial Sequence
  Description of Artificial Sequence: Synthetic oligonucleotide
  Target: ATXN2; (-) strand; PAM type: NRG; PAM sequence: GGG
gtacatgttagtcttccaga

SEQ ID NO: 30977 - DNA, 20 bp, Artificial Sequence
  Description of Artificial Sequence: Synthetic oligonucleotide
  Target: ATXN2; (-) strand; PAM type: NRG; PAM sequence: AGG
agtacatgttagtcttccag

SEQ ID NO: 30978 - DNA, 20 bp, Artificial Sequence
  Description of Artificial Sequence: Synthetic oligonucleotide
  Target: ATXN2; (-) strand; PAM type: NRG; PAM sequence: GAG
cagtacatgttagtcttcca

SEQ ID NO: 30979 - DNA, 20 bp, Artificial Sequence
  Description of Artificial Sequence: Synthetic oligonucleotide
  Target: ATXN2; (-) strand; PAM type: NRG; PAM sequence: CAG
agcagtacatgttagtcttc

SEQ ID NO: 30980 - DNA, 20 bp, Artificial Sequence
  Description of Artificial Sequence: Synthetic oligonucleotide
  Target: ATXN2; (-) strand; PAM type: NRG; PAM sequence: TAG
aagacttcagcagtacatgt

SEQ ID NO: 30981 - DNA, 20 bp, Artificial Sequence
  Description of Artificial Sequence: Synthetic oligonucleotide
  Target: ATXN2; (-) strand; PAM type: NRG; PAM sequence: CAG
gacactgaacaagacttcag

SEQ ID NO: 30982 - DNA, 20 bp, Artificial Sequence
  Description of Artificial Sequence: Synthetic oligonucleotide
  Target: ATXN2; (-) strand; PAM type: NRG; PAM sequence: CAG
aaggacactgaacaagactt

SEQ ID NO: 30983 - DNA, 20 bp, Artificial Sequence
  Description of Artificial Sequence: Synthetic oligonucleotide
  Target: ATXN2; (-) strand; PAM type: NRG; PAM sequence: AAG
gggctagaaggacactgaac

SEQ ID NO: 30984 - DNA, 20 bp, Artificial Sequence
  Description of Artificial Sequence: Synthetic oligonucleotide
  Target: ATXN2; (-) strand; PAM type: NRG; PAM sequence: AGG
ctgcaaagtctggggctaga

SEQ ID NO: 30985 - DNA, 20 bp, Artificial Sequence
  Description of Artificial Sequence: Synthetic oligonucleotide
  Target: ATXN2; (-) strand; PAM type: NRG; PAM sequence: AAG
gctgcaaagtctggggctag

SEQ ID NO: 30986 - DNA, 20 bp, Artificial Sequence
  Description of Artificial Sequence: Synthetic oligonucleotide
  Target: ATXN2; (-) strand; PAM type: NRG; PAM sequence: TAG
taggctgcaaagtctggggc

SEQ ID NO: 30987 - DNA, 20 bp, Artificial Sequence
  Description of Artificial Sequence: Synthetic oligonucleotide
  Target: ATXN2; (-) strand; PAM type: NRG; PAM sequence: GGG
ttggtaggctgcaaagtctg

SEQ ID NO: 30988 - DNA, 20 bp, Artificial Sequence
  Description of Artificial Sequence: Synthetic oligonucleotide
  Target: ATXN2; (-) strand; PAM type: NRG; PAM sequence: GGG
gttggtaggctgcaaagtct

SEQ ID NO: 30989 - DNA, 20 bp, Artificial Sequence
  Description of Artificial Sequence: Synthetic oligonucleotide
  Target: ATXN2; (-) strand; PAM type: NRG; PAM sequence: TGG
tgttggtaggctgcaaagtc

SEQ ID NO: 30990 - DNA, 20 bp, Artificial Sequence
  Description of Artificial Sequence: Synthetic oligonucleotide
  Target: ATXN2; (-) strand; PAM type: NRG; PAM sequence: AAG
gtccatgttggtaggctgca

SEQ ID NO: 30991 - DNA, 20 bp, Artificial Sequence
  Description of Artificial Sequence: Synthetic oligonucleotide
  Target: ATXN2; (-) strand; PAM type: NRG; PAM sequence: AGG
ctgtctcagtccatgttggt

SEQ ID NO: 30992 - DNA, 20 bp, Artificial Sequence
  Description of Artificial Sequence: Synthetic oligonucleotide
  Target: ATXN2; (-) strand; PAM type: NRG; PAM sequence: TAG
cctgtctcagtccatgttgg

SEQ ID NO: 30993 - DNA, 20 bp, Artificial Sequence
  Description of Artificial Sequence: Synthetic oligonucleotide
  Target: ATXN2; (-) strand; PAM type: NRG; PAM sequence: TGG
ttccctgtctcagtccatgt

SEQ ID NO: 30994 - DNA, 20 bp, Artificial Sequence
  Description of Artificial Sequence: Synthetic oligonucleotide
  Target: ATXN2; (-) strand; PAM type: NRG; PAM sequence: CAG
tgcccacgctttccctgtct

SEQ ID NO: 30995 - DNA, 20 bp, Artificial Sequence
  Description of Artificial Sequence: Synthetic oligonucleotide
  Target: ATXN2; (-) strand; PAM type: NRG; PAM sequence: TGG
tctgtaggaaaattagagta

SEQ ID NO: 30996 - DNA, 20 bp, Artificial Sequence
  Description of Artificial Sequence: Synthetic oligonucleotide
  Target: ATXN2; (-) strand; PAM type: NRG; PAM sequence: GAG
atgcttctgtaggaaaatta

SEQ ID NO: 30997 - DNA, 20 bp, Artificial Sequence
  Description of Artificial Sequence: Synthetic oligonucleotide
  Target: ATXN2; (-) strand; PAM type: NRG; PAM sequence: TAG
ggatgcttctgtaggaaaat

SEQ ID NO: 30998 - DNA, 20 bp, Artificial Sequence
  Description of Artificial Sequence: Synthetic oligonucleotide
  Target: ATXN2; (-) strand; PAM type: NRG; PAM sequence: AGG
accacttaggatgcttctgt

SEQ ID NO: 30999 - DNA, 20 bp, Artificial Sequence
  Description of Artificial Sequence: Synthetic oligonucleotide
  Target: ATXN2; (-) strand; PAM type: NRG; PAM sequence: TAG
caccacttaggatgcttctg

SEQ ID NO: 31000 - DNA, 20 bp, Artificial Sequence
  Description of Artificial Sequence: Synthetic oligonucleotide
  Target: ATXN2; (-) strand; PAM type: NRG; PAM sequence: AGG
tgagaacccacacaccactt

SEQ ID NO: 31001 - DNA, 20 bp, Artificial Sequence
  Description of Artificial Sequence: Synthetic oligonucleotide
  Target: ATXN2; (-) strand; PAM type: NRG; PAM sequence: TAG
ctgagaacccacacaccact

SEQ ID NO: 31002 - DNA, 20 bp, Artificial Sequence
  Description of Artificial Sequence: Synthetic oligonucleotide
  Target: ATXN2; (-) strand; PAM type: NRG; PAM sequence: GAG
atgtgtttgtgacttgatct

SEQ ID NO: 31003 - DNA, 20 bp, Artificial Sequence
  Description of Artificial Sequence: Synthetic oligonucleotide
  Target: ATXN2; (-) strand; PAM type: NRG; PAM sequence: GGG
gtagtgttgtacgatatcat

SEQ ID NO: 31004 - DNA, 20 bp, Artificial Sequence
  Description of Artificial Sequence: Synthetic oligonucleotide
  Target: ATXN2; (-) strand; PAM type: NRG; PAM sequence: TGG
agtagtgttgtacgatatca

SEQ ID NO: 31005 - DNA, 20 bp, Artificial Sequence
  Description of Artificial Sequence: Synthetic oligonucleotide
  Target: ATXN2; (-) strand; PAM type: NRG; PAM sequence: TAG
aattaatttgaactaaaaag

SEQ ID NO: 31006 - DNA, 20 bp, Artificial Sequence
  Description of Artificial Sequence: Synthetic oligonucleotide
  Target: ATXN2; (-) strand; PAM type: NRG; PAM sequence: AAG
cataattaatttgaactaaa

SEQ ID NO: 31007 - DNA, 20 bp, Artificial Sequence
  Description of Artificial Sequence: Synthetic oligonucleotide
  Target: ATXN2; (-) strand; PAM type: NRG; PAM sequence: TAG
cagctccctattttggcaga

SEQ ID NO: 31008 - DNA, 20 bp, Artificial Sequence
  Description of Artificial Sequence: Synthetic oligonucleotide
  Target: ATXN2; (-) strand; PAM type: NRG; PAM sequence: CAG
tctgcagctccctattttgg

SEQ ID NO: 31009 - DNA, 20 bp, Artificial Sequence
  Description of Artificial Sequence: Synthetic oligonucleotide
  Target: ATXN2; (-) strand; PAM type: NRG; PAM sequence: TGG
ttttctgcagctccctattt

SEQ ID NO: 31010 - DNA, 20 bp, Artificial Sequence
  Description of Artificial Sequence: Synthetic oligonucleotide
  Target: ATXN2; (-) strand; PAM type: NRG; PAM sequence: CAG
aaatgatggttagttttctg

SEQ ID NO: 31011 - DNA, 20 bp, Artificial Sequence
  Description of Artificial Sequence: Synthetic oligonucleotide
  Target: ATXN2; (-) strand; PAM type: NRG; PAM sequence: TAG
acaacatcataaatgatggt

SEQ ID NO: 31012 - DNA, 20 bp, Artificial Sequence
  Description of Artificial Sequence: Synthetic oligonucleotide
  Target: ATXN2; (-) strand; PAM type: NRG; PAM sequence: TGG
ggaaacaacatcataaatga

SEQ ID NO: 31013 - DNA, 20 bp, Artificial Sequence
  Description of Artificial Sequence: Synthetic oligonucleotide
  Target: ATXN2; (-) strand; PAM type: NRG; PAM sequence: TGG
ttttttaaaattttgaaatt

SEQ ID NO: 31014 - DNA, 20 bp, Artificial Sequence
  Description of Artificial Sequence: Synthetic oligonucleotide
  Target: ATXN2; (-) strand; PAM type: NRG; PAM sequence: AAG
atcagtgagtttcaatcaaa

SEQ ID NO: 31015 - DNA, 20 bp, Artificial Sequence
  Description of Artificial Sequence: Synthetic oligonucleotide
  Target: ATXN2; (-) strand; PAM type: NRG; PAM sequence: GAG
cctggcagttctctatcagt

SEQ ID NO: 31016 - DNA, 20 bp, Artificial Sequence
  Description of Artificial Sequence: Synthetic oligonucleotide
  Target: ATXN2; (-) strand; PAM type: NRG; PAM sequence: CAG
tagtcctggcagttctctat

SEQ ID NO: 31017 - DNA, 20 bp, Artificial Sequence
  Description of Artificial Sequence: Synthetic oligonucleotide
  Target: ATXN2; (-) strand; PAM type: NRG; PAM sequence: CAG
caaccatgctttagtcctgg

SEQ ID NO: 31018 - DNA, 20 bp, Artificial Sequence
  Description of Artificial Sequence: Synthetic oligonucleotide
  Target: ATXN2; (-) strand; PAM type: NRG; PAM sequence: TGG
aatcaaccatgctttagtcc

SEQ ID NO: 31019 - DNA, 20 bp, Artificial Sequence
  Description of Artificial Sequence: Synthetic oligonucleotide
  Target: ATXN2; (-) strand; PAM type: NRG; PAM sequence: TAG
ttcttcaatcaaccatgctt

SEQ ID NO: 31020 - DNA, 20 bp, Artificial Sequence
  Description of Artificial Sequence: Synthetic oligonucleotide
  Target: ATXN2; (-) strand; PAM type: NRG; PAM sequence: CAG
aacaatccggtgattattgt

SEQ ID NO: 31021 - DNA, 20 bp, Artificial Sequence
  Description of Artificial Sequence: Synthetic oligonucleotide
  Target: ATXN2; (-) strand; PAM type: NRG; PAM sequence: CGG
caataatgaagaaaacaatc

SEQ ID NO: 31022 - DNA, 20 bp, Artificial Sequence
  Description of Artificial Sequence: Synthetic oligonucleotide
  Target: ATXN2; (-) strand; PAM type: NRG; PAM sequence: AAG
taaaaataataacaataatg

SEQ ID NO: 31023 - DNA, 20 bp, Artificial Sequence
  Description of Artificial Sequence: Synthetic oligonucleotide
  Target: ATXN2; (-) strand; PAM type: NRG; PAM sequence: AAG
tccagcgtaggcaacaaagc

SEQ ID NO: 31024 - DNA, 20 bp, Artificial Sequence
  Description of Artificial Sequence: Synthetic oligonucleotide
  Target: ATXN2; (-) strand; PAM type: NRG; PAM sequence: AAG
gcactccagcgtaggcaaca

SEQ ID NO: 31025 - DNA, 20 bp, Artificial Sequence
  Description of Artificial Sequence: Synthetic oligonucleotide
  Target: ATXN2; (-) strand; PAM type: NRG; PAM sequence: AGG
gctccattgcactccagcgt

SEQ ID NO: 31026 - DNA, 20 bp, Artificial Sequence
  Description of Artificial Sequence: Synthetic oligonucleotide
  Target: ATXN2; (-) strand; PAM type: NRG; PAM sequence: TAG
cgctccattgcactccagcg

SEQ ID NO: 31027 - DNA, 20 bp, Artificial Sequence
  Description of Artificial Sequence: Synthetic oligonucleotide
  Target: ATXN2; (-) strand; PAM type: NRG; PAM sequence: CAG
gagatcgctccattgcactc

SEQ ID NO: 31028 - DNA, 20 bp, Artificial Sequence
  Description of Artificial Sequence: Synthetic oligonucleotide
  Target: ATXN2; (-) strand; PAM type: NRG; PAM sequence: GAG
ggtggaggttgcagtgagct

SEQ ID NO: 31029 - DNA, 20 bp, Artificial Sequence
  Description of Artificial Sequence: Synthetic oligonucleotide
  Target: ATXN2; (-) strand; PAM type: NRG; PAM sequence: GAG
tgggaggtggaggttgcagt

SEQ ID NO: 31030 - DNA, 20 bp, Artificial Sequence
  Description of Artificial Sequence: Synthetic oligonucleotide
  Target: ATXN2; (-) strand; PAM type: NRG; PAM sequence: CAG
aacctgggaggtggaggttg

SEQ ID NO: 31031 - DNA, 20 bp, Artificial Sequence
  Description of Artificial Sequence: Synthetic oligonucleotide
  Target: ATXN2; (-) strand; PAM type: NRG; PAM sequence: AGG
cgcttgaacctgggaggtgg

SEQ ID NO: 31032 - DNA, 20 bp, Artificial Sequence
  Description of Artificial Sequence: Synthetic oligonucleotide
  Target: ATXN2; (-) strand; PAM type: NRG; PAM sequence: GAG
tcgcttgaacctgggaggtg

SEQ ID NO: 31033 - DNA, 20 bp, Artificial Sequence
  Description of Artificial Sequence: Synthetic oligonucleotide
  Target: ATXN2; (-) strand; PAM type: NRG; PAM sequence: TGG
aatcgcttgaacctgggagg

SEQ ID NO: 31034 - DNA, 20 bp, Artificial Sequence
  Description of Artificial Sequence: Synthetic oligonucleotide
  Target: ATXN2; (-) strand; PAM type: NRG; PAM sequence: AGG
gagaatcgcttgaacctggg

SEQ ID NO: 31035 - DNA, 20 bp, Artificial Sequence
  Description of Artificial Sequence: Synthetic oligonucleotide
  Target: ATXN2; (-) strand; PAM type: NRG; PAM sequence: GAG
ggagaatcgcttgaacctgg

SEQ ID NO: 31036 - DNA, 20 bp, Artificial Sequence
  Description of Artificial Sequence: Synthetic oligonucleotide
  Target: ATXN2; (-) strand; PAM type: NRG; PAM sequence: GGG
aaggagaatcgcttgaacct

SEQ ID NO: 31037 - DNA, 20 bp, Artificial Sequence
  Description of Artificial Sequence: Synthetic oligonucleotide
  Target: ATXN2; (-) strand; PAM type: NRG; PAM sequence: TGG
caaggagaatcgcttgaacc

SEQ ID NO: 31038 - DNA, 20 bp, Artificial Sequence
  Description of Artificial Sequence: Synthetic oligonucleotide
  Target: ATXN2; (-) strand; PAM type: NRG; PAM sequence: GAG
actcagtaggctgaggcaag

SEQ ID NO: 31039 - DNA, 20 bp, Artificial Sequence
  Description of Artificial Sequence: Synthetic oligonucleotide
  Target: ATXN2; (-) strand; PAM type: NRG; PAM sequence: AGG
ctactcagtaggctgaggca

SEQ ID NO: 31040 - DNA, 20 bp, Artificial Sequence
  Description of Artificial Sequence: Synthetic oligonucleotide
  Target: ATXN2; (-) strand; PAM type: NRG; PAM sequence: AAG
gctactcagtaggctgaggc

SEQ ID NO: 31041 - DNA, 20 bp, Artificial Sequence
  Description of Artificial Sequence: Synthetic oligonucleotide
  Target: ATXN2; (-) strand; PAM type: NRG; PAM sequence: AGG
cccagctactcagtaggctg

SEQ ID NO: 31042 - DNA, 20 bp, Artificial Sequence
  Description of Artificial Sequence: Synthetic oligonucleotide
  Target: ATXN2; (-) strand; PAM type: NRG; PAM sequence: GAG
tcccagctactcagtaggct

SEQ ID NO: 31043 - DNA, 20 bp, Artificial Sequence
  Description of Artificial Sequence: Synthetic oligonucleotide
  Target: ATXN2; (-) strand; PAM type: NRG; PAM sequence: AGG
tgtaatcccagctactcagt

SEQ ID NO: 31044 - DNA, 20 bp, Artificial Sequence
  Description of Artificial Sequence: Synthetic oligonucleotide
  Target: ATXN2; (-) strand; PAM type: NRG; PAM sequence: TAG
ctgtaatcccagctactcag

SEQ ID NO: 31045 - DNA, 20 bp, Artificial Sequence
  Description of Artificial Sequence: Synthetic oligonucleotide
  Target: ATXN2; (-) strand; PAM type: NRG; PAM sequence: CAG
cacctgtaatcccagctact

SEQ ID NO: 31046 - DNA, 20 bp, Artificial Sequence
  Description of Artificial Sequence: Synthetic oligonucleotide
  Target: ATXN2; (-) strand; PAM type: NRG; PAM sequence: CAG
gtgacaagcacctgtaatcc

SEQ ID NO: 31047 - DNA, 20 bp, Artificial Sequence
  Description of Artificial Sequence: Synthetic oligonucleotide
  Target: ATXN2; (-) strand; PAM type: NRG; PAM sequence: AAG
agttagccaggcgtggtgac

SEQ ID NO: 31048 - DNA, 20 bp, Artificial Sequence
  Description of Artificial Sequence: Synthetic oligonucleotide
  Target: ATXN2; (-) strand; PAM type: NRG; PAM sequence: TGG
acaaaaaagttagccaggcg

SEQ ID NO: 31049 - DNA, 20 bp, Artificial Sequence
  Description of Artificial Sequence: Synthetic oligonucleotide
  Target: ATXN2; (-) strand; PAM type: NRG; PAM sequence: AGG
aaaatacaaaaaagttagcc

SEQ ID NO: 31050 - DNA, 20 bp, Artificial Sequence
  Description of Artificial Sequence: Synthetic oligonucleotide
  Target: ATXN2; (-) strand; PAM type: NRG; PAM sequence: CAG
aaaaatacaaaaaagttagc

SEQ ID NO: 31051 - DNA, 20 bp, Artificial Sequence
  Description of Artificial Sequence: Synthetic oligonucleotide
  Target: ATXN2; (-) strand; PAM type: NRG; PAM sequence: TAG
tactaaaaatacaaaaaagt

SEQ ID NO: 31052 - DNA, 20 bp, Artificial Sequence
  Description of Artificial Sequence: Synthetic oligonucleotide
  Target: ATXN2; (-) strand; PAM type: NRG; PAM sequence: AAG
tctctactaaaaatacaaaa

SEQ ID NO: 31053 - DNA, 20 bp, Artificial Sequence
  Description of Artificial Sequence: Synthetic oligonucleotide
  Target: ATXN2; (-) strand; PAM type: NRG; PAM sequence: TGG
tcaggaatttgagaccagcc

SEQ ID NO: 31054 - DNA, 20 bp, Artificial Sequence
  Description of Artificial Sequence: Synthetic oligonucleotide
  Target: ATXN2; (-) strand; PAM type: NRG; PAM sequence: CAG
tgaggtcaggaatttgagac

SEQ ID NO: 31055 - DNA, 20 bp, Artificial Sequence
  Description of Artificial Sequence: Synthetic oligonucleotide
  Target: ATXN2; (-) strand; PAM type: NRG; PAM sequence: GAG
tcgcctgaggtcaggaattt

SEQ ID NO: 31056 - DNA, 20 bp, Artificial Sequence
  Description of Artificial Sequence: Synthetic oligonucleotide
  Target: ATXN2; (-) strand; PAM type: NRG; PAM sequence: AGG
cgtgtggatcgcctgaggtc

SEQ ID NO: 31057 - DNA, 20 bp, Artificial Sequence
  Description of Artificial Sequence: Synthetic oligonucleotide
  Target: ATXN2; (-) strand; PAM type: NRG; PAM sequence: CAG
gcgtgtggatcgcctgaggt

SEQ ID NO: 31058 - DNA, 20 bp, Artificial Sequence
  Description of Artificial Sequence: Synthetic oligonucleotide
  Target: ATXN2; (-) strand; PAM type: NRG; PAM sequence: AGG
cgaggcgtgtggatcgcctg

SEQ ID NO: 31059 - DNA, 20 bp, Artificial Sequence
  Description of Artificial Sequence: Synthetic oligonucleotide
  Target: ATXN2; (-) strand; PAM type: NRG; PAM sequence: GAG
ccgaggcgtgtggatcgcct

SEQ ID NO: 31060 - DNA, 20 bp, Artificial Sequence
  Description of Artificial Sequence: Synthetic oligonucleotide
  Target: ATXN2; (-) strand; PAM type: NRG; PAM sequence: TGG
gtttgggaggccgaggcgtg

SEQ ID NO: 31061 - DNA, 20 bp, Artificial Sequence
  Description of Artificial Sequence: Synthetic oligonucleotide
  Target: ATXN2; (-) strand; PAM type: NRG; PAM sequence: AGG
cccagcagtttgggaggccg

SEQ ID NO: 31062 - DNA, 20 bp, Artificial Sequence
  Description of Artificial Sequence: Synthetic oligonucleotide
  Target: ATXN2; (-) strand; PAM type: NRG; PAM sequence: GAG
tcccagcagtttgggaggcc

SEQ ID NO: 31063 - DNA, 20 bp, Artificial Sequence
  Description of Artificial Sequence: Synthetic oligonucleotide
  Target: ATXN2; (-) strand; PAM type: NRG; PAM sequence: AGG
tgtaatcccagcagtttggg

SEQ ID NO: 31064 - DNA, 20 bp, Artificial Sequence
  Description of Artificial Sequence: Synthetic oligonucleotide
  Target: ATXN2; (-) strand; PAM type: NRG; PAM sequence: GAG
ctgtaatcccagcagtttgg

SEQ ID NO: 31065 - DNA, 20 bp, Artificial Sequence
  Description of Artificial Sequence: Synthetic oligonucleotide
  Target: ATXN2; (-) strand; PAM type: NRG; PAM sequence: GGG
gcctgtaatcccagcagttt

SEQ ID NO: 31066 - DNA, 20 bp, Artificial Sequence
  Description of Artificial Sequence: Synthetic oligonucleotide
  Target: ATXN2; (-) strand; PAM type: NRG; PAM sequence: TGG
tgcctgtaatcccagcagtt

SEQ ID NO: 31067 - DNA, 20 bp, Artificial Sequence
  Description of Artificial Sequence: Synthetic oligonucleotide
  Target: ATXN2; (-) strand; PAM type: NRG; PAM sequence: CAG
gcttatgcctgtaatcccag

SEQ ID NO: 31068 - DNA, 20 bp, Artificial Sequence
  Description of Artificial Sequence: Synthetic oligonucleotide
  Target: ATXN2; (-) strand; PAM type: NRG; PAM sequence: CAG
gtcgcttatgcctgtaatcc

SEQ ID NO: 31069 - DNA, 20 bp, Artificial Sequence
  Description of Artificial Sequence: Synthetic oligonucleotide
  Target: ATXN2; (-) strand; PAM type: NRG; PAM sequence: CAG
tcagtgaagaaggctgggag

SEQ ID NO: 31070 - DNA, 20 bp, Artificial Sequence
  Description of Artificial Sequence: Synthetic oligonucleotide
  Target: ATXN2; (-) strand; PAM type: NRG; PAM sequence: GAG
aaatcagtgaagaaggctgg

SEQ ID NO: 31071 - DNA, 20 bp, Artificial Sequence
  Description of Artificial Sequence: Synthetic oligonucleotide
  Target: ATXN2; (-) strand; PAM type: NRG; PAM sequence: GGG
aaaaatcagtgaagaaggct

SEQ ID NO: 31072 - DNA, 20 bp, Artificial Sequence
  Description of Artificial Sequence: Synthetic oligonucleotide
  Target: ATXN2; (-) strand; PAM type: NRG; PAM sequence: TGG
taaaaatcagtgaagaaggc

SEQ ID NO: 31073 - DNA, 20 bp, Artificial Sequence
  Description of Artificial Sequence: Synthetic oligonucleotide
  Target: ATXN2; (-) strand; PAM type: NRG; PAM sequence: AGG
caagtaaaaatcagtgaaga

SEQ ID NO: 31074 - DNA, 20 bp, Artificial Sequence
  Description of Artificial Sequence: Synthetic oligonucleotide
  Target: ATXN2; (-) strand; PAM type: NRG; PAM sequence: AAG
acaagtaaaaatcagtgaag

SEQ ID NO: 31075 - DNA, 20 bp, Artificial Sequence
  Description of Artificial Sequence: Synthetic oligonucleotide
  Target: ATXN2; (-) strand; PAM type: NRG; PAM sequence: AAG
aaaacaagtaaaaatcagtg

SEQ ID NO: 31076 - DNA, 20 bp, Artificial Sequence
  Description of Artificial Sequence: Synthetic oligonucleotide
  Target: ATXN2; (-) strand; PAM type: NRG; PAM sequence: CAG
tgacaaaaacaagtaaaaat

SEQ ID NO: 31077 - DNA, 20 bp, Artificial Sequence
  Description of Artificial Sequence: Synthetic oligonucleotide
  Target: ATXN2; (-) strand; PAM type: NRG; PAM sequence: AAG
tatagagatatgacaaaaac

SEQ ID NO: 31078 - DNA, 20 bp, Artificial Sequence
  Description of Artificial Sequence: Synthetic oligonucleotide
  Target: ATXN2; (-) strand; PAM type: NRG; PAM sequence: GAG
gttccattgcttctaatata

SEQ ID NO: 31079 - DNA, 20 bp, Artificial Sequence
  Description of Artificial Sequence: Synthetic oligonucleotide
  Target: ATXN2; (-) strand; PAM type: NRG; PAM sequence: TAG
ctgttccattgcttctaata

SEQ ID NO: 31080 - DNA, 20 bp, Artificial Sequence
  Description of Artificial Sequence: Synthetic oligonucleotide
  Target: ATXN2; (-) strand; PAM type: NRG; PAM sequence: AAG
tttaaccttgtgagatttca

SEQ ID NO: 31081 - DNA, 20 bp, Artificial Sequence
  Description of Artificial Sequence: Synthetic oligonucleotide
  Target: ATXN2; (-) strand; PAM type: NRG; PAM sequence: GAG
gctgagatttttaaccttgt

SEQ ID NO: 31082 - DNA, 20 bp, Artificial Sequence
  Description of Artificial Sequence: Synthetic oligonucleotide
  Target: ATXN2; (-) strand; PAM type: NRG; PAM sequence: GAG
agataggaagtgacaaagct

SEQ ID NO: 31083 - DNA, 20 bp, Artificial Sequence
  Description of Artificial Sequence: Synthetic oligonucleotide
  Target: ATXN2; (-) strand; PAM type: NRG; PAM sequence: AAG
caaagagataggaagtgaca

SEQ ID NO: 31084 - DNA, 20 bp, Artificial Sequence
  Description of Artificial Sequence: Synthetic oligonucleotide
  Target: ATXN2; (-) strand; PAM type: NRG; PAM sequence: AAG
ctttaggtcaaagagatagg

SEQ ID NO: 31085 - DNA, 20 bp, Artificial Sequence
  Description of Artificial Sequence: Synthetic oligonucleotide
  Target: ATXN2; (-) strand; PAM type: NRG; PAM sequence: AGG
tgcctttaggtcaaagagat

SEQ ID NO: 31086 - DNA, 20 bp, Artificial Sequence
  Description of Artificial Sequence: Synthetic oligonucleotide
  Target: ATXN2; (-) strand; PAM type: NRG; PAM sequence: TAG
ttgcctttaggtcaaagaga

SEQ ID NO: 31087 - DNA, 20 bp, Artificial Sequence
  Description of Artificial Sequence: Synthetic oligonucleotide
  Target: ATXN2; (-) strand; PAM type: NRG; PAM sequence: GAG
gaaattgcctttaggtcaaa

SEQ ID NO: 31088 - DNA, 20 bp, Artificial Sequence
  Description of Artificial Sequence: Synthetic oligonucleotide
  Target: ATXN2; (-) strand; PAM type: NRG; PAM sequence: AAG
aggaaattgcctttaggtca

SEQ ID NO: 31089 - DNA, 20 bp, Artificial Sequence
  Description of Artificial Sequence: Synthetic oligonucleotide
  Target: ATXN2; (-) strand; PAM type: NRG; PAM sequence: AGG
aaattaaggaaattgccttt

SEQ ID NO: 31090 - DNA, 20 bp, Artificial Sequence
  Description of Artificial Sequence: Synthetic oligonucleotide
  Target: ATXN2; (-) strand; PAM type: NRG; PAM sequence: TAG
gaaattaaggaaattgcctt

SEQ ID NO: 31091 - DNA, 20 bp, Artificial Sequence
  Description of Artificial Sequence: Synthetic oligonucleotide
  Target: ATXN2; (-) strand; PAM type: NRG; PAM sequence: AGG
gtgatggattggagaaatta

SEQ ID NO: 31092 - DNA, 20 bp, Artificial Sequence
  Description of Artificial Sequence: Synthetic oligonucleotide
  Target: ATXN2; (-) strand; PAM type: NRG; PAM sequence: AAG
agtgatggattggagaaatt

SEQ ID NO: 31093 - DNA, 20 bp, Artificial Sequence
  Description of Artificial Sequence: Synthetic oligonucleotide
  Target: ATXN2; (-) strand; PAM type: NRG; PAM sequence: GAG
gatgaggaagtgatggattg

SEQ ID NO: 31094 - DNA, 20 bp, Artificial Sequence
  Description of Artificial Sequence: Synthetic oligonucleotide
  Target: ATXN2; (-) strand; PAM type: NRG; PAM sequence: TGG
cagatgaggaagtgatggat

SEQ ID NO: 31095 - DNA, 20 bp, Artificial Sequence
  Description of Artificial Sequence: Synthetic oligonucleotide
  Target: ATXN2; (-) strand; PAM type: NRG; PAM sequence: TGG
ttttacagatgaggaagtga

SEQ ID NO: 31096 - DNA, 20 bp, Artificial Sequence
  Description of Artificial Sequence: Synthetic oligonucleotide
  Target: ATXN2; (-) strand; PAM type: NRG; PAM sequence: AAG
tatctgttttacagatgagg

SEQ ID NO: 31097 - DNA, 20 bp, Artificial Sequence
  Description of Artificial Sequence: Synthetic oligonucleotide
  Target: ATXN2; (-) strand; PAM type: NRG; PAM sequence: AGG
ccatatctgttttacagatg

SEQ ID NO: 31098 - DNA, 20 bp, Artificial Sequence
  Description of Artificial Sequence: Synthetic oligonucleotide
  Target: ATXN2; (-) strand; PAM type: NRG; PAM sequence: GAG
gccatatctgttttacagat

SEQ ID NO: 31099 - DNA, 20 bp, Artificial Sequence
  Description of Artificial Sequence: Synthetic oligonucleotide
  Target: ATXN2; (-) strand; PAM type: NRG; PAM sequence: CAG
gtagtgccatatctgtttta

SEQ ID NO: 31100 - DNA, 20 bp, Artificial Sequence
  Description of Artificial Sequence: Synthetic oligonucleotide
  Target: ATXN2; (-) strand; PAM type: NRG; PAM sequence: TAG
agcccagcctgtcaggctgg

SEQ ID NO: 31101 - DNA, 20 bp, Artificial Sequence
  Description of Artificial Sequence: Synthetic oligonucleotide
  Target: ATXN2; (-) strand; PAM type: NRG; PAM sequence: TGG
aacagcccagcctgtcaggc

SEQ ID NO: 31102 - DNA, 20 bp, Artificial Sequence
  Description of Artificial Sequence: Synthetic oligonucleotide
  Target: ATXN2; (-) strand; PAM type: NRG; PAM sequence: AGG
ttacaacagcccagcctgtc

SEQ ID NO: 31103 - DNA, 20 bp, Artificial Sequence
  Description of Artificial Sequence: Synthetic oligonucleotide
  Target: ATXN2; (-) strand; PAM type: NRG; PAM sequence: CAG
cttacaacagcccagcctgt

SEQ ID NO: 31104 - DNA, 20 bp, Artificial Sequence
  Description of Artificial Sequence: Synthetic oligonucleotide
  Target: ATXN2; (-) strand; PAM type: NRG; PAM sequence: CAG
ttttaagccttacaacagcc

SEQ ID NO: 31105 - DNA, 20 bp, Artificial Sequence
  Description of Artificial Sequence: Synthetic oligonucleotide
  Target: ATXN2; (-) strand; PAM type: NRG; PAM sequence: CAG
atatcttttaagccttacaa

SEQ ID NO: 31106 - DNA, 20 bp, Artificial Sequence
  Description of Artificial Sequence: Synthetic oligonucleotide
  Target: ATXN2; (-) strand; PAM type: NRG; PAM sequence: AAG
gcattacttgtatatctttt

SEQ ID NO: 31107 - DNA, 20 bp, Artificial Sequence
  Description of Artificial Sequence: Synthetic oligonucleotide
  Target: ATXN2; (-) strand; PAM type: NRG; PAM sequence: GAG
tttcaggagagctgtgccaa

SEQ ID NO: 31108 - DNA, 20 bp, Artificial Sequence
  Description of Artificial Sequence: Synthetic oligonucleotide
  Target: ATXN2; (-) strand; PAM type: NRG; PAM sequence: AAG
ggtttcaggagagctgtgcc

SEQ ID NO: 31109 - DNA, 20 bp, Artificial Sequence
  Description of Artificial Sequence: Synthetic oligonucleotide
  Target: ATXN2; (-) strand; PAM type: NRG; PAM sequence: GAG
gtgcctattaggtttcagga

SEQ ID NO: 31110 - DNA, 20 bp, Artificial Sequence
  Description of Artificial Sequence: Synthetic oligonucleotide
  Target: ATXN2; (-) strand; PAM type: NRG; PAM sequence: GAG
gtgtgcctattaggtttcag

SEQ ID NO: 31111 - DNA, 20 bp, Artificial Sequence
  Description of Artificial Sequence: Synthetic oligonucleotide
  Target: ATXN2; (-) strand; PAM type: NRG; PAM sequence: AGG
ttgtgtgcctattaggtttc

SEQ ID NO: 31112 - DNA, 20 bp, Artificial Sequence
  Description of Artificial Sequence: Synthetic oligonucleotide
  Target: ATXN2; (-) strand; PAM type: NRG; PAM sequence: CAG
attgtgtgcctattaggttt

SEQ ID NO: 31113 - DNA, 20 bp, Artificial Sequence
  Description of Artificial Sequence: Synthetic oligonucleotide
  Target: ATXN2; (-) strand; PAM type: NRG; PAM sequence: AGG
ccatttattgtgtgcctatt

SEQ ID NO: 31114 - DNA, 20 bp, Artificial Sequence
  Description of Artificial Sequence: Synthetic oligonucleotide
  Target: ATXN2; (-) strand; PAM type: NRG; PAM sequence: TAG
accatttattgtgtgcctat

SEQ ID NO: 31115 - DNA, 20 bp, Artificial Sequence
  Description of Artificial Sequence: Synthetic oligonucleotide
  Target: ATXN2; (-) strand; PAM type: NRG; PAM sequence: AGG
aaaagatgaacattttattt

SEQ ID NO: 31116 - DNA, 20 bp, Artificial Sequence
  Description of Artificial Sequence: Synthetic oligonucleotide
  Target: ATXN2; (-) strand; PAM type: NRG; PAM sequence: TAG
gaaaagatgaacattttatt

SEQ ID NO: 31117 - DNA, 20 bp, Artificial Sequence
  Description of Artificial Sequence: Synthetic oligonucleotide
  Target: ATXN2; (-) strand; PAM type: NRG; PAM sequence: AAG
ttagctatctatgatgtgaa

SEQ ID NO: 31118 - DNA, 20 bp, Artificial Sequence
  Description of Artificial Sequence: Synthetic oligonucleotide
  Target: ATXN2; (-) strand; PAM type: NRG; PAM sequence: TAG
aaagaaagaaaaaacacatt

SEQ ID NO: 31119 - DNA, 20 bp, Artificial Sequence
  Description of Artificial Sequence: Synthetic oligonucleotide
  Target: ATXN2; (-) strand; PAM type: NRG; PAM sequence: AAG
tggaaaaaaaaaaaaaaaga

SEQ ID NO: 31120 - DNA, 20 bp, Artificial Sequence
  Description of Artificial Sequence: Synthetic oligonucleotide
  Target: ATXN2; (-) strand; PAM type: NRG; PAM sequence: AAG
tttctggaaaaaaaaaaaaa

SEQ ID NO: 31121 - DNA, 20 bp, Artificial Sequence
  Description of Artificial Sequence: Synthetic oligonucleotide
  Target: ATXN2; (-) strand; PAM type: NRG; PAM sequence: TGG
gtagtagtggccattttttc

SEQ ID NO: 31122 - DNA, 20 bp, Artificial Sequence
  Description of Artificial Sequence: Synthetic oligonucleotide
  Target: ATXN2; (-) strand; PAM type: NRG; PAM sequence: TGG
tctgagccaagtggtagtag

SEQ ID NO: 31123 - DNA, 20 bp, Artificial Sequence
  Description of Artificial Sequence: Synthetic oligonucleotide
  Target: ATXN2; (-) strand; PAM type: NRG; PAM sequence: TAG
atttctgagccaagtggtag

SEQ ID NO: 31124 - DNA, 20 bp, Artificial Sequence
  Description of Artificial Sequence: Synthetic oligonucleotide
  Target: ATXN2; (-) strand; PAM type: NRG; PAM sequence: TAG
agcatttctgagccaagtgg

SEQ ID NO: 31125 - DNA, 20 bp, Artificial Sequence
  Description of Artificial Sequence: Synthetic oligonucleotide
  Target: ATXN2; (-) strand; PAM type: NRG; PAM sequence: TGG
actagcatttctgagccaag

SEQ ID NO: 31126 - DNA, 20 bp, Artificial Sequence
  Description of Artificial Sequence: Synthetic oligonucleotide
  Target: ATXN2; (-) strand; PAM type: NRG; PAM sequence: AAG
aagactagcatttctgagcc

SEQ ID NO: 31127 - DNA, 20 bp, Artificial Sequence
  Description of Artificial Sequence: Synthetic oligonucleotide
  Target: ATXN2; (-) strand; PAM type: NRG; PAM sequence: GAG
aaataaagactagcatttct

SEQ ID NO: 31128 - DNA, 20 bp, Artificial Sequence
  Description of Artificial Sequence: Synthetic oligonucleotide
  Target: ATXN2; (-) strand; PAM type: NRG; PAM sequence: TAG
acatttcagaaaataaagac

SEQ ID NO: 31129 - DNA, 20 bp, Artificial Sequence
  Description of Artificial Sequence: Synthetic oligonucleotide
  Target: ATXN2; (-) strand; PAM type: NRG; PAM sequence: AAG
ataaaacatttcagaaaata

SEQ ID NO: 31130 - DNA, 20 bp, Artificial Sequence
  Description of Artificial Sequence: Synthetic oligonucleotide
  Target: ATXN2; (-) strand; PAM type: NRG; PAM sequence: CAG
tttttctatataaaacattt

SEQ ID NO: 31131 - DNA, 20 bp, Artificial Sequence
  Description of Artificial Sequence: Synthetic oligonucleotide
  Target: ATXN2; (-) strand; PAM type: NRG; PAM sequence: AAG
aaaatggtaaggaaatatat

SEQ ID NO: 31132 - DNA, 20 bp, Artificial Sequence
  Description of Artificial Sequence: Synthetic oligonucleotide
  Target: ATXN2; (-) strand; PAM type: NRG; PAM sequence: AGG
taacccaatctaaaatggta

SEQ ID NO: 31133 - DNA, 20 bp, Artificial Sequence
  Description of Artificial Sequence: Synthetic oligonucleotide
  Target: ATXN2; (-) strand; PAM type: NRG; PAM sequence: AAG
ttaacccaatctaaaatggt

SEQ ID NO: 31134 - DNA, 20 bp, Artificial Sequence
  Description of Artificial Sequence: Synthetic oligonucleotide
  Target: ATXN2; (-) strand; PAM type: NRG; PAM sequence: TGG
ctttttaacccaatctaaaa

SEQ ID NO: 31135 - DNA, 20 bp, Artificial Sequence
  Description of Artificial Sequence: Synthetic oligonucleotide
  Target: ATXN2; (-) strand; PAM type: NRG; PAM sequence: AAG
gaatcaccgcacccggccgg

SEQ ID NO: 31136 - DNA, 20 bp, Artificial Sequence
  Description of Artificial Sequence: Synthetic oligonucleotide
  Target: ATXN2; (-) strand; PAM type: NRG; PAM sequence: CGG
cttgaatcaccgcacccggc

SEQ ID NO: 31137 - DNA, 20 bp, Artificial Sequence
  Description of Artificial Sequence: Synthetic oligonucleotide
  Target: ATXN2; (-) strand; PAM type: NRG; PAM sequence: CGG
caggcttgaatcaccgcacc

SEQ ID NO: 31138 - DNA, 20 bp, Artificial Sequence
  Description of Artificial Sequence: Synthetic oligonucleotide
  Target: ATXN2; (-) strand; PAM type: NRG; PAM sequence: AGG
tcccaaagtgctgggattgc

SEQ ID NO: 31139 - DNA, 20 bp, Artificial Sequence
  Description of Artificial Sequence: Synthetic oligonucleotide
  Target: ATXN2; (-) strand; PAM type: NRG; PAM sequence: CAG
ctcccaaagtgctgggattg

SEQ ID NO: 31140 - DNA, 20 bp, Artificial Sequence
  Description of Artificial Sequence: Synthetic oligonucleotide
  Target: ATXN2; (-) strand; PAM type: NRG; PAM sequence: GGG
cctcagcctcccaaagtgct

SEQ ID NO: 31141 - DNA, 20 bp, Artificial Sequence
  Description of Artificial Sequence: Synthetic oligonucleotide
  Target: ATXN2; (-) strand; PAM type: NRG; PAM sequence: TGG
gcctcagcctcccaaagtgc

SEQ ID NO: 31142 - DNA, 20 bp, Artificial Sequence
  Description of Artificial Sequence: Synthetic oligonucleotide
  Target: ATXN2; (-) strand; PAM type: NRG; PAM sequence: AAG
ctgtctgcctcagcctccca

SEQ ID NO: 31143 - DNA, 20 bp, Artificial Sequence
  Description of Artificial Sequence: Synthetic oligonucleotide
  Target: ATXN2; (-) strand; PAM type: NRG; PAM sequence: CAG
acctcatgatctgtctgcct

SEQ ID NO: 31144 - DNA, 20 bp, Artificial Sequence
  Description of Artificial Sequence: Synthetic oligonucleotide
  Target: ATXN2; (-) strand; PAM type: NRG; PAM sequence: CAG
aggtttcactgtgttagcca

SEQ ID NO: 31145 - DNA, 20 bp, Artificial Sequence
  Description of Artificial Sequence: Synthetic oligonucleotide
  Target: ATXN2; (-) strand; PAM type: NRG; PAM sequence: TAG
gagatgaggtttcactgtgt

SEQ ID NO: 31146 - DNA, 20 bp, Artificial Sequence
  Description of Artificial Sequence: Synthetic oligonucleotide
  Target: ATXN2; (-) strand; PAM type: NRG; PAM sequence: AGG
ttgtatttttggtagagatg

SEQ ID NO: 31147 - DNA, 20 bp, Artificial Sequence
  Description of Artificial Sequence: Synthetic oligonucleotide
  Target: ATXN2; (-) strand; PAM type: NRG; PAM sequence: GAG
tttgtatttttggtagagat

SEQ ID NO: 31148 - DNA, 20 bp, Artificial Sequence
  Description of Artificial Sequence: Synthetic oligonucleotide
  Target: ATXN2; (-) strand; PAM type: NRG; PAM sequence: GAG
atttttttgtatttttggta

SEQ ID NO: 31149 - DNA, 20 bp, Artificial Sequence
  Description of Artificial Sequence: Synthetic oligonucleotide
  Target: ATXN2; (-) strand; PAM type: NRG; PAM sequence: TAG
taatttttttgtatttttgg

SEQ ID NO: 31150 - DNA, 20 bp, Artificial Sequence
  Description of Artificial Sequence: Synthetic oligonucleotide
  Target: ATXN2; (-) strand; PAM type: NRG; PAM sequence: TGG
ggctaatttttttgtatttt

SEQ ID NO: 31151 - DNA, 20 bp, Artificial Sequence
  Description of Artificial Sequence: Synthetic oligonucleotide
  Target: ATXN2; (-) strand; PAM type: NRG; PAM sequence: CGG
caggtgcccgccaccacgcc

SEQ ID NO: 31152 - DNA, 20 bp, Artificial Sequence
  Description of Artificial Sequence: Synthetic oligonucleotide
  Target: ATXN2; (-) strand; PAM type: NRG; PAM sequence: AGG
tcccgagtagctgggactac

SEQ ID NO: 31153 - DNA, 20 bp, Artificial Sequence
  Description of Artificial Sequence: Synthetic oligonucleotide
  Target: ATXN2; (-) strand; PAM type: NRG; PAM sequence: CAG
ctcccgagtagctgggacta

SEQ ID NO: 31154 - DNA, 20 bp, Artificial Sequence
  Description of Artificial Sequence: Synthetic oligonucleotide
  Target: ATXN2; (-) strand; PAM type: NRG; PAM sequence: GGG
cctccacctcccgagtagct

SEQ ID NO: 31155 - DNA, 20 bp, Artificial Sequence
  Description of Artificial Sequence: Synthetic oligonucleotide
  Target: ATXN2; (-) strand; PAM type: NRG; PAM sequence: TGG
gcctccacctcccgagtagc

SEQ ID NO: 31156 - DNA, 20 bp, Artificial Sequence
  Description of Artificial Sequence: Synthetic oligonucleotide
  Target: ATXN2; (-) strand; PAM type: NRG; PAM sequence: TAG
tcctgcctccacctcccgag

SEQ ID NO: 31157 - DNA, 20 bp, Artificial Sequence
  Description of Artificial Sequence: Synthetic oligonucleotide
  Target: ATXN2; (-) strand; PAM type: NRG; PAM sequence: GAG
ttctcctgcctccacctccc

SEQ ID NO: 31158 - DNA, 20 bp, Artificial Sequence
  Description of Artificial Sequence: Synthetic oligonucleotide
  Target: ATXN2; (-) strand; PAM type: NRG; PAM sequence: GGG
cactacaagctctgcctctc

SEQ ID NO: 31159 - DNA, 20 bp, Artificial Sequence
  Description of Artificial Sequence: Synthetic oligonucleotide
  Target: ATXN2; (-) strand; PAM type: NRG; PAM sequence: CGG
tcactacaagctctgcctct

SEQ ID NO: 31160 - DNA, 20 bp, Artificial Sequence
  Description of Artificial Sequence: Synthetic oligonucleotide
  Target: ATXN2; (-) strand; PAM type: NRG; PAM sequence: AAG
gtgcgatcttggctcactac

SEQ ID NO: 31161 - DNA, 20 bp, Artificial Sequence
  Description of Artificial Sequence: Synthetic oligonucleotide
  Target: ATXN2; (-) strand; PAM type: NRG; PAM sequence: TGG
ggagtgcagtggtgcgatct

SEQ ID NO: 31162 - DNA, 20 bp, Artificial Sequence
  Description of Artificial Sequence: Synthetic oligonucleotide
  Target: ATXN2; (-) strand; PAM type: NRG; PAM sequence: TGG
tcgcccaggctggagtgcag

SEQ ID NO: 31163 - DNA, 20 bp, Artificial Sequence
  Description of Artificial Sequence: Synthetic oligonucleotide
  Target: ATXN2; (-) strand; PAM type: NRG; PAM sequence: CAG
ctgtcgcccaggctggagtg

SEQ ID NO: 31164 - DNA, 20 bp, Artificial Sequence
  Description of Artificial Sequence: Synthetic oligonucleotide
  Target: ATXN2; (-) strand; PAM type: NRG; PAM sequence: GAG
ttgctctgtcgcccaggctg

SEQ ID NO: 31165 - DNA, 20 bp, Artificial Sequence
  Description of Artificial Sequence: Synthetic oligonucleotide
  Target: ATXN2; (-) strand; PAM type: NRG; PAM sequence: TGG
tcttgctctgtcgcccaggc

SEQ ID NO: 31166 - DNA, 20 bp, Artificial Sequence
  Description of Artificial Sequence: Synthetic oligonucleotide
  Target: ATXN2; (-) strand; PAM type: NRG; PAM sequence: AGG
agagtcttgctctgtcgccc

SEQ ID NO: 31167 - DNA, 20 bp, Artificial Sequence
  Description of Artificial Sequence: Synthetic oligonucleotide
  Target: ATXN2; (-) strand; PAM type: NRG; PAM sequence: CAG
cagagtcttgctctgtcgcc

SEQ ID NO: 31168 - DNA, 20 bp, Artificial Sequence
  Description of Artificial Sequence: Synthetic oligonucleotide
  Target: ATXN2; (-) strand; PAM type: NRG; PAM sequence: GAG
tttttttttttttggagaca

SEQ ID NO: 31169 - DNA, 20 bp, Artificial Sequence
  Description of Artificial Sequence: Synthetic oligonucleotide
  Target: ATXN2; (-) strand; PAM type: NRG; PAM sequence: CAG
tttttttttttttttggaga

SEQ ID NO: 31170 - DNA, 20 bp, Artificial Sequence
  Description of Artificial Sequence: Synthetic oligonucleotide
  Target: ATXN2; (-) strand; PAM type: NRG; PAM sequence: GAG
tttttttttttttttttttg

SEQ ID NO: 31171 - DNA, 20 bp, Artificial Sequence
  Description of Artificial Sequence: Synthetic oligonucleotide
  Target: ATXN2; (-) strand; PAM type: NRG; PAM sequence: TGG
tttttttttttttttttttt

SEQ ID NO: 31172 - DNA, 20 bp, Artificial Sequence
  Description of Artificial Sequence: Synthetic oligonucleotide
  Target: ATXN2; (-) strand; PAM type: NRG; PAM sequence: AAG
tagtctataaatgctataag

SEQ ID NO: 31173 - DNA, 20 bp, Artificial Sequence
  Description of Artificial Sequence: Synthetic oligonucleotide
  Target: ATXN2; (-) strand; PAM type: NRG; PAM sequence: AAG
tcatagtctataaatgctat

SEQ ID NO: 31174 - DNA, 20 bp, Artificial Sequence
  Description of Artificial Sequence: Synthetic oligonucleotide
  Target: ATXN2; (-) strand; PAM type: NRG; PAM sequence: TAG
tcagggaatttagttgttca

SEQ ID NO: 31175 - DNA, 20 bp, Artificial Sequence
  Description of Artificial Sequence: Synthetic oligonucleotide
  Target: ATXN2; (-) strand; PAM type: NRG; PAM sequence: TAG
gatacggaattcagggaatt

SEQ ID NO: 31176 - DNA, 20 bp, Artificial Sequence
  Description of Artificial Sequence: Synthetic oligonucleotide
  Target: ATXN2; (-) strand; PAM type: NRG; PAM sequence: GGG
tgtgacagatacggaattca

SEQ ID NO: 31177 - DNA, 20 bp, Artificial Sequence
  Description of Artificial Sequence: Synthetic oligonucleotide
  Target: ATXN2; (-) strand; PAM type: NRG; PAM sequence: AGG
ttgtgacagatacggaattc

SEQ ID NO: 31178 - DNA, 20 bp, Artificial Sequence
  Description of Artificial Sequence: Synthetic oligonucleotide
  Target: ATXN2; (-) strand; PAM type: NRG; PAM sequence: CAG
tttgtgacagatacggaatt

SEQ ID NO: 31179 - DNA, 20 bp, Artificial Sequence
  Description of Artificial Sequence: Synthetic oligonucleotide
  Target: ATXN2; (-) strand; PAM type: NRG; PAM sequence: CGG
atttacatttgtgacagata

SEQ ID NO: 31180 - DNA, 20 bp, Artificial Sequence
  Description of Artificial Sequence: Synthetic oligonucleotide
  Target: ATXN2; (-) strand; PAM type: NRG; PAM sequence: CAG
tgaggaatttacatttgtga

SEQ ID NO: 31181 - DNA, 20 bp, Artificial Sequence
  Description of Artificial Sequence: Synthetic oligonucleotide
  Target: ATXN2; (-) strand; PAM type: NRG; PAM sequence: AGG
aaaaaaaagaaaagaaaatg

SEQ ID NO: 31182 - DNA, 20 bp, Artificial Sequence
  Description of Artificial Sequence: Synthetic oligonucleotide
  Target: ATXN2; (-) strand; PAM type: NRG; PAM sequence: GAG
caaaaaaaagaaaagaaaat

SEQ ID NO: 31183 - DNA, 20 bp, Artificial Sequence
  Description of Artificial Sequence: Synthetic oligonucleotide
  Target: ATXN2; (-) strand; PAM type: NRG; PAM sequence: AAG
cccaccgccaaaaaaaagaa

SEQ ID NO: 31184 - DNA, 20 bp, Artificial Sequence
  Description of Artificial Sequence: Synthetic oligonucleotide
  Target: ATXN2; (-) strand; PAM type: NRG; PAM sequence: AAG
atccccccaccgccaaaaaa

SEQ ID NO: 31185 - DNA, 20 bp, Artificial Sequence
  Description of Artificial Sequence: Synthetic oligonucleotide
  Target: ATXN2; (-) strand; PAM type: NRG; PAM sequence: GAG
accatcccaggcgacagagt

SEQ ID NO: 31186 - DNA, 20 bp, Artificial Sequence
  Description of Artificial Sequence: Synthetic oligonucleotide
  Target: ATXN2; (-) strand; PAM type: NRG; PAM sequence: GAG
gtataccatcccaggcgaca

SEQ ID NO: 31187 - DNA, 20 bp, Artificial Sequence
  Description of Artificial Sequence: Synthetic oligonucleotide
  Target: ATXN2; (-) strand; PAM type: NRG; PAM sequence: CAG
ctgtataccatcccaggcga

SEQ ID NO: 31188 - DNA, 20 bp, Artificial Sequence
  Description of Artificial Sequence: Synthetic oligonucleotide
  Target: ATXN2; (-) strand; PAM type: NRG; PAM sequence: AGG
gcgccactgtataccatccc

SEQ ID NO: 31189 - DNA, 20 bp, Artificial Sequence
  Description of Artificial Sequence: Synthetic oligonucleotide
  Target: ATXN2; (-) strand; PAM type: NRG; PAM sequence: CAG
tgcgccactgtataccatcc

SEQ ID NO: 31190 - DNA, 20 bp, Artificial Sequence
  Description of Artificial Sequence: Synthetic oligonucleotide
  Target: ATXN2; (-) strand; PAM type: NRG; PAM sequence: GAG
caggaattggaggttgcagt

SEQ ID NO: 31191 - DNA, 20 bp, Artificial Sequence
  Description of Artificial Sequence: Synthetic oligonucleotide
  Target: ATXN2; (-) strand; PAM type: NRG; PAM sequence: CAG
aacccaggaattggaggttg

SEQ ID NO: 31192 - DNA, 20 bp, Artificial Sequence
  Description of Artificial Sequence: Synthetic oligonucleotide
  Target: ATXN2; (-) strand; PAM type: NRG; PAM sequence: AGG
cacttaaacccaggaattgg

SEQ ID NO: 31193 - DNA, 20 bp, Artificial Sequence
  Description of Artificial Sequence: Synthetic oligonucleotide
  Target: ATXN2; (-) strand; PAM type: NRG; PAM sequence: GAG
tcacttaaacccaggaattg

SEQ ID NO: 31194 - DNA, 20 bp, Artificial Sequence
  Description of Artificial Sequence: Synthetic oligonucleotide
  Target: ATXN2; (-) strand; PAM type: NRG; PAM sequence: TGG
ggtcacttaaacccaggaat

SEQ ID NO: 31195 - DNA, 20 bp, Artificial Sequence
  Description of Artificial Sequence: Synthetic oligonucleotide
  Target: ATXN2; (-) strand; PAM type: NRG; PAM sequence: AGG
caggagggtcacttaaaccc

SEQ ID NO: 31196 - DNA, 20 bp, Artificial Sequence
  Description of Artificial Sequence: Synthetic oligonucleotide
  Target: ATXN2; (-) strand; PAM type: NRG; PAM sequence: CAG
tcaggagggtcacttaaacc

SEQ ID NO: 31197 - DNA, 20 bp, Artificial Sequence
  Description of Artificial Sequence: Synthetic oligonucleotide
  Target: ATXN2; (-) strand; PAM type: NRG; PAM sequence: GGG
cttgggaggctgactcagga

SEQ ID NO: 31198 - DNA, 20 bp, Artificial Sequence
  Description of Artificial Sequence: Synthetic oligonucleotide
  Target: ATXN2; (-) strand; PAM type: NRG; PAM sequence: AGG
acttgggaggctgactcagg

SEQ ID NO: 31199 - DNA, 20 bp, Artificial Sequence
  Description of Artificial Sequence: Synthetic oligonucleotide
  Target: ATXN2; (-) strand; PAM type: NRG; PAM sequence: GAG
tacttgggaggctgactcag

SEQ ID NO: 31200 - DNA, 20 bp, Artificial Sequence
  Description of Artificial Sequence: Synthetic oligonucleotide
  Target: ATXN2; (-) strand; PAM type: NRG; PAM sequence: AGG
gctacttgggaggctgactc

SEQ ID NO: 31201 - DNA, 20 bp, Artificial Sequence
  Description of Artificial Sequence: Synthetic oligonucleotide
  Target: ATXN2; (-) strand; PAM type: NRG; PAM sequence: CAG
agctacttgggaggctgact

SEQ ID NO: 31202 - DNA, 20 bp, Artificial Sequence
  Description of Artificial Sequence: Synthetic oligonucleotide
  Target: ATXN2; (-) strand; PAM type: NRG; PAM sequence: AGG
tatagtctcagctacttggg

SEQ ID NO: 31203 - DNA, 20 bp, Artificial Sequence
  Description of Artificial Sequence: Synthetic oligonucleotide
  Target: ATXN2; (-) strand; PAM type: NRG; PAM sequence: GAG
gtatagtctcagctacttgg

SEQ ID NO: 31204 - DNA, 20 bp, Artificial Sequence
  Description of Artificial Sequence: Synthetic oligonucleotide
  Target: ATXN2; (-) strand; PAM type: NRG; PAM sequence: GGG
gcgtatagtctcagctactt

SEQ ID NO: 31205 - DNA, 20 bp, Artificial Sequence
  Description of Artificial Sequence: Synthetic oligonucleotide
  Target: ATXN2; (-) strand; PAM type: NRG; PAM sequence: TGG
tgcgtatagtctcagctact

SEQ ID NO: 31206 - DNA, 20 bp, Artificial Sequence
  Description of Artificial Sequence: Synthetic oligonucleotide
  Target: ATXN2; (-) strand; PAM type: NRG; PAM sequence: CAG
gtggtgcatgcgtatagtct

SEQ ID NO: 31207 - DNA, 20 bp, Artificial Sequence
  Description of Artificial Sequence: Synthetic oligonucleotide
  Target: ATXN2; (-) strand; PAM type: NRG; PAM sequence: TAG
ggcatggtggtgcatgcgta

SEQ ID NO: 31208 - DNA, 20 bp, Artificial Sequence
  Description of Artificial Sequence: Synthetic oligonucleotide
  Target: ATXN2; (-) strand; PAM type: NRG; PAM sequence: TGG
aataaattagctgggcatgg

SEQ ID NO: 31209 - DNA, 20 bp, Artificial Sequence
  Description of Artificial Sequence: Synthetic oligonucleotide
  Target: ATXN2; (-) strand; PAM type: NRG; PAM sequence: TGG
aaaaataaattagctgggca

SEQ ID NO: 31210 - DNA, 20 bp, Artificial Sequence
  Description of Artificial Sequence: Synthetic oligonucleotide
  Target: ATXN2; (-) strand; PAM type: NRG; PAM sequence: GGG
tctacaaaaataaattagct

SEQ ID NO: 31211 - DNA, 20 bp, Artificial Sequence
  Description of Artificial Sequence: Synthetic oligonucleotide
  Target: ATXN2; (-) strand; PAM type: NRG; PAM sequence: TGG
ctctacaaaaataaattagc

SEQ ID NO: 31212 - DNA, 20 bp, Artificial Sequence
  Description of Artificial Sequence: Synthetic oligonucleotide
  Target: ATXN2; (-) strand; PAM type: NRG; PAM sequence: TAG
ccatctctacaaaaataaat

SEQ ID NO: 31213 - DNA, 20 bp, Artificial Sequence
  Description of Artificial Sequence: Synthetic oligonucleotide
  Target: ATXN2; (-) strand; PAM type: NRG; PAM sequence: AGG
tcagcctaggcaacatagtg

SEQ ID NO: 31214 - DNA, 20 bp, Artificial Sequence
  Description of Artificial Sequence: Synthetic oligonucleotide
  Target: ATXN2; (-) strand; PAM type: NRG; PAM sequence: GAG
atcagcctaggcaacatagt

SEQ ID NO: 31215 - DNA, 20 bp, Artificial Sequence
  Description of Artificial Sequence: Synthetic oligonucleotide
  Target: ATXN2; (-) strand; PAM type: NRG; PAM sequence: TAG
caagatcagcctaggcaaca

SEQ ID NO: 31216 - DNA, 20 bp, Artificial Sequence
  Description of Artificial Sequence: Synthetic oligonucleotide
  Target: ATXN2; (-) strand; PAM type: NRG; PAM sequence: AGG
caggaattcaagatcagcct

SEQ ID NO: 31217 - DNA, 20 bp, Artificial Sequence
  Description of Artificial Sequence: Synthetic oligonucleotide
  Target: ATXN2; (-) strand; PAM type: NRG; PAM sequence: TAG
tcaggaattcaagatcagcc

SEQ ID NO: 31218 - DNA, 20 bp, Artificial Sequence
  Description of Artificial Sequence: Synthetic oligonucleotide
  Target: ATXN2; (-) strand; PAM type: NRG; PAM sequence: CAG
tgagctcaggaattcaagat

SEQ ID NO: 31219 - DNA, 20 bp, Artificial Sequence
  Description of Artificial Sequence: Synthetic oligonucleotide
  Target: ATXN2; (-) strand; PAM type: NRG; PAM sequence: AAG
tcgcttgagctcaggaattc

SEQ ID NO: 31220 - DNA, 20 bp, Artificial Sequence
  Description of Artificial Sequence: Synthetic oligonucleotide
  Target: ATXN2; (-) strand; PAM type: NRG; PAM sequence: AGG
gaggagggtcgcttgagctc

SEQ ID NO: 31221 - DNA, 20 bp, Artificial Sequence
  Description of Artificial Sequence: Synthetic oligonucleotide
  Target: ATXN2; (-) strand; PAM type: NRG; PAM sequence: CAG
ggaggagggtcgcttgagct

SEQ ID NO: 31222 - DNA, 20 bp, Artificial Sequence
  Description of Artificial Sequence: Synthetic oligonucleotide
  Target: ATXN2; (-) strand; PAM type: NRG; PAM sequence: GAG
ccaagggaggagggtcgctt

SEQ ID NO: 31223 - DNA, 20 bp, Artificial Sequence
  Description of Artificial Sequence: Synthetic oligonucleotide
  Target: ATXN2; (-) strand; PAM type: NRG; PAM sequence: GGG
tttgggaagccaagggagga

SEQ ID NO: 31224 - DNA, 20 bp, Artificial Sequence
  Description of Artificial Sequence: Synthetic oligonucleotide
  Target: ATXN2; (-) strand; PAM type: NRG; PAM sequence: AGG
ctttgggaagccaagggagg

SEQ ID NO: 31225 - DNA, 20 bp, Artificial Sequence
  Description of Artificial Sequence: Synthetic oligonucleotide
  Target: ATXN2; (-) strand; PAM type: NRG; PAM sequence: GAG
actttgggaagccaagggag

SEQ ID NO: 31226 - DNA, 20 bp, Artificial Sequence
  Description of Artificial Sequence: Synthetic oligonucleotide
  Target: ATXN2; (-) strand; PAM type: NRG; PAM sequence: AGG
gcactttgggaagccaaggg

SEQ ID NO: 31227 - DNA, 20 bp, Artificial Sequence
  Description of Artificial Sequence: Synthetic oligonucleotide
  Target: ATXN2; (-) strand; PAM type: NRG; PAM sequence: GAG
agcactttgggaagccaagg

SEQ ID NO: 31228 - DNA, 20 bp, Artificial Sequence
  Description of Artificial Sequence: Synthetic oligonucleotide
  Target: ATXN2; (-) strand; PAM type: NRG; PAM sequence: GGG
ctagcactttgggaagccaa

SEQ ID NO: 31229 - DNA, 20 bp, Artificial Sequence
  Description of Artificial Sequence: Synthetic oligonucleotide
  Target: ATXN2; (-) strand; PAM type: NRG; PAM sequence: AGG
tctagcactttgggaagcca

SEQ ID NO: 31230 - DNA, 20 bp, Artificial Sequence
  Description of Artificial Sequence: Synthetic oligonucleotide
  Target: ATXN2; (-) strand; PAM type: NRG; PAM sequence: AAG
ttctagcactttgggaagcc

SEQ ID NO: 31231 - DNA, 20 bp, Artificial Sequence
  Description of Artificial Sequence: Synthetic oligonucleotide
  Target: ATXN2; (-) strand; PAM type: NRG; PAM sequence: AAG
tgtaattctagcactttggg

SEQ ID NO: 31232 - DNA, 20 bp, Artificial Sequence
  Description of Artificial Sequence: Synthetic oligonucleotide
  Target: ATXN2; (-) strand; PAM type: NRG; PAM sequence: GGG
acctgtaattctagcacttt

SEQ ID NO: 31233 - DNA, 20 bp, Artificial Sequence
  Description of Artificial Sequence: Synthetic oligonucleotide
  Target: ATXN2; (-) strand; PAM type: NRG; PAM sequence: TGG
cacctgtaattctagcactt

SEQ ID NO: 31234 - DNA, 20 bp, Artificial Sequence
  Description of Artificial Sequence: Synthetic oligonucleotide
  Target: ATXN2; (-) strand; PAM type: NRG; PAM sequence: TAG
gtggctcacacctgtaattc

SEQ ID NO: 31235 - DNA, 20 bp, Artificial Sequence
  Description of Artificial Sequence: Synthetic oligonucleotide
  Target: ATXN2; (-) strand; PAM type: NRG; PAM sequence: TGG
ggaattttggctgggcacag

SEQ ID NO: 31236 - DNA, 20 bp, Artificial Sequence
  Description of Artificial Sequence: Synthetic oligonucleotide
  Target: ATXN2; (-) strand; PAM type: NRG; PAM sequence: CAG
tgaggaattttggctgggca

SEQ ID NO: 31237 - DNA, 20 bp, Artificial Sequence
  Description of Artificial Sequence: Synthetic oligonucleotide
  Target: ATXN2; (-) strand; PAM type: NRG; PAM sequence: GGG
gaaaatgaggaattttggct

SEQ ID NO: 31238 - DNA, 20 bp, Artificial Sequence
  Description of Artificial Sequence: Synthetic oligonucleotide
  Target: ATXN2; (-) strand; PAM type: NRG; PAM sequence: TGG
agaaaatgaggaattttggc

SEQ ID NO: 31239 - DNA, 20 bp, Artificial Sequence
  Description of Artificial Sequence: Synthetic oligonucleotide
  Target: ATXN2; (-) strand; PAM type: NRG; PAM sequence: TGG
gaaaagaaaatgaggaattt

SEQ ID NO: 31240 - DNA, 20 bp, Artificial Sequence
  Description of Artificial Sequence: Synthetic oligonucleotide
  Target: ATXN2; (-) strand; PAM type: NRG; PAM sequence: AGG
gaaaaacggaaaagaaaatg

SEQ ID NO: 31241 - DNA, 20 bp, Artificial Sequence
  Description of Artificial Sequence: Synthetic oligonucleotide
  Target: ATXN2; (-) strand; PAM type: NRG; PAM sequence: GAG
tgaaaaacggaaaagaaaat

SEQ ID NO: 31242 - DNA, 20 bp, Artificial Sequence
  Description of Artificial Sequence: Synthetic oligonucleotide
  Target: ATXN2; (-) strand; PAM type: NRG; PAM sequence: AAG
caacagtatgaaaaacggaa

SEQ ID NO: 31243 - DNA, 20 bp, Artificial Sequence
  Description of Artificial Sequence: Synthetic oligonucleotide
  Target: ATXN2; (-) strand; PAM type: NRG; PAM sequence: CGG
tacttcaacagtatgaaaaa

SEQ ID NO: 31244 - DNA, 20 bp, Artificial Sequence
  Description of Artificial Sequence: Synthetic oligonucleotide
  Target: ATXN2; (-) strand; PAM type: NRG; PAM sequence: CAG
ggtgaaggactatacttcaa

SEQ ID NO: 31245 - DNA, 20 bp, Artificial Sequence
  Description of Artificial Sequence: Synthetic oligonucleotide
  Target: ATXN2; (-) strand; PAM type: NRG; PAM sequence: AGG
tcactagcttctctgggtga

SEQ ID NO: 31246 - DNA, 20 bp, Artificial Sequence
  Description of Artificial Sequence: Synthetic oligonucleotide
  Target: ATXN2; (-) strand; PAM type: NRG; PAM sequence: AAG
gtcactagcttctctgggtg

SEQ ID NO: 31247 - DNA, 20 bp, Artificial Sequence
  Description of Artificial Sequence: Synthetic oligonucleotide
  Target: ATXN2; (-) strand; PAM type: NRG; PAM sequence: GGG
cttgagtcactagcttctct

SEQ ID NO: 31248 - DNA, 20 bp, Artificial Sequence
  Description of Artificial Sequence: Synthetic oligonucleotide
  Target: ATXN2; (-) strand; PAM type: NRG; PAM sequence: TGG
acttgagtcactagcttctc

SEQ ID NO: 31249 - DNA, 20 bp, Artificial Sequence
  Description of Artificial Sequence: Synthetic oligonucleotide
  Target: ATXN2; (-) strand; PAM type: NRG; PAM sequence: TAG
caaccaggaacttgagtcac

SEQ ID NO: 31250 - DNA, 20 bp, Artificial Sequence
  Description of Artificial Sequence: Synthetic oligonucleotide
  Target: ATXN2; (-) strand; PAM type: NRG; PAM sequence: GAG
ttttaatcaaccaggaactt

SEQ ID NO: 31251 - DNA, 20 bp, Artificial Sequence
  Description of Artificial Sequence: Synthetic oligonucleotide
  Target: ATXN2; (-) strand; PAM type: NRG; PAM sequence: AGG
atagtttcttttaatcaacc

SEQ ID NO: 31252 - DNA, 20 bp, Artificial Sequence
  Description of Artificial Sequence: Synthetic oligonucleotide
  Target: ATXN2; (-) strand; PAM type: NRG; PAM sequence: CAG
aatagtttcttttaatcaac

SEQ ID NO: 31253 - DNA, 20 bp, Artificial Sequence
  Description of Artificial Sequence: Synthetic oligonucleotide
  Target: ATXN2; (-) strand; PAM type: NRG; PAM sequence: TAG
gtattaaaaaatgttattaa

SEQ ID NO: 31254 - DNA, 20 bp, Artificial Sequence
  Description of Artificial Sequence: Synthetic oligonucleotide
  Target: ATXN2; (-) strand; PAM type: NRG; PAM sequence: TGG
gaaagaaagaaaactagtga

SEQ ID NO: 31255 - DNA, 20 bp, Artificial Sequence
  Description of Artificial Sequence: Synthetic oligonucleotide
  Target: ATXN2; (-) strand; PAM type: NRG; PAM sequence: TAG
tctctggaaagaaagaaaac

SEQ ID NO: 31256 - DNA, 20 bp, Artificial Sequence
  Description of Artificial Sequence: Synthetic oligonucleotide
  Target: ATXN2; (-) strand; PAM type: NRG; PAM sequence: AAG
attttggatctctggaaaga

SEQ ID NO: 31257 - DNA, 20 bp, Artificial Sequence
  Description of Artificial Sequence: Synthetic oligonucleotide
  Target: ATXN2; (-) strand; PAM type: NRG; PAM sequence: AAG
ttgtattttggatctctgga

SEQ ID NO: 31258 - DNA, 20 bp, Artificial Sequence
  Description of Artificial Sequence: Synthetic oligonucleotide
  Target: ATXN2; (-) strand; PAM type: NRG; PAM sequence: TGG
atcattgtattttggatctc

SEQ ID NO: 31259 - DNA, 20 bp, Artificial Sequence
  Description of Artificial Sequence: Synthetic oligonucleotide
  Target: ATXN2; (-) strand; PAM type: NRG; PAM sequence: TGG
gagttactatcattgtattt

SEQ ID NO: 31260 - DNA, 20 bp, Artificial Sequence
  Description of Artificial Sequence: Synthetic oligonucleotide
  Target: ATXN2; (-) strand; PAM type: NRG; PAM sequence: GAG
actcagaaggtggcagagat

SEQ ID NO: 31261 - DNA, 20 bp, Artificial Sequence
  Description of Artificial Sequence: Synthetic oligonucleotide
  Target: ATXN2; (-) strand; PAM type: NRG; PAM sequence: GAG
aattcactcagaaggtggca

SEQ ID NO: 31262 - DNA, 20 bp, Artificial Sequence
  Description of Artificial Sequence: Synthetic oligonucleotide
  Target: ATXN2; (-) strand; PAM type: NRG; PAM sequence: CAG
caaattcactcagaaggtgg

SEQ ID NO: 31263 - DNA, 20 bp, Artificial Sequence
  Description of Artificial Sequence: Synthetic oligonucleotide
  Target: ATXN2; (-) strand; PAM type: NRG; PAM sequence: TGG
attcaaattcactcagaagg

SEQ ID NO: 31264 - DNA, 20 bp, Artificial Sequence
  Description of Artificial Sequence: Synthetic oligonucleotide
  Target: ATXN2; (-) strand; PAM type: NRG; PAM sequence: AGG
cctattcaaattcactcaga

SEQ ID NO: 31265 - DNA, 20 bp, Artificial Sequence
  Description of Artificial Sequence: Synthetic oligonucleotide
  Target: ATXN2; (-) strand; PAM type: NRG; PAM sequence: AAG
acctattcaaattcactcag

SEQ ID NO: 31266 - DNA, 20 bp, Artificial Sequence
  Description of Artificial Sequence: Synthetic oligonucleotide
  Target: ATXN2; (-) strand; PAM type: NRG; PAM sequence: CAG
atgacctattcaaattcact

SEQ ID NO: 31267 - DNA, 20 bp, Artificial Sequence
  Description of Artificial Sequence: Synthetic oligonucleotide
  Target: ATXN2; (-) strand; PAM type: NRG; PAM sequence: AGG
gaggaaatgaaggcccagag

SEQ ID NO: 31268 - DNA, 20 bp, Artificial Sequence
  Description of Artificial Sequence: Synthetic oligonucleotide
  Target: ATXN2; (-) strand; PAM type: NRG; PAM sequence: GAG
tgaggaaatgaaggcccaga

SEQ ID NO: 31269 - DNA, 20 bp, Artificial Sequence
  Description of Artificial Sequence: Synthetic oligonucleotide
  Target: ATXN2; (-) strand; PAM type: NRG; PAM sequence: GAG
catgaggaaatgaaggccca

SEQ ID NO: 31270 - DNA, 20 bp, Artificial Sequence
  Description of Artificial Sequence: Synthetic oligonucleotide
  Target: ATXN2; (-) strand; PAM type: NRG; PAM sequence: CAG
cccatgaggaaatgaaggcc

SEQ ID NO: 31271 - DNA, 20 bp, Artificial Sequence
  Description of Artificial Sequence: Synthetic oligonucleotide
  Target: ATXN2; (-) strand; PAM type: NRG; PAM sequence: AGG
ttttacccatgaggaaatga

SEQ ID NO: 31272 - DNA, 20 bp, Artificial Sequence
  Description of Artificial Sequence: Synthetic oligonucleotide
  Target: ATXN2; (-) strand; PAM type: NRG; PAM sequence: AAG
attttacccatgaggaaatg

SEQ ID NO: 31273 - DNA, 20 bp, Artificial Sequence
  Description of Artificial Sequence: Synthetic oligonucleotide
  Target: ATXN2; (-) strand; PAM type: NRG; PAM sequence: AGG
ctgtcctcattttacccatg

SEQ ID NO: 31274 - DNA, 20 bp, Artificial Sequence
  Description of Artificial Sequence: Synthetic oligonucleotide
  Target: ATXN2; (-) strand; PAM type: NRG; PAM sequence: GAG
cctgtcctcattttacccat

SEQ ID NO: 31275 - DNA, 20 bp, Artificial Sequence
  Description of Artificial Sequence: Synthetic oligonucleotide
  Target: ATXN2; (-) strand; PAM type: NRG; PAM sequence: TAG
tgattaccacatagccctgt

SEQ ID NO: 31276 - DNA, 20 bp, Artificial Sequence
  Description of Artificial Sequence: Synthetic oligonucleotide
  Target: ATXN2; (-) strand; PAM type: NRG; PAM sequence: TAG
aatctcatgtgattaccaca

SEQ ID NO: 31277 - DNA, 20 bp, Artificial Sequence
  Description of Artificial Sequence: Synthetic oligonucleotide
  Target: ATXN2; (-) strand; PAM type: NRG; PAM sequence: GGG
accgtgagtttattctccca

SEQ ID NO: 31278 - DNA, 20 bp, Artificial Sequence
  Description of Artificial Sequence: Synthetic oligonucleotide
  Target: ATXN2; (-) strand; PAM type: NRG; PAM sequence: AGG
taccgtgagtttattctccc

SEQ ID NO: 31279 - DNA, 20 bp, Artificial Sequence
  Description of Artificial Sequence: Synthetic oligonucleotide
  Target: ATXN2; (-) strand; PAM type: NRG; PAM sequence: CAG
ctaccgtgagtttattctcc

SEQ ID NO: 31280 - DNA, 20 bp, Artificial Sequence
  Description of Artificial Sequence: Synthetic oligonucleotide
  Target: ATXN2; (-) strand; PAM type: NRG; PAM sequence: GAG
agtgaaccggacgctaccgt

SEQ ID NO: 31281 - DNA, 20 bp, Artificial Sequence
  Description of Artificial Sequence: Synthetic oligonucleotide
  Target: ATXN2; (-) strand; PAM type: NRG; PAM sequence: CGG
ggaaacaggattgagtgaac

SEQ ID NO: 31282 - DNA, 20 bp, Artificial Sequence
  Description of Artificial Sequence: Synthetic oligonucleotide
  Target: ATXN2; (-) strand; PAM type: NRG; PAM sequence: GAG
aaagggagggaaacaggatt

SEQ ID NO: 31283 - DNA, 20 bp, Artificial Sequence
  Description of Artificial Sequence: Synthetic oligonucleotide
  Target: ATXN2; (-) strand; PAM type: NRG; PAM sequence: AGG
aattaaaaagggagggaaac

SEQ ID NO: 31284 - DNA, 20 bp, Artificial Sequence
  Description of Artificial Sequence: Synthetic oligonucleotide
  Target: ATXN2; (-) strand; PAM type: NRG; PAM sequence: CAG
taattaaaaagggagggaaa

SEQ ID NO: 31285 - DNA, 20 bp, Artificial Sequence
  Description of Artificial Sequence: Synthetic oligonucleotide
  Target: ATXN2; (-) strand; PAM type: NRG; PAM sequence: GGG
gggtcataattaaaaaggga

SEQ ID NO: 31286 - DNA, 20 bp, Artificial Sequence
  Description of Artificial Sequence: Synthetic oligonucleotide
  Target: ATXN2; (-) strand; PAM type: NRG; PAM sequence: AGG
agggtcataattaaaaaggg

SEQ ID NO: 31287 - DNA, 20 bp, Artificial Sequence
  Description of Artificial Sequence: Synthetic oligonucleotide
  Target: ATXN2; (-) strand; PAM type: NRG; PAM sequence: GAG
tagggtcataattaaaaagg

SEQ ID NO: 31288 - DNA, 20 bp, Artificial Sequence
  Description of Artificial Sequence: Synthetic oligonucleotide
  Target: ATXN2; (-) strand; PAM type: NRG; PAM sequence: GGG
attagggtcataattaaaaa

SEQ ID NO: 31289 - DNA, 20 bp, Artificial Sequence
  Description of Artificial Sequence: Synthetic oligonucleotide
  Target: ATXN2; (-) strand; PAM type: NRG; PAM sequence: AGG
gattagggtcataattaaaa

SEQ ID NO: 31290 - DNA, 20 bp, Artificial Sequence
  Description of Artificial Sequence: Synthetic oligonucleotide
  Target: ATXN2; (-) strand; PAM type: NRG; PAM sequence: AAG
tgattagggtcataattaaa

SEQ ID NO: 31291 - DNA, 20 bp, Artificial Sequence
  Description of Artificial Sequence: Synthetic oligonucleotide
  Target: ATXN2; (-) strand; PAM type: NRG; PAM sequence: GGG
tcagcttgaaaaattgatta

SEQ ID NO: 31292 - DNA, 20 bp, Artificial Sequence
  Description of Artificial Sequence: Synthetic oligonucleotide
  Target: ATXN2; (-) strand; PAM type: NRG; PAM sequence: AGG
ctcagcttgaaaaattgatt

SEQ ID NO: 31293 - DNA, 20 bp, Artificial Sequence
  Description of Artificial Sequence: Synthetic oligonucleotide
  Target: ATXN2; (-) strand; PAM type: NRG; PAM sequence: TAG
cctcagcttgaaaaattgat

SEQ ID NO: 31294 - DNA, 20 bp, Artificial Sequence
  Description of Artificial Sequence: Synthetic oligonucleotide
  Target: ATXN2; (-) strand; PAM type: NRG; PAM sequence: CAG
tttgagaagctttctgacct

SEQ ID NO: 31295 - DNA, 20 bp, Artificial Sequence
  Description of Artificial Sequence: Synthetic oligonucleotide
  Target: ATXN2; (-) strand; PAM type: NRG; PAM sequence: AAG
cagaaataagtatgtttgag

SEQ ID NO: 31296 - DNA, 20 bp, Artificial Sequence
  Description of Artificial Sequence: Synthetic oligonucleotide
  Target: ATXN2; (-) strand; PAM type: NRG; PAM sequence: GAG
gcccagaaataagtatgttt

SEQ ID NO: 31297 - DNA, 20 bp, Artificial Sequence
  Description of Artificial Sequence: Synthetic oligonucleotide
  Target: ATXN2; (-) strand; PAM type: NRG; PAM sequence: AAG
cactggctatgcccagaaat

SEQ ID NO: 31298 - DNA, 20 bp, Artificial Sequence
  Description of Artificial Sequence: Synthetic oligonucleotide
  Target: ATXN2; (-) strand; PAM type: NRG; PAM sequence: CAG
ggacagccactggctatgcc

SEQ ID NO: 31299 - DNA, 20 bp, Artificial Sequence
  Description of Artificial Sequence: Synthetic oligonucleotide
  Target: ATXN2; (-) strand; PAM type: NRG; PAM sequence: TGG
agtgcttcagggacagccac

SEQ ID NO: 31300 - DNA, 20 bp, Artificial Sequence
  Description of Artificial Sequence: Synthetic oligonucleotide
  Target: ATXN2; (-) strand; PAM type: NRG; PAM sequence: CAG
tctttttagtgcttcaggga

SEQ ID NO: 31301 - DNA, 20 bp, Artificial Sequence
  Description of Artificial Sequence: Synthetic oligonucleotide
  Target: ATXN2; (-) strand; PAM type: NRG; PAM sequence: GGG
ttgttctttttagtgcttca

SEQ ID NO: 31302 - DNA, 20 bp, Artificial Sequence
  Description of Artificial Sequence: Synthetic oligonucleotide
  Target: ATXN2; (-) strand; PAM type: NRG; PAM sequence: AGG
cttgttctttttagtgcttc

SEQ ID NO: 31303 - DNA, 20 bp, Artificial Sequence
  Description of Artificial Sequence: Synthetic oligonucleotide
  Target: ATXN2; (-) strand; PAM type: NRG; PAM sequence: CAG
tcttgttctttttagtgctt

SEQ ID NO: 31304 - DNA, 20 bp, Artificial Sequence
  Description of Artificial Sequence: Synthetic oligonucleotide
  Target: ATXN2; (-) strand; PAM type: NRG; PAM sequence: TAG
gctaagggtcttgttctttt

SEQ ID NO: 31305 - DNA, 20 bp, Artificial Sequence
  Description of Artificial Sequence: Synthetic oligonucleotide
  Target: ATXN2; (-) strand; PAM type: NRG; PAM sequence: GGG
gcagtctggtatgttgctaa

SEQ ID NO: 31306 - DNA, 20 bp, Artificial Sequence
  Description of Artificial Sequence: Synthetic oligonucleotide
  Target: ATXN2; (-) strand; PAM type: NRG; PAM sequence: AGG
agcagtctggtatgttgcta

SEQ ID NO: 31307 - DNA, 20 bp, Artificial Sequence
  Description of Artificial Sequence: Synthetic oligonucleotide
  Target: ATXN2; (-) strand; PAM type: NRG; PAM sequence: AAG
cagcagtctggtatgttgct

SEQ ID NO: 31308 - DNA, 20 bp, Artificial Sequence
  Description of Artificial Sequence: Synthetic oligonucleotide
  Target: ATXN2; (-) strand; PAM type: NRG; PAM sequence: TGG
agcccctcttatcagcagtc

SEQ ID NO: 31309 - DNA, 20 bp, Artificial Sequence
  Description of Artificial Sequence: Synthetic oligonucleotide
  Target: ATXN2; (-) strand; PAM type: NRG; PAM sequence: CAG
gctccagcccctcttatcag

SEQ ID NO: 31310 - DNA, 20 bp, Artificial Sequence
  Description of Artificial Sequence: Synthetic oligonucleotide
  Target: ATXN2; (-) strand; PAM type: NRG; PAM sequence: CAG
tgcgctccagcccctcttat

SEQ ID NO: 31311 - DNA, 20 bp, Artificial Sequence
  Description of Artificial Sequence: Synthetic oligonucleotide
  Target: ATXN2; (-) strand; PAM type: NRG; PAM sequence: CAG
atgatcacagcactgcgctc

SEQ ID NO: 31312 - DNA, 20 bp, Artificial Sequence
  Description of Artificial Sequence: Synthetic oligonucleotide
  Target: ATXN2; (-) strand; PAM type: NRG; PAM sequence: CAG
gattgcaggagctatgatca

SEQ ID NO: 31313 - DNA, 20 bp, Artificial Sequence
  Description of Artificial Sequence: Synthetic oligonucleotide
  Target: ATXN2; (-) strand; PAM type: NRG; PAM sequence: GAG
tcaggagttaaagattgcag

SEQ ID NO: 31314 - DNA, 20 bp, Artificial Sequence
  Description of Artificial Sequence: Synthetic oligonucleotide
  Target: ATXN2; (-) strand; PAM type: NRG; PAM sequence: AGG
gctcaggagttaaagattgc

SEQ ID NO: 31315 - DNA, 20 bp, Artificial Sequence
  Description of Artificial Sequence: Synthetic oligonucleotide
  Target: ATXN2; (-) strand; PAM type: NRG; PAM sequence: CAG
agctcaggagttaaagattg

SEQ ID NO: 31316 - DNA, 20 bp, Artificial Sequence
  Description of Artificial Sequence: Synthetic oligonucleotide
  Target: ATXN2; (-) strand; PAM type: NRG; PAM sequence: AAG
ttgcttgagctcaggagtta

SEQ ID NO: 31317 - DNA, 20 bp, Artificial Sequence
  Description of Artificial Sequence: Synthetic oligonucleotide
  Target: ATXN2; (-) strand; PAM type: NRG; PAM sequence: GAG
agaggattgcttgagctcag

SEQ ID NO: 31318 - DNA, 20 bp, Artificial Sequence
  Description of Artificial Sequence: Synthetic oligonucleotide
  Target: ATXN2; (-) strand; PAM type: NRG; PAM sequence: AGG
cgagaggattgcttgagctc

SEQ ID NO: 31319 - DNA, 20 bp, Artificial Sequence
  Description of Artificial Sequence: Synthetic oligonucleotide
  Target: ATXN2; (-) strand; PAM type: NRG; PAM sequence: CAG
gcgagaggattgcttgagct

SEQ ID NO: 31320 - DNA, 20 bp, Artificial Sequence
  Description of Artificial Sequence: Synthetic oligonucleotide
  Target: ATXN2; (-) strand; PAM type: NRG; PAM sequence: GAG
ctgaagcgagaggattgctt

SEQ ID NO: 31321 - DNA, 20 bp, Artificial Sequence
  Description of Artificial Sequence: Synthetic oligonucleotide
  Target: ATXN2; (-) strand; PAM type: NRG; PAM sequence: AGG
tactacgaggctgaagcgag

SEQ ID NO: 31322 - DNA, 20 bp, Artificial Sequence
  Description of Artificial Sequence: Synthetic oligonucleotide
  Target: ATXN2; (-) strand; PAM type: NRG; PAM sequence: GAG
ctactacgaggctgaagcga

SEQ ID NO: 31323 - DNA, 20 bp, Artificial Sequence
  Description of Artificial Sequence: Synthetic oligonucleotide
  Target: ATXN2; (-) strand; PAM type: NRG; PAM sequence: GAG
agctactacgaggctgaagc

SEQ ID NO: 31324 - DNA, 20 bp, Artificial Sequence
  Description of Artificial Sequence: Synthetic oligonucleotide
  Target: ATXN2; (-) strand; PAM type: NRG; PAM sequence: AAG
tcgcagctactacgaggctg

SEQ ID NO: 31325 - DNA, 20 bp, Artificial Sequence
  Description of Artificial Sequence: Synthetic oligonucleotide
  Target: ATXN2; (-) strand; PAM type: NRG; PAM sequence: AGG
ctgtagtcgcagctactacg

SEQ ID NO: 31326 - DNA, 20 bp, Artificial Sequence
  Description of Artificial Sequence: Synthetic oligonucleotide
  Target: ATXN2; (-) strand; PAM type: NRG; PAM sequence: GAG
cctgtagtcgcagctactac

SEQ ID NO: 31327 - DNA, 20 bp, Artificial Sequence
  Description of Artificial Sequence: Synthetic oligonucleotide
  Target: ATXN2; (-) strand; PAM type: NRG; PAM sequence: CAG
gcagcacacacctgtagtcg

SEQ ID NO: 31328 - DNA, 20 bp, Artificial Sequence
  Description of Artificial Sequence: Synthetic oligonucleotide
  Target: ATXN2; (-) strand; PAM type: NRG; PAM sequence: TAG
gggatggcagcacacacctg

SEQ ID NO: 31329 - DNA, 20 bp, Artificial Sequence
  Description of Artificial Sequence: Synthetic oligonucleotide
  Target: ATXN2; (-) strand; PAM type: NRG; PAM sequence: CAG
ttttaattaatgggggatgg

SEQ ID NO: 31330 - DNA, 20 bp, Artificial Sequence
  Description of Artificial Sequence: Synthetic oligonucleotide
  Target: ATXN2; (-) strand; PAM type: NRG; PAM sequence: TGG
attttttaattaatggggga

SEQ ID NO: 31331 - DNA, 20 bp, Artificial Sequence
  Description of Artificial Sequence: Synthetic oligonucleotide
  Target: ATXN2; (-) strand; PAM type: NRG; PAM sequence: GGG
aaatattttttaattaatgg

SEQ ID NO: 31332 - DNA, 20 bp, Artificial Sequence
  Description of Artificial Sequence: Synthetic oligonucleotide
  Target: ATXN2; (-) strand; PAM type: NRG; PAM sequence: GGG
aaaatattttttaattaatg

SEQ ID NO: 31333 - DNA, 20 bp, Artificial Sequence
  Description of Artificial Sequence: Synthetic oligonucleotide
  Target: ATXN2; (-) strand; PAM type: NRG; PAM sequence: GGG
aaaaatattttttaattaat

SEQ ID NO: 31334 - DNA, 20 bp, Artificial Sequence
  Description of Artificial Sequence: Synthetic oligonucleotide
  Target: ATXN2; (-) strand; PAM type: NRG; PAM sequence: TGG
aaaaaatattttttaattaa

SEQ ID NO: 31335 - DNA, 20 bp, Artificial Sequence
  Description of Artificial Sequence: Synthetic oligonucleotide
  Target: ATXN2; (-) strand; PAM type: NRG; PAM sequence: AAG
accaggctgagaaacataac

SEQ ID NO: 31336 - DNA, 20 bp, Artificial Sequence
  Description of Artificial Sequence: Synthetic oligonucleotide
  Target: ATXN2; (-) strand; PAM type: NRG; PAM sequence: GAG
caggagttcaagaccaggct

SEQ ID NO: 31337 - DNA, 20 bp, Artificial Sequence
  Description of Artificial Sequence: Synthetic oligonucleotide
  Target: ATXN2; (-) strand; PAM type: NRG; PAM sequence: AGG
agggccaggagttcaagacc

SEQ ID NO: 31338 - DNA, 20 bp, Artificial Sequence
  Description of Artificial Sequence: Synthetic oligonucleotide
  Target: ATXN2; (-) strand; PAM type: NRG; PAM sequence: CAG
aagggccaggagttcaagac

SEQ ID NO: 31339 - DNA, 20 bp, Artificial Sequence
  Description of Artificial Sequence: Synthetic oligonucleotide
  Target: ATXN2; (-) strand; PAM type: NRG; PAM sequence: AAG
atgggaagggccaggagttc

SEQ ID NO: 31340 - DNA, 20 bp, Artificial Sequence
  Description of Artificial Sequence: Synthetic oligonucleotide
  Target: ATXN2; (-) strand; PAM type: NRG; PAM sequence: GAG
gctgaaatgggaagggccag

SEQ ID NO: 31341 - DNA, 20 bp, Artificial Sequence
  Description of Artificial Sequence: Synthetic oligonucleotide
  Target: ATXN2; (-) strand; PAM type: NRG; PAM sequence: AGG
aggctgaaatgggaagggcc

SEQ ID NO: 31342 - DNA, 20 bp, Artificial Sequence
  Description of Artificial Sequence: Synthetic oligonucleotide
  Target: ATXN2; (-) strand; PAM type: NRG; PAM sequence: CAG
gaggctgaaatgggaagggc

SEQ ID NO: 31343 - DNA, 20 bp, Artificial Sequence
  Description of Artificial Sequence: Synthetic oligonucleotide
  Target: ATXN2; (-) strand; PAM type: NRG; PAM sequence: GGG
tggggaggctgaaatgggaa

SEQ ID NO: 31344 - DNA, 20 bp, Artificial Sequence
  Description of Artificial Sequence: Synthetic oligonucleotide
  Target: ATXN2; (-) strand; PAM type: NRG; PAM sequence: AGG
atggggaggctgaaatggga

SEQ ID NO: 31345 - DNA, 20 bp, Artificial Sequence
  Description of Artificial Sequence: Synthetic oligonucleotide
  Target: ATXN2; (-) strand; PAM type: NRG; PAM sequence: AAG
catggggaggctgaaatggg

SEQ ID NO: 31346 - DNA, 20 bp, Artificial Sequence
  Description of Artificial Sequence: Synthetic oligonucleotide
  Target: ATXN2; (-) strand; PAM type: NRG; PAM sequence: GGG
cgtcatggggaggctgaaat

SEQ ID NO: 31347 - DNA, 20 bp, Artificial Sequence
  Description of Artificial Sequence: Synthetic oligonucleotide
  Target: ATXN2; (-) strand; PAM type: NRG; PAM sequence: TGG
acgtcatggggaggctgaaa

SEQ ID NO: 31348 - DNA, 20 bp, Artificial Sequence
  Description of Artificial Sequence: Synthetic oligonucleotide
  Target: ATXN2; (-) strand; PAM type: NRG; PAM sequence: AGG
aacctccccacgtcatgggg

SEQ ID NO: 31349 - DNA, 20 bp, Artificial Sequence
  Description of Artificial Sequence: Synthetic oligonucleotide
  Target: ATXN2; (-) strand; PAM type: NRG; PAM sequence: GAG
aaacctccccacgtcatggg

SEQ ID NO: 31350 - DNA, 20 bp, Artificial Sequence
  Description of Artificial Sequence: Synthetic oligonucleotide
  Target: ATXN2; (-) strand; PAM type: NRG; PAM sequence: GGG
gtaaacctccccacgtcatg

SEQ ID NO: 31351 - DNA, 20 bp, Artificial Sequence
  Description of Artificial Sequence: Synthetic oligonucleotide
  Target: ATXN2; (-) strand; PAM type: NRG; PAM sequence: GGG
tgtaaacctccccacgtcat

SEQ ID NO: 31352 - DNA, 20 bp, Artificial Sequence
  Description of Artificial Sequence: Synthetic oligonucleotide
  Target: ATXN2; (-) strand; PAM type: NRG; PAM sequence: TGG
ctgtaaacctccccacgtca

SEQ ID NO: 31353 - DNA, 20 bp, Artificial Sequence
  Description of Artificial Sequence: Synthetic oligonucleotide
  Target: ATXN2; (-) strand; PAM type: NRG; PAM sequence: GGG
aaaatcagaagaatgggcct

SEQ ID NO: 31354 - DNA, 20 bp, Artificial Sequence
  Description of Artificial Sequence: Synthetic oligonucleotide
  Target: ATXN2; (-) strand; PAM type: NRG; PAM sequence: TGG
caaaatcagaagaatgggcc

SEQ ID NO: 31355 - DNA, 20 bp, Artificial Sequence
  Description of Artificial Sequence: Synthetic oligonucleotide
  Target: ATXN2; (-) strand; PAM type: NRG; PAM sequence: GGG
gaaaacaaaatcagaagaat

SEQ ID NO: 31356 - DNA, 20 bp, Artificial Sequence
  Description of Artificial Sequence: Synthetic oligonucleotide
  Target: ATXN2; (-) strand; PAM type: NRG; PAM sequence: TGG
ggaaaacaaaatcagaagaa

SEQ ID NO: 31357 - DNA, 20 bp, Artificial Sequence
  Description of Artificial Sequence: Synthetic oligonucleotide
  Target: ATXN2; (-) strand; PAM type: NRG; PAM sequence: AAG
gaagaggaaaacaaaatcag

SEQ ID NO: 31358 - DNA, 20 bp, Artificial Sequence
  Description of Artificial Sequence: Synthetic oligonucleotide
  Target: ATXN2; (-) strand; PAM type: NRG; PAM sequence: CAG
gatgaagaggaaaacaaaat

SEQ ID NO: 31359 - DNA, 20 bp, Artificial Sequence
  Description of Artificial Sequence: Synthetic oligonucleotide
  Target: ATXN2; (-) strand; PAM type: NRG; PAM sequence: AGG
aggagttcttttagatgaag

SEQ ID NO: 31360 - DNA, 20 bp, Artificial Sequence
  Description of Artificial Sequence: Synthetic oligonucleotide
  Target: ATXN2; (-) strand; PAM type: NRG; PAM sequence: GAG
aaggagttcttttagatgaa

SEQ ID NO: 31361 - DNA, 20 bp, Artificial Sequence
  Description of Artificial Sequence: Synthetic oligonucleotide
  Target: ATXN2; (-) strand; PAM type: NRG; PAM sequence: AAG
gaaaggagttcttttagatg

SEQ ID NO: 31362 - DNA, 20 bp, Artificial Sequence
  Description of Artificial Sequence: Synthetic oligonucleotide
  Target: ATXN2; (-) strand; PAM type: NRG; PAM sequence: TAG
aatcttgaaaggagttcttt

SEQ ID NO: 31363 - DNA, 20 bp, Artificial Sequence
  Description of Artificial Sequence: Synthetic oligonucleotide
  Target: ATXN2; (-) strand; PAM type: NRG; PAM sequence: GAG
gtctcataaaatcttgaaag

SEQ ID NO: 31364 - DNA, 20 bp, Artificial Sequence
  Description of Artificial Sequence: Synthetic oligonucleotide
  Target: ATXN2; (-) strand; PAM type: NRG; PAM sequence: AGG
ctgtctcataaaatcttgaa

SEQ ID NO: 31365 - DNA, 20 bp, Artificial Sequence
  Description of Artificial Sequence: Synthetic oligonucleotide
  Target: ATXN2; (-) strand; PAM type: NRG; PAM sequence: AAG
tctgtctcataaaatcttga

SEQ ID NO: 31366 - DNA, 20 bp, Artificial Sequence
  Description of Artificial Sequence: Synthetic oligonucleotide
  Target: ATXN2; (-) strand; PAM type: NRG; PAM sequence: GAG
cttatggcattgaggtgttt

SEQ ID NO: 31367 - DNA, 20 bp, Artificial Sequence
  Description of Artificial Sequence: Synthetic oligonucleotide
  Target: ATXN2; (-) strand; PAM type: NRG; PAM sequence: AGG
cctgccaccttatggcattg

SEQ ID NO: 31368 - DNA, 20 bp, Artificial Sequence
  Description of Artificial Sequence: Synthetic oligonucleotide
  Target: ATXN2; (-) strand; PAM type: NRG; PAM sequence: GAG
ccctgccaccttatggcatt

SEQ ID NO: 31369 - DNA, 20 bp, Artificial Sequence
  Description of Artificial Sequence: Synthetic oligonucleotide
  Target: ATXN2; (-) strand; PAM type: NRG; PAM sequence: TGG
tcattgcccctgccacctta

SEQ ID NO: 31370 - DNA, 20 bp, Artificial Sequence
  Description of Artificial Sequence: Synthetic oligonucleotide
  Target: ATXN2; (-) strand; PAM type: NRG; PAM sequence: AAG
ggtagtatagactaggcaga

SEQ ID NO: 31371 - DNA, 20 bp, Artificial Sequence
  Description of Artificial Sequence: Synthetic oligonucleotide
  Target: ATXN2; (-) strand; PAM type: NRG; PAM sequence: CAG
atgtggtagtatagactagg

SEQ ID NO: 31372 - DNA, 20 bp, Artificial Sequence
  Description of Artificial Sequence: Synthetic oligonucleotide
  Target: ATXN2; (-) strand; PAM type: NRG; PAM sequence: AGG
cttatgtggtagtatagact

SEQ ID NO: 31373 - DNA, 20 bp, Artificial Sequence
  Description of Artificial Sequence: Synthetic oligonucleotide
  Target: ATXN2; (-) strand; PAM type: NRG; PAM sequence: TAG
gcttatgtggtagtatagac

SEQ ID NO: 31374 - DNA, 20 bp, Artificial Sequence
  Description of Artificial Sequence: Synthetic oligonucleotide
  Target: ATXN2; (-) strand; PAM type: NRG; PAM sequence: TAG
ttggagcttatgtggtagta

SEQ ID NO: 31375 - DNA, 20 bp, Artificial Sequence
  Description of Artificial Sequence: Synthetic oligonucleotide
  Target: ATXN2; (-) strand; PAM type: NRG; PAM sequence: TAG
tctttttggagcttatgtgg

SEQ ID NO: 31376 - DNA, 20 bp, Artificial Sequence
  Description of Artificial Sequence: Synthetic oligonucleotide
  Target: ATXN2; (-) strand; PAM type: NRG; PAM sequence: TGG
ctctctttttggagcttatg

SEQ ID NO: 31377 - DNA, 20 bp, Artificial Sequence
  Description of Artificial Sequence: Synthetic oligonucleotide
  Target: ATXN2; (-) strand; PAM type: NRG; PAM sequence: GAG
atgaggtctctctctttttg

SEQ ID NO: 31378 - DNA, 20 bp, Artificial Sequence
  Description of Artificial Sequence: Synthetic oligonucleotide
  Target: ATXN2; (-) strand; PAM type: NRG; PAM sequence: TGG
agatgaggtctctctctttt

SEQ ID NO: 31379 - DNA, 20 bp, Artificial Sequence
  Description of Artificial Sequence: Synthetic oligonucleotide
  Target: ATXN2; (-) strand; PAM type: NRG; PAM sequence: AGG
agtagtgaataagccagatg

SEQ ID NO: 31380 - DNA, 20 bp, Artificial Sequence
  Description of Artificial Sequence: Synthetic oligonucleotide
  Target: ATXN2; (-) strand; PAM type: NRG; PAM sequence: GAG
cagtagtgaataagccagat

SEQ ID NO: 31381 - DNA, 20 bp, Artificial Sequence
  Description of Artificial Sequence: Synthetic oligonucleotide
  Target: ATXN2; (-) strand; PAM type: NRG; PAM sequence: CAG
gaatacagtagtgaataagc

SEQ ID NO: 31382 - DNA, 20 bp, Artificial Sequence
  Description of Artificial Sequence: Synthetic oligonucleotide
  Target: ATXN2; (-) strand; PAM type: NRG; PAM sequence: AAG
ttgggaatacagtagtgaat

SEQ ID NO: 31383 - DNA, 20 bp, Artificial Sequence
  Description of Artificial Sequence: Synthetic oligonucleotide
  Target: ATXN2; (-) strand; PAM type: NRG; PAM sequence: TAG
tgtgaggcttgggaatacag

SEQ ID NO: 31384 - DNA, 20 bp, Artificial Sequence
  Description of Artificial Sequence: Synthetic oligonucleotide
  Target: ATXN2; (-) strand; PAM type: NRG; PAM sequence: CAG
gcttgtgaggcttgggaata

SEQ ID NO: 31385 - DNA, 20 bp, Artificial Sequence
  Description of Artificial Sequence: Synthetic oligonucleotide
  Target: ATXN2; (-) strand; PAM type: NRG; PAM sequence: GGG
acctcctgcttgtgaggctt

SEQ ID NO: 31386 - DNA, 20 bp, Artificial Sequence
  Description of Artificial Sequence: Synthetic oligonucleotide
  Target: ATXN2; (-) strand; PAM type: NRG; PAM sequence: TGG
tacctcctgcttgtgaggct

SEQ ID NO: 31387 - DNA, 20 bp, Artificial Sequence
  Description of Artificial Sequence: Synthetic oligonucleotide
  Target: ATXN2; (-) strand; PAM type: NRG; PAM sequence: AGG
tggagtacctcctgcttgtg

SEQ ID NO: 31388 - DNA, 20 bp, Artificial Sequence
  Description of Artificial Sequence: Synthetic oligonucleotide
  Target: ATXN2; (-) strand; PAM type: NRG; PAM sequence: GAG
ttggagtacctcctgcttgt

SEQ ID NO: 31389 - DNA, 20 bp, Artificial Sequence
  Description of Artificial Sequence: Synthetic oligonucleotide
  Target: ATXN2; (-) strand; PAM type: NRG; PAM sequence: GAG
ctcccctttttttatttttg

SEQ ID NO: 31390 - DNA, 20 bp, Artificial Sequence
  Description of Artificial Sequence: Synthetic oligonucleotide
  Target: ATXN2; (-) strand; PAM type: NRG; PAM sequence: TGG
tcctcccctttttttatttt

SEQ ID NO: 31391 - DNA, 20 bp, Artificial Sequence
  Description of Artificial Sequence: Synthetic oligonucleotide
  Target: ATXN2; (-) strand; PAM type: NRG; PAM sequence: AGG
gtagaaagcatggcatttat

SEQ ID NO: 31392 - DNA, 20 bp, Artificial Sequence
  Description of Artificial Sequence: Synthetic oligonucleotide
  Target: ATXN2; (-) strand; PAM type: NRG; PAM sequence: TAG
tgtagaaagcatggcattta

SEQ ID NO: 31393 - DNA, 20 bp, Artificial Sequence
  Description of Artificial Sequence: Synthetic oligonucleotide
  Target: ATXN2; (-) strand; PAM type: NRG; PAM sequence: TGG
accctgtcatgtagaaagca

SEQ ID NO: 31394 - DNA, 20 bp, Artificial Sequence
  Description of Artificial Sequence: Synthetic oligonucleotide
  Target: ATXN2; (-) strand; PAM type: NRG; PAM sequence: AAG
agttgaccctgtcatgtaga

SEQ ID NO: 31395 - DNA, 20 bp, Artificial Sequence
  Description of Artificial Sequence: Synthetic oligonucleotide
  Target: ATXN2; (-) strand; PAM type: NRG; PAM sequence: TAG
tagtagttgaccctgtcatg

SEQ ID NO: 31396 - DNA, 20 bp, Artificial Sequence
  Description of Artificial Sequence: Synthetic oligonucleotide
  Target: ATXN2; (-) strand; PAM type: NRG; PAM sequence: TAG
gttttattattaagcagtag

SEQ ID NO: 31397 - DNA, 20 bp, Artificial Sequence
  Description of Artificial Sequence: Synthetic oligonucleotide
  Target: ATXN2; (-) strand; PAM type: NRG; PAM sequence: TAG
ttggttttattattaagcag

SEQ ID NO: 31398 - DNA, 20 bp, Artificial Sequence
  Description of Artificial Sequence: Synthetic oligonucleotide
  Target: ATXN2; (-) strand; PAM type: NRG; PAM sequence: CAG
ctattggttttattattaag

SEQ ID NO: 31399 - DNA, 20 bp, Artificial Sequence
  Description of Artificial Sequence: Synthetic oligonucleotide
  Target: ATXN2; (-) strand; PAM type: NRG; PAM sequence: AAG
tgactattggttttattatt

SEQ ID NO: 31400 - DNA, 20 bp, Artificial Sequence
  Description of Artificial Sequence: Synthetic oligonucleotide
  Target: ATXN2; (-) strand; PAM type: NRG; PAM sequence: TGG
cactgcgcctggctgactat

SEQ ID NO: 31401 - DNA, 20 bp, Artificial Sequence
  Description of Artificial Sequence: Synthetic oligonucleotide
  Target: ATXN2; (-) strand; PAM type: NRG; PAM sequence: TGG
caggcgtgagccactgcgcc

SEQ ID NO: 31402 - DNA, 20 bp, Artificial Sequence
  Description of Artificial Sequence: Synthetic oligonucleotide
  Target: ATXN2; (-) strand; PAM type: NRG; PAM sequence: GAG
agtgctgggattacaggcgt

SEQ ID NO: 31403 - DNA, 20 bp, Artificial Sequence
  Description of Artificial Sequence: Synthetic oligonucleotide
  Target: ATXN2; (-) strand; PAM type: NRG; PAM sequence: AGG
tcccaaagtgctgggattac

SEQ ID NO: 31404 - DNA, 20 bp, Artificial Sequence
  Description of Artificial Sequence: Synthetic oligonucleotide
  Target: ATXN2; (-) strand; PAM type: NRG; PAM sequence: CAG
ctcccaaagtgctgggatta

SEQ ID NO: 31405 - DNA, 20 bp, Artificial Sequence
  Description of Artificial Sequence: Synthetic oligonucleotide
  Target: ATXN2; (-) strand; PAM type: NRG; PAM sequence: GGG
ccttggcctcccaaagtgct

SEQ ID NO: 31406 - DNA, 20 bp, Artificial Sequence
  Description of Artificial Sequence: Synthetic oligonucleotide
  Target: ATXN2; (-) strand; PAM type: NRG; PAM sequence: TGG
gccttggcctcccaaagtgc

SEQ ID NO: 31407 - DNA, 20 bp, Artificial Sequence
  Description of Artificial Sequence: Synthetic oligonucleotide
  Target: ATXN2; (-) strand; PAM type: NRG; PAM sequence: AAG
ccacccgccttggcctccca

SEQ ID NO: 31408 - DNA, 20 bp, Artificial Sequence
  Description of Artificial Sequence: Synthetic oligonucleotide
  Target: ATXN2; (-) strand; PAM type: NRG; PAM sequence: TGG
acctcatgatccacccgcct

SEQ ID NO: 31409 - DNA, 20 bp, Artificial Sequence
  Description of Artificial Sequence: Synthetic oligonucleotide
  Target: ATXN2; (-) strand; PAM type: NRG; PAM sequence: TGG
ccatcttggccaggctgttc

SEQ ID NO: 31410 - DNA, 20 bp, Artificial Sequence
  Description of Artificial Sequence: Synthetic oligonucleotide
  Target: ATXN2; (-) strand; PAM type: NRG; PAM sequence: AGG
agggtttcaccatcttggcc

SEQ ID NO: 31411 - DNA, 20 bp, Artificial Sequence
  Description of Artificial Sequence: Synthetic oligonucleotide
  Target: ATXN2; (-) strand; PAM type: NRG; PAM sequence: CAG
cagggtttcaccatcttggc

SEQ ID NO: 31412 - DNA, 20 bp, Artificial Sequence
  Description of Artificial Sequence: Synthetic oligonucleotide
  Target: ATXN2; (-) strand; PAM type: NRG; PAM sequence: TGG
gagacagggtttcaccatct

SEQ ID NO: 31413 - DNA, 20 bp, Artificial Sequence
  Description of Artificial Sequence: Synthetic oligonucleotide
  Target: ATXN2; (-) strand; PAM type: NRG; PAM sequence: GGG
ttgtatttttagtagagaca

SEQ ID NO: 31414 - DNA, 20 bp, Artificial Sequence
  Description of Artificial Sequence: Synthetic oligonucleotide
  Target: ATXN2; (-) strand; PAM type: NRG; PAM sequence: AGG
tttgtatttttagtagagac

SEQ ID NO: 31415 - DNA, 20 bp, Artificial Sequence
  Description of Artificial Sequence: Synthetic oligonucleotide
  Target: ATXN2; (-) strand; PAM type: NRG; PAM sequence: CAG
ttttgtatttttagtagaga

SEQ ID NO: 31416 - DNA, 20 bp, Artificial Sequence
  Description of Artificial Sequence: Synthetic oligonucleotide
  Target: ATXN2; (-) strand; PAM type: NRG; PAM sequence: GAG
taatttttgtatttttagta

SEQ ID NO: 31417 - DNA, 20 bp, Artificial Sequence
  Description of Artificial Sequence: Synthetic oligonucleotide
  Target: ATXN2; (-) strand; PAM type: NRG; PAM sequence: TAG
gctaatttttgtatttttag

SEQ ID NO: 31418 - DNA, 20 bp, Artificial Sequence
  Description of Artificial Sequence: Synthetic oligonucleotide
  Target: ATXN2; (-) strand; PAM type: NRG; PAM sequence: TAG
ctggctaatttttgtatttt

SEQ ID NO: 31419 - DNA, 20 bp, Artificial Sequence
  Description of Artificial Sequence: Synthetic oligonucleotide
  Target: ATXN2; (-) strand; PAM type: NRG; PAM sequence: TGG
caggcgcccaccaccgtgcc

SEQ ID NO: 31420 - DNA, 20 bp, Artificial Sequence
  Description of Artificial Sequence: Synthetic oligonucleotide
  Target: ATXN2; (-) strand; PAM type: NRG; PAM sequence: AGG
tcccaagtagctgggattac

SEQ ID NO: 31421 - DNA, 20 bp, Artificial Sequence
  Description of Artificial Sequence: Synthetic oligonucleotide
  Target: ATXN2; (-) strand; PAM type: NRG; PAM sequence: CAG
ctcccaagtagctgggatta

SEQ ID NO: 31422 - DNA, 20 bp, Artificial Sequence
  Description of Artificial Sequence: Synthetic oligonucleotide
  Target: ATXN2; (-) strand; PAM type: NRG; PAM sequence: GGG
tcttagcctcccaagtagct

SEQ ID NO: 31423 - DNA, 20 bp, Artificial Sequence
  Description of Artificial Sequence: Synthetic oligonucleotide
  Target: ATXN2; (-) strand; PAM type: NRG; PAM sequence: TGG
gtcttagcctcccaagtagc

SEQ ID NO: 31424 - DNA, 20 bp, Artificial Sequence
  Description of Artificial Sequence: Synthetic oligonucleotide
  Target: ATXN2; (-) strand; PAM type: NRG; PAM sequence: TAG
tcctgtcttagcctcccaag

SEQ ID NO: 31425 - DNA, 20 bp, Artificial Sequence
  Description of Artificial Sequence: Synthetic oligonucleotide
  Target: ATXN2; (-) strand; PAM type: NRG; PAM sequence: AAG
ttctcctgtcttagcctccc

SEQ ID NO: 31426 - DNA, 20 bp, Artificial Sequence
  Description of Artificial Sequence: Synthetic oligonucleotide
  Target: ATXN2; (-) strand; PAM type: NRG; PAM sequence: TAG
ttcaagtgattctcctgtct

SEQ ID NO: 31427 - DNA, 20 bp, Artificial Sequence
  Description of Artificial Sequence: Synthetic oligonucleotide
  Target: ATXN2; (-) strand; PAM type: NRG; PAM sequence: AAG
aacctccgcctcccaggttc

SEQ ID NO: 31428 - DNA, 20 bp, Artificial Sequence
  Description of Artificial Sequence: Synthetic oligonucleotide
  Target: ATXN2; (-) strand; PAM type: NRG; PAM sequence: AGG
tactgcaacctccgcctccc

SEQ ID NO: 31429 - DNA, 20 bp, Artificial Sequence
  Description of Artificial Sequence: Synthetic oligonucleotide
  Target: ATXN2; (-) strand; PAM type: NRG; PAM sequence: CAG
ttactgcaacctccgcctcc

SEQ ID NO: 31430 - DNA, 20 bp, Artificial Sequence
  Description of Artificial Sequence: Synthetic oligonucleotide
  Target: ATXN2; (-) strand; PAM type: NRG; PAM sequence: CGG
ggagtgcagcggcatgatct

SEQ ID NO: 31431 - DNA, 20 bp, Artificial Sequence
  Description of Artificial Sequence: Synthetic oligonucleotide
  Target: ATXN2; (-) strand; PAM type: NRG; PAM sequence: CGG
tcgcccaggctggagtgcag

SEQ ID NO: 31432 - DNA, 20 bp, Artificial Sequence
  Description of Artificial Sequence: Synthetic oligonucleotide
  Target: ATXN2; (-) strand; PAM type: NRG; PAM sequence: CAG
ttgtcgcccaggctggagtg

SEQ ID NO: 31433 - DNA, 20 bp, Artificial Sequence
  Description of Artificial Sequence: Synthetic oligonucleotide
  Target: ATXN2; (-) strand; PAM type: NRG; PAM sequence: GAG
gtctcttgtcgcccaggctg

SEQ ID NO: 31434 - DNA, 20 bp, Artificial Sequence
  Description of Artificial Sequence: Synthetic oligonucleotide
  Target: ATXN2; (-) strand; PAM type: NRG; PAM sequence: TGG
ttgtctcttgtcgcccaggc

SEQ ID NO: 31435 - DNA, 20 bp, Artificial Sequence
  Description of Artificial Sequence: Synthetic oligonucleotide
  Target: ATXN2; (-) strand; PAM type: NRG; PAM sequence: AGG
gagtttgtctcttgtcgccc

SEQ ID NO: 31436 - DNA, 20 bp, Artificial Sequence
  Description of Artificial Sequence: Synthetic oligonucleotide
  Target: ATXN2; (-) strand; PAM type: NRG; PAM sequence: CAG
agagtttgtctcttgtcgcc

SEQ ID NO: 31437 - DNA, 20 bp, Artificial Sequence
  Description of Artificial Sequence: Synthetic oligonucleotide
  Target: ATXN2; (-) strand; PAM type: NRG; PAM sequence: GAG
tgttatgttattttaagaca

SEQ ID NO: 31438 - DNA, 20 bp, Artificial Sequence
  Description of Artificial Sequence: Synthetic oligonucleotide
  Target: ATXN2; (-) strand; PAM type: NRG; PAM sequence: CAG
tatgttatgttattttaaga

SEQ ID NO: 31439 - DNA, 20 bp, Artificial Sequence
  Description of Artificial Sequence: Synthetic oligonucleotide
  Target: ATXN2; (-) strand; PAM type: NRG; PAM sequence: AAG
atgttatgttatgttatttt

SEQ ID NO: 31440 - DNA, 20 bp, Artificial Sequence
  Description of Artificial Sequence: Synthetic oligonucleotide
  Target: ATXN2; (-) strand; PAM type: NRG; PAM sequence: TGG
gccagactattggtttggtt

SEQ ID NO: 31441 - DNA, 20 bp, Artificial Sequence
  Description of Artificial Sequence: Synthetic oligonucleotide
  Target: ATXN2; (-) strand; PAM type: NRG; PAM sequence: TGG
gcccggccagactattggtt

SEQ ID NO: 31442 - DNA, 20 bp, Artificial Sequence
  Description of Artificial Sequence: Synthetic oligonucleotide
  Target: ATXN2; (-) strand; PAM type: NRG; PAM sequence: TGG
gtggtgcccggccagactat

SEQ ID NO: 31443 - DNA, 20 bp, Artificial Sequence
  Description of Artificial Sequence: Synthetic oligonucleotide
  Target: ATXN2; (-) strand; PAM type: NRG; PAM sequence: CAG
tgtgagccgtggtgcccggc

SEQ ID NO: 31444 - DNA, 20 bp, Artificial Sequence
  Description of Artificial Sequence: Synthetic oligonucleotide
  Target: ATXN2; (-) strand; PAM type: NRG; PAM sequence: CGG
taggtgtgagccgtggtgcc

SEQ ID NO: 31445 - DNA, 20 bp, Artificial Sequence
  Description of Artificial Sequence: Synthetic oligonucleotide
  Target: ATXN2; (-) strand; PAM type: NRG; PAM sequence: TGG
ggaattataggtgtgagccg

SEQ ID NO: 31446 - DNA, 20 bp, Artificial Sequence
  Description of Artificial Sequence: Synthetic oligonucleotide
  Target: ATXN2; (-) strand; PAM type: NRG; PAM sequence: GAG
agtggcggaattataggtgt

SEQ ID NO: 31447 - DNA, 20 bp, Artificial Sequence
  Description of Artificial Sequence: Synthetic oligonucleotide
  Target: ATXN2; (-) strand; PAM type: NRG; PAM sequence: AGG
ttccaaagtggcggaattat

SEQ ID NO: 31448 - DNA, 20 bp, Artificial Sequence
  Description of Artificial Sequence: Synthetic oligonucleotide
  Target: ATXN2; (-) strand; PAM type: NRG; PAM sequence: TAG
cttccaaagtggcggaatta

SEQ ID NO: 31449 - DNA, 20 bp, Artificial Sequence
  Description of Artificial Sequence: Synthetic oligonucleotide
  Target: ATXN2; (-) strand; PAM type: NRG; PAM sequence: CGG
acctcgaccttccaaagtgg

SEQ ID NO: 31450 - DNA, 20 bp, Artificial Sequence
  Description of Artificial Sequence: Synthetic oligonucleotide
  Target: ATXN2; (-) strand; PAM type: NRG; PAM sequence: TGG
cctacctcgaccttccaaag

SEQ ID NO: 31451 - DNA, 20 bp, Artificial Sequence
  Description of Artificial Sequence: Synthetic oligonucleotide
  Target: ATXN2; (-) strand; PAM type: NRG; PAM sequence: AAG
ccgcctacctcgaccttcca

SEQ ID NO: 31452 - DNA, 20 bp, Artificial Sequence
  Description of Artificial Sequence: Synthetic oligonucleotide
  Target: ATXN2; (-) strand; PAM type: NRG; PAM sequence: AAG
ggtctcaaactcctattctc

SEQ ID NO: 31453 - DNA, 20 bp, Artificial Sequence
  Description of Artificial Sequence: Synthetic oligonucleotide
  Target: ATXN2; (-) strand; PAM type: NRG; PAM sequence: TGG
tttcaccatgttggtcagcc

SEQ ID NO: 31454 - DNA, 20 bp, Artificial Sequence
  Description of Artificial Sequence: Synthetic oligonucleotide
  Target: ATXN2; (-) strand; PAM type: NRG; PAM sequence: CAG
tggggtttcaccatgttggt

SEQ ID NO: 31455 - DNA, 20 bp, Artificial Sequence
  Description of Artificial Sequence: Synthetic oligonucleotide
  Target: ATXN2; (-) strand; PAM type: NRG; PAM sequence: TGG
gaaatggggtttcaccatgt

SEQ ID NO: 31456 - DNA, 20 bp, Artificial Sequence
  Description of Artificial Sequence: Synthetic oligonucleotide
  Target: ATXN2; (-) strand; PAM type: NRG; PAM sequence: GGG
ttgtatttttagtagaaatg

SEQ ID NO: 31457 - DNA, 20 bp, Artificial Sequence
  Description of Artificial Sequence: Synthetic oligonucleotide
  Target: ATXN2; (-) strand; PAM type: NRG; PAM sequence: GGG
tttgtatttttagtagaaat

SEQ ID NO: 31458 - DNA, 20 bp, Artificial Sequence
  Description of Artificial Sequence: Synthetic oligonucleotide
  Target: ATXN2; (-) strand; PAM type: NRG; PAM sequence: TGG
ttttgtatttttagtagaaa

SEQ ID NO: 31459 - DNA, 20 bp, Artificial Sequence
  Description of Artificial Sequence: Synthetic oligonucleotide
  Target: ATXN2; (-) strand; PAM type: NRG; PAM sequence: TAG
actaatttttgtatttttag

SEQ ID NO: 31460 - DNA, 20 bp, Artificial Sequence
  Description of Artificial Sequence: Synthetic oligonucleotide
  Target: ATXN2; (-) strand; PAM type: NRG; PAM sequence: TAG
ctgactaatttttgtatttt

SEQ ID NO: 31461 - DNA, 20 bp, Artificial Sequence
  Description of Artificial Sequence: Synthetic oligonucleotide
  Target: ATXN2; (-) strand; PAM type: NRG; PAM sequence: CAG
ctcccaagtacctgagacta

SEQ ID NO: 31462 - DNA, 20 bp, Artificial Sequence
  Description of Artificial Sequence: Synthetic oligonucleotide
  Target: ATXN2; (-) strand; PAM type: NRG; PAM sequence: GAG
attcagcctcccaagtacct

SEQ ID NO: 31463 - DNA, 20 bp, Artificial Sequence
  Description of Artificial Sequence: Synthetic oligonucleotide
  Target: ATXN2; (-) strand; PAM type: NRG; PAM sequence: AAG
ttcaggtgattcagcctccc

SEQ ID NO: 31464 - DNA, 20 bp, Artificial Sequence
  Description of Artificial Sequence: Synthetic oligonucleotide
  Target: ATXN2; (-) strand; PAM type: NRG; PAM sequence: CAG
cctcctgtgttcaggtgatt

SEQ ID NO: 31465 - DNA, 20 bp, Artificial Sequence
  Description of Artificial Sequence: Synthetic oligonucleotide
  Target: ATXN2; (-) strand; PAM type: NRG; PAM sequence: AGG
aacctccgcctcctgtgttc

SEQ ID NO: 31466 - DNA, 20 bp, Artificial Sequence
  Description of Artificial Sequence: Synthetic oligonucleotide
  Target: ATXN2; (-) strand; PAM type: NRG; PAM sequence: CAG
caacctccgcctcctgtgtt

SEQ ID NO: 31467 - DNA, 20 bp, Artificial Sequence
  Description of Artificial Sequence: Synthetic oligonucleotide
  Target: ATXN2; (-) strand; PAM type: NRG; PAM sequence: TAG
ggcgtgcagtggcgcaatct

SEQ ID NO: 31468 - DNA, 20 bp, Artificial Sequence
  Description of Artificial Sequence: Synthetic oligonucleotide
  Target: ATXN2; (-) strand; PAM type: NRG; PAM sequence: TGG
tggagtacagtggcgtgcag

SEQ ID NO: 31469 - DNA, 20 bp, Artificial Sequence
  Description of Artificial Sequence: Synthetic oligonucleotide
  Target: ATXN2; (-) strand; PAM type: NRG; PAM sequence: CAG
ggttggagtacagtggcgtg

SEQ ID NO: 31470 - DNA, 20 bp, Artificial Sequence
  Description of Artificial Sequence: Synthetic oligonucleotide
  Target: ATXN2; (-) strand; PAM type: NRG; PAM sequence: TGG
ttgcccaggttggagtacag

SEQ ID NO: 31471 - DNA, 20 bp, Artificial Sequence
  Description of Artificial Sequence: Synthetic oligonucleotide
  Target: ATXN2; (-) strand; PAM type: NRG; PAM sequence: CAG
ctgttgcccaggttggagta

SEQ ID NO: 31472 - DNA, 20 bp, Artificial Sequence
  Description of Artificial Sequence: Synthetic oligonucleotide
  Target: ATXN2; (-) strand; PAM type: NRG; PAM sequence: GAG
tcactctgttgcccaggttg

SEQ ID NO: 31473 - DNA, 20 bp, Artificial Sequence
  Description of Artificial Sequence: Synthetic oligonucleotide
  Target: ATXN2; (-) strand; PAM type: NRG; PAM sequence: TGG
tctcactctgttgcccaggt

SEQ ID NO: 31474 - DNA, 20 bp, Artificial Sequence
  Description of Artificial Sequence: Synthetic oligonucleotide
  Target: ATXN2; (-) strand; PAM type: NRG; PAM sequence: AGG
ggagtctcactctgttgccc

SEQ ID NO: 31475 - DNA, 20 bp, Artificial Sequence
  Description of Artificial Sequence: Synthetic oligonucleotide
  Target: ATXN2; (-) strand; PAM type: NRG; PAM sequence: CAG
tggagtctcactctgttgcc

SEQ ID NO: 31476 - DNA, 20 bp, Artificial Sequence
  Description of Artificial Sequence: Synthetic oligonucleotide
  Target: ATXN2; (-) strand; PAM type: NRG; PAM sequence: GAG
atttttatttttatgagatg

SEQ ID NO: 31477 - DNA, 20 bp, Artificial Sequence
  Description of Artificial Sequence: Synthetic oligonucleotide
  Target: ATXN2; (-) strand; PAM type: NRG; PAM sequence: TGG
taatttttatttttatgaga

SEQ ID NO: 31478 - DNA, 20 bp, Artificial Sequence
  Description of Artificial Sequence: Synthetic oligonucleotide
  Target: ATXN2; (-) strand; PAM type: NRG; PAM sequence: GAG
ggtttaatttttatttttat

SEQ ID NO: 31479 - DNA, 20 bp, Artificial Sequence
  Description of Artificial Sequence: Synthetic oligonucleotide
  Target: ATXN2; (-) strand; PAM type: NRG; PAM sequence: TGG
tttgttgaatatgtgactgt

SEQ ID NO: 31480 - DNA, 20 bp, Artificial Sequence
  Description of Artificial Sequence: Synthetic oligonucleotide
  Target: ATXN2; (-) strand; PAM type: NRG; PAM sequence: GAG
ttcagcctgggtgacagagt

SEQ ID NO: 31481 - DNA, 20 bp, Artificial Sequence
  Description of Artificial Sequence: Synthetic oligonucleotide
  Target: ATXN2; (-) strand; PAM type: NRG; PAM sequence: GAG
gtacttcagcctgggtgaca

SEQ ID NO: 31482 - DNA, 20 bp, Artificial Sequence
  Description of Artificial Sequence: Synthetic oligonucleotide
  Target: ATXN2; (-) strand; PAM type: NRG; PAM sequence: CAG
ctgtacttcagcctgggtga

SEQ ID NO: 31483 - DNA, 20 bp, Artificial Sequence
  Description of Artificial Sequence: Synthetic oligonucleotide
  Target: ATXN2; (-) strand; PAM type: NRG; PAM sequence: GGG
gtgccactgtacttcagcct

SEQ ID NO: 31484 - DNA, 20 bp, Artificial Sequence
  Description of Artificial Sequence: Synthetic oligonucleotide
  Target: ATXN2; (-) strand; PAM type: NRG; PAM sequence: TGG
cgtgccactgtacttcagcc

SEQ ID NO: 31485 - DNA, 20 bp, Artificial Sequence
  Description of Artificial Sequence: Synthetic oligonucleotide
  Target: ATXN2; (-) strand; PAM type: NRG; PAM sequence: CAG
gagatcgtgccactgtactt

SEQ ID NO: 31486 - DNA, 20 bp, Artificial Sequence
  Description of Artificial Sequence: Synthetic oligonucleotide
  Target: ATXN2; (-) strand; PAM type: NRG; PAM sequence: GAG
ggcagaggttgcagtgagca

SEQ ID NO: 31487 - DNA, 20 bp, Artificial Sequence
  Description of Artificial Sequence: Synthetic oligonucleotide
  Target: ATXN2; (-) strand; PAM type: NRG; PAM sequence: CAG
gaggcagaggttgcagtgag

SEQ ID NO: 31488 - DNA, 20 bp, Artificial Sequence
  Description of Artificial Sequence: Synthetic oligonucleotide
  Target: ATXN2; (-) strand; PAM type: NRG; PAM sequence: GAG
cgggaggcagaggttgcagt

SEQ ID NO: 31489 - DNA, 20 bp, Artificial Sequence
  Description of Artificial Sequence: Synthetic oligonucleotide
  Target: ATXN2; (-) strand; PAM type: NRG; PAM sequence: CAG
aacccgggaggcagaggttg

SEQ ID NO: 31490 - DNA, 20 bp, Artificial Sequence
  Description of Artificial Sequence: Synthetic oligonucleotide
  Target: ATXN2; (-) strand; PAM type: NRG; PAM sequence: AGG
ctcttgaacccgggaggcag

SEQ ID NO: 31491 - DNA, 20 bp, Artificial Sequence
  Description of Artificial Sequence: Synthetic oligonucleotide
  Target: ATXN2; (-) strand; PAM type: NRG; PAM sequence: GAG
tctcttgaacccgggaggca

SEQ ID NO: 31492 - DNA, 20 bp, Artificial Sequence
  Description of Artificial Sequence: Synthetic oligonucleotide
  Target: ATXN2; (-) strand; PAM type: NRG; PAM sequence: CAG
aatctcttgaacccgggagg

SEQ ID NO: 31493 - DNA, 20 bp, Artificial Sequence
  Description of Artificial Sequence: Synthetic oligonucleotide
  Target: ATXN2; (-) strand; PAM type: NRG; PAM sequence: AGG
gagaatctcttgaacccggg

SEQ ID NO: 31494 - DNA, 20 bp, Artificial Sequence
  Description of Artificial Sequence: Synthetic oligonucleotide
  Target: ATXN2; (-) strand; PAM type: NRG; PAM sequence: GAG
ggagaatctcttgaacccgg

SEQ ID NO: 31495 - DNA, 20 bp, Artificial Sequence
  Description of Artificial Sequence: Synthetic oligonucleotide
  Target: ATXN2; (-) strand; PAM type: NRG; PAM sequence: GGG
caggagaatctcttgaaccc

SEQ ID NO: 31496 - DNA, 20 bp, Artificial Sequence
  Description of Artificial Sequence: Synthetic oligonucleotide
  Target: ATXN2; (-) strand; PAM type: NRG; PAM sequence: CGG
gcaggagaatctcttgaacc

SEQ ID NO: 31497 - DNA, 20 bp, Artificial Sequence
  Description of Artificial Sequence: Synthetic oligonucleotide
  Target: ATXN2; (-) strand; PAM type: NRG; PAM sequence: GAG
gactcagaaggctgaggcag

SEQ ID NO: 31498 - DNA, 20 bp, Artificial Sequence
  Description of Artificial Sequence: Synthetic oligonucleotide
  Target: ATXN2; (-) strand; PAM type: NRG; PAM sequence: AGG
gtgactcagaaggctgaggc

SEQ ID NO: 31499 - DNA, 20 bp, Artificial Sequence
  Description of Artificial Sequence: Synthetic oligonucleotide
  Target: ATXN2; (-) strand; PAM type: NRG; PAM sequence: CAG
agtgactcagaaggctgagg

SEQ ID NO: 31500 - DNA, 20 bp, Artificial Sequence
  Description of Artificial Sequence: Synthetic oligonucleotide
  Target: ATXN2; (-) strand; PAM type: NRG; PAM sequence: AGG
ctcagtgactcagaaggctg

SEQ ID NO: 31501 - DNA, 20 bp, Artificial Sequence
  Description of Artificial Sequence: Synthetic oligonucleotide
  Target: ATXN2; (-) strand; PAM type: NRG; PAM sequence: GAG
tctcagtgactcagaaggct

SEQ ID NO: 31502 - DNA, 20 bp, Artificial Sequence
  Description of Artificial Sequence: Synthetic oligonucleotide
  Target: ATXN2; (-) strand; PAM type: NRG; PAM sequence: AGG
tacagtctcagtgactcaga

SEQ ID NO: 31503 - DNA, 20 bp, Artificial Sequence
  Description of Artificial Sequence: Synthetic oligonucleotide
  Target: ATXN2; (-) strand; PAM type: NRG; PAM sequence: AAG
ctacagtctcagtgactcag

SEQ ID NO: 31504 - DNA, 20 bp, Artificial Sequence
  Description of Artificial Sequence: Synthetic oligonucleotide
  Target: ATXN2; (-) strand; PAM type: NRG; PAM sequence: CAG
catctacagtctcagtgact

SEQ ID NO: 31505 - DNA, 20 bp, Artificial Sequence
  Description of Artificial Sequence: Synthetic oligonucleotide
  Target: ATXN2; (-) strand; PAM type: NRG; PAM sequence: CAG
gcgtggctcatctacagtct

SEQ ID NO: 31506 - DNA, 20 bp, Artificial Sequence
  Description of Artificial Sequence: Synthetic oligonucleotide
  Target: ATXN2; (-) strand; PAM type: NRG; PAM sequence: CAG
atttgtgcgtggctcatcta

SEQ ID NO: 31507 - DNA, 20 bp, Artificial Sequence
  Description of Artificial Sequence: Synthetic oligonucleotide
  Target: ATXN2; (-) strand; PAM type: NRG; PAM sequence: TGG
acaaattggccatttgtgcg

SEQ ID NO: 31508 - DNA, 20 bp, Artificial Sequence
  Description of Artificial Sequence: Synthetic oligonucleotide
  Target: ATXN2; (-) strand; PAM type: NRG; PAM sequence: TGG
tttattacaaatacacaaat

SEQ ID NO: 31509 - DNA, 20 bp, Artificial Sequence
  Description of Artificial Sequence: Synthetic oligonucleotide
  Target: ATXN2; (-) strand; PAM type: NRG; PAM sequence: TGG
caggcgtgagccaccacacc

SEQ ID NO: 31510 - DNA, 20 bp, Artificial Sequence
  Description of Artificial Sequence: Synthetic oligonucleotide
  Target: ATXN2; (-) strand; PAM type: NRG; PAM sequence: GAG
agttctgggattacaggcgt

SEQ ID NO: 31511 - DNA, 20 bp, Artificial Sequence
  Description of Artificial Sequence: Synthetic oligonucleotide
  Target: ATXN2; (-) strand; PAM type: NRG; PAM sequence: AGG
tcccaaagttctgggattac

SEQ ID NO: 31512 - DNA, 20 bp, Artificial Sequence
  Description of Artificial Sequence: Synthetic oligonucleotide
  Target: ATXN2; (-) strand; PAM type: NRG; PAM sequence: CAG
ctcccaaagttctgggatta

SEQ ID NO: 31513 - DNA, 20 bp, Artificial Sequence
  Description of Artificial Sequence: Synthetic oligonucleotide
  Target: ATXN2; (-) strand; PAM type: NRG; PAM sequence: GGG
cctcggcctcccaaagttct

SEQ ID NO: 31514 - DNA, 20 bp, Artificial Sequence
  Description of Artificial Sequence: Synthetic oligonucleotide
  Target: ATXN2; (-) strand; PAM type: NRG; PAM sequence: TGG
gcctcggcctcccaaagttc

SEQ ID NO: 31515 - DNA, 20 bp, Artificial Sequence
  Description of Artificial Sequence: Synthetic oligonucleotide
  Target: ATXN2; (-) strand; PAM type: NRG; PAM sequence: AAG
ccgcccgcctcggcctccca

SEQ ID NO: 31516 - DNA, 20 bp, Artificial Sequence
  Description of Artificial Sequence: Synthetic oligonucleotide
  Target: ATXN2; (-) strand; PAM type: NRG; PAM sequence: CGG
actttgtgatccgcccgcct

SEQ ID NO: 31517 - DNA, 20 bp, Artificial Sequence
  Description of Artificial Sequence: Synthetic oligonucleotide
  Target: ATXN2; (-) strand; PAM type: NRG; PAM sequence: TGG
tttcgccgtgttatctggga

SEQ ID NO: 31518 - DNA, 20 bp, Artificial Sequence
  Description of Artificial Sequence: Synthetic oligonucleotide
  Target: ATXN2; (-) strand; PAM type: NRG; PAM sequence: GGG
ggggtttcgccgtgttatct

SEQ ID NO: 31519 - DNA, 20 bp, Artificial Sequence
  Description of Artificial Sequence: Synthetic oligonucleotide
  Target: ATXN2; (-) strand; PAM type: NRG; PAM sequence: TGG
tggggtttcgccgtgttatc

SEQ ID NO: 31520 - DNA, 20 bp, Artificial Sequence
  Description of Artificial Sequence: Synthetic oligonucleotide
  Target: ATXN2; (-) strand; PAM type: NRG; PAM sequence: GGG
ttttatttttagtagagatg

SEQ ID NO: 31521 - DNA, 20 bp, Artificial Sequence
  Description of Artificial Sequence: Synthetic oligonucleotide
  Target: ATXN2; (-) strand; PAM type: NRG; PAM sequence: GGG
tttttatttttagtagagat

SEQ ID NO: 31522 - DNA, 20 bp, Artificial Sequence
  Description of Artificial Sequence: Synthetic oligonucleotide
  Target: ATXN2; (-) strand; PAM type: NRG; PAM sequence: TGG
ttttttatttttagtagaga

SEQ ID NO: 31523 - DNA, 20 bp, Artificial Sequence
  Description of Artificial Sequence: Synthetic oligonucleotide
  Target: ATXN2; (-) strand; PAM type: NRG; PAM sequence: GAG
taatttttttatttttagta

SEQ ID NO: 31524 - DNA, 20 bp, Artificial Sequence
  Description of Artificial Sequence: Synthetic oligonucleotide
  Target: ATXN2; (-) strand; PAM type: NRG; PAM sequence: TAG
gctaatttttttatttttag

SEQ ID NO: 31525 - DNA, 20 bp, Artificial Sequence
  Description of Artificial Sequence: Synthetic oligonucleotide
  Target: ATXN2; (-) strand; PAM type: NRG; PAM sequence: TAG
ctggctaatttttttatttt

SEQ ID NO: 31526 - DNA, 20 bp, Artificial Sequence
  Description of Artificial Sequence: Synthetic oligonucleotide
  Target: ATXN2; (-) strand; PAM type: NRG; PAM sequence: TGG
caggagcccgccaccatgcc

SEQ ID NO: 31527 - DNA, 20 bp, Artificial Sequence
  Description of Artificial Sequence: Synthetic oligonucleotide
  Target: ATXN2; (-) strand; PAM type: NRG; PAM sequence: GAG
ccaagtagctgggactacag

SEQ ID NO: 31528 - DNA, 20 bp, Artificial Sequence
  Description of Artificial Sequence: Synthetic oligonucleotide
  Target: ATXN2; (-) strand; PAM type: NRG; PAM sequence: AGG
tcccaagtagctgggactac

SEQ ID NO: 31529 - DNA, 20 bp, Artificial Sequence
  Description of Artificial Sequence: Synthetic oligonucleotide
  Target: ATXN2; (-) strand; PAM type: NRG; PAM sequence: CAG
ctcccaagtagctgggacta

SEQ ID NO: 31530 - DNA, 20 bp, Artificial Sequence
  Description of Artificial Sequence: Synthetic oligonucleotide
  Target: ATXN2; (-) strand; PAM type: NRG; PAM sequence: GGG
cctcagcctcccaagtagct

SEQ ID NO: 31531 - DNA, 20 bp, Artificial Sequence
  Description of Artificial Sequence: Synthetic oligonucleotide
  Target: ATXN2; (-) strand; PAM type: NRG; PAM sequence: TGG
gcctcagcctcccaagtagc

SEQ ID NO: 31532 - DNA, 20 bp, Artificial Sequence
  Description of Artificial Sequence: Synthetic oligonucleotide
  Target: ATXN2; (-) strand; PAM type: NRG; PAM sequence: TAG
tcctgcctcagcctcccaag

SEQ ID NO: 31533 - DNA, 20 bp, Artificial Sequence
  Description of Artificial Sequence: Synthetic oligonucleotide
  Target: ATXN2; (-) strand; PAM type: NRG; PAM sequence: AAG
ttctcctgcctcagcctccc

SEQ ID NO: 31534 - DNA, 20 bp, Artificial Sequence
  Description of Artificial Sequence: Synthetic oligonucleotide
  Target: ATXN2; (-) strand; PAM type: NRG; PAM sequence: CAG
ttcatgccattctcctgcct

SEQ ID NO: 31535 - DNA, 20 bp, Artificial Sequence
  Description of Artificial Sequence: Synthetic oligonucleotide
  Target: ATXN2; (-) strand; PAM type: NRG; PAM sequence: AGG
cactgcaacctccgactccc

SEQ ID NO: 31536 - DNA, 20 bp, Artificial Sequence
  Description of Artificial Sequence: Synthetic oligonucleotide
  Target: ATXN2; (-) strand; PAM type: NRG; PAM sequence: CAG
tcactgcaacctccgactcc

SEQ ID NO: 31537 - DNA, 20 bp, Artificial Sequence
  Description of Artificial Sequence: Synthetic oligonucleotide
  Target: ATXN2; (-) strand; PAM type: NRG; PAM sequence: CGG
ggagtgcagtggcgtgatct

SEQ ID NO: 31538 - DNA, 20 bp, Artificial Sequence
  Description of Artificial Sequence: Synthetic oligonucleotide
  Target: ATXN2; (-) strand; PAM type: NRG; PAM sequence: TGG
tcgcccaggctggagtgcag

SEQ ID NO: 31539 - DNA, 20 bp, Artificial Sequence
  Description of Artificial Sequence: Synthetic oligonucleotide
  Target: ATXN2; (-) strand; PAM type: NRG; PAM sequence: CAG
ctgtcgcccaggctggagtg

SEQ ID NO: 31540 - DNA, 20 bp, Artificial Sequence
  Description of Artificial Sequence: Synthetic oligonucleotide
  Target: ATXN2; (-) strand; PAM type: NRG; PAM sequence: GAG
tcgctctgtcgcccaggctg

SEQ ID NO: 31541 - DNA, 20 bp, Artificial Sequence
  Description of Artificial Sequence: Synthetic oligonucleotide
  Target: ATXN2; (-) strand; PAM type: NRG; PAM sequence: TGG
tctcgctctgtcgcccaggc

SEQ ID NO: 31542 - DNA, 20 bp, Artificial Sequence
  Description of Artificial Sequence: Synthetic oligonucleotide
  Target: ATXN2; (-) strand; PAM type: NRG; PAM sequence: AGG
ggagtctcgctctgtcgccc

SEQ ID NO: 31543 - DNA, 20 bp, Artificial Sequence
  Description of Artificial Sequence: Synthetic oligonucleotide
  Target: ATXN2; (-) strand; PAM type: NRG; PAM sequence: CAG
cggagtctcgctctgtcgcc

SEQ ID NO: 31544 - DNA, 20 bp, Artificial Sequence
  Description of Artificial Sequence: Synthetic oligonucleotide
  Target: ATXN2; (-) strand; PAM type: NRG; PAM sequence: GAG
ttatttattttttggagacg

SEQ ID NO: 31545 - DNA, 20 bp, Artificial Sequence
  Description of Artificial Sequence: Synthetic oligonucleotide
  Target: ATXN2; (-) strand; PAM type: NRG; PAM sequence: CGG
atttatttattttttggaga

SEQ ID NO: 31546 - DNA, 20 bp, Artificial Sequence
  Description of Artificial Sequence: Synthetic oligonucleotide
  Target: ATXN2; (-) strand; PAM type: NRG; PAM sequence: GAG
atttatttatttattttttg

SEQ ID NO: 31547 - DNA, 20 bp, Artificial Sequence
  Description of Artificial Sequence: Synthetic oligonucleotide
  Target: ATXN2; (-) strand; PAM type: NRG; PAM sequence: TGG
ttatttatttatttattttt

SEQ ID NO: 31548 - DNA, 20 bp, Artificial Sequence
  Description of Artificial Sequence: Synthetic oligonucleotide
  Target: ATXN2; (-) strand; PAM type: NRG; PAM sequence: GGG
ggccaacgtggtgaaaccct

SEQ ID NO: 31549 - DNA, 20 bp, Artificial Sequence
  Description of Artificial Sequence: Synthetic oligonucleotide
  Target: ATXN2; (-) strand; PAM type: NRG; PAM sequence: TGG
tggccaacgtggtgaaaccc

SEQ ID NO: 31550 - DNA, 20 bp, Artificial Sequence
  Description of Artificial Sequence: Synthetic oligonucleotide
  Target: ATXN2; (-) strand; PAM type: NRG; PAM sequence: TGG
cgagaccagcgtggccaacg

SEQ ID NO: 31551 - DNA, 20 bp, Artificial Sequence
  Description of Artificial Sequence: Synthetic oligonucleotide
  Target: ATXN2; (-) strand; PAM type: NRG; PAM sequence: TGG
tcaggagttcgagaccagcg

SEQ ID NO: 31552 - DNA, 20 bp, Artificial Sequence
  Description of Artificial Sequence: Synthetic oligonucleotide
  Target: ATXN2; (-) strand; PAM type: NRG; PAM sequence: CAG
tgaggtcaggagttcgagac

SEQ ID NO: 31553 - DNA, 20 bp, Artificial Sequence
  Description of Artificial Sequence: Synthetic oligonucleotide
  Target: ATXN2; (-) strand; PAM type: NRG; PAM sequence: GAG
tcacctgaggtcaggagttc

SEQ ID NO: 31554 - DNA, 20 bp, Artificial Sequence
  Description of Artificial Sequence: Synthetic oligonucleotide
  Target: ATXN2; (-) strand; PAM type: NRG; PAM sequence: GAG
ggcagatcacctgaggtcag

SEQ ID NO: 31555 - DNA, 20 bp, Artificial Sequence
  Description of Artificial Sequence: Synthetic oligonucleotide
  Target: ATXN2; (-) strand; PAM type: NRG; PAM sequence: AGG
cgggcagatcacctgaggtc

SEQ ID NO: 31556 - DNA, 20 bp, Artificial Sequence
  Description of Artificial Sequence: Synthetic oligonucleotide
  Target: ATXN2; (-) strand; PAM type: NRG; PAM sequence: CAG
gcgggcagatcacctgaggt

SEQ ID NO: 31557 - DNA, 20 bp, Artificial Sequence
  Description of Artificial Sequence: Synthetic oligonucleotide
  Target: ATXN2; (-) strand; PAM type: NRG; PAM sequence: AGG
cgaggcgggcagatcacctg

SEQ ID NO: 31558 - DNA, 20 bp, Artificial Sequence
  Description of Artificial Sequence: Synthetic oligonucleotide
  Target: ATXN2; (-) strand; PAM type: NRG; PAM sequence: GAG
ccgaggcgggcagatcacct

SEQ ID NO: 31559 - DNA, 20 bp, Artificial Sequence
  Description of Artificial Sequence: Synthetic oligonucleotide
  Target: ATXN2; (-) strand; PAM type: NRG; PAM sequence: CAG
ctttgggaggccgaggcggg

SEQ ID NO: 31560 - DNA, 20 bp, Artificial Sequence
  Description of Artificial Sequence: Synthetic oligonucleotide
  Target: ATXN2; (-) strand; PAM type: NRG; PAM sequence: GGG
gcactttgggaggccgaggc

SEQ ID NO: 31561 - DNA, 20 bp, Artificial Sequence
  Description of Artificial Sequence: Synthetic oligonucleotide
  Target: ATXN2; (-) strand; PAM type: NRG; PAM sequence: CGG
agcactttgggaggccgagg

SEQ ID NO: 31562 - DNA, 20 bp, Artificial Sequence
  Description of Artificial Sequence: Synthetic oligonucleotide
  Target: ATXN2; (-) strand; PAM type: NRG; PAM sequence: AGG
cccagcactttgggaggccg

SEQ ID NO: 31563 - DNA, 20 bp, Artificial Sequence
  Description of Artificial Sequence: Synthetic oligonucleotide
  Target: ATXN2; (-) strand; PAM type: NRG; PAM sequence: GAG
tcccagcactttgggaggcc

SEQ ID NO: 31564 - DNA, 20 bp, Artificial Sequence
  Description of Artificial Sequence: Synthetic oligonucleotide
  Target: ATXN2; (-) strand; PAM type: NRG; PAM sequence: AGG
tgtaatcccagcactttggg

SEQ ID NO: 31565 - DNA, 20 bp, Artificial Sequence
  Description of Artificial Sequence: Synthetic oligonucleotide
  Target: ATXN2; (-) strand; PAM type: NRG; PAM sequence: GAG
ctgtaatcccagcactttgg

SEQ ID NO: 31566 - DNA, 20 bp, Artificial Sequence
  Description of Artificial Sequence: Synthetic oligonucleotide
  Target: ATXN2; (-) strand; PAM type: NRG; PAM sequence: GGG
gactgtaatcccagcacttt

SEQ ID NO: 31567 - DNA, 20 bp, Artificial Sequence
  Description of Artificial Sequence: Synthetic oligonucleotide
  Target: ATXN2; (-) strand; PAM type: NRG; PAM sequence: TGG
cgactgtaatcccagcactt

SEQ ID NO: 31568 - DNA, 20 bp, Artificial Sequence
  Description of Artificial Sequence: Synthetic oligonucleotide
  Target: ATXN2; (-) strand; PAM type: NRG; PAM sequence: CAG
gtggctcacgactgtaatcc

SEQ ID NO: 31569 - DNA, 20 bp, Artificial Sequence
  Description of Artificial Sequence: Synthetic oligonucleotide
  Target: ATXN2; (-) strand; PAM type: NRG; PAM sequence: TGG
cttgtcgtggccaggcgcag

SEQ ID NO: 31570 - DNA, 20 bp, Artificial Sequence
  Description of Artificial Sequence: Synthetic oligonucleotide
  Target: ATXN2; (-) strand; PAM type: NRG; PAM sequence: CAG
taacttgtcgtggccaggcg

SEQ ID NO: 31571 - DNA, 20 bp, Artificial Sequence
  Description of Artificial Sequence: Synthetic oligonucleotide
  Target: ATXN2; (-) strand; PAM type: NRG; PAM sequence: AGG
tcaattaacttgtcgtggcc

SEQ ID NO: 31572 - DNA, 20 bp, Artificial Sequence
  Description of Artificial Sequence: Synthetic oligonucleotide
  Target: ATXN2; (-) strand; PAM type: NRG; PAM sequence: CAG
atcaattaacttgtcgtggc

SEQ ID NO: 31573 - DNA, 20 bp, Artificial Sequence
  Description of Artificial Sequence: Synthetic oligonucleotide
  Target: ATXN2; (-) strand; PAM type: NRG; PAM sequence: TGG
agttatcaattaacttgtcg

SEQ ID NO: 31574 - DNA, 20 bp, Artificial Sequence
  Description of Artificial Sequence: Synthetic oligonucleotide
  Target: ATXN2; (-) strand; PAM type: NRG; PAM sequence: AAG
tacaactttgtatgcttagt

SEQ ID NO: 31575 - DNA, 20 bp, Artificial Sequence
  Description of Artificial Sequence: Synthetic oligonucleotide
  Target: ATXN2; (-) strand; PAM type: NRG; PAM sequence: TAG
tttgtacaactttgtatgct

SEQ ID NO: 31576 - DNA, 20 bp, Artificial Sequence
  Description of Artificial Sequence: Synthetic oligonucleotide
  Target: ATXN2; (-) strand; PAM type: NRG; PAM sequence: AAG
agcatcttgacagtaggaac

SEQ ID NO: 31577 - DNA, 20 bp, Artificial Sequence
  Description of Artificial Sequence: Synthetic oligonucleotide
  Target: ATXN2; (-) strand; PAM type: NRG; PAM sequence: AGG
atttagagcatcttgacagt

SEQ ID NO: 31578 - DNA, 20 bp, Artificial Sequence
  Description of Artificial Sequence: Synthetic oligonucleotide
  Target: ATXN2; (-) strand; PAM type: NRG; PAM sequence: TAG
gatttagagcatcttgacag

SEQ ID NO: 31579 - DNA, 20 bp, Artificial Sequence
  Description of Artificial Sequence: Synthetic oligonucleotide
  Target: ATXN2; (-) strand; PAM type: NRG; PAM sequence: CAG
ctagatttagagcatcttga

SEQ ID NO: 31580 - DNA, 20 bp, Artificial Sequence
  Description of Artificial Sequence: Synthetic oligonucleotide
  Target: ATXN2; (-) strand; PAM type: NRG; PAM sequence: GAG
ttatcttccttctagattta

SEQ ID NO: 31581 - DNA, 20 bp, Artificial Sequence
  Description of Artificial Sequence: Synthetic oligonucleotide
  Target: ATXN2; (-) strand; PAM type: NRG; PAM sequence: TAG
cattatcttccttctagatt

SEQ ID NO: 31582 - DNA, 20 bp, Artificial Sequence
  Description of Artificial Sequence: Synthetic oligonucleotide
  Target: ATXN2; (-) strand; PAM type: NRG; PAM sequence: TAG
tatttgcattatcttccttc

SEQ ID NO: 31583 - DNA, 20 bp, Artificial Sequence
  Description of Artificial Sequence: Synthetic oligonucleotide
  Target: ATXN2; (-) strand; PAM type: NRG; PAM sequence: TGG
tatttgcgatctgacttgtt

SEQ ID NO: 31584 - DNA, 20 bp, Artificial Sequence
  Description of Artificial Sequence: Synthetic oligonucleotide
  Target: ATXN2; (-) strand; PAM type: NRG; PAM sequence: CGG
aaataaataattgaaacatg

SEQ ID NO: 31585 - DNA, 20 bp, Artificial Sequence
  Description of Artificial Sequence: Synthetic oligonucleotide
  Target: ATXN2; (-) strand; PAM type: NRG; PAM sequence: GAG
tccagcctgggcaacagagc

SEQ ID NO: 31586 - DNA, 20 bp, Artificial Sequence
  Description of Artificial Sequence: Synthetic oligonucleotide
  Target: ATXN2; (-) strand; PAM type: NRG; PAM sequence: GAG
gcactccagcctgggcaaca

SEQ ID NO: 31587 - DNA, 20 bp, Artificial Sequence
  Description of Artificial Sequence: Synthetic oligonucleotide
  Target: ATXN2; (-) strand; PAM type: NRG; PAM sequence: CAG
ctgcactccagcctgggcaa

SEQ ID NO: 31588 - DNA, 20 bp, Artificial Sequence
  Description of Artificial Sequence: Synthetic oligonucleotide
  Target: ATXN2; (-) strand; PAM type: NRG; PAM sequence: GGG
gtgccactgcactccagcct

SEQ ID NO: 31589 - DNA, 20 bp, Artificial Sequence
  Description of Artificial Sequence: Synthetic oligonucleotide
  Target: ATXN2; (-) strand; PAM type: NRG; PAM sequence: TGG
cgtgccactgcactccagcc

SEQ ID NO: 31590 - DNA, 20 bp, Artificial Sequence
  Description of Artificial Sequence: Synthetic oligonucleotide
  Target: ATXN2; (-) strand; PAM type: NRG; PAM sequence: CAG
gagatcgtgccactgcactc

SEQ ID NO: 31591 - DNA, 20 bp, Artificial Sequence
  Description of Artificial Sequence: Synthetic oligonucleotide
  Target: ATXN2; (-) strand; PAM type: NRG; PAM sequence: GAG
ggcggagcttgcagtgagcc

SEQ ID NO: 31592 - DNA, 20 bp, Artificial Sequence
  Description of Artificial Sequence: Synthetic oligonucleotide
  Target: ATXN2; (-) strand; PAM type: NRG; PAM sequence: GAG
cgggaggcggagcttgcagt

SEQ ID NO: 31593 - DNA, 20 bp, Artificial Sequence
  Description of Artificial Sequence: Synthetic oligonucleotide
  Target: ATXN2; (-) strand; PAM type: NRG; PAM sequence: CAG
aacccgggaggcggagcttg

SEQ ID NO: 31594 - DNA, 20 bp, Artificial Sequence
  Description of Artificial Sequence: Synthetic oligonucleotide
  Target: ATXN2; (-) strand; PAM type: NRG; PAM sequence: GAG
tggcgtgaacccgggaggcg

SEQ ID NO: 31595 - DNA, 20 bp, Artificial Sequence
  Description of Artificial Sequence: Synthetic oligonucleotide
  Target: ATXN2; (-) strand; PAM type: NRG; PAM sequence: CGG
aatggcgtgaacccgggagg

SEQ ID NO: 31596 - DNA, 20 bp, Artificial Sequence
  Description of Artificial Sequence: Synthetic oligonucleotide
  Target: ATXN2; (-) strand; PAM type: NRG; PAM sequence: AGG
gagaatggcgtgaacccggg

SEQ ID NO: 31597 - DNA, 20 bp, Artificial Sequence
  Description of Artificial Sequence: Synthetic oligonucleotide
  Target: ATXN2; (-) strand; PAM type: NRG; PAM sequence: GAG
ggagaatggcgtgaacccgg

SEQ ID NO: 31598 - DNA, 20 bp, Artificial Sequence
  Description of Artificial Sequence: Synthetic oligonucleotide
  Target: ATXN2; (-) strand; PAM type: NRG; PAM sequence: GGG
caggagaatggcgtgaaccc

SEQ ID NO: 31599 - DNA, 20 bp, Artificial Sequence
  Description of Artificial Sequence: Synthetic oligonucleotide
  Target: ATXN2; (-) strand; PAM type: NRG; PAM sequence: CGG
gcaggagaatggcgtgaacc

SEQ ID NO: 31600 - DNA, 20 bp, Artificial Sequence
  Description of Artificial Sequence: Synthetic oligonucleotide
  Target: ATXN2; (-) strand; PAM type: NRG; PAM sequence: TGG
gggaggctgaggcaggagaa

SEQ ID NO: 31601 - DNA, 20 bp, Artificial Sequence
  Description of Artificial Sequence: Synthetic oligonucleotide
  Target: ATXN2; (-) strand; PAM type: NRG; PAM sequence: GAG
tactcgggaggctgaggcag

SEQ ID NO: 31602 - DNA, 20 bp, Artificial Sequence
  Description of Artificial Sequence: Synthetic oligonucleotide
  Target: ATXN2; (-) strand; PAM type: NRG; PAM sequence: AGG
gctactcgggaggctgaggc

SEQ ID NO: 31603 - DNA, 20 bp, Artificial Sequence
  Description of Artificial Sequence: Synthetic oligonucleotide
  Target: ATXN2; (-) strand; PAM type: NRG; PAM sequence: CAG
agctactcgggaggctgagg

SEQ ID NO: 31604 - DNA, 20 bp, Artificial Sequence
  Description of Artificial Sequence: Synthetic oligonucleotide
  Target: ATXN2; (-) strand; PAM type: NRG; PAM sequence: AGG
cccagctactcgggaggctg

SEQ ID NO: 31605 - DNA, 20 bp, Artificial Sequence
  Description of Artificial Sequence: Synthetic oligonucleotide
  Target: ATXN2; (-) strand; PAM type: NRG; PAM sequence: GAG
tcccagctactcgggaggct

SEQ ID NO: 31606 - DNA, 20 bp, Artificial Sequence
  Description of Artificial Sequence: Synthetic oligonucleotide
  Target: ATXN2; (-) strand; PAM type: NRG; PAM sequence: AGG
tgtaatcccagctactcggg

SEQ ID NO: 31607 - DNA, 20 bp, Artificial Sequence
  Description of Artificial Sequence: Synthetic oligonucleotide
  Target: ATXN2; (-) strand; PAM type: NRG; PAM sequence: GAG
ctgtaatcccagctactcgg

SEQ ID NO: 31608 - DNA, 20 bp, Artificial Sequence
  Description of Artificial Sequence: Synthetic oligonucleotide
  Target: ATXN2; (-) strand; PAM type: NRG; PAM sequence: GGG
gcctgtaatcccagctactc

SEQ ID NO: 31609 - DNA, 20 bp, Artificial Sequence
  Description of Artificial Sequence: Synthetic oligonucleotide
  Target: ATXN2; (-) strand; PAM type: NRG; PAM sequence: CGG
cgcctgtaatcccagctact

SEQ ID NO: 31610 - DNA, 20 bp, Artificial Sequence
  Description of Artificial Sequence: Synthetic oligonucleotide
  Target: ATXN2; (-) strand; PAM type: NRG; PAM sequence: CAG
gtggcgggcgcctgtaatcc

SEQ ID NO: 31611 - DNA, 20 bp, Artificial Sequence
  Description of Artificial Sequence: Synthetic oligonucleotide
  Target: ATXN2; (-) strand; PAM type: NRG; PAM sequence: GGG
aattaaccgggtgtggtggc

SEQ ID NO: 31612 - DNA, 20 bp, Artificial Sequence
  Description of Artificial Sequence: Synthetic oligonucleotide
  Target: ATXN2; (-) strand; PAM type: NRG; PAM sequence: CGG
aaattaaccgggtgtggtgg

SEQ ID NO: 31613 - DNA, 20 bp, Artificial Sequence
  Description of Artificial Sequence: Synthetic oligonucleotide
  Target: ATXN2; (-) strand; PAM type: NRG; PAM sequence: TGG
taaaaattaaccgggtgtgg

SEQ ID NO: 31614 - DNA, 20 bp, Artificial Sequence
  Description of Artificial Sequence: Synthetic oligonucleotide
  Target: ATXN2; (-) strand; PAM type: NRG; PAM sequence: TGG
tactaaaaattaaccgggtg

SEQ ID NO: 31615 - DNA, 20 bp, Artificial Sequence
  Description of Artificial Sequence: Synthetic oligonucleotide
  Target: ATXN2; (-) strand; PAM type: NRG; PAM sequence: GGG
aaaaatactaaaaattaacc

SEQ ID NO: 31616 - DNA, 20 bp, Artificial Sequence
  Description of Artificial Sequence: Synthetic oligonucleotide
  Target: ATXN2; (-) strand; PAM type: NRG; PAM sequence: CGG
taaaaatactaaaaattaac

SEQ ID NO: 31617 - DNA, 20 bp, Artificial Sequence
  Description of Artificial Sequence: Synthetic oligonucleotide
  Target: ATXN2; (-) strand; PAM type: NRG; PAM sequence: CGG
cgagaccatcctggctaaca

SEQ ID NO: 31618 - DNA, 20 bp, Artificial Sequence
  Description of Artificial Sequence: Synthetic oligonucleotide
  Target: ATXN2; (-) strand; PAM type: NRG; PAM sequence: TGG
tcaggagatcgagaccatcc

SEQ ID NO: 31619 - DNA, 20 bp, Artificial Sequence
  Description of Artificial Sequence: Synthetic oligonucleotide
  Target: ATXN2; (-) strand; PAM type: NRG; PAM sequence: GAG
gatcacaaggtcaggagatc

SEQ ID NO: 31620 - DNA, 20 bp, Artificial Sequence
  Description of Artificial Sequence: Synthetic oligonucleotide
  Target: ATXN2; (-) strand; PAM type: NRG; PAM sequence: GAG
cgggtggatcacaaggtcag

SEQ ID NO: 31621 - DNA, 20 bp, Artificial Sequence
  Description of Artificial Sequence: Synthetic oligonucleotide
  Target: ATXN2; (-) strand; PAM type: NRG; PAM sequence: AGG
ggcgggtggatcacaaggtc

SEQ ID NO: 31622 - DNA, 20 bp, Artificial Sequence
  Description of Artificial Sequence: Synthetic oligonucleotide
  Target: ATXN2; (-) strand; PAM type: NRG; PAM sequence: CAG
aggcgggtggatcacaaggt

SEQ ID NO: 31623 - DNA, 20 bp, Artificial Sequence
  Description of Artificial Sequence: Synthetic oligonucleotide
  Target: ATXN2; (-) strand; PAM type: NRG; PAM sequence: AGG
gccgaggcgggtggatcaca

SEQ ID NO: 31624 - DNA, 20 bp, Artificial Sequence
  Description of Artificial Sequence: Synthetic oligonucleotide
  Target: ATXN2; (-) strand; PAM type: NRG; PAM sequence: AAG
ggccgaggcgggtggatcac

SEQ ID NO: 31625 - DNA, 20 bp, Artificial Sequence
  Description of Artificial Sequence: Synthetic oligonucleotide
  Target: ATXN2; (-) strand; PAM type: NRG; PAM sequence: TGG
ctttgggaggccgaggcggg

SEQ ID NO: 31626 - DNA, 20 bp, Artificial Sequence
  Description of Artificial Sequence: Synthetic oligonucleotide
  Target: ATXN2; (-) strand; PAM type: NRG; PAM sequence: GGG
gcactttgggaggccgaggc

SEQ ID NO: 31627 - DNA, 20 bp, Artificial Sequence
  Description of Artificial Sequence: Synthetic oligonucleotide
  Target: ATXN2; (-) strand; PAM type: NRG; PAM sequence: CGG
agcactttgggaggccgagg

SEQ ID NO: 31628 - DNA, 20 bp, Artificial Sequence
  Description of Artificial Sequence: Synthetic oligonucleotide
  Target: ATXN2; (-) strand; PAM type: NRG; PAM sequence: AGG
cccagcactttgggaggccg

SEQ ID NO: 31629 - DNA, 20 bp, Artificial Sequence
  Description of Artificial Sequence: Synthetic oligonucleotide
  Target: ATXN2; (-) strand; PAM type: NRG; PAM sequence: GAG
tcccagcactttgggaggcc

SEQ ID NO: 31630 - DNA, 20 bp, Artificial Sequence
  Description of Artificial Sequence: Synthetic oligonucleotide
  Target: ATXN2; (-) strand; PAM type: NRG; PAM sequence: AGG
tgtaatcccagcactttggg

SEQ ID NO: 31631 - DNA, 20 bp, Artificial Sequence
  Description of Artificial Sequence: Synthetic oligonucleotide
  Target: ATXN2; (-) strand; PAM type: NRG; PAM sequence: GAG
ctgtaatcccagcactttgg

SEQ ID NO: 31632 - DNA, 20 bp, Artificial Sequence
  Description of Artificial Sequence: Synthetic oligonucleotide
  Target: ATXN2; (-) strand; PAM type: NRG; PAM sequence: GGG
gcctgtaatcccagcacttt

SEQ ID NO: 31633 - DNA, 20 bp, Artificial Sequence
  Description of Artificial Sequence: Synthetic oligonucleotide
  Target: ATXN2; (-) strand; PAM type: NRG; PAM sequence: TGG
tgcctgtaatcccagcactt

SEQ ID NO: 31634 - DNA, 20 bp, Artificial Sequence
  Description of Artificial Sequence: Synthetic oligonucleotide
  Target: ATXN2; (-) strand; PAM type: NRG; PAM sequence: CAG
gtggctcatgcctgtaatcc

SEQ ID NO: 31635 - DNA, 20 bp, Artificial Sequence
  Description of Artificial Sequence: Synthetic oligonucleotide
  Target: ATXN2; (-) strand; PAM type: NRG; PAM sequence: TGG
aacatgcgggccgggcccgg

SEQ ID NO: 31636 - DNA, 20 bp, Artificial Sequence
  Description of Artificial Sequence: Synthetic oligonucleotide
  Target: ATXN2; (-) strand; PAM type: NRG; PAM sequence: CGG
tgaaacatgcgggccgggcc

SEQ ID NO: 31637 - DNA, 20 bp, Artificial Sequence
  Description of Artificial Sequence: Synthetic oligonucleotide
  Target: ATXN2; (-) strand; PAM type: NRG; PAM sequence: GGG
ttaattgaaacatgcgggcc

SEQ ID NO: 31638 - DNA, 20 bp, Artificial Sequence
  Description of Artificial Sequence: Synthetic oligonucleotide
  Target: ATXN2; (-) strand; PAM type: NRG; PAM sequence: CGG
gttaattgaaacatgcgggc

SEQ ID NO: 31639 - DNA, 20 bp, Artificial Sequence
  Description of Artificial Sequence: Synthetic oligonucleotide
  Target: ATXN2; (-) strand; PAM type: NRG; PAM sequence: GGG
tgttgttaattgaaacatgc

SEQ ID NO: 31640 - DNA, 20 bp, Artificial Sequence
  Description of Artificial Sequence: Synthetic oligonucleotide
  Target: ATXN2; (-) strand; PAM type: NRG; PAM sequence: CGG
ctgttgttaattgaaacatg

SEQ ID NO: 31641 - DNA, 20 bp, Artificial Sequence
  Description of Artificial Sequence: Synthetic oligonucleotide
  Target: ATXN2; (-) strand; PAM type: NRG; PAM sequence: AGG
actggttgatcattgtatat

SEQ ID NO: 31642 - DNA, 20 bp, Artificial Sequence
  Description of Artificial Sequence: Synthetic oligonucleotide
  Target: ATXN2; (-) strand; PAM type: NRG; PAM sequence: TAG
tactggttgatcattgtata

SEQ ID NO: 31643 - DNA, 20 bp, Artificial Sequence
  Description of Artificial Sequence: Synthetic oligonucleotide
  Target: ATXN2; (-) strand; PAM type: NRG; PAM sequence: TGG
gtaaatttaccttaacttac

SEQ ID NO: 31644 - DNA, 20 bp, Artificial Sequence
  Description of Artificial Sequence: Synthetic oligonucleotide
  Target: ATXN2; (-) strand; PAM type: NRG; PAM sequence: GAG
tcaaaaatatctttctttaa

SEQ ID NO: 31645 - DNA, 20 bp, Artificial Sequence
  Description of Artificial Sequence: Synthetic oligonucleotide
  Target: ATXN2; (-) strand; PAM type: NRG; PAM sequence: AAG
ggtcaaaaatatctttcttt

SEQ ID NO: 31646 - DNA, 20 bp, Artificial Sequence
  Description of Artificial Sequence: Synthetic oligonucleotide
  Target: ATXN2; (-) strand; PAM type: NRG; PAM sequence: TGG
caggtgtgagccatcacgcc

SEQ ID NO: 31647 - DNA, 20 bp, Artificial Sequence
  Description of Artificial Sequence: Synthetic oligonucleotide
  Target: ATXN2; (-) strand; PAM type: NRG; PAM sequence: GAG
agtgctgggattacaggtgt

SEQ ID NO: 31648 - DNA, 20 bp, Artificial Sequence
  Description of Artificial Sequence: Synthetic oligonucleotide
  Target: ATXN2; (-) strand; PAM type: NRG; PAM sequence: AGG
tcccaaagtgctgggattac

SEQ ID NO: 31649 - DNA, 20 bp, Artificial Sequence
  Description of Artificial Sequence: Synthetic oligonucleotide
  Target: ATXN2; (-) strand; PAM type: NRG; PAM sequence: CAG
ctcccaaagtgctgggatta

SEQ ID NO: 31650 - DNA, 20 bp, Artificial Sequence
  Description of Artificial Sequence: Synthetic oligonucleotide
  Target: ATXN2; (-) strand; PAM type: NRG; PAM sequence: GGG
ccttgacctcccaaagtgct

SEQ ID NO: 31651 - DNA, 20 bp, Artificial Sequence
  Description of Artificial Sequence: Synthetic oligonucleotide
  Target: ATXN2; (-) strand; PAM type: NRG; PAM sequence: TGG
accttgacctcccaaagtgc

SEQ ID NO: 31652 - DNA, 20 bp, Artificial Sequence
  Description of Artificial Sequence: Synthetic oligonucleotide
  Target: ATXN2; (-) strand; PAM type: NRG; PAM sequence: AAG
ctgcccaccttgacctccca

SEQ ID NO: 31653 - DNA, 20 bp, Artificial Sequence
  Description of Artificial Sequence: Synthetic oligonucleotide
  Target: ATXN2; (-) strand; PAM type: NRG; PAM sequence: AAG
gacttttaacctctgacctc

SEQ ID NO: 31654 - DNA, 20 bp, Artificial Sequence
  Description of Artificial Sequence: Synthetic oligonucleotide
  Target: ATXN2; (-) strand; PAM type: NRG; PAM sequence: AAG
gttcactgtggttaggagtt

SEQ ID NO: 31655 - DNA, 20 bp, Artificial Sequence
  Description of Artificial Sequence: Synthetic oligonucleotide
  Target: ATXN2; (-) strand; PAM type: NRG; PAM sequence: GAG
agaaagttcactgtggttag

SEQ ID NO: 31656 - DNA, 20 bp, Artificial Sequence
  Description of Artificial Sequence: Synthetic oligonucleotide
  Target: ATXN2; (-) strand; PAM type: NRG; PAM sequence: AGG
acagaaagttcactgtggtt

SEQ ID NO: 31657 - DNA, 20 bp, Artificial Sequence
  Description of Artificial Sequence: Synthetic oligonucleotide
  Target: ATXN2; (-) strand; PAM type: NRG; PAM sequence: TAG
gacagaaagttcactgtggt

SEQ ID NO: 31658 - DNA, 20 bp, Artificial Sequence
  Description of Artificial Sequence: Synthetic oligonucleotide
  Target: ATXN2; (-) strand; PAM type: NRG; PAM sequence: TGG
tgcagacagaaagttcactg

SEQ ID NO: 31659 - DNA, 20 bp, Artificial Sequence
  Description of Artificial Sequence: Synthetic oligonucleotide
  Target: ATXN2; (-) strand; PAM type: NRG; PAM sequence: AAG
tgctcttttctgcagacaga

SEQ ID NO: 31660 - DNA, 20 bp, Artificial Sequence
  Description of Artificial Sequence: Synthetic oligonucleotide
  Target: ATXN2; (-) strand; PAM type: NRG; PAM sequence: CAG
ccaatgctcttttctgcaga

SEQ ID NO: 31661 - DNA, 20 bp, Artificial Sequence
  Description of Artificial Sequence: Synthetic oligonucleotide
  Target: ATXN2; (-) strand; PAM type: NRG; PAM sequence: CAG
ttgaccaatgctcttttctg

SEQ ID NO: 31662 - DNA, 20 bp, Artificial Sequence
  Description of Artificial Sequence: Synthetic oligonucleotide
  Target: ATXN2; (-) strand; PAM type: NRG; PAM sequence: TAG
tgggtgcacgccatcatgcc

SEQ ID NO: 31663 - DNA, 20 bp, Artificial Sequence
  Description of Artificial Sequence: Synthetic oligonucleotide
  Target: ATXN2; (-) strand; PAM type: NRG; PAM sequence: GGG
tcccacgtagctgggactgt

SEQ ID NO: 31664 - DNA, 20 bp, Artificial Sequence
  Description of Artificial Sequence: Synthetic oligonucleotide
  Target: ATXN2; (-) strand; PAM type: NRG; PAM sequence: TGG
ttcccacgtagctgggactg

SEQ ID NO: 31665 - DNA, 20 bp, Artificial Sequence
  Description of Artificial Sequence: Synthetic oligonucleotide
  Target: ATXN2; (-) strand; PAM type: NRG; PAM sequence: GGG
cctcagcttcccacgtagct

SEQ ID NO: 31666 - DNA, 20 bp, Artificial Sequence
  Description of Artificial Sequence: Synthetic oligonucleotide
  Target: ATXN2; (-) strand; PAM type: NRG; PAM sequence: TGG
acctcagcttcccacgtagc

SEQ ID NO: 31667 - DNA, 20 bp, Artificial Sequence
  Description of Artificial Sequence: Synthetic oligonucleotide
  Target: ATXN2; (-) strand; PAM type: NRG; PAM sequence: TAG
tcccacctcagcttcccacg

SEQ ID NO: 31668 - DNA, 20 bp, Artificial Sequence
  Description of Artificial Sequence: Synthetic oligonucleotide
  Target: ATXN2; (-) strand; PAM type: NRG; PAM sequence: CAG
ctccagcaatcctcccacct

SEQ ID NO: 31669 - DNA, 20 bp, Artificial Sequence
  Description of Artificial Sequence: Synthetic oligonucleotide
  Target: ATXN2; (-) strand; PAM type: NRG; PAM sequence: CAG
ggcgttgaactcctgggctc

SEQ ID NO: 31670 - DNA, 20 bp, Artificial Sequence
  Description of Artificial Sequence: Synthetic oligonucleotide
  Target: ATXN2; (-) strand; PAM type: NRG; PAM sequence: GGG
gcccagggcgttgaactcct

SEQ ID NO: 31671 - DNA, 20 bp, Artificial Sequence
  Description of Artificial Sequence: Synthetic oligonucleotide
  Target: ATXN2; (-) strand; PAM type: NRG; PAM sequence: TGG
tgcccagggcgttgaactcc

SEQ ID NO: 31672 - DNA, 20 bp, Artificial Sequence
  Description of Artificial Sequence: Synthetic oligonucleotide
  Target: ATXN2; (-) strand; PAM type: NRG; PAM sequence: GGG
aggtcttgctgtattgccca

SEQ ID NO: 31673 - DNA, 20 bp, Artificial Sequence
  Description of Artificial Sequence: Synthetic oligonucleotide
  Target: ATXN2; (-) strand; PAM type: NRG; PAM sequence: AGG
gaggtcttgctgtattgccc

SEQ ID NO: 31674 - DNA, 20 bp, Artificial Sequence
  Description of Artificial Sequence: Synthetic oligonucleotide
  Target: ATXN2; (-) strand; PAM type: NRG; PAM sequence: CAG
tgaggtcttgctgtattgcc

SEQ ID NO: 31675 - DNA, 20 bp, Artificial Sequence
  Description of Artificial Sequence: Synthetic oligonucleotide
  Target: ATXN2; (-) strand; PAM type: NRG; PAM sequence: AGG
accgcacctggccagagatg

SEQ ID NO: 31676 - DNA, 20 bp, Artificial Sequence
  Description of Artificial Sequence: Synthetic oligonucleotide
  Target: ATXN2; (-) strand; PAM type: NRG; PAM sequence: GAG
caccgcacctggccagagat

SEQ ID NO: 31677 - DNA, 20 bp, Artificial Sequence
  Description of Artificial Sequence: Synthetic oligonucleotide
  Target: ATXN2; (-) strand; PAM type: NRG; PAM sequence: GAG
tgagccaccgcacctggcca

SEQ ID NO: 31678 - DNA, 20 bp, Artificial Sequence
  Description of Artificial Sequence: Synthetic oligonucleotide
  Target: ATXN2; (-) strand; PAM type: NRG; PAM sequence: CAG
tgtgagccaccgcacctggc

SEQ ID NO: 31679 - DNA, 20 bp, Artificial Sequence
  Description of Artificial Sequence: Synthetic oligonucleotide
  Target: ATXN2; (-) strand; PAM type: NRG; PAM sequence: TGG
cagatgtgagccaccgcacc

SEQ ID NO: 31680 - DNA, 20 bp, Artificial Sequence
  Description of Artificial Sequence: Synthetic oligonucleotide
  Target: ATXN2; (-) strand; PAM type: NRG; PAM sequence: GAG
agtgctgggattacagatgt

SEQ ID NO: 31681 - DNA, 20 bp, Artificial Sequence
  Description of Artificial Sequence: Synthetic oligonucleotide
  Target: ATXN2; (-) strand; PAM type: NRG; PAM sequence: CAG
ctcccaaagtgctgggatta

SEQ ID NO: 31682 - DNA, 20 bp, Artificial Sequence
  Description of Artificial Sequence: Synthetic oligonucleotide
  Target: ATXN2; (-) strand; PAM type: NRG; PAM sequence: GGG
ccgtggcctcccaaagtgct

SEQ ID NO: 31683 - DNA, 20 bp, Artificial Sequence
  Description of Artificial Sequence: Synthetic oligonucleotide
  Target: ATXN2; (-) strand; PAM type: NRG; PAM sequence: TGG
gccgtggcctcccaaagtgc

SEQ ID NO: 31684 - DNA, 20 bp, Artificial Sequence
  Description of Artificial Sequence: Synthetic oligonucleotide
  Target: ATXN2; (-) strand; PAM type: NRG; PAM sequence: AAG
ccacccgccgtggcctccca

SEQ ID NO: 31685 - DNA, 20 bp, Artificial Sequence
  Description of Artificial Sequence: Synthetic oligonucleotide
  Target: ATXN2; (-) strand; PAM type: NRG; PAM sequence: TGG
ctcaggtgatccacccgccg

SEQ ID NO: 31686 - DNA, 20 bp, Artificial Sequence
  Description of Artificial Sequence: Synthetic oligonucleotide
  Target: ATXN2; (-) strand; PAM type: NRG; PAM sequence: AGG
ggtctcgaactcctgacctc

SEQ ID NO: 31687 - DNA, 20 bp, Artificial Sequence
  Description of Artificial Sequence: Synthetic oligonucleotide
  Target: ATXN2; (-) strand; PAM type: NRG; PAM sequence: CAG
tggtctcgaactcctgacct

SEQ ID NO: 31688 - DNA, 20 bp, Artificial Sequence
  Description of Artificial Sequence: Synthetic oligonucleotide
  Target: ATXN2; (-) strand; PAM type: NRG; PAM sequence: TGG
tttcaccatgttggccaggc

SEQ ID NO: 31689 - DNA, 20 bp, Artificial Sequence
  Description of Artificial Sequence: Synthetic oligonucleotide
  Target: ATXN2; (-) strand; PAM type: NRG; PAM sequence: AGG
ggggtttcaccatgttggcc

SEQ ID NO: 31690 - DNA, 20 bp, Artificial Sequence
  Description of Artificial Sequence: Synthetic oligonucleotide
  Target: ATXN2; (-) strand; PAM type: NRG; PAM sequence: CAG
gggggtttcaccatgttggc

SEQ ID NO: 31691 - DNA, 20 bp, Artificial Sequence
  Description of Artificial Sequence: Synthetic oligonucleotide
  Target: ATXN2; (-) strand; PAM type: NRG; PAM sequence: TGG
agacgggggtttcaccatgt

SEQ ID NO: 31692 - DNA, 20 bp, Artificial Sequence
  Description of Artificial Sequence: Synthetic oligonucleotide
  Target: ATXN2; (-) strand; PAM type: NRG; PAM sequence: GGG
tgtatttttagtagagacgg

SEQ ID NO: 31693 - DNA, 20 bp, Artificial Sequence
  Description of Artificial Sequence: Synthetic oligonucleotide
  Target: ATXN2; (-) strand; PAM type: NRG; PAM sequence: GGG
ttgtatttttagtagagacg

SEQ ID NO: 31694 - DNA, 20 bp, Artificial Sequence
  Description of Artificial Sequence: Synthetic oligonucleotide
  Target: ATXN2; (-) strand; PAM type: NRG; PAM sequence: GGG
tttgtatttttagtagagac

SEQ ID NO: 31695 - DNA, 20 bp, Artificial Sequence
  Description of Artificial Sequence: Synthetic oligonucleotide
  Target: ATXN2; (-) strand; PAM type: NRG; PAM sequence: CGG
ttttgtatttttagtagaga

SEQ ID NO: 31696 - DNA, 20 bp, Artificial Sequence
  Description of Artificial Sequence: Synthetic oligonucleotide
  Target: ATXN2; (-) strand; PAM type: NRG; PAM sequence: GAG
taatttttgtatttttagta

SEQ ID NO: 31697 - DNA, 20 bp, Artificial Sequence
  Description of Artificial Sequence: Synthetic oligonucleotide
  Target: ATXN2; (-) strand; PAM type: NRG; PAM sequence: TAG
gctaatttttgtatttttag

SEQ ID NO: 31698 - DNA, 20 bp, Artificial Sequence
  Description of Artificial Sequence: Synthetic oligonucleotide
  Target: ATXN2; (-) strand; PAM type: NRG; PAM sequence: TAG
ctggctaatttttgtatttt

SEQ ID NO: 31699 - DNA, 20 bp, Artificial Sequence
  Description of Artificial Sequence: Synthetic oligonucleotide
  Target: ATXN2; (-) strand; PAM type: NRG; PAM sequence: TGG
caggtgcgtgccaccacacc

SEQ ID NO: 31700 - DNA, 20 bp, Artificial Sequence
  Description of Artificial Sequence: Synthetic oligonucleotide
  Target: ATXN2; (-) strand; PAM type: NRG; PAM sequence: AGG
tcctgaatagctgggattac

SEQ ID NO: 31701 - DNA, 20 bp, Artificial Sequence
  Description of Artificial Sequence: Synthetic oligonucleotide
  Target: ATXN2; (-) strand; PAM type: NRG; PAM sequence: CAG
ctcctgaatagctgggatta

SEQ ID NO: 31702 - DNA, 20 bp, Artificial Sequence
  Description of Artificial Sequence: Synthetic oligonucleotide
  Target: ATXN2; (-) strand; PAM type: NRG; PAM sequence: GGG
cctcaacctcctgaatagct

SEQ ID NO: 31703 - DNA, 20 bp, Artificial Sequence
  Description of Artificial Sequence: Synthetic oligonucleotide
  Target: ATXN2; (-) strand; PAM type: NRG; PAM sequence: TGG
gcctcaacctcctgaatagc

SEQ ID NO: 31704 - DNA, 20 bp, Artificial Sequence
  Description of Artificial Sequence: Synthetic oligonucleotide
  Target: ATXN2; (-) strand; PAM type: NRG; PAM sequence: TAG
tcctgcctcaacctcctgaa

SEQ ID NO: 31705 - DNA, 20 bp, Artificial Sequence
  Description of Artificial Sequence: Synthetic oligonucleotide
  Target: ATXN2; (-) strand; PAM type: NRG; PAM sequence: AAG
agtctctgccttctgggttc

SEQ ID NO: 31706 - DNA, 20 bp, Artificial Sequence
  Description of Artificial Sequence: Synthetic oligonucleotide
  Target: ATXN2; (-) strand; PAM type: NRG; PAM sequence: GGG
cactgcagtctctgccttct

SEQ ID NO: 31707 - DNA, 20 bp, Artificial Sequence
  Description of Artificial Sequence: Synthetic oligonucleotide
  Target: ATXN2; (-) strand; PAM type: NRG; PAM sequence: TGG
tcactgcagtctctgccttc

SEQ ID NO: 31708 - DNA, 20 bp, Artificial Sequence
  Description of Artificial Sequence: Synthetic oligonucleotide
  Target: ATXN2; (-) strand; PAM type: NRG; PAM sequence: CAG
ggcgtgatgttggctcactg

SEQ ID NO: 31709 - DNA, 20 bp, Artificial Sequence
  Description of Artificial Sequence: Synthetic oligonucleotide
  Target: ATXN2; (-) strand; PAM type: NRG; PAM sequence: TGG
ggagtgtagtggcgtgatgt

SEQ ID NO: 31710 - DNA, 20 bp, Artificial Sequence
  Description of Artificial Sequence: Synthetic oligonucleotide
  Target: ATXN2; (-) strand; PAM type: NRG; PAM sequence: TGG
tcgcccaggctggagtgtag

SEQ ID NO: 31711 - DNA, 20 bp, Artificial Sequence
  Description of Artificial Sequence: Synthetic oligonucleotide
  Target: ATXN2; (-) strand; PAM type: NRG; PAM sequence: TAG
ctatcgcccaggctggagtg

SEQ ID NO: 31712 - DNA, 20 bp, Artificial Sequence
  Description of Artificial Sequence: Synthetic oligonucleotide
  Target: ATXN2; (-) strand; PAM type: NRG; PAM sequence: GAG
tcgctctatcgcccaggctg

SEQ ID NO: 31713 - DNA, 20 bp, Artificial Sequence
  Description of Artificial Sequence: Synthetic oligonucleotide
  Target: ATXN2; (-) strand; PAM type: NRG; PAM sequence: TGG
tctcgctctatcgcccaggc

SEQ ID NO: 31714 - DNA, 20 bp, Artificial Sequence
  Description of Artificial Sequence: Synthetic oligonucleotide
  Target: ATXN2; (-) strand; PAM type: NRG; PAM sequence: AGG
ggagtctcgctctatcgccc

SEQ ID NO: 31715 - DNA, 20 bp, Artificial Sequence
  Description of Artificial Sequence: Synthetic oligonucleotide
  Target: ATXN2; (-) strand; PAM type: NRG; PAM sequence: CAG
tggagtctcgctctatcgcc

SEQ ID NO: 31716 - DNA, 20 bp, Artificial Sequence
  Description of Artificial Sequence: Synthetic oligonucleotide
  Target: ATXN2; (-) strand; PAM type: NRG; PAM sequence: GAG
ttattttgttttttgagatg

SEQ ID NO: 31717 - DNA, 20 bp, Artificial Sequence
  Description of Artificial Sequence: Synthetic oligonucleotide
  Target: ATXN2; (-) strand; PAM type: NRG; PAM sequence: TGG
tcttattttgttttttgaga

SEQ ID NO: 31718 - DNA, 20 bp, Artificial Sequence
  Description of Artificial Sequence: Synthetic oligonucleotide
  Target: ATXN2; (-) strand; PAM type: NRG; PAM sequence: GAG
tctttcttattttgtttttt

SEQ ID NO: 31719 - DNA, 20 bp, Artificial Sequence
  Description of Artificial Sequence: Synthetic oligonucleotide
  Target: ATXN2; (-) strand; PAM type: NRG; PAM sequence: AGG
tagacaaacactgaacagtt

SEQ ID NO: 31720 - DNA, 20 bp, Artificial Sequence
  Description of Artificial Sequence: Synthetic oligonucleotide
  Target: ATXN2; (-) strand; PAM type: NRG; PAM sequence: TAG
gtagacaaacactgaacagt

SEQ ID NO: 31721 - DNA, 20 bp, Artificial Sequence
  Description of Artificial Sequence: Synthetic oligonucleotide
  Target: ATXN2; (-) strand; PAM type: NRG; PAM sequence: CAG
tactgtagacaaacactgaa

SEQ ID NO: 31722 - DNA, 20 bp, Artificial Sequence
  Description of Artificial Sequence: Synthetic oligonucleotide
  Target: ATXN2; (-) strand; PAM type: NRG; PAM sequence: TAG
gacattactgtatgctactg

SEQ ID NO: 31723 - DNA, 20 bp, Artificial Sequence
  Description of Artificial Sequence: Synthetic oligonucleotide
  Target: ATXN2; (-) strand; PAM type: NRG; PAM sequence: AGG
gtgtgtgaatgtgcaggcct

SEQ ID NO: 31724 - DNA, 20 bp, Artificial Sequence
  Description of Artificial Sequence: Synthetic oligonucleotide
  Target: ATXN2; (-) strand; PAM type: NRG; PAM sequence: TAG
ggtgtgtgaatgtgcaggcc

SEQ ID NO: 31725 - DNA, 20 bp, Artificial Sequence
  Description of Artificial Sequence: Synthetic oligonucleotide
  Target: ATXN2; (-) strand; PAM type: NRG; PAM sequence: AGG
tcagtggtgtgtgaatgtgc

SEQ ID NO: 31726 - DNA, 20 bp, Artificial Sequence
  Description of Artificial Sequence: Synthetic oligonucleotide
  Target: ATXN2; (-) strand; PAM type: NRG; PAM sequence: CAG
atcagtggtgtgtgaatgtg

SEQ ID NO: 31727 - DNA, 20 bp, Artificial Sequence
  Description of Artificial Sequence: Synthetic oligonucleotide
  Target: ATXN2; (-) strand; PAM type: NRG; PAM sequence: TGG
tgggatgagtcatttatcag

SEQ ID NO: 31728 - DNA, 20 bp, Artificial Sequence
  Description of Artificial Sequence: Synthetic oligonucleotide
  Target: ATXN2; (-) strand; PAM type: NRG; PAM sequence: CAG
gcttgggatgagtcatttat

SEQ ID NO: 31729 - DNA, 20 bp, Artificial Sequence
  Description of Artificial Sequence: Synthetic oligonucleotide
  Target: ATXN2; (-) strand; PAM type: NRG; PAM sequence: GAG
gacaggaagttgcttgggat

SEQ ID NO: 31730 - DNA, 20 bp, Artificial Sequence
  Description of Artificial Sequence: Synthetic oligonucleotide
  Target: ATXN2; (-) strand; PAM type: NRG; PAM sequence: GGG
tgcaggacaggaagttgctt

SEQ ID NO: 31731 - DNA, 20 bp, Artificial Sequence
  Description of Artificial Sequence: Synthetic oligonucleotide
  Target: ATXN2; (-) strand; PAM type: NRG; PAM sequence: TGG
ttgcaggacaggaagttgct

SEQ ID NO: 31732 - DNA, 20 bp, Artificial Sequence
  Description of Artificial Sequence: Synthetic oligonucleotide
  Target: ATXN2; (-) strand; PAM type: NRG; PAM sequence: AAG
aatggagcttgcaggacagg

SEQ ID NO: 31733 - DNA, 20 bp, Artificial Sequence
  Description of Artificial Sequence: Synthetic oligonucleotide
  Target: ATXN2; (-) strand; PAM type: NRG; PAM sequence: AGG
atgaatggagcttgcaggac

SEQ ID NO: 31734 - DNA, 20 bp, Artificial Sequence
  Description of Artificial Sequence: Synthetic oligonucleotide
  Target: ATXN2; (-) strand; PAM type: NRG; PAM sequence: CAG
catgaatggagcttgcagga

SEQ ID NO: 31735 - DNA, 20 bp, Artificial Sequence
  Description of Artificial Sequence: Synthetic oligonucleotide
  Target: ATXN2; (-) strand; PAM type: NRG; PAM sequence: AGG
ttaccatgaatggagcttgc

SEQ ID NO: 31736 - DNA, 20 bp, Artificial Sequence
  Description of Artificial Sequence: Synthetic oligonucleotide
  Target: ATXN2; (-) strand; PAM type: NRG; PAM sequence: CAG
cttaccatgaatggagcttg

SEQ ID NO: 31737 - DNA, 20 bp, Artificial Sequence
  Description of Artificial Sequence: Synthetic oligonucleotide
  Target: ATXN2; (-) strand; PAM type: NRG; PAM sequence: GAG
taggtcacttaccatgaatg

SEQ ID NO: 31738 - DNA, 20 bp, Artificial Sequence
  Description of Artificial Sequence: Synthetic oligonucleotide
  Target: ATXN2; (-) strand; PAM type: NRG; PAM sequence: TGG
aataggtcacttaccatgaa

SEQ ID NO: 31739 - DNA, 20 bp, Artificial Sequence
  Description of Artificial Sequence: Synthetic oligonucleotide
  Target: ATXN2; (-) strand; PAM type: NRG; PAM sequence: AGG
taaaagtggtatatctgaat

SEQ ID NO: 31740 - DNA, 20 bp, Artificial Sequence
  Description of Artificial Sequence: Synthetic oligonucleotide
  Target: ATXN2; (-) strand; PAM type: NRG; PAM sequence: TAG
ataaaagtggtatatctgaa

SEQ ID NO: 31741 - DNA, 20 bp, Artificial Sequence
  Description of Artificial Sequence: Synthetic oligonucleotide
  Target: ATXN2; (-) strand; PAM type: NRG; PAM sequence: TGG
tacagcgtaaaagataaaag

SEQ ID NO: 31742 - DNA, 20 bp, Artificial Sequence
  Description of Artificial Sequence: Synthetic oligonucleotide
  Target: ATXN2; (-) strand; PAM type: NRG; PAM sequence: AAG
aaatacagcgtaaaagataa

SEQ ID NO: 31743 - DNA, 20 bp, Artificial Sequence
  Description of Artificial Sequence: Synthetic oligonucleotide
  Target: ATXN2; (-) strand; PAM type: NRG; PAM sequence: AAG
tgagtaaaaatacagcgtaa

SEQ ID NO: 31744 - DNA, 20 bp, Artificial Sequence
  Description of Artificial Sequence: Synthetic oligonucleotide
  Target: ATXN2; (-) strand; PAM type: NRG; PAM sequence: CAG
agaaaaggtgagtaaaaata

SEQ ID NO: 31745 - DNA, 20 bp, Artificial Sequence
  Description of Artificial Sequence: Synthetic oligonucleotide
  Target: ATXN2; (-) strand; PAM type: NRG; PAM sequence: GAG
tatctaaacatagaaaaggt

SEQ ID NO: 31746 - DNA, 20 bp, Artificial Sequence
  Description of Artificial Sequence: Synthetic oligonucleotide
  Target: ATXN2; (-) strand; PAM type: NRG; PAM sequence: AGG
aacatatctaaacatagaaa

SEQ ID NO: 31747 - DNA, 20 bp, Artificial Sequence
  Description of Artificial Sequence: Synthetic oligonucleotide
  Target: ATXN2; (-) strand; PAM type: NRG; PAM sequence: AAG
aaacatatctaaacatagaa

SEQ ID NO: 31748 - DNA, 20 bp, Artificial Sequence
  Description of Artificial Sequence: Synthetic oligonucleotide
  Target: ATXN2; (-) strand; PAM type: NRG; PAM sequence: TAG
aatctaaacatatctaaaca

SEQ ID NO: 31749 - DNA, 20 bp, Artificial Sequence
  Description of Artificial Sequence: Synthetic oligonucleotide
  Target: ATXN2; (-) strand; PAM type: NRG; PAM sequence: AAG
ggcagatgtaacataatgtt

SEQ ID NO: 31750 - DNA, 20 bp, Artificial Sequence
  Description of Artificial Sequence: Synthetic oligonucleotide
  Target: ATXN2; (-) strand; PAM type: NRG; PAM sequence: CAG
gcggtactgaacactgttgg

SEQ ID NO: 31751 - DNA, 20 bp, Artificial Sequence
  Description of Artificial Sequence: Synthetic oligonucleotide
  Target: ATXN2; (-) strand; PAM type: NRG; PAM sequence: TGG
gttgcggtactgaacactgt

SEQ ID NO: 31752 - DNA, 20 bp, Artificial Sequence
  Description of Artificial Sequence: Synthetic oligonucleotide
  Target: ATXN2; (-) strand; PAM type: NRG; PAM sequence: CGG
caaatctgtatagcatgttg

SEQ ID NO: 31753 - DNA, 20 bp, Artificial Sequence
  Description of Artificial Sequence: Synthetic oligonucleotide
  Target: ATXN2; (-) strand; PAM type: NRG; PAM sequence: TAG
tcttaggctacaaatctgta

SEQ ID NO: 31754 - DNA, 20 bp, Artificial Sequence
  Description of Artificial Sequence: Synthetic oligonucleotide
  Target: ATXN2; (-) strand; PAM type: NRG; PAM sequence: AGG
tcgtacagagtattactctt

SEQ ID NO: 31755 - DNA, 20 bp, Artificial Sequence
  Description of Artificial Sequence: Synthetic oligonucleotide
  Target: ATXN2; (-) strand; PAM type: NRG; PAM sequence: TAG
gtcgtacagagtattactct

SEQ ID NO: 31756 - DNA, 20 bp, Artificial Sequence
  Description of Artificial Sequence: Synthetic oligonucleotide
  Target: ATXN2; (-) strand; PAM type: NRG; PAM sequence: GAG
gacacataggctgtcgtaca

SEQ ID NO: 31757 - DNA, 20 bp, Artificial Sequence
  Description of Artificial Sequence: Synthetic oligonucleotide
  Target: ATXN2; (-) strand; PAM type: NRG; PAM sequence: CAG
tagacacataggctgtcgta

SEQ ID NO: 31758 - DNA, 20 bp, Artificial Sequence
  Description of Artificial Sequence: Synthetic oligonucleotide
  Target: ATXN2; (-) strand; PAM type: NRG; PAM sequence: AGG
ggtatacctactagacacat

SEQ ID NO: 31759 - DNA, 20 bp, Artificial Sequence
  Description of Artificial Sequence: Synthetic oligonucleotide
  Target: ATXN2; (-) strand; PAM type: NRG; PAM sequence: TAG
tggtatacctactagacaca

SEQ ID NO: 31760 - DNA, 20 bp, Artificial Sequence
  Description of Artificial Sequence: Synthetic oligonucleotide
  Target: ATXN2; (-) strand; PAM type: NRG; PAM sequence: TAG
agcctagatggtatacctac

SEQ ID NO: 31761 - DNA, 20 bp, Artificial Sequence
  Description of Artificial Sequence: Synthetic oligonucleotide
  Target: ATXN2; (-) strand; PAM type: NRG; PAM sequence: TGG
tttacttacacaagcctaga

SEQ ID NO: 31762 - DNA, 20 bp, Artificial Sequence
  Description of Artificial Sequence: Synthetic oligonucleotide
  Target: ATXN2; (-) strand; PAM type: NRG; PAM sequence: TAG
agagtttacttacacaagcc

SEQ ID NO: 31763 - DNA, 20 bp, Artificial Sequence
  Description of Artificial Sequence: Synthetic oligonucleotide
  Target: ATXN2; (-) strand; PAM type: NRG; PAM sequence: AAG
aatatagagtttacttacac

SEQ ID NO: 31764 - DNA, 20 bp, Artificial Sequence
  Description of Artificial Sequence: Synthetic oligonucleotide
  Target: ATXN2; (-) strand; PAM type: NRG; PAM sequence: GAG
cttatcattgtacaaatata

SEQ ID NO: 31765 - DNA, 20 bp, Artificial Sequence
  Description of Artificial Sequence: Synthetic oligonucleotide
  Target: ATXN2; (-) strand; PAM type: NRG; PAM sequence: TAG
atcttatcattgtacaaata

SEQ ID NO: 31766 - DNA, 20 bp, Artificial Sequence
  Description of Artificial Sequence: Synthetic oligonucleotide
  Target: ATXN2; (-) strand; PAM type: NRG; PAM sequence: CGG
tgtgttttgagaaatttttt

SEQ ID NO: 31767 - DNA, 20 bp, Artificial Sequence
  Description of Artificial Sequence: Synthetic oligonucleotide
  Target: ATXN2; (-) strand; PAM type: NRG; PAM sequence: GAG
taatgatggggatgtgtttt

SEQ ID NO: 31768 - DNA, 20 bp, Artificial Sequence
  Description of Artificial Sequence: Synthetic oligonucleotide
  Target: ATXN2; (-) strand; PAM type: NRG; PAM sequence: GGG
ttatgcattgcttaatgatg

SEQ ID NO: 31769 - DNA, 20 bp, Artificial Sequence
  Description of Artificial Sequence: Synthetic oligonucleotide
  Target: ATXN2; (-) strand; PAM type: NRG; PAM sequence: GGG
tttatgcattgcttaatgat

SEQ ID NO: 31770 - DNA, 20 bp, Artificial Sequence
  Description of Artificial Sequence: Synthetic oligonucleotide
  Target: ATXN2; (-) strand; PAM type: NRG; PAM sequence: TGG
gtttatgcattgcttaatga

SEQ ID NO: 31771 - DNA, 20 bp, Artificial Sequence
  Description of Artificial Sequence: Synthetic oligonucleotide
  Target: ATXN2; (-) strand; PAM type: NRG; PAM sequence: GAG
ttcataccatctttggtgat

SEQ ID NO: 31772 - DNA, 20 bp, Artificial Sequence
  Description of Artificial Sequence: Synthetic oligonucleotide
  Target: ATXN2; (-) strand; PAM type: NRG; PAM sequence: TGG
tttgacattcataccatctt

SEQ ID NO: 31773 - DNA, 20 bp, Artificial Sequence
  Description of Artificial Sequence: Synthetic oligonucleotide
  Target: ATXN2; (-) strand; PAM type: NRG; PAM sequence: GAG
ccctaatgcccagtgatatt

SEQ ID NO: 31774 - DNA, 20 bp, Artificial Sequence
  Description of Artificial Sequence: Synthetic oligonucleotide
  Target: ATXN2; (-) strand; PAM type: NRG; PAM sequence: CAG
atttgcatttccctaatgcc

SEQ ID NO: 31775 - DNA, 20 bp, Artificial Sequence
  Description of Artificial Sequence: Synthetic oligonucleotide
  Target: ATXN2; (-) strand; PAM type: NRG; PAM sequence: TGG
ccctgtgcctggcctcattg

SEQ ID NO: 31776 - DNA, 20 bp, Artificial Sequence
  Description of Artificial Sequence: Synthetic oligonucleotide
  Target: ATXN2; (-) strand; PAM type: NRG; PAM sequence: TGG
tagatatgagcccctgtgcc

SEQ ID NO: 31777 - DNA, 20 bp, Artificial Sequence
  Description of Artificial Sequence: Synthetic oligonucleotide
  Target: ATXN2; (-) strand; PAM type: NRG; PAM sequence: GAG
agtgctgggattatagatat

SEQ ID NO: 31778 - DNA, 20 bp, Artificial Sequence
  Description of Artificial Sequence: Synthetic oligonucleotide
  Target: ATXN2; (-) strand; PAM type: NRG; PAM sequence: TAG
ctcccaaagtgctgggatta

SEQ ID NO: 31779 - DNA, 20 bp, Artificial Sequence
  Description of Artificial Sequence: Synthetic oligonucleotide
  Target: ATXN2; (-) strand; PAM type: NRG; PAM sequence: GGG
cctcagcctcccaaagtgct

SEQ ID NO: 31780 - DNA, 20 bp, Artificial Sequence
  Description of Artificial Sequence: Synthetic oligonucleotide
  Target: ATXN2; (-) strand; PAM type: NRG; PAM sequence: TGG
acctcagcctcccaaagtgc

SEQ ID NO: 31781 - DNA, 20 bp, Artificial Sequence
  Description of Artificial Sequence: Synthetic oligonucleotide
  Target: ATXN2; (-) strand; PAM type: NRG; PAM sequence: AAG
tcatctacctcagcctccca

SEQ ID NO: 31782 - DNA, 20 bp, Artificial Sequence
  Description of Artificial Sequence: Synthetic oligonucleotide
  Target: ATXN2; (-) strand; PAM type: NRG; PAM sequence: CAG
ctcaagtgattcatctacct

SEQ ID NO: 31783 - DNA, 20 bp, Artificial Sequence
  Description of Artificial Sequence: Synthetic oligonucleotide
  Target: ATXN2; (-) strand; PAM type: NRG; PAM sequence: AAG
ggtgttgaactcctgggctc

SEQ ID NO: 31784 - DNA, 20 bp, Artificial Sequence
  Description of Artificial Sequence: Synthetic oligonucleotide
  Target: ATXN2; (-) strand; PAM type: NRG; PAM sequence: GGG
ctgggtggtgttgaactcct

SEQ ID NO: 31785 - DNA, 20 bp, Artificial Sequence
  Description of Artificial Sequence: Synthetic oligonucleotide
  Target: ATXN2; (-) strand; PAM type: NRG; PAM sequence: TGG
cctgggtggtgttgaactcc

SEQ ID NO: 31786 - DNA, 20 bp, Artificial Sequence
  Description of Artificial Sequence: Synthetic oligonucleotide
  Target: ATXN2; (-) strand; PAM type: NRG; PAM sequence: TGG
tctcactatgttgccctggg

SEQ ID NO: 31787 - DNA, 20 bp, Artificial Sequence
  Description of Artificial Sequence: Synthetic oligonucleotide
  Target: ATXN2; (-) strand; PAM type: NRG; PAM sequence: GGG
aggtctcactatgttgccct

SEQ ID NO: 31788 - DNA, 20 bp, Artificial Sequence
  Description of Artificial Sequence: Synthetic oligonucleotide
  Target: ATXN2; (-) strand; PAM type: NRG; PAM sequence: TGG
gaggtctcactatgttgccc

SEQ ID NO: 31789 - DNA, 20 bp, Artificial Sequence
  Description of Artificial Sequence: Synthetic oligonucleotide
  Target: ATXN2; (-) strand; PAM type: NRG; PAM sequence: AGG
tttgatttttagtagagaag

SEQ ID NO: 31790 - DNA, 20 bp, Artificial Sequence
  Description of Artificial Sequence: Synthetic oligonucleotide
  Target: ATXN2; (-) strand; PAM type: NRG; PAM sequence: GAG
ctttgatttttagtagagaa

SEQ ID NO: 31791 - DNA, 20 bp, Artificial Sequence
  Description of Artificial Sequence: Synthetic oligonucleotide
  Target: ATXN2; (-) strand; PAM type: NRG; PAM sequence: AAG
tgctttgatttttagtagag

SEQ ID NO: 31792 - DNA, 20 bp, Artificial Sequence
  Description of Artificial Sequence: Synthetic oligonucleotide
  Target: ATXN2; (-) strand; PAM type: NRG; PAM sequence: GAG
gtttgctttgatttttagta

SEQ ID NO: 31793 - DNA, 20 bp, Artificial Sequence
  Description of Artificial Sequence: Synthetic oligonucleotide
  Target: ATXN2; (-) strand; PAM type: NRG; PAM sequence: TAG
tagtttgctttgatttttag

SEQ ID NO: 31794 - DNA, 20 bp, Artificial Sequence
  Description of Artificial Sequence: Synthetic oligonucleotide
  Target: ATXN2; (-) strand; PAM type: NRG; PAM sequence: TAG
tggtagtttgctttgatttt

SEQ ID NO: 31795 - DNA, 20 bp, Artificial Sequence
  Description of Artificial Sequence: Synthetic oligonucleotide
  Target: ATXN2; (-) strand; PAM type: NRG; PAM sequence: TAG
gcatgtaccaccacacctgg

SEQ ID NO: 31796 - DNA, 20 bp, Artificial Sequence
  Description of Artificial Sequence: Synthetic oligonucleotide
  Target: ATXN2; (-) strand; PAM type: NRG; PAM sequence: TGG
caggcatgtaccaccacacc

SEQ ID NO: 31797 - DNA, 20 bp, Artificial Sequence
  Description of Artificial Sequence: Synthetic oligonucleotide
  Target: ATXN2; (-) strand; PAM type: NRG; PAM sequence: AGG
agcctcctggctgggaccac

SEQ ID NO: 31798 - DNA, 20 bp, Artificial Sequence
  Description of Artificial Sequence: Synthetic oligonucleotide
  Target: ATXN2; (-) strand; PAM type: NRG; PAM sequence: CAG
cagcctcctggctgggacca

SEQ ID NO: 31799 - DNA, 20 bp, Artificial Sequence
  Description of Artificial Sequence: Synthetic oligonucleotide
  Target: ATXN2; (-) strand; PAM type: NRG; PAM sequence: GGG
cctgcctcagcctcctggct

SEQ ID NO: 31800 - DNA, 20 bp, Artificial Sequence
  Description of Artificial Sequence: Synthetic oligonucleotide
  Target: ATXN2; (-) strand; PAM type: NRG; PAM sequence: TGG
tcctgcctcagcctcctggc

SEQ ID NO: 31801 - DNA, 20 bp, Artificial Sequence
  Description of Artificial Sequence: Synthetic oligonucleotide
  Target: ATXN2; (-) strand; PAM type: NRG; PAM sequence: TGG
atcctcctgcctcagcctcc

SEQ ID NO: 31802 - DNA, 20 bp, Artificial Sequence
  Description of Artificial Sequence: Synthetic oligonucleotide
  Target: ATXN2; (-) strand; PAM type: NRG; PAM sequence: CAG
ctcaagtgatcctcctgcct

SEQ ID NO: 31803 - DNA, 20 bp, Artificial Sequence
  Description of Artificial Sequence: Synthetic oligonucleotide
  Target: ATXN2; (-) strand; PAM type: NRG; PAM sequence: AAG
aacattgacctcctgggctc

SEQ ID NO: 31804 - DNA, 20 bp, Artificial Sequence
  Description of Artificial Sequence: Synthetic oligonucleotide
  Target: ATXN2; (-) strand; PAM type: NRG; PAM sequence: GGG
gactgcaacattgacctcct

SEQ ID NO: 31805 - DNA, 20 bp, Artificial Sequence
  Description of Artificial Sequence: Synthetic oligonucleotide
  Target: ATXN2; (-) strand; PAM type: NRG; PAM sequence: TGG
tgactgcaacattgacctcc

SEQ ID NO: 31806 - DNA, 20 bp, Artificial Sequence
  Description of Artificial Sequence: Synthetic oligonucleotide
  Target: ATXN2; (-) strand; PAM type: NRG; PAM sequence: TGG
tcacccagggtggagtgcag

SEQ ID NO: 31807 - DNA, 20 bp, Artificial Sequence
  Description of Artificial Sequence: Synthetic oligonucleotide
  Target: ATXN2; (-) strand; PAM type: NRG; PAM sequence: CAG
ctgtcacccagggtggagtg

SEQ ID NO: 31808 - DNA, 20 bp, Artificial Sequence
  Description of Artificial Sequence: Synthetic oligonucleotide
  Target: ATXN2; (-) strand; PAM type: NRG; PAM sequence: GAG
ttgctctgtcacccagggtg

SEQ ID NO: 31809 - DNA, 20 bp, Artificial Sequence
  Description of Artificial Sequence: Synthetic oligonucleotide
  Target: ATXN2; (-) strand; PAM type: NRG; PAM sequence: TGG
tcttgctctgtcacccaggg

SEQ ID NO: 31810 - DNA, 20 bp, Artificial Sequence
  Description of Artificial Sequence: Synthetic oligonucleotide
  Target: ATXN2; (-) strand; PAM type: NRG; PAM sequence: GGG
gggtcttgctctgtcaccca

SEQ ID NO: 31811 - DNA, 20 bp, Artificial Sequence
  Description of Artificial Sequence: Synthetic oligonucleotide
  Target: ATXN2; (-) strand; PAM type: NRG; PAM sequence: AGG
agggtcttgctctgtcaccc

SEQ ID NO: 31812 - DNA, 20 bp, Artificial Sequence
  Description of Artificial Sequence: Synthetic oligonucleotide
  Target: ATXN2; (-) strand; PAM type: NRG; PAM sequence: CAG
cagggtcttgctctgtcacc

SEQ ID NO: 31813 - DNA, 20 bp, Artificial Sequence
  Description of Artificial Sequence: Synthetic oligonucleotide
  Target: ATXN2; (-) strand; PAM type: NRG; PAM sequence: GGG
atgaatttttttttgaggca

SEQ ID NO: 31814 - DNA, 20 bp, Artificial Sequence
  Description of Artificial Sequence: Synthetic oligonucleotide
  Target: ATXN2; (-) strand; PAM type: NRG; PAM sequence: AGG
tatgaatttttttttgaggc

SEQ ID NO: 31815 - DNA, 20 bp, Artificial Sequence
  Description of Artificial Sequence: Synthetic oligonucleotide
  Target: ATXN2; (-) strand; PAM type: NRG; PAM sequence: CAG
gtatgaatttttttttgagg

SEQ ID NO: 31816 - DNA, 20 bp, Artificial Sequence
  Description of Artificial Sequence: Synthetic oligonucleotide
  Target: ATXN2; (-) strand; PAM type: NRG; PAM sequence: AGG
agtgtatgaatttttttttg

SEQ ID NO: 31817 - DNA, 20 bp, Artificial Sequence
  Description of Artificial Sequence: Synthetic oligonucleotide
  Target: ATXN2; (-) strand; PAM type: NRG; PAM sequence: GAG
cagtgtatgaattttttttt

SEQ ID NO: 31818 - DNA, 20 bp, Artificial Sequence
  Description of Artificial Sequence: Synthetic oligonucleotide
  Target: ATXN2; (-) strand; PAM type: NRG; PAM sequence: CAG
gctatattttctttccctag

SEQ ID NO: 31819 - DNA, 20 bp, Artificial Sequence
  Description of Artificial Sequence: Synthetic oligonucleotide
  Target: ATXN2; (-) strand; PAM type: NRG; PAM sequence: TAG
actgctatattttctttccc

SEQ ID NO: 31820 - DNA, 20 bp, Artificial Sequence
  Description of Artificial Sequence: Synthetic oligonucleotide
  Target: ATXN2; (-) strand; PAM type: NRG; PAM sequence: AAG
aattgctaaactgtttgcta

SEQ ID NO: 31821 - DNA, 20 bp, Artificial Sequence
  Description of Artificial Sequence: Synthetic oligonucleotide
  Target: ATXN2; (-) strand; PAM type: NRG; PAM sequence: AAG
gagtgtttatttaattttaa

SEQ ID NO: 31822 - DNA, 20 bp, Artificial Sequence
  Description of Artificial Sequence: Synthetic oligonucleotide
  Target: ATXN2; (-) strand; PAM type: NRG; PAM sequence: GAG
cagggtacatataatcctgt

SEQ ID NO: 31823 - DNA, 20 bp, Artificial Sequence
  Description of Artificial Sequence: Synthetic oligonucleotide
  Target: ATXN2; (-) strand; PAM type: NRG; PAM sequence: GGG
ggcaagtgtttatttttcca

SEQ ID NO: 31824 - DNA, 20 bp, Artificial Sequence
  Description of Artificial Sequence: Synthetic oligonucleotide
  Target: ATXN2; (-) strand; PAM type: NRG; PAM sequence: AGG
tggcaagtgtttatttttcc

SEQ ID NO: 31825 - DNA, 20 bp, Artificial Sequence
  Description of Artificial Sequence: Synthetic oligonucleotide
  Target: ATXN2; (-) strand; PAM type: NRG; PAM sequence: CAG
gtggcaagtgtttatttttc

SEQ ID NO: 31826 - DNA, 20 bp, Artificial Sequence
  Description of Artificial Sequence: Synthetic oligonucleotide
  Target: ATXN2; (-) strand; PAM type: NRG; PAM sequence: AAG
agattgctgggttttgtggc

SEQ ID NO: 31827 - DNA, 20 bp, Artificial Sequence
  Description of Artificial Sequence: Synthetic oligonucleotide
  Target: ATXN2; (-) strand; PAM type: NRG; PAM sequence: TGG
aatgagattgctgggttttg

SEQ ID NO: 31828 - DNA, 20 bp, Artificial Sequence
  Description of Artificial Sequence: Synthetic oligonucleotide
  Target: ATXN2; (-) strand; PAM type: NRG; PAM sequence: GGG
tgcatagaaatgagattgct

SEQ ID NO: 31829 - DNA, 20 bp, Artificial Sequence
  Description of Artificial Sequence: Synthetic oligonucleotide
  Target: ATXN2; (-) strand; PAM type: NRG; PAM sequence: TGG
atgcatagaaatgagattgc

SEQ ID NO: 31830 - DNA, 20 bp, Artificial Sequence
  Description of Artificial Sequence: Synthetic oligonucleotide
  Target: ATXN2; (-) strand; PAM type: NRG; PAM sequence: GAG
tggttggaatgcatagaaat

SEQ ID NO: 31831 - DNA, 20 bp, Artificial Sequence
  Description of Artificial Sequence: Synthetic oligonucleotide
  Target: ATXN2; (-) strand; PAM type: NRG; PAM sequence: TAG
tttctcttggttggaatgca

SEQ ID NO: 31832 - DNA, 20 bp, Artificial Sequence
  Description of Artificial Sequence: Synthetic oligonucleotide
  Target: ATXN2; (-) strand; PAM type: NRG; PAM sequence: TGG
atgattttatttctcttggt

SEQ ID NO: 31833 - DNA, 20 bp, Artificial Sequence
  Description of Artificial Sequence: Synthetic oligonucleotide
  Target: ATXN2; (-) strand; PAM type: NRG; PAM sequence: TGG
acatatgattttatttctct

SEQ ID NO: 31834 - DNA, 20 bp, Artificial Sequence
  Description of Artificial Sequence: Synthetic oligonucleotide
  Target: ATXN2; (-) strand; PAM type: NRG; PAM sequence: AGG
tggtatgaatatttatgtac

SEQ ID NO: 31835 - DNA, 20 bp, Artificial Sequence
  Description of Artificial Sequence: Synthetic oligonucleotide
  Target: ATXN2; (-) strand; PAM type: NRG; PAM sequence: CAG
ctggtatgaatatttatgta

SEQ ID NO: 31836 - DNA, 20 bp, Artificial Sequence
  Description of Artificial Sequence: Synthetic oligonucleotide
  Target: ATXN2; (-) strand; PAM type: NRG; PAM sequence: TGG
aaaaaataaataaataaagc

SEQ ID NO: 31837 - DNA, 20 bp, Artificial Sequence
  Description of Artificial Sequence: Synthetic oligonucleotide
  Target: ATXN2; (-) strand; PAM type: NRG; PAM sequence: AAG
ctcaaaaaaataaataaata

SEQ ID NO: 31838 - DNA, 20 bp, Artificial Sequence
  Description of Artificial Sequence: Synthetic oligonucleotide
  Target: ATXN2; (-) strand; PAM type: NRG; PAM sequence: GAG
cactccagcctgggcatcaa

SEQ ID NO: 31839 - DNA, 20 bp, Artificial Sequence
  Description of Artificial Sequence: Synthetic oligonucleotide
  Target: ATXN2; (-) strand; PAM type: NRG; PAM sequence: AAG
tgcactccagcctgggcatc

SEQ ID NO: 31840 - DNA, 20 bp, Artificial Sequence
  Description of Artificial Sequence: Synthetic oligonucleotide
  Target: ATXN2; (-) strand; PAM type: NRG; PAM sequence: GGG
gcaccattgcactccagcct

SEQ ID NO: 31841 - DNA, 20 bp, Artificial Sequence
  Description of Artificial Sequence: Synthetic oligonucleotide
  Target: ATXN2; (-) strand; PAM type: NRG; PAM sequence: TGG
tgcaccattgcactccagcc

SEQ ID NO: 31842 - DNA, 20 bp, Artificial Sequence
  Description of Artificial Sequence: Synthetic oligonucleotide
  Target: ATXN2; (-) strand; PAM type: NRG; PAM sequence: CAG
aagattgcaccattgcactc

SEQ ID NO: 31843 - DNA, 20 bp, Artificial Sequence
  Description of Artificial Sequence: Synthetic oligonucleotide
  Target: ATXN2; (-) strand; PAM type: NRG; PAM sequence: AAG
ggcagaggttgtggtgagcc

SEQ ID NO: 31844 - DNA, 20 bp, Artificial Sequence
  Description of Artificial Sequence: Synthetic oligonucleotide
  Target: ATXN2; (-) strand; PAM type: NRG; PAM sequence: GAG
cgggaggcagaggttgtggt

SEQ ID NO: 31845 - DNA, 20 bp, Artificial Sequence
  Description of Artificial Sequence: Synthetic oligonucleotide
  Target: ATXN2; (-) strand; PAM type: NRG; PAM sequence: TGG
aacccgggaggcagaggttg

SEQ ID NO: 31846 - DNA, 20 bp, Artificial Sequence
  Description of Artificial Sequence: Synthetic oligonucleotide
  Target: ATXN2; (-) strand; PAM type: NRG; PAM sequence: AGG
cgcttgaacccgggaggcag

SEQ ID NO: 31847 - DNA, 20 bp, Artificial Sequence
  Description of Artificial Sequence: Synthetic oligonucleotide
  Target: ATXN2; (-) strand; PAM type: NRG; PAM sequence: GAG
tcgcttgaacccgggaggca

SEQ ID NO: 31848 - DNA, 20 bp, Artificial Sequence
  Description of Artificial Sequence: Synthetic oligonucleotide
  Target: ATXN2; (-) strand; PAM type: NRG; PAM sequence: CAG
aatcgcttgaacccgggagg

SEQ ID NO: 31849 - DNA, 20 bp, Artificial Sequence
  Description of Artificial Sequence: Synthetic oligonucleotide
  Target: ATXN2; (-) strand; PAM type: NRG; PAM sequence: AGG
gagaatcgcttgaacccggg

SEQ ID NO: 31850 - DNA, 20 bp, Artificial Sequence
  Description of Artificial Sequence: Synthetic oligonucleotide
  Target: ATXN2; (-) strand; PAM type: NRG; PAM sequence: GAG
ggagaatcgcttgaacccgg

SEQ ID NO: 31851 - DNA, 20 bp, Artificial Sequence
  Description of Artificial Sequence: Synthetic oligonucleotide
  Target: ATXN2; (-) strand; PAM type: NRG; PAM sequence: GGG
caggagaatcgcttgaaccc

SEQ ID NO: 31852 - DNA, 20 bp, Artificial Sequence
  Description of Artificial Sequence: Synthetic oligonucleotide
  Target: ATXN2; (-) strand; PAM type: NRG; PAM sequence: CGG
gcaggagaatcgcttgaacc

SEQ ID NO: 31853 - DNA, 20 bp, Artificial Sequence
  Description of Artificial Sequence: Synthetic oligonucleotide
  Target: ATXN2; (-) strand; PAM type: NRG; PAM sequence: GAG
tactcaggaggctgaggcag

SEQ ID NO: 31854 - DNA, 20 bp, Artificial Sequence
  Description of Artificial Sequence: Synthetic oligonucleotide
  Target: ATXN2; (-) strand; PAM type: NRG; PAM sequence: AGG
gctactcaggaggctgaggc

SEQ ID NO: 31855 - DNA, 20 bp, Artificial Sequence
  Description of Artificial Sequence: Synthetic oligonucleotide
  Target: ATXN2; (-) strand; PAM type: NRG; PAM sequence: CAG
agctactcaggaggctgagg

SEQ ID NO: 31856 - DNA, 20 bp, Artificial Sequence
  Description of Artificial Sequence: Synthetic oligonucleotide
  Target: ATXN2; (-) strand; PAM type: NRG; PAM sequence: AGG
cctagctactcaggaggctg

SEQ ID NO: 31857 - DNA, 20 bp, Artificial Sequence
  Description of Artificial Sequence: Synthetic oligonucleotide
  Target: ATXN2; (-) strand; PAM type: NRG; PAM sequence: GAG
tcctagctactcaggaggct

SEQ ID NO: 31858 - DNA, 20 bp, Artificial Sequence
  Description of Artificial Sequence: Synthetic oligonucleotide
  Target: ATXN2; (-) strand; PAM type: NRG; PAM sequence: AGG
tgtaatcctagctactcagg

SEQ ID NO: 31859 - DNA, 20 bp, Artificial Sequence
  Description of Artificial Sequence: Synthetic oligonucleotide
  Target: ATXN2; (-) strand; PAM type: NRG; PAM sequence: GAG
ctgtaatcctagctactcag

SEQ ID NO: 31860 - DNA, 20 bp, Artificial Sequence
  Description of Artificial Sequence: Synthetic oligonucleotide
  Target: ATXN2; (-) strand; PAM type: NRG; PAM sequence: AGG
gcctgtaatcctagctactc

SEQ ID NO: 31861 - DNA, 20 bp, Artificial Sequence
  Description of Artificial Sequence: Synthetic oligonucleotide
  Target: ATXN2; (-) strand; PAM type: NRG; PAM sequence: CAG
tgcctgtaatcctagctact

SEQ ID NO: 31862 - DNA, 20 bp, Artificial Sequence
  Description of Artificial Sequence: Synthetic oligonucleotide
  Target: ATXN2; (-) strand; PAM type: NRG; PAM sequence: TAG
gtggcgcatgcctgtaatcc

SEQ ID NO: 31863 - DNA, 20 bp, Artificial Sequence
  Description of Artificial Sequence: Synthetic oligonucleotide
  Target: ATXN2; (-) strand; PAM type: NRG; PAM sequence: TGG
acaaaattagccaggcgtgg

SEQ ID NO: 31864 - DNA, 20 bp, Artificial Sequence
  Description of Artificial Sequence: Synthetic oligonucleotide
  Target: ATXN2; (-) strand; PAM type: NRG; PAM sequence: TGG
aatacaaaattagccaggcg

SEQ ID NO: 31865 - DNA, 20 bp, Artificial Sequence
  Description of Artificial Sequence: Synthetic oligonucleotide
  Target: ATXN2; (-) strand; PAM type: NRG; PAM sequence: AGG
ctaaaaatacaaaattagcc

SEQ ID NO: 31866 - DNA, 20 bp, Artificial Sequence
  Description of Artificial Sequence: Synthetic oligonucleotide
  Target: ATXN2; (-) strand; PAM type: NRG; PAM sequence: CAG
actaaaaatacaaaattagc

SEQ ID NO: 31867 - DNA, 20 bp, Artificial Sequence
  Description of Artificial Sequence: Synthetic oligonucleotide
  Target: ATXN2; (-) strand; PAM type: NRG; PAM sequence: TAG
ctctactaaaaatacaaaat

SEQ ID NO: 31868 - DNA, 20 bp, Artificial Sequence
  Description of Artificial Sequence: Synthetic oligonucleotide
  Target: ATXN2; (-) strand; PAM type: NRG; PAM sequence: GAG
agaccagcctgaccaacatg

SEQ ID NO: 31869 - DNA, 20 bp, Artificial Sequence
  Description of Artificial Sequence: Synthetic oligonucleotide
  Target: ATXN2; (-) strand; PAM type: NRG; PAM sequence: TGG
tgagaccagcctgaccaaca

SEQ ID NO: 31870 - DNA, 20 bp, Artificial Sequence
  Description of Artificial Sequence: Synthetic oligonucleotide
  Target: ATXN2; (-) strand; PAM type: NRG; PAM sequence: CAG
taaggttgggagtttgagac

SEQ ID NO: 31871 - DNA, 20 bp, Artificial Sequence
  Description of Artificial Sequence: Synthetic oligonucleotide
  Target: ATXN2; (-) strand; PAM type: NRG; PAM sequence: GAG
tcacctaaggttgggagttt

SEQ ID NO: 31872 - DNA, 20 bp, Artificial Sequence
  Description of Artificial Sequence: Synthetic oligonucleotide
  Target: ATXN2; (-) strand; PAM type: NRG; PAM sequence: GAG
ggcggatcacctaaggttgg

SEQ ID NO: 31873 - DNA, 20 bp, Artificial Sequence
  Description of Artificial Sequence: Synthetic oligonucleotide
  Target: ATXN2; (-) strand; PAM type: NRG; PAM sequence: GGG
caggcggatcacctaaggtt

SEQ ID NO: 31874 - DNA, 20 bp, Artificial Sequence
  Description of Artificial Sequence: Synthetic oligonucleotide
  Target: ATXN2; (-) strand; PAM type: NRG; PAM sequence: TGG
gcaggcggatcacctaaggt

SEQ ID NO: 31875 - DNA, 20 bp, Artificial Sequence
  Description of Artificial Sequence: Synthetic oligonucleotide
  Target: ATXN2; (-) strand; PAM type: NRG; PAM sequence: AGG
cgaggcaggcggatcaccta

SEQ ID NO: 31876 - DNA, 20 bp, Artificial Sequence
  Description of Artificial Sequence: Synthetic oligonucleotide
  Target: ATXN2; (-) strand; PAM type: NRG; PAM sequence: AAG
ccgaggcaggcggatcacct

SEQ ID NO: 31877 - DNA, 20 bp, Artificial Sequence
  Description of Artificial Sequence: Synthetic oligonucleotide
  Target: ATXN2; (-) strand; PAM type: NRG; PAM sequence: CGG
ttttggaaggccgaggcagg

SEQ ID NO: 31878 - DNA, 20 bp, Artificial Sequence
  Description of Artificial Sequence: Synthetic oligonucleotide
  Target: ATXN2; (-) strand; PAM type: NRG; PAM sequence: AGG
gcattttggaaggccgaggc

SEQ ID NO: 31879 - DNA, 20 bp, Artificial Sequence
  Description of Artificial Sequence: Synthetic oligonucleotide
  Target: ATXN2; (-) strand; PAM type: NRG; PAM sequence: CAG
agcattttggaaggccgagg

SEQ ID NO: 31880 - DNA, 20 bp, Artificial Sequence
  Description of Artificial Sequence: Synthetic oligonucleotide
  Target: ATXN2; (-) strand; PAM type: NRG; PAM sequence: AGG
cccagcattttggaaggccg

SEQ ID NO: 31881 - DNA, 20 bp, Artificial Sequence
  Description of Artificial Sequence: Synthetic oligonucleotide
  Target: ATXN2; (-) strand; PAM type: NRG; PAM sequence: GAG
tcccagcattttggaaggcc

SEQ ID NO: 31882 - DNA, 20 bp, Artificial Sequence
  Description of Artificial Sequence: Synthetic oligonucleotide
  Target: ATXN2; (-) strand; PAM type: NRG; PAM sequence: AGG
tgtaatcccagcattttgga

SEQ ID NO: 31883 - DNA, 20 bp, Artificial Sequence
  Description of Artificial Sequence: Synthetic oligonucleotide
  Target: ATXN2; (-) strand; PAM type: NRG; PAM sequence: AAG
ctgtaatcccagcattttgg

SEQ ID NO: 31884 - DNA, 20 bp, Artificial Sequence
  Description of Artificial Sequence: Synthetic oligonucleotide
  Target: ATXN2; (-) strand; PAM type: NRG; PAM sequence: TGG
cgcctgtaatcccagcattt

SEQ ID NO: 31885 - DNA, 20 bp, Artificial Sequence
  Description of Artificial Sequence: Synthetic oligonucleotide
  Target: ATXN2; (-) strand; PAM type: NRG; PAM sequence: CAG
atgtctcacgcctgtaatcc

SEQ ID NO: 31886 - DNA, 20 bp, Artificial Sequence
  Description of Artificial Sequence: Synthetic oligonucleotide
  Target: ATXN2; (-) strand; PAM type: NRG; PAM sequence: GGG
taaaaataaagctggaggcc

SEQ ID NO: 31887 - DNA, 20 bp, Artificial Sequence
  Description of Artificial Sequence: Synthetic oligonucleotide
  Target: ATXN2; (-) strand; PAM type: NRG; PAM sequence: CGG
ttaaaaataaagctggaggc

SEQ ID NO: 31888 - DNA, 20 bp, Artificial Sequence
  Description of Artificial Sequence: Synthetic oligonucleotide
  Target: ATXN2; (-) strand; PAM type: NRG; PAM sequence: AGG
gctattaaaaataaagctgg

SEQ ID NO: 31889 - DNA, 20 bp, Artificial Sequence
  Description of Artificial Sequence: Synthetic oligonucleotide
  Target: ATXN2; (-) strand; PAM type: NRG; PAM sequence: GAG
ggctattaaaaataaagctg

SEQ ID NO: 31890 - DNA, 20 bp, Artificial Sequence
  Description of Artificial Sequence: Synthetic oligonucleotide
  Target: ATXN2; (-) strand; PAM type: NRG; PAM sequence: TGG
ttggctattaaaaataaagc

SEQ ID NO: 31891 - DNA, 20 bp, Artificial Sequence
  Description of Artificial Sequence: Synthetic oligonucleotide
  Target: ATXN2; (-) strand; PAM type: NRG; PAM sequence: AAG
ggttttggctattaaaaata

SEQ ID NO: 31892 - DNA, 20 bp, Artificial Sequence
  Description of Artificial Sequence: Synthetic oligonucleotide
  Target: ATXN2; (-) strand; PAM type: NRG; PAM sequence: TGG
gacattgagttagcaggttt

SEQ ID NO: 31893 - DNA, 20 bp, Artificial Sequence
  Description of Artificial Sequence: Synthetic oligonucleotide
  Target: ATXN2; (-) strand; PAM type: NRG; PAM sequence: AGG
gtggtggacattgagttagc

SEQ ID NO: 31894 - DNA, 20 bp, Artificial Sequence
  Description of Artificial Sequence: Synthetic oligonucleotide
  Target: ATXN2; (-) strand; PAM type: NRG; PAM sequence: CAG
agtggtggacattgagttag

SEQ ID NO: 31895 - DNA, 20 bp, Artificial Sequence
  Description of Artificial Sequence: Synthetic oligonucleotide
  Target: ATXN2; (-) strand; PAM type: NRG; PAM sequence: TAG
tctagtggtggacattgagt

SEQ ID NO: 31896 - DNA, 20 bp, Artificial Sequence
  Description of Artificial Sequence: Synthetic oligonucleotide
  Target: ATXN2; (-) strand; PAM type: NRG; PAM sequence: GAG
ttcatctagtggtggacatt

SEQ ID NO: 31897 - DNA, 20 bp, Artificial Sequence
  Description of Artificial Sequence: Synthetic oligonucleotide
  Target: ATXN2; (-) strand; PAM type: NRG; PAM sequence: TGG
ccagtttgttcatctagtgg

SEQ ID NO: 31898 - DNA, 20 bp, Artificial Sequence
  Description of Artificial Sequence: Synthetic oligonucleotide
  Target: ATXN2; (-) strand; PAM type: NRG; PAM sequence: TGG
gtaccagtttgttcatctag

SEQ ID NO: 31899 - DNA, 20 bp, Artificial Sequence
  Description of Artificial Sequence: Synthetic oligonucleotide
  Target: ATXN2; (-) strand; PAM type: NRG; PAM sequence: TAG
catgtaccagtttgttcatc

SEQ ID NO: 31900 - DNA, 20 bp, Artificial Sequence
  Description of Artificial Sequence: Synthetic oligonucleotide
  Target: ATXN2; (-) strand; PAM type: NRG; PAM sequence: CAG
agtctattgtatgcatgtac

SEQ ID NO: 31901 - DNA, 20 bp, Artificial Sequence
  Description of Artificial Sequence: Synthetic oligonucleotide
  Target: ATXN2; (-) strand; PAM type: NRG; PAM sequence: TAG
ttctgcttattgttgagtag

SEQ ID NO: 31902 - DNA, 20 bp, Artificial Sequence
  Description of Artificial Sequence: Synthetic oligonucleotide
  Target: ATXN2; (-) strand; PAM type: NRG; PAM sequence: TAG
tctttctgcttattgttgag

SEQ ID NO: 31903 - DNA, 20 bp, Artificial Sequence
  Description of Artificial Sequence: Synthetic oligonucleotide
  Target: ATXN2; (-) strand; PAM type: NRG; PAM sequence: GAG
gtttctttctgcttattgtt

SEQ ID NO: 31904 - DNA, 20 bp, Artificial Sequence
  Description of Artificial Sequence: Synthetic oligonucleotide
  Target: ATXN2; (-) strand; PAM type: NRG; PAM sequence: TAG
tctgtactattgcatgttag

SEQ ID NO: 31905 - DNA, 20 bp, Artificial Sequence
  Description of Artificial Sequence: Synthetic oligonucleotide
  Target: ATXN2; (-) strand; PAM type: NRG; PAM sequence: TAG
tcgtctgtactattgcatgt

SEQ ID NO: 31906 - DNA, 20 bp, Artificial Sequence
  Description of Artificial Sequence: Synthetic oligonucleotide
  Target: ATXN2; (-) strand; PAM type: NRG; PAM sequence: AGG
atctcaaaaaaaaaaaaaaa

SEQ ID NO: 31907 - DNA, 20 bp, Artificial Sequence
  Description of Artificial Sequence: Synthetic oligonucleotide
  Target: ATXN2; (-) strand; PAM type: NRG; PAM sequence: AAG
tatctcaaaaaaaaaaaaaa

SEQ ID NO: 31908 - DNA, 20 bp, Artificial Sequence
  Description of Artificial Sequence: Synthetic oligonucleotide
  Target: ATXN2; (-) strand; PAM type: NRG; PAM sequence: GAG
tccagcctgggtgacatagt

SEQ ID NO: 31909 - DNA, 20 bp, Artificial Sequence
  Description of Artificial Sequence: Synthetic oligonucleotide
  Target: ATXN2; (-) strand; PAM type: NRG; PAM sequence: TAG
gcactccagcctgggtgaca

SEQ ID NO: 31910 - DNA, 20 bp, Artificial Sequence
  Description of Artificial Sequence: Synthetic oligonucleotide
  Target: ATXN2; (-) strand; PAM type: NRG; PAM sequence: GGG
acgccactgcactccagcct

SEQ ID NO: 31911 - DNA, 20 bp, Artificial Sequence
  Description of Artificial Sequence: Synthetic oligonucleotide
  Target: ATXN2; (-) strand; PAM type: NRG; PAM sequence: TGG
cacgccactgcactccagcc

SEQ ID NO: 31912 - DNA, 20 bp, Artificial Sequence
  Description of Artificial Sequence: Synthetic oligonucleotide
  Target: ATXN2; (-) strand; PAM type: NRG; PAM sequence: CAG
aagaacacgccactgcactc

SEQ ID NO: 31913 - DNA, 20 bp, Artificial Sequence
  Description of Artificial Sequence: Synthetic oligonucleotide
  Target: ATXN2; (-) strand; PAM type: NRG; PAM sequence: AAG
ggaggaggttgcagtgaacc

SEQ ID NO: 31914 - DNA, 20 bp, Artificial Sequence
  Description of Artificial Sequence: Synthetic oligonucleotide
  Target: ATXN2; (-) strand; PAM type: NRG; PAM sequence: CAG
aacccaggaggaggaggttg

SEQ ID NO: 31915 - DNA, 20 bp, Artificial Sequence
  Description of Artificial Sequence: Synthetic oligonucleotide
  Target: ATXN2; (-) strand; PAM type: NRG; PAM sequence: AGG
cacttgaacccaggaggagg

SEQ ID NO: 31916 - DNA, 20 bp, Artificial Sequence
  Description of Artificial Sequence: Synthetic oligonucleotide
  Target: ATXN2; (-) strand; PAM type: NRG; PAM sequence: GAG
tcacttgaacccaggaggag

SEQ ID NO: 31917 - DNA, 20 bp, Artificial Sequence
  Description of Artificial Sequence: Synthetic oligonucleotide
  Target: ATXN2; (-) strand; PAM type: NRG; PAM sequence: AGG
aatcacttgaacccaggagg

SEQ ID NO: 31918 - DNA, 20 bp, Artificial Sequence
  Description of Artificial Sequence: Synthetic oligonucleotide
  Target: ATXN2; (-) strand; PAM type: NRG; PAM sequence: GAG
gaatcacttgaacccaggag

SEQ ID NO: 31919 - DNA, 20 bp, Artificial Sequence
  Description of Artificial Sequence: Synthetic oligonucleotide
  Target: ATXN2; (-) strand; PAM type: NRG; PAM sequence: AGG
gagaatcacttgaacccagg

SEQ ID NO: 31920 - DNA, 20 bp, Artificial Sequence
  Description of Artificial Sequence: Synthetic oligonucleotide
  Target: ATXN2; (-) strand; PAM type: NRG; PAM sequence: GAG
ggagaatcacttgaacccag

SEQ ID NO: 31921 - DNA, 20 bp, Artificial Sequence
  Description of Artificial Sequence: Synthetic oligonucleotide
  Target: ATXN2; (-) strand; PAM type: NRG; PAM sequence: AGG
caggagaatcacttgaaccc

SEQ ID NO: 31922 - DNA, 20 bp, Artificial Sequence
  Description of Artificial Sequence: Synthetic oligonucleotide
  Target: ATXN2; (-) strand; PAM type: NRG; PAM sequence: CAG
acaggagaatcacttgaacc

SEQ ID NO: 31923 - DNA, 20 bp, Artificial Sequence
  Description of Artificial Sequence: Synthetic oligonucleotide
  Target: ATXN2; (-) strand; PAM type: NRG; PAM sequence: GAG
actcgggggggctgagacag

SEQ ID NO: 31924 - DNA, 20 bp, Artificial Sequence
  Description of Artificial Sequence: Synthetic oligonucleotide
  Target: ATXN2; (-) strand; PAM type: NRG; PAM sequence: AGG
ctactcgggggggctgagac

SEQ ID NO: 31925 - DNA, 20 bp, Artificial Sequence
  Description of Artificial Sequence: Synthetic oligonucleotide
  Target: ATXN2; (-) strand; PAM type: NRG; PAM sequence: CAG
gctactcgggggggctgaga

SEQ ID NO: 31926 - DNA, 20 bp, Artificial Sequence
  Description of Artificial Sequence: Synthetic oligonucleotide
  Target: ATXN2; (-) strand; PAM type: NRG; PAM sequence: GAG
cccagctactcgggggggct

SEQ ID NO: 31927 - DNA, 20 bp, Artificial Sequence
  Description of Artificial Sequence: Synthetic oligonucleotide
  Target: ATXN2; (-) strand; PAM type: NRG; PAM sequence: GGG
gtaatcccagctactcgggg

SEQ ID NO: 31928 - DNA, 20 bp, Artificial Sequence
  Description of Artificial Sequence: Synthetic oligonucleotide
  Target: ATXN2; (-) strand; PAM type: NRG; PAM sequence: GGG
tgtaatcccagctactcggg

SEQ ID NO: 31929 - DNA, 20 bp, Artificial Sequence
  Description of Artificial Sequence: Synthetic oligonucleotide
  Target: ATXN2; (-) strand; PAM type: NRG; PAM sequence: GGG
ctgtaatcccagctactcgg

SEQ ID NO: 31930 - DNA, 20 bp, Artificial Sequence
  Description of Artificial Sequence: Synthetic oligonucleotide
  Target: ATXN2; (-) strand; PAM type: NRG; PAM sequence: GGG
cctgtaatcccagctactcg

SEQ ID NO: 31931 - DNA, 20 bp, Artificial Sequence
  Description of Artificial Sequence: Synthetic oligonucleotide
  Target: ATXN2; (-) strand; PAM type: NRG; PAM sequence: GGG
tcctgtaatcccagctactc

SEQ ID NO: 31932 - DNA, 20 bp, Artificial Sequence
  Description of Artificial Sequence: Synthetic oligonucleotide
  Target: ATXN2; (-) strand; PAM type: NRG; PAM sequence: CGG
ctcctgtaatcccagctact

SEQ ID NO: 31933 - DNA, 20 bp, Artificial Sequence
  Description of Artificial Sequence: Synthetic oligonucleotide
  Target: ATXN2; (-) strand; PAM type: NRG; PAM sequence: CAG
gtggcgcgctcctgtaatcc

SEQ ID NO: 31934 - DNA, 20 bp, Artificial Sequence
  Description of Artificial Sequence: Synthetic oligonucleotide
  Target: ATXN2; (-) strand; PAM type: NRG; PAM sequence: TGG
caaaaattagccaggcacgg

SEQ ID NO: 31935 - DNA, 20 bp, Artificial Sequence
  Description of Artificial Sequence: Synthetic oligonucleotide
  Target: ATXN2; (-) strand; PAM type: NRG; PAM sequence: CGG
gtacaaaaattagccaggca

SEQ ID NO: 31936 - DNA, 20 bp, Artificial Sequence
  Description of Artificial Sequence: Synthetic oligonucleotide
  Target: ATXN2; (-) strand; PAM type: NRG; PAM sequence: AGG
taaaagtacaaaaattagcc

SEQ ID NO: 31937 - DNA, 20 bp, Artificial Sequence
  Description of Artificial Sequence: Synthetic oligonucleotide
  Target: ATXN2; (-) strand; PAM type: NRG; PAM sequence: CAG
ctaaaagtacaaaaattagc

SEQ ID NO: 31938 - DNA, 20 bp, Artificial Sequence
  Description of Artificial Sequence: Synthetic oligonucleotide
  Target: ATXN2; (-) strand; PAM type: NRG; PAM sequence: TAG
tctactaaaagtacaaaaat

SEQ ID NO: 31939 - DNA, 20 bp, Artificial Sequence
  Description of Artificial Sequence: Synthetic oligonucleotide
  Target: ATXN2; (-) strand; PAM type: NRG; PAM sequence: AAG
tgagaccctgtgtctactaa

SEQ ID NO: 31940 - DNA, 20 bp, Artificial Sequence
  Description of Artificial Sequence: Synthetic oligonucleotide
  Target: ATXN2; (-) strand; PAM type: NRG; PAM sequence: GAG
accagcctggccaacatggt

SEQ ID NO: 31941 - DNA, 20 bp, Artificial Sequence
  Description of Artificial Sequence: Synthetic oligonucleotide
  Target: ATXN2; (-) strand; PAM type: NRG; PAM sequence: TGG
cgagaccagcctggccaaca

SEQ ID NO: 31942 - DNA, 20 bp, Artificial Sequence
  Description of Artificial Sequence: Synthetic oligonucleotide
  Target: ATXN2; (-) strand; PAM type: NRG; PAM sequence: TGG
tcaggagttcgagaccagcc

SEQ ID NO: 31943 - DNA, 20 bp, Artificial Sequence
  Description of Artificial Sequence: Synthetic oligonucleotide
  Target: ATXN2; (-) strand; PAM type: NRG; PAM sequence: CAG
tgaggtcaggagttcgagac

SEQ ID NO: 31944 - DNA, 20 bp, Artificial Sequence
  Description of Artificial Sequence: Synthetic oligonucleotide
  Target: ATXN2; (-) strand; PAM type: NRG; PAM sequence: GAG
tcacctgaggtcaggagttc

SEQ ID NO: 31945 - DNA, 20 bp, Artificial Sequence
  Description of Artificial Sequence: Synthetic oligonucleotide
  Target: ATXN2; (-) strand; PAM type: NRG; PAM sequence: GAG
ggtggatcacctgaggtcag

SEQ ID NO: 31946 - DNA, 20 bp, Artificial Sequence
  Description of Artificial Sequence: Synthetic oligonucleotide
  Target: ATXN2; (-) strand; PAM type: NRG; PAM sequence: AGG
tgggtggatcacctgaggtc

SEQ ID NO: 31947 - DNA, 20 bp, Artificial Sequence
  Description of Artificial Sequence: Synthetic oligonucleotide
  Target: ATXN2; (-) strand; PAM type: NRG; PAM sequence: CAG
gtgggtggatcacctgaggt

SEQ ID NO: 31948 - DNA, 20 bp, Artificial Sequence
  Description of Artificial Sequence: Synthetic oligonucleotide
  Target: ATXN2; (-) strand; PAM type: NRG; PAM sequence: AGG
tgaggtgggtggatcacctg

SEQ ID NO: 31949 - DNA, 20 bp, Artificial Sequence
  Description of Artificial Sequence: Synthetic oligonucleotide
  Target: ATXN2; (-) strand; PAM type: NRG; PAM sequence: GAG
ctgaggtgggtggatcacct

SEQ ID NO: 31950 - DNA, 20 bp, Artificial Sequence
  Description of Artificial Sequence: Synthetic oligonucleotide
  Target: ATXN2; (-) strand; PAM type: NRG; PAM sequence: TGG
ctttgggaggctgaggtggg

SEQ ID NO: 31951 - DNA, 20 bp, Artificial Sequence
  Description of Artificial Sequence: Synthetic oligonucleotide
  Target: ATXN2; (-) strand; PAM type: NRG; PAM sequence: GGG
gcactttgggaggctgaggt

SEQ ID NO: 31952 - DNA, 20 bp, Artificial Sequence
  Description of Artificial Sequence: Synthetic oligonucleotide
  Target: ATXN2; (-) strand; PAM type: NRG; PAM sequence: TGG
agcactttgggaggctgagg

SEQ ID NO: 31953 - DNA, 20 bp, Artificial Sequence
  Description of Artificial Sequence: Synthetic oligonucleotide
  Target: ATXN2; (-) strand; PAM type: NRG; PAM sequence: AGG
cccagcactttgggaggctg

SEQ ID NO: 31954 - DNA, 20 bp, Artificial Sequence
  Description of Artificial Sequence: Synthetic oligonucleotide
  Target: ATXN2; (-) strand; PAM type: NRG; PAM sequence: GAG
tcccagcactttgggaggct

SEQ ID NO: 31955 - DNA, 20 bp, Artificial Sequence
  Description of Artificial Sequence: Synthetic oligonucleotide
  Target: ATXN2; (-) strand; PAM type: NRG; PAM sequence: AGG
tgtaatcccagcactttggg

SEQ ID NO: 31956 - DNA, 20 bp, Artificial Sequence
  Description of Artificial Sequence: Synthetic oligonucleotide
  Target: ATXN2; (-) strand; PAM type: NRG; PAM sequence: GAG
ctgtaatcccagcactttgg

SEQ ID NO: 31957 - DNA, 20 bp, Artificial Sequence
  Description of Artificial Sequence: Synthetic oligonucleotide
  Target: ATXN2; (-) strand; PAM type: NRG; PAM sequence: GGG
gcctgtaatcccagcacttt

SEQ ID NO: 31958 - DNA, 20 bp, Artificial Sequence
  Description of Artificial Sequence: Synthetic oligonucleotide
  Target: ATXN2; (-) strand; PAM type: NRG; PAM sequence: TGG
cgcctgtaatcccagcactt

SEQ ID NO: 31959 - DNA, 20 bp, Artificial Sequence
  Description of Artificial Sequence: Synthetic oligonucleotide
  Target: ATXN2; (-) strand; PAM type: NRG; PAM sequence: CAG
gtggctcacgcctgtaatcc

SEQ ID NO: 31960 - DNA, 20 bp, Artificial Sequence
  Description of Artificial Sequence: Synthetic oligonucleotide
  Target: ATXN2; (-) strand; PAM type: NRG; PAM sequence: TGG
ttatctctggctgggcccag

SEQ ID NO: 31961 - DNA, 20 bp, Artificial Sequence
  Description of Artificial Sequence: Synthetic oligonucleotide
  Target: ATXN2; (-) strand; PAM type: NRG; PAM sequence: CAG
accttatctctggctgggcc

SEQ ID NO: 31962 - DNA, 20 bp, Artificial Sequence
  Description of Artificial Sequence: Synthetic oligonucleotide
  Target: ATXN2; (-) strand; PAM type: NRG; PAM sequence: GGG
gcaagaccttatctctggct

SEQ ID NO: 31963 - DNA, 20 bp, Artificial Sequence
  Description of Artificial Sequence: Synthetic oligonucleotide
  Target: ATXN2; (-) strand; PAM type: NRG; PAM sequence: TGG
agcaagaccttatctctggc

SEQ ID NO: 31964 - DNA, 20 bp, Artificial Sequence
  Description of Artificial Sequence: Synthetic oligonucleotide
  Target: ATXN2; (-) strand; PAM type: NRG; PAM sequence: TGG
acacagcaagaccttatctc

SEQ ID NO: 31965 - DNA, 20 bp, Artificial Sequence
  Description of Artificial Sequence: Synthetic oligonucleotide
  Target: ATXN2; (-) strand; PAM type: NRG; PAM sequence: AAG
aaggccctgggcaacacagc

SEQ ID NO: 31966 - DNA, 20 bp, Artificial Sequence
  Description of Artificial Sequence: Synthetic oligonucleotide
  Target: ATXN2; (-) strand; PAM type: NRG; PAM sequence: CAG
gttcaaggccctgggcaaca

SEQ ID NO: 31967 - DNA, 20 bp, Artificial Sequence
  Description of Artificial Sequence: Synthetic oligonucleotide
  Target: ATXN2; (-) strand; PAM type: NRG; PAM sequence: GGG
gcccaggagttcaaggccct

SEQ ID NO: 31968 - DNA, 20 bp, Artificial Sequence
  Description of Artificial Sequence: Synthetic oligonucleotide
  Target: ATXN2; (-) strand; PAM type: NRG; PAM sequence: TGG
agcccaggagttcaaggccc

SEQ ID NO: 31969 - DNA, 20 bp, Artificial Sequence
  Description of Artificial Sequence: Synthetic oligonucleotide
  Target: ATXN2; (-) strand; PAM type: NRG; PAM sequence: AGG
cgctggagcccaggagttca

SEQ ID NO: 31970 - DNA, 20 bp, Artificial Sequence
  Description of Artificial Sequence: Synthetic oligonucleotide
  Target: ATXN2; (-) strand; PAM type: NRG; PAM sequence: AAG
tcgctggagcccaggagttc

SEQ ID NO: 31971 - DNA, 20 bp, Artificial Sequence
  Description of Artificial Sequence: Synthetic oligonucleotide
  Target: ATXN2; (-) strand; PAM type: NRG; PAM sequence: GAG
ggaggatcgctggagcccag

SEQ ID NO: 31972 - DNA, 20 bp, Artificial Sequence
  Description of Artificial Sequence: Synthetic oligonucleotide
  Target: ATXN2; (-) strand; PAM type: NRG; PAM sequence: AGG
tgggaggatcgctggagccc

SEQ ID NO: 31973 - DNA, 20 bp, Artificial Sequence
  Description of Artificial Sequence: Synthetic oligonucleotide
  Target: ATXN2; (-) strand; PAM type: NRG; PAM sequence: CAG
gtgggaggatcgctggagcc

SEQ ID NO: 31974 - DNA, 20 bp, Artificial Sequence
  Description of Artificial Sequence: Synthetic oligonucleotide
  Target: ATXN2; (-) strand; PAM type: NRG; PAM sequence: GAG
ctgaggtgggaggatcgctg

SEQ ID NO: 31975 - DNA, 20 bp, Artificial Sequence
  Description of Artificial Sequence: Synthetic oligonucleotide
  Target: ATXN2; (-) strand; PAM type: NRG; PAM sequence: TGG
agctgaggtgggaggatcgc

SEQ ID NO: 31976 - DNA, 20 bp, Artificial Sequence
  Description of Artificial Sequence: Synthetic oligonucleotide
  Target: ATXN2; (-) strand; PAM type: NRG; PAM sequence: AGG
acttggggagctgaggtggg

SEQ ID NO: 31977 - DNA, 20 bp, Artificial Sequence
  Description of Artificial Sequence: Synthetic oligonucleotide
  Target: ATXN2; (-) strand; PAM type: NRG; PAM sequence: GAG
tacttggggagctgaggtgg

SEQ ID NO: 31978 - DNA, 20 bp, Artificial Sequence
  Description of Artificial Sequence: Synthetic oligonucleotide
  Target: ATXN2; (-) strand; PAM type: NRG; PAM sequence: GGG
gctacttggggagctgaggt

SEQ ID NO: 31979 - DNA, 20 bp, Artificial Sequence
  Description of Artificial Sequence: Synthetic oligonucleotide
  Target: ATXN2; (-) strand; PAM type: NRG; PAM sequence: TGG
agctacttggggagctgagg

SEQ ID NO: 31980 - DNA, 20 bp, Artificial Sequence
  Description of Artificial Sequence: Synthetic oligonucleotide
  Target: ATXN2; (-) strand; PAM type: NRG; PAM sequence: AGG
cccagctacttggggagctg

SEQ ID NO: 31981 - DNA, 20 bp, Artificial Sequence
  Description of Artificial Sequence: Synthetic oligonucleotide
  Target: ATXN2; (-) strand; PAM type: NRG; PAM sequence: GAG
tcccagctacttggggagct

SEQ ID NO: 31982 - DNA, 20 bp, Artificial Sequence
  Description of Artificial Sequence: Synthetic oligonucleotide
  Target: ATXN2; (-) strand; PAM type: NRG; PAM sequence: GAG
catagtcccagctacttggg

SEQ ID NO: 31983 - DNA, 20 bp, Artificial Sequence
  Description of Artificial Sequence: Synthetic oligonucleotide
  Target: ATXN2; (-) strand; PAM type: NRG; PAM sequence: GGG
cccatagtcccagctacttg

SEQ ID NO: 31984 - DNA, 20 bp, Artificial Sequence
  Description of Artificial Sequence: Synthetic oligonucleotide
  Target: ATXN2; (-) strand; PAM type: NRG; PAM sequence: GGG
acccatagtcccagctactt

SEQ ID NO: 31985 - DNA, 20 bp, Artificial Sequence
  Description of Artificial Sequence: Synthetic oligonucleotide
  Target: ATXN2; (-) strand; PAM type: NRG; PAM sequence: TGG
cacccatagtcccagctact

SEQ ID NO: 31986 - DNA, 20 bp, Artificial Sequence
  Description of Artificial Sequence: Synthetic oligonucleotide
  Target: ATXN2; (-) strand; PAM type: NRG; PAM sequence: CAG
atggcgtgcacccatagtcc

SEQ ID NO: 31987 - DNA, 20 bp, Artificial Sequence
  Description of Artificial Sequence: Synthetic oligonucleotide
  Target: ATXN2; (-) strand; PAM type: NRG; PAM sequence: TAG
ggtgtgatggcgtgcaccca

SEQ ID NO: 31988 - DNA, 20 bp, Artificial Sequence
  Description of Artificial Sequence: Synthetic oligonucleotide
  Target: ATXN2; (-) strand; PAM type: NRG; PAM sequence: TGG
cacaaaatggctaggtgtga

SEQ ID NO: 31989 - DNA, 20 bp, Artificial Sequence
  Description of Artificial Sequence: Synthetic oligonucleotide
  Target: ATXN2; (-) strand; PAM type: NRG; PAM sequence: AGG
cagcagttcacaaaatggct

SEQ ID NO: 31990 - DNA, 20 bp, Artificial Sequence
  Description of Artificial Sequence: Synthetic oligonucleotide
  Target: ATXN2; (-) strand; PAM type: NRG; PAM sequence: TAG
tcagcagttcacaaaatggc

SEQ ID NO: 31991 - DNA, 20 bp, Artificial Sequence
  Description of Artificial Sequence: Synthetic oligonucleotide
  Target: ATXN2; (-) strand; PAM type: NRG; PAM sequence: TGG
ttggtcagcagttcacaaaa

SEQ ID NO: 31992 - DNA, 20 bp, Artificial Sequence
  Description of Artificial Sequence: Synthetic oligonucleotide
  Target: ATXN2; (-) strand; PAM type: NRG; PAM sequence: CAG
cagagaggagcattggtcag

SEQ ID NO: 31993 - DNA, 20 bp, Artificial Sequence
  Description of Artificial Sequence: Synthetic oligonucleotide
  Target: ATXN2; (-) strand; PAM type: NRG; PAM sequence: CAG
ctgcagagaggagcattggt

SEQ ID NO: 31994 - DNA, 20 bp, Artificial Sequence
  Description of Artificial Sequence: Synthetic oligonucleotide
  Target: ATXN2; (-) strand; PAM type: NRG; PAM sequence: TGG
ctgtctgcagagaggagcat

SEQ ID NO: 31995 - DNA, 20 bp, Artificial Sequence
  Description of Artificial Sequence: Synthetic oligonucleotide
  Target: ATXN2; (-) strand; PAM type: NRG; PAM sequence: GAG
aactttctgtctgcagagag

SEQ ID NO: 31996 - DNA, 20 bp, Artificial Sequence
  Description of Artificial Sequence: Synthetic oligonucleotide
  Target: ATXN2; (-) strand; PAM type: NRG; PAM sequence: AGG
cgaactttctgtctgcagag

SEQ ID NO: 31997 - DNA, 20 bp, Artificial Sequence
  Description of Artificial Sequence: Synthetic oligonucleotide
  Target: ATXN2; (-) strand; PAM type: NRG; PAM sequence: GAG
ccgaactttctgtctgcaga

SEQ ID NO: 31998 - DNA, 20 bp, Artificial Sequence
  Description of Artificial Sequence: Synthetic oligonucleotide
  Target: ATXN2; (-) strand; PAM type: NRG; PAM sequence: GAG
caccgaactttctgtctgca

SEQ ID NO: 31999 - DNA, 20 bp, Artificial Sequence
  Description of Artificial Sequence: Synthetic oligonucleotide
  Target: ATXN2; (-) strand; PAM type: NRG; PAM sequence: CAG
cacaccgaactttctgtctg

SEQ ID NO: 32000 - DNA, 20 bp, Artificial Sequence
  Description of Artificial Sequence: Synthetic oligonucleotide
  Target: ATXN2; (-) strand; PAM type: NRG; PAM sequence: CAG
caggcatgagccactgcacc

SEQ ID NO: 32001 - DNA, 20 bp, Artificial Sequence
  Description of Artificial Sequence: Synthetic oligonucleotide
  Target: ATXN2; (-) strand; PAM type: NRG; PAM sequence: GAG
ttgggagggattacaggcat

SEQ ID NO: 32002 - DNA, 20 bp, Artificial Sequence
  Description of Artificial Sequence: Synthetic oligonucleotide
  Target: ATXN2; (-) strand; PAM type: NRG; PAM sequence: AGG
aaagtgttgggagggattac

SEQ ID NO: 32003 - DNA, 20 bp, Artificial Sequence
  Description of Artificial Sequence: Synthetic oligonucleotide
  Target: ATXN2; (-) strand; PAM type: NRG; PAM sequence: CAG
caaagtgttgggagggatta

SEQ ID NO: 32004 - DNA, 20 bp, Artificial Sequence
  Description of Artificial Sequence: Synthetic oligonucleotide
  Target: ATXN2; (-) strand; PAM type: NRG; PAM sequence: GGG
ggcctcccaaagtgttggga

SEQ ID NO: 32005 - DNA, 20 bp, Artificial Sequence
  Description of Artificial Sequence: Synthetic oligonucleotide
  Target: ATXN2; (-) strand; PAM type: NRG; PAM sequence: AGG
tggcctcccaaagtgttggg

SEQ ID NO: 32006 - DNA, 20 bp, Artificial Sequence
  Description of Artificial Sequence: Synthetic oligonucleotide
  Target: ATXN2; (-) strand; PAM type: NRG; PAM sequence: GAG
ttggcctcccaaagtgttgg

SEQ ID NO: 32007 - DNA, 20 bp, Artificial Sequence
  Description of Artificial Sequence: Synthetic oligonucleotide
  Target: ATXN2; (-) strand; PAM type: NRG; PAM sequence: GGG
ccttggcctcccaaagtgtt

SEQ ID NO: 32008 - DNA, 20 bp, Artificial Sequence
  Description of Artificial Sequence: Synthetic oligonucleotide
  Target: ATXN2; (-) strand; PAM type: NRG; PAM sequence: TGG
gccttggcctcccaaagtgt

SEQ ID NO: 32009 - DNA, 20 bp, Artificial Sequence
  Description of Artificial Sequence: Synthetic oligonucleotide
  Target: ATXN2; (-) strand; PAM type: NRG; PAM sequence: AAG
actcttgccttggcctccca

SEQ ID NO: 32010 - DNA, 20 bp, Artificial Sequence
  Description of Artificial Sequence: Synthetic oligonucleotide
  Target: ATXN2; (-) strand; PAM type: NRG; PAM sequence: TGG
ctcaagtgaaactcttgcct

SEQ ID NO: 32011 - DNA, 20 bp, Artificial Sequence
  Description of Artificial Sequence: Synthetic oligonucleotide
  Target: ATXN2; (-) strand; PAM type: NRG; PAM sequence: AAG
ggtgtcaaactcctgggctc

SEQ ID NO: 32012 - DNA, 20 bp, Artificial Sequence
  Description of Artificial Sequence: Synthetic oligonucleotide
  Target: ATXN2; (-) strand; PAM type: NRG; PAM sequence: GGG
caggctggtgtcaaactcct

SEQ ID NO: 32013 - DNA, 20 bp, Artificial Sequence
  Description of Artificial Sequence: Synthetic oligonucleotide
  Target: ATXN2; (-) strand; PAM type: NRG; PAM sequence: TGG
ccaggctggtgtcaaactcc

SEQ ID NO: 32014 - DNA, 20 bp, Artificial Sequence
  Description of Artificial Sequence: Synthetic oligonucleotide
  Target: ATXN2; (-) strand; PAM type: NRG; PAM sequence: TGG
tcttgctctgttgcccaggc

SEQ ID NO: 32015 - DNA, 20 bp, Artificial Sequence
  Description of Artificial Sequence: Synthetic oligonucleotide
  Target: ATXN2; (-) strand; PAM type: NRG; PAM sequence: AGG
aggatcttgctctgttgccc

SEQ ID NO: 32016 - DNA, 20 bp, Artificial Sequence
  Description of Artificial Sequence: Synthetic oligonucleotide
  Target: ATXN2; (-) strand; PAM type: NRG; PAM sequence: CAG
taggatcttgctctgttgcc

SEQ ID NO: 32017 - DNA, 20 bp, Artificial Sequence
  Description of Artificial Sequence: Synthetic oligonucleotide
  Target: ATXN2; (-) strand; PAM type: NRG; PAM sequence: AGG
atttttaatttttcggagat

SEQ ID NO: 32018 - DNA, 20 bp, Artificial Sequence
  Description of Artificial Sequence: Synthetic oligonucleotide
  Target: ATXN2; (-) strand; PAM type: NRG; PAM sequence: TAG
tatttttaatttttcggaga

SEQ ID NO: 32019 - DNA, 20 bp, Artificial Sequence
  Description of Artificial Sequence: Synthetic oligonucleotide
  Target: ATXN2; (-) strand; PAM type: NRG; PAM sequence: GAG
ttcttatttttaatttttcg

SEQ ID NO: 32020 - DNA, 20 bp, Artificial Sequence
  Description of Artificial Sequence: Synthetic oligonucleotide
  Target: ATXN2; (-) strand; PAM type: NRG; PAM sequence: CGG
ttttcttatttttaattttt

SEQ ID NO: 32021 - DNA, 20 bp, Artificial Sequence
  Description of Artificial Sequence: Synthetic oligonucleotide
  Target: ATXN2; (-) strand; PAM type: NRG; PAM sequence: CGG
caggtgtgtaccaccatgtc

SEQ ID NO: 32022 - DNA, 20 bp, Artificial Sequence
  Description of Artificial Sequence: Synthetic oligonucleotide
  Target: ATXN2; (-) strand; PAM type: NRG; PAM sequence: AGG
tgctgagtacctggggctac

SEQ ID NO: 32023 - DNA, 20 bp, Artificial Sequence
  Description of Artificial Sequence: Synthetic oligonucleotide
  Target: ATXN2; (-) strand; PAM type: NRG; PAM sequence: CAG
ttgctgagtacctggggcta

SEQ ID NO: 32024 - DNA, 20 bp, Artificial Sequence
  Description of Artificial Sequence: Synthetic oligonucleotide
  Target: ATXN2; (-) strand; PAM type: NRG; PAM sequence: GGG
ctcagcttgctgagtacctg

SEQ ID NO: 32025 - DNA, 20 bp, Artificial Sequence
  Description of Artificial Sequence: Synthetic oligonucleotide
  Target: ATXN2; (-) strand; PAM type: NRG; PAM sequence: GGG
cctcagcttgctgagtacct

SEQ ID NO: 32026 - DNA, 20 bp, Artificial Sequence
  Description of Artificial Sequence: Synthetic oligonucleotide
  Target: ATXN2; (-) strand; PAM type: NRG; PAM sequence: TGG
acctcagcttgctgagtacc

SEQ ID NO: 32027 - DNA, 20 bp, Artificial Sequence
  Description of Artificial Sequence: Synthetic oligonucleotide
  Target: ATXN2; (-) strand; PAM type: NRG; PAM sequence: GAG
tcatcccacctcagcttgct

SEQ ID NO: 32028 - DNA, 20 bp, Artificial Sequence
  Description of Artificial Sequence: Synthetic oligonucleotide
  Target: ATXN2; (-) strand; PAM type: NRG; PAM sequence: CAG
atcatcccatcatcccacct

SEQ ID NO: 32029 - DNA, 20 bp, Artificial Sequence
  Description of Artificial Sequence: Synthetic oligonucleotide
  Target: ATXN2; (-) strand; PAM type: NRG; PAM sequence: AAG
aacctcgaattcttgggctc

SEQ ID NO: 32030 - DNA, 20 bp, Artificial Sequence
  Description of Artificial Sequence: Synthetic oligonucleotide
  Target: ATXN2; (-) strand; PAM type: NRG; PAM sequence: GGG
ctgtgtaacctcgaattctt

SEQ ID NO: 32031 - DNA, 20 bp, Artificial Sequence
  Description of Artificial Sequence: Synthetic oligonucleotide
  Target: ATXN2; (-) strand; PAM type: NRG; PAM sequence: TGG
actgtgtaacctcgaattct

SEQ ID NO: 32032 - DNA, 20 bp, Artificial Sequence
  Description of Artificial Sequence: Synthetic oligonucleotide
  Target: ATXN2; (-) strand; PAM type: NRG; PAM sequence: TAG
ggagtgtagtggcacgatca

SEQ ID NO: 32033 - DNA, 20 bp, Artificial Sequence
  Description of Artificial Sequence: Synthetic oligonucleotide
  Target: ATXN2; (-) strand; PAM type: NRG; PAM sequence: TGG
ttgctcagggtggagtgtag

SEQ ID NO: 32034 - DNA, 20 bp, Artificial Sequence
  Description of Artificial Sequence: Synthetic oligonucleotide
  Target: ATXN2; (-) strand; PAM type: NRG; PAM sequence: TAG
ctgttgctcagggtggagtg

SEQ ID NO: 32035 - DNA, 20 bp, Artificial Sequence
  Description of Artificial Sequence: Synthetic oligonucleotide
  Target: ATXN2; (-) strand; PAM type: NRG; PAM sequence: GAG
ttcctctgttgctcagggtg

SEQ ID NO: 32036 - DNA, 20 bp, Artificial Sequence
  Description of Artificial Sequence: Synthetic oligonucleotide
  Target: ATXN2; (-) strand; PAM type: NRG; PAM sequence: TGG
tcttcctctgttgctcaggg

SEQ ID NO: 32037 - DNA, 20 bp, Artificial Sequence
  Description of Artificial Sequence: Synthetic oligonucleotide
  Target: ATXN2; (-) strand; PAM type: NRG; PAM sequence: GGG
gaatcttcctctgttgctca

SEQ ID NO: 32038 - DNA, 20 bp, Artificial Sequence
  Description of Artificial Sequence: Synthetic oligonucleotide
  Target: ATXN2; (-) strand; PAM type: NRG; PAM sequence: AGG
agaatcttcctctgttgctc

SEQ ID NO: 32039 - DNA, 20 bp, Artificial Sequence
  Description of Artificial Sequence: Synthetic oligonucleotide
  Target: ATXN2; (-) strand; PAM type: NRG; PAM sequence: CAG
cagaatcttcctctgttgct

SEQ ID NO: 32040 - DNA, 20 bp, Artificial Sequence
  Description of Artificial Sequence: Synthetic oligonucleotide
  Target: ATXN2; (-) strand; PAM type: NRG; PAM sequence: CAG
ttttttttcttttttggaga

SEQ ID NO: 32041 - DNA, 20 bp, Artificial Sequence
  Description of Artificial Sequence: Synthetic oligonucleotide
  Target: ATXN2; (-) strand; PAM type: NRG; PAM sequence: GAG
ttttttttttttcttttttg

SEQ ID NO: 32042 - DNA, 20 bp, Artificial Sequence
  Description of Artificial Sequence: Synthetic oligonucleotide
  Target: ATXN2; (-) strand; PAM type: NRG; PAM sequence: TGG
ttttttttttttttcttttt

SEQ ID NO: 32043 - DNA, 20 bp, Artificial Sequence
  Description of Artificial Sequence: Synthetic oligonucleotide
  Target: ATXN2; (-) strand; PAM type: NRG; PAM sequence: GGG
attctgcctccttagtagct

SEQ ID NO: 32044 - DNA, 20 bp, Artificial Sequence
  Description of Artificial Sequence: Synthetic oligonucleotide
  Target: ATXN2; (-) strand; PAM type: NRG; PAM sequence: TGG
gattctgcctccttagtagc

SEQ ID NO: 32045 - DNA, 20 bp, Artificial Sequence
  Description of Artificial Sequence: Synthetic oligonucleotide
  Target: ATXN2; (-) strand; PAM type: NRG; PAM sequence: TAG
agatgattctgcctccttag

SEQ ID NO: 32046 - DNA, 20 bp, Artificial Sequence
  Description of Artificial Sequence: Synthetic oligonucleotide
  Target: ATXN2; (-) strand; PAM type: NRG; PAM sequence: TAG
cccagatgattctgcctcct

SEQ ID NO: 32047 - DNA, 20 bp, Artificial Sequence
  Description of Artificial Sequence: Synthetic oligonucleotide
  Target: ATXN2; (-) strand; PAM type: NRG; PAM sequence: CAG
tgaccttgaactcctgagcc

SEQ ID NO: 32048 - DNA, 20 bp, Artificial Sequence
  Description of Artificial Sequence: Synthetic oligonucleotide
  Target: ATXN2; (-) strand; PAM type: NRG; PAM sequence: GAG
gaggctgaccttgaactcct

SEQ ID NO: 32049 - DNA, 20 bp, Artificial Sequence
  Description of Artificial Sequence: Synthetic oligonucleotide
  Target: ATXN2; (-) strand; PAM type: NRG; PAM sequence: AGG
agggtctccttatgttgctg

SEQ ID NO: 32050 - DNA, 20 bp, Artificial Sequence
  Description of Artificial Sequence: Synthetic oligonucleotide
  Target: ATXN2; (-) strand; PAM type: NRG; PAM sequence: GAG
cagggtctccttatgttgct

SEQ ID NO: 32051 - DNA, 20 bp, Artificial Sequence
  Description of Artificial Sequence: Synthetic oligonucleotide
  Target: ATXN2; (-) strand; PAM type: NRG; PAM sequence: GGG
ccttttgttcctaagagaca

SEQ ID NO: 32052 - DNA, 20 bp, Artificial Sequence
  Description of Artificial Sequence: Synthetic oligonucleotide
  Target: ATXN2; (-) strand; PAM type: NRG; PAM sequence: AGG
cccttttgttcctaagagac

SEQ ID NO: 32053 - DNA, 20 bp, Artificial Sequence
  Description of Artificial Sequence: Synthetic oligonucleotide
  Target: ATXN2; (-) strand; PAM type: NRG; PAM sequence: CAG
ccccttttgttcctaagaga

SEQ ID NO: 32054 - DNA, 20 bp, Artificial Sequence
  Description of Artificial Sequence: Synthetic oligonucleotide
  Target: ATXN2; (-) strand; PAM type: NRG; PAM sequence: GAG
ccctccccttttgttcctaa

SEQ ID NO: 32055 - DNA, 20 bp, Artificial Sequence
  Description of Artificial Sequence: Synthetic oligonucleotide
  Target: ATXN2; (-) strand; PAM type: NRG; PAM sequence: AAG
ccccctccccttttgttcct

SEQ ID NO: 32056 - DNA, 20 bp, Artificial Sequence
  Description of Artificial Sequence: Synthetic oligonucleotide
  Target: ATXN2; (-) strand; PAM type: NRG; PAM sequence: TGG
taggcatgagccaccatgcc

SEQ ID NO: 32057 - DNA, 20 bp, Artificial Sequence
  Description of Artificial Sequence: Synthetic oligonucleotide
  Target: ATXN2; (-) strand; PAM type: NRG; PAM sequence: GAG
agtgctgggattataggcat

SEQ ID NO: 32058 - DNA, 20 bp, Artificial Sequence
  Description of Artificial Sequence: Synthetic oligonucleotide
  Target: ATXN2; (-) strand; PAM type: NRG; PAM sequence: AGG
cctcccagtgctgggattat

SEQ ID NO: 32059 - DNA, 20 bp, Artificial Sequence
  Description of Artificial Sequence: Synthetic oligonucleotide
  Target: ATXN2; (-) strand; PAM type: NRG; PAM sequence: TAG
gcctcccagtgctgggatta

SEQ ID NO: 32060 - DNA, 20 bp, Artificial Sequence
  Description of Artificial Sequence: Synthetic oligonucleotide
  Target: ATXN2; (-) strand; PAM type: NRG; PAM sequence: GGG
tgcctcggcctcccagtgct

SEQ ID NO: 32061 - DNA, 20 bp, Artificial Sequence
  Description of Artificial Sequence: Synthetic oligonucleotide
  Target: ATXN2; (-) strand; PAM type: NRG; PAM sequence: TGG
ctgcctcggcctcccagtgc

SEQ ID NO: 32062 - DNA, 20 bp, Artificial Sequence
  Description of Artificial Sequence: Synthetic oligonucleotide
  Target: ATXN2; (-) strand; PAM type: NRG; PAM sequence: CAG
atccacctgcctcggcctcc

SEQ ID NO: 32063 - DNA, 20 bp, Artificial Sequence
  Description of Artificial Sequence: Synthetic oligonucleotide
  Target: ATXN2; (-) strand; PAM type: NRG; PAM sequence: CGG
ctcaggtgatccacctgcct

SEQ ID NO: 32064 - DNA, 20 bp, Artificial Sequence
  Description of Artificial Sequence: Synthetic oligonucleotide
  Target: ATXN2; (-) strand; PAM type: NRG; PAM sequence: AGG
ggtctcgaactcatgacctc

SEQ ID NO: 32065 - DNA, 20 bp, Artificial Sequence
  Description of Artificial Sequence: Synthetic oligonucleotide
  Target: ATXN2; (-) strand; PAM type: NRG; PAM sequence: CAG
tggtctcgaactcatgacct

SEQ ID NO: 32066 - DNA, 20 bp, Artificial Sequence
  Description of Artificial Sequence: Synthetic oligonucleotide
  Target: ATXN2; (-) strand; PAM type: NRG; PAM sequence: TGG
tagcaccatgttggccaggc

SEQ ID NO: 32067 - DNA, 20 bp, Artificial Sequence
  Description of Artificial Sequence: Synthetic oligonucleotide
  Target: ATXN2; (-) strand; PAM type: NRG; PAM sequence: AGG
ggggtagcaccatgttggcc

SEQ ID NO: 32068 - DNA, 20 bp, Artificial Sequence
  Description of Artificial Sequence: Synthetic oligonucleotide
  Target: ATXN2; (-) strand; PAM type: NRG; PAM sequence: CAG
tggggtagcaccatgttggc

SEQ ID NO: 32069 - DNA, 20 bp, Artificial Sequence
  Description of Artificial Sequence: Synthetic oligonucleotide
  Target: ATXN2; (-) strand; PAM type: NRG; PAM sequence: TGG
gagatggggtagcaccatgt

SEQ ID NO: 32070 - DNA, 20 bp, Artificial Sequence
  Description of Artificial Sequence: Synthetic oligonucleotide
  Target: ATXN2; (-) strand; PAM type: NRG; PAM sequence: TAG
gtattttagtagagatgggg

SEQ ID NO: 32071 - DNA, 20 bp, Artificial Sequence
  Description of Artificial Sequence: Synthetic oligonucleotide
  Target: ATXN2; (-) strand; PAM type: NRG; PAM sequence: GGG
tttgtattttagtagagatg

SEQ ID NO: 32072 - DNA, 20 bp, Artificial Sequence
  Description of Artificial Sequence: Synthetic oligonucleotide
  Target: ATXN2; (-) strand; PAM type: NRG; PAM sequence: GGG
ttttgtattttagtagagat

SEQ ID NO: 32073 - DNA, 20 bp, Artificial Sequence
  Description of Artificial Sequence: Synthetic oligonucleotide
  Target: ATXN2; (-) strand; PAM type: NRG; PAM sequence: TGG
gttttgtattttagtagaga

SEQ ID NO: 32074 - DNA, 20 bp, Artificial Sequence
  Description of Artificial Sequence: Synthetic oligonucleotide
  Target: ATXN2; (-) strand; PAM type: NRG; PAM sequence: GAG
ctaggttttgtattttagta

SEQ ID NO: 32075 - DNA, 20 bp, Artificial Sequence
  Description of Artificial Sequence: Synthetic oligonucleotide
  Target: ATXN2; (-) strand; PAM type: NRG; PAM sequence: TAG
ggctaggttttgtattttag

SEQ ID NO: 32076 - DNA, 20 bp, Artificial Sequence
  Description of Artificial Sequence: Synthetic oligonucleotide
  Target: ATXN2; (-) strand; PAM type: NRG; PAM sequence: TAG
gccggctaggttttgtattt

SEQ ID NO: 32077 - DNA, 20 bp, Artificial Sequence
  Description of Artificial Sequence: Synthetic oligonucleotide
  Target: ATXN2; (-) strand; PAM type: NRG; PAM sequence: AGG
acctgccaccacagccggct

SEQ ID NO: 32078 - DNA, 20 bp, Artificial Sequence
  Description of Artificial Sequence: Synthetic oligonucleotide
  Target: ATXN2; (-) strand; PAM type: NRG; PAM sequence: TAG
cacctgccaccacagccggc

SEQ ID NO: 32079 - DNA, 20 bp, Artificial Sequence
  Description of Artificial Sequence: Synthetic oligonucleotide
  Target: ATXN2; (-) strand; PAM type: NRG; PAM sequence: CGG
caggcacctgccaccacagc

SEQ ID NO: 32080 - DNA, 20 bp, Artificial Sequence
  Description of Artificial Sequence: Synthetic oligonucleotide
  Target: ATXN2; (-) strand; PAM type: NRG; PAM sequence: CAG
actacaggcacctgccacca

SEQ ID NO: 32081 - DNA, 20 bp, Artificial Sequence
  Description of Artificial Sequence: Synthetic oligonucleotide
  Target: ATXN2; (-) strand; PAM type: NRG; PAM sequence: AGG
tcccaagtagctgggactac

SEQ ID NO: 32082 - DNA, 20 bp, Artificial Sequence
  Description of Artificial Sequence: Synthetic oligonucleotide
  Target: ATXN2; (-) strand; PAM type: NRG; PAM sequence: CAG
ctcccaagtagctgggacta

SEQ ID NO: 32083 - DNA, 20 bp, Artificial Sequence
  Description of Artificial Sequence: Synthetic oligonucleotide
  Target: ATXN2; (-) strand; PAM type: NRG; PAM sequence: GGG
tctcagcctcccaagtagct

SEQ ID NO: 32084 - DNA, 20 bp, Artificial Sequence
  Description of Artificial Sequence: Synthetic oligonucleotide
  Target: ATXN2; (-) strand; PAM type: NRG; PAM sequence: TGG
gtctcagcctcccaagtagc

SEQ ID NO: 32085 - DNA, 20 bp, Artificial Sequence
  Description of Artificial Sequence: Synthetic oligonucleotide
  Target: ATXN2; (-) strand; PAM type: NRG; PAM sequence: TAG
tcctgtctcagcctcccaag

SEQ ID NO: 32086 - DNA, 20 bp, Artificial Sequence
  Description of Artificial Sequence: Synthetic oligonucleotide
  Target: ATXN2; (-) strand; PAM type: NRG; PAM sequence: AAG
tattcctgtctcagcctccc

SEQ ID NO: 32087 - DNA, 20 bp, Artificial Sequence
  Description of Artificial Sequence: Synthetic oligonucleotide
  Target: ATXN2; (-) strand; PAM type: NRG; PAM sequence: CAG
ggttcaagctattcctgtct

SEQ ID NO: 32088 - DNA, 20 bp, Artificial Sequence
  Description of Artificial Sequence: Synthetic oligonucleotide
  Target: ATXN2; (-) strand; PAM type: NRG; PAM sequence: AAG
aacctccacctcctgggttc

SEQ ID NO: 32089 - DNA, 20 bp, Artificial Sequence
  Description of Artificial Sequence: Synthetic oligonucleotide
  Target: ATXN2; (-) strand; PAM type: NRG; PAM sequence: GGG
ccttgcaacctccacctcct

SEQ ID NO: 32090 - DNA, 20 bp, Artificial Sequence
  Description of Artificial Sequence: Synthetic oligonucleotide
  Target: ATXN2; (-) strand; PAM type: NRG; PAM sequence: TGG
tccttgcaacctccacctcc

SEQ ID NO: 32091 - DNA, 20 bp, Artificial Sequence
  Description of Artificial Sequence: Synthetic oligonucleotide
  Target: ATXN2; (-) strand; PAM type: NRG; PAM sequence: TGG
agagtgcagtggggcaatct

SEQ ID NO: 32092 - DNA, 20 bp, Artificial Sequence
  Description of Artificial Sequence: Synthetic oligonucleotide
  Target: ATXN2; (-) strand; PAM type: NRG; PAM sequence: GGG
gccgagcctagagtgcagtg

SEQ ID NO: 32093 - DNA, 20 bp, Artificial Sequence
  Description of Artificial Sequence: Synthetic oligonucleotide
  Target: ATXN2; (-) strand; PAM type: NRG; PAM sequence: GGG
tgccgagcctagagtgcagt

SEQ ID NO: 32094 - DNA, 20 bp, Artificial Sequence
  Description of Artificial Sequence: Synthetic oligonucleotide
  Target: ATXN2; (-) strand; PAM type: NRG; PAM sequence: TGG
ttgccgagcctagagtgcag

SEQ ID NO: 32095 - DNA, 20 bp, Artificial Sequence
  Description of Artificial Sequence: Synthetic oligonucleotide
  Target: ATXN2; (-) strand; PAM type: NRG; PAM sequence: CAG
ctgttgccgagcctagagtg

SEQ ID NO: 32096 - DNA, 20 bp, Artificial Sequence
  Description of Artificial Sequence: Synthetic oligonucleotide
  Target: ATXN2; (-) strand; PAM type: NRG; PAM sequence: GAG
tcgctctgttgccgagccta

SEQ ID NO: 32097 - DNA, 20 bp, Artificial Sequence
  Description of Artificial Sequence: Synthetic oligonucleotide
  Target: ATXN2; (-) strand; PAM type: NRG; PAM sequence: TAG
tctcgctctgttgccgagcc

SEQ ID NO: 32098 - DNA, 20 bp, Artificial Sequence
  Description of Artificial Sequence: Synthetic oligonucleotide
  Target: ATXN2; (-) strand; PAM type: NRG; PAM sequence: GAG
tggagtctcgctctgttgcc

SEQ ID NO: 32099 - DNA, 20 bp, Artificial Sequence
  Description of Artificial Sequence: Synthetic oligonucleotide
  Target: ATXN2; (-) strand; PAM type: NRG; PAM sequence: GAG
ttttttttttttttgagatg

SEQ ID NO: 32100 - DNA, 20 bp, Artificial Sequence
  Description of Artificial Sequence: Synthetic oligonucleotide
  Target: ATXN2; (-) strand; PAM type: NRG; PAM sequence: TGG
ttttttttttttttttgaga

SEQ ID NO: 32101 - DNA, 20 bp, Artificial Sequence
  Description of Artificial Sequence: Synthetic oligonucleotide
  Target: ATXN2; (-) strand; PAM type: NRG; PAM sequence: GAG
cttttttttttttttttttt

SEQ ID NO: 32102 - DNA, 20 bp, Artificial Sequence
  Description of Artificial Sequence: Synthetic oligonucleotide
  Target: ATXN2; (-) strand; PAM type: NRG; PAM sequence: TAG
attggctgcataactggcat

SEQ ID NO: 32103 - DNA, 20 bp, Artificial Sequence
  Description of Artificial Sequence: Synthetic oligonucleotide
  Target: ATXN2; (-) strand; PAM type: NRG; PAM sequence: TGG
ctcatcattggctgcataac

SEQ ID NO: 32104 - DNA, 20 bp, Artificial Sequence
  Description of Artificial Sequence: Synthetic oligonucleotide
  Target: ATXN2; (-) strand; PAM type: NRG; PAM sequence: TGG
ttaccagagtatctcatcat

SEQ ID NO: 32105 - DNA, 20 bp, Artificial Sequence
  Description of Artificial Sequence: Synthetic oligonucleotide
  Target: ATXN2; (-) strand; PAM type: NRG; PAM sequence: GAG
accaagagggttatttacca

SEQ ID NO: 32106 - DNA, 20 bp, Artificial Sequence
  Description of Artificial Sequence: Synthetic oligonucleotide
  Target: ATXN2; (-) strand; PAM type: NRG; PAM sequence: CAG
agaccaagagggttatttac

SEQ ID NO: 32107 - DNA, 20 bp, Artificial Sequence
  Description of Artificial Sequence: Synthetic oligonucleotide
  Target: ATXN2; (-) strand; PAM type: NRG; PAM sequence: GGG
tgaagaaattgagaccaaga

SEQ ID NO: 32108 - DNA, 20 bp, Artificial Sequence
  Description of Artificial Sequence: Synthetic oligonucleotide
  Target: ATXN2; (-) strand; PAM type: NRG; PAM sequence: AGG
gtgaagaaattgagaccaag

SEQ ID NO: 32109 - DNA, 20 bp, Artificial Sequence
  Description of Artificial Sequence: Synthetic oligonucleotide
  Target: ATXN2; (-) strand; PAM type: NRG; PAM sequence: GAG
ggtgaagaaattgagaccaa

SEQ ID NO: 32110 - DNA, 20 bp, Artificial Sequence
  Description of Artificial Sequence: Synthetic oligonucleotide
  Target: ATXN2; (-) strand; PAM type: NRG; PAM sequence: AAG
cgggtgaagaaattgagacc

SEQ ID NO: 32111 - DNA, 20 bp, Artificial Sequence
  Description of Artificial Sequence: Synthetic oligonucleotide
  Target: ATXN2; (-) strand; PAM type: NRG; PAM sequence: GAG
tatttacgggtgaagaaatt

SEQ ID NO: 32112 - DNA, 20 bp, Artificial Sequence
  Description of Artificial Sequence: Synthetic oligonucleotide
  Target: ATXN2; (-) strand; PAM type: NRG; PAM sequence: AAG
actcattctatttacgggtg

SEQ ID NO: 32113 - DNA, 20 bp, Artificial Sequence
  Description of Artificial Sequence: Synthetic oligonucleotide
  Target: ATXN2; (-) strand; PAM type: NRG; PAM sequence: GGG
ttagtactcattctatttac

SEQ ID NO: 32114 - DNA, 20 bp, Artificial Sequence
  Description of Artificial Sequence: Synthetic oligonucleotide
  Target: ATXN2; (-) strand; PAM type: NRG; PAM sequence: CGG
tttagtactcattctattta

SEQ ID NO: 32115 - DNA, 20 bp, Artificial Sequence
  Description of Artificial Sequence: Synthetic oligonucleotide
  Target: ATXN2; (-) strand; PAM type: NRG; PAM sequence: TAG
ctctggctctggtggttttt

SEQ ID NO: 32116 - DNA, 20 bp, Artificial Sequence
  Description of Artificial Sequence: Synthetic oligonucleotide
  Target: ATXN2; (-) strand; PAM type: NRG; PAM sequence: TGG
ttggatttctctggctctgg

SEQ ID NO: 32117 - DNA, 20 bp, Artificial Sequence
  Description of Artificial Sequence: Synthetic oligonucleotide
  Target: ATXN2; (-) strand; PAM type: NRG; PAM sequence: TGG
agtttggatttctctggctc

SEQ ID NO: 32118 - DNA, 20 bp, Artificial Sequence
  Description of Artificial Sequence: Synthetic oligonucleotide
  Target: ATXN2; (-) strand; PAM type: NRG; PAM sequence: TGG
cctggtagtttggatttctc

SEQ ID NO: 32119 - DNA, 20 bp, Artificial Sequence
  Description of Artificial Sequence: Synthetic oligonucleotide
  Target: ATXN2; (-) strand; PAM type: NRG; PAM sequence: TGG
cctccctttccctggtagtt

SEQ ID NO: 32120 - DNA, 20 bp, Artificial Sequence
  Description of Artificial Sequence: Synthetic oligonucleotide
  Target: ATXN2; (-) strand; PAM type: NRG; PAM sequence: TAG
gggcccctccctttccctgg

SEQ ID NO: 32121 - DNA, 20 bp, Artificial Sequence
  Description of Artificial Sequence: Synthetic oligonucleotide
  Target: ATXN2; (-) strand; PAM type: NRG; PAM sequence: TGG
agtgggcccctccctttccc

SEQ ID NO: 32122 - DNA, 20 bp, Artificial Sequence
  Description of Artificial Sequence: Synthetic oligonucleotide
  Target: ATXN2; (-) strand; PAM type: NRG; PAM sequence: GGG
ttgctggggtggttctcagt

SEQ ID NO: 32123 - DNA, 20 bp, Artificial Sequence
  Description of Artificial Sequence: Synthetic oligonucleotide
  Target: ATXN2; (-) strand; PAM type: NRG; PAM sequence: TGG
gttgctggggtggttctcag

SEQ ID NO: 32124 - DNA, 20 bp, Artificial Sequence
  Description of Artificial Sequence: Synthetic oligonucleotide
  Target: ATXN2; (-) strand; PAM type: NRG; PAM sequence: CAG
cgggttgctggggtggttct

SEQ ID NO: 32125 - DNA, 20 bp, Artificial Sequence
  Description of Artificial Sequence: Synthetic oligonucleotide
  Target: ATXN2; (-) strand; PAM type: NRG; PAM sequence: TGG
ctgtggtcgggttgctgggg

SEQ ID NO: 32126 - DNA, 20 bp, Artificial Sequence
  Description of Artificial Sequence: Synthetic oligonucleotide
  Target: ATXN2; (-) strand; PAM type: NRG; PAM sequence: GGG
cagctgtggtcgggttgctg

SEQ ID NO: 32127 - DNA, 20 bp, Artificial Sequence
  Description of Artificial Sequence: Synthetic oligonucleotide
  Target: ATXN2; (-) strand; PAM type: NRG; PAM sequence: GGG
ccagctgtggtcgggttgct

SEQ ID NO: 32128 - DNA, 20 bp, Artificial Sequence
  Description of Artificial Sequence: Synthetic oligonucleotide
  Target: ATXN2; (-) strand; PAM type: NRG; PAM sequence: TGG
accagctgtggtcgggttgc

SEQ ID NO: 32129 - DNA, 20 bp, Artificial Sequence
  Description of Artificial Sequence: Synthetic oligonucleotide
  Target: ATXN2; (-) strand; PAM type: NRG; PAM sequence: GGG
agggaagaccagctgtggtc

SEQ ID NO: 32130 - DNA, 20 bp, Artificial Sequence
  Description of Artificial Sequence: Synthetic oligonucleotide
  Target: ATXN2; (-) strand; PAM type: NRG; PAM sequence: CGG
cagggaagaccagctgtggt

SEQ ID NO: 32131 - DNA, 20 bp, Artificial Sequence
  Description of Artificial Sequence: Synthetic oligonucleotide
  Target: ATXN2; (-) strand; PAM type: NRG; PAM sequence: TGG
tgtccagggaagaccagctg

SEQ ID NO: 32132 - DNA, 20 bp, Artificial Sequence
  Description of Artificial Sequence: Synthetic oligonucleotide
  Target: ATXN2; (-) strand; PAM type: NRG; PAM sequence: CAG
tcatggtgtccagggaagac

SEQ ID NO: 32133 - DNA, 20 bp, Artificial Sequence
  Description of Artificial Sequence: Synthetic oligonucleotide
  Target: ATXN2; (-) strand; PAM type: NRG; PAM sequence: AAG
gtggttcatggtgtccaggg

SEQ ID NO: 32134 - DNA, 20 bp, Artificial Sequence
  Description of Artificial Sequence: Synthetic oligonucleotide
  Target: ATXN2; (-) strand; PAM type: NRG; PAM sequence: GGG
attgtggttcatggtgtcca

SEQ ID NO: 32135 - DNA, 20 bp, Artificial Sequence
  Description of Artificial Sequence: Synthetic oligonucleotide
  Target: ATXN2; (-) strand; PAM type: NRG; PAM sequence: AGG
cattgtggttcatggtgtcc

SEQ ID NO: 32136 - DNA, 20 bp, Artificial Sequence
  Description of Artificial Sequence: Synthetic oligonucleotide
  Target: ATXN2; (-) strand; PAM type: NRG; PAM sequence: CAG
acattgtggttcatggtgtc

SEQ ID NO: 32137 - DNA, 20 bp, Artificial Sequence
  Description of Artificial Sequence: Synthetic oligonucleotide
  Target: ATXN2; (-) strand; PAM type: NRG; PAM sequence: TGG
ggtttggacattgtggttca

SEQ ID NO: 32138 - DNA, 20 bp, Artificial Sequence
  Description of Artificial Sequence: Synthetic oligonucleotide
  Target: ATXN2; (-) strand; PAM type: NRG; PAM sequence: TGG
gtgaagaggtttggacattg

SEQ ID NO: 32139 - DNA, 20 bp, Artificial Sequence
  Description of Artificial Sequence: Synthetic oligonucleotide
  Target: ATXN2; (-) strand; PAM type: NRG; PAM sequence: TGG
ttggcaggagtgaagaggtt

SEQ ID NO: 32140 - DNA, 20 bp, Artificial Sequence
  Description of Artificial Sequence: Synthetic oligonucleotide
  Target: ATXN2; (-) strand; PAM type: NRG; PAM sequence: AGG
cgatgttggcaggagtgaag

SEQ ID NO: 32141 - DNA, 20 bp, Artificial Sequence
  Description of Artificial Sequence: Synthetic oligonucleotide
  Target: ATXN2; (-) strand; PAM type: NRG; PAM sequence: GAG
ccgatgttggcaggagtgaa

SEQ ID NO: 32142 - DNA, 20 bp, Artificial Sequence
  Description of Artificial Sequence: Synthetic oligonucleotide
  Target: ATXN2; (-) strand; PAM type: NRG; PAM sequence: AAG
ggccgatgttggcaggagtg

SEQ ID NO: 32143 - DNA, 20 bp, Artificial Sequence
  Description of Artificial Sequence: Synthetic oligonucleotide
  Target: ATXN2; (-) strand; PAM type: NRG; PAM sequence: GAG
gggatggccgatgttggcag

SEQ ID NO: 32144 - DNA, 20 bp, Artificial Sequence
  Description of Artificial Sequence: Synthetic oligonucleotide
  Target: ATXN2; (-) strand; PAM type: NRG; PAM sequence: AGG
gggggatggccgatgttggc

SEQ ID NO: 32145 - DNA, 20 bp, Artificial Sequence
  Description of Artificial Sequence: Synthetic oligonucleotide
  Target: ATXN2; (-) strand; PAM type: NRG; PAM sequence: CAG
agggggatggccgatgttgg

SEQ ID NO: 32146 - DNA, 20 bp, Artificial Sequence
  Description of Artificial Sequence: Synthetic oligonucleotide
  Target: ATXN2; (-) strand; PAM type: NRG; PAM sequence: TGG
gttagggggatggccgatgt

SEQ ID NO: 32147 - DNA, 20 bp, Artificial Sequence
  Description of Artificial Sequence: Synthetic oligonucleotide
  Target: ATXN2; (-) strand; PAM type: NRG; PAM sequence: TGG
gcatctcatagttaggggga

SEQ ID NO: 32148 - DNA, 20 bp, Artificial Sequence
  Description of Artificial Sequence: Synthetic oligonucleotide
  Target: ATXN2; (-) strand; PAM type: NRG; PAM sequence: GGG
ttgagcatctcatagttagg

SEQ ID NO: 32149 - DNA, 20 bp, Artificial Sequence
  Description of Artificial Sequence: Synthetic oligonucleotide
  Target: ATXN2; (-) strand; PAM type: NRG; PAM sequence: GGG
cttgagcatctcatagttag

SEQ ID NO: 32150 - DNA, 20 bp, Artificial Sequence
  Description of Artificial Sequence: Synthetic oligonucleotide
  Target: ATXN2; (-) strand; PAM type: NRG; PAM sequence: GGG
ccttgagcatctcatagtta

SEQ ID NO: 32151 - DNA, 20 bp, Artificial Sequence
  Description of Artificial Sequence: Synthetic oligonucleotide
  Target: ATXN2; (-) strand; PAM type: NRG; PAM sequence: AGG
tccttgagcatctcatagtt

SEQ ID NO: 32152 - DNA, 20 bp, Artificial Sequence
  Description of Artificial Sequence: Synthetic oligonucleotide
  Target: ATXN2; (-) strand; PAM type: NRG; PAM sequence: TAG
ctccttgagcatctcatagt

SEQ ID NO: 32153 - DNA, 20 bp, Artificial Sequence
  Description of Artificial Sequence: Synthetic oligonucleotide
  Target: ATXN2; (-) strand; PAM type: NRG; PAM sequence: TAG
gctcctccttgagcatctca

SEQ ID NO: 32154 - DNA, 20 bp, Artificial Sequence
  Description of Artificial Sequence: Synthetic oligonucleotide
  Target: ATXN2; (-) strand; PAM type: NRG; PAM sequence: GAG
gccacctcttgctcctcctt

SEQ ID NO: 32155 - DNA, 20 bp, Artificial Sequence
  Description of Artificial Sequence: Synthetic oligonucleotide
  Target: ATXN2; (-) strand; PAM type: NRG; PAM sequence: CAG
gttgtggggtgcccccagca

SEQ ID NO: 32156 - DNA, 20 bp, Artificial Sequence
  Description of Artificial Sequence: Synthetic oligonucleotide
  Target: ATXN2; (-) strand; PAM type: NRG; PAM sequence: CAG
gcagggttgtggggtgcccc

SEQ ID NO: 32157 - DNA, 20 bp, Artificial Sequence
  Description of Artificial Sequence: Synthetic oligonucleotide
  Target: ATXN2; (-) strand; PAM type: NRG; PAM sequence: GGG
attgggggagcagggttgtg

SEQ ID NO: 32158 - DNA, 20 bp, Artificial Sequence
  Description of Artificial Sequence: Synthetic oligonucleotide
  Target: ATXN2; (-) strand; PAM type: NRG; PAM sequence: GGG
cattgggggagcagggttgt

SEQ ID NO: 32159 - DNA, 20 bp, Artificial Sequence
  Description of Artificial Sequence: Synthetic oligonucleotide
  Target: ATXN2; (-) strand; PAM type: NRG; PAM sequence: TGG
acattgggggagcagggttg

SEQ ID NO: 32160 - DNA, 20 bp, Artificial Sequence
  Description of Artificial Sequence: Synthetic oligonucleotide
  Target: ATXN2; (-) strand; PAM type: NRG; PAM sequence: GGG
cggtggacattgggggagca

SEQ ID NO: 32161 - DNA, 20 bp, Artificial Sequence
  Description of Artificial Sequence: Synthetic oligonucleotide
  Target: ATXN2; (-) strand; PAM type: NRG; PAM sequence: AGG
acggtggacattgggggagc

SEQ ID NO: 32162 - DNA, 20 bp, Artificial Sequence
  Description of Artificial Sequence: Synthetic oligonucleotide
  Target: ATXN2; (-) strand; PAM type: NRG; PAM sequence: CAG
cacggtggacattgggggag

SEQ ID NO: 32163 - DNA, 20 bp, Artificial Sequence
  Description of Artificial Sequence: Synthetic oligonucleotide
  Target: ATXN2; (-) strand; PAM type: NRG; PAM sequence: GAG
gatcacggtggacattgggg

SEQ ID NO: 32164 - DNA, 20 bp, Artificial Sequence
  Description of Artificial Sequence: Synthetic oligonucleotide
  Target: ATXN2; (-) strand; PAM type: NRG; PAM sequence: GGG
gggatcacggtggacattgg

SEQ ID NO: 32165 - DNA, 20 bp, Artificial Sequence
  Description of Artificial Sequence: Synthetic oligonucleotide
  Target: ATXN2; (-) strand; PAM type: NRG; PAM sequence: GGG
ggggatcacggtggacattg

SEQ ID NO: 32166 - DNA, 20 bp, Artificial Sequence
  Description of Artificial Sequence: Synthetic oligonucleotide
  Target: ATXN2; (-) strand; PAM type: NRG; PAM sequence: GGG
tggggatcacggtggacatt

SEQ ID NO: 32167 - DNA, 20 bp, Artificial Sequence
  Description of Artificial Sequence: Synthetic oligonucleotide
  Target: ATXN2; (-) strand; PAM type: NRG; PAM sequence: TGG
atggggatcacggtggacat

SEQ ID NO: 32168 - DNA, 20 bp, Artificial Sequence
  Description of Artificial Sequence: Synthetic oligonucleotide
  Target: ATXN2; (-) strand; PAM type: NRG; PAM sequence: TGG
gctgtggatggggatcacgg

SEQ ID NO: 32169 - DNA, 20 bp, Artificial Sequence
  Description of Artificial Sequence: Synthetic oligonucleotide
  Target: ATXN2; (-) strand; PAM type: NRG; PAM sequence: CGG
ctcgctgtggatggggatca

SEQ ID NO: 32170 - DNA, 20 bp, Artificial Sequence
  Description of Artificial Sequence: Synthetic oligonucleotide
  Target: ATXN2; (-) strand; PAM type: NRG; PAM sequence: GGG
cggagttctcgctgtggatg

SEQ ID NO: 32171 - DNA, 20 bp, Artificial Sequence
  Description of Artificial Sequence: Synthetic oligonucleotide
  Target: ATXN2; (-) strand; PAM type: NRG; PAM sequence: GGG
acggagttctcgctgtggat

SEQ ID NO: 32172 - DNA, 20 bp, Artificial Sequence
  Description of Artificial Sequence: Synthetic oligonucleotide
  Target: ATXN2; (-) strand; PAM type: NRG; PAM sequence: TGG
cacggagttctcgctgtgga

SEQ ID NO: 32173 - DNA, 20 bp, Artificial Sequence
  Description of Artificial Sequence: Synthetic oligonucleotide
  Target: ATXN2; (-) strand; PAM type: NRG; PAM sequence: TGG
cgggcacggagttctcgctg

SEQ ID NO: 32174 - DNA, 20 bp, Artificial Sequence
  Description of Artificial Sequence: Synthetic oligonucleotide
  Target: ATXN2; (-) strand; PAM type: NRG; PAM sequence: GAG
agacgacatggtcgggcacg

SEQ ID NO: 32175 - DNA, 20 bp, Artificial Sequence
  Description of Artificial Sequence: Synthetic oligonucleotide
  Target: ATXN2; (-) strand; PAM type: NRG; PAM sequence: CGG
ccagacgacatggtcgggca

SEQ ID NO: 32176 - DNA, 20 bp, Artificial Sequence
  Description of Artificial Sequence: Synthetic oligonucleotide
  Target: ATXN2; (-) strand; PAM type: NRG; PAM sequence: GGG
agggaccagacgacatggtc

SEQ ID NO: 32177 - DNA, 20 bp, Artificial Sequence
  Description of Artificial Sequence: Synthetic oligonucleotide
  Target: ATXN2; (-) strand; PAM type: NRG; PAM sequence: CGG
cagggaccagacgacatggt

SEQ ID NO: 32178 - DNA, 20 bp, Artificial Sequence
  Description of Artificial Sequence: Synthetic oligonucleotide
  Target: ATXN2; (-) strand; PAM type: NRG; PAM sequence: TGG
tgaacagggaccagacgaca

SEQ ID NO: 32179 - DNA, 20 bp, Artificial Sequence
  Description of Artificial Sequence: Synthetic oligonucleotide
  Target: ATXN2; (-) strand; PAM type: NRG; PAM sequence: CAG
agtgggtgttgaacagggac

SEQ ID NO: 32180 - DNA, 20 bp, Artificial Sequence
  Description of Artificial Sequence: Synthetic oligonucleotide
  Target: ATXN2; (-) strand; PAM type: NRG; PAM sequence: GGG
catgaagtgggtgttgaaca

SEQ ID NO: 32181 - DNA, 20 bp, Artificial Sequence
  Description of Artificial Sequence: Synthetic oligonucleotide
  Target: ATXN2; (-) strand; PAM type: NRG; PAM sequence: AGG
tcatgaagtgggtgttgaac

SEQ ID NO: 32182 - DNA, 20 bp, Artificial Sequence
  Description of Artificial Sequence: Synthetic oligonucleotide
  Target: ATXN2; (-) strand; PAM type: NRG; PAM sequence: CAG
ttcatgaagtgggtgttgaa

SEQ ID NO: 32183 - DNA, 20 bp, Artificial Sequence
  Description of Artificial Sequence: Synthetic oligonucleotide
  Target: ATXN2; (-) strand; PAM type: NRG; PAM sequence: GGG
gcagcaggagttcatgaagt

SEQ ID NO: 32184 - DNA, 20 bp, Artificial Sequence
  Description of Artificial Sequence: Synthetic oligonucleotide
  Target: ATXN2; (-) strand; PAM type: NRG; PAM sequence: TGG
ggcagcaggagttcatgaag

SEQ ID NO: 32185 - DNA, 20 bp, Artificial Sequence
  Description of Artificial Sequence: Synthetic oligonucleotide
  Target: ATXN2; (-) strand; PAM type: NRG; PAM sequence: AAG
ccaggcagcaggagttcatg

SEQ ID NO: 32186 - DNA, 20 bp, Artificial Sequence
  Description of Artificial Sequence: Synthetic oligonucleotide
  Target: ATXN2; (-) strand; PAM type: NRG; PAM sequence: GAG
ctatgaagcccaggcagcag

SEQ ID NO: 32187 - DNA, 20 bp, Artificial Sequence
  Description of Artificial Sequence: Synthetic oligonucleotide
  Target: ATXN2; (-) strand; PAM type: NRG; PAM sequence: AGG
tgctatgaagcccaggcagc

SEQ ID NO: 32188 - DNA, 20 bp, Artificial Sequence
  Description of Artificial Sequence: Synthetic oligonucleotide
  Target: ATXN2; (-) strand; PAM type: NRG; PAM sequence: CAG
atgctatgaagcccaggcag

SEQ ID NO: 32189 - DNA, 20 bp, Artificial Sequence
  Description of Artificial Sequence: Synthetic oligonucleotide
  Target: ATXN2; (-) strand; PAM type: NRG; PAM sequence: CAG
ccaatgctatgaagcccagg

SEQ ID NO: 32190 - DNA, 20 bp, Artificial Sequence
  Description of Artificial Sequence: Synthetic oligonucleotide
  Target: ATXN2; (-) strand; PAM type: NRG; PAM sequence: AGG
aggccaatgctatgaagccc

SEQ ID NO: 32191 - DNA, 20 bp, Artificial Sequence
  Description of Artificial Sequence: Synthetic oligonucleotide
  Target: ATXN2; (-) strand; PAM type: NRG; PAM sequence: CAG
taggccaatgctatgaagcc

SEQ ID NO: 32192 - DNA, 20 bp, Artificial Sequence
  Description of Artificial Sequence: Synthetic oligonucleotide
  Target: ATXN2; (-) strand; PAM type: NRG; PAM sequence: AAG
cggagtaggccaatgctatg

SEQ ID NO: 32193 - DNA, 20 bp, Artificial Sequence
  Description of Artificial Sequence: Synthetic oligonucleotide
  Target: ATXN2; (-) strand; PAM type: NRG; PAM sequence: AGG
gtccctagacttcacggagt

SEQ ID NO: 32194 - DNA, 20 bp, Artificial Sequence
  Description of Artificial Sequence: Synthetic oligonucleotide
  Target: ATXN2; (-) strand; PAM type: NRG; PAM sequence: TAG
tgtccctagacttcacggag

SEQ ID NO: 32195 - DNA, 20 bp, Artificial Sequence
  Description of Artificial Sequence: Synthetic oligonucleotide
  Target: ATXN2; (-) strand; PAM type: NRG; PAM sequence: GAG
tcttgtccctagacttcacg

SEQ ID NO: 32196 - DNA, 20 bp, Artificial Sequence
  Description of Artificial Sequence: Synthetic oligonucleotide
  Target: ATXN2; (-) strand; PAM type: NRG; PAM sequence: CGG
cttcttgtccctagacttca

SEQ ID NO: 32197 - DNA, 20 bp, Artificial Sequence
  Description of Artificial Sequence: Synthetic oligonucleotide
  Target: ATXN2; (-) strand; PAM type: NRG; PAM sequence: TAG
gccaaccatcttcttgtccc

SEQ ID NO: 32198 - DNA, 20 bp, Artificial Sequence
  Description of Artificial Sequence: Synthetic oligonucleotide
  Target: ATXN2; (-) strand; PAM type: NRG; PAM sequence: AGG
cataggcctgggccctgatc

SEQ ID NO: 32199 - DNA, 20 bp, Artificial Sequence
  Description of Artificial Sequence: Synthetic oligonucleotide
  Target: ATXN2; (-) strand; PAM type: NRG; PAM sequence: CAG
gcataggcctgggccctgat

SEQ ID NO: 32200 - DNA, 20 bp, Artificial Sequence
  Description of Artificial Sequence: Synthetic oligonucleotide
  Target: ATXN2; (-) strand; PAM type: NRG; PAM sequence: GGG
ggcggtaaaggcataggcct

SEQ ID NO: 32201 - DNA, 20 bp, Artificial Sequence
  Description of Artificial Sequence: Synthetic oligonucleotide
  Target: ATXN2; (-) strand; PAM type: NRG; PAM sequence: TGG
tggcggtaaaggcataggcc

SEQ ID NO: 32202 - DNA, 20 bp, Artificial Sequence
  Description of Artificial Sequence: Synthetic oligonucleotide
  Target: ATXN2; (-) strand; PAM type: NRG; PAM sequence: AGG
gcacttggcggtaaaggcat

SEQ ID NO: 32203 - DNA, 20 bp, Artificial Sequence
  Description of Artificial Sequence: Synthetic oligonucleotide
  Target: ATXN2; (-) strand; PAM type: NRG; PAM sequence: TAG
ggcacttggcggtaaaggca

SEQ ID NO: 32204 - DNA, 20 bp, Artificial Sequence
  Description of Artificial Sequence: Synthetic oligonucleotide
  Target: ATXN2; (-) strand; PAM type: NRG; PAM sequence: AGG
gttcaggcacttggcggtaa

SEQ ID NO: 32205 - DNA, 20 bp, Artificial Sequence
  Description of Artificial Sequence: Synthetic oligonucleotide
  Target: ATXN2; (-) strand; PAM type: NRG; PAM sequence: AAG
tgttcaggcacttggcggta

SEQ ID NO: 32206 - DNA, 20 bp, Artificial Sequence
  Description of Artificial Sequence: Synthetic oligonucleotide
  Target: ATXN2; (-) strand; PAM type: NRG; PAM sequence: CGG
ccagatgttcaggcacttgg

SEQ ID NO: 32207 - DNA, 20 bp, Artificial Sequence
  Description of Artificial Sequence: Synthetic oligonucleotide
  Target: ATXN2; (-) strand; PAM type: NRG; PAM sequence: TGG
ggcccagatgttcaggcact

SEQ ID NO: 32208 - DNA, 20 bp, Artificial Sequence
  Description of Artificial Sequence: Synthetic oligonucleotide
  Target: ATXN2; (-) strand; PAM type: NRG; PAM sequence: AGG
caatcagggcccagatgttc

SEQ ID NO: 32209 - DNA, 20 bp, Artificial Sequence
  Description of Artificial Sequence: Synthetic oligonucleotide
  Target: ATXN2; (-) strand; PAM type: NRG; PAM sequence: CAG
acaatcagggcccagatgtt

SEQ ID NO: 32210 - DNA, 20 bp, Artificial Sequence
  Description of Artificial Sequence: Synthetic oligonucleotide
  Target: ATXN2; (-) strand; PAM type: NRG; PAM sequence: CAG
tgatgcgcacaatcagggcc

SEQ ID NO: 32211 - DNA, 20 bp, Artificial Sequence
  Description of Artificial Sequence: Synthetic oligonucleotide
  Target: ATXN2; (-) strand; PAM type: NRG; PAM sequence: GGG
cgtaatgatgcgcacaatca

SEQ ID NO: 32212 - DNA, 20 bp, Artificial Sequence
  Description of Artificial Sequence: Synthetic oligonucleotide
  Target: ATXN2; (-) strand; PAM type: NRG; PAM sequence: AGG
tcgtaatgatgcgcacaatc

SEQ ID NO: 32213 - DNA, 20 bp, Artificial Sequence
  Description of Artificial Sequence: Synthetic oligonucleotide
  Target: ATXN2; (-) strand; PAM type: NRG; PAM sequence: CAG
gtcgtaatgatgcgcacaat

SEQ ID NO: 32214 - DNA, 20 bp, Artificial Sequence
  Description of Artificial Sequence: Synthetic oligonucleotide
  Target: ATXN2; (-) strand; PAM type: NRG; PAM sequence: TGG
tgggatgatgctgagcagaa

SEQ ID NO: 32215 - DNA, 20 bp, Artificial Sequence
  Description of Artificial Sequence: Synthetic oligonucleotide
  Target: ATXN2; (-) strand; PAM type: NRG; PAM sequence: CAG
aacactgggatgatgctgag

SEQ ID NO: 32216 - DNA, 20 bp, Artificial Sequence
  Description of Artificial Sequence: Synthetic oligonucleotide
  Target: ATXN2; (-) strand; PAM type: NRG; PAM sequence: GAG
atcaacactgggatgatgct

SEQ ID NO: 32217 - DNA, 20 bp, Artificial Sequence
  Description of Artificial Sequence: Synthetic oligonucleotide
  Target: ATXN2; (-) strand; PAM type: NRG; PAM sequence: GGG
agacttgaaagatcaacact

SEQ ID NO: 32218 - DNA, 20 bp, Artificial Sequence
  Description of Artificial Sequence: Synthetic oligonucleotide
  Target: ATXN2; (-) strand; PAM type: NRG; PAM sequence: TGG
tagacttgaaagatcaacac

SEQ ID NO: 32219 - DNA, 20 bp, Artificial Sequence
  Description of Artificial Sequence: Synthetic oligonucleotide
  Target: ATXN2; (-) strand; PAM type: NRG; PAM sequence: AAG
tgatctgttgatagacttga

SEQ ID NO: 32220 - DNA, 20 bp, Artificial Sequence
  Description of Artificial Sequence: Synthetic oligonucleotide
  Target: ATXN2; (-) strand; PAM type: NRG; PAM sequence: TAG
aatgcctcctgatctgttga

SEQ ID NO: 32221 - DNA, 20 bp, Artificial Sequence
  Description of Artificial Sequence: Synthetic oligonucleotide
  Target: ATXN2; (-) strand; PAM type: NRG; PAM sequence: TAG
cacgggcagagctcctggcc

SEQ ID NO: 32222 - DNA, 20 bp, Artificial Sequence
  Description of Artificial Sequence: Synthetic oligonucleotide
  Target: ATXN2; (-) strand; PAM type: NRG; PAM sequence: TGG
cagatcacgggcagagctcc

SEQ ID NO: 32223 - DNA, 20 bp, Artificial Sequence
  Description of Artificial Sequence: Synthetic oligonucleotide
  Target: ATXN2; (-) strand; PAM type: NRG; PAM sequence: GAG
tgggaatcagatcacgggca

SEQ ID NO: 32224 - DNA, 20 bp, Artificial Sequence
  Description of Artificial Sequence: Synthetic oligonucleotide
  Target: ATXN2; (-) strand; PAM type: NRG; PAM sequence: CAG
catgggaatcagatcacggg

SEQ ID NO: 32225 - DNA, 20 bp, Artificial Sequence
  Description of Artificial Sequence: Synthetic oligonucleotide
  Target: ATXN2; (-) strand; PAM type: NRG; PAM sequence: GGG
gtacatgggaatcagatcac

SEQ ID NO: 32226 - DNA, 20 bp, Artificial Sequence
  Description of Artificial Sequence: Synthetic oligonucleotide
  Target: ATXN2; (-) strand; PAM type: NRG; PAM sequence: CGG
agtacatgggaatcagatca

SEQ ID NO: 32227 - DNA, 20 bp, Artificial Sequence
  Description of Artificial Sequence: Synthetic oligonucleotide
  Target: ATXN2; (-) strand; PAM type: NRG; PAM sequence: CAG
tggatggagtacatgggaat

SEQ ID NO: 32228 - DNA, 20 bp, Artificial Sequence
  Description of Artificial Sequence: Synthetic oligonucleotide
  Target: ATXN2; (-) strand; PAM type: NRG; PAM sequence: GGG
ggagggtggatggagtacat

SEQ ID NO: 32229 - DNA, 20 bp, Artificial Sequence
  Description of Artificial Sequence: Synthetic oligonucleotide
  Target: ATXN2; (-) strand; PAM type: NRG; PAM sequence: TGG
tggagggtggatggagtaca

SEQ ID NO: 32230 - DNA, 20 bp, Artificial Sequence
  Description of Artificial Sequence: Synthetic oligonucleotide
  Target: ATXN2; (-) strand; PAM type: NRG; PAM sequence: GAG
cgaggaatggagggtggatg

SEQ ID NO: 32231 - DNA, 20 bp, Artificial Sequence
  Description of Artificial Sequence: Synthetic oligonucleotide
  Target: ATXN2; (-) strand; PAM type: NRG; PAM sequence: TGG
ggcgaggaatggagggtgga

SEQ ID NO: 32232 - DNA, 20 bp, Artificial Sequence
  Description of Artificial Sequence: Synthetic oligonucleotide
  Target: ATXN2; (-) strand; PAM type: NRG; PAM sequence: TGG
gcagggcgaggaatggaggg

SEQ ID NO: 32233 - DNA, 20 bp, Artificial Sequence
  Description of Artificial Sequence: Synthetic oligonucleotide
  Target: ATXN2; (-) strand; PAM type: NRG; PAM sequence: GGG
ggggcagggcgaggaatgga

SEQ ID NO: 32234 - DNA, 20 bp, Artificial Sequence
  Description of Artificial Sequence: Synthetic oligonucleotide
  Target: ATXN2; (-) strand; PAM type: NRG; PAM sequence: AGG
gggggcagggcgaggaatgg

SEQ ID NO: 32235 - DNA, 20 bp, Artificial Sequence
  Description of Artificial Sequence: Synthetic oligonucleotide
  Target: ATXN2; (-) strand; PAM type: NRG; PAM sequence: GAG
tgggggcagggcgaggaatg

SEQ ID NO: 32236 - DNA, 20 bp, Artificial Sequence
  Description of Artificial Sequence: Synthetic oligonucleotide
  Target: ATXN2; (-) strand; PAM type: NRG; PAM sequence: TGG
tctgggggcagggcgaggaa

SEQ ID NO: 32237 - DNA, 20 bp, Artificial Sequence
  Description of Artificial Sequence: Synthetic oligonucleotide
  Target: ATXN2; (-) strand; PAM type: NRG; PAM sequence: AGG
ttggctctgggggcagggcg

SEQ ID NO: 32238 - DNA, 20 bp, Artificial Sequence
  Description of Artificial Sequence: Synthetic oligonucleotide
  Target: ATXN2; (-) strand; PAM type: NRG; PAM sequence: GAG
cttggctctgggggcagggc

SEQ ID NO: 32239 - DNA, 20 bp, Artificial Sequence
  Description of Artificial Sequence: Synthetic oligonucleotide
  Target: ATXN2; (-) strand; PAM type: NRG; PAM sequence: GGG
agaacttggctctgggggca

SEQ ID NO: 32240 - DNA, 20 bp, Artificial Sequence
  Description of Artificial Sequence: Synthetic oligonucleotide
  Target: ATXN2; (-) strand; PAM type: NRG; PAM sequence: AGG
gagaacttggctctgggggc

SEQ ID NO: 32241 - DNA, 20 bp, Artificial Sequence
  Description of Artificial Sequence: Synthetic oligonucleotide
  Target: ATXN2; (-) strand; PAM type: NRG; PAM sequence: CAG
agagaacttggctctggggg

SEQ ID NO: 32242 - DNA, 20 bp, Artificial Sequence
  Description of Artificial Sequence: Synthetic oligonucleotide
  Target: ATXN2; (-) strand; PAM type: NRG; PAM sequence: GGG
gatagagaacttggctctgg

SEQ ID NO: 32243 - DNA, 20 bp, Artificial Sequence
  Description of Artificial Sequence: Synthetic oligonucleotide
  Target: ATXN2; (-) strand; PAM type: NRG; PAM sequence: GGG
tgatagagaacttggctctg

SEQ ID NO: 32244 - DNA, 20 bp, Artificial Sequence
  Description of Artificial Sequence: Synthetic oligonucleotide
  Target: ATXN2; (-) strand; PAM type: NRG; PAM sequence: GGG
ctgatagagaacttggctct

SEQ ID NO: 32245 - DNA, 20 bp, Artificial Sequence
  Description of Artificial Sequence: Synthetic oligonucleotide
  Target: ATXN2; (-) strand; PAM type: NRG; PAM sequence: TGG
gctgatagagaacttggctc

SEQ ID NO: 32246 - DNA, 20 bp, Artificial Sequence
  Description of Artificial Sequence: Synthetic oligonucleotide
  Target: ATXN2; (-) strand; PAM type: NRG; PAM sequence: TGG
taaacggctgatagagaact

SEQ ID NO: 32247 - DNA, 20 bp, Artificial Sequence
  Description of Artificial Sequence: Synthetic oligonucleotide
  Target: ATXN2; (-) strand; PAM type: NRG; PAM sequence: GAG
gtgaggataaacggctgata

SEQ ID NO: 32248 - DNA, 20 bp, Artificial Sequence
  Description of Artificial Sequence: Synthetic oligonucleotide
  Target: ATXN2; (-) strand; PAM type: NRG; PAM sequence: TAG
gtgtgaggataaacggctga

SEQ ID NO: 32249 - DNA, 20 bp, Artificial Sequence
  Description of Artificial Sequence: Synthetic oligonucleotide
  Target: ATXN2; (-) strand; PAM type: NRG; PAM sequence: CGG
gaaaagtgtgtgaggataaa

SEQ ID NO: 32250 - DNA, 20 bp, Artificial Sequence
  Description of Artificial Sequence: Synthetic oligonucleotide
  Target: ATXN2; (-) strand; PAM type: NRG; PAM sequence: AGG
ccattgtagaaaagtgtgtg

SEQ ID NO: 32251 - DNA, 20 bp, Artificial Sequence
  Description of Artificial Sequence: Synthetic oligonucleotide
  Target: ATXN2; (-) strand; PAM type: NRG; PAM sequence: GAG
gccattgtagaaaagtgtgt

SEQ ID NO: 32252 - DNA, 20 bp, Artificial Sequence
  Description of Artificial Sequence: Synthetic oligonucleotide
  Target: ATXN2; (-) strand; PAM type: NRG; PAM sequence: AAG
tattgaatgccattgtagaa

SEQ ID NO: 32253 - DNA, 20 bp, Artificial Sequence
  Description of Artificial Sequence: Synthetic oligonucleotide
  Target: ATXN2; (-) strand; PAM type: NRG; PAM sequence: TAG
cagtttattgaatgccattg

SEQ ID NO: 32254 - DNA, 20 bp, Artificial Sequence
  Description of Artificial Sequence: Synthetic oligonucleotide
  Target: ATXN2; (-) strand; PAM type: NRG; PAM sequence: CAG
ttttaaaccagaaacacgtg

SEQ ID NO: 32255 - DNA, 20 bp, Artificial Sequence
  Description of Artificial Sequence: Synthetic oligonucleotide
  Target: ATXN2; (-) strand; PAM type: NRG; PAM sequence: CAG
ttttttttttttttttaaac

SEQ ID NO: 32256 - DNA, 20 bp, Artificial Sequence
  Description of Artificial Sequence: Synthetic oligonucleotide
  Target: ATXN2; (-) strand; PAM type: NRG; PAM sequence: TGG
atttggagttggaatggctc

SEQ ID NO: 32257 - DNA, 20 bp, Artificial Sequence
  Description of Artificial Sequence: Synthetic oligonucleotide
  Target: ATXN2; (-) strand; PAM type: NRG; PAM sequence: TGG
aaacgcatttggagttggaa

SEQ ID NO: 32258 - DNA, 20 bp, Artificial Sequence
  Description of Artificial Sequence: Synthetic oligonucleotide
  Target: ATXN2; (-) strand; PAM type: NRG; PAM sequence: TGG
gagtcaaacgcatttggagt

SEQ ID NO: 32259 - DNA, 20 bp, Artificial Sequence
  Description of Artificial Sequence: Synthetic oligonucleotide
  Target: ATXN2; (-) strand; PAM type: NRG; PAM sequence: GAG
tgtagagtcaaacgcatttg

SEQ ID NO: 32260 - DNA, 20 bp, Artificial Sequence
  Description of Artificial Sequence: Synthetic oligonucleotide
  Target: ATXN2; (-) strand; PAM type: NRG; PAM sequence: TGG
aatgtagagtcaaacgcatt

SEQ ID NO: 32261 - DNA, 20 bp, Artificial Sequence
  Description of Artificial Sequence: Synthetic oligonucleotide
  Target: ATXN2; (-) strand; PAM type: NRG; PAM sequence: GAG
agtagatgttcaacaatgta

SEQ ID NO: 32262 - DNA, 20 bp, Artificial Sequence
  Description of Artificial Sequence: Synthetic oligonucleotide
  Target: ATXN2; (-) strand; PAM type: NRG; PAM sequence: TAG
atagtagatgttcaacaatg

SEQ ID NO: 32263 - DNA, 20 bp, Artificial Sequence
  Description of Artificial Sequence: Synthetic oligonucleotide
  Target: ATXN2; (-) strand; PAM type: NRG; PAM sequence: TAG
gttctgttcttggcacatag

SEQ ID NO: 32264 - DNA, 20 bp, Artificial Sequence
  Description of Artificial Sequence: Synthetic oligonucleotide
  Target: ATXN2; (-) strand; PAM type: NRG; PAM sequence: TAG
tatgttctgttcttggcaca

SEQ ID NO: 32265 - DNA, 20 bp, Artificial Sequence
  Description of Artificial Sequence: Synthetic oligonucleotide
  Target: ATXN2; (-) strand; PAM type: NRG; PAM sequence: TGG
ttcttcttatgttctgttct

SEQ ID NO: 32266 - DNA, 20 bp, Artificial Sequence
  Description of Artificial Sequence: Synthetic oligonucleotide
  Target: ATXN2; (-) strand; PAM type: NRG; PAM sequence: CAG
aggccatgaggcagcacacc

SEQ ID NO: 32267 - DNA, 20 bp, Artificial Sequence
  Description of Artificial Sequence: Synthetic oligonucleotide
  Target: ATXN2; (-) strand; PAM type: NRG; PAM sequence: CAG
ttgaaattaaggccatgagg

SEQ ID NO: 32268 - DNA, 20 bp, Artificial Sequence
  Description of Artificial Sequence: Synthetic oligonucleotide
  Target: ATXN2; (-) strand; PAM type: NRG; PAM sequence: AGG
gtattgaaattaaggccatg

SEQ ID NO: 32269 - DNA, 20 bp, Artificial Sequence
  Description of Artificial Sequence: Synthetic oligonucleotide
  Target: ATXN2; (-) strand; PAM type: NRG; PAM sequence: GAG
agtattgaaattaaggccat

SEQ ID NO: 32270 - DNA, 20 bp, Artificial Sequence
  Description of Artificial Sequence: Synthetic oligonucleotide
  Target: ATXN2; (-) strand; PAM type: NRG; PAM sequence: AGG
ctcccaaagtattgaaatta

SEQ ID NO: 32271 - DNA, 20 bp, Artificial Sequence
  Description of Artificial Sequence: Synthetic oligonucleotide
  Target: ATXN2; (-) strand; PAM type: NRG; PAM sequence: AAG
cctcccaaagtattgaaatt

SEQ ID NO: 32272 - DNA, 20 bp, Artificial Sequence
  Description of Artificial Sequence: Synthetic oligonucleotide
  Target: ATXN2; (-) strand; PAM type: NRG; PAM sequence: AAG
cctcttgccttggcctccca

SEQ ID NO: 32273 - DNA, 20 bp, Artificial Sequence
  Description of Artificial Sequence: Synthetic oligonucleotide
  Target: ATXN2; (-) strand; PAM type: NRG; PAM sequence: TGG
ctcaagtactcctcttgcct

SEQ ID NO: 32274 - DNA, 20 bp, Artificial Sequence
  Description of Artificial Sequence: Synthetic oligonucleotide
  Target: ATXN2; (-) strand; PAM type: NRG; PAM sequence: AAG
ggttttgaacttctgccctc

SEQ ID NO: 32275 - DNA, 20 bp, Artificial Sequence
  Description of Artificial Sequence: Synthetic oligonucleotide
  Target: ATXN2; (-) strand; PAM type: NRG; PAM sequence: TGG
agtctcactgttacccgggc

SEQ ID NO: 32276 - DNA, 20 bp, Artificial Sequence
  Description of Artificial Sequence: Synthetic oligonucleotide
  Target: ATXN2; (-) strand; PAM type: NRG; PAM sequence: GGG
agacagtctcactgttaccc

SEQ ID NO: 32277 - DNA, 20 bp, Artificial Sequence
  Description of Artificial Sequence: Synthetic oligonucleotide
  Target: ATXN2; (-) strand; PAM type: NRG; PAM sequence: CGG
gagacagtctcactgttacc

SEQ ID NO: 32278 - DNA, 20 bp, Artificial Sequence
  Description of Artificial Sequence: Synthetic oligonucleotide
  Target: ATXN2; (-) strand; PAM type: NRG; PAM sequence: CAG
taaaaaaatttttgtagaga

SEQ ID NO: 32279 - DNA, 20 bp, Artificial Sequence
  Description of Artificial Sequence: Synthetic oligonucleotide
  Target: ATXN2; (-) strand; PAM type: NRG; PAM sequence: GAG
aatttaaaaaaatttttgta

SEQ ID NO: 32280 - DNA, 20 bp, Artificial Sequence
  Description of Artificial Sequence: Synthetic oligonucleotide
  Target: ATXN2; (-) strand; PAM type: NRG; PAM sequence: TAG
acaatttaaaaaaatttttg

SEQ ID NO: 32281 - DNA, 20 bp, Artificial Sequence
  Description of Artificial Sequence: Synthetic oligonucleotide
  Target: ATXN2; (-) strand; PAM type: NRG; PAM sequence: AAG
ctgcccgccttcgcctccca

SEQ ID NO: 32282 - DNA, 20 bp, Artificial Sequence
  Description of Artificial Sequence: Synthetic oligonucleotide
  Target: ATXN2; (-) strand; PAM type: NRG; PAM sequence: AAG
ggtctcaaactcctgagctc

SEQ ID NO: 32283 - DNA, 20 bp, Artificial Sequence
  Description of Artificial Sequence: Synthetic oligonucleotide
  Target: ATXN2; (-) strand; PAM type: NRG; PAM sequence: GAG
caggttggtctcaaactcct

SEQ ID NO: 32284 - DNA, 20 bp, Artificial Sequence
  Description of Artificial Sequence: Synthetic oligonucleotide
  Target: ATXN2; (-) strand; PAM type: NRG; PAM sequence: TGG
tcttaccatgttgcccaggt

SEQ ID NO: 32285 - DNA, 20 bp, Artificial Sequence
  Description of Artificial Sequence: Synthetic oligonucleotide
  Target: ATXN2; (-) strand; PAM type: NRG; PAM sequence: AGG
agggtcttaccatgttgccc

SEQ ID NO: 32286 - DNA, 20 bp, Artificial Sequence
  Description of Artificial Sequence: Synthetic oligonucleotide
  Target: ATXN2; (-) strand; PAM type: NRG; PAM sequence: CAG
cagggtcttaccatgttgcc

SEQ ID NO: 32287 - DNA, 20 bp, Artificial Sequence
  Description of Artificial Sequence: Synthetic oligonucleotide
  Target: ATXN2; (-) strand; PAM type: NRG; PAM sequence: GGG
ttgtatttttagtagtgaca

SEQ ID NO: 32288 - DNA, 20 bp, Artificial Sequence
  Description of Artificial Sequence: Synthetic oligonucleotide
  Target: ATXN2; (-) strand; PAM type: NRG; PAM sequence: AGG
tttgtatttttagtagtgac

SEQ ID NO: 32289 - DNA, 20 bp, Artificial Sequence
  Description of Artificial Sequence: Synthetic oligonucleotide
  Target: ATXN2; (-) strand; PAM type: NRG; PAM sequence: CAG
ttttgtatttttagtagtga

SEQ ID NO: 32290 - DNA, 20 bp, Artificial Sequence
  Description of Artificial Sequence: Synthetic oligonucleotide
  Target: ATXN2; (-) strand; PAM type: NRG; PAM sequence: TAG
ttaattttttgtatttttag

SEQ ID NO: 32291 - DNA, 20 bp, Artificial Sequence
  Description of Artificial Sequence: Synthetic oligonucleotide
  Target: ATXN2; (-) strand; PAM type: NRG; PAM sequence: TAG
tggttaattttttgtatttt

SEQ ID NO: 32292 - DNA, 20 bp, Artificial Sequence
  Description of Artificial Sequence: Synthetic oligonucleotide
  Target: ATXN2; (-) strand; PAM type: NRG; PAM sequence: TGG
catgtgtgtgccatcatgcc

SEQ ID NO: 32293 - DNA, 20 bp, Artificial Sequence
  Description of Artificial Sequence: Synthetic oligonucleotide
  Target: ATXN2; (-) strand; PAM type: NRG; PAM sequence: GGG
ctcagcctcctgagtagctt

SEQ ID NO: 32294 - DNA, 20 bp, Artificial Sequence
  Description of Artificial Sequence: Synthetic oligonucleotide
  Target: ATXN2; (-) strand; PAM type: NRG; PAM sequence: TGG
cctcagcctcctgagtagct

SEQ ID NO: 32295 - DNA, 20 bp, Artificial Sequence
  Description of Artificial Sequence: Synthetic oligonucleotide
  Target: ATXN2; (-) strand; PAM type: NRG; PAM sequence: TAG
ttctgcctcagcctcctgag

SEQ ID NO: 32296 - DNA, 20 bp, Artificial Sequence
  Description of Artificial Sequence: Synthetic oligonucleotide
  Target: ATXN2; (-) strand; PAM type: NRG; PAM sequence: GAG
cagttctgcctcagcctcct

SEQ ID NO: 32297 - DNA, 20 bp, Artificial Sequence
  Description of Artificial Sequence: Synthetic oligonucleotide
  Target: ATXN2; (-) strand; PAM type: NRG; PAM sequence: CAG
gagttcaagcagttctgcct

SEQ ID NO: 32298 - DNA, 20 bp, Artificial Sequence
  Description of Artificial Sequence: Synthetic oligonucleotide
  Target: ATXN2; (-) strand; PAM type: NRG; PAM sequence: CAG
ctccacctcccgagttcaag

SEQ ID NO: 32299 - DNA, 20 bp, Artificial Sequence
  Description of Artificial Sequence: Synthetic oligonucleotide
  Target: ATXN2; (-) strand; PAM type: NRG; PAM sequence: AAG
aacctccacctcccgagttc

SEQ ID NO: 32300 - DNA, 20 bp, Artificial Sequence
  Description of Artificial Sequence: Synthetic oligonucleotide
  Target: ATXN2; (-) strand; PAM type: NRG; PAM sequence: GAG
cactctaacctccacctccc

SEQ ID NO: 32301 - DNA, 20 bp, Artificial Sequence
  Description of Artificial Sequence: Synthetic oligonucleotide
  Target: ATXN2; (-) strand; PAM type: NRG; PAM sequence: TGG
gtcacccaggctgcagtgcg

SEQ ID NO: 32302 - DNA, 20 bp, Artificial Sequence
  Description of Artificial Sequence: Synthetic oligonucleotide
  Target: ATXN2; (-) strand; PAM type: NRG; PAM sequence: CAG
tcgctttgtcacccaggctg

SEQ ID NO: 32303 - DNA, 20 bp, Artificial Sequence
  Description of Artificial Sequence: Synthetic oligonucleotide
  Target: ATXN2; (-) strand; PAM type: NRG; PAM sequence: AGG
accgtctcgctttgtcaccc

SEQ ID NO: 32304 - DNA, 20 bp, Artificial Sequence
  Description of Artificial Sequence: Synthetic oligonucleotide
  Target: ATXN2; (-) strand; PAM type: NRG; PAM sequence: CAG
caccgtctcgctttgtcacc

SEQ ID NO: 32305 - DNA, 20 bp, Artificial Sequence
  Description of Artificial Sequence: Synthetic oligonucleotide
  Target: ATXN2; (-) strand; PAM type: NRG; PAM sequence: GAG
gcagttcttttttttttttt

SEQ ID NO: 32306 - DNA, 20 bp, Artificial Sequence
  Description of Artificial Sequence: Synthetic oligonucleotide
  Target: ATXN2; (-) strand; PAM type: NRG; PAM sequence: CAG
acatgcaacatcacaccctg

SEQ ID NO: 32307 - DNA, 20 bp, Artificial Sequence
  Description of Artificial Sequence: Synthetic oligonucleotide
  Target: ATXN2; (-) strand; PAM type: NRG; PAM sequence: AGG
tcctgagtagctgggaccac

SEQ ID NO: 32308 - DNA, 20 bp, Artificial Sequence
  Description of Artificial Sequence: Synthetic oligonucleotide
  Target: ATXN2; (-) strand; PAM type: NRG; PAM sequence: CAG
ctcctgagtagctgggacca

SEQ ID NO: 32309 - DNA, 20 bp, Artificial Sequence
  Description of Artificial Sequence: Synthetic oligonucleotide
  Target: ATXN2; (-) strand; PAM type: NRG; PAM sequence: GGG
cctcagcctcctgagtagct

SEQ ID NO: 32310 - DNA, 20 bp, Artificial Sequence
  Description of Artificial Sequence: Synthetic oligonucleotide
  Target: ATXN2; (-) strand; PAM type: NRG; PAM sequence: TGG
acctcagcctcctgagtagc

SEQ ID NO: 32311 - DNA, 20 bp, Artificial Sequence
  Description of Artificial Sequence: Synthetic oligonucleotide
  Target: ATXN2; (-) strand; PAM type: NRG; PAM sequence: TAG
tcccacctcagcctcctgag

SEQ ID NO: 32312 - DNA, 20 bp, Artificial Sequence
  Description of Artificial Sequence: Synthetic oligonucleotide
  Target: ATXN2; (-) strand; PAM type: NRG; PAM sequence: GAG
tcctcccacctcagcctcct

SEQ ID NO: 32313 - DNA, 20 bp, Artificial Sequence
  Description of Artificial Sequence: Synthetic oligonucleotide
  Target: ATXN2; (-) strand; PAM type: NRG; PAM sequence: CAG
ttcaagtgatcctcccacct

SEQ ID NO: 32314 - DNA, 20 bp, Artificial Sequence
  Description of Artificial Sequence: Synthetic oligonucleotide
  Target: ATXN2; (-) strand; PAM type: NRG; PAM sequence: AAG
agcctttaactcctgggttc

SEQ ID NO: 32315 - DNA, 20 bp, Artificial Sequence
  Description of Artificial Sequence: Synthetic oligonucleotide
  Target: ATXN2; (-) strand; PAM type: NRG; PAM sequence: GGG
tattgcagcctttaactcct

SEQ ID NO: 32316 - DNA, 20 bp, Artificial Sequence
  Description of Artificial Sequence: Synthetic oligonucleotide
  Target: ATXN2; (-) strand; PAM type: NRG; PAM sequence: TGG
ttattgcagcctttaactcc

SEQ ID NO: 32317 - DNA, 20 bp, Artificial Sequence
  Description of Artificial Sequence: Synthetic oligonucleotide
  Target: ATXN2; (-) strand; PAM type: NRG; PAM sequence: CAG
attgtgatcatggcttattg

SEQ ID NO: 32318 - DNA, 20 bp, Artificial Sequence
  Description of Artificial Sequence: Synthetic oligonucleotide
  Target: ATXN2; (-) strand; PAM type: NRG; PAM sequence: TGG
ggagtacagtattgtgatca

SEQ ID NO: 32319 - DNA, 20 bp, Artificial Sequence
  Description of Artificial Sequence: Synthetic oligonucleotide
  Target: ATXN2; (-) strand; PAM type: NRG; PAM sequence: CAG
gtattgcccaggttggagta

SEQ ID NO: 32320 - DNA, 20 bp, Artificial Sequence
  Description of Artificial Sequence: Synthetic oligonucleotide
  Target: ATXN2; (-) strand; PAM type: NRG; PAM sequence: GAG
ttgctgtattgcccaggttg

SEQ ID NO: 32321 - DNA, 20 bp, Artificial Sequence
  Description of Artificial Sequence: Synthetic oligonucleotide
  Target: ATXN2; (-) strand; PAM type: NRG; PAM sequence: TGG
tcttgctgtattgcccaggt

SEQ ID NO: 32322 - DNA, 20 bp, Artificial Sequence
  Description of Artificial Sequence: Synthetic oligonucleotide
  Target: ATXN2; (-) strand; PAM type: NRG; PAM sequence: AGG
gggatcttgctgtattgccc

SEQ ID NO: 32323 - DNA, 20 bp, Artificial Sequence
  Description of Artificial Sequence: Synthetic oligonucleotide
  Target: ATXN2; (-) strand; PAM type: NRG; PAM sequence: CAG
tgggatcttgctgtattgcc

SEQ ID NO: 32324 - DNA, 20 bp, Artificial Sequence
  Description of Artificial Sequence: Synthetic oligonucleotide
  Target: ATXN2; (-) strand; PAM type: NRG; PAM sequence: GGG
atgtatttattttttgagat

SEQ ID NO: 32325 - DNA, 20 bp, Artificial Sequence
  Description of Artificial Sequence: Synthetic oligonucleotide
  Target: ATXN2; (-) strand; PAM type: NRG; PAM sequence: TGG
tatgtatttattttttgaga

SEQ ID NO: 32326 - DNA, 20 bp, Artificial Sequence
  Description of Artificial Sequence: Synthetic oligonucleotide
  Target: ATXN2; (-) strand; PAM type: NRG; PAM sequence: GAG
tttttatgtatttatttttt

SEQ ID NO: 32327 - DNA, 20 bp, Artificial Sequence
  Description of Artificial Sequence: Synthetic oligonucleotide
  Target: ATXN2; (-) strand; PAM type: NRG; PAM sequence: AAG
acaaaaaaactgagatacta

SEQ ID NO: 32328 - DNA, 20 bp, Artificial Sequence
  Description of Artificial Sequence: Synthetic oligonucleotide
  Target: ATXN2; (-) strand; PAM type: NRG; PAM sequence: GAG
aacaaacaaacaaaaaaact

SEQ ID NO: 32329 - DNA, 20 bp, Artificial Sequence
  Description of Artificial Sequence: Synthetic oligonucleotide
  Target: ATXN2; (-) strand; PAM type: NRG; PAM sequence: GAG
agcctgctgggcgacagagc

SEQ ID NO: 32330 - DNA, 20 bp, Artificial Sequence
  Description of Artificial Sequence: Synthetic oligonucleotide
  Target: ATXN2; (-) strand; PAM type: NRG; PAM sequence: GAG
ctccagcctgctgggcgaca

SEQ ID NO: 32331 - DNA, 20 bp, Artificial Sequence
  Description of Artificial Sequence: Synthetic oligonucleotide
  Target: ATXN2; (-) strand; PAM type: NRG; PAM sequence: CAG
cactccagcctgctgggcga

SEQ ID NO: 32332 - DNA, 20 bp, Artificial Sequence
  Description of Artificial Sequence: Synthetic oligonucleotide
  Target: ATXN2; (-) strand; PAM type: NRG; PAM sequence: GGG
ccactgcactccagcctgct

SEQ ID NO: 32333 - DNA, 20 bp, Artificial Sequence
  Description of Artificial Sequence: Synthetic oligonucleotide
  Target: ATXN2; (-) strand; PAM type: NRG; PAM sequence: TGG
gccactgcactccagcctgc

SEQ ID NO: 32334 - DNA, 20 bp, Artificial Sequence
  Description of Artificial Sequence: Synthetic oligonucleotide
  Target: ATXN2; (-) strand; PAM type: NRG; PAM sequence: CAG
gagatggtgccactgcactc

SEQ ID NO: 32335 - DNA, 20 bp, Artificial Sequence
  Description of Artificial Sequence: Synthetic oligonucleotide
  Target: ATXN2; (-) strand; PAM type: NRG; PAM sequence: TGG
gagcttgcagtgagcggaga

SEQ ID NO: 32336 - DNA, 20 bp, Artificial Sequence
  Description of Artificial Sequence: Synthetic oligonucleotide
  Target: ATXN2; (-) strand; PAM type: NRG; PAM sequence: GAG
ggcagagcttgcagtgagcg

SEQ ID NO: 32337 - DNA, 20 bp, Artificial Sequence
  Description of Artificial Sequence: Synthetic oligonucleotide
  Target: ATXN2; (-) strand; PAM type: NRG; PAM sequence: CGG
gaggcagagcttgcagtgag

SEQ ID NO: 32338 - DNA, 20 bp, Artificial Sequence
  Description of Artificial Sequence: Synthetic oligonucleotide
  Target: ATXN2; (-) strand; PAM type: NRG; PAM sequence: GAG
cgggaggcagagcttgcagt

SEQ ID NO: 32339 - DNA, 20 bp, Artificial Sequence
  Description of Artificial Sequence: Synthetic oligonucleotide
  Target: ATXN2; (-) strand; PAM type: NRG; PAM sequence: CAG
aacccgggaggcagagcttg

SEQ ID NO: 32340 - DNA, 20 bp, Artificial Sequence
  Description of Artificial Sequence: Synthetic oligonucleotide
  Target: ATXN2; (-) strand; PAM type: NRG; PAM sequence: GAG
tggcgtgaacccgggaggca

SEQ ID NO: 32341 - DNA, 20 bp, Artificial Sequence
  Description of Artificial Sequence: Synthetic oligonucleotide
  Target: ATXN2; (-) strand; PAM type: NRG; PAM sequence: CAG
aatggcgtgaacccgggagg

SEQ ID NO: 32342 - DNA, 20 bp, Artificial Sequence
  Description of Artificial Sequence: Synthetic oligonucleotide
  Target: ATXN2; (-) strand; PAM type: NRG; PAM sequence: AGG
gagaatggcgtgaacccggg

SEQ ID NO: 32343 - DNA, 20 bp, Artificial Sequence
  Description of Artificial Sequence: Synthetic oligonucleotide
  Target: ATXN2; (-) strand; PAM type: NRG; PAM sequence: GAG
ggagaatggcgtgaacccgg

SEQ ID NO: 32344 - DNA, 20 bp, Artificial Sequence
  Description of Artificial Sequence: Synthetic oligonucleotide
  Target: ATXN2; (-) strand; PAM type: NRG; PAM sequence: GGG
caggagaatggcgtgaaccc

SEQ ID NO: 32345 - DNA, 20 bp, Artificial Sequence
  Description of Artificial Sequence: Synthetic oligonucleotide
  Target: ATXN2; (-) strand; PAM type: NRG; PAM sequence: CGG
gcaggagaatggcgtgaacc

SEQ ID NO: 32346 - DNA, 20 bp, Artificial Sequence
  Description of Artificial Sequence: Synthetic oligonucleotide
  Target: ATXN2; (-) strand; PAM type: NRG; PAM sequence: TGG
gggaggctgaggcaggagaa

SEQ ID NO: 32347 - DNA, 20 bp, Artificial Sequence
  Description of Artificial Sequence: Synthetic oligonucleotide
  Target: ATXN2; (-) strand; PAM type: NRG; PAM sequence: GAG
tacttgggaggctgaggcag

SEQ ID NO: 32348 - DNA, 20 bp, Artificial Sequence
  Description of Artificial Sequence: Synthetic oligonucleotide
  Target: ATXN2; (-) strand; PAM type: NRG; PAM sequence: AGG
gctacttgggaggctgaggc

SEQ ID NO: 32349 - DNA, 20 bp, Artificial Sequence
  Description of Artificial Sequence: Synthetic oligonucleotide
  Target: ATXN2; (-) strand; PAM type: NRG; PAM sequence: CAG
agctacttgggaggctgagg

SEQ ID NO: 32350 - DNA, 20 bp, Artificial Sequence
  Description of Artificial Sequence: Synthetic oligonucleotide
  Target: ATXN2; (-) strand; PAM type: NRG; PAM sequence: AGG
cccagctacttgggaggctg

SEQ ID NO: 32351 - DNA, 20 bp, Artificial Sequence
  Description of Artificial Sequence: Synthetic oligonucleotide
  Target: ATXN2; (-) strand; PAM type: NRG; PAM sequence: GAG
tcccagctacttgggaggct

SEQ ID NO: 32352 - DNA, 20 bp, Artificial Sequence
  Description of Artificial Sequence: Synthetic oligonucleotide
  Target: ATXN2; (-) strand; PAM type: NRG; PAM sequence: AGG
tgtaatcccagctacttggg

SEQ ID NO: 32353 - DNA, 20 bp, Artificial Sequence
  Description of Artificial Sequence: Synthetic oligonucleotide
  Target: ATXN2; (-) strand; PAM type: NRG; PAM sequence: GAG
ctgtaatcccagctacttgg

SEQ ID NO: 32354 - DNA, 20 bp, Artificial Sequence
  Description of Artificial Sequence: Synthetic oligonucleotide
  Target: ATXN2; (-) strand; PAM type: NRG; PAM sequence: GGG
gcctgtaatcccagctactt

SEQ ID NO: 32355 - DNA, 20 bp, Artificial Sequence
  Description of Artificial Sequence: Synthetic oligonucleotide
  Target: ATXN2; (-) strand; PAM type: NRG; PAM sequence: TGG
cgcctgtaatcccagctact

SEQ ID NO: 32356 - DNA, 20 bp, Artificial Sequence
  Description of Artificial Sequence: Synthetic oligonucleotide
  Target: ATXN2; (-) strand; PAM type: NRG; PAM sequence: CAG
gtggcgggcgcctgtaatcc

SEQ ID NO: 32357 - DNA, 20 bp, Artificial Sequence
  Description of Artificial Sequence: Synthetic oligonucleotide
  Target: ATXN2; (-) strand; PAM type: NRG; PAM sequence: GGG
aattagccaggcgtggtggc

SEQ ID NO: 32358 - DNA, 20 bp, Artificial Sequence
  Description of Artificial Sequence: Synthetic oligonucleotide
  Target: ATXN2; (-) strand; PAM type: NRG; PAM sequence: CGG
aaattagccaggcgtggtgg

SEQ ID NO: 32359 - DNA, 20 bp, Artificial Sequence
  Description of Artificial Sequence: Synthetic oligonucleotide
  Target: ATXN2; (-) strand; PAM type: NRG; PAM sequence: TGG
aaaaaattagccaggcgtgg

SEQ ID NO: 32360 - DNA, 20 bp, Artificial Sequence
  Description of Artificial Sequence: Synthetic oligonucleotide
  Target: ATXN2; (-) strand; PAM type: NRG; PAM sequence: TGG
tacaaaaaattagccaggcg

SEQ ID NO: 32361 - DNA, 20 bp, Artificial Sequence
  Description of Artificial Sequence: Synthetic oligonucleotide
  Target: ATXN2; (-) strand; PAM type: NRG; PAM sequence: AGG
aaaaatacaaaaaattagcc

SEQ ID NO: 32362 - DNA, 20 bp, Artificial Sequence
  Description of Artificial Sequence: Synthetic oligonucleotide
  Target: ATXN2; (-) strand; PAM type: NRG; PAM sequence: CAG
taaaaatacaaaaaattagc

SEQ ID NO: 32363 - DNA, 20 bp, Artificial Sequence
  Description of Artificial Sequence: Synthetic oligonucleotide
  Target: ATXN2; (-) strand; PAM type: NRG; PAM sequence: TAG
ctactaaaaatacaaaaaat

SEQ ID NO: 32364 - DNA, 20 bp, Artificial Sequence
  Description of Artificial Sequence: Synthetic oligonucleotide
  Target: ATXN2; (-) strand; PAM type: NRG; PAM sequence: GGG
agaccgtcctgcctaacatg

SEQ ID NO: 32365 - DNA, 20 bp, Artificial Sequence
  Description of Artificial Sequence: Synthetic oligonucleotide
  Target: ATXN2; (-) strand; PAM type: NRG; PAM sequence: GGG
gagaccgtcctgcctaacat

SEQ ID NO: 32366 - DNA, 20 bp, Artificial Sequence
  Description of Artificial Sequence: Synthetic oligonucleotide
  Target: ATXN2; (-) strand; PAM type: NRG; PAM sequence: TGG
cgagaccgtcctgcctaaca

SEQ ID NO: 32367 - DNA, 20 bp, Artificial Sequence
  Description of Artificial Sequence: Synthetic oligonucleotide
  Target: ATXN2; (-) strand; PAM type: NRG; PAM sequence: GAG
gatcacgaggtcaggagatc

SEQ ID NO: 32368 - DNA, 20 bp, Artificial Sequence
  Description of Artificial Sequence: Synthetic oligonucleotide
  Target: ATXN2; (-) strand; PAM type: NRG; PAM sequence: GAG
cgggtggatcacgaggtcag

SEQ ID NO: 32369 - DNA, 20 bp, Artificial Sequence
  Description of Artificial Sequence: Synthetic oligonucleotide
  Target: ATXN2; (-) strand; PAM type: NRG; PAM sequence: AGG
ggcgggtggatcacgaggtc

SEQ ID NO: 32370 - DNA, 20 bp, Artificial Sequence
  Description of Artificial Sequence: Synthetic oligonucleotide
  Target: ATXN2; (-) strand; PAM type: NRG; PAM sequence: CAG
aggcgggtggatcacgaggt

SEQ ID NO: 32371 - DNA, 20 bp, Artificial Sequence
  Description of Artificial Sequence: Synthetic oligonucleotide
  Target: ATXN2; (-) strand; PAM type: NRG; PAM sequence: AGG
gccgaggcgggtggatcacg

SEQ ID NO: 32372 - DNA, 20 bp, Artificial Sequence
  Description of Artificial Sequence: Synthetic oligonucleotide
  Target: ATXN2; (-) strand; PAM type: NRG; PAM sequence: GAG
ggccgaggcgggtggatcac

SEQ ID NO: 32373 - DNA, 20 bp, Artificial Sequence
  Description of Artificial Sequence: Synthetic oligonucleotide
  Target: ATXN2; (-) strand; PAM type: NRG; PAM sequence: TGG
ctttggaaggccgaggcggg

SEQ ID NO: 32374 - DNA, 20 bp, Artificial Sequence
  Description of Artificial Sequence: Synthetic oligonucleotide
  Target: ATXN2; (-) strand; PAM type: NRG; PAM sequence: GGG
gcactttggaaggccgaggc

SEQ ID NO: 32375 - DNA, 20 bp, Artificial Sequence
  Description of Artificial Sequence: Synthetic oligonucleotide
  Target: ATXN2; (-) strand; PAM type: NRG; PAM sequence: CGG
agcactttggaaggccgagg

SEQ ID NO: 32376 - DNA, 20 bp, Artificial Sequence
  Description of Artificial Sequence: Synthetic oligonucleotide
  Target: ATXN2; (-) strand; PAM type: NRG; PAM sequence: AGG
cccagcactttggaaggccg

SEQ ID NO: 32377 - DNA, 20 bp, Artificial Sequence
  Description of Artificial Sequence: Synthetic oligonucleotide
  Target: ATXN2; (-) strand; PAM type: NRG; PAM sequence: GAG
tcccagcactttggaaggcc

SEQ ID NO: 32378 - DNA, 20 bp, Artificial Sequence
  Description of Artificial Sequence: Synthetic oligonucleotide
  Target: ATXN2; (-) strand; PAM type: NRG; PAM sequence: AGG
tgtaatcccagcactttgga

SEQ ID NO: 32379 - DNA, 20 bp, Artificial Sequence
  Description of Artificial Sequence: Synthetic oligonucleotide
  Target: ATXN2; (-) strand; PAM type: NRG; PAM sequence: AAG
ctgtaatcccagcactttgg

SEQ ID NO: 32380 - DNA, 20 bp, Artificial Sequence
  Description of Artificial Sequence: Synthetic oligonucleotide
  Target: ATXN2; (-) strand; PAM type: NRG; PAM sequence: TGG
tgcctgtaatcccagcactt

SEQ ID NO: 32381 - DNA, 20 bp, Artificial Sequence
  Description of Artificial Sequence: Synthetic oligonucleotide
  Target: ATXN2; (-) strand; PAM type: NRG; PAM sequence: CAG
gtggctcgtgcctgtaatcc

SEQ ID NO: 32382 - DNA, 20 bp, Artificial Sequence
  Description of Artificial Sequence: Synthetic oligonucleotide
  Target: ATXN2; (-) strand; PAM type: NRG; PAM sequence: TGG
gagatactggccgggcgcgg

SEQ ID NO: 32383 - DNA, 20 bp, Artificial Sequence
  Description of Artificial Sequence: Synthetic oligonucleotide
  Target: ATXN2; (-) strand; PAM type: NRG; PAM sequence: CGG
actgagatactggccgggcg

SEQ ID NO: 32384 - DNA, 20 bp, Artificial Sequence
  Description of Artificial Sequence: Synthetic oligonucleotide
  Target: ATXN2; (-) strand; PAM type: NRG; PAM sequence: GGG
aaaaaactgagatactggcc

SEQ ID NO: 32385 - DNA, 20 bp, Artificial Sequence
  Description of Artificial Sequence: Synthetic oligonucleotide
  Target: ATXN2; (-) strand; PAM type: NRG; PAM sequence: CGG
aaaaaaactgagatactggc

SEQ ID NO: 32386 - DNA, 20 bp, Artificial Sequence
  Description of Artificial Sequence: Synthetic oligonucleotide
  Target: ATXN2; (-) strand; PAM type: NRG; PAM sequence: TGG
aaaaaaaaaaactgagatac

SEQ ID NO: 32387 - DNA, 20 bp, Artificial Sequence
  Description of Artificial Sequence: Synthetic oligonucleotide
  Target: ATXN2; (-) strand; PAM type: NRG; PAM sequence: GAG
aacaaacaaaaaaaaaaact

SEQ ID NO: 32388 - DNA, 20 bp, Artificial Sequence
  Description of Artificial Sequence: Synthetic oligonucleotide
  Target: ATXN2; (-) strand; PAM type: NRG; PAM sequence: GAG
tccagcctgggcgacagaac

SEQ ID NO: 32389 - DNA, 20 bp, Artificial Sequence
  Description of Artificial Sequence: Synthetic oligonucleotide
  Target: ATXN2; (-) strand; PAM type: NRG; PAM sequence: CAG
ctgcactccagcctgggcga

SEQ ID NO: 32390 - DNA, 20 bp, Artificial Sequence
  Description of Artificial Sequence: Synthetic oligonucleotide
  Target: ATXN2; (-) strand; PAM type: NRG; PAM sequence: GGG
gtgccactgcactccagcct

SEQ ID NO: 32391 - DNA, 20 bp, Artificial Sequence
  Description of Artificial Sequence: Synthetic oligonucleotide
  Target: ATXN2; (-) strand; PAM type: NRG; PAM sequence: TGG
tgtgccactgcactccagcc

SEQ ID NO: 32392 - DNA, 20 bp, Artificial Sequence
  Description of Artificial Sequence: Synthetic oligonucleotide
  Target: ATXN2; (-) strand; PAM type: NRG; PAM sequence: CAG
aagattgtgccactgcactc

SEQ ID NO: 32393 - DNA, 20 bp, Artificial Sequence
  Description of Artificial Sequence: Synthetic oligonucleotide
  Target: ATXN2; (-) strand; PAM type: NRG; PAM sequence: AAG
ggtggaggttgcagtgagcc

SEQ ID NO: 32394 - DNA, 20 bp, Artificial Sequence
  Description of Artificial Sequence: Synthetic oligonucleotide
  Target: ATXN2; (-) strand; PAM type: NRG; PAM sequence: GAG
caggaggtggaggttgcagt

SEQ ID NO: 32395 - DNA, 20 bp, Artificial Sequence
  Description of Artificial Sequence: Synthetic oligonucleotide
  Target: ATXN2; (-) strand; PAM type: NRG; PAM sequence: CAG
aacccaggaggtggaggttg

SEQ ID NO: 32396 - DNA, 20 bp, Artificial Sequence
  Description of Artificial Sequence: Synthetic oligonucleotide
  Target: ATXN2; (-) strand; PAM type: NRG; PAM sequence: AGG
cgcttgaacccaggaggtgg

SEQ ID NO: 32397 - DNA, 20 bp, Artificial Sequence
  Description of Artificial Sequence: Synthetic oligonucleotide
  Target: ATXN2; (-) strand; PAM type: NRG; PAM sequence: GAG
tcgcttgaacccaggaggtg

SEQ ID NO: 32398 - DNA, 20 bp, Artificial Sequence
  Description of Artificial Sequence: Synthetic oligonucleotide
  Target: ATXN2; (-) strand; PAM type: NRG; PAM sequence: TGG
aatcgcttgaacccaggagg

SEQ ID NO: 32399 - DNA, 20 bp, Artificial Sequence
  Description of Artificial Sequence: Synthetic oligonucleotide
  Target: ATXN2; (-) strand; PAM type: NRG; PAM sequence: AGG
gggaatcgcttgaacccagg

SEQ ID NO: 32400 - DNA, 20 bp, Artificial Sequence
  Description of Artificial Sequence: Synthetic oligonucleotide
  Target: ATXN2; (-) strand; PAM type: NRG; PAM sequence: GAG
ggggaatcgcttgaacccag

SEQ ID NO: 32401 - DNA, 20 bp, Artificial Sequence
  Description of Artificial Sequence: Synthetic oligonucleotide
  Target: ATXN2; (-) strand; PAM type: NRG; PAM sequence: AGG
caggggaatcgcttgaaccc

SEQ ID NO: 32402 - DNA, 20 bp, Artificial Sequence
  Description of Artificial Sequence: Synthetic oligonucleotide
  Target: ATXN2; (-) strand; PAM type: NRG; PAM sequence: CAG
gcaggggaatcgcttgaacc

SEQ ID NO: 32403 - DNA, 20 bp, Artificial Sequence
  Description of Artificial Sequence: Synthetic oligonucleotide
  Target: ATXN2; (-) strand; PAM type: NRG; PAM sequence: GGG
tactcgagaggctgaggcag

SEQ ID NO: 32404 - DNA, 20 bp, Artificial Sequence
  Description of Artificial Sequence: Synthetic oligonucleotide
  Target: ATXN2; (-) strand; PAM type: NRG; PAM sequence: GGG
ctactcgagaggctgaggca

SEQ ID NO: 32405 - DNA, 20 bp, Artificial Sequence
  Description of Artificial Sequence: Synthetic oligonucleotide
  Target: ATXN2; (-) strand; PAM type: NRG; PAM sequence: AGG
gctactcgagaggctgaggc

SEQ ID NO: 32406 - DNA, 20 bp, Artificial Sequence
  Description of Artificial Sequence: Synthetic oligonucleotide
  Target: ATXN2; (-) strand; PAM type: NRG; PAM sequence: CAG
agctactcgagaggctgagg

SEQ ID NO: 32407 - DNA, 20 bp, Artificial Sequence
  Description of Artificial Sequence: Synthetic oligonucleotide
  Target: ATXN2; (-) strand; PAM type: NRG; PAM sequence: AGG
cccagctactcgagaggctg

SEQ ID NO: 32408 - DNA, 20 bp, Artificial Sequence
  Description of Artificial Sequence: Synthetic oligonucleotide
  Target: ATXN2; (-) strand; PAM type: NRG; PAM sequence: GAG
tcccagctactcgagaggct

SEQ ID NO: 32409 - DNA, 20 bp, Artificial Sequence
  Description of Artificial Sequence: Synthetic oligonucleotide
  Target: ATXN2; (-) strand; PAM type: NRG; PAM sequence: AGG
tgtagtcccagctactcgag

SEQ ID NO: 32410 - DNA, 20 bp, Artificial Sequence
  Description of Artificial Sequence: Synthetic oligonucleotide
  Target: ATXN2; (-) strand; PAM type: NRG; PAM sequence: GAG
ctgtagtcccagctactcga

SEQ ID NO: 32411 - DNA, 20 bp, Artificial Sequence
  Description of Artificial Sequence: Synthetic oligonucleotide
  Target: ATXN2; (-) strand; PAM type: NRG; PAM sequence: GAG
atctgtagtcccagctactc

SEQ ID NO: 32412 - DNA, 20 bp, Artificial Sequence
  Description of Artificial Sequence: Synthetic oligonucleotide
  Target: ATXN2; (-) strand; PAM type: NRG; PAM sequence: CAG
gtggtgcgcatctgtagtcc

SEQ ID NO: 32413 - DNA, 20 bp, Artificial Sequence
  Description of Artificial Sequence: Synthetic oligonucleotide
  Target: ATXN2; (-) strand; PAM type: NRG; PAM sequence: TAG
ggcatggtggtgcgcatctg

SEQ ID NO: 32414 - DNA, 20 bp, Artificial Sequence
  Description of Artificial Sequence: Synthetic oligonucleotide
  Target: ATXN2; (-) strand; PAM type: NRG; PAM sequence: TGG
aaaaaattagctgggcatgg

SEQ ID NO: 32415 - DNA, 20 bp, Artificial Sequence
  Description of Artificial Sequence: Synthetic oligonucleotide
  Target: ATXN2; (-) strand; PAM type: NRG; PAM sequence: TGG
tagaaaaaattagctgggca

SEQ ID NO: 32416 - DNA, 20 bp, Artificial Sequence
  Description of Artificial Sequence: Synthetic oligonucleotide
  Target: ATXN2; (-) strand; PAM type: NRG; PAM sequence: GGG
taaaatagaaaaaattagct

SEQ ID NO: 32417 - DNA, 20 bp, Artificial Sequence
  Description of Artificial Sequence: Synthetic oligonucleotide
  Target: ATXN2; (-) strand; PAM type: NRG; PAM sequence: TGG
ctaaaatagaaaaaattagc

SEQ ID NO: 32418 - DNA, 20 bp, Artificial Sequence
  Description of Artificial Sequence: Synthetic oligonucleotide
  Target: ATXN2; (-) strand; PAM type: NRG; PAM sequence: TAG
tctactaaaatagaaaaaat

SEQ ID NO: 32419 - DNA, 20 bp, Artificial Sequence
  Description of Artificial Sequence: Synthetic oligonucleotide
  Target: ATXN2; (-) strand; PAM type: NRG; PAM sequence: TAG
aaacctcatctctactaaaa

SEQ ID NO: 32420 - DNA, 20 bp, Artificial Sequence
  Description of Artificial Sequence: Synthetic oligonucleotide
  Target: ATXN2; (-) strand; PAM type: NRG; PAM sequence: GGG
caggagatcgagaccaacct

SEQ ID NO: 32421 - DNA, 20 bp, Artificial Sequence
  Description of Artificial Sequence: Synthetic oligonucleotide
  Target: ATXN2; (-) strand; PAM type: NRG; PAM sequence: TGG
tcaggagatcgagaccaacc

SEQ ID NO: 32422 - DNA, 20 bp, Artificial Sequence
  Description of Artificial Sequence: Synthetic oligonucleotide
  Target: ATXN2; (-) strand; PAM type: NRG; PAM sequence: GAG
gatcacgaggtcaggagatc

SEQ ID NO: 32423 - DNA, 20 bp, Artificial Sequence
  Description of Artificial Sequence: Synthetic oligonucleotide
  Target: ATXN2; (-) strand; PAM type: NRG; PAM sequence: GAG
cgggtggatcacgaggtcag

SEQ ID NO: 32424 - DNA, 20 bp, Artificial Sequence
  Description of Artificial Sequence: Synthetic oligonucleotide
  Target: ATXN2; (-) strand; PAM type: NRG; PAM sequence: AGG
ggcgggtggatcacgaggtc

SEQ ID NO: 32425 - DNA, 20 bp, Artificial Sequence
  Description of Artificial Sequence: Synthetic oligonucleotide
  Target: ATXN2; (-) strand; PAM type: NRG; PAM sequence: CAG
aggcgggtggatcacgaggt

SEQ ID NO: 32426 - DNA, 20 bp, Artificial Sequence
  Description of Artificial Sequence: Synthetic oligonucleotide
  Target: ATXN2; (-) strand; PAM type: NRG; PAM sequence: AGG
gctgaggcgggtggatcacg

SEQ ID NO: 32427 - DNA, 20 bp, Artificial Sequence
  Description of Artificial Sequence: Synthetic oligonucleotide
  Target: ATXN2; (-) strand; PAM type: NRG; PAM sequence: GAG
ggctgaggcgggtggatcac

SEQ ID NO: 32428 - DNA, 20 bp, Artificial Sequence
  Description of Artificial Sequence: Synthetic oligonucleotide
  Target: ATXN2; (-) strand; PAM type: NRG; PAM sequence: TGG
ctttgggaggctgaggcggg

SEQ ID NO: 32429 - DNA, 20 bp, Artificial Sequence
  Description of Artificial Sequence: Synthetic oligonucleotide
  Target: ATXN2; (-) strand; PAM type: NRG; PAM sequence: GGG
gcactttgggaggctgaggc

SEQ ID NO: 32430 - DNA, 20 bp, Artificial Sequence
  Description of Artificial Sequence: Synthetic oligonucleotide
  Target: ATXN2; (-) strand; PAM type: NRG; PAM sequence: CGG
agcactttgggaggctgagg

SEQ ID NO: 32431 - DNA, 20 bp, Artificial Sequence
  Description of Artificial Sequence: Synthetic oligonucleotide
  Target: ATXN2; (-) strand; PAM type: NRG; PAM sequence: AGG
cccagcactttgggaggctg

SEQ ID NO: 32432 - DNA, 20 bp, Artificial Sequence
  Description of Artificial Sequence: Synthetic oligonucleotide
  Target: ATXN2; (-) strand; PAM type: NRG; PAM sequence: GAG
tcccagcactttgggaggct

SEQ ID NO: 32433 - DNA, 20 bp, Artificial Sequence
  Description of Artificial Sequence: Synthetic oligonucleotide
  Target: ATXN2; (-) strand; PAM type: NRG; PAM sequence: AGG
tataatcccagcactttggg

SEQ ID NO: 32434 - DNA, 20 bp, Artificial Sequence
  Description of Artificial Sequence: Synthetic oligonucleotide
  Target: ATXN2; (-) strand; PAM type: NRG; PAM sequence: GAG
ctataatcccagcactttgg

SEQ ID NO: 32435 - DNA, 20 bp, Artificial Sequence
  Description of Artificial Sequence: Synthetic oligonucleotide
  Target: ATXN2; (-) strand; PAM type: NRG; PAM sequence: GGG
gcctataatcccagcacttt

SEQ ID NO: 32436 - DNA, 20 bp, Artificial Sequence
  Description of Artificial Sequence: Synthetic oligonucleotide
  Target: ATXN2; (-) strand; PAM type: NRG; PAM sequence: TGG
cgcctataatcccagcactt

SEQ ID NO: 32437 - DNA, 20 bp, Artificial Sequence
  Description of Artificial Sequence: Synthetic oligonucleotide
  Target: ATXN2; (-) strand; PAM type: NRG; PAM sequence: CAG
gtggctcacgcctataatcc

SEQ ID NO: 32438 - DNA, 20 bp, Artificial Sequence
  Description of Artificial Sequence: Synthetic oligonucleotide
  Target: ATXN2; (-) strand; PAM type: NRG; PAM sequence: TGG
tcttccttggctgggcgcgg

SEQ ID NO: 32439 - DNA, 20 bp, Artificial Sequence
  Description of Artificial Sequence: Synthetic oligonucleotide
  Target: ATXN2; (-) strand; PAM type: NRG; PAM sequence: CGG
atatcttccttggctgggcg

SEQ ID NO: 32440 - DNA, 20 bp, Artificial Sequence
  Description of Artificial Sequence: Synthetic oligonucleotide
  Target: ATXN2; (-) strand; PAM type: NRG; PAM sequence: GGG
aaagaatatcttccttggct

SEQ ID NO: 32441 - DNA, 20 bp, Artificial Sequence
  Description of Artificial Sequence: Synthetic oligonucleotide
  Target: ATXN2; (-) strand; PAM type: NRG; PAM sequence: TGG
gaaagaatatcttccttggc

SEQ ID NO: 32442 - DNA, 20 bp, Artificial Sequence
  Description of Artificial Sequence: Synthetic oligonucleotide
  Target: ATXN2; (-) strand; PAM type: NRG; PAM sequence: TGG
aagagaaagaatatcttcct

SEQ ID NO: 32443 - DNA, 20 bp, Artificial Sequence
  Description of Artificial Sequence: Synthetic oligonucleotide
  Target: ATXN2; (-) strand; PAM type: NRG; PAM sequence: AAG
tatttacctattaaaagaga

SEQ ID NO: 32444 - DNA, 20 bp, Artificial Sequence
  Description of Artificial Sequence: Synthetic oligonucleotide
  Target: ATXN2; (-) strand; PAM type: NRG; PAM sequence: GAG
agtttatttacctattaaaa

SEQ ID NO: 32445 - DNA, 20 bp, Artificial Sequence
  Description of Artificial Sequence: Synthetic oligonucleotide
  Target: ATXN2; (-) strand; PAM type: NRG; PAM sequence: AAG
ttagtttatttacctattaa

SEQ ID NO: 32446 - DNA, 20 bp, Artificial Sequence
  Description of Artificial Sequence: Synthetic oligonucleotide
  Target: ATXN2; (-) strand; PAM type: NRG; PAM sequence: TAG
tactcagccactctcaggct

SEQ ID NO: 32447 - DNA, 20 bp, Artificial Sequence
  Description of Artificial Sequence: Synthetic oligonucleotide
  Target: ATXN2; (-) strand; PAM type: NRG; PAM sequence: AGG
caagttactcagccactctc

SEQ ID NO: 32448 - DNA, 20 bp, Artificial Sequence
  Description of Artificial Sequence: Synthetic oligonucleotide
  Target: ATXN2; (-) strand; PAM type: NRG; PAM sequence: CAG
gcaagttactcagccactct

SEQ ID NO: 32449 - DNA, 20 bp, Artificial Sequence
  Description of Artificial Sequence: Synthetic oligonucleotide
  Target: ATXN2; (-) strand; PAM type: NRG; PAM sequence: CAG
gtttgaatgggcaagttact

SEQ ID NO: 32450 - DNA, 20 bp, Artificial Sequence
  Description of Artificial Sequence: Synthetic oligonucleotide
  Target: ATXN2; (-) strand; PAM type: NRG; PAM sequence: AAG
ggtcacatgtttgaatgggc

SEQ ID NO: 32451 - DNA, 20 bp, Artificial Sequence
  Description of Artificial Sequence: Synthetic oligonucleotide
  Target: ATXN2; (-) strand; PAM type: NRG; PAM sequence: GGG
gcttggtcacatgtttgaat

SEQ ID NO: 32452 - DNA, 20 bp, Artificial Sequence
  Description of Artificial Sequence: Synthetic oligonucleotide
  Target: ATXN2; (-) strand; PAM type: NRG; PAM sequence: TGG
tgcttggtcacatgtttgaa

SEQ ID NO: 32453 - DNA, 20 bp, Artificial Sequence
  Description of Artificial Sequence: Synthetic oligonucleotide
  Target: ATXN2; (-) strand; PAM type: NRG; PAM sequence: TGG
atggttggcacttaactgct

SEQ ID NO: 32454 - DNA, 20 bp, Artificial Sequence
  Description of Artificial Sequence: Synthetic oligonucleotide
  Target: ATXN2; (-) strand; PAM type: NRG; PAM sequence: TGG
atccctatttcttgaatggt

SEQ ID NO: 32455 - DNA, 20 bp, Artificial Sequence
  Description of Artificial Sequence: Synthetic oligonucleotide
  Target: ATXN2; (-) strand; PAM type: NRG; PAM sequence: TGG
ttgtatccctatttcttgaa

SEQ ID NO: 32456 - DNA, 20 bp, Artificial Sequence
  Description of Artificial Sequence: Synthetic oligonucleotide
  Target: ATXN2; (-) strand; PAM type: NRG; PAM sequence: AGG
aatttaagctctatgaaagc

SEQ ID NO: 32457 - DNA, 20 bp, Artificial Sequence
  Description of Artificial Sequence: Synthetic oligonucleotide
  Target: ATXN2; (-) strand; PAM type: NRG; PAM sequence: CAG
aaatttaagctctatgaaag

SEQ ID NO: 32458 - DNA, 20 bp, Artificial Sequence
  Description of Artificial Sequence: Synthetic oligonucleotide
  Target: ATXN2; (-) strand; PAM type: NRG; PAM sequence: AAG
ctaaaatttaagctctatga

SEQ ID NO: 32459 - DNA, 20 bp, Artificial Sequence
  Description of Artificial Sequence: Synthetic oligonucleotide
  Target: ATXN2; (-) strand; PAM type: NRG; PAM sequence: AAG
ctcttcagtaactaaaattt

SEQ ID NO: 32460 - DNA, 20 bp, Artificial Sequence
  Description of Artificial Sequence: Synthetic oligonucleotide
  Target: ATXN2; (-) strand; PAM type: NRG; PAM sequence: CAG
cctggccatggttcactctt

SEQ ID NO: 32461 - DNA, 20 bp, Artificial Sequence
  Description of Artificial Sequence: Synthetic oligonucleotide
  Target: ATXN2; (-) strand; PAM type: NRG; PAM sequence: TGG
tgatctaccgtgcctggcca

SEQ ID NO: 32462 - DNA, 20 bp, Artificial Sequence
  Description of Artificial Sequence: Synthetic oligonucleotide
  Target: ATXN2; (-) strand; PAM type: NRG; PAM sequence: TGG
caggcatgatctaccgtgcc

SEQ ID NO: 32463 - DNA, 20 bp, Artificial Sequence
  Description of Artificial Sequence: Synthetic oligonucleotide
  Target: ATXN2; (-) strand; PAM type: NRG; PAM sequence: AGG
tcccaacgtgctgggattac

SEQ ID NO: 32464 - DNA, 20 bp, Artificial Sequence
  Description of Artificial Sequence: Synthetic oligonucleotide
  Target: ATXN2; (-) strand; PAM type: NRG; PAM sequence: CAG
ctcccaacgtgctgggatta

SEQ ID NO: 32465 - DNA, 20 bp, Artificial Sequence
  Description of Artificial Sequence: Synthetic oligonucleotide
  Target: ATXN2; (-) strand; PAM type: NRG; PAM sequence: GGG
cctgggcctcccaacgtgct

SEQ ID NO: 32466 - DNA, 20 bp, Artificial Sequence
  Description of Artificial Sequence: Synthetic oligonucleotide
  Target: ATXN2; (-) strand; PAM type: NRG; PAM sequence: TGG
acctgggcctcccaacgtgc

SEQ ID NO: 32467 - DNA, 20 bp, Artificial Sequence
  Description of Artificial Sequence: Synthetic oligonucleotide
  Target: ATXN2; (-) strand; PAM type: NRG; PAM sequence: GGG
ctcaggtggtccgcccacct

SEQ ID NO: 32468 - DNA, 20 bp, Artificial Sequence
  Description of Artificial Sequence: Synthetic oligonucleotide
  Target: ATXN2; (-) strand; PAM type: NRG; PAM sequence: TGG
cctcaggtggtccgcccacc

SEQ ID NO: 32469 - DNA, 20 bp, Artificial Sequence
  Description of Artificial Sequence: Synthetic oligonucleotide
  Target: ATXN2; (-) strand; PAM type: NRG; PAM sequence: TGG
cttgaactcctgacctcagg

SEQ ID NO: 32470 - DNA, 20 bp, Artificial Sequence
  Description of Artificial Sequence: Synthetic oligonucleotide
  Target: ATXN2; (-) strand; PAM type: NRG; PAM sequence: AGG
ggtcttgaactcctgacctc

SEQ ID NO: 32471 - DNA, 20 bp, Artificial Sequence
  Description of Artificial Sequence: Synthetic oligonucleotide
  Target: ATXN2; (-) strand; PAM type: NRG; PAM sequence: CAG
tggtcttgaactcctgacct

SEQ ID NO: 32472 - DNA, 20 bp, Artificial Sequence
  Description of Artificial Sequence: Synthetic oligonucleotide
  Target: ATXN2; (-) strand; PAM type: NRG; PAM sequence: TGG
tttcgccatgttgttcaggc

SEQ ID NO: 32473 - DNA, 20 bp, Artificial Sequence
  Description of Artificial Sequence: Synthetic oligonucleotide
  Target: ATXN2; (-) strand; PAM type: NRG; PAM sequence: AGG
gggttttcgccatgttgttc

SEQ ID NO: 32474 - DNA, 20 bp, Artificial Sequence
  Description of Artificial Sequence: Synthetic oligonucleotide
  Target: ATXN2; (-) strand; PAM type: NRG; PAM sequence: CAG
ggggttttcgccatgttgtt

SEQ ID NO: 32475 - DNA, 20 bp, Artificial Sequence
  Description of Artificial Sequence: Synthetic oligonucleotide
  Target: ATXN2; (-) strand; PAM type: NRG; PAM sequence: GGG
ttatatttttagtagagacg

SEQ ID NO: 32476 - DNA, 20 bp, Artificial Sequence
  Description of Artificial Sequence: Synthetic oligonucleotide
  Target: ATXN2; (-) strand; PAM type: NRG; PAM sequence: GGG
tttatatttttagtagagac

SEQ ID NO: 32477 - DNA, 20 bp, Artificial Sequence
  Description of Artificial Sequence: Synthetic oligonucleotide
  Target: ATXN2; (-) strand; PAM type: NRG; PAM sequence: CGG
ttttatatttttagtagaga

SEQ ID NO: 32478 - DNA, 20 bp, Artificial Sequence
  Description of Artificial Sequence: Synthetic oligonucleotide
  Target: ATXN2; (-) strand; PAM type: NRG; PAM sequence: GAG
taatttttatatttttagta

SEQ ID NO: 32479 - DNA, 20 bp, Artificial Sequence
  Description of Artificial Sequence: Synthetic oligonucleotide
  Target: ATXN2; (-) strand; PAM type: NRG; PAM sequence: TAG
gctaatttttatatttttag

SEQ ID NO: 32480 - DNA, 20 bp, Artificial Sequence
  Description of Artificial Sequence: Synthetic oligonucleotide
  Target: ATXN2; (-) strand; PAM type: NRG; PAM sequence: TAG
ccagctaatttttatatttt

SEQ ID NO: 32481 - DNA, 20 bp, Artificial Sequence
  Description of Artificial Sequence: Synthetic oligonucleotide
  Target: ATXN2; (-) strand; PAM type: NRG; PAM sequence: CAG
caggcacccaccaccatgcc

SEQ ID NO: 32482 - DNA, 20 bp, Artificial Sequence
  Description of Artificial Sequence: Synthetic oligonucleotide
  Target: ATXN2; (-) strand; PAM type: NRG; PAM sequence: AGG
tcctgaatagttgggattac

SEQ ID NO: 32483 - DNA, 20 bp, Artificial Sequence
  Description of Artificial Sequence: Synthetic oligonucleotide
  Target: ATXN2; (-) strand; PAM type: NRG; PAM sequence: CAG
ctcctgaatagttgggatta

SEQ ID NO: 32484 - DNA, 20 bp, Artificial Sequence
  Description of Artificial Sequence: Synthetic oligonucleotide
  Target: ATXN2; (-) strand; PAM type: NRG; PAM sequence: GGG
cctcagcctcctgaatagtt

SEQ ID NO: 32485 - DNA, 20 bp, Artificial Sequence
  Description of Artificial Sequence: Synthetic oligonucleotide
  Target: ATXN2; (-) strand; PAM type: NRG; PAM sequence: TGG
gcctcagcctcctgaatagt

SEQ ID NO: 32486 - DNA, 20 bp, Artificial Sequence
  Description of Artificial Sequence: Synthetic oligonucleotide
  Target: ATXN2; (-) strand; PAM type: NRG; PAM sequence: TAG
tcctgcctcagcctcctgaa

SEQ ID NO: 32487 - DNA, 20 bp, Artificial Sequence
  Description of Artificial Sequence: Synthetic oligonucleotide
  Target: ATXN2; (-) strand; PAM type: NRG; PAM sequence: CAG
ttcaagtgattctcctgcct

SEQ ID NO: 32488 - DNA, 20 bp, Artificial Sequence
  Description of Artificial Sequence: Synthetic oligonucleotide
  Target: ATXN2; (-) strand; PAM type: NRG; PAM sequence: AAG
aacctccacctcctgtgttc

SEQ ID NO: 32489 - DNA, 20 bp, Artificial Sequence
  Description of Artificial Sequence: Synthetic oligonucleotide
  Target: ATXN2; (-) strand; PAM type: NRG; PAM sequence: TGG
ggagtgcaatggtgcgatct

SEQ ID NO: 32490 - DNA, 20 bp, Artificial Sequence
  Description of Artificial Sequence: Synthetic oligonucleotide
  Target: ATXN2; (-) strand; PAM type: NRG; PAM sequence: TGG
ttgcccaggctggagtgcaa

SEQ ID NO: 32491 - DNA, 20 bp, Artificial Sequence
  Description of Artificial Sequence: Synthetic oligonucleotide
  Target: ATXN2; (-) strand; PAM type: NRG; PAM sequence: GAG
ttgctgtgttgcccaggctg

SEQ ID NO: 32492 - DNA, 20 bp, Artificial Sequence
  Description of Artificial Sequence: Synthetic oligonucleotide
  Target: ATXN2; (-) strand; PAM type: NRG; PAM sequence: TGG
tcttgctgtgttgcccaggc

SEQ ID NO: 32493 - DNA, 20 bp, Artificial Sequence
  Description of Artificial Sequence: Synthetic oligonucleotide
  Target: ATXN2; (-) strand; PAM type: NRG; PAM sequence: AGG
ggagtcttgctgtgttgccc

SEQ ID NO: 32494 - DNA, 20 bp, Artificial Sequence
  Description of Artificial Sequence: Synthetic oligonucleotide
  Target: ATXN2; (-) strand; PAM type: NRG; PAM sequence: CAG
cggagtcttgctgtgttgcc

SEQ ID NO: 32495 - DNA, 20 bp, Artificial Sequence
  Description of Artificial Sequence: Synthetic oligonucleotide
  Target: ATXN2; (-) strand; PAM type: NRG; PAM sequence: GAG
ttttttttttttttgagtcg

SEQ ID NO: 32496 - DNA, 20 bp, Artificial Sequence
  Description of Artificial Sequence: Synthetic oligonucleotide
  Target: ATXN2; (-) strand; PAM type: NRG; PAM sequence: CGG
ttttttttttttttttgagt

SEQ ID NO: 32497 - DNA, 20 bp, Artificial Sequence
  Description of Artificial Sequence: Synthetic oligonucleotide
  Target: ATXN2; (-) strand; PAM type: NRG; PAM sequence: GAG
tttttttttttttttttttt

SEQ ID NO: 32498 - DNA, 20 bp, Artificial Sequence
  Description of Artificial Sequence: Synthetic oligonucleotide
  Target: ATXN2; (-) strand; PAM type: NRG; PAM sequence: TGG
tccagtctaagctggaatca

SEQ ID NO: 32499 - DNA, 20 bp, Artificial Sequence
  Description of Artificial Sequence: Synthetic oligonucleotide
  Target: ATXN2; (-) strand; PAM type: NRG; PAM sequence: TGG
ctggcaactccagtctaagc

SEQ ID NO: 32500 - DNA, 20 bp, Artificial Sequence
  Description of Artificial Sequence: Synthetic oligonucleotide
  Target: ATXN2; (-) strand; PAM type: NRG; PAM sequence: AAG
ttatctggcaactccagtct

SEQ ID NO: 32501 - DNA, 20 bp, Artificial Sequence
  Description of Artificial Sequence: Synthetic oligonucleotide
  Target: ATXN2; (-) strand; PAM type: NRG; PAM sequence: CAG
tgtattttatctggcaactc

SEQ ID NO: 32502 - DNA, 20 bp, Artificial Sequence
  Description of Artificial Sequence: Synthetic oligonucleotide
  Target: ATXN2; (-) strand; PAM type: NRG; PAM sequence: TGG
tgagcatcttgtattttatc

SEQ ID NO: 32503 - DNA, 20 bp, Artificial Sequence
  Description of Artificial Sequence: Synthetic oligonucleotide
  Target: ATXN2; (-) strand; PAM type: NRG; PAM sequence: GAG
tctaaagttgaaatttaact

SEQ ID NO: 32504 - DNA, 20 bp, Artificial Sequence
  Description of Artificial Sequence: Synthetic oligonucleotide
  Target: ATXN2; (-) strand; PAM type: NRG; PAM sequence: AAG
agaaaaaagttatttatcta

SEQ ID NO: 32505 - DNA, 20 bp, Artificial Sequence
  Description of Artificial Sequence: Synthetic oligonucleotide
  Target: ATXN2; (-) strand; PAM type: NRG; PAM sequence: AAG
gtattaaattgcatagaaaa

SEQ ID NO: 32506 - DNA, 20 bp, Artificial Sequence
  Description of Artificial Sequence: Synthetic oligonucleotide
  Target: ATXN2; (-) strand; PAM type: NRG; PAM sequence: TAG
taattgtgtattaaattgca

SEQ ID NO: 32507 - DNA, 20 bp, Artificial Sequence
  Description of Artificial Sequence: Synthetic oligonucleotide
  Target: ATXN2; (-) strand; PAM type: NRG; PAM sequence: TAG
atgaacattgaccagttttt

SEQ ID NO: 32508 - DNA, 20 bp, Artificial Sequence
  Description of Artificial Sequence: Synthetic oligonucleotide
  Target: ATXN2; (-) strand; PAM type: NRG; PAM sequence: CAG
aatttttgatgaacattgac

SEQ ID NO: 32509 - DNA, 20 bp, Artificial Sequence
  Description of Artificial Sequence: Synthetic oligonucleotide
  Target: ATXN2; (-) strand; PAM type: NRG; PAM sequence: CAG
aaatagaaatacaggacact

SEQ ID NO: 32510 - DNA, 20 bp, Artificial Sequence
  Description of Artificial Sequence: Synthetic oligonucleotide
  Target: ATXN2; (-) strand; PAM type: NRG; PAM sequence: AGG
gatttggcaaatagaaatac

SEQ ID NO: 32511 - DNA, 20 bp, Artificial Sequence
  Description of Artificial Sequence: Synthetic oligonucleotide
  Target: ATXN2; (-) strand; PAM type: NRG; PAM sequence: CAG
agatttggcaaatagaaata

SEQ ID NO: 32512 - DNA, 20 bp, Artificial Sequence
  Description of Artificial Sequence: Synthetic oligonucleotide
  Target: ATXN2; (-) strand; PAM type: NRG; PAM sequence: TAG
gggttgtcagatttggcaaa

SEQ ID NO: 32513 - DNA, 20 bp, Artificial Sequence
  Description of Artificial Sequence: Synthetic oligonucleotide
  Target: ATXN2; (-) strand; PAM type: NRG; PAM sequence: TGG
taagctagggttgtcagatt

SEQ ID NO: 32514 - DNA, 20 bp, Artificial Sequence
  Description of Artificial Sequence: Synthetic oligonucleotide
  Target: ATXN2; (-) strand; PAM type: NRG; PAM sequence: CAG
tatatctaagctagggttgt

SEQ ID NO: 32515 - DNA, 20 bp, Artificial Sequence
  Description of Artificial Sequence: Synthetic oligonucleotide
  Target: ATXN2; (-) strand; PAM type: NRG; PAM sequence: GGG
ttgaggttatatctaagcta

SEQ ID NO: 32516 - DNA, 20 bp, Artificial Sequence
  Description of Artificial Sequence: Synthetic oligonucleotide
  Target: ATXN2; (-) strand; PAM type: NRG; PAM sequence: AGG
tttgaggttatatctaagct

SEQ ID NO: 32517 - DNA, 20 bp, Artificial Sequence
  Description of Artificial Sequence: Synthetic oligonucleotide
  Target: ATXN2; (-) strand; PAM type: NRG; PAM sequence: TAG
ttttgaggttatatctaagc

SEQ ID NO: 32518 - DNA, 20 bp, Artificial Sequence
  Description of Artificial Sequence: Synthetic oligonucleotide
  Target: ATXN2; (-) strand; PAM type: NRG; PAM sequence: AAG
agagttttgaggttatatct

SEQ ID NO: 32519 - DNA, 20 bp, Artificial Sequence
  Description of Artificial Sequence: Synthetic oligonucleotide
  Target: ATXN2; (-) strand; PAM type: NRG; PAM sequence: AGG
aggattgagaaagagttttg

SEQ ID NO: 32520 - DNA, 20 bp, Artificial Sequence
  Description of Artificial Sequence: Synthetic oligonucleotide
  Target: ATXN2; (-) strand; PAM type: NRG; PAM sequence: GAG
aaggattgagaaagagtttt

SEQ ID NO: 32521 - DNA, 20 bp, Artificial Sequence
  Description of Artificial Sequence: Synthetic oligonucleotide
  Target: ATXN2; (-) strand; PAM type: NRG; PAM sequence: GAG
gcagtaaaaggattgagaaa

SEQ ID NO: 32522 - DNA, 20 bp, Artificial Sequence
  Description of Artificial Sequence: Synthetic oligonucleotide
  Target: ATXN2; (-) strand; PAM type: NRG; PAM sequence: AAG
acgcagtaaaaggattgaga

SEQ ID NO: 32523 - DNA, 20 bp, Artificial Sequence
  Description of Artificial Sequence: Synthetic oligonucleotide
  Target: ATXN2; (-) strand; PAM type: NRG; PAM sequence: GAG
agaaacgcagtaaaaggatt

SEQ ID NO: 32524 - DNA, 20 bp, Artificial Sequence
  Description of Artificial Sequence: Synthetic oligonucleotide
  Target: ATXN2; (-) strand; PAM type: NRG; PAM sequence: AGG
agccagagaaacgcagtaaa

SEQ ID NO: 32525 - DNA, 20 bp, Artificial Sequence
  Description of Artificial Sequence: Synthetic oligonucleotide
  Target: ATXN2; (-) strand; PAM type: NRG; PAM sequence: AAG
gagccagagaaacgcagtaa

SEQ ID NO: 32526 - DNA, 20 bp, Artificial Sequence
  Description of Artificial Sequence: Synthetic oligonucleotide
  Target: ATXN2; (-) strand; PAM type: NRG; PAM sequence: CAG
gctttagagccagagaaacg

SEQ ID NO: 32527 - DNA, 20 bp, Artificial Sequence
  Description of Artificial Sequence: Synthetic oligonucleotide
  Target: ATXN2; (-) strand; PAM type: NRG; PAM sequence: GAG
aagttactgctttagagcca

SEQ ID NO: 32528 - DNA, 20 bp, Artificial Sequence
  Description of Artificial Sequence: Synthetic oligonucleotide
  Target: ATXN2; (-) strand; PAM type: NRG; PAM sequence: CAG
aaaagttactgctttagagc

SEQ ID NO: 32529 - DNA, 20 bp, Artificial Sequence
  Description of Artificial Sequence: Synthetic oligonucleotide
  Target: ATXN2; (-) strand; PAM type: NRG; PAM sequence: GAG
tcaaaaaagttactgcttta

SEQ ID NO: 32530 - DNA, 20 bp, Artificial Sequence
  Description of Artificial Sequence: Synthetic oligonucleotide
  Target: ATXN2; (-) strand; PAM type: NRG; PAM sequence: TAG
agtcaaaaaagttactgctt

SEQ ID NO: 32531 - DNA, 20 bp, Artificial Sequence
  Description of Artificial Sequence: Synthetic oligonucleotide
  Target: ATXN2; (-) strand; PAM type: NRG; PAM sequence: AAG
ttttattgatatagtcaaaa

SEQ ID NO: 32532 - DNA, 20 bp, Artificial Sequence
  Description of Artificial Sequence: Synthetic oligonucleotide
  Target: ATXN2; (-) strand; PAM type: NRG; PAM sequence: TAG
taagtaattttttattgata

SEQ ID NO: 32533 - DNA, 20 bp, Artificial Sequence
  Description of Artificial Sequence: Synthetic oligonucleotide
  Target: ATXN2; (-) strand; PAM type: NRG; PAM sequence: AAG
ctagccaaaaattttttttt

SEQ ID NO: 32534 - DNA, 20 bp, Artificial Sequence
  Description of Artificial Sequence: Synthetic oligonucleotide
  Target: ATXN2; (-) strand; PAM type: NRG; PAM sequence: TAG
cagggatgagccaccgtgcc

SEQ ID NO: 32535 - DNA, 20 bp, Artificial Sequence
  Description of Artificial Sequence: Synthetic oligonucleotide
  Target: ATXN2; (-) strand; PAM type: NRG; PAM sequence: GAG
aatgctgggattacagggat

SEQ ID NO: 32536 - DNA, 20 bp, Artificial Sequence
  Description of Artificial Sequence: Synthetic oligonucleotide
  Target: ATXN2; (-) strand; PAM type: NRG; PAM sequence: GGG
ccagaaatgctgggattaca

SEQ ID NO: 32537 - DNA, 20 bp, Artificial Sequence
  Description of Artificial Sequence: Synthetic oligonucleotide
  Target: ATXN2; (-) strand; PAM type: NRG; PAM sequence: AGG
tccagaaatgctgggattac

SEQ ID NO: 32538 - DNA, 20 bp, Artificial Sequence
  Description of Artificial Sequence: Synthetic oligonucleotide
  Target: ATXN2; (-) strand; PAM type: NRG; PAM sequence: CAG
gtccagaaatgctgggatta

SEQ ID NO: 32539 - DNA, 20 bp, Artificial Sequence
  Description of Artificial Sequence: Synthetic oligonucleotide
  Target: ATXN2; (-) strand; PAM type: NRG; PAM sequence: GGG
ccttggtgtccagaaatgct

SEQ ID NO: 32540 - DNA, 20 bp, Artificial Sequence
  Description of Artificial Sequence: Synthetic oligonucleotide
  Target: ATXN2; (-) strand; PAM type: NRG; PAM sequence: TGG
accttggtgtccagaaatgc

SEQ ID NO: 32541 - DNA, 20 bp, Artificial Sequence
  Description of Artificial Sequence: Synthetic oligonucleotide
  Target: ATXN2; (-) strand; PAM type: NRG; PAM sequence: CAG
gatccacccaccttggtgtc

SEQ ID NO: 32542 - DNA, 20 bp, Artificial Sequence
  Description of Artificial Sequence: Synthetic oligonucleotide
  Target: ATXN2; (-) strand; PAM type: NRG; PAM sequence: TGG
ctcagatgatccacccacct

SEQ ID NO: 32543 - DNA, 20 bp, Artificial Sequence
  Description of Artificial Sequence: Synthetic oligonucleotide
  Target: ATXN2; (-) strand; PAM type: NRG; PAM sequence: CAG
tagtcttgaactctggagct

SEQ ID NO: 32544 - DNA, 20 bp, Artificial Sequence
  Description of Artificial Sequence: Synthetic oligonucleotide
  Target: ATXN2; (-) strand; PAM type: NRG; PAM sequence: GAG
caggctagtcttgaactctg

SEQ ID NO: 32545 - DNA, 20 bp, Artificial Sequence
  Description of Artificial Sequence: Synthetic oligonucleotide
  Target: ATXN2; (-) strand; PAM type: NRG; PAM sequence: TGG
ttcaggctagtcttgaactc

SEQ ID NO: 32546 - DNA, 20 bp, Artificial Sequence
  Description of Artificial Sequence: Synthetic oligonucleotide
  Target: ATXN2; (-) strand; PAM type: NRG; PAM sequence: TAG
ttttgccatgttgttcaggc

SEQ ID NO: 32547 - DNA, 20 bp, Artificial Sequence
  Description of Artificial Sequence: Synthetic oligonucleotide
  Target: ATXN2; (-) strand; PAM type: NRG; PAM sequence: AGG
gaggttttgccatgttgttc

SEQ ID NO: 32548 - DNA, 20 bp, Artificial Sequence
  Description of Artificial Sequence: Synthetic oligonucleotide
  Target: ATXN2; (-) strand; PAM type: NRG; PAM sequence: CAG
tgaggttttgccatgttgtt

SEQ ID NO: 32549 - DNA, 20 bp, Artificial Sequence
  Description of Artificial Sequence: Synthetic oligonucleotide
  Target: ATXN2; (-) strand; PAM type: NRG; PAM sequence: AGG
ttgtattttttgaagagatg

SEQ ID NO: 32550 - DNA, 20 bp, Artificial Sequence
  Description of Artificial Sequence: Synthetic oligonucleotide
  Target: ATXN2; (-) strand; PAM type: NRG; PAM sequence: GAG
tttgtattttttgaagagat

SEQ ID NO: 32551 - DNA, 20 bp, Artificial Sequence
  Description of Artificial Sequence: Synthetic oligonucleotide
  Target: ATXN2; (-) strand; PAM type: NRG; PAM sequence: GAG
taatttttgtattttttgaa

SEQ ID NO: 32552 - DNA, 20 bp, Artificial Sequence
  Description of Artificial Sequence: Synthetic oligonucleotide
  Target: ATXN2; (-) strand; PAM type: NRG; PAM sequence: AAG
gctaatttttgtattttttg

SEQ ID NO: 32553 - DNA, 20 bp, Artificial Sequence
  Description of Artificial Sequence: Synthetic oligonucleotide
  Target: ATXN2; (-) strand; PAM type: NRG; PAM sequence: TGG
caggagcacgctaccatgcc

SEQ ID NO: 32554 - DNA, 20 bp, Artificial Sequence
  Description of Artificial Sequence: Synthetic oligonucleotide
  Target: ATXN2; (-) strand; PAM type: NRG; PAM sequence: GAG
ctgagtagctgggagtacag

SEQ ID NO: 32555 - DNA, 20 bp, Artificial Sequence
  Description of Artificial Sequence: Synthetic oligonucleotide
  Target: ATXN2; (-) strand; PAM type: NRG; PAM sequence: AGG
tcctgagtagctgggagtac

SEQ ID NO: 32556 - DNA, 20 bp, Artificial Sequence
  Description of Artificial Sequence: Synthetic oligonucleotide
  Target: ATXN2; (-) strand; PAM type: NRG; PAM sequence: CAG
ctcctgagtagctgggagta

SEQ ID NO: 32557 - DNA, 20 bp, Artificial Sequence
  Description of Artificial Sequence: Synthetic oligonucleotide
  Target: ATXN2; (-) strand; PAM type: NRG; PAM sequence: GAG
tcagcctcctgagtagctgg

SEQ ID NO: 32558 - DNA, 20 bp, Artificial Sequence
  Description of Artificial Sequence: Synthetic oligonucleotide
  Target: ATXN2; (-) strand; PAM type: NRG; PAM sequence: GGG
cctcagcctcctgagtagct

SEQ ID NO: 32559 - DNA, 20 bp, Artificial Sequence
  Description of Artificial Sequence: Synthetic oligonucleotide
  Target: ATXN2; (-) strand; PAM type: NRG; PAM sequence: TGG
acctcagcctcctgagtagc

SEQ ID NO: 32560 - DNA, 20 bp, Artificial Sequence
  Description of Artificial Sequence: Synthetic oligonucleotide
  Target: ATXN2; (-) strand; PAM type: NRG; PAM sequence: TAG
tcccacctcagcctcctgag

SEQ ID NO: 32561 - DNA, 20 bp, Artificial Sequence
  Description of Artificial Sequence: Synthetic oligonucleotide
  Target: ATXN2; (-) strand; PAM type: NRG; PAM sequence: GAG
tcctcccacctcagcctcct

SEQ ID NO: 32562 - DNA, 20 bp, Artificial Sequence
  Description of Artificial Sequence: Synthetic oligonucleotide
  Target: ATXN2; (-) strand; PAM type: NRG; PAM sequence: CAG
ctcaagcgatcctcccacct

SEQ ID NO: 32563 - DNA, 20 bp, Artificial Sequence
  Description of Artificial Sequence: Synthetic oligonucleotide
  Target: ATXN2; (-) strand; PAM type: NRG; PAM sequence: AAG
aacctctgtttcctgggctc

SEQ ID NO: 32564 - DNA, 20 bp, Artificial Sequence
  Description of Artificial Sequence: Synthetic oligonucleotide
  Target: ATXN2; (-) strand; PAM type: NRG; PAM sequence: GGG
cactgcaacctctgtttcct

SEQ ID NO: 32565 - DNA, 20 bp, Artificial Sequence
  Description of Artificial Sequence: Synthetic oligonucleotide
  Target: ATXN2; (-) strand; PAM type: NRG; PAM sequence: TGG
tcactgcaacctctgtttcc

SEQ ID NO: 32566 - DNA, 20 bp, Artificial Sequence
  Description of Artificial Sequence: Synthetic oligonucleotide
  Target: ATXN2; (-) strand; PAM type: NRG; PAM sequence: CGG
agaatgtagtggtgcagtct

SEQ ID NO: 32567 - DNA, 20 bp, Artificial Sequence
  Description of Artificial Sequence: Synthetic oligonucleotide
  Target: ATXN2; (-) strand; PAM type: NRG; PAM sequence: CAG
aaggctagaatgtagtggtg

SEQ ID NO: 32568 - DNA, 20 bp, Artificial Sequence
  Description of Artificial Sequence: Synthetic oligonucleotide
  Target: ATXN2; (-) strand; PAM type: NRG; PAM sequence: TGG
tcaccaaggctagaatgtag

SEQ ID NO: 32569 - DNA, 20 bp, Artificial Sequence
  Description of Artificial Sequence: Synthetic oligonucleotide
  Target: ATXN2; (-) strand; PAM type: NRG; PAM sequence: TAG
ctgtcaccaaggctagaatg

SEQ ID NO: 32570 - DNA, 20 bp, Artificial Sequence
  Description of Artificial Sequence: Synthetic oligonucleotide
  Target: ATXN2; (-) strand; PAM type: NRG; PAM sequence: TAG
agggtctctgtcaccaaggc

SEQ ID NO: 32571 - DNA, 20 bp, Artificial Sequence
  Description of Artificial Sequence: Synthetic oligonucleotide
  Target: ATXN2; (-) strand; PAM type: NRG; PAM sequence: AGG
agacagggtctctgtcacca

SEQ ID NO: 32572 - DNA, 20 bp, Artificial Sequence
  Description of Artificial Sequence: Synthetic oligonucleotide
  Target: ATXN2; (-) strand; PAM type: NRG; PAM sequence: AAG
gagacagggtctctgtcacc

SEQ ID NO: 32573 - DNA, 20 bp, Artificial Sequence
  Description of Artificial Sequence: Synthetic oligonucleotide
  Target: ATXN2; (-) strand; PAM type: NRG; PAM sequence: GGG
ttttttttttttttgagaca

SEQ ID NO: 32574 - DNA, 20 bp, Artificial Sequence
  Description of Artificial Sequence: Synthetic oligonucleotide
  Target: ATXN2; (-) strand; PAM type: NRG; PAM sequence: AGG
tttttttttttttttgagac

SEQ ID NO: 32575 - DNA, 20 bp, Artificial Sequence
  Description of Artificial Sequence: Synthetic oligonucleotide
  Target: ATXN2; (-) strand; PAM type: NRG; PAM sequence: CAG
ttttttttttttttttgaga

SEQ ID NO: 32576 - DNA, 20 bp, Artificial Sequence
  Description of Artificial Sequence: Synthetic oligonucleotide
  Target: ATXN2; (-) strand; PAM type: NRG; PAM sequence: GAG
tttttttttttttttttttt

SEQ ID NO: 32577 - DNA, 20 bp, Artificial Sequence
  Description of Artificial Sequence: Synthetic oligonucleotide
  Target: ATXN2; (-) strand; PAM type: NRG; PAM sequence: CAG
tgctctgccacgagcagcaa

SEQ ID NO: 32578 - DNA, 20 bp, Artificial Sequence
  Description of Artificial Sequence: Synthetic oligonucleotide
  Target: ATXN2; (-) strand; PAM type: NRG; PAM sequence: CAG
tagtcctgctctgccacgag

SEQ ID NO: 32579 - DNA, 20 bp, Artificial Sequence
  Description of Artificial Sequence: Synthetic oligonucleotide
  Target: ATXN2; (-) strand; PAM type: NRG; PAM sequence: GAG
gactagtcctgctctgccac

SEQ ID NO: 32580 - DNA, 20 bp, Artificial Sequence
  Description of Artificial Sequence: Synthetic oligonucleotide
  Target: ATXN2; (-) strand; PAM type: NRG; PAM sequence: TAG
tgggcacattgcctatggac

SEQ ID NO: 32581 - DNA, 20 bp, Artificial Sequence
  Description of Artificial Sequence: Synthetic oligonucleotide
  Target: ATXN2; (-) strand; PAM type: NRG; PAM sequence: TGG
aactctgggcacattgccta

SEQ ID NO: 32582 - DNA, 20 bp, Artificial Sequence
  Description of Artificial Sequence: Synthetic oligonucleotide
  Target: ATXN2; (-) strand; PAM type: NRG; PAM sequence: GGG
tgtaatttttggccaactct

SEQ ID NO: 32583 - DNA, 20 bp, Artificial Sequence
  Description of Artificial Sequence: Synthetic oligonucleotide
  Target: ATXN2; (-) strand; PAM type: NRG; PAM sequence: TGG
atgtaatttttggccaactc

SEQ ID NO: 32584 - DNA, 20 bp, Artificial Sequence
  Description of Artificial Sequence: Synthetic oligonucleotide
  Target: ATXN2; (-) strand; PAM type: NRG; PAM sequence: TGG
gtaattcaaaatgtaatttt

SEQ ID NO: 32585 - DNA, 20 bp, Artificial Sequence
  Description of Artificial Sequence: Synthetic oligonucleotide
  Target: ATXN2; (-) strand; PAM type: NRG; PAM sequence: GAG
attgttttaagctttggttt

SEQ ID NO: 32586 - DNA, 20 bp, Artificial Sequence
  Description of Artificial Sequence: Synthetic oligonucleotide
  Target: ATXN2; (-) strand; PAM type: NRG; PAM sequence: TGG
ccaagaattgttttaagctt

SEQ ID NO: 32587 - DNA, 20 bp, Artificial Sequence
  Description of Artificial Sequence: Synthetic oligonucleotide
  Target: ATXN2; (-) strand; PAM type: NRG; PAM sequence: AAG
cagctgccaagaattgtttt

SEQ ID NO: 32588 - DNA, 20 bp, Artificial Sequence
  Description of Artificial Sequence: Synthetic oligonucleotide
  Target: ATXN2; (-) strand; PAM type: NRG; PAM sequence: AAG
agccactgcacccagctgcc

SEQ ID NO: 32589 - DNA, 20 bp, Artificial Sequence
  Description of Artificial Sequence: Synthetic oligonucleotide
  Target: ATXN2; (-) strand; PAM type: NRG; PAM sequence: CAG
caggtgtgagccactgcacc

SEQ ID NO: 32590 - DNA, 20 bp, Artificial Sequence
  Description of Artificial Sequence: Synthetic oligonucleotide
  Target: ATXN2; (-) strand; PAM type: NRG; PAM sequence: GAG
agtgctgggattacaggtgt

SEQ ID NO: 32591 - DNA, 20 bp, Artificial Sequence
  Description of Artificial Sequence: Synthetic oligonucleotide
  Target: ATXN2; (-) strand; PAM type: NRG; PAM sequence: AGG
tcccaaagtgctgggattac

SEQ ID NO: 32592 - DNA, 20 bp, Artificial Sequence
  Description of Artificial Sequence: Synthetic oligonucleotide
  Target: ATXN2; (-) strand; PAM type: NRG; PAM sequence: CAG
ctcccaaagtgctgggatta

SEQ ID NO: 32593 - DNA, 20 bp, Artificial Sequence
  Description of Artificial Sequence: Synthetic oligonucleotide
  Target: ATXN2; (-) strand; PAM type: NRG; PAM sequence: GGG
acctcgactcccaaagtgct

SEQ ID NO: 32594 - DNA, 20 bp, Artificial Sequence
  Description of Artificial Sequence: Synthetic oligonucleotide
  Target: ATXN2; (-) strand; PAM type: NRG; PAM sequence: TGG
cacctcgactcccaaagtgc

SEQ ID NO: 32595 - DNA, 20 bp, Artificial Sequence
  Description of Artificial Sequence: Synthetic oligonucleotide
  Target: ATXN2; (-) strand; PAM type: NRG; PAM sequence: AAG
tctgcccacctcgactccca

SEQ ID NO: 32596 - DNA, 20 bp, Artificial Sequence
  Description of Artificial Sequence: Synthetic oligonucleotide
  Target: ATXN2; (-) strand; PAM type: NRG; PAM sequence: TAG
tttcaccatgttggccagga

SEQ ID NO: 32597 - DNA, 20 bp, Artificial Sequence
  Description of Artificial Sequence: Synthetic oligonucleotide
  Target: ATXN2; (-) strand; PAM type: NRG; PAM sequence: AGG
ggggtttcaccatgttggcc

SEQ ID NO: 32598 - DNA, 20 bp, Artificial Sequence
  Description of Artificial Sequence: Synthetic oligonucleotide
  Target: ATXN2; (-) strand; PAM type: NRG; PAM sequence: CAG
tggggtttcaccatgttggc

SEQ ID NO: 32599 - DNA, 20 bp, Artificial Sequence
  Description of Artificial Sequence: Synthetic oligonucleotide
  Target: ATXN2; (-) strand; PAM type: NRG; PAM sequence: TGG
gagatggggtttcaccatgt

SEQ ID NO: 32600 - DNA, 20 bp, Artificial Sequence
  Description of Artificial Sequence: Synthetic oligonucleotide
  Target: ATXN2; (-) strand; PAM type: NRG; PAM sequence: GGG
ttgtatttttagtagagatg

SEQ ID NO: 32601 - DNA, 20 bp, Artificial Sequence
  Description of Artificial Sequence: Synthetic oligonucleotide
  Target: ATXN2; (-) strand; PAM type: NRG; PAM sequence: GGG
tttgtatttttagtagagat

SEQ ID NO: 32602 - DNA, 20 bp, Artificial Sequence
  Description of Artificial Sequence: Synthetic oligonucleotide
  Target: ATXN2; (-) strand; PAM type: NRG; PAM sequence: TGG
ttttgtatttttagtagaga

SEQ ID NO: 32603 - DNA, 20 bp, Artificial Sequence
  Description of Artificial Sequence: Synthetic oligonucleotide
  Target: ATXN2; (-) strand; PAM type: NRG; PAM sequence: GAG
taatttttgtatttttagta

SEQ ID NO: 32604 - DNA, 20 bp, Artificial Sequence
  Description of Artificial Sequence: Synthetic oligonucleotide
  Target: ATXN2; (-) strand; PAM type: NRG; PAM sequence: TAG
cctaatttttgtatttttag

SEQ ID NO: 32605 - DNA, 20 bp, Artificial Sequence
  Description of Artificial Sequence: Synthetic oligonucleotide
  Target: ATXN2; (-) strand; PAM type: NRG; PAM sequence: TAG
cggcctaatttttgtatttt

SEQ ID NO: 32606 - DNA, 20 bp, Artificial Sequence
  Description of Artificial Sequence: Synthetic oligonucleotide
  Target: ATXN2; (-) strand; PAM type: NRG; PAM sequence: CGG
caggcatgaacccctgtgcc

SEQ ID NO: 32607 - DNA, 20 bp, Artificial Sequence
  Description of Artificial Sequence: Synthetic oligonucleotide
  Target: ATXN2; (-) strand; PAM type: NRG; PAM sequence: AGG
tcccaaagtgctggggatac

SEQ ID NO: 32608 - DNA, 20 bp, Artificial Sequence
  Description of Artificial Sequence: Synthetic oligonucleotide
  Target: ATXN2; (-) strand; PAM type: NRG; PAM sequence: CAG
ctcccaaagtgctggggata

SEQ ID NO: 32609 - DNA, 20 bp, Artificial Sequence
  Description of Artificial Sequence: Synthetic oligonucleotide
  Target: ATXN2; (-) strand; PAM type: NRG; PAM sequence: GGG
ctcggcctcccaaagtgctg

SEQ ID NO: 32610 - DNA, 20 bp, Artificial Sequence
  Description of Artificial Sequence: Synthetic oligonucleotide
  Target: ATXN2; (-) strand; PAM type: NRG; PAM sequence: GGG
cctcggcctcccaaagtgct

SEQ ID NO: 32611 - DNA, 20 bp, Artificial Sequence
  Description of Artificial Sequence: Synthetic oligonucleotide
  Target: ATXN2; (-) strand; PAM type: NRG; PAM sequence: TGG
gcctcggcctcccaaagtgc

SEQ ID NO: 32612 - DNA, 20 bp, Artificial Sequence
  Description of Artificial Sequence: Synthetic oligonucleotide
  Target: ATXN2; (-) strand; PAM type: NRG; PAM sequence: AAG
ccacttgcctcggcctccca

SEQ ID NO: 32613 - DNA, 20 bp, Artificial Sequence
  Description of Artificial Sequence: Synthetic oligonucleotide
  Target: ATXN2; (-) strand; PAM type: NRG; PAM sequence: CGG
ctcaggtgatccacttgcct

SEQ ID NO: 32614 - DNA, 20 bp, Artificial Sequence
  Description of Artificial Sequence: Synthetic oligonucleotide
  Target: ATXN2; (-) strand; PAM type: NRG; PAM sequence: AGG
ggtcttgaactcctgacctc

SEQ ID NO: 32615 - DNA, 20 bp, Artificial Sequence
  Description of Artificial Sequence: Synthetic oligonucleotide
  Target: ATXN2; (-) strand; PAM type: NRG; PAM sequence: CAG
tggtcttgaactcctgacct

SEQ ID NO: 32616 - DNA, 20 bp, Artificial Sequence
  Description of Artificial Sequence: Synthetic oligonucleotide
  Target: ATXN2; (-) strand; PAM type: NRG; PAM sequence: TGG
tttctccatgttggtcaggc

SEQ ID NO: 32617 - DNA, 20 bp, Artificial Sequence
  Description of Artificial Sequence: Synthetic oligonucleotide
  Target: ATXN2; (-) strand; PAM type: NRG; PAM sequence: AGG
ggggtttctccatgttggtc

SEQ ID NO: 32618 - DNA, 20 bp, Artificial Sequence
  Description of Artificial Sequence: Synthetic oligonucleotide
  Target: ATXN2; (-) strand; PAM type: NRG; PAM sequence: CAG
tggggtttctccatgttggt

SEQ ID NO: 32619 - DNA, 20 bp, Artificial Sequence
  Description of Artificial Sequence: Synthetic oligonucleotide
  Target: ATXN2; (-) strand; PAM type: NRG; PAM sequence: TGG
gagatggggtttctccatgt

SEQ ID NO: 32620 - DNA, 20 bp, Artificial Sequence
  Description of Artificial Sequence: Synthetic oligonucleotide
  Target: ATXN2; (-) strand; PAM type: NRG; PAM sequence: GGG
atttagttttagtagagatg

SEQ ID NO: 32621 - DNA, 20 bp, Artificial Sequence
  Description of Artificial Sequence: Synthetic oligonucleotide
  Target: ATXN2; (-) strand; PAM type: NRG; PAM sequence: GGG
tatttagttttagtagagat

SEQ ID NO: 32622 - DNA, 20 bp, Artificial Sequence
  Description of Artificial Sequence: Synthetic oligonucleotide
  Target: ATXN2; (-) strand; PAM type: NRG; PAM sequence: TGG
gtatttagttttagtagaga

SEQ ID NO: 32623 - DNA, 20 bp, Artificial Sequence
  Description of Artificial Sequence: Synthetic oligonucleotide
  Target: ATXN2; (-) strand; PAM type: NRG; PAM sequence: GAG
ttttgtatttagttttagta

SEQ ID NO: 32624 - DNA, 20 bp, Artificial Sequence
  Description of Artificial Sequence: Synthetic oligonucleotide
  Target: ATXN2; (-) strand; PAM type: NRG; PAM sequence: TAG
aattttgtatttagttttag

SEQ ID NO: 32625 - DNA, 20 bp, Artificial Sequence
  Description of Artificial Sequence: Synthetic oligonucleotide
  Target: ATXN2; (-) strand; PAM type: NRG; PAM sequence: TAG
gctaattttgtatttagttt

SEQ ID NO: 32626 - DNA, 20 bp, Artificial Sequence
  Description of Artificial Sequence: Synthetic oligonucleotide
  Target: ATXN2; (-) strand; PAM type: NRG; PAM sequence: TAG
tgcctggctaattttgtatt

SEQ ID NO: 32627 - DNA, 20 bp, Artificial Sequence
  Description of Artificial Sequence: Synthetic oligonucleotide
  Target: ATXN2; (-) strand; PAM type: NRG; PAM sequence: TGG
cagacatgctccaccatgcc

SEQ ID NO: 32628 - DNA, 20 bp, Artificial Sequence
  Description of Artificial Sequence: Synthetic oligonucleotide
  Target: ATXN2; (-) strand; PAM type: NRG; PAM sequence: CAG
ctcctgagtagctgggatta

SEQ ID NO: 32629 - DNA, 20 bp, Artificial Sequence
  Description of Artificial Sequence: Synthetic oligonucleotide
  Target: ATXN2; (-) strand; PAM type: NRG; PAM sequence: GGG
cctcagcctcctgagtagct

SEQ ID NO: 32630 - DNA, 20 bp, Artificial Sequence
  Description of Artificial Sequence: Synthetic oligonucleotide
  Target: ATXN2; (-) strand; PAM type: NRG; PAM sequence: TGG
acctcagcctcctgagtagc

SEQ ID NO: 32631 - DNA, 20 bp, Artificial Sequence
  Description of Artificial Sequence: Synthetic oligonucleotide
  Target: ATXN2; (-) strand; PAM type: NRG; PAM sequence: TAG
tcctacctcagcctcctgag

SEQ ID NO: 32632 - DNA, 20 bp, Artificial Sequence
  Description of Artificial Sequence: Synthetic oligonucleotide
  Target: ATXN2; (-) strand; PAM type: NRG; PAM sequence: GAG
ttctcctacctcagcctcct

SEQ ID NO: 32633 - DNA, 20 bp, Artificial Sequence
  Description of Artificial Sequence: Synthetic oligonucleotide
  Target: ATXN2; (-) strand; PAM type: NRG; PAM sequence: CAG
ttcaagtgattctcctacct

SEQ ID NO: 32634 - DNA, 20 bp, Artificial Sequence
  Description of Artificial Sequence: Synthetic oligonucleotide
  Target: ATXN2; (-) strand; PAM type: NRG; PAM sequence: AAG
ccgatctgcctcccgggttc

SEQ ID NO: 32635 - DNA, 20 bp, Artificial Sequence
  Description of Artificial Sequence: Synthetic oligonucleotide
  Target: ATXN2; (-) strand; PAM type: NRG; PAM sequence: GGG
aatggcccgatctgcctccc

SEQ ID NO: 32636 - DNA, 20 bp, Artificial Sequence
  Description of Artificial Sequence: Synthetic oligonucleotide
  Target: ATXN2; (-) strand; PAM type: NRG; PAM sequence: CGG
caatggcccgatctgcctcc

SEQ ID NO: 32637 - DNA, 20 bp, Artificial Sequence
  Description of Artificial Sequence: Synthetic oligonucleotide
  Target: ATXN2; (-) strand; PAM type: NRG; PAM sequence: TGG
ttgccgaggctggagtgcaa

SEQ ID NO: 32638 - DNA, 20 bp, Artificial Sequence
  Description of Artificial Sequence: Synthetic oligonucleotide
  Target: ATXN2; (-) strand; PAM type: NRG; PAM sequence: GAG
gctcttagttgccgaggctg

SEQ ID NO: 32639 - DNA, 20 bp, Artificial Sequence
  Description of Artificial Sequence: Synthetic oligonucleotide
  Target: ATXN2; (-) strand; PAM type: NRG; PAM sequence: TGG
tcgctcttagttgccgaggc

SEQ ID NO: 32640 - DNA, 20 bp, Artificial Sequence
  Description of Artificial Sequence: Synthetic oligonucleotide
  Target: ATXN2; (-) strand; PAM type: NRG; PAM sequence: AGG
agtttcgctcttagttgccg

SEQ ID NO: 32641 - DNA, 20 bp, Artificial Sequence
  Description of Artificial Sequence: Synthetic oligonucleotide
  Target: ATXN2; (-) strand; PAM type: NRG; PAM sequence: GAG
gagtttcgctcttagttgcc

SEQ ID NO: 32642 - DNA, 20 bp, Artificial Sequence
  Description of Artificial Sequence: Synthetic oligonucleotide
  Target: ATXN2; (-) strand; PAM type: NRG; PAM sequence: TAG
ttgagatggagtttcgctct

SEQ ID NO: 32643 - DNA, 20 bp, Artificial Sequence
  Description of Artificial Sequence: Synthetic oligonucleotide
  Target: ATXN2; (-) strand; PAM type: NRG; PAM sequence: GAG
aaataattgtttttgagatg

SEQ ID NO: 32644 - DNA, 20 bp, Artificial Sequence
  Description of Artificial Sequence: Synthetic oligonucleotide
  Target: ATXN2; (-) strand; PAM type: NRG; PAM sequence: TGG
tgaaataattgtttttgaga

SEQ ID NO: 32645 - DNA, 20 bp, Artificial Sequence
  Description of Artificial Sequence: Synthetic oligonucleotide
  Target: ATXN2; (-) strand; PAM type: NRG; PAM sequence: GAG
ttattgaaataattgttttt

SEQ ID NO: 32646 - DNA, 20 bp, Artificial Sequence
  Description of Artificial Sequence: Synthetic oligonucleotide
  Target: ATXN2; (-) strand; PAM type: NRG; PAM sequence: AGG
gaaaaagaataagaagtgtt

SEQ ID NO: 32647 - DNA, 20 bp, Artificial Sequence
  Description of Artificial Sequence: Synthetic oligonucleotide
  Target: ATXN2; (-) strand; PAM type: NRG; PAM sequence: TAG
tgaaaaagaataagaagtgt

SEQ ID NO: 32648 - DNA, 20 bp, Artificial Sequence
  Description of Artificial Sequence: Synthetic oligonucleotide
  Target: ATXN2; (-) strand; PAM type: NRG; PAM sequence: AAG
gaaaaatgaaaaagaataag

SEQ ID NO: 32649 - DNA, 20 bp, Artificial Sequence
  Description of Artificial Sequence: Synthetic oligonucleotide
  Target: ATXN2; (-) strand; PAM type: NRG; PAM sequence: AAG
ttagaaaaatgaaaaagaat

SEQ ID NO: 32650 - DNA, 20 bp, Artificial Sequence
  Description of Artificial Sequence: Synthetic oligonucleotide
  Target: ATXN2; (-) strand; PAM type: NRG; PAM sequence: AAG
gcatttttagaaaaatgaaa

SEQ ID NO: 32651 - DNA, 20 bp, Artificial Sequence
  Description of Artificial Sequence: Synthetic oligonucleotide
  Target: ATXN2; (-) strand; PAM type: NRG; PAM sequence: TAG
tggattatgacaagcatttt

SEQ ID NO: 32652 - DNA, 20 bp, Artificial Sequence
  Description of Artificial Sequence: Synthetic oligonucleotide
  Target: ATXN2; (-) strand; PAM type: NRG; PAM sequence: AAG
acacattagtggattatgac

SEQ ID NO: 32653 - DNA, 20 bp, Artificial Sequence
  Description of Artificial Sequence: Synthetic oligonucleotide
  Target: ATXN2; (-) strand; PAM type: NRG; PAM sequence: TGG
tagattgtgaaacacattag

SEQ ID NO: 32654 - DNA, 20 bp, Artificial Sequence
  Description of Artificial Sequence: Synthetic oligonucleotide
  Target: ATXN2; (-) strand; PAM type: NRG; PAM sequence: TAG
tagtagattgtgaaacacat

SEQ ID NO: 32655 - DNA, 20 bp, Artificial Sequence
  Description of Artificial Sequence: Synthetic oligonucleotide
  Target: ATXN2; (-) strand; PAM type: NRG; PAM sequence: TAG
tgcagatcatgaccccttag

SEQ ID NO: 32656 - DNA, 20 bp, Artificial Sequence
  Description of Artificial Sequence: Synthetic oligonucleotide
  Target: ATXN2; (-) strand; PAM type: NRG; PAM sequence: TAG
atctgcagatcatgacccct

SEQ ID NO: 32657 - DNA, 20 bp, Artificial Sequence
  Description of Artificial Sequence: Synthetic oligonucleotide
  Target: ATXN2; (-) strand; PAM type: NRG; PAM sequence: CAG
aagaagtatttttcaatctg

SEQ ID NO: 32658 - DNA, 20 bp, Artificial Sequence
  Description of Artificial Sequence: Synthetic oligonucleotide
  Target: ATXN2; (-) strand; PAM type: NRG; PAM sequence: AAG
attttttatatctcccaaag

SEQ ID NO: 32659 - DNA, 20 bp, Artificial Sequence
  Description of Artificial Sequence: Synthetic oligonucleotide
  Target: ATXN2; (-) strand; PAM type: NRG; PAM sequence: AAG
atgattttttatatctccca

SEQ ID NO: 32660 - DNA, 20 bp, Artificial Sequence
  Description of Artificial Sequence: Synthetic oligonucleotide
  Target: ATXN2; (-) strand; PAM type: NRG; PAM sequence: AGG
taatggtgactcataacacc

SEQ ID NO: 32661 - DNA, 20 bp, Artificial Sequence
  Description of Artificial Sequence: Synthetic oligonucleotide
  Target: ATXN2; (-) strand; PAM type: NRG; PAM sequence: CAG
ataatggtgactcataacac

SEQ ID NO: 32662 - DNA, 20 bp, Artificial Sequence
  Description of Artificial Sequence: Synthetic oligonucleotide
  Target: ATXN2; (-) strand; PAM type: NRG; PAM sequence: TGG
gttagttaatgtgctcataa

SEQ ID NO: 32663 - DNA, 20 bp, Artificial Sequence
  Description of Artificial Sequence: Synthetic oligonucleotide
  Target: ATXN2; (-) strand; PAM type: NRG; PAM sequence: TAG
gttttatagcacagtgtagt

SEQ ID NO: 32664 - DNA, 20 bp, Artificial Sequence
  Description of Artificial Sequence: Synthetic oligonucleotide
  Target: ATXN2; (-) strand; PAM type: NRG; PAM sequence: TAG
tactgttttatagcacagtg

SEQ ID NO: 32665 - DNA, 20 bp, Artificial Sequence
  Description of Artificial Sequence: Synthetic oligonucleotide
  Target: ATXN2; (-) strand; PAM type: NRG; PAM sequence: CAG
ggcattactgttttatagca

SEQ ID NO: 32666 - DNA, 20 bp, Artificial Sequence
  Description of Artificial Sequence: Synthetic oligonucleotide
  Target: ATXN2; (-) strand; PAM type: NRG; PAM sequence: TAG
ctaagggcattactgtttta

SEQ ID NO: 32667 - DNA, 20 bp, Artificial Sequence
  Description of Artificial Sequence: Synthetic oligonucleotide
  Target: ATXN2; (-) strand; PAM type: NRG; PAM sequence: GGG
ctgtatatcttaggccctaa

SEQ ID NO: 32668 - DNA, 20 bp, Artificial Sequence
  Description of Artificial Sequence: Synthetic oligonucleotide
  Target: ATXN2; (-) strand; PAM type: NRG; PAM sequence: AGG
gctgtatatcttaggcccta

SEQ ID NO: 32669 - DNA, 20 bp, Artificial Sequence
  Description of Artificial Sequence: Synthetic oligonucleotide
  Target: ATXN2; (-) strand; PAM type: NRG; PAM sequence: AAG
agctgtatatcttaggccct

SEQ ID NO: 32670 - DNA, 20 bp, Artificial Sequence
  Description of Artificial Sequence: Synthetic oligonucleotide
  Target: ATXN2; (-) strand; PAM type: NRG; PAM sequence: AGG
agtttatagctgtatatctt

SEQ ID NO: 32671 - DNA, 20 bp, Artificial Sequence
  Description of Artificial Sequence: Synthetic oligonucleotide
  Target: ATXN2; (-) strand; PAM type: NRG; PAM sequence: TAG
aagtttatagctgtatatct

SEQ ID NO: 32672 - DNA, 20 bp, Artificial Sequence
  Description of Artificial Sequence: Synthetic oligonucleotide
  Target: ATXN2; (-) strand; PAM type: NRG; PAM sequence: TAG
gagttttgactgtaagttta

SEQ ID NO: 32673 - DNA, 20 bp, Artificial Sequence
  Description of Artificial Sequence: Synthetic oligonucleotide
  Target: ATXN2; (-) strand; PAM type: NRG; PAM sequence: AAG
ggcctgggagttttgactgt

SEQ ID NO: 32674 - DNA, 20 bp, Artificial Sequence
  Description of Artificial Sequence: Synthetic oligonucleotide
  Target: ATXN2; (-) strand; PAM type: NRG; PAM sequence: GAG
agccaccactcccggcctgg

SEQ ID NO: 32675 - DNA, 20 bp, Artificial Sequence
  Description of Artificial Sequence: Synthetic oligonucleotide
  Target: ATXN2; (-) strand; PAM type: NRG; PAM sequence: GGG
tgagccaccactcccggcct

SEQ ID NO: 32676 - DNA, 20 bp, Artificial Sequence
  Description of Artificial Sequence: Synthetic oligonucleotide
  Target: ATXN2; (-) strand; PAM type: NRG; PAM sequence: TGG
gtgagccaccactcccggcc

SEQ ID NO: 32677 - DNA, 20 bp, Artificial Sequence
  Description of Artificial Sequence: Synthetic oligonucleotide
  Target: ATXN2; (-) strand; PAM type: NRG; PAM sequence: CGG
caggcgtgagccaccactcc

SEQ ID NO: 32678 - DNA, 20 bp, Artificial Sequence
  Description of Artificial Sequence: Synthetic oligonucleotide
  Target: ATXN2; (-) strand; PAM type: NRG; PAM sequence: GAG
agtgccgggattacaggcgt

SEQ ID NO: 32679 - DNA, 20 bp, Artificial Sequence
  Description of Artificial Sequence: Synthetic oligonucleotide
  Target: ATXN2; (-) strand; PAM type: NRG; PAM sequence: AGG
tcccaaagtgccgggattac

SEQ ID NO: 32680 - DNA, 20 bp, Artificial Sequence
  Description of Artificial Sequence: Synthetic oligonucleotide
  Target: ATXN2; (-) strand; PAM type: NRG; PAM sequence: CAG
ctcccaaagtgccgggatta

SEQ ID NO: 32681 - DNA, 20 bp, Artificial Sequence
  Description of Artificial Sequence: Synthetic oligonucleotide
  Target: ATXN2; (-) strand; PAM type: NRG; PAM sequence: GGG
cctaggcctcccaaagtgcc

SEQ ID NO: 32682 - DNA, 20 bp, Artificial Sequence
  Description of Artificial Sequence: Synthetic oligonucleotide
  Target: ATXN2; (-) strand; PAM type: NRG; PAM sequence: CGG
gcctaggcctcccaaagtgc

SEQ ID NO: 32683 - DNA, 20 bp, Artificial Sequence
  Description of Artificial Sequence: Synthetic oligonucleotide
  Target: ATXN2; (-) strand; PAM type: NRG; PAM sequence: AAG
ccacctgcctaggcctccca

SEQ ID NO: 32684 - DNA, 20 bp, Artificial Sequence
  Description of Artificial Sequence: Synthetic oligonucleotide
  Target: ATXN2; (-) strand; PAM type: NRG; PAM sequence: AGG
ctcagatgatccacctgcct

SEQ ID NO: 32685 - DNA, 20 bp, Artificial Sequence
  Description of Artificial Sequence: Synthetic oligonucleotide
  Target: ATXN2; (-) strand; PAM type: NRG; PAM sequence: TAG
cctcagatgatccacctgcc

SEQ ID NO: 32686 - DNA, 20 bp, Artificial Sequence
  Description of Artificial Sequence: Synthetic oligonucleotide
  Target: ATXN2; (-) strand; PAM type: NRG; PAM sequence: CAG
cggtcttgaactcctgacct

SEQ ID NO: 32687 - DNA, 20 bp, Artificial Sequence
  Description of Artificial Sequence: Synthetic oligonucleotide
  Target: ATXN2; (-) strand; PAM type: NRG; PAM sequence: CGG
ttttgccatattggccaggc

SEQ ID NO: 32688 - DNA, 20 bp, Artificial Sequence
  Description of Artificial Sequence: Synthetic oligonucleotide
  Target: ATXN2; (-) strand; PAM type: NRG; PAM sequence: AGG
ggggttttgccatattggcc

SEQ ID NO: 32689 - DNA, 20 bp, Artificial Sequence
  Description of Artificial Sequence: Synthetic oligonucleotide
  Target: ATXN2; (-) strand; PAM type: NRG; PAM sequence: CAG
tggggttttgccatattggc

SEQ ID NO: 32690 - DNA, 20 bp, Artificial Sequence
  Description of Artificial Sequence: Synthetic oligonucleotide
  Target: ATXN2; (-) strand; PAM type: NRG; PAM sequence: TGG
gagatggggttttgccatat

SEQ ID NO: 32691 - DNA, 20 bp, Artificial Sequence
  Description of Artificial Sequence: Synthetic oligonucleotide
  Target: ATXN2; (-) strand; PAM type: NRG; PAM sequence: GGG
ttgtatttttagtagagatg

SEQ ID NO: 32692 - DNA, 20 bp, Artificial Sequence
  Description of Artificial Sequence: Synthetic oligonucleotide
  Target: ATXN2; (-) strand; PAM type: NRG; PAM sequence: GGG
tttgtatttttagtagagat

SEQ ID NO: 32693 - DNA, 20 bp, Artificial Sequence
  Description of Artificial Sequence: Synthetic oligonucleotide
  Target: ATXN2; (-) strand; PAM type: NRG; PAM sequence: TGG
ttttgtatttttagtagaga

SEQ ID NO: 32694 - DNA, 20 bp, Artificial Sequence
  Description of Artificial Sequence: Synthetic oligonucleotide
  Target: ATXN2; (-) strand; PAM type: NRG; PAM sequence: GAG
taatttttgtatttttagta

SEQ ID NO: 32695 - DNA, 20 bp, Artificial Sequence
  Description of Artificial Sequence: Synthetic oligonucleotide
  Target: ATXN2; (-) strand; PAM type: NRG; PAM sequence: TAG
gataatttttgtatttttag

SEQ ID NO: 32696 - DNA, 20 bp, Artificial Sequence
  Description of Artificial Sequence: Synthetic oligonucleotide
  Target: ATXN2; (-) strand; PAM type: NRG; PAM sequence: TAG
ccggataatttttgtatttt

SEQ ID NO: 32697 - DNA, 20 bp, Artificial Sequence
  Description of Artificial Sequence: Synthetic oligonucleotide
  Target: ATXN2; (-) strand; PAM type: NRG; PAM sequence: CGG
cgggtgcccgccaccacacc

SEQ ID NO: 32698 - DNA, 20 bp, Artificial Sequence
  Description of Artificial Sequence: Synthetic oligonucleotide
  Target: ATXN2; (-) strand; PAM type: NRG; PAM sequence: GGG
tcctgagtagctgggattac

SEQ ID NO: 32699 - DNA, 20 bp, Artificial Sequence
  Description of Artificial Sequence: Synthetic oligonucleotide
  Target: ATXN2; (-) strand; PAM type: NRG; PAM sequence: CGG
ctcctgagtagctgggatta

SEQ ID NO: 32700 - DNA, 20 bp, Artificial Sequence
  Description of Artificial Sequence: Synthetic oligonucleotide
  Target: ATXN2; (-) strand; PAM type: NRG; PAM sequence: GGG
cctctgactcctgagtagct

SEQ ID NO: 32701 - DNA, 20 bp, Artificial Sequence
  Description of Artificial Sequence: Synthetic oligonucleotide
  Target: ATXN2; (-) strand; PAM type: NRG; PAM sequence: TGG
gcctctgactcctgagtagc

SEQ ID NO: 32702 - DNA, 20 bp, Artificial Sequence
  Description of Artificial Sequence: Synthetic oligonucleotide
  Target: ATXN2; (-) strand; PAM type: NRG; PAM sequence: TAG
tcctgcctctgactcctgag

SEQ ID NO: 32703 - DNA, 20 bp, Artificial Sequence
  Description of Artificial Sequence: Synthetic oligonucleotide
  Target: ATXN2; (-) strand; PAM type: NRG; PAM sequence: GAG
ttttcctgcctctgactcct

SEQ ID NO: 32704 - DNA, 20 bp, Artificial Sequence
  Description of Artificial Sequence: Synthetic oligonucleotide
  Target: ATXN2; (-) strand; PAM type: NRG; PAM sequence: TAG
aacctctgcctcccagcttc

SEQ ID NO: 32705 - DNA, 20 bp, Artificial Sequence
  Description of Artificial Sequence: Synthetic oligonucleotide
  Target: ATXN2; (-) strand; PAM type: NRG; PAM sequence: CAG
ccactgcaacctctgcctcc

SEQ ID NO: 32706 - DNA, 20 bp, Artificial Sequence
  Description of Artificial Sequence: Synthetic oligonucleotide
  Target: ATXN2; (-) strand; PAM type: NRG; PAM sequence: TGG
ggagtgcaatggtacaatct

SEQ ID NO: 32707 - DNA, 20 bp, Artificial Sequence
  Description of Artificial Sequence: Synthetic oligonucleotide
  Target: ATXN2; (-) strand; PAM type: NRG; PAM sequence: TGG
ttgcccaggctggagtgcaa

SEQ ID NO: 32708 - DNA, 20 bp, Artificial Sequence
  Description of Artificial Sequence: Synthetic oligonucleotide
  Target: ATXN2; (-) strand; PAM type: NRG; PAM sequence: GAG
ttgttctgttgcccaggctg

SEQ ID NO: 32709 - DNA, 20 bp, Artificial Sequence
  Description of Artificial Sequence: Synthetic oligonucleotide
  Target: ATXN2; (-) strand; PAM type: NRG; PAM sequence: TGG
tcttgttctgttgcccaggc

SEQ ID NO: 32710 - DNA, 20 bp, Artificial Sequence
  Description of Artificial Sequence: Synthetic oligonucleotide
  Target: ATXN2; (-) strand; PAM type: NRG; PAM sequence: AGG
agaatcttgttctgttgccc

SEQ ID NO: 32711 - DNA, 20 bp, Artificial Sequence
  Description of Artificial Sequence: Synthetic oligonucleotide
  Target: ATXN2; (-) strand; PAM type: NRG; PAM sequence: CAG
tagaatcttgttctgttgcc

SEQ ID NO: 32712 - DNA, 20 bp, Artificial Sequence
  Description of Artificial Sequence: Synthetic oligonucleotide
  Target: ATXN2; (-) strand; PAM type: NRG; PAM sequence: TAG
ctggctttttttttttgaca

SEQ ID NO: 32713 - DNA, 20 bp, Artificial Sequence
  Description of Artificial Sequence: Synthetic oligonucleotide
  Target: ATXN2; (-) strand; PAM type: NRG; PAM sequence: TGG
caggcgtgagccaccgcacc

SEQ ID NO: 32714 - DNA, 20 bp, Artificial Sequence
  Description of Artificial Sequence: Synthetic oligonucleotide
  Target: ATXN2; (-) strand; PAM type: NRG; PAM sequence: GAG
agtgccgggaccacaggcgt

SEQ ID NO: 32715 - DNA, 20 bp, Artificial Sequence
  Description of Artificial Sequence: Synthetic oligonucleotide
  Target: ATXN2; (-) strand; PAM type: NRG; PAM sequence: AGG
tcccaaagtgccgggaccac

SEQ ID NO: 32716 - DNA, 20 bp, Artificial Sequence
  Description of Artificial Sequence: Synthetic oligonucleotide
  Target: ATXN2; (-) strand; PAM type: NRG; PAM sequence: CAG
ctcccaaagtgccgggacca

SEQ ID NO: 32717 - DNA, 20 bp, Artificial Sequence
  Description of Artificial Sequence: Synthetic oligonucleotide
  Target: ATXN2; (-) strand; PAM type: NRG; PAM sequence: GGG
cttcagcctcccaaagtgcc

SEQ ID NO: 32718 - DNA, 20 bp, Artificial Sequence
  Description of Artificial Sequence: Synthetic oligonucleotide
  Target: ATXN2; (-) strand; PAM type: NRG; PAM sequence: CGG
gcttcagcctcccaaagtgc

SEQ ID NO: 32719 - DNA, 20 bp, Artificial Sequence
  Description of Artificial Sequence: Synthetic oligonucleotide
  Target: ATXN2; (-) strand; PAM type: NRG; PAM sequence: AAG
ccgcctgcttcagcctccca

SEQ ID NO: 32720 - DNA, 20 bp, Artificial Sequence
  Description of Artificial Sequence: Synthetic oligonucleotide
  Target: ATXN2; (-) strand; PAM type: NRG; PAM sequence: CAG
ctcaggtgatccgcctgctt

SEQ ID NO: 32721 - DNA, 20 bp, Artificial Sequence
  Description of Artificial Sequence: Synthetic oligonucleotide
  Target: ATXN2; (-) strand; PAM type: NRG; PAM sequence: AGG
ggtctcgaactcctgacctc

SEQ ID NO: 32722 - DNA, 20 bp, Artificial Sequence
  Description of Artificial Sequence: Synthetic oligonucleotide
  Target: ATXN2; (-) strand; PAM type: NRG; PAM sequence: CAG
tggtctcgaactcctgacct

SEQ ID NO: 32723 - DNA, 20 bp, Artificial Sequence
  Description of Artificial Sequence: Synthetic oligonucleotide
  Target: ATXN2; (-) strand; PAM type: NRG; PAM sequence: TGG
tttccccattttggccaggc

SEQ ID NO: 32724 - DNA, 20 bp, Artificial Sequence
  Description of Artificial Sequence: Synthetic oligonucleotide
  Target: ATXN2; (-) strand; PAM type: NRG; PAM sequence: AGG
ggggtttccccattttggcc

SEQ ID NO: 32725 - DNA, 20 bp, Artificial Sequence
  Description of Artificial Sequence: Synthetic oligonucleotide
  Target: ATXN2; (-) strand; PAM type: NRG; PAM sequence: CAG
cggggtttccccattttggc

SEQ ID NO: 32726 - DNA, 20 bp, Artificial Sequence
  Description of Artificial Sequence: Synthetic oligonucleotide
  Target: ATXN2; (-) strand; PAM type: NRG; PAM sequence: TGG
gagacggggtttccccattt

SEQ ID NO: 32727 - DNA, 20 bp, Artificial Sequence
  Description of Artificial Sequence: Synthetic oligonucleotide
  Target: ATXN2; (-) strand; PAM type: NRG; PAM sequence: GGG
ttgtatttttagtagagacg

SEQ ID NO: 32728 - DNA, 20 bp, Artificial Sequence
  Description of Artificial Sequence: Synthetic oligonucleotide
  Target: ATXN2; (-) strand; PAM type: NRG; PAM sequence: GGG
tttgtatttttagtagagac

SEQ ID NO: 32729 - DNA, 20 bp, Artificial Sequence
  Description of Artificial Sequence: Synthetic oligonucleotide
  Target: ATXN2; (-) strand; PAM type: NRG; PAM sequence: CGG
ttttgtatttttagtagaga

SEQ ID NO: 32730 - DNA, 20 bp, Artificial Sequence
  Description of Artificial Sequence: Synthetic oligonucleotide
  Target: ATXN2; (-) strand; PAM type: NRG; PAM sequence: GAG
taatttttgtatttttagta

SEQ ID NO: 32731 - DNA, 20 bp, Artificial Sequence
  Description of Artificial Sequence: Synthetic oligonucleotide
  Target: ATXN2; (-) strand; PAM type: NRG; PAM sequence: TAG
gttaatttttgtatttttag

SEQ ID NO: 32732 - DNA, 20 bp, Artificial Sequence
  Description of Artificial Sequence: Synthetic oligonucleotide
  Target: ATXN2; (-) strand; PAM type: NRG; PAM sequence: TAG
cgggttaatttttgtatttt

SEQ ID NO: 32733 - DNA, 20 bp, Artificial Sequence
  Description of Artificial Sequence: Synthetic oligonucleotide
  Target: ATXN2; (-) strand; PAM type: NRG; PAM sequence: GGG
acagatattggtcacacacc

SEQ ID NO: 32734 - DNA, 20 bp, Artificial Sequence
  Description of Artificial Sequence: Synthetic oligonucleotide
  Target: ATXN2; (-) strand; PAM type: NRG; PAM sequence: CGG
tacagatattggtcacacac

SEQ ID NO: 32735 - DNA, 20 bp, Artificial Sequence
  Description of Artificial Sequence: Synthetic oligonucleotide
  Target: ATXN2; (-) strand; PAM type: NRG; PAM sequence: TGG
gtagctgggagtacagatat

SEQ ID NO: 32736 - DNA, 20 bp, Artificial Sequence
  Description of Artificial Sequence: Synthetic oligonucleotide
  Target: ATXN2; (-) strand; PAM type: NRG; PAM sequence: CAG
ctcctgagtagctgggagta

SEQ ID NO: 32737 - DNA, 20 bp, Artificial Sequence
  Description of Artificial Sequence: Synthetic oligonucleotide
  Target: ATXN2; (-) strand; PAM type: NRG; PAM sequence: GAG
cctgactcctgagtagctgg

SEQ ID NO: 32738 - DNA, 20 bp, Artificial Sequence
  Description of Artificial Sequence: Synthetic oligonucleotide
  Target: ATXN2; (-) strand; PAM type: NRG; PAM sequence: GGG
tgcctgactcctgagtagct

SEQ ID NO: 32739 - DNA, 20 bp, Artificial Sequence
  Description of Artificial Sequence: Synthetic oligonucleotide
  Target: ATXN2; (-) strand; PAM type: NRG; PAM sequence: TGG
ctgcctgactcctgagtagc

SEQ ID NO: 32740 - DNA, 20 bp, Artificial Sequence
  Description of Artificial Sequence: Synthetic oligonucleotide
  Target: ATXN2; (-) strand; PAM type: NRG; PAM sequence: TAG
tctcctgcctgactcctgag

SEQ ID NO: 32741 - DNA, 20 bp, Artificial Sequence
  Description of Artificial Sequence: Synthetic oligonucleotide
  Target: ATXN2; (-) strand; PAM type: NRG; PAM sequence: GAG
agttctcctgcctgactcct

SEQ ID NO: 32742 - DNA, 20 bp, Artificial Sequence
  Description of Artificial Sequence: Synthetic oligonucleotide
  Target: ATXN2; (-) strand; PAM type: NRG; PAM sequence: CAG
ttccgcctcccaggttcaag

SEQ ID NO: 32743 - DNA, 20 bp, Artificial Sequence
  Description of Artificial Sequence: Synthetic oligonucleotide
  Target: ATXN2; (-) strand; PAM type: NRG; PAM sequence: AAG
tagttccgcctcccaggttc

SEQ ID NO: 32744 - DNA, 20 bp, Artificial Sequence
  Description of Artificial Sequence: Synthetic oligonucleotide
  Target: ATXN2; (-) strand; PAM type: NRG; PAM sequence: AGG
tcactgtagttccgcctccc

SEQ ID NO: 32745 - DNA, 20 bp, Artificial Sequence
  Description of Artificial Sequence: Synthetic oligonucleotide
  Target: ATXN2; (-) strand; PAM type: NRG; PAM sequence: CAG
ctcactgtagttccgcctcc

SEQ ID NO: 32746 - DNA, 20 bp, Artificial Sequence
  Description of Artificial Sequence: Synthetic oligonucleotide
  Target: ATXN2; (-) strand; PAM type: NRG; PAM sequence: TAG
ggcgccatctctgctcactg

SEQ ID NO: 32747 - DNA, 20 bp, Artificial Sequence
  Description of Artificial Sequence: Synthetic oligonucleotide
  Target: ATXN2; (-) strand; PAM type: NRG; PAM sequence: TGG
tcacccaggctggagtgcaa

SEQ ID NO: 32748 - DNA, 20 bp, Artificial Sequence
  Description of Artificial Sequence: Synthetic oligonucleotide
  Target: ATXN2; (-) strand; PAM type: NRG; PAM sequence: GAG
tgctcttgtcacccaggctg

SEQ ID NO: 32749 - DNA, 20 bp, Artificial Sequence
  Description of Artificial Sequence: Synthetic oligonucleotide
  Target: ATXN2; (-) strand; PAM type: NRG; PAM sequence: TGG
tttgctcttgtcacccaggc

SEQ ID NO: 32750 - DNA, 20 bp, Artificial Sequence
  Description of Artificial Sequence: Synthetic oligonucleotide
  Target: ATXN2; (-) strand; PAM type: NRG; PAM sequence: AGG
gagttttgctcttgtcaccc

SEQ ID NO: 32751 - DNA, 20 bp, Artificial Sequence
  Description of Artificial Sequence: Synthetic oligonucleotide
  Target: ATXN2; (-) strand; PAM type: NRG; PAM sequence: CAG
ggagttttgctcttgtcacc

SEQ ID NO: 32752 - DNA, 20 bp, Artificial Sequence
  Description of Artificial Sequence: Synthetic oligonucleotide
  Target: ATXN2; (-) strand; PAM type: NRG; PAM sequence: GAG
ttttttttttttttgagatg

SEQ ID NO: 32753 - DNA, 20 bp, Artificial Sequence
  Description of Artificial Sequence: Synthetic oligonucleotide
  Target: ATXN2; (-) strand; PAM type: NRG; PAM sequence: TGG
ttttttttttttttttgaga

SEQ ID NO: 32754 - DNA, 20 bp, Artificial Sequence
  Description of Artificial Sequence: Synthetic oligonucleotide
  Target: ATXN2; (-) strand; PAM type: NRG; PAM sequence: GAG
tttttttttttttttttttt

SEQ ID NO: 32755 - DNA, 20 bp, Artificial Sequence
  Description of Artificial Sequence: Synthetic oligonucleotide
  Target: ATXN2; (-) strand; PAM type: NRG; PAM sequence: AGG
aacaagtataccattctggg

SEQ ID NO: 32756 - DNA, 20 bp, Artificial Sequence
  Description of Artificial Sequence: Synthetic oligonucleotide
  Target: ATXN2; (-) strand; PAM type: NRG; PAM sequence: GAG
caacaagtataccattctgg

SEQ ID NO: 32757 - DNA, 20 bp, Artificial Sequence
  Description of Artificial Sequence: Synthetic oligonucleotide
  Target: ATXN2; (-) strand; PAM type: NRG; PAM sequence: GGG
ctcaacaagtataccattct

SEQ ID NO: 32758 - DNA, 20 bp, Artificial Sequence
  Description of Artificial Sequence: Synthetic oligonucleotide
  Target: ATXN2; (-) strand; PAM type: NRG; PAM sequence: TGG
gctcaacaagtataccattc

SEQ ID NO: 32759 - DNA, 20 bp, Artificial Sequence
  Description of Artificial Sequence: Synthetic oligonucleotide
  Target: ATXN2; (-) strand; PAM type: NRG; PAM sequence: AAG
aacagacacaagagctcaac

SEQ ID NO: 32760 - DNA, 20 bp, Artificial Sequence
  Description of Artificial Sequence: Synthetic oligonucleotide
  Target: ATXN2; (-) strand; PAM type: NRG; PAM sequence: GAG
ctactaaaaaacagacacaa

SEQ ID NO: 32761 - DNA, 20 bp, Artificial Sequence
  Description of Artificial Sequence: Synthetic oligonucleotide
  Target: ATXN2; (-) strand; PAM type: NRG; PAM sequence: AAG
aactactaaaaaacagacac

SEQ ID NO: 32762 - DNA, 20 bp, Artificial Sequence
  Description of Artificial Sequence: Synthetic oligonucleotide
  Target: ATXN2; (-) strand; PAM type: NRG; PAM sequence: CAG
aaatgggaactactaaaaaa

SEQ ID NO: 32763 - DNA, 20 bp, Artificial Sequence
  Description of Artificial Sequence: Synthetic oligonucleotide
  Target: ATXN2; (-) strand; PAM type: NRG; PAM sequence: GGG
agcctgggaactactaaaat

SEQ ID NO: 32764 - DNA, 20 bp, Artificial Sequence
  Description of Artificial Sequence: Synthetic oligonucleotide
  Target: ATXN2; (-) strand; PAM type: NRG; PAM sequence: TGG
gagcctgggaactactaaaa

SEQ ID NO: 32765 - DNA, 20 bp, Artificial Sequence
  Description of Artificial Sequence: Synthetic oligonucleotide
  Target: ATXN2; (-) strand; PAM type: NRG; PAM sequence: GGG
aaaaacaaagcaaagagcct

SEQ ID NO: 32766 - DNA, 20 bp, Artificial Sequence
  Description of Artificial Sequence: Synthetic oligonucleotide
  Target: ATXN2; (-) strand; PAM type: NRG; PAM sequence: TGG
aaaaaacaaagcaaagagcc

SEQ ID NO: 32767 - DNA, 20 bp, Artificial Sequence
  Description of Artificial Sequence: Synthetic oligonucleotide
  Target: ATXN2; (-) strand; PAM type: NRG; PAM sequence: GAG
tctcaaaaaaacaaagcaaa

SEQ ID NO: 32768 - DNA, 20 bp, Artificial Sequence
  Description of Artificial Sequence: Synthetic oligonucleotide
  Target: ATXN2; (-) strand; PAM type: NRG; PAM sequence: AAG
tatctcaaaaaaacaaagca

SEQ ID NO: 32769 - DNA, 20 bp, Artificial Sequence
  Description of Artificial Sequence: Synthetic oligonucleotide
  Target: ATXN2; (-) strand; PAM type: NRG; PAM sequence: AAG
gaccttatctcaaaaaaaca

SEQ ID NO: 32770 - DNA, 20 bp, Artificial Sequence
  Description of Artificial Sequence: Synthetic oligonucleotide
  Target: ATXN2; (-) strand; PAM type: NRG; PAM sequence: GAG
tccagcctgggcgttaaaat

SEQ ID NO: 32771 - DNA, 20 bp, Artificial Sequence
  Description of Artificial Sequence: Synthetic oligonucleotide
  Target: ATXN2; (-) strand; PAM type: NRG; PAM sequence: GGG
gcaccactgcactccagcct

SEQ ID NO: 32772 - DNA, 20 bp, Artificial Sequence
  Description of Artificial Sequence: Synthetic oligonucleotide
  Target: ATXN2; (-) strand; PAM type: NRG; PAM sequence: TGG
tgcaccactgcactccagcc

SEQ ID NO: 32773 - DNA, 20 bp, Artificial Sequence
  Description of Artificial Sequence: Synthetic oligonucleotide
  Target: ATXN2; (-) strand; PAM type: NRG; PAM sequence: CAG
atgattgcaccactgcactc

SEQ ID NO: 32774 - DNA, 20 bp, Artificial Sequence
  Description of Artificial Sequence: Synthetic oligonucleotide
  Target: ATXN2; (-) strand; PAM type: NRG; PAM sequence: GAG
ttaagtctggatgtcgaggt

SEQ ID NO: 32775 - DNA, 20 bp, Artificial Sequence
  Description of Artificial Sequence: Synthetic oligonucleotide
  Target: ATXN2; (-) strand; PAM type: NRG; PAM sequence: AGG
tcacttaagtctggatgtcg

SEQ ID NO: 32776 - DNA, 20 bp, Artificial Sequence
  Description of Artificial Sequence: Synthetic oligonucleotide
  Target: ATXN2; (-) strand; PAM type: NRG; PAM sequence: GAG
ttcacttaagtctggatgtc

SEQ ID NO: 32777 - DNA, 20 bp, Artificial Sequence
  Description of Artificial Sequence: Synthetic oligonucleotide
  Target: ATXN2; (-) strand; PAM type: NRG; PAM sequence: TGG
gcaggtggttcacttaagtc

SEQ ID NO: 32778 - DNA, 20 bp, Artificial Sequence
  Description of Artificial Sequence: Synthetic oligonucleotide
  Target: ATXN2; (-) strand; PAM type: NRG; PAM sequence: AAG
ctgaggcaggtggttcactt

SEQ ID NO: 32779 - DNA, 20 bp, Artificial Sequence
  Description of Artificial Sequence: Synthetic oligonucleotide
  Target: ATXN2; (-) strand; PAM type: NRG; PAM sequence: TGG
acttgggaggctgaggcagg

SEQ ID NO: 32780 - DNA, 20 bp, Artificial Sequence
  Description of Artificial Sequence: Synthetic oligonucleotide
  Target: ATXN2; (-) strand; PAM type: NRG; PAM sequence: AGG
gctacttgggaggctgaggc

SEQ ID NO: 32781 - DNA, 20 bp, Artificial Sequence
  Description of Artificial Sequence: Synthetic oligonucleotide
  Target: ATXN2; (-) strand; PAM type: NRG; PAM sequence: CAG
agctacttgggaggctgagg

SEQ ID NO: 32782 - DNA, 20 bp, Artificial Sequence
  Description of Artificial Sequence: Synthetic oligonucleotide
  Target: ATXN2; (-) strand; PAM type: NRG; PAM sequence: AGG
ctcagctacttgggaggctg

SEQ ID NO: 32783 - DNA, 20 bp, Artificial Sequence
  Description of Artificial Sequence: Synthetic oligonucleotide
  Target: ATXN2; (-) strand; PAM type: NRG; PAM sequence: GAG
tctcagctacttgggaggct

SEQ ID NO: 32784 - DNA, 20 bp, Artificial Sequence
  Description of Artificial Sequence: Synthetic oligonucleotide
  Target: ATXN2; (-) strand; PAM type: NRG; PAM sequence: AGG
tgtagtctcagctacttggg

SEQ ID NO: 32785 - DNA, 20 bp, Artificial Sequence
  Description of Artificial Sequence: Synthetic oligonucleotide
  Target: ATXN2; (-) strand; PAM type: NRG; PAM sequence: GAG
ctgtagtctcagctacttgg

SEQ ID NO: 32786 - DNA, 20 bp, Artificial Sequence
  Description of Artificial Sequence: Synthetic oligonucleotide
  Target: ATXN2; (-) strand; PAM type: NRG; PAM sequence: GGG
ttctgtagtctcagctactt

SEQ ID NO: 32787 - DNA, 20 bp, Artificial Sequence
  Description of Artificial Sequence: Synthetic oligonucleotide
  Target: ATXN2; (-) strand; PAM type: NRG; PAM sequence: TGG
cttctgtagtctcagctact

SEQ ID NO: 32788 - DNA, 20 bp, Artificial Sequence
  Description of Artificial Sequence: Synthetic oligonucleotide
  Target: ATXN2; (-) strand; PAM type: NRG; PAM sequence: CAG
gtcgtgcacttctgtagtct

SEQ ID NO: 32789 - DNA, 20 bp, Artificial Sequence
  Description of Artificial Sequence: Synthetic oligonucleotide
  Target: ATXN2; (-) strand; PAM type: NRG; PAM sequence: TAG
gtcatggtcgtgcacttctg

SEQ ID NO: 32790 - DNA, 20 bp, Artificial Sequence
  Description of Artificial Sequence: Synthetic oligonucleotide
  Target: ATXN2; (-) strand; PAM type: NRG; PAM sequence: TGG
acaaaaaatttagccagtca

SEQ ID NO: 32791 - DNA, 20 bp, Artificial Sequence
  Description of Artificial Sequence: Synthetic oligonucleotide
  Target: ATXN2; (-) strand; PAM type: NRG; PAM sequence: CAG
attaatacaaaaaatttagc

SEQ ID NO: 32792 - DNA, 20 bp, Artificial Sequence
  Description of Artificial Sequence: Synthetic oligonucleotide
  Target: ATXN2; (-) strand; PAM type: NRG; PAM sequence: TAG
aaatattaatacaaaaaatt

SEQ ID NO: 32793 - DNA, 20 bp, Artificial Sequence
  Description of Artificial Sequence: Synthetic oligonucleotide
  Target: ATXN2; (-) strand; PAM type: NRG; PAM sequence: GGG
agtccagcctgggcaacaca

SEQ ID NO: 32794 - DNA, 20 bp, Artificial Sequence
  Description of Artificial Sequence: Synthetic oligonucleotide
  Target: ATXN2; (-) strand; PAM type: NRG; PAM sequence: AGG
aagtccagcctgggcaacac

SEQ ID NO: 32795 - DNA, 20 bp, Artificial Sequence
  Description of Artificial Sequence: Synthetic oligonucleotide
  Target: ATXN2; (-) strand; PAM type: NRG; PAM sequence: CAG
caagtccagcctgggcaaca

SEQ ID NO: 32796 - DNA, 20 bp, Artificial Sequence
  Description of Artificial Sequence: Synthetic oligonucleotide
  Target: ATXN2; (-) strand; PAM type: NRG; PAM sequence: GGG
caggagttcaagtccagcct

SEQ ID NO: 32797 - DNA, 20 bp, Artificial Sequence
  Description of Artificial Sequence: Synthetic oligonucleotide
  Target: ATXN2; (-) strand; PAM type: NRG; PAM sequence: TGG
ccaggagttcaagtccagcc

SEQ ID NO: 32798 - DNA, 20 bp, Artificial Sequence
  Description of Artificial Sequence: Synthetic oligonucleotide
  Target: ATXN2; (-) strand; PAM type: NRG; PAM sequence: CAG
tgagcccaggagttcaagtc

SEQ ID NO: 32799 - DNA, 20 bp, Artificial Sequence
  Description of Artificial Sequence: Synthetic oligonucleotide
  Target: ATXN2; (-) strand; PAM type: NRG; PAM sequence: AAG
ttacctgagcccaggagttc

SEQ ID NO: 32800 - DNA, 20 bp, Artificial Sequence
  Description of Artificial Sequence: Synthetic oligonucleotide
  Target: ATXN2; (-) strand; PAM type: NRG; PAM sequence: GAG
ggcagattacctgagcccag

SEQ ID NO: 32801 - DNA, 20 bp, Artificial Sequence
  Description of Artificial Sequence: Synthetic oligonucleotide
  Target: ATXN2; (-) strand; PAM type: NRG; PAM sequence: AGG
caggcagattacctgagccc

SEQ ID NO: 32802 - DNA, 20 bp, Artificial Sequence
  Description of Artificial Sequence: Synthetic oligonucleotide
  Target: ATXN2; (-) strand; PAM type: NRG; PAM sequence: CAG
gcaggcagattacctgagcc

SEQ ID NO: 32803 - DNA, 20 bp, Artificial Sequence
  Description of Artificial Sequence: Synthetic oligonucleotide
  Target: ATXN2; (-) strand; PAM type: NRG; PAM sequence: GAG
ctgaagcaggcagattacct

SEQ ID NO: 32804 - DNA, 20 bp, Artificial Sequence
  Description of Artificial Sequence: Synthetic oligonucleotide
  Target: ATXN2; (-) strand; PAM type: NRG; PAM sequence: CAG
ctttgggaggctgaagcagg

SEQ ID NO: 32805 - DNA, 20 bp, Artificial Sequence
  Description of Artificial Sequence: Synthetic oligonucleotide
  Target: ATXN2; (-) strand; PAM type: NRG; PAM sequence: AGG
acactttgggaggctgaagc

SEQ ID NO: 32806 - DNA, 20 bp, Artificial Sequence
  Description of Artificial Sequence: Synthetic oligonucleotide
  Target: ATXN2; (-) strand; PAM type: NRG; PAM sequence: CAG
aacactttgggaggctgaag

SEQ ID NO: 32807 - DNA, 20 bp, Artificial Sequence
  Description of Artificial Sequence: Synthetic oligonucleotide
  Target: ATXN2; (-) strand; PAM type: NRG; PAM sequence: AAG
cccaacactttgggaggctg

SEQ ID NO: 32808 - DNA, 20 bp, Artificial Sequence
  Description of Artificial Sequence: Synthetic oligonucleotide
  Target: ATXN2; (-) strand; PAM type: NRG; PAM sequence: AGG
tgtaatcccaacactttggg

SEQ ID NO: 32809 - DNA, 20 bp, Artificial Sequence
  Description of Artificial Sequence: Synthetic oligonucleotide
  Target: ATXN2; (-) strand; PAM type: NRG; PAM sequence: GAG
ctgtaatcccaacactttgg

SEQ ID NO: 32810 - DNA, 20 bp, Artificial Sequence
  Description of Artificial Sequence: Synthetic oligonucleotide
  Target: ATXN2; (-) strand; PAM type: NRG; PAM sequence: GGG
acctgtaatcccaacacttt

SEQ ID NO: 32811 - DNA, 20 bp, Artificial Sequence
  Description of Artificial Sequence: Synthetic oligonucleotide
  Target: ATXN2; (-) strand; PAM type: NRG; PAM sequence: TGG
cacctgtaatcccaacactt

SEQ ID NO: 32812 - DNA, 20 bp, Artificial Sequence
  Description of Artificial Sequence: Synthetic oligonucleotide
  Target: ATXN2; (-) strand; PAM type: NRG; PAM sequence: TGG
agactggtggctgggcatgg

SEQ ID NO: 32813 - DNA, 20 bp, Artificial Sequence
  Description of Artificial Sequence: Synthetic oligonucleotide
  Target: ATXN2; (-) strand; PAM type: NRG; PAM sequence: TGG
ggaagactggtggctgggca

SEQ ID NO: 32814 - DNA, 20 bp, Artificial Sequence
  Description of Artificial Sequence: Synthetic oligonucleotide
  Target: ATXN2; (-) strand; PAM type: NRG; PAM sequence: GGG
agtttggaagactggtggct

SEQ ID NO: 32815 - DNA, 20 bp, Artificial Sequence
  Description of Artificial Sequence: Synthetic oligonucleotide
  Target: ATXN2; (-) strand; PAM type: NRG; PAM sequence: TGG
aagtttggaagactggtggc

SEQ ID NO: 32816 - DNA, 20 bp, Artificial Sequence
  Description of Artificial Sequence: Synthetic oligonucleotide
  Target: ATXN2; (-) strand; PAM type: NRG; PAM sequence: TGG
aaaaaagtttggaagactgg

SEQ ID NO: 32817 - DNA, 20 bp, Artificial Sequence
  Description of Artificial Sequence: Synthetic oligonucleotide
  Target: ATXN2; (-) strand; PAM type: NRG; PAM sequence: TGG
aaaaaaaaagtttggaagac

SEQ ID NO: 32818 - DNA, 20 bp, Artificial Sequence
  Description of Artificial Sequence: Synthetic oligonucleotide
  Target: ATXN2; (-) strand; PAM type: NRG; PAM sequence: AAG
aaaaaaaaaaaaaagtttgg

SEQ ID NO: 32819 - DNA, 20 bp, Artificial Sequence
  Description of Artificial Sequence: Synthetic oligonucleotide
  Target: ATXN2; (-) strand; PAM type: NRG; PAM sequence: TGG
tcaaaaaaaaaaaaaaagtt

SEQ ID NO: 32820 - DNA, 20 bp, Artificial Sequence
  Description of Artificial Sequence: Synthetic oligonucleotide
  Target: ATXN2; (-) strand; PAM type: NRG; PAM sequence: AAG
ctgtctcaaaaaaaaaaaaa

SEQ ID NO: 32821 - DNA, 20 bp, Artificial Sequence
  Description of Artificial Sequence: Synthetic oligonucleotide
  Target: ATXN2; (-) strand; PAM type: NRG; PAM sequence: GAG
cctgggccacagagcagagt

SEQ ID NO: 32822 - DNA, 20 bp, Artificial Sequence
  Description of Artificial Sequence: Synthetic oligonucleotide
  Target: ATXN2; (-) strand; PAM type: NRG; PAM sequence: GAG
ccagcctgggccacagagca

SEQ ID NO: 32823 - DNA, 20 bp, Artificial Sequence
  Description of Artificial Sequence: Synthetic oligonucleotide
  Target: ATXN2; (-) strand; PAM type: NRG; PAM sequence: CAG
ccccagcctgggccacagag

SEQ ID NO: 32824 - DNA, 20 bp, Artificial Sequence
  Description of Artificial Sequence: Synthetic oligonucleotide
  Target: ATXN2; (-) strand; PAM type: NRG; PAM sequence: GAG
gtgccccagcctgggccaca

SEQ ID NO: 32825 - DNA, 20 bp, Artificial Sequence
  Description of Artificial Sequence: Synthetic oligonucleotide
  Target: ATXN2; (-) strand; PAM type: NRG; PAM sequence: CAG
ctgtgccccagcctgggcca

SEQ ID NO: 32826 - DNA, 20 bp, Artificial Sequence
  Description of Artificial Sequence: Synthetic oligonucleotide
  Target: ATXN2; (-) strand; PAM type: NRG; PAM sequence: GGG
gtgccactgtgccccagcct

SEQ ID NO: 32827 - DNA, 20 bp, Artificial Sequence
  Description of Artificial Sequence: Synthetic oligonucleotide
  Target: ATXN2; (-) strand; PAM type: NRG; PAM sequence: TGG
tgtgccactgtgccccagcc

SEQ ID NO: 32828 - DNA, 20 bp, Artificial Sequence
  Description of Artificial Sequence: Synthetic oligonucleotide
  Target: ATXN2; (-) strand; PAM type: NRG; PAM sequence: CAG
cagattgtgccactgtgccc

SEQ ID NO: 32829 - DNA, 20 bp, Artificial Sequence
  Description of Artificial Sequence: Synthetic oligonucleotide
  Target: ATXN2; (-) strand; PAM type: NRG; PAM sequence: CAG
ggtgaaggttgcagtgagct

SEQ ID NO: 32830 - DNA, 20 bp, Artificial Sequence
  Description of Artificial Sequence: Synthetic oligonucleotide
  Target: ATXN2; (-) strand; PAM type: NRG; PAM sequence: GAG
cgggaggtgaaggttgcagt

SEQ ID NO: 32831 - DNA, 20 bp, Artificial Sequence
  Description of Artificial Sequence: Synthetic oligonucleotide
  Target: ATXN2; (-) strand; PAM type: NRG; PAM sequence: CAG
aacccgggaggtgaaggttg

SEQ ID NO: 32832 - DNA, 20 bp, Artificial Sequence
  Description of Artificial Sequence: Synthetic oligonucleotide
  Target: ATXN2; (-) strand; PAM type: NRG; PAM sequence: AGG
cgcttgaacccgggaggtga

SEQ ID NO: 32833 - DNA, 20 bp, Artificial Sequence
  Description of Artificial Sequence: Synthetic oligonucleotide
  Target: ATXN2; (-) strand; PAM type: NRG; PAM sequence: AAG
tcgcttgaacccgggaggtg

SEQ ID NO: 32834 - DNA, 20 bp, Artificial Sequence
  Description of Artificial Sequence: Synthetic oligonucleotide
  Target: ATXN2; (-) strand; PAM type: NRG; PAM sequence: AGG
gagaatcgcttgaacccggg

SEQ ID NO: 32835 - DNA, 20 bp, Artificial Sequence
  Description of Artificial Sequence: Synthetic oligonucleotide
  Target: ATXN2; (-) strand; PAM type: NRG; PAM sequence: GAG
ggagaatcgcttgaacccgg

SEQ ID NO: 32836 - DNA, 20 bp, Artificial Sequence
  Description of Artificial Sequence: Synthetic oligonucleotide
  Target: ATXN2; (-) strand; PAM type: NRG; PAM sequence: GGG
caggagaatcgcttgaaccc

SEQ ID NO: 32837 - DNA, 20 bp, Artificial Sequence
  Description of Artificial Sequence: Synthetic oligonucleotide
  Target: ATXN2; (-) strand; PAM type: NRG; PAM sequence: CGG
gcaggagaatcgcttgaacc

SEQ ID NO: 32838 - DNA, 20 bp, Artificial Sequence
  Description of Artificial Sequence: Synthetic oligonucleotide
  Target: ATXN2; (-) strand; PAM type: NRG; PAM sequence: GAG
tacttgggaggctgaggcag

SEQ ID NO: 32839 - DNA, 20 bp, Artificial Sequence
  Description of Artificial Sequence: Synthetic oligonucleotide
  Target: ATXN2; (-) strand; PAM type: NRG; PAM sequence: AGG
gctacttgggaggctgaggc

SEQ ID NO: 32840 - DNA, 20 bp, Artificial Sequence
  Description of Artificial Sequence: Synthetic oligonucleotide
  Target: ATXN2; (-) strand; PAM type: NRG; PAM sequence: CAG
agctacttgggaggctgagg

SEQ ID NO: 32841 - DNA, 20 bp, Artificial Sequence
  Description of Artificial Sequence: Synthetic oligonucleotide
  Target: ATXN2; (-) strand; PAM type: NRG; PAM sequence: AGG
cccagctacttgggaggctg

SEQ ID NO: 32842 - DNA, 20 bp, Artificial Sequence
  Description of Artificial Sequence: Synthetic oligonucleotide
  Target: ATXN2; (-) strand; PAM type: NRG; PAM sequence: GAG
tcccagctacttgggaggct

SEQ ID NO: 32843 - DNA, 20 bp, Artificial Sequence
  Description of Artificial Sequence: Synthetic oligonucleotide
  Target: ATXN2; (-) strand; PAM type: NRG; PAM sequence: AGG
tgtaatcccagctacttggg

SEQ ID NO: 32844 - DNA, 20 bp, Artificial Sequence
  Description of Artificial Sequence: Synthetic oligonucleotide
  Target: ATXN2; (-) strand; PAM type: NRG; PAM sequence: GAG
ctgtaatcccagctacttgg

SEQ ID NO: 32845 - DNA, 20 bp, Artificial Sequence
  Description of Artificial Sequence: Synthetic oligonucleotide
  Target: ATXN2; (-) strand; PAM type: NRG; PAM sequence: GGG
gcctgtaatcccagctactt

SEQ ID NO: 32846 - DNA, 20 bp, Artificial Sequence
  Description of Artificial Sequence: Synthetic oligonucleotide
  Target: ATXN2; (-) strand; PAM type: NRG; PAM sequence: TGG
cgcctgtaatcccagctact

SEQ ID NO: 32847 - DNA, 20 bp, Artificial Sequence
  Description of Artificial Sequence: Synthetic oligonucleotide
  Target: ATXN2; (-) strand; PAM type: NRG; PAM sequence: CAG
tgggcgggcgcctgtaatcc

SEQ ID NO: 32848 - DNA, 20 bp, Artificial Sequence
  Description of Artificial Sequence: Synthetic oligonucleotide
  Target: ATXN2; (-) strand; PAM type: NRG; PAM sequence: GGG
aaccagacttggggctgggc

SEQ ID NO: 32849 - DNA, 20 bp, Artificial Sequence
  Description of Artificial Sequence: Synthetic oligonucleotide
  Target: ATXN2; (-) strand; PAM type: NRG; PAM sequence: CGG
aaaccagacttggggctggg

SEQ ID NO: 32850 - DNA, 20 bp, Artificial Sequence
  Description of Artificial Sequence: Synthetic oligonucleotide
  Target: ATXN2; (-) strand; PAM type: NRG; PAM sequence: GGG
aaaaaaccagacttggggct

SEQ ID NO: 32851 - DNA, 20 bp, Artificial Sequence
  Description of Artificial Sequence: Synthetic oligonucleotide
  Target: ATXN2; (-) strand; PAM type: NRG; PAM sequence: TGG
aaaaaaaccagacttggggc

SEQ ID NO: 32852 - DNA, 20 bp, Artificial Sequence
  Description of Artificial Sequence: Synthetic oligonucleotide
  Target: ATXN2; (-) strand; PAM type: NRG; PAM sequence: GGG
aaaaaaaaaaaccagacttg

SEQ ID NO: 32853 - DNA, 20 bp, Artificial Sequence
  Description of Artificial Sequence: Synthetic oligonucleotide
  Target: ATXN2; (-) strand; PAM type: NRG; PAM sequence: GGG
aaaaaaaaaaaaccagactt

SEQ ID NO: 32854 - DNA, 20 bp, Artificial Sequence
  Description of Artificial Sequence: Synthetic oligonucleotide
  Target: ATXN2; (-) strand; PAM type: NRG; PAM sequence: TGG
aaaaaaaaaaaaaccagact

SEQ ID NO: 32855 - DNA, 20 bp, Artificial Sequence
  Description of Artificial Sequence: Synthetic oligonucleotide
  Target: ATXN2; (-) strand; PAM type: NRG; PAM sequence: CAG
aaaaaaaaaaaaaaaaaaac

SEQ ID NO: 32856 - DNA, 20 bp, Artificial Sequence
  Description of Artificial Sequence: Synthetic oligonucleotide
  Target: ATXN2; (-) strand; PAM type: NRG; PAM sequence: GAG
cactgcactgacgacagagg

SEQ ID NO: 32857 - DNA, 20 bp, Artificial Sequence
  Description of Artificial Sequence: Synthetic oligonucleotide
  Target: ATXN2; (-) strand; PAM type: NRG; PAM sequence: GGG
gccactgcactgacgacaga

SEQ ID NO: 32858 - DNA, 20 bp, Artificial Sequence
  Description of Artificial Sequence: Synthetic oligonucleotide
  Target: ATXN2; (-) strand; PAM type: NRG; PAM sequence: AGG
ggccactgcactgacgacag

SEQ ID NO: 32859 - DNA, 20 bp, Artificial Sequence
  Description of Artificial Sequence: Synthetic oligonucleotide
  Target: ATXN2; (-) strand; PAM type: NRG; PAM sequence: GAG
gggccactgcactgacgaca

SEQ ID NO: 32860 - DNA, 20 bp, Artificial Sequence
  Description of Artificial Sequence: Synthetic oligonucleotide
  Target: ATXN2; (-) strand; PAM type: NRG; PAM sequence: CAG
tcgggccactgcactgacga

SEQ ID NO: 32861 - DNA, 20 bp, Artificial Sequence
  Description of Artificial Sequence: Synthetic oligonucleotide
  Target: ATXN2; (-) strand; PAM type: NRG; PAM sequence: GGG
ggttgcagtgagccgagatc

SEQ ID NO: 32862 - DNA, 20 bp, Artificial Sequence
  Description of Artificial Sequence: Synthetic oligonucleotide
  Target: ATXN2; (-) strand; PAM type: NRG; PAM sequence: CGG
aggttgcagtgagccgagat

SEQ ID NO: 32863 - DNA, 20 bp, Artificial Sequence
  Description of Artificial Sequence: Synthetic oligonucleotide
  Target: ATXN2; (-) strand; PAM type: NRG; PAM sequence: GAG
ggcagaggttgcagtgagcc

SEQ ID NO: 32864 - DNA, 20 bp, Artificial Sequence
  Description of Artificial Sequence: Synthetic oligonucleotide
  Target: ATXN2; (-) strand; PAM type: NRG; PAM sequence: GAG
cgggaggcagaggttgcagt

SEQ ID NO: 32865 - DNA, 20 bp, Artificial Sequence
  Description of Artificial Sequence: Synthetic oligonucleotide
  Target: ATXN2; (-) strand; PAM type: NRG; PAM sequence: CAG
aacccgggaggcagaggttg

SEQ ID NO: 32866 - DNA, 20 bp, Artificial Sequence
  Description of Artificial Sequence: Synthetic oligonucleotide
  Target: ATXN2; (-) strand; PAM type: NRG; PAM sequence: AGG
tgcttgaacccgggaggcag

SEQ ID NO: 32867 - DNA, 20 bp, Artificial Sequence
  Description of Artificial Sequence: Synthetic oligonucleotide
  Target: ATXN2; (-) strand; PAM type: NRG; PAM sequence: GAG
ttgcttgaacccgggaggca

SEQ ID NO: 32868 - DNA, 20 bp, Artificial Sequence
  Description of Artificial Sequence: Synthetic oligonucleotide
  Target: ATXN2; (-) strand; PAM type: NRG; PAM sequence: CAG
aattgcttgaacccgggagg

SEQ ID NO: 32869 - DNA, 20 bp, Artificial Sequence
  Description of Artificial Sequence: Synthetic oligonucleotide
  Target: ATXN2; (-) strand; PAM type: NRG; PAM sequence: AGG
gagaattgcttgaacccggg

SEQ ID NO: 32870 - DNA, 20 bp, Artificial Sequence
  Description of Artificial Sequence: Synthetic oligonucleotide
  Target: ATXN2; (-) strand; PAM type: NRG; PAM sequence: GAG
ggagaattgcttgaacccgg

SEQ ID NO: 32871 - DNA, 20 bp, Artificial Sequence
  Description of Artificial Sequence: Synthetic oligonucleotide
  Target: ATXN2; (-) strand; PAM type: NRG; PAM sequence: GGG
caggagaattgcttgaaccc

SEQ ID NO: 32872 - DNA, 20 bp, Artificial Sequence
  Description of Artificial Sequence: Synthetic oligonucleotide
  Target: ATXN2; (-) strand; PAM type: NRG; PAM sequence: CGG
gcaggagaattgcttgaacc

SEQ ID NO: 32873 - DNA, 20 bp, Artificial Sequence
  Description of Artificial Sequence: Synthetic oligonucleotide
  Target: ATXN2; (-) strand; PAM type: NRG; PAM sequence: GAG
tactcgggaggctgaggcag

SEQ ID NO: 32874 - DNA, 20 bp, Artificial Sequence
  Description of Artificial Sequence: Synthetic oligonucleotide
  Target: ATXN2; (-) strand; PAM type: NRG; PAM sequence: AGG
gctactcgggaggctgaggc

SEQ ID NO: 32875 - DNA, 20 bp, Artificial Sequence
  Description of Artificial Sequence: Synthetic oligonucleotide
  Target: ATXN2; (-) strand; PAM type: NRG; PAM sequence: CAG
agctactcgggaggctgagg

SEQ ID NO: 32876 - DNA, 20 bp, Artificial Sequence
  Description of Artificial Sequence: Synthetic oligonucleotide
  Target: ATXN2; (-) strand; PAM type: NRG; PAM sequence: AGG
cccagctactcgggaggctg

SEQ ID NO: 32877 - DNA, 20 bp, Artificial Sequence
  Description of Artificial Sequence: Synthetic oligonucleotide
  Target: ATXN2; (-) strand; PAM type: NRG; PAM sequence: GAG
tcccagctactcgggaggct

SEQ ID NO: 32878 - DNA, 20 bp, Artificial Sequence
  Description of Artificial Sequence: Synthetic oligonucleotide
  Target: ATXN2; (-) strand; PAM type: NRG; PAM sequence: AGG
tgtagtcccagctactcggg

SEQ ID NO: 32879 - DNA, 20 bp, Artificial Sequence
  Description of Artificial Sequence: Synthetic oligonucleotide
  Target: ATXN2; (-) strand; PAM type: NRG; PAM sequence: GAG
ctgtagtcccagctactcgg

SEQ ID NO: 32880 - DNA, 20 bp, Artificial Sequence
  Description of Artificial Sequence: Synthetic oligonucleotide
  Target: ATXN2; (-) strand; PAM type: NRG; PAM sequence: GGG
gcctgtagtcccagctactc

SEQ ID NO: 32881 - DNA, 20 bp, Artificial Sequence
  Description of Artificial Sequence: Synthetic oligonucleotide
  Target: ATXN2; (-) strand; PAM type: NRG; PAM sequence: CGG
tgcctgtagtcccagctact

SEQ ID NO: 32882 - DNA, 20 bp, Artificial Sequence
  Description of Artificial Sequence: Synthetic oligonucleotide
  Target: ATXN2; (-) strand; PAM type: NRG; PAM sequence: CAG
gtgatgtgtgcctgtagtcc

SEQ ID NO: 32883 - DNA, 20 bp, Artificial Sequence
  Description of Artificial Sequence: Synthetic oligonucleotide
  Target: ATXN2; (-) strand; PAM type: NRG; PAM sequence: TAG
ggcgtggtgatgtgtgcctg

SEQ ID NO: 32884 - DNA, 20 bp, Artificial Sequence
  Description of Artificial Sequence: Synthetic oligonucleotide
  Target: ATXN2; (-) strand; PAM type: NRG; PAM sequence: TGG
acaaaaaaattaaatgggcg

SEQ ID NO: 32885 - DNA, 20 bp, Artificial Sequence
  Description of Artificial Sequence: Synthetic oligonucleotide
  Target: ATXN2; (-) strand; PAM type: NRG; PAM sequence: GGG
aaaatacaaaaaaattaaat

SEQ ID NO: 32886 - DNA, 20 bp, Artificial Sequence
  Description of Artificial Sequence: Synthetic oligonucleotide
  Target: ATXN2; (-) strand; PAM type: NRG; PAM sequence: TGG
aaaaatacaaaaaaattaaa

SEQ ID NO: 32887 - DNA, 20 bp, Artificial Sequence
  Description of Artificial Sequence: Synthetic oligonucleotide
  Target: ATXN2; (-) strand; PAM type: NRG; PAM sequence: GGG
tgagaccattctggccaaca

SEQ ID NO: 32888 - DNA, 20 bp, Artificial Sequence
  Description of Artificial Sequence: Synthetic oligonucleotide
  Target: ATXN2; (-) strand; PAM type: NRG; PAM sequence: AGG
ttgagaccattctggccaac

SEQ ID NO: 32889 - DNA, 20 bp, Artificial Sequence
  Description of Artificial Sequence: Synthetic oligonucleotide
  Target: ATXN2; (-) strand; PAM type: NRG; PAM sequence: CAG
attgagaccattctggccaa

SEQ ID NO: 32890 - DNA, 20 bp, Artificial Sequence
  Description of Artificial Sequence: Synthetic oligonucleotide
  Target: ATXN2; (-) strand; PAM type: NRG; PAM sequence: TGG
tcaagagattgagaccattc

SEQ ID NO: 32891 - DNA, 20 bp, Artificial Sequence
  Description of Artificial Sequence: Synthetic oligonucleotide
  Target: ATXN2; (-) strand; PAM type: NRG; PAM sequence: GAG
gattacaaggtcaagagatt

SEQ ID NO: 32892 - DNA, 20 bp, Artificial Sequence
  Description of Artificial Sequence: Synthetic oligonucleotide
  Target: ATXN2; (-) strand; PAM type: NRG; PAM sequence: GAG
agggcggattacaaggtcaa

SEQ ID NO: 32893 - DNA, 20 bp, Artificial Sequence
  Description of Artificial Sequence: Synthetic oligonucleotide
  Target: ATXN2; (-) strand; PAM type: NRG; PAM sequence: AAG
ggagggcggattacaaggtc

SEQ ID NO: 32894 - DNA, 20 bp, Artificial Sequence
  Description of Artificial Sequence: Synthetic oligonucleotide
  Target: ATXN2; (-) strand; PAM type: NRG; PAM sequence: AGG
gttgaggagggcggattaca

SEQ ID NO: 32895 - DNA, 20 bp, Artificial Sequence
  Description of Artificial Sequence: Synthetic oligonucleotide
  Target: ATXN2; (-) strand; PAM type: NRG; PAM sequence: AAG
ggttgaggagggcggattac

SEQ ID NO: 32896 - DNA, 20 bp, Artificial Sequence
  Description of Artificial Sequence: Synthetic oligonucleotide
  Target: ATXN2; (-) strand; PAM type: NRG; PAM sequence: CGG
ctttgggaggttgaggaggg

SEQ ID NO: 32897 - DNA, 20 bp, Artificial Sequence
  Description of Artificial Sequence: Synthetic oligonucleotide
  Target: ATXN2; (-) strand; PAM type: NRG; PAM sequence: GGG
gcactttgggaggttgagga

SEQ ID NO: 32898 - DNA, 20 bp, Artificial Sequence
  Description of Artificial Sequence: Synthetic oligonucleotide
  Target: ATXN2; (-) strand; PAM type: NRG; PAM sequence: AGG
agcactttgggaggttgagg

SEQ ID NO: 32899 - DNA, 20 bp, Artificial Sequence
  Description of Artificial Sequence: Synthetic oligonucleotide
  Target: ATXN2; (-) strand; PAM type: NRG; PAM sequence: GAG
cagcactttgggaggttgag

SEQ ID NO: 32900 - DNA, 20 bp, Artificial Sequence
  Description of Artificial Sequence: Synthetic oligonucleotide
  Target: ATXN2; (-) strand; PAM type: NRG; PAM sequence: AGG
cccagcactttgggaggttg

SEQ ID NO: 32901 - DNA, 20 bp, Artificial Sequence
  Description of Artificial Sequence: Synthetic oligonucleotide
  Target: ATXN2; (-) strand; PAM type: NRG; PAM sequence: GAG
tcccagcactttgggaggtt

SEQ ID NO: 32902 - DNA, 20 bp, Artificial Sequence
  Description of Artificial Sequence: Synthetic oligonucleotide
  Target: ATXN2; (-) strand; PAM type: NRG; PAM sequence: AGG
tgtaatcccagcactttggg

SEQ ID NO: 32903 - DNA, 20 bp, Artificial Sequence
  Description of Artificial Sequence: Synthetic oligonucleotide
  Target: ATXN2; (-) strand; PAM type: NRG; PAM sequence: GAG
ctgtaatcccagcactttgg

SEQ ID NO: 32904 - DNA, 20 bp, Artificial Sequence
  Description of Artificial Sequence: Synthetic oligonucleotide
  Target: ATXN2; (-) strand; PAM type: NRG; PAM sequence: GGG
ccctgtaatcccagcacttt

SEQ ID NO: 32905 - DNA, 20 bp, Artificial Sequence
  Description of Artificial Sequence: Synthetic oligonucleotide
  Target: ATXN2; (-) strand; PAM type: NRG; PAM sequence: TGG
cccctgtaatcccagcactt

SEQ ID NO: 32906 - DNA, 20 bp, Artificial Sequence
  Description of Artificial Sequence: Synthetic oligonucleotide
  Target: ATXN2; (-) strand; PAM type: NRG; PAM sequence: CAG
gtggctcacccctgtaatcc

SEQ ID NO: 32907 - DNA, 20 bp, Artificial Sequence
  Description of Artificial Sequence: Synthetic oligonucleotide
  Target: ATXN2; (-) strand; PAM type: NRG; PAM sequence: TGG
agaaaaagggccgggcgtgg

SEQ ID NO: 32908 - DNA, 20 bp, Artificial Sequence
  Description of Artificial Sequence: Synthetic oligonucleotide
  Target: ATXN2; (-) strand; PAM type: NRG; PAM sequence: TGG
aacagaaaaagggccgggcg

SEQ ID NO: 32909 - DNA, 20 bp, Artificial Sequence
  Description of Artificial Sequence: Synthetic oligonucleotide
  Target: ATXN2; (-) strand; PAM type: NRG; PAM sequence: GGG
tgaaaaacagaaaaagggcc

SEQ ID NO: 32910 - DNA, 20 bp, Artificial Sequence
  Description of Artificial Sequence: Synthetic oligonucleotide
  Target: ATXN2; (-) strand; PAM type: NRG; PAM sequence: CGG
ctgaaaaacagaaaaagggc

SEQ ID NO: 32911 - DNA, 20 bp, Artificial Sequence
  Description of Artificial Sequence: Synthetic oligonucleotide
  Target: ATXN2; (-) strand; PAM type: NRG; PAM sequence: GGG
tctactgaaaaacagaaaaa

SEQ ID NO: 32912 - DNA, 20 bp, Artificial Sequence
  Description of Artificial Sequence: Synthetic oligonucleotide
  Target: ATXN2; (-) strand; PAM type: NRG; PAM sequence: AGG
ctctactgaaaaacagaaaa

SEQ ID NO: 32913 - DNA, 20 bp, Artificial Sequence
  Description of Artificial Sequence: Synthetic oligonucleotide
  Target: ATXN2; (-) strand; PAM type: NRG; PAM sequence: AAG
tctctactgaaaaacagaaa

SEQ ID NO: 32914 - DNA, 20 bp, Artificial Sequence
  Description of Artificial Sequence: Synthetic oligonucleotide
  Target: ATXN2; (-) strand; PAM type: NRG; PAM sequence: CAG
accctgtctctactgaaaaa

SEQ ID NO: 32915 - DNA, 20 bp, Artificial Sequence
  Description of Artificial Sequence: Synthetic oligonucleotide
  Target: ATXN2; (-) strand; PAM type: NRG; PAM sequence: TGG
cgagaccagtctggccaaca

SEQ ID NO: 32916 - DNA, 20 bp, Artificial Sequence
  Description of Artificial Sequence: Synthetic oligonucleotide
  Target: ATXN2; (-) strand; PAM type: NRG; PAM sequence: TGG
tcaggagttcgagaccagtc

SEQ ID NO: 32917 - DNA, 20 bp, Artificial Sequence
  Description of Artificial Sequence: Synthetic oligonucleotide
  Target: ATXN2; (-) strand; PAM type: NRG; PAM sequence: CAG
tgaggtcaggagttcgagac

SEQ ID NO: 32918 - DNA, 20 bp, Artificial Sequence
  Description of Artificial Sequence: Synthetic oligonucleotide
  Target: ATXN2; (-) strand; PAM type: NRG; PAM sequence: GAG
tcacttgaggtcaggagttc

SEQ ID NO: 32919 - DNA, 20 bp, Artificial Sequence
  Description of Artificial Sequence: Synthetic oligonucleotide
  Target: ATXN2; (-) strand; PAM type: NRG; PAM sequence: GAG
ggtggatcacttgaggtcag

SEQ ID NO: 32920 - DNA, 20 bp, Artificial Sequence
  Description of Artificial Sequence: Synthetic oligonucleotide
  Target: ATXN2; (-) strand; PAM type: NRG; PAM sequence: AGG
agggtggatcacttgaggtc

SEQ ID NO: 32921 - DNA, 20 bp, Artificial Sequence
  Description of Artificial Sequence: Synthetic oligonucleotide
  Target: ATXN2; (-) strand; PAM type: NRG; PAM sequence: CAG
gagggtggatcacttgaggt

SEQ ID NO: 32922 - DNA, 20 bp, Artificial Sequence
  Description of Artificial Sequence: Synthetic oligonucleotide
  Target: ATXN2; (-) strand; PAM type: NRG; PAM sequence: AGG
caaggagggtggatcacttg

SEQ ID NO: 32923 - DNA, 20 bp, Artificial Sequence
  Description of Artificial Sequence: Synthetic oligonucleotide
  Target: ATXN2; (-) strand; PAM type: NRG; PAM sequence: GAG
ccaaggagggtggatcactt

SEQ ID NO: 32924 - DNA, 20 bp, Artificial Sequence
  Description of Artificial Sequence: Synthetic oligonucleotide
  Target: ATXN2; (-) strand; PAM type: NRG; PAM sequence: TGG
ctttgggaggccaaggaggg

SEQ ID NO: 32925 - DNA, 20 bp, Artificial Sequence
  Description of Artificial Sequence: Synthetic oligonucleotide
  Target: ATXN2; (-) strand; PAM type: NRG; PAM sequence: GGG
gcactttgggaggccaagga

SEQ ID NO: 32926 - DNA, 20 bp, Artificial Sequence
  Description of Artificial Sequence: Synthetic oligonucleotide
  Target: ATXN2; (-) strand; PAM type: NRG; PAM sequence: AGG
agcactttgggaggccaagg

SEQ ID NO: 32927 - DNA, 20 bp, Artificial Sequence
  Description of Artificial Sequence: Synthetic oligonucleotide
  Target: ATXN2; (-) strand; PAM type: NRG; PAM sequence: GAG
cagcactttgggaggccaag

SEQ ID NO: 32928 - DNA, 20 bp, Artificial Sequence
  Description of Artificial Sequence: Synthetic oligonucleotide
  Target: ATXN2; (-) strand; PAM type: NRG; PAM sequence: AGG
cccagcactttgggaggcca

SEQ ID NO: 32929 - DNA, 20 bp, Artificial Sequence
  Description of Artificial Sequence: Synthetic oligonucleotide
  Target: ATXN2; (-) strand; PAM type: NRG; PAM sequence: AAG
tcccagcactttgggaggcc

SEQ ID NO: 32930 - DNA, 20 bp, Artificial Sequence
  Description of Artificial Sequence: Synthetic oligonucleotide
  Target: ATXN2; (-) strand; PAM type: NRG; PAM sequence: AGG
tgtaatcccagcactttggg

SEQ ID NO: 32931 - DNA, 20 bp, Artificial Sequence
  Description of Artificial Sequence: Synthetic oligonucleotide
  Target: ATXN2; (-) strand; PAM type: NRG; PAM sequence: GAG
ttgtaatcccagcactttgg

SEQ ID NO: 32932 - DNA, 20 bp, Artificial Sequence
  Description of Artificial Sequence: Synthetic oligonucleotide
  Target: ATXN2; (-) strand; PAM type: NRG; PAM sequence: GGG
gcttgtaatcccagcacttt

SEQ ID NO: 32933 - DNA, 20 bp, Artificial Sequence
  Description of Artificial Sequence: Synthetic oligonucleotide
  Target: ATXN2; (-) strand; PAM type: NRG; PAM sequence: TGG
cgcttgtaatcccagcactt

SEQ ID NO: 32934 - DNA, 20 bp, Artificial Sequence
  Description of Artificial Sequence: Synthetic oligonucleotide
  Target: ATXN2; (-) strand; PAM type: NRG; PAM sequence: CAG
gtggctcacgcttgtaatcc

SEQ ID NO: 32935 - DNA, 20 bp, Artificial Sequence
  Description of Artificial Sequence: Synthetic oligonucleotide
  Target: ATXN2; (-) strand; PAM type: NRG; PAM sequence: TGG
aaagacttagctgggtgcgg

SEQ ID NO: 32936 - DNA, 20 bp, Artificial Sequence
  Description of Artificial Sequence: Synthetic oligonucleotide
  Target: ATXN2; (-) strand; PAM type: NRG; PAM sequence: CGG
ttgaaagacttagctgggtg

SEQ ID NO: 32937 - DNA, 20 bp, Artificial Sequence
  Description of Artificial Sequence: Synthetic oligonucleotide
  Target: ATXN2; (-) strand; PAM type: NRG; PAM sequence: GGG
gaaagttgaaagacttagct

SEQ ID NO: 32938 - DNA, 20 bp, Artificial Sequence
  Description of Artificial Sequence: Synthetic oligonucleotide
  Target: ATXN2; (-) strand; PAM type: NRG; PAM sequence: TGG
agaaagttgaaagacttagc

SEQ ID NO: 32939 - DNA, 20 bp, Artificial Sequence
  Description of Artificial Sequence: Synthetic oligonucleotide
  Target: ATXN2; (-) strand; PAM type: NRG; PAM sequence: TAG
tgatagaaagttgaaagact

SEQ ID NO: 32940 - DNA, 20 bp, Artificial Sequence
  Description of Artificial Sequence: Synthetic oligonucleotide
  Target: ATXN2; (-) strand; PAM type: NRG; PAM sequence: AAG
gtagcgtgatagaaagttga

SEQ ID NO: 32941 - DNA, 20 bp, Artificial Sequence
  Description of Artificial Sequence: Synthetic oligonucleotide
  Target: ATXN2; (-) strand; PAM type: NRG; PAM sequence: AAG
aataacagtagcgtgataga

SEQ ID NO: 32942 - DNA, 20 bp, Artificial Sequence
  Description of Artificial Sequence: Synthetic oligonucleotide
  Target: ATXN2; (-) strand; PAM type: NRG; PAM sequence: TAG
gagaaataacagtagcgtga

SEQ ID NO: 32943 - DNA, 20 bp, Artificial Sequence
  Description of Artificial Sequence: Synthetic oligonucleotide
  Target: ATXN2; (-) strand; PAM type: NRG; PAM sequence: TAG
acagcaatgagaaataacag

SEQ ID NO: 32944 - DNA, 20 bp, Artificial Sequence
  Description of Artificial Sequence: Synthetic oligonucleotide
  Target: ATXN2; (-) strand; PAM type: NRG; PAM sequence: CAG
ttaacagcaatgagaaataa

SEQ ID NO: 32945 - DNA, 20 bp, Artificial Sequence
  Description of Artificial Sequence: Synthetic oligonucleotide
  Target: ATXN2; (-) strand; PAM type: NRG; PAM sequence: GAG
gcagatatattaacagcaat

SEQ ID NO: 32946 - DNA, 20 bp, Artificial Sequence
  Description of Artificial Sequence: Synthetic oligonucleotide
  Target: ATXN2; (-) strand; PAM type: NRG; PAM sequence: CAG
ttcagaggcagatatattaa

SEQ ID NO: 32947 - DNA, 20 bp, Artificial Sequence
  Description of Artificial Sequence: Synthetic oligonucleotide
  Target: ATXN2; (-) strand; PAM type: NRG; PAM sequence: CAG
aaaagcaatgttttcagagg

SEQ ID NO: 32948 - DNA, 20 bp, Artificial Sequence
  Description of Artificial Sequence: Synthetic oligonucleotide
  Target: ATXN2; (-) strand; PAM type: NRG; PAM sequence: AGG
tagaaaagcaatgttttcag

SEQ ID NO: 32949 - DNA, 20 bp, Artificial Sequence
  Description of Artificial Sequence: Synthetic oligonucleotide
  Target: ATXN2; (-) strand; PAM type: NRG; PAM sequence: GAG
gtagaaaagcaatgttttca

SEQ ID NO: 32950 - DNA, 20 bp, Artificial Sequence
  Description of Artificial Sequence: Synthetic oligonucleotide
  Target: ATXN2; (-) strand; PAM type: NRG; PAM sequence: CAG
aagtagaaaagcaatgtttt

SEQ ID NO: 32951 - DNA, 20 bp, Artificial Sequence
  Description of Artificial Sequence: Synthetic oligonucleotide
  Target: ATXN2; (-) strand; PAM type: NRG; PAM sequence: AAG
catattggcagcaagtagaa

SEQ ID NO: 32952 - DNA, 20 bp, Artificial Sequence
  Description of Artificial Sequence: Synthetic oligonucleotide
  Target: ATXN2; (-) strand; PAM type: NRG; PAM sequence: TAG
atgtacatattggcagcaag

SEQ ID NO: 32953 - DNA, 20 bp, Artificial Sequence
  Description of Artificial Sequence: Synthetic oligonucleotide
  Target: ATXN2; (-) strand; PAM type: NRG; PAM sequence: AAG
ctgatgtacatattggcagc

SEQ ID NO: 32954 - DNA, 20 bp, Artificial Sequence
  Description of Artificial Sequence: Synthetic oligonucleotide
  Target: ATXN2; (-) strand; PAM type: NRG; PAM sequence: CAG
ttttctgatgtacatattgg

SEQ ID NO: 32955 - DNA, 20 bp, Artificial Sequence
  Description of Artificial Sequence: Synthetic oligonucleotide
  Target: ATXN2; (-) strand; PAM type: NRG; PAM sequence: TGG
ttcttttctgatgtacatat

SEQ ID NO: 32956 - DNA, 20 bp, Artificial Sequence
  Description of Artificial Sequence: Synthetic oligonucleotide
  Target: ATXN2; (-) strand; PAM type: NRG; PAM sequence: TAG
actttacacatgattctatc

SEQ ID NO: 32957 - DNA, 20 bp, Artificial Sequence
  Description of Artificial Sequence: Synthetic oligonucleotide
  Target: ATXN2; (-) strand; PAM type: NRG; PAM sequence: GAG
gagttctttatggcctcttt

SEQ ID NO: 32958 - DNA, 20 bp, Artificial Sequence
  Description of Artificial Sequence: Synthetic oligonucleotide
  Target: ATXN2; (-) strand; PAM type: NRG; PAM sequence: TGG
ctggtctggagagttcttta

SEQ ID NO: 32959 - DNA, 20 bp, Artificial Sequence
  Description of Artificial Sequence: Synthetic oligonucleotide
  Target: ATXN2; (-) strand; PAM type: NRG; PAM sequence: GAG
gctttagcctctggtctgga

SEQ ID NO: 32960 - DNA, 20 bp, Artificial Sequence
  Description of Artificial Sequence: Synthetic oligonucleotide
  Target: ATXN2; (-) strand; PAM type: NRG; PAM sequence: GAG
ctgctttagcctctggtctg

SEQ ID NO: 32961 - DNA, 20 bp, Artificial Sequence
  Description of Artificial Sequence: Synthetic oligonucleotide
  Target: ATXN2; (-) strand; PAM type: NRG; PAM sequence: TGG
tcctgctttagcctctggtc

SEQ ID NO: 32962 - DNA, 20 bp, Artificial Sequence
  Description of Artificial Sequence: Synthetic oligonucleotide
  Target: ATXN2; (-) strand; PAM type: NRG; PAM sequence: TGG
tgtcctcctgctttagcctc

SEQ ID NO: 32963 - DNA, 20 bp, Artificial Sequence
  Description of Artificial Sequence: Synthetic oligonucleotide
  Target: ATXN2; (-) strand; PAM type: NRG; PAM sequence: TAG
cttaaactgtcctcctgctt

SEQ ID NO: 32964 - DNA, 20 bp, Artificial Sequence
  Description of Artificial Sequence: Synthetic oligonucleotide
  Target: ATXN2; (-) strand; PAM type: NRG; PAM sequence: GGG
caggctggcctccaacttct

SEQ ID NO: 32965 - DNA, 20 bp, Artificial Sequence
  Description of Artificial Sequence: Synthetic oligonucleotide
  Target: ATXN2; (-) strand; PAM type: NRG; PAM sequence: TGG
ccaggctggcctccaacttc

SEQ ID NO: 32966 - DNA, 20 bp, Artificial Sequence
  Description of Artificial Sequence: Synthetic oligonucleotide
  Target: ATXN2; (-) strand; PAM type: NRG; PAM sequence: TGG
tcttgttatgttgcccaggc

SEQ ID NO: 32967 - DNA, 20 bp, Artificial Sequence
  Description of Artificial Sequence: Synthetic oligonucleotide
  Target: ATXN2; (-) strand; PAM type: NRG; PAM sequence: AGG
ggggtcttgttatgttgccc

SEQ ID NO: 32968 - DNA, 20 bp, Artificial Sequence
  Description of Artificial Sequence: Synthetic oligonucleotide
  Target: ATXN2; (-) strand; PAM type: NRG; PAM sequence: CAG
gggggtcttgttatgttgcc

SEQ ID NO: 32969 - DNA, 20 bp, Artificial Sequence
  Description of Artificial Sequence: Synthetic oligonucleotide
  Target: ATXN2; (-) strand; PAM type: NRG; PAM sequence: GGG
tttttttttggtagaaatgg

SEQ ID NO: 32970 - DNA, 20 bp, Artificial Sequence
  Description of Artificial Sequence: Synthetic oligonucleotide
  Target: ATXN2; (-) strand; PAM type: NRG; PAM sequence: GGG
ttttttttttggtagaaatg

SEQ ID NO: 32971 - DNA, 20 bp, Artificial Sequence
  Description of Artificial Sequence: Synthetic oligonucleotide
  Target: ATXN2; (-) strand; PAM type: NRG; PAM sequence: GGG
tttttttttttggtagaaat

SEQ ID NO: 32972 - DNA, 20 bp, Artificial Sequence
  Description of Artificial Sequence: Synthetic oligonucleotide
  Target: ATXN2; (-) strand; PAM type: NRG; PAM sequence: TGG
ttttttttttttggtagaaa

SEQ ID NO: 32973 - DNA, 20 bp, Artificial Sequence
  Description of Artificial Sequence: Synthetic oligonucleotide
  Target: ATXN2; (-) strand; PAM type: NRG; PAM sequence: TAG
ttttttttttttttttttgg

SEQ ID NO: 32974 - DNA, 20 bp, Artificial Sequence
  Description of Artificial Sequence: Synthetic oligonucleotide
  Target: ATXN2; (-) strand; PAM type: NRG; PAM sequence: TGG
cttttttttttttttttttt

SEQ ID NO: 32975 - DNA, 20 bp, Artificial Sequence
  Description of Artificial Sequence: Synthetic oligonucleotide
  Target: ATXN2; (-) strand; PAM type: NRG; PAM sequence: GAG
tgagcagattttagaaaggg

SEQ ID NO: 32976 - DNA, 20 bp, Artificial Sequence
  Description of Artificial Sequence: Synthetic oligonucleotide
  Target: ATXN2; (-) strand; PAM type: NRG; PAM sequence: GGG
cttgagcagattttagaaag

SEQ ID NO: 32977 - DNA, 20 bp, Artificial Sequence
  Description of Artificial Sequence: Synthetic oligonucleotide
  Target: ATXN2; (-) strand; PAM type: NRG; PAM sequence: GGG
gcttgagcagattttagaaa

SEQ ID NO: 32978 - DNA, 20 bp, Artificial Sequence
  Description of Artificial Sequence: Synthetic oligonucleotide
  Target: ATXN2; (-) strand; PAM type: NRG; PAM sequence: AGG
agcttgagcagattttagaa

SEQ ID NO: 32979 - DNA, 20 bp, Artificial Sequence
  Description of Artificial Sequence: Synthetic oligonucleotide
  Target: ATXN2; (-) strand; PAM type: NRG; PAM sequence: AAG
aagcttgagcagattttaga

SEQ ID NO: 32980 - DNA, 20 bp, Artificial Sequence
  Description of Artificial Sequence: Synthetic oligonucleotide
  Target: ATXN2; (-) strand; PAM type: NRG; PAM sequence: TAG
actgaagcttgagcagattt

SEQ ID NO: 32981 - DNA, 20 bp, Artificial Sequence
  Description of Artificial Sequence: Synthetic oligonucleotide
  Target: ATXN2; (-) strand; PAM type: NRG; PAM sequence: CAG
tcttttcactgaagcttgag

SEQ ID NO: 32982 - DNA, 20 bp, Artificial Sequence
  Description of Artificial Sequence: Synthetic oligonucleotide
  Target: ATXN2; (-) strand; PAM type: NRG; PAM sequence: GAG
atgtcttttcactgaagctt

SEQ ID NO: 32983 - DNA, 20 bp, Artificial Sequence
  Description of Artificial Sequence: Synthetic oligonucleotide
  Target: ATXN2; (-) strand; PAM type: NRG; PAM sequence: AAG
gactaaatgtcttttcactg

SEQ ID NO: 32984 - DNA, 20 bp, Artificial Sequence
  Description of Artificial Sequence: Synthetic oligonucleotide
  Target: ATXN2; (-) strand; PAM type: NRG; PAM sequence: AAG
catttcgaaatcaggaattg

SEQ ID NO: 32985 - DNA, 20 bp, Artificial Sequence
  Description of Artificial Sequence: Synthetic oligonucleotide
  Target: ATXN2; (-) strand; PAM type: NRG; PAM sequence: AGG
ctgaaacacatttcgaaatc

SEQ ID NO: 32986 - DNA, 20 bp, Artificial Sequence
  Description of Artificial Sequence: Synthetic oligonucleotide
  Target: ATXN2; (-) strand; PAM type: NRG; PAM sequence: CAG
cctgaaacacatttcgaaat

SEQ ID NO: 32987 - DNA, 20 bp, Artificial Sequence
  Description of Artificial Sequence: Synthetic oligonucleotide
  Target: ATXN2; (-) strand; PAM type: NRG; PAM sequence: CAG
catttgctgtggactttgtg

SEQ ID NO: 32988 - DNA, 20 bp, Artificial Sequence
  Description of Artificial Sequence: Synthetic oligonucleotide
  Target: ATXN2; (-) strand; PAM type: NRG; PAM sequence: TGG
gggtttataaacatttgctg

SEQ ID NO: 32989 - DNA, 20 bp, Artificial Sequence
  Description of Artificial Sequence: Synthetic oligonucleotide
  Target: ATXN2; (-) strand; PAM type: NRG; PAM sequence: GGG
agtactgcatttttcttttc

SEQ ID NO: 32990 - DNA, 20 bp, Artificial Sequence
  Description of Artificial Sequence: Synthetic oligonucleotide
  Target: ATXN2; (-) strand; PAM type: NRG; PAM sequence: CGG
aagtactgcatttttctttt

SEQ ID NO: 32991 - DNA, 20 bp, Artificial Sequence
  Description of Artificial Sequence: Synthetic oligonucleotide
  Target: ATXN2; (-) strand; PAM type: NRG; PAM sequence: AAG
taaagggcgggttttgaaac

SEQ ID NO: 32992 - DNA, 20 bp, Artificial Sequence
  Description of Artificial Sequence: Synthetic oligonucleotide
  Target: ATXN2; (-) strand; PAM type: NRG; PAM sequence: GGG
tttagttttttataaagggc

SEQ ID NO: 32993 - DNA, 20 bp, Artificial Sequence
  Description of Artificial Sequence: Synthetic oligonucleotide
  Target: ATXN2; (-) strand; PAM type: NRG; PAM sequence: CGG
ttttagttttttataaaggg

SEQ ID NO: 32994 - DNA, 20 bp, Artificial Sequence
  Description of Artificial Sequence: Synthetic oligonucleotide
  Target: ATXN2; (-) strand; PAM type: NRG; PAM sequence: GGG
taattttagttttttataaa

SEQ ID NO: 32995 - DNA, 20 bp, Artificial Sequence
  Description of Artificial Sequence: Synthetic oligonucleotide
  Target: ATXN2; (-) strand; PAM type: NRG; PAM sequence: AGG
ataattttagttttttataa

SEQ ID NO: 32996 - DNA, 20 bp, Artificial Sequence
  Description of Artificial Sequence: Synthetic oligonucleotide
  Target: ATXN2; (-) strand; PAM type: NRG; PAM sequence: AAG
tataattttagttttttata

SEQ ID NO: 32997 - DNA, 20 bp, Artificial Sequence
  Description of Artificial Sequence: Synthetic oligonucleotide
  Target: ATXN2; (-) strand; PAM type: NRG; PAM sequence: TAG
attaatcttgattataattt

SEQ ID NO: 32998 - DNA, 20 bp, Artificial Sequence
  Description of Artificial Sequence: Synthetic oligonucleotide
  Target: ATXN2; (-) strand; PAM type: NRG; PAM sequence: TGG
ttcttaataatttttctaag

SEQ ID NO: 32999 - DNA, 20 bp, Artificial Sequence
  Description of Artificial Sequence: Synthetic oligonucleotide
  Target: ATXN2; (-) strand; PAM type: NRG; PAM sequence: AAG
atattcttaataatttttct

SEQ ID NO: 33000 - DNA, 20 bp, Artificial Sequence
  Description of Artificial Sequence: Synthetic oligonucleotide
  Target: ATXN2; (-) strand; PAM type: NRG; PAM sequence: AAG
gtttttcatattgcttttta

SEQ ID NO: 33001 - DNA, 20 bp, Artificial Sequence
  Description of Artificial Sequence: Synthetic oligonucleotide
  Target: ATXN2; (-) strand; PAM type: NRG; PAM sequence: AGG
gtgaggcaccgtggctggcc

SEQ ID NO: 33002 - DNA, 20 bp, Artificial Sequence
  Description of Artificial Sequence: Synthetic oligonucleotide
  Target: ATXN2; (-) strand; PAM type: NRG; PAM sequence: CAG
tgtgaggcaccgtggctggc

SEQ ID NO: 33003 - DNA, 20 bp, Artificial Sequence
  Description of Artificial Sequence: Synthetic oligonucleotide
  Target: ATXN2; (-) strand; PAM type: NRG; PAM sequence: TGG
catgtgtgaggcaccgtggc

SEQ ID NO: 33004 - DNA, 20 bp, Artificial Sequence
  Description of Artificial Sequence: Synthetic oligonucleotide
  Target: ATXN2; (-) strand; PAM type: NRG; PAM sequence: TGG
attacatgtgtgaggcaccg

SEQ ID NO: 33005 - DNA, 20 bp, Artificial Sequence
  Description of Artificial Sequence: Synthetic oligonucleotide
  Target: ATXN2; (-) strand; PAM type: NRG; PAM sequence: AGG
gtgctttaattacatgtgtg

SEQ ID NO: 33006 - DNA, 20 bp, Artificial Sequence
  Description of Artificial Sequence: Synthetic oligonucleotide
  Target: ATXN2; (-) strand; PAM type: NRG; PAM sequence: GAG
agtgctttaattacatgtgt

SEQ ID NO: 33007 - DNA, 20 bp, Artificial Sequence
  Description of Artificial Sequence: Synthetic oligonucleotide
  Target: ATXN2; (-) strand; PAM type: NRG; PAM sequence: AAG
ccacccacctagttttccca

SEQ ID NO: 33008 - DNA, 20 bp, Artificial Sequence
  Description of Artificial Sequence: Synthetic oligonucleotide
  Target: ATXN2; (-) strand; PAM type: NRG; PAM sequence: TAG
attcaaatgatccacccacc

SEQ ID NO: 33009 - DNA, 20 bp, Artificial Sequence
  Description of Artificial Sequence: Synthetic oligonucleotide
  Target: ATXN2; (-) strand; PAM type: NRG; PAM sequence: TGG
tttagccatgttgcccaggc

SEQ ID NO: 33010 - DNA, 20 bp, Artificial Sequence
  Description of Artificial Sequence: Synthetic oligonucleotide
  Target: ATXN2; (-) strand; PAM type: NRG; PAM sequence: AGG
agggtttagccatgttgccc

SEQ ID NO: 33011 - DNA, 20 bp, Artificial Sequence
  Description of Artificial Sequence: Synthetic oligonucleotide
  Target: ATXN2; (-) strand; PAM type: NRG; PAM sequence: CAG
cagggtttagccatgttgcc

SEQ ID NO: 33012 - DNA, 20 bp, Artificial Sequence
  Description of Artificial Sequence: Synthetic oligonucleotide
  Target: ATXN2; (-) strand; PAM type: NRG; PAM sequence: TAG
tattttgtagagacagggtt

SEQ ID NO: 33013 - DNA, 20 bp, Artificial Sequence
  Description of Artificial Sequence: Synthetic oligonucleotide
  Target: ATXN2; (-) strand; PAM type: NRG; PAM sequence: GGG
ttgtatattttgtagagaca

SEQ ID NO: 33014 - DNA, 20 bp, Artificial Sequence
  Description of Artificial Sequence: Synthetic oligonucleotide
  Target: ATXN2; (-) strand; PAM type: NRG; PAM sequence: AGG
tttgtatattttgtagagac

SEQ ID NO: 33015 - DNA, 20 bp, Artificial Sequence
  Description of Artificial Sequence: Synthetic oligonucleotide
  Target: ATXN2; (-) strand; PAM type: NRG; PAM sequence: CAG
ttttgtatattttgtagaga

SEQ ID NO: 33016 - DNA, 20 bp, Artificial Sequence
  Description of Artificial Sequence: Synthetic oligonucleotide
  Target: ATXN2; (-) strand; PAM type: NRG; PAM sequence: GAG
tggcttttgtatattttgta

SEQ ID NO: 33017 - DNA, 20 bp, Artificial Sequence
  Description of Artificial Sequence: Synthetic oligonucleotide
  Target: ATXN2; (-) strand; PAM type: NRG; PAM sequence: TAG
cctggcttttgtatattttg

SEQ ID NO: 33018 - DNA, 20 bp, Artificial Sequence
  Description of Artificial Sequence: Synthetic oligonucleotide
  Target: ATXN2; (-) strand; PAM type: NRG; PAM sequence: TGG
caggtgtatgccaccatgcc

SEQ ID NO: 33019 - DNA, 20 bp, Artificial Sequence
  Description of Artificial Sequence: Synthetic oligonucleotide
  Target: ATXN2; (-) strand; PAM type: NRG; PAM sequence: AGG
tcccgagtagctggaactac

SEQ ID NO: 33020 - DNA, 20 bp, Artificial Sequence
  Description of Artificial Sequence: Synthetic oligonucleotide
  Target: ATXN2; (-) strand; PAM type: NRG; PAM sequence: CAG
ctcccgagtagctggaacta

SEQ ID NO: 33021 - DNA, 20 bp, Artificial Sequence
  Description of Artificial Sequence: Synthetic oligonucleotide
  Target: ATXN2; (-) strand; PAM type: NRG; PAM sequence: TGG
acctcagtctcccgagtagc

SEQ ID NO: 33022 - DNA, 20 bp, Artificial Sequence
  Description of Artificial Sequence: Synthetic oligonucleotide
  Target: ATXN2; (-) strand; PAM type: NRG; PAM sequence: TAG
tcctacctcagtctcccgag

SEQ ID NO: 33023 - DNA, 20 bp, Artificial Sequence
  Description of Artificial Sequence: Synthetic oligonucleotide
  Target: ATXN2; (-) strand; PAM type: NRG; PAM sequence: GAG
tcctcctacctcagtctccc

SEQ ID NO: 33024 - DNA, 20 bp, Artificial Sequence
  Description of Artificial Sequence: Synthetic oligonucleotide
  Target: ATXN2; (-) strand; PAM type: NRG; PAM sequence: CAG
ctcaagcagtcctcctacct

SEQ ID NO: 33025 - DNA, 20 bp, Artificial Sequence
  Description of Artificial Sequence: Synthetic oligonucleotide
  Target: ATXN2; (-) strand; PAM type: NRG; PAM sequence: CAG
ctcaacatcctgggctcaag

SEQ ID NO: 33026 - DNA, 20 bp, Artificial Sequence
  Description of Artificial Sequence: Synthetic oligonucleotide
  Target: ATXN2; (-) strand; PAM type: NRG; PAM sequence: AAG
agcctcaacatcctgggctc

SEQ ID NO: 33027 - DNA, 20 bp, Artificial Sequence
  Description of Artificial Sequence: Synthetic oligonucleotide
  Target: ATXN2; (-) strand; PAM type: NRG; PAM sequence: GGG
cactgcagcctcaacatcct

SEQ ID NO: 33028 - DNA, 20 bp, Artificial Sequence
  Description of Artificial Sequence: Synthetic oligonucleotide
  Target: ATXN2; (-) strand; PAM type: NRG; PAM sequence: TGG
tcactgcagcctcaacatcc

SEQ ID NO: 33029 - DNA, 20 bp, Artificial Sequence
  Description of Artificial Sequence: Synthetic oligonucleotide
  Target: ATXN2; (-) strand; PAM type: NRG; PAM sequence: CAG
ggtatggtcatggctcactg

SEQ ID NO: 33030 - DNA, 20 bp, Artificial Sequence
  Description of Artificial Sequence: Synthetic oligonucleotide
  Target: ATXN2; (-) strand; PAM type: NRG; PAM sequence: TGG
ggagtatagtggtatggtca

SEQ ID NO: 33031 - DNA, 20 bp, Artificial Sequence
  Description of Artificial Sequence: Synthetic oligonucleotide
  Target: ATXN2; (-) strand; PAM type: NRG; PAM sequence: TGG
caggttggagtatagtggta

SEQ ID NO: 33032 - DNA, 20 bp, Artificial Sequence
  Description of Artificial Sequence: Synthetic oligonucleotide
  Target: ATXN2; (-) strand; PAM type: NRG; PAM sequence: TGG
ttggccaggttggagtatag

SEQ ID NO: 33033 - DNA, 20 bp, Artificial Sequence
  Description of Artificial Sequence: Synthetic oligonucleotide
  Target: ATXN2; (-) strand; PAM type: NRG; PAM sequence: TAG
ctgttggccaggttggagta

SEQ ID NO: 33034 - DNA, 20 bp, Artificial Sequence
  Description of Artificial Sequence: Synthetic oligonucleotide
  Target: ATXN2; (-) strand; PAM type: NRG; PAM sequence: GAG
ttaccctgttggccaggttg

SEQ ID NO: 33035 - DNA, 20 bp, Artificial Sequence
  Description of Artificial Sequence: Synthetic oligonucleotide
  Target: ATXN2; (-) strand; PAM type: NRG; PAM sequence: TGG
tcttaccctgttggccaggt

SEQ ID NO: 33036 - DNA, 20 bp, Artificial Sequence
  Description of Artificial Sequence: Synthetic oligonucleotide
  Target: ATXN2; (-) strand; PAM type: NRG; PAM sequence: AGG
tgagtcttaccctgttggcc

SEQ ID NO: 33037 - DNA, 20 bp, Artificial Sequence
  Description of Artificial Sequence: Synthetic oligonucleotide
  Target: ATXN2; (-) strand; PAM type: NRG; PAM sequence: CAG
ctgagtcttaccctgttggc

SEQ ID NO: 33038 - DNA, 20 bp, Artificial Sequence
  Description of Artificial Sequence: Synthetic oligonucleotide
  Target: ATXN2; (-) strand; PAM type: NRG; PAM sequence: TGG
gagactgagtcttaccctgt

SEQ ID NO: 33039 - DNA, 20 bp, Artificial Sequence
  Description of Artificial Sequence: Synthetic oligonucleotide
  Target: ATXN2; (-) strand; PAM type: NRG; PAM sequence: GAG
atttccttttttttgagact

SEQ ID NO: 33040 - DNA, 20 bp, Artificial Sequence
  Description of Artificial Sequence: Synthetic oligonucleotide
  Target: ATXN2; (-) strand; PAM type: NRG; PAM sequence: GAG
ttttaaatttcctttttttt

SEQ ID NO: 33041 - DNA, 20 bp, Artificial Sequence
  Description of Artificial Sequence: Synthetic oligonucleotide
  Target: ATXN2; (-) strand; PAM type: NRG; PAM sequence: CAG
tgaacagtgttgccaatgat

SEQ ID NO: 33042 - DNA, 20 bp, Artificial Sequence
  Description of Artificial Sequence: Synthetic oligonucleotide
  Target: ATXN2; (-) strand; PAM type: NRG; PAM sequence: CAG
ccttgagaggctttattgaa

SEQ ID NO: 33043 - DNA, 20 bp, Artificial Sequence
  Description of Artificial Sequence: Synthetic oligonucleotide
  Target: ATXN2; (-) strand; PAM type: NRG; PAM sequence: AGG
cctgaaaccattgccttgag

SEQ ID NO: 33044 - DNA, 20 bp, Artificial Sequence
  Description of Artificial Sequence: Synthetic oligonucleotide
  Target: ATXN2; (-) strand; PAM type: NRG; PAM sequence: GAG
tcctgaaaccattgccttga

SEQ ID NO: 33045 - DNA, 20 bp, Artificial Sequence
  Description of Artificial Sequence: Synthetic oligonucleotide
  Target: ATXN2; (-) strand; PAM type: NRG; PAM sequence: GAG
tctcctgaaaccattgcctt

SEQ ID NO: 33046 - DNA, 20 bp, Artificial Sequence
  Description of Artificial Sequence: Synthetic oligonucleotide
  Target: ATXN2; (-) strand; PAM type: NRG; PAM sequence: TGG
gtatcagaactttagaatgt

SEQ ID NO: 33047 - DNA, 20 bp, Artificial Sequence
  Description of Artificial Sequence: Synthetic oligonucleotide
  Target: ATXN2; (-) strand; PAM type: NRG; PAM sequence: TAG
tattaactgtatcagaactt

SEQ ID NO: 33048 - DNA, 20 bp, Artificial Sequence
  Description of Artificial Sequence: Synthetic oligonucleotide
  Target: ATXN2; (-) strand; PAM type: NRG; PAM sequence: CAG
tttatttttattaactgtat

SEQ ID NO: 33049 - DNA, 20 bp, Artificial Sequence
  Description of Artificial Sequence: Synthetic oligonucleotide
  Target: ATXN2; (-) strand; PAM type: NRG; PAM sequence: TGG
gtcggcaatataagtgaacg

SEQ ID NO: 33050 - DNA, 20 bp, Artificial Sequence
  Description of Artificial Sequence: Synthetic oligonucleotide
  Target: ATXN2; (-) strand; PAM type: NRG; PAM sequence: AAG
atgaggcttgtcggcaatat

SEQ ID NO: 33051 - DNA, 20 bp, Artificial Sequence
  Description of Artificial Sequence: Synthetic oligonucleotide
  Target: ATXN2; (-) strand; PAM type: NRG; PAM sequence: CGG
agttgtggtatgaggcttgt

SEQ ID NO: 33052 - DNA, 20 bp, Artificial Sequence
  Description of Artificial Sequence: Synthetic oligonucleotide
  Target: ATXN2; (-) strand; PAM type: NRG; PAM sequence: AGG
aactcattagttgtggtatg

SEQ ID NO: 33053 - DNA, 20 bp, Artificial Sequence
  Description of Artificial Sequence: Synthetic oligonucleotide
  Target: ATXN2; (-) strand; PAM type: NRG; PAM sequence: GAG
aaactcattagttgtggtat

SEQ ID NO: 33054 - DNA, 20 bp, Artificial Sequence
  Description of Artificial Sequence: Synthetic oligonucleotide
  Target: ATXN2; (-) strand; PAM type: NRG; PAM sequence: TGG
tttgtaaaactcattagttg

SEQ ID NO: 33055 - DNA, 20 bp, Artificial Sequence
  Description of Artificial Sequence: Synthetic oligonucleotide
  Target: ATXN2; (-) strand; PAM type: NRG; PAM sequence: TAG
gaagtctttgtaaaactcat

SEQ ID NO: 33056 - DNA, 20 bp, Artificial Sequence
  Description of Artificial Sequence: Synthetic oligonucleotide
  Target: ATXN2; (-) strand; PAM type: NRG; PAM sequence: AAG
taaaatttcattctataatg

SEQ ID NO: 33057 - DNA, 20 bp, Artificial Sequence
  Description of Artificial Sequence: Synthetic oligonucleotide
  Target: ATXN2; (-) strand; PAM type: NRG; PAM sequence: GGG
ttaatagctaactacatttt

SEQ ID NO: 33058 - DNA, 20 bp, Artificial Sequence
  Description of Artificial Sequence: Synthetic oligonucleotide
  Target: ATXN2; (-) strand; PAM type: NRG; PAM sequence: TGG
attaatagctaactacattt

SEQ ID NO: 33059 - DNA, 20 bp, Artificial Sequence
  Description of Artificial Sequence: Synthetic oligonucleotide
  Target: ATXN2; (-) strand; PAM type: NRG; PAM sequence: TAG
cagtttcgtgccatgattaa

SEQ ID NO: 33060 - DNA, 20 bp, Artificial Sequence
  Description of Artificial Sequence: Synthetic oligonucleotide
  Target: ATXN2; (-) strand; PAM type: NRG; PAM sequence: CAG
tgtgtccagcccgaaaatgt

SEQ ID NO: 33061 - DNA, 20 bp, Artificial Sequence
  Description of Artificial Sequence: Synthetic oligonucleotide
  Target: ATXN2; (-) strand; PAM type: NRG; PAM sequence: CAG
caggtgtgagccactgtgtc

SEQ ID NO: 33062 - DNA, 20 bp, Artificial Sequence
  Description of Artificial Sequence: Synthetic oligonucleotide
  Target: ATXN2; (-) strand; PAM type: NRG; PAM sequence: GAG
catgctggtgttacaggtgt

SEQ ID NO: 33063 - DNA, 20 bp, Artificial Sequence
  Description of Artificial Sequence: Synthetic oligonucleotide
  Target: ATXN2; (-) strand; PAM type: NRG; PAM sequence: AGG
tcctaacatgctggtgttac

SEQ ID NO: 33064 - DNA, 20 bp, Artificial Sequence
  Description of Artificial Sequence: Synthetic oligonucleotide
  Target: ATXN2; (-) strand; PAM type: NRG; PAM sequence: CAG
ctcctaacatgctggtgtta

SEQ ID NO: 33065 - DNA, 20 bp, Artificial Sequence
  Description of Artificial Sequence: Synthetic oligonucleotide
  Target: ATXN2; (-) strand; PAM type: NRG; PAM sequence: TGG
acttaggcctcctaacatgc

SEQ ID NO: 33066 - DNA, 20 bp, Artificial Sequence
  Description of Artificial Sequence: Synthetic oligonucleotide
  Target: ATXN2; (-) strand; PAM type: NRG; PAM sequence: AGG
tcgagtgatccaccccactt

SEQ ID NO: 33067 - DNA, 20 bp, Artificial Sequence
  Description of Artificial Sequence: Synthetic oligonucleotide
  Target: ATXN2; (-) strand; PAM type: NRG; PAM sequence: TAG
ctcgagtgatccaccccact

SEQ ID NO: 33068 - DNA, 20 bp, Artificial Sequence
  Description of Artificial Sequence: Synthetic oligonucleotide
  Target: ATXN2; (-) strand; PAM type: NRG; PAM sequence: GAG
gatcttgaactcatggcctc

SEQ ID NO: 33069 - DNA, 20 bp, Artificial Sequence
  Description of Artificial Sequence: Synthetic oligonucleotide
  Target: ATXN2; (-) strand; PAM type: NRG; PAM sequence: TGG
ccatgttgatcttgaactca

SEQ ID NO: 33070 - DNA, 20 bp, Artificial Sequence
  Description of Artificial Sequence: Synthetic oligonucleotide
  Target: ATXN2; (-) strand; PAM type: NRG; PAM sequence: GAG
ttgtattttcagtagatgtg

SEQ ID NO: 33071 - DNA, 20 bp, Artificial Sequence
  Description of Artificial Sequence: Synthetic oligonucleotide
  Target: ATXN2; (-) strand; PAM type: NRG; PAM sequence: TGG
ttttgtattttcagtagatg

SEQ ID NO: 33072 - DNA, 20 bp, Artificial Sequence
  Description of Artificial Sequence: Synthetic oligonucleotide
  Target: ATXN2; (-) strand; PAM type: NRG; PAM sequence: TAG
tagtttttttgtattttcag

SEQ ID NO: 33073 - DNA, 20 bp, Artificial Sequence
  Description of Artificial Sequence: Synthetic oligonucleotide
  Target: ATXN2; (-) strand; PAM type: NRG; PAM sequence: CAG
gcctagtttttttgtatttt

SEQ ID NO: 33074 - DNA, 20 bp, Artificial Sequence
  Description of Artificial Sequence: Synthetic oligonucleotide
  Target: ATXN2; (-) strand; PAM type: NRG; PAM sequence: TAG
tgcgccccacagtgcctgcc

SEQ ID NO: 33075 - DNA, 20 bp, Artificial Sequence
  Description of Artificial Sequence: Synthetic oligonucleotide
  Target: ATXN2; (-) strand; PAM type: NRG; PAM sequence: CAG
ggaactactggtgcgcccca

SEQ ID NO: 33076 - DNA, 20 bp, Artificial Sequence
  Description of Artificial Sequence: Synthetic oligonucleotide
  Target: ATXN2; (-) strand; PAM type: NRG; PAM sequence: TGG
tcccaagtagttggaactac

SEQ ID NO: 33077 - DNA, 20 bp, Artificial Sequence
  Description of Artificial Sequence: Synthetic oligonucleotide
  Target: ATXN2; (-) strand; PAM type: NRG; PAM sequence: TGG
acctcagcctcccaagtagt

SEQ ID NO: 33078 - DNA, 20 bp, Artificial Sequence
  Description of Artificial Sequence: Synthetic oligonucleotide
  Target: ATXN2; (-) strand; PAM type: NRG; PAM sequence: TAG
tcccacctcagcctcccaag

SEQ ID NO: 33079 - DNA, 20 bp, Artificial Sequence
  Description of Artificial Sequence: Synthetic oligonucleotide
  Target: ATXN2; (-) strand; PAM type: NRG; PAM sequence: AAG
tcctcccacctcagcctccc

SEQ ID NO: 33080 - DNA, 20 bp, Artificial Sequence
  Description of Artificial Sequence: Synthetic oligonucleotide
  Target: ATXN2; (-) strand; PAM type: NRG; PAM sequence: CAG
ttcaagccatcctcccacct

SEQ ID NO: 33081 - DNA, 20 bp, Artificial Sequence
  Description of Artificial Sequence: Synthetic oligonucleotide
  Target: ATXN2; (-) strand; PAM type: NRG; PAM sequence: AAG
aacctctgtctcccgggttc

SEQ ID NO: 33082 - DNA, 20 bp, Artificial Sequence
  Description of Artificial Sequence: Synthetic oligonucleotide
  Target: ATXN2; (-) strand; PAM type: NRG; PAM sequence: GGG
cactgcaacctctgtctccc

SEQ ID NO: 33083 - DNA, 20 bp, Artificial Sequence
  Description of Artificial Sequence: Synthetic oligonucleotide
  Target: ATXN2; (-) strand; PAM type: NRG; PAM sequence: CGG
tcactgcaacctctgtctcc

SEQ ID NO: 33084 - DNA, 20 bp, Artificial Sequence
  Description of Artificial Sequence: Synthetic oligonucleotide
  Target: ATXN2; (-) strand; PAM type: NRG; PAM sequence: CGG
ggagtgcagtgttgcaaata

SEQ ID NO: 33085 - DNA, 20 bp, Artificial Sequence
  Description of Artificial Sequence: Synthetic oligonucleotide
  Target: ATXN2; (-) strand; PAM type: NRG; PAM sequence: CAG
ctgttgctaaggctggagtg

SEQ ID NO: 33086 - DNA, 20 bp, Artificial Sequence
  Description of Artificial Sequence: Synthetic oligonucleotide
  Target: ATXN2; (-) strand; PAM type: NRG; PAM sequence: GAG
tggctctgttgctaaggctg

SEQ ID NO: 33087 - DNA, 20 bp, Artificial Sequence
  Description of Artificial Sequence: Synthetic oligonucleotide
  Target: ATXN2; (-) strand; PAM type: NRG; PAM sequence: TGG
tctggctctgttgctaaggc

SEQ ID NO: 33088 - DNA, 20 bp, Artificial Sequence
  Description of Artificial Sequence: Synthetic oligonucleotide
  Target: ATXN2; (-) strand; PAM type: NRG; PAM sequence: AGG
aggatctggctctgttgcta

SEQ ID NO: 33089 - DNA, 20 bp, Artificial Sequence
  Description of Artificial Sequence: Synthetic oligonucleotide
  Target: ATXN2; (-) strand; PAM type: NRG; PAM sequence: AAG
taggatctggctctgttgct

SEQ ID NO: 33090 - DNA, 20 bp, Artificial Sequence
  Description of Artificial Sequence: Synthetic oligonucleotide
  Target: ATXN2; (-) strand; PAM type: NRG; PAM sequence: TGG
tttatttttgtgataggatc

SEQ ID NO: 33091 - DNA, 20 bp, Artificial Sequence
  Description of Artificial Sequence: Synthetic oligonucleotide
  Target: ATXN2; (-) strand; PAM type: NRG; PAM sequence: AGG
tatttatttatttttgtgat

SEQ ID NO: 33092 - DNA, 20 bp, Artificial Sequence
  Description of Artificial Sequence: Synthetic oligonucleotide
  Target: ATXN2; (-) strand; PAM type: NRG; PAM sequence: TAG
ttatttatttatttttgtga

SEQ ID NO: 33093 - DNA, 20 bp, Artificial Sequence
  Description of Artificial Sequence: Synthetic oligonucleotide
  Target: ATXN2; (-) strand; PAM type: NRG; PAM sequence: AAG
tttaaccctgaagttgtgtc

SEQ ID NO: 33094 - DNA, 20 bp, Artificial Sequence
  Description of Artificial Sequence: Synthetic oligonucleotide
  Target: ATXN2; (-) strand; PAM type: NRG; PAM sequence: AAG
tgcttgtaattttaaccctg

SEQ ID NO: 33095 - DNA, 20 bp, Artificial Sequence
  Description of Artificial Sequence: Synthetic oligonucleotide
  Target: ATXN2; (-) strand; PAM type: NRG; PAM sequence: TAG
aacatttaaagattcttaca

SEQ ID NO: 33096 - DNA, 20 bp, Artificial Sequence
  Description of Artificial Sequence: Synthetic oligonucleotide
  Target: ATXN2; (-) strand; PAM type: NRG; PAM sequence: AAG
gaaattctcattaacattta

SEQ ID NO: 33097 - DNA, 20 bp, Artificial Sequence
  Description of Artificial Sequence: Synthetic oligonucleotide
  Target: ATXN2; (-) strand; PAM type: NRG; PAM sequence: TGG
aaccttaactttttatttgc

SEQ ID NO: 33098 - DNA, 20 bp, Artificial Sequence
  Description of Artificial Sequence: Synthetic oligonucleotide
  Target: ATXN2; (-) strand; PAM type: NRG; PAM sequence: TGG
ctgccttggcctcccatgcc

SEQ ID NO: 33099 - DNA, 20 bp, Artificial Sequence
  Description of Artificial Sequence: Synthetic oligonucleotide
  Target: ATXN2; (-) strand; PAM type: NRG; PAM sequence: TGG
ctcaagtgatccacctgcct

SEQ ID NO: 33100 - DNA, 20 bp, Artificial Sequence
  Description of Artificial Sequence: Synthetic oligonucleotide
  Target: ATXN2; (-) strand; PAM type: NRG; PAM sequence: AAG
ggtctggaacttctggcctc

SEQ ID NO: 33101 - DNA, 20 bp, Artificial Sequence
  Description of Artificial Sequence: Synthetic oligonucleotide
  Target: ATXN2; (-) strand; PAM type: NRG; PAM sequence: TGG
ccaggctggtctggaacttc

SEQ ID NO: 33102 - DNA, 20 bp, Artificial Sequence
  Description of Artificial Sequence: Synthetic oligonucleotide
  Target: ATXN2; (-) strand; PAM type: NRG; PAM sequence: TGG
ccatattggccaggctggtc

SEQ ID NO: 33103 - DNA, 20 bp, Artificial Sequence
  Description of Artificial Sequence: Synthetic oligonucleotide
  Target: ATXN2; (-) strand; PAM type: NRG; PAM sequence: TGG
tttcaccatattggccaggc

SEQ ID NO: 33104 - DNA, 20 bp, Artificial Sequence
  Description of Artificial Sequence: Synthetic oligonucleotide
  Target: ATXN2; (-) strand; PAM type: NRG; PAM sequence: AGG
ggggtttcaccatattggcc

SEQ ID NO: 33105 - DNA, 20 bp, Artificial Sequence
  Description of Artificial Sequence: Synthetic oligonucleotide
  Target: ATXN2; (-) strand; PAM type: NRG; PAM sequence: CAG
tggggtttcaccatattggc

SEQ ID NO: 33106 - DNA, 20 bp, Artificial Sequence
  Description of Artificial Sequence: Synthetic oligonucleotide
  Target: ATXN2; (-) strand; PAM type: NRG; PAM sequence: TGG
gagatggggtttcaccatat

SEQ ID NO: 33107 - DNA, 20 bp, Artificial Sequence
  Description of Artificial Sequence: Synthetic oligonucleotide
  Target: ATXN2; (-) strand; PAM type: NRG; PAM sequence: GGG
tttgtattttagtagagatg

SEQ ID NO: 33108 - DNA, 20 bp, Artificial Sequence
  Description of Artificial Sequence: Synthetic oligonucleotide
  Target: ATXN2; (-) strand; PAM type: NRG; PAM sequence: GGG
ttttgtattttagtagagat

SEQ ID NO: 33109 - DNA, 20 bp, Artificial Sequence
  Description of Artificial Sequence: Synthetic oligonucleotide
  Target: ATXN2; (-) strand; PAM type: NRG; PAM sequence: TGG
tttttgtattttagtagaga

SEQ ID NO: 33110 - DNA, 20 bp, Artificial Sequence
  Description of Artificial Sequence: Synthetic oligonucleotide
  Target: ATXN2; (-) strand; PAM type: NRG; PAM sequence: GAG
ctaatttttgtattttagta

SEQ ID NO: 33111 - DNA, 20 bp, Artificial Sequence
  Description of Artificial Sequence: Synthetic oligonucleotide
  Target: ATXN2; (-) strand; PAM type: NRG; PAM sequence: TAG
ggctaatttttgtattttag

SEQ ID NO: 33112 - DNA, 20 bp, Artificial Sequence
  Description of Artificial Sequence: Synthetic oligonucleotide
  Target: ATXN2; (-) strand; PAM type: NRG; PAM sequence: TAG
cctggctaatttttgtattt

SEQ ID NO: 33113 - DNA, 20 bp, Artificial Sequence
  Description of Artificial Sequence: Synthetic oligonucleotide
  Target: ATXN2; (-) strand; PAM type: NRG; PAM sequence: TGG
caggcacgcaccatctcgcc

SEQ ID NO: 33114 - DNA, 20 bp, Artificial Sequence
  Description of Artificial Sequence: Synthetic oligonucleotide
  Target: ATXN2; (-) strand; PAM type: NRG; PAM sequence: AGG
tcctgagtagctgggactgc

SEQ ID NO: 33115 - DNA, 20 bp, Artificial Sequence
  Description of Artificial Sequence: Synthetic oligonucleotide
  Target: ATXN2; (-) strand; PAM type: NRG; PAM sequence: CAG
ctcctgagtagctgggactg

SEQ ID NO: 33116 - DNA, 20 bp, Artificial Sequence
  Description of Artificial Sequence: Synthetic oligonucleotide
  Target: ATXN2; (-) strand; PAM type: NRG; PAM sequence: GGG
cctcagcctcctgagtagct

SEQ ID NO: 33117 - DNA, 20 bp, Artificial Sequence
  Description of Artificial Sequence: Synthetic oligonucleotide
  Target: ATXN2; (-) strand; PAM type: NRG; PAM sequence: TGG
gcctcagcctcctgagtagc

SEQ ID NO: 33118 - DNA, 20 bp, Artificial Sequence
  Description of Artificial Sequence: Synthetic oligonucleotide
  Target: ATXN2; (-) strand; PAM type: NRG; PAM sequence: TAG
ttctgcctcagcctcctgag

SEQ ID NO: 33119 - DNA, 20 bp, Artificial Sequence
  Description of Artificial Sequence: Synthetic oligonucleotide
  Target: ATXN2; (-) strand; PAM type: NRG; PAM sequence: GAG
tttttctgcctcagcctcct

SEQ ID NO: 33120 - DNA, 20 bp, Artificial Sequence
  Description of Artificial Sequence: Synthetic oligonucleotide
  Target: ATXN2; (-) strand; PAM type: NRG; PAM sequence: CAG
ttaaagcgatttttctgcct

SEQ ID NO: 33121 - DNA, 20 bp, Artificial Sequence
  Description of Artificial Sequence: Synthetic oligonucleotide
  Target: ATXN2; (-) strand; PAM type: NRG; PAM sequence: AAG
aacctctgcctcccaggtta

SEQ ID NO: 33122 - DNA, 20 bp, Artificial Sequence
  Description of Artificial Sequence: Synthetic oligonucleotide
  Target: ATXN2; (-) strand; PAM type: NRG; PAM sequence: AGG
cattgcaacctctgcctccc

SEQ ID NO: 33123 - DNA, 20 bp, Artificial Sequence
  Description of Artificial Sequence: Synthetic oligonucleotide
  Target: ATXN2; (-) strand; PAM type: NRG; PAM sequence: CAG
tcattgcaacctctgcctcc

SEQ ID NO: 33124 - DNA, 20 bp, Artificial Sequence
  Description of Artificial Sequence: Synthetic oligonucleotide
  Target: ATXN2; (-) strand; PAM type: NRG; PAM sequence: CGG
ggagtgcagtggtgcgatct

SEQ ID NO: 33125 - DNA, 20 bp, Artificial Sequence
  Description of Artificial Sequence: Synthetic oligonucleotide
  Target: ATXN2; (-) strand; PAM type: NRG; PAM sequence: TGG
tcacctaggctggagtgcag

SEQ ID NO: 33126 - DNA, 20 bp, Artificial Sequence
  Description of Artificial Sequence: Synthetic oligonucleotide
  Target: ATXN2; (-) strand; PAM type: NRG; PAM sequence: CAG
ctgtcacctaggctggagtg

SEQ ID NO: 33127 - DNA, 20 bp, Artificial Sequence
  Description of Artificial Sequence: Synthetic oligonucleotide
  Target: ATXN2; (-) strand; PAM type: NRG; PAM sequence: GAG
tcgctctgtcacctaggctg

SEQ ID NO: 33128 - DNA, 20 bp, Artificial Sequence
  Description of Artificial Sequence: Synthetic oligonucleotide
  Target: ATXN2; (-) strand; PAM type: NRG; PAM sequence: TGG
tctcgctctgtcacctaggc

SEQ ID NO: 33129 - DNA, 20 bp, Artificial Sequence
  Description of Artificial Sequence: Synthetic oligonucleotide
  Target: ATXN2; (-) strand; PAM type: NRG; PAM sequence: AGG
ggagtctcgctctgtcacct

SEQ ID NO: 33130 - DNA, 20 bp, Artificial Sequence
  Description of Artificial Sequence: Synthetic oligonucleotide
  Target: ATXN2; (-) strand; PAM type: NRG; PAM sequence: TAG
cggagtctcgctctgtcacc

SEQ ID NO: 33131 - DNA, 20 bp, Artificial Sequence
  Description of Artificial Sequence: Synthetic oligonucleotide
  Target: ATXN2; (-) strand; PAM type: NRG; PAM sequence: GAG
tttcttttttttccgagacg

SEQ ID NO: 33132 - DNA, 20 bp, Artificial Sequence
  Description of Artificial Sequence: Synthetic oligonucleotide
  Target: ATXN2; (-) strand; PAM type: NRG; PAM sequence: CGG
tttttcttttttttccgaga

SEQ ID NO: 33133 - DNA, 20 bp, Artificial Sequence
  Description of Artificial Sequence: Synthetic oligonucleotide
  Target: ATXN2; (-) strand; PAM type: NRG; PAM sequence: GAG
tttttttttcttttttttcc

SEQ ID NO: 33134 - DNA, 20 bp, Artificial Sequence
  Description of Artificial Sequence: Synthetic oligonucleotide
  Target: ATXN2; (-) strand; PAM type: NRG; PAM sequence: CAG
ttgtttatgaaaacttgtca

SEQ ID NO: 33135 - DNA, 20 bp, Artificial Sequence
  Description of Artificial Sequence: Synthetic oligonucleotide
  Target: ATXN2; (-) strand; PAM type: NRG; PAM sequence: GGG
ggtattttttttatgagtct

SEQ ID NO: 33136 - DNA, 20 bp, Artificial Sequence
  Description of Artificial Sequence: Synthetic oligonucleotide
  Target: ATXN2; (-) strand; PAM type: NRG; PAM sequence: TGG
tggtattttttttatgagtc

SEQ ID NO: 33137 - DNA, 20 bp, Artificial Sequence
  Description of Artificial Sequence: Synthetic oligonucleotide
  Target: ATXN2; (-) strand; PAM type: NRG; PAM sequence: GAG
tggtttggtattttttttat

SEQ ID NO: 33138 - DNA, 20 bp, Artificial Sequence
  Description of Artificial Sequence: Synthetic oligonucleotide
  Target: ATXN2; (-) strand; PAM type: NRG; PAM sequence: TGG
ccaccgcgtccggcctggtt

SEQ ID NO: 33139 - DNA, 20 bp, Artificial Sequence
  Description of Artificial Sequence: Synthetic oligonucleotide
  Target: ATXN2; (-) strand; PAM type: NRG; PAM sequence: TGG
atgagccaccgcgtccggcc

SEQ ID NO: 33140 - DNA, 20 bp, Artificial Sequence
  Description of Artificial Sequence: Synthetic oligonucleotide
  Target: ATXN2; (-) strand; PAM type: NRG; PAM sequence: CGG
taggcatgagccaccgcgtc

SEQ ID NO: 33141 - DNA, 20 bp, Artificial Sequence
  Description of Artificial Sequence: Synthetic oligonucleotide
  Target: ATXN2; (-) strand; PAM type: NRG; PAM sequence: GAG
agtgctgggattataggcat

SEQ ID NO: 33142 - DNA, 20 bp, Artificial Sequence
  Description of Artificial Sequence: Synthetic oligonucleotide
  Target: ATXN2; (-) strand; PAM type: NRG; PAM sequence: AGG
tcccaaagtgctgggattat

SEQ ID NO: 33143 - DNA, 20 bp, Artificial Sequence
  Description of Artificial Sequence: Synthetic oligonucleotide
  Target: ATXN2; (-) strand; PAM type: NRG; PAM sequence: TAG
ttcccaaagtgctgggatta

SEQ ID NO: 33144 - DNA, 20 bp, Artificial Sequence
  Description of Artificial Sequence: Synthetic oligonucleotide
  Target: ATXN2; (-) strand; PAM type: NRG; PAM sequence: GGG
cctcggcttcccaaagtgct

SEQ ID NO: 33145 - DNA, 20 bp, Artificial Sequence
  Description of Artificial Sequence: Synthetic oligonucleotide
  Target: ATXN2; (-) strand; PAM type: NRG; PAM sequence: TGG
gcctcggcttcccaaagtgc

SEQ ID NO: 33146 - DNA, 20 bp, Artificial Sequence
  Description of Artificial Sequence: Synthetic oligonucleotide
  Target: ATXN2; (-) strand; PAM type: NRG; PAM sequence: AAG
ctgcccgcctcggcttccca

SEQ ID NO: 33147 - DNA, 20 bp, Artificial Sequence
  Description of Artificial Sequence: Synthetic oligonucleotide
  Target: ATXN2; (-) strand; PAM type: NRG; PAM sequence: CGG
acctcttgatctgcccgcct

SEQ ID NO: 33148 - DNA, 20 bp, Artificial Sequence
  Description of Artificial Sequence: Synthetic oligonucleotide
  Target: ATXN2; (-) strand; PAM type: NRG; PAM sequence: AGG
ggggtttcactgtgttagcc

SEQ ID NO: 33149 - DNA, 20 bp, Artificial Sequence
  Description of Artificial Sequence: Synthetic oligonucleotide
  Target: ATXN2; (-) strand; PAM type: NRG; PAM sequence: CAG
tggggtttcactgtgttagc

SEQ ID NO: 33150 - DNA, 20 bp, Artificial Sequence
  Description of Artificial Sequence: Synthetic oligonucleotide
  Target: ATXN2; (-) strand; PAM type: NRG; PAM sequence: TAG
gagatggggtttcactgtgt

SEQ ID NO: 33151 - DNA, 20 bp, Artificial Sequence
  Description of Artificial Sequence: Synthetic oligonucleotide
  Target: ATXN2; (-) strand; PAM type: NRG; PAM sequence: GGG
atgcattttaagtagagatg

SEQ ID NO: 33152 - DNA, 20 bp, Artificial Sequence
  Description of Artificial Sequence: Synthetic oligonucleotide
  Target: ATXN2; (-) strand; PAM type: NRG; PAM sequence: GGG
tatgcattttaagtagagat

SEQ ID NO: 33153 - DNA, 20 bp, Artificial Sequence
  Description of Artificial Sequence: Synthetic oligonucleotide
  Target: ATXN2; (-) strand; PAM type: NRG; PAM sequence: TGG
ttatgcattttaagtagaga

SEQ ID NO: 33154 - DNA, 20 bp, Artificial Sequence
  Description of Artificial Sequence: Synthetic oligonucleotide
  Target: ATXN2; (-) strand; PAM type: NRG; PAM sequence: GAG
ttttttatgcattttaagta

SEQ ID NO: 33155 - DNA, 20 bp, Artificial Sequence
  Description of Artificial Sequence: Synthetic oligonucleotide
  Target: ATXN2; (-) strand; PAM type: NRG; PAM sequence: TAG
ttttttttatgcattttaag

SEQ ID NO: 33156 - DNA, 20 bp, Artificial Sequence
  Description of Artificial Sequence: Synthetic oligonucleotide
  Target: ATXN2; (-) strand; PAM type: NRG; PAM sequence: AAG
taattttttttatgcatttt

SEQ ID NO: 33157 - DNA, 20 bp, Artificial Sequence
  Description of Artificial Sequence: Synthetic oligonucleotide
  Target: ATXN2; (-) strand; PAM type: NRG; PAM sequence: CGG
catgcgcccgccaccatgcc

SEQ ID NO: 33158 - DNA, 20 bp, Artificial Sequence
  Description of Artificial Sequence: Synthetic oligonucleotide
  Target: ATXN2; (-) strand; PAM type: NRG; PAM sequence: GGG
cctcagcctcccgagtagct

SEQ ID NO: 33159 - DNA, 20 bp, Artificial Sequence
  Description of Artificial Sequence: Synthetic oligonucleotide
  Target: ATXN2; (-) strand; PAM type: NRG; PAM sequence: TGG
gcctcagcctcccgagtagc

SEQ ID NO: 33160 - DNA, 20 bp, Artificial Sequence
  Description of Artificial Sequence: Synthetic oligonucleotide
  Target: ATXN2; (-) strand; PAM type: NRG; PAM sequence: TAG
tcctgcctcagcctcccgag

SEQ ID NO: 33161 - DNA, 20 bp, Artificial Sequence
  Description of Artificial Sequence: Synthetic oligonucleotide
  Target: ATXN2; (-) strand; PAM type: NRG; PAM sequence: GAG
ttctcctgcctcagcctccc

SEQ ID NO: 33162 - DNA, 20 bp, Artificial Sequence
  Description of Artificial Sequence: Synthetic oligonucleotide
  Target: ATXN2; (-) strand; PAM type: NRG; PAM sequence: CAG
ttcatgccattctcctgcct

SEQ ID NO: 33163 - DNA, 20 bp, Artificial Sequence
  Description of Artificial Sequence: Synthetic oligonucleotide
  Target: ATXN2; (-) strand; PAM type: NRG; PAM sequence: AGG
cactgcaagctccacctccc

SEQ ID NO: 33164 - DNA, 20 bp, Artificial Sequence
  Description of Artificial Sequence: Synthetic oligonucleotide
  Target: ATXN2; (-) strand; PAM type: NRG; PAM sequence: CAG
tcactgcaagctccacctcc

SEQ ID NO: 33165 - DNA, 20 bp, Artificial Sequence
  Description of Artificial Sequence: Synthetic oligonucleotide
  Target: ATXN2; (-) strand; PAM type: NRG; PAM sequence: AAG
acacaatctcagctcactgc

SEQ ID NO: 33166 - DNA, 20 bp, Artificial Sequence
  Description of Artificial Sequence: Synthetic oligonucleotide
  Target: ATXN2; (-) strand; PAM type: NRG; PAM sequence: CAG
agagtgcggtgacacaatct

SEQ ID NO: 33167 - DNA, 20 bp, Artificial Sequence
  Description of Artificial Sequence: Synthetic oligonucleotide
  Target: ATXN2; (-) strand; PAM type: NRG; PAM sequence: CGG
ctgtcgcccaggctagagtg

SEQ ID NO: 33168 - DNA, 20 bp, Artificial Sequence
  Description of Artificial Sequence: Synthetic oligonucleotide
  Target: ATXN2; (-) strand; PAM type: NRG; PAM sequence: GAG
tcgctctgtcgcccaggcta

SEQ ID NO: 33169 - DNA, 20 bp, Artificial Sequence
  Description of Artificial Sequence: Synthetic oligonucleotide
  Target: ATXN2; (-) strand; PAM type: NRG; PAM sequence: TAG
tctcgctctgtcgcccaggc

SEQ ID NO: 33170 - DNA, 20 bp, Artificial Sequence
  Description of Artificial Sequence: Synthetic oligonucleotide
  Target: ATXN2; (-) strand; PAM type: NRG; PAM sequence: AGG
gaaatctcgctctgtcgccc

SEQ ID NO: 33171 - DNA, 20 bp, Artificial Sequence
  Description of Artificial Sequence: Synthetic oligonucleotide
  Target: ATXN2; (-) strand; PAM type: NRG; PAM sequence: CAG
agaaatctcgctctgtcgcc

SEQ ID NO: 33172 - DNA, 20 bp, Artificial Sequence
  Description of Artificial Sequence: Synthetic oligonucleotide
  Target: ATXN2; (-) strand; PAM type: NRG; PAM sequence: GAG
tttttttttttttttttttt

SEQ ID NO: 33173 - DNA, 20 bp, Artificial Sequence
  Description of Artificial Sequence: Synthetic oligonucleotide
  Target: ATXN2; (-) strand; PAM type: NRG; PAM sequence: TAG
ccaccgtgaccagtttggtt

SEQ ID NO: 33174 - DNA, 20 bp, Artificial Sequence
  Description of Artificial Sequence: Synthetic oligonucleotide
  Target: ATXN2; (-) strand; PAM type: NRG; PAM sequence: TGG
gtgagccaccgtgaccagtt

SEQ ID NO: 33175 - DNA, 20 bp, Artificial Sequence
  Description of Artificial Sequence: Synthetic oligonucleotide
  Target: ATXN2; (-) strand; PAM type: NRG; PAM sequence: CAG
caggtgtgagccaccgtgac

SEQ ID NO: 33176 - DNA, 20 bp, Artificial Sequence
  Description of Artificial Sequence: Synthetic oligonucleotide
  Target: ATXN2; (-) strand; PAM type: NRG; PAM sequence: GAG
agtgctgggattacaggtgt

SEQ ID NO: 33177 - DNA, 20 bp, Artificial Sequence
  Description of Artificial Sequence: Synthetic oligonucleotide
  Target: ATXN2; (-) strand; PAM type: NRG; PAM sequence: AGG
tcccaaagtgctgggattac

SEQ ID NO: 33178 - DNA, 20 bp, Artificial Sequence
  Description of Artificial Sequence: Synthetic oligonucleotide
  Target: ATXN2; (-) strand; PAM type: NRG; PAM sequence: CAG
ctcccaaagtgctgggatta

SEQ ID NO: 33179 - DNA, 20 bp, Artificial Sequence
  Description of Artificial Sequence: Synthetic oligonucleotide
  Target: ATXN2; (-) strand; PAM type: NRG; PAM sequence: GGG
cctcgtcctcccaaagtgct

SEQ ID NO: 33180 - DNA, 20 bp, Artificial Sequence
  Description of Artificial Sequence: Synthetic oligonucleotide
  Target: ATXN2; (-) strand; PAM type: NRG; PAM sequence: TGG
gcctcgtcctcccaaagtgc

SEQ ID NO: 33181 - DNA, 20 bp, Artificial Sequence
  Description of Artificial Sequence: Synthetic oligonucleotide
  Target: ATXN2; (-) strand; PAM type: NRG; PAM sequence: AAG
ccacccgcctcgtcctccca

SEQ ID NO: 33182 - DNA, 20 bp, Artificial Sequence
  Description of Artificial Sequence: Synthetic oligonucleotide
  Target: ATXN2; (-) strand; PAM type: NRG; PAM sequence: TAG
tggtctcgaactcctgacct

SEQ ID NO: 33183 - DNA, 20 bp, Artificial Sequence
  Description of Artificial Sequence: Synthetic oligonucleotide
  Target: ATXN2; (-) strand; PAM type: NRG; PAM sequence: TGG
tttcatcatgttggccaggc

SEQ ID NO: 33184 - DNA, 20 bp, Artificial Sequence
  Description of Artificial Sequence: Synthetic oligonucleotide
  Target: ATXN2; (-) strand; PAM type: NRG; PAM sequence: AGG
ggggtttcatcatgttggcc

SEQ ID NO: 33185 - DNA, 20 bp, Artificial Sequence
  Description of Artificial Sequence: Synthetic oligonucleotide
  Target: ATXN2; (-) strand; PAM type: NRG; PAM sequence: CAG
tggggtttcatcatgttggc

SEQ ID NO: 33186 - DNA, 20 bp, Artificial Sequence
  Description of Artificial Sequence: Synthetic oligonucleotide
  Target: ATXN2; (-) strand; PAM type: NRG; PAM sequence: TGG
gagatggggtttcatcatgt

SEQ ID NO: 33187 - DNA, 20 bp, Artificial Sequence
  Description of Artificial Sequence: Synthetic oligonucleotide
  Target: ATXN2; (-) strand; PAM type: NRG; PAM sequence: GGG
ttgtatttttagtagagatg

SEQ ID NO: 33188 - DNA, 20 bp, Artificial Sequence
  Description of Artificial Sequence: Synthetic oligonucleotide
  Target: ATXN2; (-) strand; PAM type: NRG; PAM sequence: GGG
tttgtatttttagtagagat

SEQ ID NO: 33189 - DNA, 20 bp, Artificial Sequence
  Description of Artificial Sequence: Synthetic oligonucleotide
  Target: ATXN2; (-) strand; PAM type: NRG; PAM sequence: TGG
ttttgtatttttagtagaga

SEQ ID NO: 33190 - DNA, 20 bp, Artificial Sequence
  Description of Artificial Sequence: Synthetic oligonucleotide
  Target: ATXN2; (-) strand; PAM type: NRG; PAM sequence: GAG
taatttttgtatttttagta

SEQ ID NO: 33191 - DNA, 20 bp, Artificial Sequence
  Description of Artificial Sequence: Synthetic oligonucleotide
  Target: ATXN2; (-) strand; PAM type: NRG; PAM sequence: TAG
gctaatttttgtatttttag

SEQ ID NO: 33192 - DNA, 20 bp, Artificial Sequence
  Description of Artificial Sequence: Synthetic oligonucleotide
  Target: ATXN2; (-) strand; PAM type: NRG; PAM sequence: TAG
ctggctaatttttgtatttt

SEQ ID NO: 33193 - DNA, 20 bp, Artificial Sequence
  Description of Artificial Sequence: Synthetic oligonucleotide
  Target: ATXN2; (-) strand; PAM type: NRG; PAM sequence: TGG
cagctgtgtgccaccatgcc

SEQ ID NO: 33194 - DNA, 20 bp, Artificial Sequence
  Description of Artificial Sequence: Synthetic oligonucleotide
  Target: ATXN2; (-) strand; PAM type: NRG; PAM sequence: CAG
ctcctgagtagctgggataa

SEQ ID NO: 33195 - DNA, 20 bp, Artificial Sequence
  Description of Artificial Sequence: Synthetic oligonucleotide
  Target: ATXN2; (-) strand; PAM type: NRG; PAM sequence: GGG
cctcagcctcctgagtagct

SEQ ID NO: 33196 - DNA, 20 bp, Artificial Sequence
  Description of Artificial Sequence: Synthetic oligonucleotide
  Target: ATXN2; (-) strand; PAM type: NRG; PAM sequence: TGG
gcctcagcctcctgagtagc

SEQ ID NO: 33197 - DNA, 20 bp, Artificial Sequence
  Description of Artificial Sequence: Synthetic oligonucleotide
  Target: ATXN2; (-) strand; PAM type: NRG; PAM sequence: TAG
tcctgcctcagcctcctgag

SEQ ID NO: 33198 - DNA, 20 bp, Artificial Sequence
  Description of Artificial Sequence: Synthetic oligonucleotide
  Target: ATXN2; (-) strand; PAM type: NRG; PAM sequence: GAG
ttgtcctgcctcagcctcct

SEQ ID NO: 33199 - DNA, 20 bp, Artificial Sequence
  Description of Artificial Sequence: Synthetic oligonucleotide
  Target: ATXN2; (-) strand; PAM type: NRG; PAM sequence: CAG
ttcaagtgattgtcctgcct

SEQ ID NO: 33200 - DNA, 20 bp, Artificial Sequence
  Description of Artificial Sequence: Synthetic oligonucleotide
  Target: ATXN2; (-) strand; PAM type: NRG; PAM sequence: AAG
aacctccgcctcctaggttc

SEQ ID NO: 33201 - DNA, 20 bp, Artificial Sequence
  Description of Artificial Sequence: Synthetic oligonucleotide
  Target: ATXN2; (-) strand; PAM type: NRG; PAM sequence: AGG
tactgcaacctccgcctcct

SEQ ID NO: 33202 - DNA, 20 bp, Artificial Sequence
  Description of Artificial Sequence: Synthetic oligonucleotide
  Target: ATXN2; (-) strand; PAM type: NRG; PAM sequence: TAG
ttactgcaacctccgcctcc

SEQ ID NO: 33203 - DNA, 20 bp, Artificial Sequence
  Description of Artificial Sequence: Synthetic oligonucleotide
  Target: ATXN2; (-) strand; PAM type: NRG; PAM sequence: CGG
ggaatgcagtgatgtgatct

SEQ ID NO: 33204 - DNA, 20 bp, Artificial Sequence
  Description of Artificial Sequence: Synthetic oligonucleotide
  Target: ATXN2; (-) strand; PAM type: NRG; PAM sequence: CAG
ctgtcacccaggctggaatg

SEQ ID NO: 33205 - DNA, 20 bp, Artificial Sequence
  Description of Artificial Sequence: Synthetic oligonucleotide
  Target: ATXN2; (-) strand; PAM type: NRG; PAM sequence: TGG
tcttaccctgtcacccaggc

SEQ ID NO: 33206 - DNA, 20 bp, Artificial Sequence
  Description of Artificial Sequence: Synthetic oligonucleotide
  Target: ATXN2; (-) strand; PAM type: NRG; PAM sequence: AGG
aggatcttaccctgtcaccc

SEQ ID NO: 33207 - DNA, 20 bp, Artificial Sequence
  Description of Artificial Sequence: Synthetic oligonucleotide
  Target: ATXN2; (-) strand; PAM type: NRG; PAM sequence: CAG
caggatcttaccctgtcacc

SEQ ID NO: 33208 - DNA, 20 bp, Artificial Sequence
  Description of Artificial Sequence: Synthetic oligonucleotide
  Target: ATXN2; (-) strand; PAM type: NRG; PAM sequence: AGG
tgtttgtgtgtgtgtgttgc

SEQ ID NO: 33209 - DNA, 20 bp, Artificial Sequence
  Description of Artificial Sequence: Synthetic oligonucleotide
  Target: ATXN2; (-) strand; PAM type: NRG; PAM sequence: CAG
ttgtttgtgtgtgtgtgttg

SEQ ID NO: 33210 - DNA, 20 bp, Artificial Sequence
  Description of Artificial Sequence: Synthetic oligonucleotide
  Target: ATXN2; (-) strand; PAM type: NRG; PAM sequence: TGG
tgtgagccactatgcctggc

SEQ ID NO: 33211 - DNA, 20 bp, Artificial Sequence
  Description of Artificial Sequence: Synthetic oligonucleotide
  Target: ATXN2; (-) strand; PAM type: NRG; PAM sequence: TGG
caggtgtgagccactatgcc

SEQ ID NO: 33212 - DNA, 20 bp, Artificial Sequence
  Description of Artificial Sequence: Synthetic oligonucleotide
  Target: ATXN2; (-) strand; PAM type: NRG; PAM sequence: GAG
ggtgctgggattacaggtgt

SEQ ID NO: 33213 - DNA, 20 bp, Artificial Sequence
  Description of Artificial Sequence: Synthetic oligonucleotide
  Target: ATXN2; (-) strand; PAM type: NRG; PAM sequence: AGG
tcccaaggtgctgggattac

SEQ ID NO: 33214 - DNA, 20 bp, Artificial Sequence
  Description of Artificial Sequence: Synthetic oligonucleotide
  Target: ATXN2; (-) strand; PAM type: NRG; PAM sequence: CAG
ctcccaaggtgctgggatta

SEQ ID NO: 33215 - DNA, 20 bp, Artificial Sequence
  Description of Artificial Sequence: Synthetic oligonucleotide
  Target: ATXN2; (-) strand; PAM type: NRG; PAM sequence: GGG
ccttggcctcccaaggtgct

SEQ ID NO: 33216 - DNA, 20 bp, Artificial Sequence
  Description of Artificial Sequence: Synthetic oligonucleotide
  Target: ATXN2; (-) strand; PAM type: NRG; PAM sequence: TGG
tccttggcctcccaaggtgc

SEQ ID NO: 33217 - DNA, 20 bp, Artificial Sequence
  Description of Artificial Sequence: Synthetic oligonucleotide
  Target: ATXN2; (-) strand; PAM type: NRG; PAM sequence: AGG
ttgccctccttggcctccca

SEQ ID NO: 33218 - DNA, 20 bp, Artificial Sequence
  Description of Artificial Sequence: Synthetic oligonucleotide
  Target: ATXN2; (-) strand; PAM type: NRG; PAM sequence: AAG
tttgccctccttggcctccc

SEQ ID NO: 33219 - DNA, 20 bp, Artificial Sequence
  Description of Artificial Sequence: Synthetic oligonucleotide
  Target: ATXN2; (-) strand; PAM type: NRG; PAM sequence: TGG
ctcaaacaatttgccctcct

SEQ ID NO: 33220 - DNA, 20 bp, Artificial Sequence
  Description of Artificial Sequence: Synthetic oligonucleotide
  Target: ATXN2; (-) strand; PAM type: NRG; PAM sequence: TGG
attttacctgttgcccagga

SEQ ID NO: 33221 - DNA, 20 bp, Artificial Sequence
  Description of Artificial Sequence: Synthetic oligonucleotide
  Target: ATXN2; (-) strand; PAM type: NRG; PAM sequence: AGG
agagattttacctgttgccc

SEQ ID NO: 33222 - DNA, 20 bp, Artificial Sequence
  Description of Artificial Sequence: Synthetic oligonucleotide
  Target: ATXN2; (-) strand; PAM type: NRG; PAM sequence: CAG
cagagattttacctgttgcc

SEQ ID NO: 33223 - DNA, 20 bp, Artificial Sequence
  Description of Artificial Sequence: Synthetic oligonucleotide
  Target: ATXN2; (-) strand; PAM type: NRG; PAM sequence: GAG
gtttttattttgtagggaca

SEQ ID NO: 33224 - DNA, 20 bp, Artificial Sequence
  Description of Artificial Sequence: Synthetic oligonucleotide
  Target: ATXN2; (-) strand; PAM type: NRG; PAM sequence: CAG
ttgtttttattttgtaggga

SEQ ID NO: 33225 - DNA, 20 bp, Artificial Sequence
  Description of Artificial Sequence: Synthetic oligonucleotide
  Target: ATXN2; (-) strand; PAM type: NRG; PAM sequence: GGG
ttgtttgtttttattttgta

SEQ ID NO: 33226 - DNA, 20 bp, Artificial Sequence
  Description of Artificial Sequence: Synthetic oligonucleotide
  Target: ATXN2; (-) strand; PAM type: NRG; PAM sequence: AGG
tttgtttgtttttattttgt

SEQ ID NO: 33227 - DNA, 20 bp, Artificial Sequence
  Description of Artificial Sequence: Synthetic oligonucleotide
  Target: ATXN2; (-) strand; PAM type: NRG; PAM sequence: TAG
ttttgtttgtttttattttg

SEQ ID NO: 33228 - DNA, 20 bp, Artificial Sequence
  Description of Artificial Sequence: Synthetic oligonucleotide
  Target: ATXN2; (-) strand; PAM type: NRG; PAM sequence: TAG
caggcataagccactgcgcc

SEQ ID NO: 33229 - DNA, 20 bp, Artificial Sequence
  Description of Artificial Sequence: Synthetic oligonucleotide
  Target: ATXN2; (-) strand; PAM type: NRG; PAM sequence: AAG
agtgctggaattacaggcat

SEQ ID NO: 33230 - DNA, 20 bp, Artificial Sequence
  Description of Artificial Sequence: Synthetic oligonucleotide
  Target: ATXN2; (-) strand; PAM type: NRG; PAM sequence: AGG
tcctgaagtgctggaattac

SEQ ID NO: 33231 - DNA, 20 bp, Artificial Sequence
  Description of Artificial Sequence: Synthetic oligonucleotide
  Target: ATXN2; (-) strand; PAM type: NRG; PAM sequence: CAG
ctcctgaagtgctggaatta

SEQ ID NO: 33232 - DNA, 20 bp, Artificial Sequence
  Description of Artificial Sequence: Synthetic oligonucleotide
  Target: ATXN2; (-) strand; PAM type: NRG; PAM sequence: TGG
accttggcctcctgaagtgc

SEQ ID NO: 33233 - DNA, 20 bp, Artificial Sequence
  Description of Artificial Sequence: Synthetic oligonucleotide
  Target: ATXN2; (-) strand; PAM type: NRG; PAM sequence: AAG
ccatataccttggcctcctg

SEQ ID NO: 33234 - DNA, 20 bp, Artificial Sequence
  Description of Artificial Sequence: Synthetic oligonucleotide
  Target: ATXN2; (-) strand; PAM type: NRG; PAM sequence: TGG
ctcaggtgatccatatacct

SEQ ID NO: 33235 - DNA, 20 bp, Artificial Sequence
  Description of Artificial Sequence: Synthetic oligonucleotide
  Target: ATXN2; (-) strand; PAM type: NRG; PAM sequence: AGG
ggtctcgaactcccgacctc

SEQ ID NO: 33236 - DNA, 20 bp, Artificial Sequence
  Description of Artificial Sequence: Synthetic oligonucleotide
  Target: ATXN2; (-) strand; PAM type: NRG; PAM sequence: CAG
tggtctcgaactcccgacct

SEQ ID NO: 33237 - DNA, 20 bp, Artificial Sequence
  Description of Artificial Sequence: Synthetic oligonucleotide
  Target: ATXN2; (-) strand; PAM type: NRG; PAM sequence: TGG
ttttatcatgttggccaggc

SEQ ID NO: 33238 - DNA, 20 bp, Artificial Sequence
  Description of Artificial Sequence: Synthetic oligonucleotide
  Target: ATXN2; (-) strand; PAM type: NRG; PAM sequence: AGG
ggggttttatcatgttggcc

SEQ ID NO: 33239 - DNA, 20 bp, Artificial Sequence
  Description of Artificial Sequence: Synthetic oligonucleotide
  Target: ATXN2; (-) strand; PAM type: NRG; PAM sequence: CAG
tggggttttatcatgttggc

SEQ ID NO: 33240 - DNA, 20 bp, Artificial Sequence
  Description of Artificial Sequence: Synthetic oligonucleotide
  Target: ATXN2; (-) strand; PAM type: NRG; PAM sequence: TGG
gagatggggttttatcatgt

SEQ ID NO: 33241 - DNA, 20 bp, Artificial Sequence
  Description of Artificial Sequence: Synthetic oligonucleotide
  Target: ATXN2; (-) strand; PAM type: NRG; PAM sequence: GGG
ttgtattattggtagagatg

SEQ ID NO: 33242 - DNA, 20 bp, Artificial Sequence
  Description of Artificial Sequence: Synthetic oligonucleotide
  Target: ATXN2; (-) strand; PAM type: NRG; PAM sequence: GGG
tttgtattattggtagagat

SEQ ID NO: 33243 - DNA, 20 bp, Artificial Sequence
  Description of Artificial Sequence: Synthetic oligonucleotide
  Target: ATXN2; (-) strand; PAM type: NRG; PAM sequence: TGG
ttttgtattattggtagaga

SEQ ID NO: 33244 - DNA, 20 bp, Artificial Sequence
  Description of Artificial Sequence: Synthetic oligonucleotide
  Target: ATXN2; (-) strand; PAM type: NRG; PAM sequence: GAG
taatttttgtattattggta

SEQ ID NO: 33245 - DNA, 20 bp, Artificial Sequence
  Description of Artificial Sequence: Synthetic oligonucleotide
  Target: ATXN2; (-) strand; PAM type: NRG; PAM sequence: TAG
gctaatttttgtattattgg

SEQ ID NO: 33246 - DNA, 20 bp, Artificial Sequence
  Description of Artificial Sequence: Synthetic oligonucleotide
  Target: ATXN2; (-) strand; PAM type: NRG; PAM sequence: TGG
ctggctaatttttgtattat

SEQ ID NO: 33247 - DNA, 20 bp, Artificial Sequence
  Description of Artificial Sequence: Synthetic oligonucleotide
  Target: ATXN2; (-) strand; PAM type: NRG; PAM sequence: TGG
taggcatgcgccactacacc

SEQ ID NO: 33248 - DNA, 20 bp, Artificial Sequence
  Description of Artificial Sequence: Synthetic oligonucleotide
  Target: ATXN2; (-) strand; PAM type: NRG; PAM sequence: AGG
tcccgagtagctgggattat

SEQ ID NO: 33249 - DNA, 20 bp, Artificial Sequence
  Description of Artificial Sequence: Synthetic oligonucleotide
  Target: ATXN2; (-) strand; PAM type: NRG; PAM sequence: TAG
ctcccgagtagctgggatta

SEQ ID NO: 33250 - DNA, 20 bp, Artificial Sequence
  Description of Artificial Sequence: Synthetic oligonucleotide
  Target: ATXN2; (-) strand; PAM type: NRG; PAM sequence: GGG
cctcagcctcccgagtagct

SEQ ID NO: 33251 - DNA, 20 bp, Artificial Sequence
  Description of Artificial Sequence: Synthetic oligonucleotide
  Target: ATXN2; (-) strand; PAM type: NRG; PAM sequence: TGG
gcctcagcctcccgagtagc

SEQ ID NO: 33252 - DNA, 20 bp, Artificial Sequence
  Description of Artificial Sequence: Synthetic oligonucleotide
  Target: ATXN2; (-) strand; PAM type: NRG; PAM sequence: TAG
tcatgcctcagcctcccgag

SEQ ID NO: 33253 - DNA, 20 bp, Artificial Sequence
  Description of Artificial Sequence: Synthetic oligonucleotide
  Target: ATXN2; (-) strand; PAM type: NRG; PAM sequence: GAG
ttctcatgcctcagcctccc

SEQ ID NO: 33254 - DNA, 20 bp, Artificial Sequence
  Description of Artificial Sequence: Synthetic oligonucleotide
  Target: ATXN2; (-) strand; PAM type: NRG; PAM sequence: CAG
ttcaaatgattctcatgcct

SEQ ID NO: 33255 - DNA, 20 bp, Artificial Sequence
  Description of Artificial Sequence: Synthetic oligonucleotide
  Target: ATXN2; (-) strand; PAM type: NRG; PAM sequence: CAG
gcagtggcaggatatcggct

SEQ ID NO: 33256 - DNA, 20 bp, Artificial Sequence
  Description of Artificial Sequence: Synthetic oligonucleotide
  Target: ATXN2; (-) strand; PAM type: NRG; PAM sequence: CGG
ggggtgcagtggcaggatat

SEQ ID NO: 33257 - DNA, 20 bp, Artificial Sequence
  Description of Artificial Sequence: Synthetic oligonucleotide
  Target: ATXN2; (-) strand; PAM type: NRG; PAM sequence: AGG
ctagggtggggtgcagtggc

SEQ ID NO: 33258 - DNA, 20 bp, Artificial Sequence
  Description of Artificial Sequence: Synthetic oligonucleotide
  Target: ATXN2; (-) strand; PAM type: NRG; PAM sequence: CAG
cctagggtggggtgcagtgg

SEQ ID NO: 33259 - DNA, 20 bp, Artificial Sequence
  Description of Artificial Sequence: Synthetic oligonucleotide
  Target: ATXN2; (-) strand; PAM type: NRG; PAM sequence: TGG
ttgcctagggtggggtgcag

SEQ ID NO: 33260 - DNA, 20 bp, Artificial Sequence
  Description of Artificial Sequence: Synthetic oligonucleotide
  Target: ATXN2; (-) strand; PAM type: NRG; PAM sequence: CAG
ctgttgcctagggtggggtg

SEQ ID NO: 33261 - DNA, 20 bp, Artificial Sequence
  Description of Artificial Sequence: Synthetic oligonucleotide
  Target: ATXN2; (-) strand; PAM type: NRG; PAM sequence: GGG
tcactctgttgcctagggtg

SEQ ID NO: 33262 - DNA, 20 bp, Artificial Sequence
  Description of Artificial Sequence: Synthetic oligonucleotide
  Target: ATXN2; (-) strand; PAM type: NRG; PAM sequence: GGG
ttcactctgttgcctagggt

SEQ ID NO: 33263 - DNA, 20 bp, Artificial Sequence
  Description of Artificial Sequence: Synthetic oligonucleotide
  Target: ATXN2; (-) strand; PAM type: NRG; PAM sequence: TGG
tttcactctgttgcctaggg

SEQ ID NO: 33264 - DNA, 20 bp, Artificial Sequence
  Description of Artificial Sequence: Synthetic oligonucleotide
  Target: ATXN2; (-) strand; PAM type: NRG; PAM sequence: GGG
ttgtttcactctgttgccta

SEQ ID NO: 33265 - DNA, 20 bp, Artificial Sequence
  Description of Artificial Sequence: Synthetic oligonucleotide
  Target: ATXN2; (-) strand; PAM type: NRG; PAM sequence: AGG
tttgtttcactctgttgcct

SEQ ID NO: 33266 - DNA, 20 bp, Artificial Sequence
  Description of Artificial Sequence: Synthetic oligonucleotide
  Target: ATXN2; (-) strand; PAM type: NRG; PAM sequence: TAG
ttttgtttcactctgttgcc

SEQ ID NO: 33267 - DNA, 20 bp, Artificial Sequence
  Description of Artificial Sequence: Synthetic oligonucleotide
  Target: ATXN2; (-) strand; PAM type: NRG; PAM sequence: CAG
caggcatgcgccactatgcc

SEQ ID NO: 33268 - DNA, 20 bp, Artificial Sequence
  Description of Artificial Sequence: Synthetic oligonucleotide
  Target: ATXN2; (-) strand; PAM type: NRG; PAM sequence: AGG
tcctgagtagctgggaccac

SEQ ID NO: 33269 - DNA, 20 bp, Artificial Sequence
  Description of Artificial Sequence: Synthetic oligonucleotide
  Target: ATXN2; (-) strand; PAM type: NRG; PAM sequence: CAG
ctcctgagtagctgggacca

SEQ ID NO: 33270 - DNA, 20 bp, Artificial Sequence
  Description of Artificial Sequence: Synthetic oligonucleotide
  Target: ATXN2; (-) strand; PAM type: NRG; PAM sequence: GGG
tctcagcctcctgagtagct

SEQ ID NO: 33271 - DNA, 20 bp, Artificial Sequence
  Description of Artificial Sequence: Synthetic oligonucleotide
  Target: ATXN2; (-) strand; PAM type: NRG; PAM sequence: TGG
atctcagcctcctgagtagc

SEQ ID NO: 33272 - DNA, 20 bp, Artificial Sequence
  Description of Artificial Sequence: Synthetic oligonucleotide
  Target: ATXN2; (-) strand; PAM type: NRG; PAM sequence: TAG
tcctatctcagcctcctgag

SEQ ID NO: 33273 - DNA, 20 bp, Artificial Sequence
  Description of Artificial Sequence: Synthetic oligonucleotide
  Target: ATXN2; (-) strand; PAM type: NRG; PAM sequence: GAG
tcctcctatctcagcctcct

SEQ ID NO: 33274 - DNA, 20 bp, Artificial Sequence
  Description of Artificial Sequence: Synthetic oligonucleotide
  Target: ATXN2; (-) strand; PAM type: NRG; PAM sequence: CAG
cccaagtgatcctcctatct

SEQ ID NO: 33275 - DNA, 20 bp, Artificial Sequence
  Description of Artificial Sequence: Synthetic oligonucleotide
  Target: ATXN2; (-) strand; PAM type: NRG; PAM sequence: AAG
aacctcgagttctcaggccc

SEQ ID NO: 33276 - DNA, 20 bp, Artificial Sequence
  Description of Artificial Sequence: Synthetic oligonucleotide
  Target: ATXN2; (-) strand; PAM type: NRG; PAM sequence: AGG
cattgcaacctcgagttctc

SEQ ID NO: 33277 - DNA, 20 bp, Artificial Sequence
  Description of Artificial Sequence: Synthetic oligonucleotide
  Target: ATXN2; (-) strand; PAM type: NRG; PAM sequence: CAG
tcattgcaacctcgagttct

SEQ ID NO: 33278 - DNA, 20 bp, Artificial Sequence
  Description of Artificial Sequence: Synthetic oligonucleotide
  Target: ATXN2; (-) strand; PAM type: NRG; PAM sequence: GAG
tcatggctcattgcaacctc

SEQ ID NO: 33279 - DNA, 20 bp, Artificial Sequence
  Description of Artificial Sequence: Synthetic oligonucleotide
  Target: ATXN2; (-) strand; PAM type: NRG; PAM sequence: TGG
ggagtgcagtggtgccatca

SEQ ID NO: 33280 - DNA, 20 bp, Artificial Sequence
  Description of Artificial Sequence: Synthetic oligonucleotide
  Target: ATXN2; (-) strand; PAM type: NRG; PAM sequence: TGG
tcacccaggcgggagtgcag

SEQ ID NO: 33281 - DNA, 20 bp, Artificial Sequence
  Description of Artificial Sequence: Synthetic oligonucleotide
  Target: ATXN2; (-) strand; PAM type: NRG; PAM sequence: CAG
ctgtcacccaggcgggagtg

SEQ ID NO: 33282 - DNA, 20 bp, Artificial Sequence
  Description of Artificial Sequence: Synthetic oligonucleotide
  Target: ATXN2; (-) strand; PAM type: NRG; PAM sequence: GAG
tagctctgtcacccaggcgg

SEQ ID NO: 33283 - DNA, 20 bp, Artificial Sequence
  Description of Artificial Sequence: Synthetic oligonucleotide
  Target: ATXN2; (-) strand; PAM type: NRG; PAM sequence: GGG
tctagctctgtcacccaggc

SEQ ID NO: 33284 - DNA, 20 bp, Artificial Sequence
  Description of Artificial Sequence: Synthetic oligonucleotide
  Target: ATXN2; (-) strand; PAM type: NRG; PAM sequence: CGG
ttctagctctgtcacccagg

SEQ ID NO: 33285 - DNA, 20 bp, Artificial Sequence
  Description of Artificial Sequence: Synthetic oligonucleotide
  Target: ATXN2; (-) strand; PAM type: NRG; PAM sequence: AGG
aggttctagctctgtcaccc

SEQ ID NO: 33286 - DNA, 20 bp, Artificial Sequence
  Description of Artificial Sequence: Synthetic oligonucleotide
  Target: ATXN2; (-) strand; PAM type: NRG; PAM sequence: CAG
caggttctagctctgtcacc

SEQ ID NO: 33287 - DNA, 20 bp, Artificial Sequence
  Description of Artificial Sequence: Synthetic oligonucleotide
  Target: ATXN2; (-) strand; PAM type: NRG; PAM sequence: TAG
tatttttttgagacaggttc

SEQ ID NO: 33288 - DNA, 20 bp, Artificial Sequence
  Description of Artificial Sequence: Synthetic oligonucleotide
  Target: ATXN2; (-) strand; PAM type: NRG; PAM sequence: AGG
tcgccttatttttttgagac

SEQ ID NO: 33289 - DNA, 20 bp, Artificial Sequence
  Description of Artificial Sequence: Synthetic oligonucleotide
  Target: ATXN2; (-) strand; PAM type: NRG; PAM sequence: CAG
ctcgccttatttttttgaga

SEQ ID NO: 33290 - DNA, 20 bp, Artificial Sequence
  Description of Artificial Sequence: Synthetic oligonucleotide
  Target: ATXN2; (-) strand; PAM type: NRG; PAM sequence: GAG
gcgcctcgccttattttttt

SEQ ID NO: 33291 - DNA, 20 bp, Artificial Sequence
  Description of Artificial Sequence: Synthetic oligonucleotide
  Target: ATXN2; (-) strand; PAM type: NRG; PAM sequence: GAG
aagttttgggattacagcat

SEQ ID NO: 33292 - DNA, 20 bp, Artificial Sequence
  Description of Artificial Sequence: Synthetic oligonucleotide
  Target: ATXN2; (-) strand; PAM type: NRG; PAM sequence: CAG
ctcccaaagttttgggatta

SEQ ID NO: 33293 - DNA, 20 bp, Artificial Sequence
  Description of Artificial Sequence: Synthetic oligonucleotide
  Target: ATXN2; (-) strand; PAM type: NRG; PAM sequence: GGG
tcttggcctcccaaagtttt

SEQ ID NO: 33294 - DNA, 20 bp, Artificial Sequence
  Description of Artificial Sequence: Synthetic oligonucleotide
  Target: ATXN2; (-) strand; PAM type: NRG; PAM sequence: TGG
gtcttggcctcccaaagttt

SEQ ID NO: 33295 - DNA, 20 bp, Artificial Sequence
  Description of Artificial Sequence: Synthetic oligonucleotide
  Target: ATXN2; (-) strand; PAM type: NRG; PAM sequence: AAG
ctgcctgtcttggcctccca

SEQ ID NO: 33296 - DNA, 20 bp, Artificial Sequence
  Description of Artificial Sequence: Synthetic oligonucleotide
  Target: ATXN2; (-) strand; PAM type: NRG; PAM sequence: TGG
cttaggtgatctgcctgtct

SEQ ID NO: 33297 - DNA, 20 bp, Artificial Sequence
  Description of Artificial Sequence: Synthetic oligonucleotide
  Target: ATXN2; (-) strand; PAM type: NRG; PAM sequence: AGG
cgtcttgaactcctgacctt

SEQ ID NO: 33298 - DNA, 20 bp, Artificial Sequence
  Description of Artificial Sequence: Synthetic oligonucleotide
  Target: ATXN2; (-) strand; PAM type: NRG; PAM sequence: TAG
tcgtcttgaactcctgacct

SEQ ID NO: 33299 - DNA, 20 bp, Artificial Sequence
  Description of Artificial Sequence: Synthetic oligonucleotide
  Target: ATXN2; (-) strand; PAM type: NRG; PAM sequence: AGG
ggggtttcaccatgttggcc

SEQ ID NO: 33300 - DNA, 20 bp, Artificial Sequence
  Description of Artificial Sequence: Synthetic oligonucleotide
  Target: ATXN2; (-) strand; PAM type: NRG; PAM sequence: CAG
tggggtttcaccatgttggc

SEQ ID NO: 33301 - DNA, 20 bp, Artificial Sequence
  Description of Artificial Sequence: Synthetic oligonucleotide
  Target: ATXN2; (-) strand; PAM type: NRG; PAM sequence: TGG
gagatggggtttcaccatgt

SEQ ID NO: 33302 - DNA, 20 bp, Artificial Sequence
  Description of Artificial Sequence: Synthetic oligonucleotide
  Target: ATXN2; (-) strand; PAM type: NRG; PAM sequence: GGG
atttttttttagtagagatg

SEQ ID NO: 33303 - DNA, 20 bp, Artificial Sequence
  Description of Artificial Sequence: Synthetic oligonucleotide
  Target: ATXN2; (-) strand; PAM type: NRG; PAM sequence: GGG
tatttttttttagtagagat

SEQ ID NO: 33304 - DNA, 20 bp, Artificial Sequence
  Description of Artificial Sequence: Synthetic oligonucleotide
  Target: ATXN2; (-) strand; PAM type: NRG; PAM sequence: TGG
gtatttttttttagtagaga

SEQ ID NO: 33305 - DNA, 20 bp, Artificial Sequence
  Description of Artificial Sequence: Synthetic oligonucleotide
  Target: ATXN2; (-) strand; PAM type: NRG; PAM sequence: GAG
ttttgtatttttttttagta

SEQ ID NO: 33306 - DNA, 20 bp, Artificial Sequence
  Description of Artificial Sequence: Synthetic oligonucleotide
  Target: ATXN2; (-) strand; PAM type: NRG; PAM sequence: TAG
atttttgtatttttttttag

SEQ ID NO: 33307 - DNA, 20 bp, Artificial Sequence
  Description of Artificial Sequence: Synthetic oligonucleotide
  Target: ATXN2; (-) strand; PAM type: NRG; PAM sequence: TAG
caaatttttgtatttttttt

SEQ ID NO: 33308 - DNA, 20 bp, Artificial Sequence
  Description of Artificial Sequence: Synthetic oligonucleotide
  Target: ATXN2; (-) strand; PAM type: NRG; PAM sequence: TGG
caggcatgcaccactacacc

SEQ ID NO: 33309 - DNA, 20 bp, Artificial Sequence
  Description of Artificial Sequence: Synthetic oligonucleotide
  Target: ATXN2; (-) strand; PAM type: NRG; PAM sequence: AGG
tcctgagtagctgggattac

SEQ ID NO: 33310 - DNA, 20 bp, Artificial Sequence
  Description of Artificial Sequence: Synthetic oligonucleotide
  Target: ATXN2; (-) strand; PAM type: NRG; PAM sequence: CAG
ctcctgagtagctgggatta

SEQ ID NO: 33311 - DNA, 20 bp, Artificial Sequence
  Description of Artificial Sequence: Synthetic oligonucleotide
  Target: ATXN2; (-) strand; PAM type: NRG; PAM sequence: GGG
cctcagcctcctgagtagct

SEQ ID NO: 33312 - DNA, 20 bp, Artificial Sequence
  Description of Artificial Sequence: Synthetic oligonucleotide
  Target: ATXN2; (-) strand; PAM type: NRG; PAM sequence: TGG
gcctcagcctcctgagtagc

SEQ ID NO: 33313 - DNA, 20 bp, Artificial Sequence
  Description of Artificial Sequence: Synthetic oligonucleotide
  Target: ATXN2; (-) strand; PAM type: NRG; PAM sequence: TAG
tcctgcctcagcctcctgag

SEQ ID NO: 33314 - DNA, 20 bp, Artificial Sequence
  Description of Artificial Sequence: Synthetic oligonucleotide
  Target: ATXN2; (-) strand; PAM type: NRG; PAM sequence: GAG
ttctcctgcctcagcctcct

SEQ ID NO: 33315 - DNA, 20 bp, Artificial Sequence
  Description of Artificial Sequence: Synthetic oligonucleotide
  Target: ATXN2; (-) strand; PAM type: NRG; PAM sequence: CAG
ttccagtgattctcctgcct

SEQ ID NO: 33316 - DNA, 20 bp, Artificial Sequence
  Description of Artificial Sequence: Synthetic oligonucleotide
  Target: ATXN2; (-) strand; PAM type: NRG; PAM sequence: CAG
aacctccacttcccaggttc

SEQ ID NO: 33317 - DNA, 20 bp, Artificial Sequence
  Description of Artificial Sequence: Synthetic oligonucleotide
  Target: ATXN2; (-) strand; PAM type: NRG; PAM sequence: AGG
cactgtaacctccacttccc

SEQ ID NO: 33318 - DNA, 20 bp, Artificial Sequence
  Description of Artificial Sequence: Synthetic oligonucleotide
  Target: ATXN2; (-) strand; PAM type: NRG; PAM sequence: CAG
tcactgtaacctccacttcc

SEQ ID NO: 33319 - DNA, 20 bp, Artificial Sequence
  Description of Artificial Sequence: Synthetic oligonucleotide
  Target: ATXN2; (-) strand; PAM type: NRG; PAM sequence: CGG
ggaaagcagtggcataatct

SEQ ID NO: 33320 - DNA, 20 bp, Artificial Sequence
  Description of Artificial Sequence: Synthetic oligonucleotide
  Target: ATXN2; (-) strand; PAM type: NRG; PAM sequence: TGG
tcacccagtctggaaagcag

SEQ ID NO: 33321 - DNA, 20 bp, Artificial Sequence
  Description of Artificial Sequence: Synthetic oligonucleotide
  Target: ATXN2; (-) strand; PAM type: NRG; PAM sequence: CAG
ctgtcacccagtctggaaag

SEQ ID NO: 33322 - DNA, 20 bp, Artificial Sequence
  Description of Artificial Sequence: Synthetic oligonucleotide
  Target: ATXN2; (-) strand; PAM type: NRG; PAM sequence: AAG
actctgtcacccagtctgga

SEQ ID NO: 33323 - DNA, 20 bp, Artificial Sequence
  Description of Artificial Sequence: Synthetic oligonucleotide
  Target: ATXN2; (-) strand; PAM type: NRG; PAM sequence: TGG
tctcactctgtcacccagtc

SEQ ID NO: 33324 - DNA, 20 bp, Artificial Sequence
  Description of Artificial Sequence: Synthetic oligonucleotide
  Target: ATXN2; (-) strand; PAM type: NRG; PAM sequence: CAG
cagagtctcactctgtcacc

SEQ ID NO: 33325 - DNA, 20 bp, Artificial Sequence
  Description of Artificial Sequence: Synthetic oligonucleotide
  Target: ATXN2; (-) strand; PAM type: NRG; PAM sequence: GAG
tatttatttattttgagaca

SEQ ID NO: 33326 - DNA, 20 bp, Artificial Sequence
  Description of Artificial Sequence: Synthetic oligonucleotide
  Target: ATXN2; (-) strand; PAM type: NRG; PAM sequence: CAG
gttatttatttattttgaga

SEQ ID NO: 33327 - DNA, 20 bp, Artificial Sequence
  Description of Artificial Sequence: Synthetic oligonucleotide
  Target: ATXN2; (-) strand; PAM type: NRG; PAM sequence: GAG
cttggttatttatttatttt

SEQ ID NO: 33328 - DNA, 20 bp, Artificial Sequence
  Description of Artificial Sequence: Synthetic oligonucleotide
  Target: ATXN2; (-) strand; PAM type: NRG; PAM sequence: TGG
ctacataaatgttaaatcct

SEQ ID NO: 33329 - DNA, 20 bp, Artificial Sequence
  Description of Artificial Sequence: Synthetic oligonucleotide
  Target: ATXN2; (-) strand; PAM type: NRG; PAM sequence: TGG
tatgtggttctgtacttacg

SEQ ID NO: 33330 - DNA, 20 bp, Artificial Sequence
  Description of Artificial Sequence: Synthetic oligonucleotide
  Target: ATXN2; (-) strand; PAM type: NRG; PAM sequence: TGG
ttctttgtttttaatgtatg

SEQ ID NO: 33331 - DNA, 20 bp, Artificial Sequence
  Description of Artificial Sequence: Synthetic oligonucleotide
  Target: ATXN2; (-) strand; PAM type: NRG; PAM sequence: AGG
ttttggcttgctaaaatagg

SEQ ID NO: 33332 - DNA, 20 bp, Artificial Sequence
  Description of Artificial Sequence: Synthetic oligonucleotide
  Target: ATXN2; (-) strand; PAM type: NRG; PAM sequence: GAG
attttggcttgctaaaatag

SEQ ID NO: 33333 - DNA, 20 bp, Artificial Sequence
  Description of Artificial Sequence: Synthetic oligonucleotide
  Target: ATXN2; (-) strand; PAM type: NRG; PAM sequence: AGG
tgattttggcttgctaaaat

SEQ ID NO: 33334 - DNA, 20 bp, Artificial Sequence
  Description of Artificial Sequence: Synthetic oligonucleotide
  Target: ATXN2; (-) strand; PAM type: NRG; PAM sequence: TAG
ttgattttggcttgctaaaa

SEQ ID NO: 33335 - DNA, 20 bp, Artificial Sequence
  Description of Artificial Sequence: Synthetic oligonucleotide
  Target: ATXN2; (-) strand; PAM type: NRG; PAM sequence: TGG
tctttttgtaaccttgattt

SEQ ID NO: 33336 - DNA, 20 bp, Artificial Sequence
  Description of Artificial Sequence: Synthetic oligonucleotide
  Target: ATXN2; (-) strand; PAM type: NRG; PAM sequence: AGG
acggacagtacttgcccttc

SEQ ID NO: 33337 - DNA, 20 bp, Artificial Sequence
  Description of Artificial Sequence: Synthetic oligonucleotide
  Target: ATXN2; (-) strand; PAM type: NRG; PAM sequence: CAG
cacggacagtacttgccctt

SEQ ID NO: 33338 - DNA, 20 bp, Artificial Sequence
  Description of Artificial Sequence: Synthetic oligonucleotide
  Target: ATXN2; (-) strand; PAM type: NRG; PAM sequence: CAG
ttatggaatacagtcacgga

SEQ ID NO: 33339 - DNA, 20 bp, Artificial Sequence
  Description of Artificial Sequence: Synthetic oligonucleotide
  Target: ATXN2; (-) strand; PAM type: NRG; PAM sequence: CGG
tgttttatggaatacagtca

SEQ ID NO: 33340 - DNA, 20 bp, Artificial Sequence
  Description of Artificial Sequence: Synthetic oligonucleotide
  Target: ATXN2; (-) strand; PAM type: NRG; PAM sequence: CAG
caggcttgttttatggaata

SEQ ID NO: 33341 - DNA, 20 bp, Artificial Sequence
  Description of Artificial Sequence: Synthetic oligonucleotide
  Target: ATXN2; (-) strand; PAM type: NRG; PAM sequence: TGG
cccctaacaggcttgtttta

SEQ ID NO: 33342 - DNA, 20 bp, Artificial Sequence
  Description of Artificial Sequence: Synthetic oligonucleotide
  Target: ATXN2; (-) strand; PAM type: NRG; PAM sequence: AGG
gctgcgtccggccccctaac

SEQ ID NO: 33343 - DNA, 20 bp, Artificial Sequence
  Description of Artificial Sequence: Synthetic oligonucleotide
  Target: ATXN2; (-) strand; PAM type: NRG; PAM sequence: CAG
tgctgcgtccggccccctaa

SEQ ID NO: 33344 - DNA, 20 bp, Artificial Sequence
  Description of Artificial Sequence: Synthetic oligonucleotide
  Target: ATXN2; (-) strand; PAM type: NRG; PAM sequence: CGG
caggcgtgagctgctgcgtc

SEQ ID NO: 33345 - DNA, 20 bp, Artificial Sequence
  Description of Artificial Sequence: Synthetic oligonucleotide
  Target: ATXN2; (-) strand; PAM type: NRG; PAM sequence: GAG
agtgctggaattacaggcgt

SEQ ID NO: 33346 - DNA, 20 bp, Artificial Sequence
  Description of Artificial Sequence: Synthetic oligonucleotide
  Target: ATXN2; (-) strand; PAM type: NRG; PAM sequence: AGG
tcccaaagtgctggaattac

SEQ ID NO: 33347 - DNA, 20 bp, Artificial Sequence
  Description of Artificial Sequence: Synthetic oligonucleotide
  Target: ATXN2; (-) strand; PAM type: NRG; PAM sequence: CAG
ctcccaaagtgctggaatta

SEQ ID NO: 33348 - DNA, 20 bp, Artificial Sequence
  Description of Artificial Sequence: Synthetic oligonucleotide
  Target: ATXN2; (-) strand; PAM type: NRG; PAM sequence: TGG
ccaacagcctcccaaagtgc

SEQ ID NO: 33349 - DNA, 20 bp, Artificial Sequence
  Description of Artificial Sequence: Synthetic oligonucleotide
  Target: ATXN2; (-) strand; PAM type: NRG; PAM sequence: AAG
atccgcccaacagcctccca

SEQ ID NO: 33350 - DNA, 20 bp, Artificial Sequence
  Description of Artificial Sequence: Synthetic oligonucleotide
  Target: ATXN2; (-) strand; PAM type: NRG; PAM sequence: CAG
tgaccttgtgatccgcccaa

SEQ ID NO: 33351 - DNA, 20 bp, Artificial Sequence
  Description of Artificial Sequence: Synthetic oligonucleotide
  Target: ATXN2; (-) strand; PAM type: NRG; PAM sequence: TGG
tttcaccatgttggccagga

SEQ ID NO: 33352 - DNA, 20 bp, Artificial Sequence
  Description of Artificial Sequence: Synthetic oligonucleotide
  Target: ATXN2; (-) strand; PAM type: NRG; PAM sequence: AGG
ggggtttcaccatgttggcc

SEQ ID NO: 33353 - DNA, 20 bp, Artificial Sequence
  Description of Artificial Sequence: Synthetic oligonucleotide
  Target: ATXN2; (-) strand; PAM type: NRG; PAM sequence: CAG
cggggtttcaccatgttggc

SEQ ID NO: 33354 - DNA, 20 bp, Artificial Sequence
  Description of Artificial Sequence: Synthetic oligonucleotide
  Target: ATXN2; (-) strand; PAM type: NRG; PAM sequence: TGG
gagacggggtttcaccatgt

SEQ ID NO: 33355 - DNA, 20 bp, Artificial Sequence
  Description of Artificial Sequence: Synthetic oligonucleotide
  Target: ATXN2; (-) strand; PAM type: NRG; PAM sequence: GGG
ttgtatttttagtagagacg

SEQ ID NO: 33356 - DNA, 20 bp, Artificial Sequence
  Description of Artificial Sequence: Synthetic oligonucleotide
  Target: ATXN2; (-) strand; PAM type: NRG; PAM sequence: GGG
tttgtatttttagtagagac

SEQ ID NO: 33357 - DNA, 20 bp, Artificial Sequence
  Description of Artificial Sequence: Synthetic oligonucleotide
  Target: ATXN2; (-) strand; PAM type: NRG; PAM sequence: CGG
ttttgtatttttagtagaga

SEQ ID NO: 33358 - DNA, 20 bp, Artificial Sequence
  Description of Artificial Sequence: Synthetic oligonucleotide
  Target: ATXN2; (-) strand; PAM type: NRG; PAM sequence: GAG
taatttttgtatttttagta

SEQ ID NO: 33359 - DNA, 20 bp, Artificial Sequence
  Description of Artificial Sequence: Synthetic oligonucleotide
  Target: ATXN2; (-) strand; PAM type: NRG; PAM sequence: TAG
gctaatttttgtatttttag

SEQ ID NO: 33360 - DNA, 20 bp, Artificial Sequence
  Description of Artificial Sequence: Synthetic oligonucleotide
  Target: ATXN2; (-) strand; PAM type: NRG; PAM sequence: TAG
ccagctaatttttgtatttt

SEQ ID NO: 33361 - DNA, 20 bp, Artificial Sequence
  Description of Artificial Sequence: Synthetic oligonucleotide
  Target: ATXN2; (-) strand; PAM type: NRG; PAM sequence: CAG
caggcgcacactgtgatgcc

SEQ ID NO: 33362 - DNA, 20 bp, Artificial Sequence
  Description of Artificial Sequence: Synthetic oligonucleotide
  Target: ATXN2; (-) strand; PAM type: NRG; PAM sequence: AGG
tcccatgtagttggtactac

SEQ ID NO: 33363 - DNA, 20 bp, Artificial Sequence
  Description of Artificial Sequence: Synthetic oligonucleotide
  Target: ATXN2; (-) strand; PAM type: NRG; PAM sequence: CAG
ctcccatgtagttggtacta

SEQ ID NO: 33364 - DNA, 20 bp, Artificial Sequence
  Description of Artificial Sequence: Synthetic oligonucleotide
  Target: ATXN2; (-) strand; PAM type: NRG; PAM sequence: TGG
gccttagcctcccatgtagt

SEQ ID NO: 33365 - DNA, 20 bp, Artificial Sequence
  Description of Artificial Sequence: Synthetic oligonucleotide
  Target: ATXN2; (-) strand; PAM type: NRG; PAM sequence: TAG
tcctgccttagcctcccatg

SEQ ID NO: 33366 - DNA, 20 bp, Artificial Sequence
  Description of Artificial Sequence: Synthetic oligonucleotide
  Target: ATXN2; (-) strand; PAM type: NRG; PAM sequence: TAG
ttcaagcgattctcctgcct

SEQ ID NO: 33367 - DNA, 20 bp, Artificial Sequence
  Description of Artificial Sequence: Synthetic oligonucleotide
  Target: ATXN2; (-) strand; PAM type: NRG; PAM sequence: AAG
aacctctgcctcccgggttc

SEQ ID NO: 33368 - DNA, 20 bp, Artificial Sequence
  Description of Artificial Sequence: Synthetic oligonucleotide
  Target: ATXN2; (-) strand; PAM type: NRG; PAM sequence: GGG
cactgcaacctctgcctccc

SEQ ID NO: 33369 - DNA, 20 bp, Artificial Sequence
  Description of Artificial Sequence: Synthetic oligonucleotide
  Target: ATXN2; (-) strand; PAM type: NRG; PAM sequence: CGG
tcactgcaacctctgcctcc

SEQ ID NO: 33370 - DNA, 20 bp, Artificial Sequence
  Description of Artificial Sequence: Synthetic oligonucleotide
  Target: ATXN2; (-) strand; PAM type: NRG; PAM sequence: CAG
ggagtgcagtggcacgatct

SEQ ID NO: 33371 - DNA, 20 bp, Artificial Sequence
  Description of Artificial Sequence: Synthetic oligonucleotide
  Target: ATXN2; (-) strand; PAM type: NRG; PAM sequence: TGG
gtcaccaggctggagtgcag

SEQ ID NO: 33372 - DNA, 20 bp, Artificial Sequence
  Description of Artificial Sequence: Synthetic oligonucleotide
  Target: ATXN2; (-) strand; PAM type: NRG; PAM sequence: CAG
tctgtcaccaggctggagtg

SEQ ID NO: 33373 - DNA, 20 bp, Artificial Sequence
  Description of Artificial Sequence: Synthetic oligonucleotide
  Target: ATXN2; (-) strand; PAM type: NRG; PAM sequence: GAG
ctcgctctgtcaccaggctg

SEQ ID NO: 33374 - DNA, 20 bp, Artificial Sequence
  Description of Artificial Sequence: Synthetic oligonucleotide
  Target: ATXN2; (-) strand; PAM type: NRG; PAM sequence: TGG
gtctcgctctgtcaccaggc

SEQ ID NO: 33375 - DNA, 20 bp, Artificial Sequence
  Description of Artificial Sequence: Synthetic oligonucleotide
  Target: ATXN2; (-) strand; PAM type: NRG; PAM sequence: AGG
tggagtctcgctctgtcacc

SEQ ID NO: 33376 - DNA, 20 bp, Artificial Sequence
  Description of Artificial Sequence: Synthetic oligonucleotide
  Target: ATXN2; (-) strand; PAM type: NRG; PAM sequence: CAG
atggagtctcgctctgtcac

SEQ ID NO: 33377 - DNA, 20 bp, Artificial Sequence
  Description of Artificial Sequence: Synthetic oligonucleotide
  Target: ATXN2; (-) strand; PAM type: NRG; PAM sequence: GAG
tttttttttttaattagatg

SEQ ID NO: 33378 - DNA, 20 bp, Artificial Sequence
  Description of Artificial Sequence: Synthetic oligonucleotide
  Target: ATXN2; (-) strand; PAM type: NRG; PAM sequence: TGG
tttttttttttttaattaga

SEQ ID NO: 33379 - DNA, 20 bp, Artificial Sequence
  Description of Artificial Sequence: Synthetic oligonucleotide
  Target: ATXN2; (-) strand; PAM type: NRG; PAM sequence: TAG
cctgtttttttttttttaat

SEQ ID NO: 33380 - DNA, 20 bp, Artificial Sequence
  Description of Artificial Sequence: Synthetic oligonucleotide
  Target: ATXN2; (-) strand; PAM type: NRG; PAM sequence: AGG
tgtgcagtctggttcctaac

SEQ ID NO: 33381 - DNA, 20 bp, Artificial Sequence
  Description of Artificial Sequence: Synthetic oligonucleotide
  Target: ATXN2; (-) strand; PAM type: NRG; PAM sequence: CAG
ttgtgcagtctggttcctaa

SEQ ID NO: 33382 - DNA, 20 bp, Artificial Sequence
  Description of Artificial Sequence: Synthetic oligonucleotide
  Target: ATXN2; (-) strand; PAM type: NRG; PAM sequence: TGG
acagctcctgttgtgcagtc

SEQ ID NO: 33383 - DNA, 20 bp, Artificial Sequence
  Description of Artificial Sequence: Synthetic oligonucleotide
  Target: ATXN2; (-) strand; PAM type: NRG; PAM sequence: CAG
ctcacacagctcctgttgtg

SEQ ID NO: 33384 - DNA, 20 bp, Artificial Sequence
  Description of Artificial Sequence: Synthetic oligonucleotide
  Target: ATXN2; (-) strand; PAM type: NRG; PAM sequence: CAG
ctcaggtgctaatgctcaca

SEQ ID NO: 33385 - DNA, 20 bp, Artificial Sequence
  Description of Artificial Sequence: Synthetic oligonucleotide
  Target: ATXN2; (-) strand; PAM type: NRG; PAM sequence: AGG
tgatctaacaggtggggctc

SEQ ID NO: 33386 - DNA, 20 bp, Artificial Sequence
  Description of Artificial Sequence: Synthetic oligonucleotide
  Target: ATXN2; (-) strand; PAM type: NRG; PAM sequence: CAG
ctgatctaacaggtggggct

SEQ ID NO: 33387 - DNA, 20 bp, Artificial Sequence
  Description of Artificial Sequence: Synthetic oligonucleotide
  Target: ATXN2; (-) strand; PAM type: NRG; PAM sequence: GGG
tgcacctgatctaacaggtg

SEQ ID NO: 33388 - DNA, 20 bp, Artificial Sequence
  Description of Artificial Sequence: Synthetic oligonucleotide
  Target: ATXN2; (-) strand; PAM type: NRG; PAM sequence: GGG
ctgcacctgatctaacaggt

SEQ ID NO: 33389 - DNA, 20 bp, Artificial Sequence
  Description of Artificial Sequence: Synthetic oligonucleotide
  Target: ATXN2; (-) strand; PAM type: NRG; PAM sequence: TGG
gctgcacctgatctaacagg

SEQ ID NO: 33390 - DNA, 20 bp, Artificial Sequence
  Description of Artificial Sequence: Synthetic oligonucleotide
  Target: ATXN2; (-) strand; PAM type: NRG; PAM sequence: AGG
aatgctgcacctgatctaac

SEQ ID NO: 33391 - DNA, 20 bp, Artificial Sequence
  Description of Artificial Sequence: Synthetic oligonucleotide
  Target: ATXN2; (-) strand; PAM type: NRG; PAM sequence: CAG
taatgctgcacctgatctaa

SEQ ID NO: 33392 - DNA, 20 bp, Artificial Sequence
  Description of Artificial Sequence: Synthetic oligonucleotide
  Target: ATXN2; (-) strand; PAM type: NRG; PAM sequence: AAG
agtagggtttgtgcttctat

SEQ ID NO: 33393 - DNA, 20 bp, Artificial Sequence
  Description of Artificial Sequence: Synthetic oligonucleotide
  Target: ATXN2; (-) strand; PAM type: NRG; PAM sequence: GGG
gctatatgcagttcccagta

SEQ ID NO: 33394 - DNA, 20 bp, Artificial Sequence
  Description of Artificial Sequence: Synthetic oligonucleotide
  Target: ATXN2; (-) strand; PAM type: NRG; PAM sequence: AGG
tgctatatgcagttcccagt

SEQ ID NO: 33395 - DNA, 20 bp, Artificial Sequence
  Description of Artificial Sequence: Synthetic oligonucleotide
  Target: ATXN2; (-) strand; PAM type: NRG; PAM sequence: TAG
ttgctatatgcagttcccag

SEQ ID NO: 33396 - DNA, 20 bp, Artificial Sequence
  Description of Artificial Sequence: Synthetic oligonucleotide
  Target: ATXN2; (-) strand; PAM type: NRG; PAM sequence: CAG
ctcttgctatatgcagttcc

SEQ ID NO: 33397 - DNA, 20 bp, Artificial Sequence
  Description of Artificial Sequence: Synthetic oligonucleotide
  Target: ATXN2; (-) strand; PAM type: NRG; PAM sequence: CAG
cctacatctcttgctatatg

SEQ ID NO: 33398 - DNA, 20 bp, Artificial Sequence
  Description of Artificial Sequence: Synthetic oligonucleotide
  Target: ATXN2; (-) strand; PAM type: NRG; PAM sequence: GAG
atttgttagattctcataaa

SEQ ID NO: 33399 - DNA, 20 bp, Artificial Sequence
  Description of Artificial Sequence: Synthetic oligonucleotide
  Target: ATXN2; (-) strand; PAM type: NRG; PAM sequence: AAG
gcatttgttagattctcata

SEQ ID NO: 33400 - DNA, 20 bp, Artificial Sequence
  Description of Artificial Sequence: Synthetic oligonucleotide
  Target: ATXN2; (-) strand; PAM type: NRG; PAM sequence: TAG
tcagatcattatgcatttgt

SEQ ID NO: 33401 - DNA, 20 bp, Artificial Sequence
  Description of Artificial Sequence: Synthetic oligonucleotide
  Target: ATXN2; (-) strand; PAM type: NRG; PAM sequence: CAG
aaaaaaaaattgttccacct

SEQ ID NO: 33402 - DNA, 20 bp, Artificial Sequence
  Description of Artificial Sequence: Synthetic oligonucleotide
  Target: ATXN2; (-) strand; PAM type: NRG; PAM sequence: GAG
ttcagcctgggggacaaagt

SEQ ID NO: 33403 - DNA, 20 bp, Artificial Sequence
  Description of Artificial Sequence: Synthetic oligonucleotide
  Target: ATXN2; (-) strand; PAM type: NRG; PAM sequence: AAG
gtacttcagcctgggggaca

SEQ ID NO: 33404 - DNA, 20 bp, Artificial Sequence
  Description of Artificial Sequence: Synthetic oligonucleotide
  Target: ATXN2; (-) strand; PAM type: NRG; PAM sequence: GGG
accactgtacttcagcctgg

SEQ ID NO: 33405 - DNA, 20 bp, Artificial Sequence
  Description of Artificial Sequence: Synthetic oligonucleotide
  Target: ATXN2; (-) strand; PAM type: NRG; PAM sequence: GGG
caccactgtacttcagcctg

SEQ ID NO: 33406 - DNA, 20 bp, Artificial Sequence
  Description of Artificial Sequence: Synthetic oligonucleotide
  Target: ATXN2; (-) strand; PAM type: NRG; PAM sequence: GGG
gcaccactgtacttcagcct

SEQ ID NO: 33407 - DNA, 20 bp, Artificial Sequence
  Description of Artificial Sequence: Synthetic oligonucleotide
  Target: ATXN2; (-) strand; PAM type: NRG; PAM sequence: TGG
agcaccactgtacttcagcc

SEQ ID NO: 33408 - DNA, 20 bp, Artificial Sequence
  Description of Artificial Sequence: Synthetic oligonucleotide
  Target: ATXN2; (-) strand; PAM type: NRG; PAM sequence: CAG
gagatagcaccactgtactt

SEQ ID NO: 33409 - DNA, 20 bp, Artificial Sequence
  Description of Artificial Sequence: Synthetic oligonucleotide
  Target: ATXN2; (-) strand; PAM type: NRG; PAM sequence: TAG
gagcttgcagtgagctgaga

SEQ ID NO: 33410 - DNA, 20 bp, Artificial Sequence
  Description of Artificial Sequence: Synthetic oligonucleotide
  Target: ATXN2; (-) strand; PAM type: NRG; PAM sequence: GAG
ggcagagcttgcagtgagct

SEQ ID NO: 33411 - DNA, 20 bp, Artificial Sequence
  Description of Artificial Sequence: Synthetic oligonucleotide
  Target: ATXN2; (-) strand; PAM type: NRG; PAM sequence: GAG
cgggaggcagagcttgcagt

SEQ ID NO: 33412 - DNA, 20 bp, Artificial Sequence
  Description of Artificial Sequence: Synthetic oligonucleotide
  Target: ATXN2; (-) strand; PAM type: NRG; PAM sequence: CAG
aacccgggaggcagagcttg

SEQ ID NO: 33413 - DNA, 20 bp, Artificial Sequence
  Description of Artificial Sequence: Synthetic oligonucleotide
  Target: ATXN2; (-) strand; PAM type: NRG; PAM sequence: GAG
ggcatgaaacccgggaggca

SEQ ID NO: 33414 - DNA, 20 bp, Artificial Sequence
  Description of Artificial Sequence: Synthetic oligonucleotide
  Target: ATXN2; (-) strand; PAM type: NRG; PAM sequence: CAG
atggcatgaaacccgggagg

SEQ ID NO: 33415 - DNA, 20 bp, Artificial Sequence
  Description of Artificial Sequence: Synthetic oligonucleotide
  Target: ATXN2; (-) strand; PAM type: NRG; PAM sequence: AGG
agaatggcatgaaacccggg

SEQ ID NO: 33416 - DNA, 20 bp, Artificial Sequence
  Description of Artificial Sequence: Synthetic oligonucleotide
  Target: ATXN2; (-) strand; PAM type: NRG; PAM sequence: GAG
gagaatggcatgaaacccgg

SEQ ID NO: 33417 - DNA, 20 bp, Artificial Sequence
  Description of Artificial Sequence: Synthetic oligonucleotide
  Target: ATXN2; (-) strand; PAM type: NRG; PAM sequence: GGG
aagagaatggcatgaaaccc

SEQ ID NO: 33418 - DNA, 20 bp, Artificial Sequence
  Description of Artificial Sequence: Synthetic oligonucleotide
  Target: ATXN2; (-) strand; PAM type: NRG; PAM sequence: CGG
caagagaatggcatgaaacc

SEQ ID NO: 33419 - DNA, 20 bp, Artificial Sequence
  Description of Artificial Sequence: Synthetic oligonucleotide
  Target: ATXN2; (-) strand; PAM type: NRG; PAM sequence: TGG
cggaggccgaggcaagagaa

SEQ ID NO: 33420 - DNA, 20 bp, Artificial Sequence
  Description of Artificial Sequence: Synthetic oligonucleotide
  Target: ATXN2; (-) strand; PAM type: NRG; PAM sequence: GAG
tactccggaggccgaggcaa

SEQ ID NO: 33421 - DNA, 20 bp, Artificial Sequence
  Description of Artificial Sequence: Synthetic oligonucleotide
  Target: ATXN2; (-) strand; PAM type: NRG; PAM sequence: AAG
gctactccggaggccgaggc

SEQ ID NO: 33422 - DNA, 20 bp, Artificial Sequence
  Description of Artificial Sequence: Synthetic oligonucleotide
  Target: ATXN2; (-) strand; PAM type: NRG; PAM sequence: AGG
cacagctactccggaggccg

SEQ ID NO: 33423 - DNA, 20 bp, Artificial Sequence
  Description of Artificial Sequence: Synthetic oligonucleotide
  Target: ATXN2; (-) strand; PAM type: NRG; PAM sequence: GAG
tcacagctactccggaggcc

SEQ ID NO: 33424 - DNA, 20 bp, Artificial Sequence
  Description of Artificial Sequence: Synthetic oligonucleotide
  Target: ATXN2; (-) strand; PAM type: NRG; PAM sequence: AGG
tgtagtcacagctactccgg

SEQ ID NO: 33425 - DNA, 20 bp, Artificial Sequence
  Description of Artificial Sequence: Synthetic oligonucleotide
  Target: ATXN2; (-) strand; PAM type: NRG; PAM sequence: GAG
ctgtagtcacagctactccg

SEQ ID NO: 33426 - DNA, 20 bp, Artificial Sequence
  Description of Artificial Sequence: Synthetic oligonucleotide
  Target: ATXN2; (-) strand; PAM type: NRG; PAM sequence: CGG
gcctgtagtcacagctactc

SEQ ID NO: 33427 - DNA, 20 bp, Artificial Sequence
  Description of Artificial Sequence: Synthetic oligonucleotide
  Target: ATXN2; (-) strand; PAM type: NRG; PAM sequence: CAG
gtggagggcgcctgtagtca

SEQ ID NO: 33428 - DNA, 20 bp, Artificial Sequence
  Description of Artificial Sequence: Synthetic oligonucleotide
  Target: ATXN2; (-) strand; PAM type: NRG; PAM sequence: TAG
ggcgcggtggagggcgcctg

SEQ ID NO: 33429 - DNA, 20 bp, Artificial Sequence
  Description of Artificial Sequence: Synthetic oligonucleotide
  Target: ATXN2; (-) strand; PAM type: NRG; PAM sequence: GGG
aattagctgggcgcggtgga

SEQ ID NO: 33430 - DNA, 20 bp, Artificial Sequence
  Description of Artificial Sequence: Synthetic oligonucleotide
  Target: ATXN2; (-) strand; PAM type: NRG; PAM sequence: AGG
aaattagctgggcgcggtgg

SEQ ID NO: 33431 - DNA, 20 bp, Artificial Sequence
  Description of Artificial Sequence: Synthetic oligonucleotide
  Target: ATXN2; (-) strand; PAM type: NRG; PAM sequence: GAG
aaaattagctgggcgcggtg

SEQ ID NO: 33432 - DNA, 20 bp, Artificial Sequence
  Description of Artificial Sequence: Synthetic oligonucleotide
  Target: ATXN2; (-) strand; PAM type: NRG; PAM sequence: TGG
aaaaaattagctgggcgcgg

SEQ ID NO: 33433 - DNA, 20 bp, Artificial Sequence
  Description of Artificial Sequence: Synthetic oligonucleotide
  Target: ATXN2; (-) strand; PAM type: NRG; PAM sequence: CGG
acaaaaaaattagctgggcg

SEQ ID NO: 33434 - DNA, 20 bp, Artificial Sequence
  Description of Artificial Sequence: Synthetic oligonucleotide
  Target: ATXN2; (-) strand; PAM type: NRG; PAM sequence: GGG
aaaatacaaaaaaattagct

SEQ ID NO: 33435 - DNA, 20 bp, Artificial Sequence
  Description of Artificial Sequence: Synthetic oligonucleotide
  Target: ATXN2; (-) strand; PAM type: NRG; PAM sequence: TGG
aaaaatacaaaaaaattagc

SEQ ID NO: 33436 - DNA, 20 bp, Artificial Sequence
  Description of Artificial Sequence: Synthetic oligonucleotide
  Target: ATXN2; (-) strand; PAM type: NRG; PAM sequence: TAG
tactaaaaatacaaaaaaat

SEQ ID NO: 33437 - DNA, 20 bp, Artificial Sequence
  Description of Artificial Sequence: Synthetic oligonucleotide
  Target: ATXN2; (-) strand; PAM type: NRG; PAM sequence: TGG
cgagaccatcctggctaaca

SEQ ID NO: 33438 - DNA, 20 bp, Artificial Sequence
  Description of Artificial Sequence: Synthetic oligonucleotide
  Target: ATXN2; (-) strand; PAM type: NRG; PAM sequence: TGG
tcaggagatcgagaccatcc

SEQ ID NO: 33439 - DNA, 20 bp, Artificial Sequence
  Description of Artificial Sequence: Synthetic oligonucleotide
  Target: ATXN2; (-) strand; PAM type: NRG; PAM sequence: GAG
gatcacgaggtcaggagatc

SEQ ID NO: 33440 - DNA, 20 bp, Artificial Sequence
  Description of Artificial Sequence: Synthetic oligonucleotide
  Target: ATXN2; (-) strand; PAM type: NRG; PAM sequence: GAG
cgggcagatcacgaggtcag

SEQ ID NO: 33441 - DNA, 20 bp, Artificial Sequence
  Description of Artificial Sequence: Synthetic oligonucleotide
  Target: ATXN2; (-) strand; PAM type: NRG; PAM sequence: AGG
ggcgggcagatcacgaggtc

SEQ ID NO: 33442 - DNA, 20 bp, Artificial Sequence
  Description of Artificial Sequence: Synthetic oligonucleotide
  Target: ATXN2; (-) strand; PAM type: NRG; PAM sequence: CAG
aggcgggcagatcacgaggt

SEQ ID NO: 33443 - DNA, 20 bp, Artificial Sequence
  Description of Artificial Sequence: Synthetic oligonucleotide
  Target: ATXN2; (-) strand; PAM type: NRG; PAM sequence: AGG
gccgaggcgggcagatcacg

SEQ ID NO: 33444 - DNA, 20 bp, Artificial Sequence
  Description of Artificial Sequence: Synthetic oligonucleotide
  Target: ATXN2; (-) strand; PAM type: NRG; PAM sequence: GAG
ggccgaggcgggcagatcac

SEQ ID NO: 33445 - DNA, 20 bp, Artificial Sequence
  Description of Artificial Sequence: Synthetic oligonucleotide
  Target: ATXN2; (-) strand; PAM type: NRG; PAM sequence: CAG
ctttgggaggccgaggcggg

SEQ ID NO: 33446 - DNA, 20 bp, Artificial Sequence
  Description of Artificial Sequence: Synthetic oligonucleotide
  Target: ATXN2; (-) strand; PAM type: NRG; PAM sequence: GGG
gcactttgggaggccgaggc

SEQ ID NO: 33447 - DNA, 20 bp, Artificial Sequence
  Description of Artificial Sequence: Synthetic oligonucleotide
  Target: ATXN2; (-) strand; PAM type: NRG; PAM sequence: CGG
agcactttgggaggccgagg

SEQ ID NO: 33448 - DNA, 20 bp, Artificial Sequence
  Description of Artificial Sequence: Synthetic oligonucleotide
  Target: ATXN2; (-) strand; PAM type: NRG; PAM sequence: AGG
cccagcactttgggaggccg

SEQ ID NO: 33449 - DNA, 20 bp, Artificial Sequence
  Description of Artificial Sequence: Synthetic oligonucleotide
  Target: ATXN2; (-) strand; PAM type: NRG; PAM sequence: GAG
tcccagcactttgggaggcc

SEQ ID NO: 33450 - DNA, 20 bp, Artificial Sequence
  Description of Artificial Sequence: Synthetic oligonucleotide
  Target: ATXN2; (-) strand; PAM type: NRG; PAM sequence: AGG
tgtaatcccagcactttggg

SEQ ID NO: 33451 - DNA, 20 bp, Artificial Sequence
  Description of Artificial Sequence: Synthetic oligonucleotide
  Target: ATXN2; (-) strand; PAM type: NRG; PAM sequence: GAG
ctgtaatcccagcactttgg

SEQ ID NO: 33452 - DNA, 20 bp, Artificial Sequence
  Description of Artificial Sequence: Synthetic oligonucleotide
  Target: ATXN2; (-) strand; PAM type: NRG; PAM sequence: GGG
gcctgtaatcccagcacttt

SEQ ID NO: 33453 - DNA, 20 bp, Artificial Sequence
  Description of Artificial Sequence: Synthetic oligonucleotide
  Target: ATXN2; (-) strand; PAM type: NRG; PAM sequence: TGG
cgcctgtaatcccagcactt

SEQ ID NO: 33454 - DNA, 20 bp, Artificial Sequence
  Description of Artificial Sequence: Synthetic oligonucleotide
  Target: ATXN2; (-) strand; PAM type: NRG; PAM sequence: CAG
gtggctcacgcctgtaatcc

SEQ ID NO: 33455 - DNA, 20 bp, Artificial Sequence
  Description of Artificial Sequence: Synthetic oligonucleotide
  Target: ATXN2; (-) strand; PAM type: NRG; PAM sequence: TGG
gttccaccggccgggcacgg

SEQ ID NO: 33456 - DNA, 20 bp, Artificial Sequence
  Description of Artificial Sequence: Synthetic oligonucleotide
  Target: ATXN2; (-) strand; PAM type: NRG; PAM sequence: CGG
actgttccaccggccgggca

SEQ ID NO: 33457 - DNA, 20 bp, Artificial Sequence
  Description of Artificial Sequence: Synthetic oligonucleotide
  Target: ATXN2; (-) strand; PAM type: NRG; PAM sequence: GGG
atgaaactgttccaccggcc

SEQ ID NO: 33458 - DNA, 20 bp, Artificial Sequence
  Description of Artificial Sequence: Synthetic oligonucleotide
  Target: ATXN2; (-) strand; PAM type: NRG; PAM sequence: CGG
gatgaaactgttccaccggc

SEQ ID NO: 33459 - DNA, 20 bp, Artificial Sequence
  Description of Artificial Sequence: Synthetic oligonucleotide
  Target: ATXN2; (-) strand; PAM type: NRG; PAM sequence: CGG
ttgagatgaaactgttccac

SEQ ID NO: 33460 - DNA, 20 bp, Artificial Sequence
  Description of Artificial Sequence: Synthetic oligonucleotide
  Target: ATXN2; (-) strand; PAM type: NRG; PAM sequence: GAG
taggggcaggggatgatttt

SEQ ID NO: 33461 - DNA, 20 bp, Artificial Sequence
  Description of Artificial Sequence: Synthetic oligonucleotide
  Target: ATXN2; (-) strand; PAM type: NRG; PAM sequence: GGG
tggtttttccataggggcag

SEQ ID NO: 33462 - DNA, 20 bp, Artificial Sequence
  Description of Artificial Sequence: Synthetic oligonucleotide
  Target: ATXN2; (-) strand; PAM type: NRG; PAM sequence: GGG
atggtttttccataggggca

SEQ ID NO: 33463 - DNA, 20 bp, Artificial Sequence
  Description of Artificial Sequence: Synthetic oligonucleotide
  Target: ATXN2; (-) strand; PAM type: NRG; PAM sequence: AGG
gatggtttttccataggggc

SEQ ID NO: 33464 - DNA, 20 bp, Artificial Sequence
  Description of Artificial Sequence: Synthetic oligonucleotide
  Target: ATXN2; (-) strand; PAM type: NRG; PAM sequence: CAG
agatggtttttccatagggg

SEQ ID NO: 33465 - DNA, 20 bp, Artificial Sequence
  Description of Artificial Sequence: Synthetic oligonucleotide
  Target: ATXN2; (-) strand; PAM type: NRG; PAM sequence: GGG
ggaagatggtttttccatag

SEQ ID NO: 33466 - DNA, 20 bp, Artificial Sequence
  Description of Artificial Sequence: Synthetic oligonucleotide
  Target: ATXN2; (-) strand; PAM type: NRG; PAM sequence: GGG
tggaagatggtttttccata

SEQ ID NO: 33467 - DNA, 20 bp, Artificial Sequence
  Description of Artificial Sequence: Synthetic oligonucleotide
  Target: ATXN2; (-) strand; PAM type: NRG; PAM sequence: AGG
gtggaagatggtttttccat

SEQ ID NO: 33468 - DNA, 20 bp, Artificial Sequence
  Description of Artificial Sequence: Synthetic oligonucleotide
  Target: ATXN2; (-) strand; PAM type: NRG; PAM sequence: TAG
tgtggaagatggtttttcca

SEQ ID NO: 33469 - DNA, 20 bp, Artificial Sequence
  Description of Artificial Sequence: Synthetic oligonucleotide
  Target: ATXN2; (-) strand; PAM type: NRG; PAM sequence: TGG
gggaccggttttgtggaaga

SEQ ID NO: 33470 - DNA, 20 bp, Artificial Sequence
  Description of Artificial Sequence: Synthetic oligonucleotide
  Target: ATXN2; (-) strand; PAM type: NRG; PAM sequence: AAG
actagggaccggttttgtgg

SEQ ID NO: 33471 - DNA, 20 bp, Artificial Sequence
  Description of Artificial Sequence: Synthetic oligonucleotide
  Target: ATXN2; (-) strand; PAM type: NRG; PAM sequence: TGG
aacactagggaccggttttg

SEQ ID NO: 33472 - DNA, 20 bp, Artificial Sequence
  Description of Artificial Sequence: Synthetic oligonucleotide
  Target: ATXN2; (-) strand; PAM type: NRG; PAM sequence: CGG
acctttttaacactagggac

SEQ ID NO: 33473 - DNA, 20 bp, Artificial Sequence
  Description of Artificial Sequence: Synthetic oligonucleotide
  Target: ATXN2; (-) strand; PAM type: NRG; PAM sequence: GGG
cctcaacctttttaacacta

SEQ ID NO: 33474 - DNA, 20 bp, Artificial Sequence
  Description of Artificial Sequence: Synthetic oligonucleotide
  Target: ATXN2; (-) strand; PAM type: NRG; PAM sequence: AGG
tcctcaacctttttaacact

SEQ ID NO: 33475 - DNA, 20 bp, Artificial Sequence
  Description of Artificial Sequence: Synthetic oligonucleotide
  Target: ATXN2; (-) strand; PAM type: NRG; PAM sequence: TAG
gtcctcaacctttttaacac

SEQ ID NO: 33476 - DNA, 20 bp, Artificial Sequence
  Description of Artificial Sequence: Synthetic oligonucleotide
  Target: ATXN2; (-) strand; PAM type: NRG; PAM sequence: TGG
tgctgtgtattttaaggcaa

SEQ ID NO: 33477 - DNA, 20 bp, Artificial Sequence
  Description of Artificial Sequence: Synthetic oligonucleotide
  Target: ATXN2; (-) strand; PAM type: NRG; PAM sequence: AGG
agatcatgctgtgtatttta

SEQ ID NO: 33478 - DNA, 20 bp, Artificial Sequence
  Description of Artificial Sequence: Synthetic oligonucleotide
  Target: ATXN2; (-) strand; PAM type: NRG; PAM sequence: AAG
aagatcatgctgtgtatttt

SEQ ID NO: 33479 - DNA, 20 bp, Artificial Sequence
  Description of Artificial Sequence: Synthetic oligonucleotide
  Target: ATXN2; (-) strand; PAM type: NRG; PAM sequence: AAG
tagaaacgtaatatatacac

SEQ ID NO: 33480 - DNA, 20 bp, Artificial Sequence
  Description of Artificial Sequence: Synthetic oligonucleotide
  Target: ATXN2; (-) strand; PAM type: NRG; PAM sequence: TAG
ggcccctcccttgaaataaa

SEQ ID NO: 33481 - DNA, 20 bp, Artificial Sequence
  Description of Artificial Sequence: Synthetic oligonucleotide
  Target: ATXN2; (-) strand; PAM type: NRG; PAM sequence: GGG
tttttaaattttaagttctg

SEQ ID NO: 33482 - DNA, 20 bp, Artificial Sequence
  Description of Artificial Sequence: Synthetic oligonucleotide
  Target: ATXN2; (-) strand; PAM type: NRG; PAM sequence: GGG
atttttaaattttaagttct

SEQ ID NO: 33483 - DNA, 20 bp, Artificial Sequence
  Description of Artificial Sequence: Synthetic oligonucleotide
  Target: ATXN2; (-) strand; PAM type: NRG; PAM sequence: TGG
tatttttaaattttaagttc

SEQ ID NO: 33484 - DNA, 20 bp, Artificial Sequence
  Description of Artificial Sequence: Synthetic oligonucleotide
  Target: ATXN2; (-) strand; PAM type: NRG; PAM sequence: AAG
tatttttatttttaaatttt

SEQ ID NO: 33485 - DNA, 20 bp, Artificial Sequence
  Description of Artificial Sequence: Synthetic oligonucleotide
  Target: ATXN2; (-) strand; PAM type: NRG; PAM sequence: GAG
caggtgtgagccactgcacc

SEQ ID NO: 33486 - DNA, 20 bp, Artificial Sequence
  Description of Artificial Sequence: Synthetic oligonucleotide
  Target: ATXN2; (-) strand; PAM type: NRG; PAM sequence: GAG
agtgctgagattacaggtgt

SEQ ID NO: 33487 - DNA, 20 bp, Artificial Sequence
  Description of Artificial Sequence: Synthetic oligonucleotide
  Target: ATXN2; (-) strand; PAM type: NRG; PAM sequence: AGG
tcccaaagtgctgagattac

SEQ ID NO: 33488 - DNA, 20 bp, Artificial Sequence
  Description of Artificial Sequence: Synthetic oligonucleotide
  Target: ATXN2; (-) strand; PAM type: NRG; PAM sequence: CAG
ttcccaaagtgctgagatta

SEQ ID NO: 33489 - DNA, 20 bp, Artificial Sequence
  Description of Artificial Sequence: Synthetic oligonucleotide
  Target: ATXN2; (-) strand; PAM type: NRG; PAM sequence: GAG
cctcagcttcccaaagtgct

SEQ ID NO: 33490 - DNA, 20 bp, Artificial Sequence
  Description of Artificial Sequence: Synthetic oligonucleotide
  Target: ATXN2; (-) strand; PAM type: NRG; PAM sequence: AAG
cctcctgcctcagcttccca

SEQ ID NO: 33491 - DNA, 20 bp, Artificial Sequence
  Description of Artificial Sequence: Synthetic oligonucleotide
  Target: ATXN2; (-) strand; PAM type: NRG; PAM sequence: CAG
ctcaagtgatcctcctgcct

SEQ ID NO: 33492 - DNA, 20 bp, Artificial Sequence
  Description of Artificial Sequence: Synthetic oligonucleotide
  Target: ATXN2; (-) strand; PAM type: NRG; PAM sequence: AAG
ggtctcaaactcctgggctc

SEQ ID NO: 33493 - DNA, 20 bp, Artificial Sequence
  Description of Artificial Sequence: Synthetic oligonucleotide
  Target: ATXN2; (-) strand; PAM type: NRG; PAM sequence: GGG
cagattggtctcaaactcct

SEQ ID NO: 33494 - DNA, 20 bp, Artificial Sequence
  Description of Artificial Sequence: Synthetic oligonucleotide
  Target: ATXN2; (-) strand; PAM type: NRG; PAM sequence: TGG
ccagattggtctcaaactcc

SEQ ID NO: 33495 - DNA, 20 bp, Artificial Sequence
  Description of Artificial Sequence: Synthetic oligonucleotide
  Target: ATXN2; (-) strand; PAM type: NRG; PAM sequence: TGG
tcctgccatgttgcccagat

SEQ ID NO: 33496 - DNA, 20 bp, Artificial Sequence
  Description of Artificial Sequence: Synthetic oligonucleotide
  Target: ATXN2; (-) strand; PAM type: NRG; PAM sequence: CAG
cagggtcctgccatgttgcc

SEQ ID NO: 33497 - DNA, 20 bp, Artificial Sequence
  Description of Artificial Sequence: Synthetic oligonucleotide
  Target: ATXN2; (-) strand; PAM type: NRG; PAM sequence: GGG
ttaaattttttgtagagaca

SEQ ID NO: 33498 - DNA, 20 bp, Artificial Sequence
  Description of Artificial Sequence: Synthetic oligonucleotide
  Target: ATXN2; (-) strand; PAM type: NRG; PAM sequence: AGG
tttaaattttttgtagagac

SEQ ID NO: 33499 - DNA, 20 bp, Artificial Sequence
  Description of Artificial Sequence: Synthetic oligonucleotide
  Target: ATXN2; (-) strand; PAM type: NRG; PAM sequence: CAG
atttaaattttttgtagaga

SEQ ID NO: 33500 - DNA, 20 bp, Artificial Sequence
  Description of Artificial Sequence: Synthetic oligonucleotide
  Target: ATXN2; (-) strand; PAM type: NRG; PAM sequence: GAG
taacatttaaattttttgta

SEQ ID NO: 33501 - DNA, 20 bp, Artificial Sequence
  Description of Artificial Sequence: Synthetic oligonucleotide
  Target: ATXN2; (-) strand; PAM type: NRG; PAM sequence: TAG
gctaacatttaaattttttg

SEQ ID NO: 33502 - DNA, 20 bp, Artificial Sequence
  Description of Artificial Sequence: Synthetic oligonucleotide
  Target: ATXN2; (-) strand; PAM type: NRG; PAM sequence: TGG
aactacaggtgtacaccagc

SEQ ID NO: 33503 - DNA, 20 bp, Artificial Sequence
  Description of Artificial Sequence: Synthetic oligonucleotide
  Target: ATXN2; (-) strand; PAM type: NRG; PAM sequence: CAG
ctggaactacaggtgtacac

SEQ ID NO: 33504 - DNA, 20 bp, Artificial Sequence
  Description of Artificial Sequence: Synthetic oligonucleotide
  Target: ATXN2; (-) strand; PAM type: NRG; PAM sequence: AGG
tcctgagtagctggaactac

SEQ ID NO: 33505 - DNA, 20 bp, Artificial Sequence
  Description of Artificial Sequence: Synthetic oligonucleotide
  Target: ATXN2; (-) strand; PAM type: NRG; PAM sequence: CAG
ctcctgagtagctggaacta

SEQ ID NO: 33506 - DNA, 20 bp, Artificial Sequence
  Description of Artificial Sequence: Synthetic oligonucleotide
  Target: ATXN2; (-) strand; PAM type: NRG; PAM sequence: TGG
gtcttagcctcctgagtagc

SEQ ID NO: 33507 - DNA, 20 bp, Artificial Sequence
  Description of Artificial Sequence: Synthetic oligonucleotide
  Target: ATXN2; (-) strand; PAM type: NRG; PAM sequence: TAG
tcctgtcttagcctcctgag

SEQ ID NO: 33508 - DNA, 20 bp, Artificial Sequence
  Description of Artificial Sequence: Synthetic oligonucleotide
  Target: ATXN2; (-) strand; PAM type: NRG; PAM sequence: GAG
ttctcctgtcttagcctcct

SEQ ID NO: 33509 - DNA, 20 bp, Artificial Sequence
  Description of Artificial Sequence: Synthetic oligonucleotide
  Target: ATXN2; (-) strand; PAM type: NRG; PAM sequence: TAG
gccaagcatttctcctgtct

SEQ ID NO: 33510 - DNA, 20 bp, Artificial Sequence
  Description of Artificial Sequence: Synthetic oligonucleotide
  Target: ATXN2; (-) strand; PAM type: NRG; PAM sequence: AAG
cagcctcaatctatggggcc

SEQ ID NO: 33511 - DNA, 20 bp, Artificial Sequence
  Description of Artificial Sequence: Synthetic oligonucleotide
  Target: ATXN2; (-) strand; PAM type: NRG; PAM sequence: GGG
gagtgcagcctcaatctatg

SEQ ID NO: 33512 - DNA, 20 bp, Artificial Sequence
  Description of Artificial Sequence: Synthetic oligonucleotide
  Target: ATXN2; (-) strand; PAM type: NRG; PAM sequence: GGG
ggagtgcagcctcaatctat

SEQ ID NO: 33513 - DNA, 20 bp, Artificial Sequence
  Description of Artificial Sequence: Synthetic oligonucleotide
  Target: ATXN2; (-) strand; PAM type: NRG; PAM sequence: TGG
tggagtgcagcctcaatcta

SEQ ID NO: 33514 - DNA, 20 bp, Artificial Sequence
  Description of Artificial Sequence: Synthetic oligonucleotide
  Target: ATXN2; (-) strand; PAM type: NRG; PAM sequence: CAG
ctgtcacccaggctggagtg

SEQ ID NO: 33515 - DNA, 20 bp, Artificial Sequence
  Description of Artificial Sequence: Synthetic oligonucleotide
  Target: ATXN2; (-) strand; PAM type: NRG; PAM sequence: GAG
tccctctgtcacccaggctg

SEQ ID NO: 33516 - DNA, 20 bp, Artificial Sequence
  Description of Artificial Sequence: Synthetic oligonucleotide
  Target: ATXN2; (-) strand; PAM type: NRG; PAM sequence: TGG
tctccctctgtcacccaggc

SEQ ID NO: 33517 - DNA, 20 bp, Artificial Sequence
  Description of Artificial Sequence: Synthetic oligonucleotide
  Target: ATXN2; (-) strand; PAM type: NRG; PAM sequence: AGG
aaggtctccctctgtcaccc

SEQ ID NO: 33518 - DNA, 20 bp, Artificial Sequence
  Description of Artificial Sequence: Synthetic oligonucleotide
  Target: ATXN2; (-) strand; PAM type: NRG; PAM sequence: CAG
caaggtctccctctgtcacc

SEQ ID NO: 33519 - DNA, 20 bp, Artificial Sequence
  Description of Artificial Sequence: Synthetic oligonucleotide
  Target: ATXN2; (-) strand; PAM type: NRG; PAM sequence: AGG
tatttatttttttagagtca

SEQ ID NO: 33520 - DNA, 20 bp, Artificial Sequence
  Description of Artificial Sequence: Synthetic oligonucleotide
  Target: ATXN2; (-) strand; PAM type: NRG; PAM sequence: AAG
ttatttatttttttagagtc

SEQ ID NO: 33521 - DNA, 20 bp, Artificial Sequence
  Description of Artificial Sequence: Synthetic oligonucleotide
  Target: ATXN2; (-) strand; PAM type: NRG; PAM sequence: GAG
tccctttatttattttttta

SEQ ID NO: 33522 - DNA, 20 bp, Artificial Sequence
  Description of Artificial Sequence: Synthetic oligonucleotide
  Target: ATXN2; (-) strand; PAM type: NRG; PAM sequence: TAG
tctccctttatttatttttt

SEQ ID NO: 33523 - DNA, 20 bp, Artificial Sequence
  Description of Artificial Sequence: Synthetic oligonucleotide
  Target: ATXN2; (-) strand; PAM type: NRG; PAM sequence: AGG
ttgcccaaagcaatatttgt

SEQ ID NO: 33524 - DNA, 20 bp, Artificial Sequence
  Description of Artificial Sequence: Synthetic oligonucleotide
  Target: ATXN2; (-) strand; PAM type: NRG; PAM sequence: TAG
cttgcccaaagcaatatttg

SEQ ID NO: 33525 - DNA, 20 bp, Artificial Sequence
  Description of Artificial Sequence: Synthetic oligonucleotide
  Target: ATXN2; (-) strand; PAM type: NRG; PAM sequence: AAG
gagattaggggacttgccca

SEQ ID NO: 33526 - DNA, 20 bp, Artificial Sequence
  Description of Artificial Sequence: Synthetic oligonucleotide
  Target: ATXN2; (-) strand; PAM type: NRG; PAM sequence: GGG
tctaagctttgagagattag

SEQ ID NO: 33527 - DNA, 20 bp, Artificial Sequence
  Description of Artificial Sequence: Synthetic oligonucleotide
  Target: ATXN2; (-) strand; PAM type: NRG; PAM sequence: GGG
ctctaagctttgagagatta

SEQ ID NO: 33528 - DNA, 20 bp, Artificial Sequence
  Description of Artificial Sequence: Synthetic oligonucleotide
  Target: ATXN2; (-) strand; PAM type: NRG; PAM sequence: AGG
actctaagctttgagagatt

SEQ ID NO: 33529 - DNA, 20 bp, Artificial Sequence
  Description of Artificial Sequence: Synthetic oligonucleotide
  Target: ATXN2; (-) strand; PAM type: NRG; PAM sequence: TAG
aactctaagctttgagagat

SEQ ID NO: 33530 - DNA, 20 bp, Artificial Sequence
  Description of Artificial Sequence: Synthetic oligonucleotide
  Target: ATXN2; (-) strand; PAM type: NRG; PAM sequence: GAG
gcaaaaactctaagctttga

SEQ ID NO: 33531 - DNA, 20 bp, Artificial Sequence
  Description of Artificial Sequence: Synthetic oligonucleotide
  Target: ATXN2; (-) strand; PAM type: NRG; PAM sequence: GAG
aggcaaaaactctaagcttt

SEQ ID NO: 33532 - DNA, 20 bp, Artificial Sequence
  Description of Artificial Sequence: Synthetic oligonucleotide
  Target: ATXN2; (-) strand; PAM type: NRG; PAM sequence: AAG
aaatggaaggcaaaaactct

SEQ ID NO: 33533 - DNA, 20 bp, Artificial Sequence
  Description of Artificial Sequence: Synthetic oligonucleotide
  Target: ATXN2; (-) strand; PAM type: NRG; PAM sequence: AGG
tcctaaatcttaaaaatgga

SEQ ID NO: 33534 - DNA, 20 bp, Artificial Sequence
  Description of Artificial Sequence: Synthetic oligonucleotide
  Target: ATXN2; (-) strand; PAM type: NRG; PAM sequence: AAG
atcctaaatcttaaaaatgg

SEQ ID NO: 33535 - DNA, 20 bp, Artificial Sequence
  Description of Artificial Sequence: Synthetic oligonucleotide
  Target: ATXN2; (-) strand; PAM type: NRG; PAM sequence: TGG
aaaatcctaaatcttaaaaa

SEQ ID NO: 33536 - DNA, 20 bp, Artificial Sequence
  Description of Artificial Sequence: Synthetic oligonucleotide
  Target: ATXN2; (-) strand; PAM type: NRG; PAM sequence: CAG
ctaccctgtctcttaaaaaa

SEQ ID NO: 33537 - DNA, 20 bp, Artificial Sequence
  Description of Artificial Sequence: Synthetic oligonucleotide
  Target: ATXN2; (-) strand; PAM type: NRG; PAM sequence: CAG
taggcatgagccaccgtgcg

SEQ ID NO: 33538 - DNA, 20 bp, Artificial Sequence
  Description of Artificial Sequence: Synthetic oligonucleotide
  Target: ATXN2; (-) strand; PAM type: NRG; PAM sequence: GAG
agtgctgggattataggcat

SEQ ID NO: 33539 - DNA, 20 bp, Artificial Sequence
  Description of Artificial Sequence: Synthetic oligonucleotide
  Target: ATXN2; (-) strand; PAM type: NRG; PAM sequence: AGG
tcccaaagtgctgggattat

SEQ ID NO: 33540 - DNA, 20 bp, Artificial Sequence
  Description of Artificial Sequence: Synthetic oligonucleotide
  Target: ATXN2; (-) strand; PAM type: NRG; PAM sequence: TAG
ctcccaaagtgctgggatta

SEQ ID NO: 33541 - DNA, 20 bp, Artificial Sequence
  Description of Artificial Sequence: Synthetic oligonucleotide
  Target: ATXN2; (-) strand; PAM type: NRG; PAM sequence: GGG
ccttggcctcccaaagtgct

SEQ ID NO: 33542 - DNA, 20 bp, Artificial Sequence
  Description of Artificial Sequence: Synthetic oligonucleotide
  Target: ATXN2; (-) strand; PAM type: NRG; PAM sequence: TGG
gccttggcctcccaaagtgc

SEQ ID NO: 33543 - DNA, 20 bp, Artificial Sequence
  Description of Artificial Sequence: Synthetic oligonucleotide
  Target: ATXN2; (-) strand; PAM type: NRG; PAM sequence: AAG
ccacctgccttggcctccca

SEQ ID NO: 33544 - DNA, 20 bp, Artificial Sequence
  Description of Artificial Sequence: Synthetic oligonucleotide
  Target: ATXN2; (-) strand; PAM type: NRG; PAM sequence: TGG
cttaagcgatccacctgcct

SEQ ID NO: 33545 - DNA, 20 bp, Artificial Sequence
  Description of Artificial Sequence: Synthetic oligonucleotide
  Target: ATXN2; (-) strand; PAM type: NRG; PAM sequence: AAG
catctcgaactcctgacctt

SEQ ID NO: 33546 - DNA, 20 bp, Artificial Sequence
  Description of Artificial Sequence: Synthetic oligonucleotide
  Target: ATXN2; (-) strand; PAM type: NRG; PAM sequence: AGG
agggtttcaccatgttggtt

SEQ ID NO: 33547 - DNA, 20 bp, Artificial Sequence
  Description of Artificial Sequence: Synthetic oligonucleotide
  Target: ATXN2; (-) strand; PAM type: NRG; PAM sequence: TAG
cagggtttcaccatgttggt

SEQ ID NO: 33548 - DNA, 20 bp, Artificial Sequence
  Description of Artificial Sequence: Synthetic oligonucleotide
  Target: ATXN2; (-) strand; PAM type: NRG; PAM sequence: TGG
gagacagggtttcaccatgt

SEQ ID NO: 33549 - DNA, 20 bp, Artificial Sequence
  Description of Artificial Sequence: Synthetic oligonucleotide
  Target: ATXN2; (-) strand; PAM type: NRG; PAM sequence: GGG
ttgtatttttagcagagaca

SEQ ID NO: 33550 - DNA, 20 bp, Artificial Sequence
  Description of Artificial Sequence: Synthetic oligonucleotide
  Target: ATXN2; (-) strand; PAM type: NRG; PAM sequence: AGG
tttgtatttttagcagagac

SEQ ID NO: 33551 - DNA, 20 bp, Artificial Sequence
  Description of Artificial Sequence: Synthetic oligonucleotide
  Target: ATXN2; (-) strand; PAM type: NRG; PAM sequence: CAG
ttttgtatttttagcagaga

SEQ ID NO: 33552 - DNA, 20 bp, Artificial Sequence
  Description of Artificial Sequence: Synthetic oligonucleotide
  Target: ATXN2; (-) strand; PAM type: NRG; PAM sequence: GAG
taatttttgtatttttagca

SEQ ID NO: 33553 - DNA, 20 bp, Artificial Sequence
  Description of Artificial Sequence: Synthetic oligonucleotide
  Target: ATXN2; (-) strand; PAM type: NRG; PAM sequence: CAG
gctaatttttgtatttttag

SEQ ID NO: 33554 - DNA, 20 bp, Artificial Sequence
  Description of Artificial Sequence: Synthetic oligonucleotide
  Target: ATXN2; (-) strand; PAM type: NRG; PAM sequence: TAG
tcagctaatttttgtatttt

SEQ ID NO: 33555 - DNA, 20 bp, Artificial Sequence
  Description of Artificial Sequence: Synthetic oligonucleotide
  Target: ATXN2; (-) strand; PAM type: NRG; PAM sequence: CAG
caggtgcctgctaccccact

SEQ ID NO: 33556 - DNA, 20 bp, Artificial Sequence
  Description of Artificial Sequence: Synthetic oligonucleotide
  Target: ATXN2; (-) strand; PAM type: NRG; PAM sequence: AGG
ttctgagtagctgagattac

SEQ ID NO: 33557 - DNA, 20 bp, Artificial Sequence
  Description of Artificial Sequence: Synthetic oligonucleotide
  Target: ATXN2; (-) strand; PAM type: NRG; PAM sequence: CAG
cttctgagtagctgagatta

SEQ ID NO: 33558 - DNA, 20 bp, Artificial Sequence
  Description of Artificial Sequence: Synthetic oligonucleotide
  Target: ATXN2; (-) strand; PAM type: NRG; PAM sequence: GAG
cctcagccttctgagtagct

SEQ ID NO: 33559 - DNA, 20 bp, Artificial Sequence
  Description of Artificial Sequence: Synthetic oligonucleotide
  Target: ATXN2; (-) strand; PAM type: NRG; PAM sequence: TAG
tcctgcctcagccttctgag

SEQ ID NO: 33560 - DNA, 20 bp, Artificial Sequence
  Description of Artificial Sequence: Synthetic oligonucleotide
  Target: ATXN2; (-) strand; PAM type: NRG; PAM sequence: GAG
ttctcctgcctcagccttct

SEQ ID NO: 33561 - DNA, 20 bp, Artificial Sequence
  Description of Artificial Sequence: Synthetic oligonucleotide
  Target: ATXN2; (-) strand; PAM type: NRG; PAM sequence: CAG
ttcaagcgattctcctgcct

SEQ ID NO: 33562 - DNA, 20 bp, Artificial Sequence
  Description of Artificial Sequence: Synthetic oligonucleotide
  Target: ATXN2; (-) strand; PAM type: NRG; PAM sequence: AAG
aacctctgtttcccgggttc

SEQ ID NO: 33563 - DNA, 20 bp, Artificial Sequence
  Description of Artificial Sequence: Synthetic oligonucleotide
  Target: ATXN2; (-) strand; PAM type: NRG; PAM sequence: GGG
cactgcaacctctgtttccc

SEQ ID NO: 33564 - DNA, 20 bp, Artificial Sequence
  Description of Artificial Sequence: Synthetic oligonucleotide
  Target: ATXN2; (-) strand; PAM type: NRG; PAM sequence: CGG
tcactgcaacctctgtttcc

SEQ ID NO: 33565 - DNA, 20 bp, Artificial Sequence
  Description of Artificial Sequence: Synthetic oligonucleotide
  Target: ATXN2; (-) strand; PAM type: NRG; PAM sequence: CAG
ggagtgcagtggtgcaatct

SEQ ID NO: 33566 - DNA, 20 bp, Artificial Sequence
  Description of Artificial Sequence: Synthetic oligonucleotide
  Target: ATXN2; (-) strand; PAM type: NRG; PAM sequence: TGG
tttcccaggctggagtgcag

SEQ ID NO: 33567 - DNA, 20 bp, Artificial Sequence
  Description of Artificial Sequence: Synthetic oligonucleotide
  Target: ATXN2; (-) strand; PAM type: NRG; PAM sequence: CAG
ctctttcccaggctggagtg

SEQ ID NO: 33568 - DNA, 20 bp, Artificial Sequence
  Description of Artificial Sequence: Synthetic oligonucleotide
  Target: ATXN2; (-) strand; PAM type: NRG; PAM sequence: GAG
ttttgctctttcccaggctg

SEQ ID NO: 33569 - DNA, 20 bp, Artificial Sequence
  Description of Artificial Sequence: Synthetic oligonucleotide
  Target: ATXN2; (-) strand; PAM type: NRG; PAM sequence: TGG
agttttgctctttcccaggc

SEQ ID NO: 33570 - DNA, 20 bp, Artificial Sequence
  Description of Artificial Sequence: Synthetic oligonucleotide
  Target: ATXN2; (-) strand; PAM type: NRG; PAM sequence: AGG
agacagttttgctctttccc

SEQ ID NO: 33571 - DNA, 20 bp, Artificial Sequence
  Description of Artificial Sequence: Synthetic oligonucleotide
  Target: ATXN2; (-) strand; PAM type: NRG; PAM sequence: CAG
gagacagttttgctctttcc

SEQ ID NO: 33572 - DNA, 20 bp, Artificial Sequence
  Description of Artificial Sequence: Synthetic oligonucleotide
  Target: ATXN2; (-) strand; PAM type: NRG; PAM sequence: CAG
tgttttttttttttttgaga

SEQ ID NO: 33573 - DNA, 20 bp, Artificial Sequence
  Description of Artificial Sequence: Synthetic oligonucleotide
  Target: ATXN2; (-) strand; PAM type: NRG; PAM sequence: GAG
aaggtgtttttttttttttt

SEQ ID NO: 33574 - DNA, 20 bp, Artificial Sequence
  Description of Artificial Sequence: Synthetic oligonucleotide
  Target: ATXN2; (-) strand; PAM type: NRG; PAM sequence: AGG
ccgcccagcctcatgagcta

SEQ ID NO: 33575 - DNA, 20 bp, Artificial Sequence
  Description of Artificial Sequence: Synthetic oligonucleotide
  Target: ATXN2; (-) strand; PAM type: NRG; PAM sequence: AAG
cccgcccagcctcatgagct

SEQ ID NO: 33576 - DNA, 20 bp, Artificial Sequence
  Description of Artificial Sequence: Synthetic oligonucleotide
  Target: ATXN2; (-) strand; PAM type: NRG; PAM sequence: GAG
ccacccccgcccagcctcat

SEQ ID NO: 33577 - DNA, 20 bp, Artificial Sequence
  Description of Artificial Sequence: Synthetic oligonucleotide
  Target: ATXN2; (-) strand; PAM type: NRG; PAM sequence: CAG
aggcgtgagccacccccgcc

SEQ ID NO: 33578 - DNA, 20 bp, Artificial Sequence
  Description of Artificial Sequence: Synthetic oligonucleotide
  Target: ATXN2; (-) strand; PAM type: NRG; PAM sequence: GAG
agtgctgggattacaggcgt

SEQ ID NO: 33579 - DNA, 20 bp, Artificial Sequence
  Description of Artificial Sequence: Synthetic oligonucleotide
  Target: ATXN2; (-) strand; PAM type: NRG; PAM sequence: AGG
tcccaaagtgctgggattac

SEQ ID NO: 33580 - DNA, 20 bp, Artificial Sequence
  Description of Artificial Sequence: Synthetic oligonucleotide
  Target: ATXN2; (-) strand; PAM type: NRG; PAM sequence: CAG
ctcccaaagtgctgggatta

SEQ ID NO: 33581 - DNA, 20 bp, Artificial Sequence
  Description of Artificial Sequence: Synthetic oligonucleotide
  Target: ATXN2; (-) strand; PAM type: NRG; PAM sequence: GGG
cctcggcctcccaaagtgct

SEQ ID NO: 33582 - DNA, 20 bp, Artificial Sequence
  Description of Artificial Sequence: Synthetic oligonucleotide
  Target: ATXN2; (-) strand; PAM type: NRG; PAM sequence: TGG
gcctcggcctcccaaagtgc

SEQ ID NO: 33583 - DNA, 20 bp, Artificial Sequence
  Description of Artificial Sequence: Synthetic oligonucleotide
  Target: ATXN2; (-) strand; PAM type: NRG; PAM sequence: AAG
tcgcttgcctcggcctccca

SEQ ID NO: 33584 - DNA, 20 bp, Artificial Sequence
  Description of Artificial Sequence: Synthetic oligonucleotide
  Target: ATXN2; (-) strand; PAM type: NRG; PAM sequence: CGG
ctcaggtgattcgcttgcct

SEQ ID NO: 33585 - DNA, 20 bp, Artificial Sequence
  Description of Artificial Sequence: Synthetic oligonucleotide
  Target: ATXN2; (-) strand; PAM type: NRG; PAM sequence: AGG
gctcttgaactcctgacctc

SEQ ID NO: 33586 - DNA, 20 bp, Artificial Sequence
  Description of Artificial Sequence: Synthetic oligonucleotide
  Target: ATXN2; (-) strand; PAM type: NRG; PAM sequence: CAG
tgctcttgaactcctgacct

SEQ ID NO: 33587 - DNA, 20 bp, Artificial Sequence
  Description of Artificial Sequence: Synthetic oligonucleotide
  Target: ATXN2; (-) strand; PAM type: NRG; PAM sequence: AGG
ggagtttcaccatgttggcc

SEQ ID NO: 33588 - DNA, 20 bp, Artificial Sequence
  Description of Artificial Sequence: Synthetic oligonucleotide
  Target: ATXN2; (-) strand; PAM type: NRG; PAM sequence: CAG
tggagtttcaccatgttggc

SEQ ID NO: 33589 - DNA, 20 bp, Artificial Sequence
  Description of Artificial Sequence: Synthetic oligonucleotide
  Target: ATXN2; (-) strand; PAM type: NRG; PAM sequence: TGG
gatatggagtttcaccatgt

SEQ ID NO: 33590 - DNA, 20 bp, Artificial Sequence
  Description of Artificial Sequence: Synthetic oligonucleotide
  Target: ATXN2; (-) strand; PAM type: NRG; PAM sequence: GAG
ttgcatttttagtagatatg

SEQ ID NO: 33591 - DNA, 20 bp, Artificial Sequence
  Description of Artificial Sequence: Synthetic oligonucleotide
  Target: ATXN2; (-) strand; PAM type: NRG; PAM sequence: TGG
ttttgcatttttagtagata

SEQ ID NO: 33592 - DNA, 20 bp, Artificial Sequence
  Description of Artificial Sequence: Synthetic oligonucleotide
  Target: ATXN2; (-) strand; PAM type: NRG; PAM sequence: TAG
gctaagttttgcatttttag

SEQ ID NO: 33593 - DNA, 20 bp, Artificial Sequence
  Description of Artificial Sequence: Synthetic oligonucleotide
  Target: ATXN2; (-) strand; PAM type: NRG; PAM sequence: TAG
ctggctaagttttgcatttt

SEQ ID NO: 33594 - DNA, 20 bp, Artificial Sequence
  Description of Artificial Sequence: Synthetic oligonucleotide
  Target: ATXN2; (-) strand; PAM type: NRG; PAM sequence: AAG
acccgccaccatgcctggct

SEQ ID NO: 33595 - DNA, 20 bp, Artificial Sequence
  Description of Artificial Sequence: Synthetic oligonucleotide
  Target: ATXN2; (-) strand; PAM type: NRG; PAM sequence: TGG
caggcacccgccaccatgcc

SEQ ID NO: 33596 - DNA, 20 bp, Artificial Sequence
  Description of Artificial Sequence: Synthetic oligonucleotide
  Target: ATXN2; (-) strand; PAM type: NRG; PAM sequence: AGG
tcccgaatagctgggattac

SEQ ID NO: 33597 - DNA, 20 bp, Artificial Sequence
  Description of Artificial Sequence: Synthetic oligonucleotide
  Target: ATXN2; (-) strand; PAM type: NRG; PAM sequence: CAG
ctcccgaatagctgggatta

SEQ ID NO: 33598 - DNA, 20 bp, Artificial Sequence
  Description of Artificial Sequence: Synthetic oligonucleotide
  Target: ATXN2; (-) strand; PAM type: NRG; PAM sequence: GGG
cttagccctcccgaatagct

SEQ ID NO: 33599 - DNA, 20 bp, Artificial Sequence
  Description of Artificial Sequence: Synthetic oligonucleotide
  Target: ATXN2; (-) strand; PAM type: NRG; PAM sequence: TGG
ccttagccctcccgaatagc

SEQ ID NO: 33600 - DNA, 20 bp, Artificial Sequence
  Description of Artificial Sequence: Synthetic oligonucleotide
  Target: ATXN2; (-) strand; PAM type: NRG; PAM sequence: TAG
cctgccttagccctcccgaa

SEQ ID NO: 33601 - DNA, 20 bp, Artificial Sequence
  Description of Artificial Sequence: Synthetic oligonucleotide
  Target: ATXN2; (-) strand; PAM type: NRG; PAM sequence: TAG
ttcaagcaattctcctgcct

SEQ ID NO: 33602 - DNA, 20 bp, Artificial Sequence
  Description of Artificial Sequence: Synthetic oligonucleotide
  Target: ATXN2; (-) strand; PAM type: NRG; PAM sequence: AAG
aacctccgcctcccaggttc

SEQ ID NO: 33603 - DNA, 20 bp, Artificial Sequence
  Description of Artificial Sequence: Synthetic oligonucleotide
  Target: ATXN2; (-) strand; PAM type: NRG; PAM sequence: AGG
cactgcaacctccgcctccc

SEQ ID NO: 33604 - DNA, 20 bp, Artificial Sequence
  Description of Artificial Sequence: Synthetic oligonucleotide
  Target: ATXN2; (-) strand; PAM type: NRG; PAM sequence: CAG
tcactgcaacctccgcctcc

SEQ ID NO: 33605 - DNA, 20 bp, Artificial Sequence
  Description of Artificial Sequence: Synthetic oligonucleotide
  Target: ATXN2; (-) strand; PAM type: NRG; PAM sequence: TGG
ggagtgcagtggcgtgatct

SEQ ID NO: 33606 - DNA, 20 bp, Artificial Sequence
  Description of Artificial Sequence: Synthetic oligonucleotide
  Target: ATXN2; (-) strand; PAM type: NRG; PAM sequence: TGG
tcgcccaggctggagtgcag

SEQ ID NO: 33607 - DNA, 20 bp, Artificial Sequence
  Description of Artificial Sequence: Synthetic oligonucleotide
  Target: ATXN2; (-) strand; PAM type: NRG; PAM sequence: CAG
ctgtcgcccaggctggagtg

SEQ ID NO: 33608 - DNA, 20 bp, Artificial Sequence
  Description of Artificial Sequence: Synthetic oligonucleotide
  Target: ATXN2; (-) strand; PAM type: NRG; PAM sequence: GAG
agtctctgtcgcccaggctg

SEQ ID NO: 33609 - DNA, 20 bp, Artificial Sequence
  Description of Artificial Sequence: Synthetic oligonucleotide
  Target: ATXN2; (-) strand; PAM type: NRG; PAM sequence: TGG
agagtctctgtcgcccaggc

SEQ ID NO: 33610 - DNA, 20 bp, Artificial Sequence
  Description of Artificial Sequence: Synthetic oligonucleotide
  Target: ATXN2; (-) strand; PAM type: NRG; PAM sequence: AGG
agacagagtctctgtcgccc

SEQ ID NO: 33611 - DNA, 20 bp, Artificial Sequence
  Description of Artificial Sequence: Synthetic oligonucleotide
  Target: ATXN2; (-) strand; PAM type: NRG; PAM sequence: CAG
gagacagagtctctgtcgcc

SEQ ID NO: 33612 - DNA, 20 bp, Artificial Sequence
  Description of Artificial Sequence: Synthetic oligonucleotide
  Target: ATXN2; (-) strand; PAM type: NRG; PAM sequence: GAG
ttttgtttgtttttgagaca

SEQ ID NO: 33613 - DNA, 20 bp, Artificial Sequence
  Description of Artificial Sequence: Synthetic oligonucleotide
  Target: ATXN2; (-) strand; PAM type: NRG; PAM sequence: CAG
ttttttgtttgtttttgaga

SEQ ID NO: 33614 - DNA, 20 bp, Artificial Sequence
  Description of Artificial Sequence: Synthetic oligonucleotide
  Target: ATXN2; (-) strand; PAM type: NRG; PAM sequence: GAG
gggtttttttgtttgttttt

SEQ ID NO: 33615 - DNA, 20 bp, Artificial Sequence
  Description of Artificial Sequence: Synthetic oligonucleotide
  Target: ATXN2; (-) strand; PAM type: NRG; PAM sequence: GGG
atgttactgttaccatctaa

SEQ ID NO: 33616 - DNA, 20 bp, Artificial Sequence
  Description of Artificial Sequence: Synthetic oligonucleotide
  Target: ATXN2; (-) strand; PAM type: NRG; PAM sequence: AGG
gatgttactgttaccatcta

SEQ ID NO: 33617 - DNA, 20 bp, Artificial Sequence
  Description of Artificial Sequence: Synthetic oligonucleotide
  Target: ATXN2; (-) strand; PAM type: NRG; PAM sequence: AAG
tgatgttactgttaccatct

SEQ ID NO: 33618 - DNA, 20 bp, Artificial Sequence
  Description of Artificial Sequence: Synthetic oligonucleotide
  Target: ATXN2; (-) strand; PAM type: NRG; PAM sequence: GGG
tttttttccaaaggatatct

SEQ ID NO: 33619 - DNA, 20 bp, Artificial Sequence
  Description of Artificial Sequence: Synthetic oligonucleotide
  Target: ATXN2; (-) strand; PAM type: NRG; PAM sequence: TGG
gtttttttccaaaggatatc

SEQ ID NO: 33620 - DNA, 20 bp, Artificial Sequence
  Description of Artificial Sequence: Synthetic oligonucleotide
  Target: ATXN2; (-) strand; PAM type: NRG; PAM sequence: AGG
ttttttttgtttttttccaa

SEQ ID NO: 33621 - DNA, 20 bp, Artificial Sequence
  Description of Artificial Sequence: Synthetic oligonucleotide
  Target: ATXN2; (-) strand; PAM type: NRG; PAM sequence: AAG
gttttttttgtttttttcca

SEQ ID NO: 33622 - DNA, 20 bp, Artificial Sequence
  Description of Artificial Sequence: Synthetic oligonucleotide
  Target: ATXN2; (-) strand; PAM type: NRG; PAM sequence: AAG
tgccgtatctttttaaatga

SEQ ID NO: 33623 - DNA, 20 bp, Artificial Sequence
  Description of Artificial Sequence: Synthetic oligonucleotide
  Target: ATXN2; (-) strand; PAM type: NRG; PAM sequence: TGG
caggcatgagccaccgtgct

SEQ ID NO: 33624 - DNA, 20 bp, Artificial Sequence
  Description of Artificial Sequence: Synthetic oligonucleotide
  Target: ATXN2; (-) strand; PAM type: NRG; PAM sequence: GAG
agttctgggattacaggcat

SEQ ID NO: 33625 - DNA, 20 bp, Artificial Sequence
  Description of Artificial Sequence: Synthetic oligonucleotide
  Target: ATXN2; (-) strand; PAM type: NRG; PAM sequence: AGG
tcccaaagttctgggattac

SEQ ID NO: 33626 - DNA, 20 bp, Artificial Sequence
  Description of Artificial Sequence: Synthetic oligonucleotide
  Target: ATXN2; (-) strand; PAM type: NRG; PAM sequence: CAG
ctcccaaagttctgggatta

SEQ ID NO: 33627 - DNA, 20 bp, Artificial Sequence
  Description of Artificial Sequence: Synthetic oligonucleotide
  Target: ATXN2; (-) strand; PAM type: NRG; PAM sequence: GGG
cctcagcctcccaaagttct

SEQ ID NO: 33628 - DNA, 20 bp, Artificial Sequence
  Description of Artificial Sequence: Synthetic oligonucleotide
  Target: ATXN2; (-) strand; PAM type: NRG; PAM sequence: TGG
gcctcagcctcccaaagttc

SEQ ID NO: 33629 - DNA, 20 bp, Artificial Sequence
  Description of Artificial Sequence: Synthetic oligonucleotide
  Target: ATXN2; (-) strand; PAM type: NRG; PAM sequence: AAG
ccacctgcctcagcctccca

SEQ ID NO: 33630 - DNA, 20 bp, Artificial Sequence
  Description of Artificial Sequence: Synthetic oligonucleotide
  Target: ATXN2; (-) strand; PAM type: NRG; PAM sequence: CAG
ctcaggtgatccacctgcct

SEQ ID NO: 33631 - DNA, 20 bp, Artificial Sequence
  Description of Artificial Sequence: Synthetic oligonucleotide
  Target: ATXN2; (-) strand; PAM type: NRG; PAM sequence: AGG
ggtctcaaactcctgacctc

SEQ ID NO: 33632 - DNA, 20 bp, Artificial Sequence
  Description of Artificial Sequence: Synthetic oligonucleotide
  Target: ATXN2; (-) strand; PAM type: NRG; PAM sequence: CAG
tggtctcaaactcctgacct

SEQ ID NO: 33633 - DNA, 20 bp, Artificial Sequence
  Description of Artificial Sequence: Synthetic oligonucleotide
  Target: ATXN2; (-) strand; PAM type: NRG; PAM sequence: TGG
tttcaccatgttggctagaa

SEQ ID NO: 33634 - DNA, 20 bp, Artificial Sequence
  Description of Artificial Sequence: Synthetic oligonucleotide
  Target: ATXN2; (-) strand; PAM type: NRG; PAM sequence: TAG
cagggtttcaccatgttggc

SEQ ID NO: 33635 - DNA, 20 bp, Artificial Sequence
  Description of Artificial Sequence: Synthetic oligonucleotide
  Target: ATXN2; (-) strand; PAM type: NRG; PAM sequence: TGG
gagacagggtttcaccatgt

SEQ ID NO: 33636 - DNA, 20 bp, Artificial Sequence
  Description of Artificial Sequence: Synthetic oligonucleotide
  Target: ATXN2; (-) strand; PAM type: NRG; PAM sequence: GGG
ttgtatttttagtagagaca

SEQ ID NO: 33637 - DNA, 20 bp, Artificial Sequence
  Description of Artificial Sequence: Synthetic oligonucleotide
  Target: ATXN2; (-) strand; PAM type: NRG; PAM sequence: AGG
tttgtatttttagtagagac

SEQ ID NO: 33638 - DNA, 20 bp, Artificial Sequence
  Description of Artificial Sequence: Synthetic oligonucleotide
  Target: ATXN2; (-) strand; PAM type: NRG; PAM sequence: CAG
ttttgtatttttagtagaga

SEQ ID NO: 33639 - DNA, 20 bp, Artificial Sequence
  Description of Artificial Sequence: Synthetic oligonucleotide
  Target: ATXN2; (-) strand; PAM type: NRG; PAM sequence: GAG
taatttttgtatttttagta

SEQ ID NO: 33640 - DNA, 20 bp, Artificial Sequence
  Description of Artificial Sequence: Synthetic oligonucleotide
  Target: ATXN2; (-) strand; PAM type: NRG; PAM sequence: TAG
gctaatttttgtatttttag

SEQ ID NO: 33641 - DNA, 20 bp, Artificial Sequence
  Description of Artificial Sequence: Synthetic oligonucleotide
  Target: ATXN2; (-) strand; PAM type: NRG; PAM sequence: TAG
ctggctaatttttgtatttt

SEQ ID NO: 33642 - DNA, 20 bp, Artificial Sequence
  Description of Artificial Sequence: Synthetic oligonucleotide
  Target: ATXN2; (-) strand; PAM type: NRG; PAM sequence: TGG
catgcgcacaccaccacgcc

SEQ ID NO: 33643 - DNA, 20 bp, Artificial Sequence
  Description of Artificial Sequence: Synthetic oligonucleotide
  Target: ATXN2; (-) strand; PAM type: NRG; PAM sequence: GGG
cctcagcctcctgagtagct

SEQ ID NO: 33644 - DNA, 20 bp, Artificial Sequence
  Description of Artificial Sequence: Synthetic oligonucleotide
  Target: ATXN2; (-) strand; PAM type: NRG; PAM sequence: TGG
gcctcagcctcctgagtagc

SEQ ID NO: 33645 - DNA, 20 bp, Artificial Sequence
  Description of Artificial Sequence: Synthetic oligonucleotide
  Target: ATXN2; (-) strand; PAM type: NRG; PAM sequence: TAG
tcctgcctcagcctcctgag

SEQ ID NO: 33646 - DNA, 20 bp, Artificial Sequence
  Description of Artificial Sequence: Synthetic oligonucleotide
  Target: ATXN2; (-) strand; PAM type: NRG; PAM sequence: GAG
ttctcctgcctcagcctcct

SEQ ID NO: 33647 - DNA, 20 bp, Artificial Sequence
  Description of Artificial Sequence: Synthetic oligonucleotide
  Target: ATXN2; (-) strand; PAM type: NRG; PAM sequence: CAG
ttcaagtgattctcctgcct

SEQ ID NO: 33648 - DNA, 20 bp, Artificial Sequence
  Description of Artificial Sequence: Synthetic oligonucleotide
  Target: ATXN2; (-) strand; PAM type: NRG; PAM sequence: AAG
aacctttgcctcccgggttc

SEQ ID NO: 33649 - DNA, 20 bp, Artificial Sequence
  Description of Artificial Sequence: Synthetic oligonucleotide
  Target: ATXN2; (-) strand; PAM type: NRG; PAM sequence: GGG
tactgcaacctttgcctccc

SEQ ID NO: 33650 - DNA, 20 bp, Artificial Sequence
  Description of Artificial Sequence: Synthetic oligonucleotide
  Target: ATXN2; (-) strand; PAM type: NRG; PAM sequence: CGG
ttactgcaacctttgcctcc

SEQ ID NO: 33651 - DNA, 20 bp, Artificial Sequence
  Description of Artificial Sequence: Synthetic oligonucleotide
  Target: ATXN2; (-) strand; PAM type: NRG; PAM sequence: TGG
tcgcccaggctggagtgcag

SEQ ID NO: 33652 - DNA, 20 bp, Artificial Sequence
  Description of Artificial Sequence: Synthetic oligonucleotide
  Target: ATXN2; (-) strand; PAM type: NRG; PAM sequence: CAG
ctgtcgcccaggctggagtg

SEQ ID NO: 33653 - DNA, 20 bp, Artificial Sequence
  Description of Artificial Sequence: Synthetic oligonucleotide
  Target: ATXN2; (-) strand; PAM type: NRG; PAM sequence: GAG
ttgctctgtcgcccaggctg

SEQ ID NO: 33654 - DNA, 20 bp, Artificial Sequence
  Description of Artificial Sequence: Synthetic oligonucleotide
  Target: ATXN2; (-) strand; PAM type: NRG; PAM sequence: TGG
tcttgctctgtcgcccaggc

SEQ ID NO: 33655 - DNA, 20 bp, Artificial Sequence
  Description of Artificial Sequence: Synthetic oligonucleotide
  Target: ATXN2; (-) strand; PAM type: NRG; PAM sequence: AGG
ggagtcttgctctgtcgccc

SEQ ID NO: 33656 - DNA, 20 bp, Artificial Sequence
  Description of Artificial Sequence: Synthetic oligonucleotide
  Target: ATXN2; (-) strand; PAM type: NRG; PAM sequence: CAG
cggagtcttgctctgtcgcc

SEQ ID NO: 33657 - DNA, 20 bp, Artificial Sequence
  Description of Artificial Sequence: Synthetic oligonucleotide
  Target: ATXN2; (-) strand; PAM type: NRG; PAM sequence: GAG
ttttttttttttttgagacg

SEQ ID NO: 33658 - DNA, 20 bp, Artificial Sequence
  Description of Artificial Sequence: Synthetic oligonucleotide
  Target: ATXN2; (-) strand; PAM type: NRG; PAM sequence: CGG
ttttttttttttttttgaga

SEQ ID NO: 33659 - DNA, 20 bp, Artificial Sequence
  Description of Artificial Sequence: Synthetic oligonucleotide
  Target: ATXN2; (-) strand; PAM type: NRG; PAM sequence: GAG
tttttttttttttttttttt

SEQ ID NO: 33660 - DNA, 20 bp, Artificial Sequence
  Description of Artificial Sequence: Synthetic oligonucleotide
  Target: ATXN2; (-) strand; PAM type: NRG; PAM sequence: CAG
agatgtaaacagtttattaa

SEQ ID NO: 33661 - DNA, 20 bp, Artificial Sequence
  Description of Artificial Sequence: Synthetic oligonucleotide
  Target: ATXN2; (-) strand; PAM type: NRG; PAM sequence: CAG
aacttcaacggagatgtaaa

SEQ ID NO: 33662 - DNA, 20 bp, Artificial Sequence
  Description of Artificial Sequence: Synthetic oligonucleotide
  Target: ATXN2; (-) strand; PAM type: NRG; PAM sequence: GAG
tgattgtgacaacttcaacg

SEQ ID NO: 33663 - DNA, 20 bp, Artificial Sequence
  Description of Artificial Sequence: Synthetic oligonucleotide
  Target: ATXN2; (-) strand; PAM type: NRG; PAM sequence: CGG
agtgattgtgacaacttcaa

SEQ ID NO: 33664 - DNA, 20 bp, Artificial Sequence
  Description of Artificial Sequence: Synthetic oligonucleotide
  Target: ATXN2; (-) strand; PAM type: NRG; PAM sequence: AAG
tttttttttttagctatttc

SEQ ID NO: 33665 - DNA, 20 bp, Artificial Sequence
  Description of Artificial Sequence: Synthetic oligonucleotide
  Target: ATXN2; (-) strand; PAM type: NRG; PAM sequence: TAG
caaaaccctatttttttttt

SEQ ID NO: 33666 - DNA, 20 bp, Artificial Sequence
  Description of Artificial Sequence: Synthetic oligonucleotide
  Target: ATXN2; (-) strand; PAM type: NRG; PAM sequence: GAG
ttgatgttgtgtaaatagtt

SEQ ID NO: 33667 - DNA, 20 bp, Artificial Sequence
  Description of Artificial Sequence: Synthetic oligonucleotide
  Target: ATXN2; (-) strand; PAM type: NRG; PAM sequence: TAG
gtattttgatgttgtgtaaa

SEQ ID NO: 33668 - DNA, 20 bp, Artificial Sequence
  Description of Artificial Sequence: Synthetic oligonucleotide
  Target: ATXN2; (-) strand; PAM type: NRG; PAM sequence: TAG
ttttctgttttgactagtga

SEQ ID NO: 33669 - DNA, 20 bp, Artificial Sequence
  Description of Artificial Sequence: Synthetic oligonucleotide
  Target: ATXN2; (-) strand; PAM type: NRG; PAM sequence: TAG
ttacaattttctgttttgac

SEQ ID NO: 33670 - DNA, 20 bp, Artificial Sequence
  Description of Artificial Sequence: Synthetic oligonucleotide
  Target: ATXN2; (-) strand; PAM type: NRG; PAM sequence: TAG
ggttttagaagattgttctc

SEQ ID NO: 33671 - DNA, 20 bp, Artificial Sequence
  Description of Artificial Sequence: Synthetic oligonucleotide
  Target: ATXN2; (-) strand; PAM type: NRG; PAM sequence: AAG
aacgaattttaaggttttag

SEQ ID NO: 33672 - DNA, 20 bp, Artificial Sequence
  Description of Artificial Sequence: Synthetic oligonucleotide
  Target: ATXN2; (-) strand; PAM type: NRG; PAM sequence: TAG
tgaaacgaattttaaggttt

SEQ ID NO: 33673 - DNA, 20 bp, Artificial Sequence
  Description of Artificial Sequence: Synthetic oligonucleotide
  Target: ATXN2; (-) strand; PAM type: NRG; PAM sequence: AGG
ttactttgaaacgaatttta

SEQ ID NO: 33674 - DNA, 20 bp, Artificial Sequence
  Description of Artificial Sequence: Synthetic oligonucleotide
  Target: ATXN2; (-) strand; PAM type: NRG; PAM sequence: AAG
tttactttgaaacgaatttt

SEQ ID NO: 33675 - DNA, 20 bp, Artificial Sequence
  Description of Artificial Sequence: Synthetic oligonucleotide
  Target: ATXN2; (-) strand; PAM type: NRG; PAM sequence: AAG
ttagaactgtcaccttagca

SEQ ID NO: 33676 - DNA, 20 bp, Artificial Sequence
  Description of Artificial Sequence: Synthetic oligonucleotide
  Target: ATXN2; (-) strand; PAM type: NRG; PAM sequence: TAG
ccgtgttagaactgtcacct

SEQ ID NO: 33677 - DNA, 20 bp, Artificial Sequence
  Description of Artificial Sequence: Synthetic oligonucleotide
  Target: ATXN2; (-) strand; PAM type: NRG; PAM sequence: TAG
ctaaatagctacagccgtgt

SEQ ID NO: 33678 - DNA, 20 bp, Artificial Sequence
  Description of Artificial Sequence: Synthetic oligonucleotide
  Target: ATXN2; (-) strand; PAM type: NRG; PAM sequence: CAG
ttttttgtcctaaatagcta

SEQ ID NO: 33679 - DNA, 20 bp, Artificial Sequence
  Description of Artificial Sequence: Synthetic oligonucleotide
  Target: ATXN2; (-) strand; PAM type: NRG; PAM sequence: TAG
tctcatttttttgtcctaaa

SEQ ID NO: 33680 - DNA, 20 bp, Artificial Sequence
  Description of Artificial Sequence: Synthetic oligonucleotide
  Target: ATXN2; (-) strand; PAM type: NRG; PAM sequence: AGG
aacaaacaaacaaaaaaagg

SEQ ID NO: 33681 - DNA, 20 bp, Artificial Sequence
  Description of Artificial Sequence: Synthetic oligonucleotide
  Target: ATXN2; (-) strand; PAM type: NRG; PAM sequence: GAG
aaacaaacaaacaaaaaaag

SEQ ID NO: 33682 - DNA, 20 bp, Artificial Sequence
  Description of Artificial Sequence: Synthetic oligonucleotide
  Target: ATXN2; (-) strand; PAM type: NRG; PAM sequence: AGG
acaaacaaacaaacaaaaaa

SEQ ID NO: 33683 - DNA, 20 bp, Artificial Sequence
  Description of Artificial Sequence: Synthetic oligonucleotide
  Target: ATXN2; (-) strand; PAM type: NRG; PAM sequence: AAG
aacaaacaaacaaacaaaaa

SEQ ID NO: 33684 - DNA, 20 bp, Artificial Sequence
  Description of Artificial Sequence: Synthetic oligonucleotide
  Target: ATXN2; (-) strand; PAM type: NRG; PAM sequence: GAG
tccagcctgggcaacagagc

SEQ ID NO: 33685 - DNA, 20 bp, Artificial Sequence
  Description of Artificial Sequence: Synthetic oligonucleotide
  Target: ATXN2; (-) strand; PAM type: NRG; PAM sequence: GAG
acactccagcctgggcaaca

SEQ ID NO: 33686 - DNA, 20 bp, Artificial Sequence
  Description of Artificial Sequence: Synthetic oligonucleotide
  Target: ATXN2; (-) strand; PAM type: NRG; PAM sequence: CAG
ttacactccagcctgggcaa

SEQ ID NO: 33687 - DNA, 20 bp, Artificial Sequence
  Description of Artificial Sequence: Synthetic oligonucleotide
  Target: ATXN2; (-) strand; PAM type: NRG; PAM sequence: GGG
atgccattacactccagcct

SEQ ID NO: 33688 - DNA, 20 bp, Artificial Sequence
  Description of Artificial Sequence: Synthetic oligonucleotide
  Target: ATXN2; (-) strand; PAM type: NRG; PAM sequence: TGG
catgccattacactccagcc

SEQ ID NO: 33689 - DNA, 20 bp, Artificial Sequence
  Description of Artificial Sequence: Synthetic oligonucleotide
  Target: ATXN2; (-) strand; PAM type: NRG; PAM sequence: CAG
gagatcatgccattacactc

SEQ ID NO: 33690 - DNA, 20 bp, Artificial Sequence
  Description of Artificial Sequence: Synthetic oligonucleotide
  Target: ATXN2; (-) strand; PAM type: NRG; PAM sequence: GAG
tgcggaggttgcagtgagct

SEQ ID NO: 33691 - DNA, 20 bp, Artificial Sequence
  Description of Artificial Sequence: Synthetic oligonucleotide
  Target: ATXN2; (-) strand; PAM type: NRG; PAM sequence: GAG
atgagtgcggaggttgcagt

SEQ ID NO: 33692 - DNA, 20 bp, Artificial Sequence
  Description of Artificial Sequence: Synthetic oligonucleotide
  Target: ATXN2; (-) strand; PAM type: NRG; PAM sequence: CAG
tgcaatgagtgcggaggttg

SEQ ID NO: 33693 - DNA, 20 bp, Artificial Sequence
  Description of Artificial Sequence: Synthetic oligonucleotide
  Target: ATXN2; (-) strand; PAM type: NRG; PAM sequence: AGG
ggaggttgcaatgagtgcgg

SEQ ID NO: 33694 - DNA, 20 bp, Artificial Sequence
  Description of Artificial Sequence: Synthetic oligonucleotide
  Target: ATXN2; (-) strand; PAM type: NRG; PAM sequence: GAG
cggaggttgcaatgagtgcg

SEQ ID NO: 33695 - DNA, 20 bp, Artificial Sequence
  Description of Artificial Sequence: Synthetic oligonucleotide
  Target: ATXN2; (-) strand; PAM type: NRG; PAM sequence: CGG
cccggaggttgcaatgagtg

SEQ ID NO: 33696 - DNA, 20 bp, Artificial Sequence
  Description of Artificial Sequence: Synthetic oligonucleotide
  Target: ATXN2; (-) strand; PAM type: NRG; PAM sequence: GAG
ttgatcccggaggttgcaat

SEQ ID NO: 33697 - DNA, 20 bp, Artificial Sequence
  Description of Artificial Sequence: Synthetic oligonucleotide
  Target: ATXN2; (-) strand; PAM type: NRG; PAM sequence: AGG
agagaattgcttgatcccgg

SEQ ID NO: 33698 - DNA, 20 bp, Artificial Sequence
  Description of Artificial Sequence: Synthetic oligonucleotide
  Target: ATXN2; (-) strand; PAM type: NRG; PAM sequence: GAG
aagagaattgcttgatcccg

SEQ ID NO: 33699 - DNA, 20 bp, Artificial Sequence
  Description of Artificial Sequence: Synthetic oligonucleotide
  Target: ATXN2; (-) strand; PAM type: NRG; PAM sequence: CGG
ggaagagaattgcttgatcc

SEQ ID NO: 33700 - DNA, 20 bp, Artificial Sequence
  Description of Artificial Sequence: Synthetic oligonucleotide
  Target: ATXN2; (-) strand; PAM type: NRG; PAM sequence: GAG
ttcttgggaggctgagggaa

SEQ ID NO: 33701 - DNA, 20 bp, Artificial Sequence
  Description of Artificial Sequence: Synthetic oligonucleotide
  Target: ATXN2; (-) strand; PAM type: NRG; PAM sequence: AAG
gcttcttgggaggctgaggg

SEQ ID NO: 33702 - DNA, 20 bp, Artificial Sequence
  Description of Artificial Sequence: Synthetic oligonucleotide
  Target: ATXN2; (-) strand; PAM type: NRG; PAM sequence: GGG
ccagcttcttgggaggctga

SEQ ID NO: 33703 - DNA, 20 bp, Artificial Sequence
  Description of Artificial Sequence: Synthetic oligonucleotide
  Target: ATXN2; (-) strand; PAM type: NRG; PAM sequence: AGG
cccagcttcttgggaggctg

SEQ ID NO: 33704 - DNA, 20 bp, Artificial Sequence
  Description of Artificial Sequence: Synthetic oligonucleotide
  Target: ATXN2; (-) strand; PAM type: NRG; PAM sequence: GAG
tcccagcttcttgggaggct

SEQ ID NO: 33705 - DNA, 20 bp, Artificial Sequence
  Description of Artificial Sequence: Synthetic oligonucleotide
  Target: ATXN2; (-) strand; PAM type: NRG; PAM sequence: AGG
tgtaatcccagcttcttggg

SEQ ID NO: 33706 - DNA, 20 bp, Artificial Sequence
  Description of Artificial Sequence: Synthetic oligonucleotide
  Target: ATXN2; (-) strand; PAM type: NRG; PAM sequence: GAG
ctgtaatcccagcttcttgg

SEQ ID NO: 33707 - DNA, 20 bp, Artificial Sequence
  Description of Artificial Sequence: Synthetic oligonucleotide
  Target: ATXN2; (-) strand; PAM type: NRG; PAM sequence: GGG
gcctgtaatcccagcttctt

SEQ ID NO: 33708 - DNA, 20 bp, Artificial Sequence
  Description of Artificial Sequence: Synthetic oligonucleotide
  Target: ATXN2; (-) strand; PAM type: NRG; PAM sequence: TGG
cgcctgtaatcccagcttct

SEQ ID NO: 33709 - DNA, 20 bp, Artificial Sequence
  Description of Artificial Sequence: Synthetic oligonucleotide
  Target: ATXN2; (-) strand; PAM type: NRG; PAM sequence: CAG
gtggtgggcgcctgtaatcc

SEQ ID NO: 33710 - DNA, 20 bp, Artificial Sequence
  Description of Artificial Sequence: Synthetic oligonucleotide
  Target: ATXN2; (-) strand; PAM type: NRG; PAM sequence: GGG
aattagccgggcatggtggt

SEQ ID NO: 33711 - DNA, 20 bp, Artificial Sequence
  Description of Artificial Sequence: Synthetic oligonucleotide
  Target: ATXN2; (-) strand; PAM type: NRG; PAM sequence: TGG
aaattagccgggcatggtgg

SEQ ID NO: 33712 - DNA, 20 bp, Artificial Sequence
  Description of Artificial Sequence: Synthetic oligonucleotide
  Target: ATXN2; (-) strand; PAM type: NRG; PAM sequence: TGG
caaaaattagccgggcatgg

SEQ ID NO: 33713 - DNA, 20 bp, Artificial Sequence
  Description of Artificial Sequence: Synthetic oligonucleotide
  Target: ATXN2; (-) strand; PAM type: NRG; PAM sequence: TGG
atacaaaaattagccgggca

SEQ ID NO: 33714 - DNA, 20 bp, Artificial Sequence
  Description of Artificial Sequence: Synthetic oligonucleotide
  Target: ATXN2; (-) strand; PAM type: NRG; PAM sequence: GGG
taaaaatacaaaaattagcc

SEQ ID NO: 33715 - DNA, 20 bp, Artificial Sequence
  Description of Artificial Sequence: Synthetic oligonucleotide
  Target: ATXN2; (-) strand; PAM type: NRG; PAM sequence: CGG
ctaaaaatacaaaaattagc

SEQ ID NO: 33716 - DNA, 20 bp, Artificial Sequence
  Description of Artificial Sequence: Synthetic oligonucleotide
  Target: ATXN2; (-) strand; PAM type: NRG; PAM sequence: TAG
tctactaaaaatacaaaaat

SEQ ID NO: 33717 - DNA, 20 bp, Artificial Sequence
  Description of Artificial Sequence: Synthetic oligonucleotide
  Target: ATXN2; (-) strand; PAM type: NRG; PAM sequence: TGG
tgagactagtctggccaaca

SEQ ID NO: 33718 - DNA, 20 bp, Artificial Sequence
  Description of Artificial Sequence: Synthetic oligonucleotide
  Target: ATXN2; (-) strand; PAM type: NRG; PAM sequence: TGG
tcaggagtttgagactagtc

SEQ ID NO: 33719 - DNA, 20 bp, Artificial Sequence
  Description of Artificial Sequence: Synthetic oligonucleotide
  Target: ATXN2; (-) strand; PAM type: NRG; PAM sequence: TAG
tggggtcaggagtttgagac

SEQ ID NO: 33720 - DNA, 20 bp, Artificial Sequence
  Description of Artificial Sequence: Synthetic oligonucleotide
  Target: ATXN2; (-) strand; PAM type: NRG; PAM sequence: GAG
tcacctggggtcaggagttt

SEQ ID NO: 33721 - DNA, 20 bp, Artificial Sequence
  Description of Artificial Sequence: Synthetic oligonucleotide
  Target: ATXN2; (-) strand; PAM type: NRG; PAM sequence: GAG
ggtggatcacctggggtcag

SEQ ID NO: 33722 - DNA, 20 bp, Artificial Sequence
  Description of Artificial Sequence: Synthetic oligonucleotide
  Target: ATXN2; (-) strand; PAM type: NRG; PAM sequence: AGG
cgggtggatcacctggggtc

SEQ ID NO: 33723 - DNA, 20 bp, Artificial Sequence
  Description of Artificial Sequence: Synthetic oligonucleotide
  Target: ATXN2; (-) strand; PAM type: NRG; PAM sequence: CAG
gcgggtggatcacctggggt

SEQ ID NO: 33724 - DNA, 20 bp, Artificial Sequence
  Description of Artificial Sequence: Synthetic oligonucleotide
  Target: ATXN2; (-) strand; PAM type: NRG; PAM sequence: GGG
tgaggcgggtggatcacctg

SEQ ID NO: 33725 - DNA, 20 bp, Artificial Sequence
  Description of Artificial Sequence: Synthetic oligonucleotide
  Target: ATXN2; (-) strand; PAM type: NRG; PAM sequence: GGG
ctgaggcgggtggatcacct

SEQ ID NO: 33726 - DNA, 20 bp, Artificial Sequence
  Description of Artificial Sequence: Synthetic oligonucleotide
  Target: ATXN2; (-) strand; PAM type: NRG; PAM sequence: TGG
gctgaggcgggtggatcacc

SEQ ID NO: 33727 - DNA, 20 bp, Artificial Sequence
  Description of Artificial Sequence: Synthetic oligonucleotide
  Target: ATXN2; (-) strand; PAM type: NRG; PAM sequence: TGG
ctttaggaggctgaggcggg

SEQ ID NO: 33728 - DNA, 20 bp, Artificial Sequence
  Description of Artificial Sequence: Synthetic oligonucleotide
  Target: ATXN2; (-) strand; PAM type: NRG; PAM sequence: GGG
gcactttaggaggctgaggc

SEQ ID NO: 33729 - DNA, 20 bp, Artificial Sequence
  Description of Artificial Sequence: Synthetic oligonucleotide
  Target: ATXN2; (-) strand; PAM type: NRG; PAM sequence: CGG
agcactttaggaggctgagg

SEQ ID NO: 33730 - DNA, 20 bp, Artificial Sequence
  Description of Artificial Sequence: Synthetic oligonucleotide
  Target: ATXN2; (-) strand; PAM type: NRG; PAM sequence: AGG
cccagcactttaggaggctg

SEQ ID NO: 33731 - DNA, 20 bp, Artificial Sequence
  Description of Artificial Sequence: Synthetic oligonucleotide
  Target: ATXN2; (-) strand; PAM type: NRG; PAM sequence: GAG
tcccagcactttaggaggct

SEQ ID NO: 33732 - DNA, 20 bp, Artificial Sequence
  Description of Artificial Sequence: Synthetic oligonucleotide
  Target: ATXN2; (-) strand; PAM type: NRG; PAM sequence: AGG
tgtaatcccagcactttagg

SEQ ID NO: 33733 - DNA, 20 bp, Artificial Sequence
  Description of Artificial Sequence: Synthetic oligonucleotide
  Target: ATXN2; (-) strand; PAM type: NRG; PAM sequence: GAG
ctgtaatcccagcactttag

SEQ ID NO: 33734 - DNA, 20 bp, Artificial Sequence
  Description of Artificial Sequence: Synthetic oligonucleotide
  Target: ATXN2; (-) strand; PAM type: NRG; PAM sequence: AGG
acctgtaatcccagcacttt

SEQ ID NO: 33735 - DNA, 20 bp, Artificial Sequence
  Description of Artificial Sequence: Synthetic oligonucleotide
  Target: ATXN2; (-) strand; PAM type: NRG; PAM sequence: TAG
tacctgtaatcccagcactt

SEQ ID NO: 33736 - DNA, 20 bp, Artificial Sequence
  Description of Artificial Sequence: Synthetic oligonucleotide
  Target: ATXN2; (-) strand; PAM type: NRG; PAM sequence: CAG
gtggctcatacctgtaatcc

SEQ ID NO: 33737 - DNA, 20 bp, Artificial Sequence
  Description of Artificial Sequence: Synthetic oligonucleotide
  Target: ATXN2; (-) strand; PAM type: NRG; PAM sequence: TGG
gatctcaaggccaggcgcgg

SEQ ID NO: 33738 - DNA, 20 bp, Artificial Sequence
  Description of Artificial Sequence: Synthetic oligonucleotide
  Target: ATXN2; (-) strand; PAM type: NRG; PAM sequence: CGG
gaggatctcaaggccaggcg

SEQ ID NO: 33739 - DNA, 20 bp, Artificial Sequence
  Description of Artificial Sequence: Synthetic oligonucleotide
  Target: ATXN2; (-) strand; PAM type: NRG; PAM sequence: AGG
taaaggaggatctcaaggcc

SEQ ID NO: 33740 - DNA, 20 bp, Artificial Sequence
  Description of Artificial Sequence: Synthetic oligonucleotide
  Target: ATXN2; (-) strand; PAM type: NRG; PAM sequence: CAG
ttaaaggaggatctcaaggc

SEQ ID NO: 33741 - DNA, 20 bp, Artificial Sequence
  Description of Artificial Sequence: Synthetic oligonucleotide
  Target: ATXN2; (-) strand; PAM type: NRG; PAM sequence: AGG
tgacttaaaggaggatctca

SEQ ID NO: 33742 - DNA, 20 bp, Artificial Sequence
  Description of Artificial Sequence: Synthetic oligonucleotide
  Target: ATXN2; (-) strand; PAM type: NRG; PAM sequence: AAG
ttgacttaaaggaggatctc

SEQ ID NO: 33743 - DNA, 20 bp, Artificial Sequence
  Description of Artificial Sequence: Synthetic oligonucleotide
  Target: ATXN2; (-) strand; PAM type: NRG; PAM sequence: AGG
catatattttgacttaaagg

SEQ ID NO: 33744 - DNA, 20 bp, Artificial Sequence
  Description of Artificial Sequence: Synthetic oligonucleotide
  Target: ATXN2; (-) strand; PAM type: NRG; PAM sequence: GAG
ccatatattttgacttaaag

SEQ ID NO: 33745 - DNA, 20 bp, Artificial Sequence
  Description of Artificial Sequence: Synthetic oligonucleotide
  Target: ATXN2; (-) strand; PAM type: NRG; PAM sequence: AGG
agccatatattttgacttaa

SEQ ID NO: 33746 - DNA, 20 bp, Artificial Sequence
  Description of Artificial Sequence: Synthetic oligonucleotide
  Target: ATXN2; (-) strand; PAM type: NRG; PAM sequence: AAG
tagccatatattttgactta

SEQ ID NO: 33747 - DNA, 20 bp, Artificial Sequence
  Description of Artificial Sequence: Synthetic oligonucleotide
  Target: ATXN2; (-) strand; PAM type: NRG; PAM sequence: TAG
ctcatattgtagctatttaa

SEQ ID NO: 33748 - DNA, 20 bp, Artificial Sequence
  Description of Artificial Sequence: Synthetic oligonucleotide
  Target: ATXN2; (-) strand; PAM type: NRG; PAM sequence: TAG
agggatgttaactcatattg

SEQ ID NO: 33749 - DNA, 20 bp, Artificial Sequence
  Description of Artificial Sequence: Synthetic oligonucleotide
  Target: ATXN2; (-) strand; PAM type: NRG; PAM sequence: GGG
tggtttatacttctacataa

SEQ ID NO: 33750 - DNA, 20 bp, Artificial Sequence
  Description of Artificial Sequence: Synthetic oligonucleotide
  Target: ATXN2; (-) strand; PAM type: NRG; PAM sequence: AGG
atggtttatacttctacata

SEQ ID NO: 33751 - DNA, 20 bp, Artificial Sequence
  Description of Artificial Sequence: Synthetic oligonucleotide
  Target: ATXN2; (-) strand; PAM type: NRG; PAM sequence: AAG
aatggtttatacttctacat

SEQ ID NO: 33752 - DNA, 20 bp, Artificial Sequence
  Description of Artificial Sequence: Synthetic oligonucleotide
  Target: ATXN2; (-) strand; PAM type: NRG; PAM sequence: TGG
agtgttactctaattagcaa

SEQ ID NO: 33753 - DNA, 20 bp, Artificial Sequence
  Description of Artificial Sequence: Synthetic oligonucleotide
  Target: ATXN2; (-) strand; PAM type: NRG; PAM sequence: TAG
attttcagtgttactctaat

SEQ ID NO: 33754 - DNA, 20 bp, Artificial Sequence
  Description of Artificial Sequence: Synthetic oligonucleotide
  Target: ATXN2; (-) strand; PAM type: NRG; PAM sequence: CAG
taaatgtaaacttgtatttt

SEQ ID NO: 33755 - DNA, 20 bp, Artificial Sequence
  Description of Artificial Sequence: Synthetic oligonucleotide
  Target: ATXN2; (-) strand; PAM type: NRG; PAM sequence: TGG
agtcatggtgttcctttttt

SEQ ID NO: 33756 - DNA, 20 bp, Artificial Sequence
  Description of Artificial Sequence: Synthetic oligonucleotide
  Target: ATXN2; (-) strand; PAM type: NRG; PAM sequence: TGG
tgaaaacatgggatcagtca

SEQ ID NO: 33757 - DNA, 20 bp, Artificial Sequence
  Description of Artificial Sequence: Synthetic oligonucleotide
  Target: ATXN2; (-) strand; PAM type: NRG; PAM sequence: CAG
aaacagtgaaaacatgggat

SEQ ID NO: 33758 - DNA, 20 bp, Artificial Sequence
  Description of Artificial Sequence: Synthetic oligonucleotide
  Target: ATXN2; (-) strand; PAM type: NRG; PAM sequence: GGG
ttctgaaacagtgaaaacat

SEQ ID NO: 33759 - DNA, 20 bp, Artificial Sequence
  Description of Artificial Sequence: Synthetic oligonucleotide
  Target: ATXN2; (-) strand; PAM type: NRG; PAM sequence: TGG
attctgaaacagtgaaaaca

SEQ ID NO: 33760 - DNA, 20 bp, Artificial Sequence
  Description of Artificial Sequence: Synthetic oligonucleotide
  Target: ATXN2; (-) strand; PAM type: NRG; PAM sequence: CAG
aaagattccacattctgaaa

SEQ ID NO: 33761 - DNA, 20 bp, Artificial Sequence
  Description of Artificial Sequence: Synthetic oligonucleotide
  Target: ATXN2; (-) strand; PAM type: NRG; PAM sequence: AAG
tgtaagcctgtagttgctta

SEQ ID NO: 33762 - DNA, 20 bp, Artificial Sequence
  Description of Artificial Sequence: Synthetic oligonucleotide
  Target: ATXN2; (-) strand; PAM type: NRG; PAM sequence: TAG
aagagaaaaatgtaagcctg

SEQ ID NO: 33763 - DNA, 20 bp, Artificial Sequence
  Description of Artificial Sequence: Synthetic oligonucleotide
  Target: ATXN2; (-) strand; PAM type: NRG; PAM sequence: AAG
tttttttaagagaaaaatgt

SEQ ID NO: 33764 - DNA, 20 bp, Artificial Sequence
  Description of Artificial Sequence: Synthetic oligonucleotide
  Target: ATXN2; (-) strand; PAM type: NRG; PAM sequence: GAG
ttttctttttttttttttaa

SEQ ID NO: 33765 - DNA, 20 bp, Artificial Sequence
  Description of Artificial Sequence: Synthetic oligonucleotide
  Target: ATXN2; (-) strand; PAM type: NRG; PAM sequence: AAG
ctttttcttttttttttttt

SEQ ID NO: 33766 - DNA, 20 bp, Artificial Sequence
  Description of Artificial Sequence: Synthetic oligonucleotide
  Target: ATXN2; (-) strand; PAM type: NRG; PAM sequence: TGG
gtttgggccaaaacttgctt

SEQ ID NO: 33767 - DNA, 20 bp, Artificial Sequence
  Description of Artificial Sequence: Synthetic oligonucleotide
  Target: ATXN2; (-) strand; PAM type: NRG; PAM sequence: GGG
aaaataaactttttaagttt

SEQ ID NO: 33768 - DNA, 20 bp, Artificial Sequence
  Description of Artificial Sequence: Synthetic oligonucleotide
  Target: ATXN2; (-) strand; PAM type: NRG; PAM sequence: TGG
gaaaataaactttttaagtt

SEQ ID NO: 33769 - DNA, 20 bp, Artificial Sequence
  Description of Artificial Sequence: Synthetic oligonucleotide
  Target: ATXN2; (-) strand; PAM type: NRG; PAM sequence: AAG
gtggagaaaataaacttttt

SEQ ID NO: 33770 - DNA, 20 bp, Artificial Sequence
  Description of Artificial Sequence: Synthetic oligonucleotide
  Target: ATXN2; (-) strand; PAM type: NRG; PAM sequence: GAG
gtttttgtttcaagtatgtg

SEQ ID NO: 33771 - DNA, 20 bp, Artificial Sequence
  Description of Artificial Sequence: Synthetic oligonucleotide
  Target: ATXN2; (-) strand; PAM type: NRG; PAM sequence: TGG
tagtttttgtttcaagtatg

SEQ ID NO: 33772 - DNA, 20 bp, Artificial Sequence
  Description of Artificial Sequence: Synthetic oligonucleotide
  Target: ATXN2; (-) strand; PAM type: NRG; PAM sequence: AAG
attagtttagtttttgtttc

SEQ ID NO: 33773 - DNA, 20 bp, Artificial Sequence
  Description of Artificial Sequence: Synthetic oligonucleotide
  Target: ATXN2; (-) strand; PAM type: NRG; PAM sequence: TAG
cgtattttacctaattagtt

SEQ ID NO: 33774 - DNA, 20 bp, Artificial Sequence
  Description of Artificial Sequence: Synthetic oligonucleotide
  Target: ATXN2; (-) strand; PAM type: NRG; PAM sequence: TAG
gcttacgtattttacctaat

SEQ ID NO: 33775 - DNA, 20 bp, Artificial Sequence
  Description of Artificial Sequence: Synthetic oligonucleotide
  Target: ATXN2; (-) strand; PAM type: NRG; PAM sequence: GGG
acatgttttgtttttctttt

SEQ ID NO: 33776 - DNA, 20 bp, Artificial Sequence
  Description of Artificial Sequence: Synthetic oligonucleotide
  Target: ATXN2; (-) strand; PAM type: NRG; PAM sequence: TGG
gacatgttttgtttttcttt

SEQ ID NO: 33777 - DNA, 20 bp, Artificial Sequence
  Description of Artificial Sequence: Synthetic oligonucleotide
  Target: ATXN2; (-) strand; PAM type: NRG; PAM sequence: GAG
gatggctattactaaccaaa

SEQ ID NO: 33778 - DNA, 20 bp, Artificial Sequence
  Description of Artificial Sequence: Synthetic oligonucleotide
  Target: ATXN2; (-) strand; PAM type: NRG; PAM sequence: AAG
tagatggctattactaacca

SEQ ID NO: 33779 - DNA, 20 bp, Artificial Sequence
  Description of Artificial Sequence: Synthetic oligonucleotide
  Target: ATXN2; (-) strand; PAM type: NRG; PAM sequence: TGG
cattagaggtaaattgtaga

SEQ ID NO: 33780 - DNA, 20 bp, Artificial Sequence
  Description of Artificial Sequence: Synthetic oligonucleotide
  Target: ATXN2; (-) strand; PAM type: NRG; PAM sequence: TAG
gggtcattagaggtaaattg

SEQ ID NO: 33781 - DNA, 20 bp, Artificial Sequence
  Description of Artificial Sequence: Synthetic oligonucleotide
  Target: ATXN2; (-) strand; PAM type: NRG; PAM sequence: AGG
ttgacattgagggtcattag

SEQ ID NO: 33782 - DNA, 20 bp, Artificial Sequence
  Description of Artificial Sequence: Synthetic oligonucleotide
  Target: ATXN2; (-) strand; PAM type: NRG; PAM sequence: GAG
attgacattgagggtcatta

SEQ ID NO: 33783 - DNA, 20 bp, Artificial Sequence
  Description of Artificial Sequence: Synthetic oligonucleotide
  Target: ATXN2; (-) strand; PAM type: NRG; PAM sequence: TAG
taattgacattgagggtcat

SEQ ID NO: 33784 - DNA, 20 bp, Artificial Sequence
  Description of Artificial Sequence: Synthetic oligonucleotide
  Target: ATXN2; (-) strand; PAM type: NRG; PAM sequence: GGG
aaaaagttaattgacattga

SEQ ID NO: 33785 - DNA, 20 bp, Artificial Sequence
  Description of Artificial Sequence: Synthetic oligonucleotide
  Target: ATXN2; (-) strand; PAM type: NRG; PAM sequence: AGG
aaaaaagttaattgacattg

SEQ ID NO: 33786 - DNA, 20 bp, Artificial Sequence
  Description of Artificial Sequence: Synthetic oligonucleotide
  Target: ATXN2; (-) strand; PAM type: NRG; PAM sequence: GAG
caaaaaagttaattgacatt

SEQ ID NO: 33787 - DNA, 20 bp, Artificial Sequence
  Description of Artificial Sequence: Synthetic oligonucleotide
  Target: ATXN2; (-) strand; PAM type: NRG; PAM sequence: AAG
tctctgaagttagaccaaaa

SEQ ID NO: 33788 - DNA, 20 bp, Artificial Sequence
  Description of Artificial Sequence: Synthetic oligonucleotide
  Target: ATXN2; (-) strand; PAM type: NRG; PAM sequence: TAG
atactaaccatctctgaagt

SEQ ID NO: 33789 - DNA, 20 bp, Artificial Sequence
  Description of Artificial Sequence: Synthetic oligonucleotide
  Target: ATXN2; (-) strand; PAM type: NRG; PAM sequence: AAG
attgatactaaccatctctg

SEQ ID NO: 33790 - DNA, 20 bp, Artificial Sequence
  Description of Artificial Sequence: Synthetic oligonucleotide
  Target: ATXN2; (-) strand; PAM type: NRG; PAM sequence: TGG
agtaatttataaggtttaaa

SEQ ID NO: 33791 - DNA, 20 bp, Artificial Sequence
  Description of Artificial Sequence: Synthetic oligonucleotide
  Target: ATXN2; (-) strand; PAM type: NRG; PAM sequence: AGG
ggcttcattagtaatttata

SEQ ID NO: 33792 - DNA, 20 bp, Artificial Sequence
  Description of Artificial Sequence: Synthetic oligonucleotide
  Target: ATXN2; (-) strand; PAM type: NRG; PAM sequence: AAG
tggcttcattagtaatttat

SEQ ID NO: 33793 - DNA, 20 bp, Artificial Sequence
  Description of Artificial Sequence: Synthetic oligonucleotide
  Target: ATXN2; (-) strand; PAM type: NRG; PAM sequence: TAG
aattagtcatgtggcttcat

SEQ ID NO: 33794 - DNA, 20 bp, Artificial Sequence
  Description of Artificial Sequence: Synthetic oligonucleotide
  Target: ATXN2; (-) strand; PAM type: NRG; PAM sequence: TGG
atctaggttaattagtcatg

SEQ ID NO: 33795 - DNA, 20 bp, Artificial Sequence
  Description of Artificial Sequence: Synthetic oligonucleotide
  Target: ATXN2; (-) strand; PAM type: NRG; PAM sequence: TAG
tgctttttatctaggttaat

SEQ ID NO: 33796 - DNA, 20 bp, Artificial Sequence
  Description of Artificial Sequence: Synthetic oligonucleotide
  Target: ATXN2; (-) strand; PAM type: NRG; PAM sequence: AGG
tagccgtttgctttttatct

SEQ ID NO: 33797 - DNA, 20 bp, Artificial Sequence
  Description of Artificial Sequence: Synthetic oligonucleotide
  Target: ATXN2; (-) strand; PAM type: NRG; PAM sequence: TAG
ttagccgtttgctttttatc

SEQ ID NO: 33798 - DNA, 20 bp, Artificial Sequence
  Description of Artificial Sequence: Synthetic oligonucleotide
  Target: ATXN2; (-) strand; PAM type: NRG; PAM sequence: TAG
agatttgaaggttgggtatt

SEQ ID NO: 33799 - DNA, 20 bp, Artificial Sequence
  Description of Artificial Sequence: Synthetic oligonucleotide
  Target: ATXN2; (-) strand; PAM type: NRG; PAM sequence: GGG
tgagcaaagatttgaaggtt

SEQ ID NO: 33800 - DNA, 20 bp, Artificial Sequence
  Description of Artificial Sequence: Synthetic oligonucleotide
  Target: ATXN2; (-) strand; PAM type: NRG; PAM sequence: TGG
ttgagcaaagatttgaaggt

SEQ ID NO: 33801 - DNA, 20 bp, Artificial Sequence
  Description of Artificial Sequence: Synthetic oligonucleotide
  Target: ATXN2; (-) strand; PAM type: NRG; PAM sequence: AGG
acatttgagcaaagatttga

SEQ ID NO: 33802 - DNA, 20 bp, Artificial Sequence
  Description of Artificial Sequence: Synthetic oligonucleotide
  Target: ATXN2; (-) strand; PAM type: NRG; PAM sequence: AAG
aacatttgagcaaagatttg

SEQ ID NO: 33803 - DNA, 20 bp, Artificial Sequence
  Description of Artificial Sequence: Synthetic oligonucleotide
  Target: ATXN2; (-) strand; PAM type: NRG; PAM sequence: AAG
gaggagctaacatttgagca

SEQ ID NO: 33804 - DNA, 20 bp, Artificial Sequence
  Description of Artificial Sequence: Synthetic oligonucleotide
  Target: ATXN2; (-) strand; PAM type: NRG; PAM sequence: GAG
taattgaggagctaacattt

SEQ ID NO: 33805 - DNA, 20 bp, Artificial Sequence
  Description of Artificial Sequence: Synthetic oligonucleotide
  Target: ATXN2; (-) strand; PAM type: NRG; PAM sequence: GAG
attgggggaacttaattgag

SEQ ID NO: 33806 - DNA, 20 bp, Artificial Sequence
  Description of Artificial Sequence: Synthetic oligonucleotide
  Target: ATXN2; (-) strand; PAM type: NRG; PAM sequence: AGG
ggattgggggaacttaattg

SEQ ID NO: 33807 - DNA, 20 bp, Artificial Sequence
  Description of Artificial Sequence: Synthetic oligonucleotide
  Target: ATXN2; (-) strand; PAM type: NRG; PAM sequence: GAG
tggattgggggaacttaatt

SEQ ID NO: 33808 - DNA, 20 bp, Artificial Sequence
  Description of Artificial Sequence: Synthetic oligonucleotide
  Target: ATXN2; (-) strand; PAM type: NRG; PAM sequence: GGG
tacaattttaaatggattgg

SEQ ID NO: 33809 - DNA, 20 bp, Artificial Sequence
  Description of Artificial Sequence: Synthetic oligonucleotide
  Target: ATXN2; (-) strand; PAM type: NRG; PAM sequence: GGG
ttacaattttaaatggattg

SEQ ID NO: 33810 - DNA, 20 bp, Artificial Sequence
  Description of Artificial Sequence: Synthetic oligonucleotide
  Target: ATXN2; (-) strand; PAM type: NRG; PAM sequence: GGG
gttacaattttaaatggatt

SEQ ID NO: 33811 - DNA, 20 bp, Artificial Sequence
  Description of Artificial Sequence: Synthetic oligonucleotide
  Target: ATXN2; (-) strand; PAM type: NRG; PAM sequence: TGG
agttacaattttaaatggat

SEQ ID NO: 33812 - DNA, 20 bp, Artificial Sequence
  Description of Artificial Sequence: Synthetic oligonucleotide
  Target: ATXN2; (-) strand; PAM type: NRG; PAM sequence: TGG
gaatgagttacaattttaaa

SEQ ID NO: 33813 - DNA, 20 bp, Artificial Sequence
  Description of Artificial Sequence: Synthetic oligonucleotide
  Target: ATXN2; (-) strand; PAM type: NRG; PAM sequence: GAG
gggagtgtggggaggggaat

SEQ ID NO: 33814 - DNA, 20 bp, Artificial Sequence
  Description of Artificial Sequence: Synthetic oligonucleotide
  Target: ATXN2; (-) strand; PAM type: NRG; PAM sequence: GGG
ggtatagggagtgtggggag

SEQ ID NO: 33815 - DNA, 20 bp, Artificial Sequence
  Description of Artificial Sequence: Synthetic oligonucleotide
  Target: ATXN2; (-) strand; PAM type: NRG; PAM sequence: GGG
aggtatagggagtgtgggga

SEQ ID NO: 33816 - DNA, 20 bp, Artificial Sequence
  Description of Artificial Sequence: Synthetic oligonucleotide
  Target: ATXN2; (-) strand; PAM type: NRG; PAM sequence: AGG
aaggtatagggagtgtgggg

SEQ ID NO: 33817 - DNA, 20 bp, Artificial Sequence
  Description of Artificial Sequence: Synthetic oligonucleotide
  Target: ATXN2; (-) strand; PAM type: NRG; PAM sequence: GAG
aaaggtatagggagtgtggg

SEQ ID NO: 33818 - DNA, 20 bp, Artificial Sequence
  Description of Artificial Sequence: Synthetic oligonucleotide
  Target: ATXN2; (-) strand; PAM type: NRG; PAM sequence: GGG
ttaaaggtatagggagtgtg

SEQ ID NO: 33819 - DNA, 20 bp, Artificial Sequence
  Description of Artificial Sequence: Synthetic oligonucleotide
  Target: ATXN2; (-) strand; PAM type: NRG; PAM sequence: GGG
attaaaggtatagggagtgt

SEQ ID NO: 33820 - DNA, 20 bp, Artificial Sequence
  Description of Artificial Sequence: Synthetic oligonucleotide
  Target: ATXN2; (-) strand; PAM type: NRG; PAM sequence: TGG
gattaaaggtatagggagtg

SEQ ID NO: 33821 - DNA, 20 bp, Artificial Sequence
  Description of Artificial Sequence: Synthetic oligonucleotide
  Target: ATXN2; (-) strand; PAM type: NRG; PAM sequence: GAG
aagcagattaaaggtatagg

SEQ ID NO: 33822 - DNA, 20 bp, Artificial Sequence
  Description of Artificial Sequence: Synthetic oligonucleotide
  Target: ATXN2; (-) strand; PAM type: NRG; PAM sequence: GGG
gaaagcagattaaaggtata

SEQ ID NO: 33823 - DNA, 20 bp, Artificial Sequence
  Description of Artificial Sequence: Synthetic oligonucleotide
  Target: ATXN2; (-) strand; PAM type: NRG; PAM sequence: AGG
agaaagcagattaaaggtat

SEQ ID NO: 33824 - DNA, 20 bp, Artificial Sequence
  Description of Artificial Sequence: Synthetic oligonucleotide
  Target: ATXN2; (-) strand; PAM type: NRG; PAM sequence: TAG
aagaaagcagattaaaggta

SEQ ID NO: 33825 - DNA, 20 bp, Artificial Sequence
  Description of Artificial Sequence: Synthetic oligonucleotide
  Target: ATXN2; (-) strand; PAM type: NRG; PAM sequence: AGG
attagaagaaagcagattaa

SEQ ID NO: 33826 - DNA, 20 bp, Artificial Sequence
  Description of Artificial Sequence: Synthetic oligonucleotide
  Target: ATXN2; (-) strand; PAM type: NRG; PAM sequence: AAG
aattagaagaaagcagatta

SEQ ID NO: 33827 - DNA, 20 bp, Artificial Sequence
  Description of Artificial Sequence: Synthetic oligonucleotide
  Target: ATXN2; (-) strand; PAM type: NRG; PAM sequence: CAG
gctatggaattagaagaaag

SEQ ID NO: 33828 - DNA, 20 bp, Artificial Sequence
  Description of Artificial Sequence: Synthetic oligonucleotide
  Target: ATXN2; (-) strand; PAM type: NRG; PAM sequence: AAG
agagctatggaattagaaga

SEQ ID NO: 33829 - DNA, 20 bp, Artificial Sequence
  Description of Artificial Sequence: Synthetic oligonucleotide
  Target: ATXN2; (-) strand; PAM type: NRG; PAM sequence: AAG
tataagagctatggaattag

SEQ ID NO: 33830 - DNA, 20 bp, Artificial Sequence
  Description of Artificial Sequence: Synthetic oligonucleotide
  Target: ATXN2; (-) strand; PAM type: NRG; PAM sequence: TAG
gtgtataagagctatggaat

SEQ ID NO: 33831 - DNA, 20 bp, Artificial Sequence
  Description of Artificial Sequence: Synthetic oligonucleotide
  Target: ATXN2; (-) strand; PAM type: NRG; PAM sequence: TGG
ataatagtgtataagagcta

SEQ ID NO: 33832 - DNA, 20 bp, Artificial Sequence
  Description of Artificial Sequence: Synthetic oligonucleotide
  Target: ATXN2; (-) strand; PAM type: NRG; PAM sequence: GAG
ctatgtataatagtgtataa

SEQ ID NO: 33833 - DNA, 20 bp, Artificial Sequence
  Description of Artificial Sequence: Synthetic oligonucleotide
  Target: ATXN2; (-) strand; PAM type: NRG; PAM sequence: AAG
gcctatgtataatagtgtat

SEQ ID NO: 33834 - DNA, 20 bp, Artificial Sequence
  Description of Artificial Sequence: Synthetic oligonucleotide
  Target: ATXN2; (-) strand; PAM type: NRG; PAM sequence: TAG
aattaccagcctatgtataa

SEQ ID NO: 33835 - DNA, 20 bp, Artificial Sequence
  Description of Artificial Sequence: Synthetic oligonucleotide
  Target: ATXN2; (-) strand; PAM type: NRG; PAM sequence: CAG
acaatgagacattaaattac

SEQ ID NO: 33836 - DNA, 20 bp, Artificial Sequence
  Description of Artificial Sequence: Synthetic oligonucleotide
  Target: ATXN2; (-) strand; PAM type: NRG; PAM sequence: GAG
aatgtgactaggcagacaat

SEQ ID NO: 33837 - DNA, 20 bp, Artificial Sequence
  Description of Artificial Sequence: Synthetic oligonucleotide
  Target: ATXN2; (-) strand; PAM type: NRG; PAM sequence: CAG
tacattctaatgtgactagg

SEQ ID NO: 33838 - DNA, 20 bp, Artificial Sequence
  Description of Artificial Sequence: Synthetic oligonucleotide
  Target: ATXN2; (-) strand; PAM type: NRG; PAM sequence: AGG
gtttacattctaatgtgact

SEQ ID NO: 33839 - DNA, 20 bp, Artificial Sequence
  Description of Artificial Sequence: Synthetic oligonucleotide
  Target: ATXN2; (-) strand; PAM type: NRG; PAM sequence: TAG
agtttacattctaatgtgac

SEQ ID NO: 33840 - DNA, 20 bp, Artificial Sequence
  Description of Artificial Sequence: Synthetic oligonucleotide
  Target: ATXN2; (-) strand; PAM type: NRG; PAM sequence: GAG
gcaaacatattgtccttttg

SEQ ID NO: 33841 - DNA, 20 bp, Artificial Sequence
  Description of Artificial Sequence: Synthetic oligonucleotide
  Target: ATXN2; (-) strand; PAM type: NRG; PAM sequence: TGG
aagcaaacatattgtccttt

SEQ ID NO: 33842 - DNA, 20 bp, Artificial Sequence
  Description of Artificial Sequence: Synthetic oligonucleotide
  Target: ATXN2; (-) strand; PAM type: NRG; PAM sequence: AAG
ttgggatgaatcagtgaata

SEQ ID NO: 33843 - DNA, 20 bp, Artificial Sequence
  Description of Artificial Sequence: Synthetic oligonucleotide
  Target: ATXN2; (-) strand; PAM type: NRG; PAM sequence: CAG
atggggtttttgggatgaat

SEQ ID NO: 33844 - DNA, 20 bp, Artificial Sequence
  Description of Artificial Sequence: Synthetic oligonucleotide
  Target: ATXN2; (-) strand; PAM type: NRG; PAM sequence: GGG
tctatgtacatggggttttt

SEQ ID NO: 33845 - DNA, 20 bp, Artificial Sequence
  Description of Artificial Sequence: Synthetic oligonucleotide
  Target: ATXN2; (-) strand; PAM type: NRG; PAM sequence: TGG
atctatgtacatggggtttt

SEQ ID NO: 33846 - DNA, 20 bp, Artificial Sequence
  Description of Artificial Sequence: Synthetic oligonucleotide
  Target: ATXN2; (-) strand; PAM type: NRG; PAM sequence: GGG
ttgaagcatctatgtacatg

SEQ ID NO: 33847 - DNA, 20 bp, Artificial Sequence
  Description of Artificial Sequence: Synthetic oligonucleotide
  Target: ATXN2; (-) strand; PAM type: NRG; PAM sequence: GGG
attgaagcatctatgtacat

SEQ ID NO: 33848 - DNA, 20 bp, Artificial Sequence
  Description of Artificial Sequence: Synthetic oligonucleotide
  Target: ATXN2; (-) strand; PAM type: NRG; PAM sequence: TGG
tattgaagcatctatgtaca

SEQ ID NO: 33849 - DNA, 20 bp, Artificial Sequence
  Description of Artificial Sequence: Synthetic oligonucleotide
  Target: ATXN2; (-) strand; PAM type: NRG; PAM sequence: AAG
cgttgaatacagctttattg

SEQ ID NO: 33850 - DNA, 20 bp, Artificial Sequence
  Description of Artificial Sequence: Synthetic oligonucleotide
  Target: ATXN2; (-) strand; PAM type: NRG; PAM sequence: CAG
taaaatatctacgttgaata

SEQ ID NO: 33851 - DNA, 20 bp, Artificial Sequence
  Description of Artificial Sequence: Synthetic oligonucleotide
  Target: ATXN2; (-) strand; PAM type: NRG; PAM sequence: GGG
cagttaaatatcttgtagaa

SEQ ID NO: 33852 - DNA, 20 bp, Artificial Sequence
  Description of Artificial Sequence: Synthetic oligonucleotide
  Target: ATXN2; (-) strand; PAM type: NRG; PAM sequence: AGG
gcagttaaatatcttgtaga

SEQ ID NO: 33853 - DNA, 20 bp, Artificial Sequence
  Description of Artificial Sequence: Synthetic oligonucleotide
  Target: ATXN2; (-) strand; PAM type: NRG; PAM sequence: AAG
tgcagttaaatatcttgtag

SEQ ID NO: 33854 - DNA, 20 bp, Artificial Sequence
  Description of Artificial Sequence: Synthetic oligonucleotide
  Target: ATXN2; (-) strand; PAM type: NRG; PAM sequence: TAG
ttttgcagttaaatatcttg

SEQ ID NO: 33855 - DNA, 20 bp, Artificial Sequence
  Description of Artificial Sequence: Synthetic oligonucleotide
  Target: ATXN2; (-) strand; PAM type: NRG; PAM sequence: CAG
gtgagactgttcatcttttg

SEQ ID NO: 33856 - DNA, 20 bp, Artificial Sequence
  Description of Artificial Sequence: Synthetic oligonucleotide
  Target: ATXN2; (-) strand; PAM type: NRG; PAM sequence: GAG
gcttccatttaaatttcagt

SEQ ID NO: 33857 - DNA, 20 bp, Artificial Sequence
  Description of Artificial Sequence: Synthetic oligonucleotide
  Target: ATXN2; (-) strand; PAM type: NRG; PAM sequence: CAG
tcatgcttccatttaaattt

SEQ ID NO: 33858 - DNA, 20 bp, Artificial Sequence
  Description of Artificial Sequence: Synthetic oligonucleotide
  Target: ATXN2; (-) strand; PAM type: NRG; PAM sequence: TAG
aaatgtgctgtgatttaatg

SEQ ID NO: 33859 - DNA, 20 bp, Artificial Sequence
  Description of Artificial Sequence: Synthetic oligonucleotide
  Target: ATXN2; (-) strand; PAM type: NRG; PAM sequence: GAG
tccagcctgggagacagagt

SEQ ID NO: 33860 - DNA, 20 bp, Artificial Sequence
  Description of Artificial Sequence: Synthetic oligonucleotide
  Target: ATXN2; (-) strand; PAM type: NRG; PAM sequence: GAG
gcactccagcctgggagaca

SEQ ID NO: 33861 - DNA, 20 bp, Artificial Sequence
  Description of Artificial Sequence: Synthetic oligonucleotide
  Target: ATXN2; (-) strand; PAM type: NRG; PAM sequence: CAG
ctgcactccagcctgggaga

SEQ ID NO: 33862 - DNA, 20 bp, Artificial Sequence
  Description of Artificial Sequence: Synthetic oligonucleotide
  Target: ATXN2; (-) strand; PAM type: NRG; PAM sequence: GAG
gccactgcactccagcctgg

SEQ ID NO: 33863 - DNA, 20 bp, Artificial Sequence
  Description of Artificial Sequence: Synthetic oligonucleotide
  Target: ATXN2; (-) strand; PAM type: NRG; PAM sequence: GGG
gtgccactgcactccagcct

SEQ ID NO: 33864 - DNA, 20 bp, Artificial Sequence
  Description of Artificial Sequence: Synthetic oligonucleotide
  Target: ATXN2; (-) strand; PAM type: NRG; PAM sequence: TGG
tgtgccactgcactccagcc

SEQ ID NO: 33865 - DNA, 20 bp, Artificial Sequence
  Description of Artificial Sequence: Synthetic oligonucleotide
  Target: ATXN2; (-) strand; PAM type: NRG; PAM sequence: CAG
gagattgtgccactgcactc

SEQ ID NO: 33866 - DNA, 20 bp, Artificial Sequence
  Description of Artificial Sequence: Synthetic oligonucleotide
  Target: ATXN2; (-) strand; PAM type: NRG; PAM sequence: GAG
ggcggaggttgcagtcagct

SEQ ID NO: 33867 - DNA, 20 bp, Artificial Sequence
  Description of Artificial Sequence: Synthetic oligonucleotide
  Target: ATXN2; (-) strand; PAM type: NRG; PAM sequence: CAG
caggaggcggaggttgcagt

SEQ ID NO: 33868 - DNA, 20 bp, Artificial Sequence
  Description of Artificial Sequence: Synthetic oligonucleotide
  Target: ATXN2; (-) strand; PAM type: NRG; PAM sequence: CAG
agcccaggaggcggaggttg

SEQ ID NO: 33869 - DNA, 20 bp, Artificial Sequence
  Description of Artificial Sequence: Synthetic oligonucleotide
  Target: ATXN2; (-) strand; PAM type: NRG; PAM sequence: AGG
cacttgagcccaggaggcgg

SEQ ID NO: 33870 - DNA, 20 bp, Artificial Sequence
  Description of Artificial Sequence: Synthetic oligonucleotide
  Target: ATXN2; (-) strand; PAM type: NRG; PAM sequence: GAG
tcacttgagcccaggaggcg

SEQ ID NO: 33871 - DNA, 20 bp, Artificial Sequence
  Description of Artificial Sequence: Synthetic oligonucleotide
  Target: ATXN2; (-) strand; PAM type: NRG; PAM sequence: CGG
catcacttgagcccaggagg

SEQ ID NO: 33872 - DNA, 20 bp, Artificial Sequence
  Description of Artificial Sequence: Synthetic oligonucleotide
  Target: ATXN2; (-) strand; PAM type: NRG; PAM sequence: AGG
gagcatcacttgagcccagg

SEQ ID NO: 33873 - DNA, 20 bp, Artificial Sequence
  Description of Artificial Sequence: Synthetic oligonucleotide
  Target: ATXN2; (-) strand; PAM type: NRG; PAM sequence: GAG
ggagcatcacttgagcccag

SEQ ID NO: 33874 - DNA, 20 bp, Artificial Sequence
  Description of Artificial Sequence: Synthetic oligonucleotide
  Target: ATXN2; (-) strand; PAM type: NRG; PAM sequence: AGG
caggagcatcacttgagccc

SEQ ID NO: 33875 - DNA, 20 bp, Artificial Sequence
  Description of Artificial Sequence: Synthetic oligonucleotide
  Target: ATXN2; (-) strand; PAM type: NRG; PAM sequence: CAG
gcaggagcatcacttgagcc

SEQ ID NO: 33876 - DNA, 20 bp, Artificial Sequence
  Description of Artificial Sequence: Synthetic oligonucleotide
  Target: ATXN2; (-) strand; PAM type: NRG; PAM sequence: GAG
ctgaggcaggagcatcactt

SEQ ID NO: 33877 - DNA, 20 bp, Artificial Sequence
  Description of Artificial Sequence: Synthetic oligonucleotide
  Target: ATXN2; (-) strand; PAM type: NRG; PAM sequence: GAG
tacttgggaggctgaggcag

SEQ ID NO: 33878 - DNA, 20 bp, Artificial Sequence
  Description of Artificial Sequence: Synthetic oligonucleotide
  Target: ATXN2; (-) strand; PAM type: NRG; PAM sequence: AGG
gctacttgggaggctgaggc

SEQ ID NO: 33879 - DNA, 20 bp, Artificial Sequence
  Description of Artificial Sequence: Synthetic oligonucleotide
  Target: ATXN2; (-) strand; PAM type: NRG; PAM sequence: CAG
agctacttgggaggctgagg

SEQ ID NO: 33880 - DNA, 20 bp, Artificial Sequence
  Description of Artificial Sequence: Synthetic oligonucleotide
  Target: ATXN2; (-) strand; PAM type: NRG; PAM sequence: AGG
cccagctacttgggaggctg

SEQ ID NO: 33881 - DNA, 20 bp, Artificial Sequence
  Description of Artificial Sequence: Synthetic oligonucleotide
  Target: ATXN2; (-) strand; PAM type: NRG; PAM sequence: GAG
tcccagctacttgggaggct

SEQ ID NO: 33882 - DNA, 20 bp, Artificial Sequence
  Description of Artificial Sequence: Synthetic oligonucleotide
  Target: ATXN2; (-) strand; PAM type: NRG; PAM sequence: AGG
tgtaatcccagctacttggg

SEQ ID NO: 33883 - DNA, 20 bp, Artificial Sequence
  Description of Artificial Sequence: Synthetic oligonucleotide
  Target: ATXN2; (-) strand; PAM type: NRG; PAM sequence: GAG
ctgtaatcccagctacttgg

SEQ ID NO: 33884 - DNA, 20 bp, Artificial Sequence
  Description of Artificial Sequence: Synthetic oligonucleotide
  Target: ATXN2; (-) strand; PAM type: NRG; PAM sequence: GGG
gcctgtaatcccagctactt

SEQ ID NO: 33885 - DNA, 20 bp, Artificial Sequence
  Description of Artificial Sequence: Synthetic oligonucleotide
  Target: ATXN2; (-) strand; PAM type: NRG; PAM sequence: TGG
cgcctgtaatcccagctact

SEQ ID NO: 33886 - DNA, 20 bp, Artificial Sequence
  Description of Artificial Sequence: Synthetic oligonucleotide
  Target: ATXN2; (-) strand; PAM type: NRG; PAM sequence: CAG
tagccaggcgcctgtaatcc

SEQ ID NO: 33887 - DNA, 20 bp, Artificial Sequence
  Description of Artificial Sequence: Synthetic oligonucleotide
  Target: ATXN2; (-) strand; PAM type: NRG; PAM sequence: AGG
aaaaattgtgctgtttagcc

SEQ ID NO: 33888 - DNA, 20 bp, Artificial Sequence
  Description of Artificial Sequence: Synthetic oligonucleotide
  Target: ATXN2; (-) strand; PAM type: NRG; PAM sequence: CAG
taaaaattgtgctgtttagc

SEQ ID NO: 33889 - DNA, 20 bp, Artificial Sequence
  Description of Artificial Sequence: Synthetic oligonucleotide
  Target: ATXN2; (-) strand; PAM type: NRG; PAM sequence: TAG
aacttaaaaattgtgctgtt

SEQ ID NO: 33890 - DNA, 20 bp, Artificial Sequence
  Description of Artificial Sequence: Synthetic oligonucleotide
  Target: ATXN2; (-) strand; PAM type: NRG; PAM sequence: AGG
tttactgcttctttctcttg

SEQ ID NO: 33891 - DNA, 20 bp, Artificial Sequence
  Description of Artificial Sequence: Synthetic oligonucleotide
  Target: ATXN2; (-) strand; PAM type: NRG; PAM sequence: GAG
ttttactgcttctttctctt

SEQ ID NO: 33892 - DNA, 20 bp, Artificial Sequence
  Description of Artificial Sequence: Synthetic oligonucleotide
  Target: ATXN2; (-) strand; PAM type: NRG; PAM sequence: TAG
tcttttagtgattttcagct

SEQ ID NO: 33893 - DNA, 20 bp, Artificial Sequence
  Description of Artificial Sequence: Synthetic oligonucleotide
  Target: ATXN2; (-) strand; PAM type: NRG; PAM sequence: CAG
atttttcttttagtgatttt

SEQ ID NO: 33894 - DNA, 20 bp, Artificial Sequence
  Description of Artificial Sequence: Synthetic oligonucleotide
  Target: ATXN2; (-) strand; PAM type: NRG; PAM sequence: TAG
tgaataaaatatttttcttt

SEQ ID NO: 33895 - DNA, 20 bp, Artificial Sequence
  Description of Artificial Sequence: Synthetic oligonucleotide
  Target: ATXN2; (-) strand; PAM type: NRG; PAM sequence: CAG
attgcttgggatacaggatt

SEQ ID NO: 33896 - DNA, 20 bp, Artificial Sequence
  Description of Artificial Sequence: Synthetic oligonucleotide
  Target: ATXN2; (-) strand; PAM type: NRG; PAM sequence: AGG
attagaattgcttgggatac

SEQ ID NO: 33897 - DNA, 20 bp, Artificial Sequence
  Description of Artificial Sequence: Synthetic oligonucleotide
  Target: ATXN2; (-) strand; PAM type: NRG; PAM sequence: CAG
cattagaattgcttgggata

SEQ ID NO: 33898 - DNA, 20 bp, Artificial Sequence
  Description of Artificial Sequence: Synthetic oligonucleotide
  Target: ATXN2; (-) strand; PAM type: NRG; PAM sequence: GGG
atatgacattagaattgctt

SEQ ID NO: 33899 - DNA, 20 bp, Artificial Sequence
  Description of Artificial Sequence: Synthetic oligonucleotide
  Target: ATXN2; (-) strand; PAM type: NRG; PAM sequence: TGG
aatatgacattagaattgct

SEQ ID NO: 33900 - DNA, 20 bp, Artificial Sequence
  Description of Artificial Sequence: Synthetic oligonucleotide
  Target: ATXN2; (-) strand; PAM type: NRG; PAM sequence: TAG
aaacctaaataatatgacat

SEQ ID NO: 33901 - DNA, 20 bp, Artificial Sequence
  Description of Artificial Sequence: Synthetic oligonucleotide
  Target: ATXN2; (-) strand; PAM type: NRG; PAM sequence: TGG
ccccattaaaaataaaaata

SEQ ID NO: 33902 - DNA, 20 bp, Artificial Sequence
  Description of Artificial Sequence: Synthetic oligonucleotide
  Target: ATXN2; (-) strand; PAM type: NRG; PAM sequence: TGG
gcactattgggaattttcgc

SEQ ID NO: 33903 - DNA, 20 bp, Artificial Sequence
  Description of Artificial Sequence: Synthetic oligonucleotide
  Target: ATXN2; (-) strand; PAM type: NRG; PAM sequence: GGG
tgtaatttcatggcactatt

SEQ ID NO: 33904 - DNA, 20 bp, Artificial Sequence
  Description of Artificial Sequence: Synthetic oligonucleotide
  Target: ATXN2; (-) strand; PAM type: NRG; PAM sequence: TGG
ttgtaatttcatggcactat

SEQ ID NO: 33905 - DNA, 20 bp, Artificial Sequence
  Description of Artificial Sequence: Synthetic oligonucleotide
  Target: ATXN2; (-) strand; PAM type: NRG; PAM sequence: TGG
gtaacttttttgtaatttca

SEQ ID NO: 33906 - DNA, 20 bp, Artificial Sequence
  Description of Artificial Sequence: Synthetic oligonucleotide
  Target: ATXN2; (-) strand; PAM type: NRG; PAM sequence: TGG
gcctatgaccaagttatttt

SEQ ID NO: 33907 - DNA, 20 bp, Artificial Sequence
  Description of Artificial Sequence: Synthetic oligonucleotide
  Target: ATXN2; (-) strand; PAM type: NRG; PAM sequence: AAG
ttagctgctagcctatgacc

SEQ ID NO: 33908 - DNA, 20 bp, Artificial Sequence
  Description of Artificial Sequence: Synthetic oligonucleotide
  Target: ATXN2; (-) strand; PAM type: NRG; PAM sequence: TAG
aagtgttttttattagctgc

SEQ ID NO: 33909 - DNA, 20 bp, Artificial Sequence
  Description of Artificial Sequence: Synthetic oligonucleotide
  Target: ATXN2; (-) strand; PAM type: NRG; PAM sequence: TAG
catctgaaagtgttttttat

SEQ ID NO: 33910 - DNA, 20 bp, Artificial Sequence
  Description of Artificial Sequence: Synthetic oligonucleotide
  Target: ATXN2; (-) strand; PAM type: NRG; PAM sequence: AAG
aacctttctttttcatctga

SEQ ID NO: 33911 - DNA, 20 bp, Artificial Sequence
  Description of Artificial Sequence: Synthetic oligonucleotide
  Target: ATXN2; (-) strand; PAM type: NRG; PAM sequence: AAG
attcctgaggaactgttcta

SEQ ID NO: 33912 - DNA, 20 bp, Artificial Sequence
  Description of Artificial Sequence: Synthetic oligonucleotide
  Target: ATXN2; (-) strand; PAM type: NRG; PAM sequence: AGG
gtgcaggaatgaaattcctg

SEQ ID NO: 33913 - DNA, 20 bp, Artificial Sequence
  Description of Artificial Sequence: Synthetic oligonucleotide
  Target: ATXN2; (-) strand; PAM type: NRG; PAM sequence: GAG
agtgcaggaatgaaattcct

SEQ ID NO: 33914 - DNA, 20 bp, Artificial Sequence
  Description of Artificial Sequence: Synthetic oligonucleotide
  Target: ATXN2; (-) strand; PAM type: NRG; PAM sequence: AGG
gatagtactgagtaaagtgc

SEQ ID NO: 33915 - DNA, 20 bp, Artificial Sequence
  Description of Artificial Sequence: Synthetic oligonucleotide
  Target: ATXN2; (-) strand; PAM type: NRG; PAM sequence: CAG
tgatagtactgagtaaagtg

SEQ ID NO: 33916 - DNA, 20 bp, Artificial Sequence
  Description of Artificial Sequence: Synthetic oligonucleotide
  Target: ATXN2; (-) strand; PAM type: NRG; PAM sequence: AAG
cgtgctgatagtactgagta

SEQ ID NO: 33917 - DNA, 20 bp, Artificial Sequence
  Description of Artificial Sequence: Synthetic oligonucleotide
  Target: ATXN2; (-) strand; PAM type: NRG; PAM sequence: GAG
tctgtcgtgctgatagtact

SEQ ID NO: 33918 - DNA, 20 bp, Artificial Sequence
  Description of Artificial Sequence: Synthetic oligonucleotide
  Target: ATXN2; (-) strand; PAM type: NRG; PAM sequence: TAG
tggtttatctgtcgtgctga

SEQ ID NO: 33919 - DNA, 20 bp, Artificial Sequence
  Description of Artificial Sequence: Synthetic oligonucleotide
  Target: ATXN2; (-) strand; PAM type: NRG; PAM sequence: TGG
ttattattaatgagggtact

SEQ ID NO: 33920 - DNA, 20 bp, Artificial Sequence
  Description of Artificial Sequence: Synthetic oligonucleotide
  Target: ATXN2; (-) strand; PAM type: NRG; PAM sequence: GGG
gtaaccattattattaatga

SEQ ID NO: 33921 - DNA, 20 bp, Artificial Sequence
  Description of Artificial Sequence: Synthetic oligonucleotide
  Target: ATXN2; (-) strand; PAM type: NRG; PAM sequence: AGG
tgtaaccattattattaatg

SEQ ID NO: 33922 - DNA, 20 bp, Artificial Sequence
  Description of Artificial Sequence: Synthetic oligonucleotide
  Target: ATXN2; (-) strand; PAM type: NRG; PAM sequence: GAG
ctgtaaccattattattaat

SEQ ID NO: 33923 - DNA, 20 bp, Artificial Sequence
  Description of Artificial Sequence: Synthetic oligonucleotide
  Target: ATXN2; (-) strand; PAM type: NRG; PAM sequence: AAG
ttaataaggtaatatatgtg

SEQ ID NO: 33924 - DNA, 20 bp, Artificial Sequence
  Description of Artificial Sequence: Synthetic oligonucleotide
  Target: ATXN2; (-) strand; PAM type: NRG; PAM sequence: AGG
gttcctctgaggatttaata

SEQ ID NO: 33925 - DNA, 20 bp, Artificial Sequence
  Description of Artificial Sequence: Synthetic oligonucleotide
  Target: ATXN2; (-) strand; PAM type: NRG; PAM sequence: AAG
ggttcctctgaggatttaat

SEQ ID NO: 33926 - DNA, 20 bp, Artificial Sequence
  Description of Artificial Sequence: Synthetic oligonucleotide
  Target: ATXN2; (-) strand; PAM type: NRG; PAM sequence: AGG
agtttaatttggttcctctg

SEQ ID NO: 33927 - DNA, 20 bp, Artificial Sequence
  Description of Artificial Sequence: Synthetic oligonucleotide
  Target: ATXN2; (-) strand; PAM type: NRG; PAM sequence: GAG
gagtttaatttggttcctct

SEQ ID NO: 33928 - DNA, 20 bp, Artificial Sequence
  Description of Artificial Sequence: Synthetic oligonucleotide
  Target: ATXN2; (-) strand; PAM type: NRG; PAM sequence: TGG
attgatatttgagtttaatt

SEQ ID NO: 33929 - DNA, 20 bp, Artificial Sequence
  Description of Artificial Sequence: Synthetic oligonucleotide
  Target: ATXN2; (-) strand; PAM type: NRG; PAM sequence: GAG
ttactggattattgatattt

SEQ ID NO: 33930 - DNA, 20 bp, Artificial Sequence
  Description of Artificial Sequence: Synthetic oligonucleotide
  Target: ATXN2; (-) strand; PAM type: NRG; PAM sequence: TGG
taagtgcttttgttagttac

SEQ ID NO: 33931 - DNA, 20 bp, Artificial Sequence
  Description of Artificial Sequence: Synthetic oligonucleotide
  Target: ATXN2; (-) strand; PAM type: NRG; PAM sequence: TAG
atattattaagtgcttttgt

SEQ ID NO: 33932 - DNA, 20 bp, Artificial Sequence
  Description of Artificial Sequence: Synthetic oligonucleotide
  Target: ATXN2; (-) strand; PAM type: NRG; PAM sequence: AAG
tgtcaagtgcatatattatt

SEQ ID NO: 33933 - DNA, 20 bp, Artificial Sequence
  Description of Artificial Sequence: Synthetic oligonucleotide
  Target: ATXN2; (-) strand; PAM type: NRG; PAM sequence: AAG
aaaattgcatttttactgtc

SEQ ID NO: 33934 - DNA, 20 bp, Artificial Sequence
  Description of Artificial Sequence: Synthetic oligonucleotide
  Target: ATXN2; (-) strand; PAM type: NRG; PAM sequence: AGG
atattgtggggaatttttaa

SEQ ID NO: 33935 - DNA, 20 bp, Artificial Sequence
  Description of Artificial Sequence: Synthetic oligonucleotide
  Target: ATXN2; (-) strand; PAM type: NRG; PAM sequence: AAG
aatattgtggggaattttta

SEQ ID NO: 33936 - DNA, 20 bp, Artificial Sequence
  Description of Artificial Sequence: Synthetic oligonucleotide
  Target: ATXN2; (-) strand; PAM type: NRG; PAM sequence: GGG
gtagtttgtcaaatattgtg

SEQ ID NO: 33937 - DNA, 20 bp, Artificial Sequence
  Description of Artificial Sequence: Synthetic oligonucleotide
  Target: ATXN2; (-) strand; PAM type: NRG; PAM sequence: GGG
tgtagtttgtcaaatattgt

SEQ ID NO: 33938 - DNA, 20 bp, Artificial Sequence
  Description of Artificial Sequence: Synthetic oligonucleotide
  Target: ATXN2; (-) strand; PAM type: NRG; PAM sequence: TGG
ttgtagtttgtcaaatattg

SEQ ID NO: 33939 - DNA, 20 bp, Artificial Sequence
  Description of Artificial Sequence: Synthetic oligonucleotide
  Target: ATXN2; (-) strand; PAM type: NRG; PAM sequence: TAG
tccatggaatggtttctttg

SEQ ID NO: 33940 - DNA, 20 bp, Artificial Sequence
  Description of Artificial Sequence: Synthetic oligonucleotide
  Target: ATXN2; (-) strand; PAM type: NRG; PAM sequence: TGG
aaggttgctcttccatggaa

SEQ ID NO: 33941 - DNA, 20 bp, Artificial Sequence
  Description of Artificial Sequence: Synthetic oligonucleotide
  Target: ATXN2; (-) strand; PAM type: NRG; PAM sequence: TGG
tcaagaaggttgctcttcca

SEQ ID NO: 33942 - DNA, 20 bp, Artificial Sequence
  Description of Artificial Sequence: Synthetic oligonucleotide
  Target: ATXN2; (-) strand; PAM type: NRG; PAM sequence: AGG
tattacttccagtgtcaaga

SEQ ID NO: 33943 - DNA, 20 bp, Artificial Sequence
  Description of Artificial Sequence: Synthetic oligonucleotide
  Target: ATXN2; (-) strand; PAM type: NRG; PAM sequence: AAG
gtattacttccagtgtcaag

SEQ ID NO: 33944 - DNA, 20 bp, Artificial Sequence
  Description of Artificial Sequence: Synthetic oligonucleotide
  Target: ATXN2; (-) strand; PAM type: NRG; PAM sequence: AAG
cttgtattacttccagtgtc

SEQ ID NO: 33945 - DNA, 20 bp, Artificial Sequence
  Description of Artificial Sequence: Synthetic oligonucleotide
  Target: ATXN2; (-) strand; PAM type: NRG; PAM sequence: CAG
tagaagacttgtattacttc

SEQ ID NO: 33946 - DNA, 20 bp, Artificial Sequence
  Description of Artificial Sequence: Synthetic oligonucleotide
  Target: ATXN2; (-) strand; PAM type: NRG; PAM sequence: AAG
ggtgctctattattctttag

SEQ ID NO: 33947 - DNA, 20 bp, Artificial Sequence
  Description of Artificial Sequence: Synthetic oligonucleotide
  Target: ATXN2; (-) strand; PAM type: NRG; PAM sequence: TAG
agcggtgctctattattctt

SEQ ID NO: 33948 - DNA, 20 bp, Artificial Sequence
  Description of Artificial Sequence: Synthetic oligonucleotide
  Target: ATXN2; (-) strand; PAM type: NRG; PAM sequence: CGG
atttttatggctcttgctag

SEQ ID NO: 33949 - DNA, 20 bp, Artificial Sequence
  Description of Artificial Sequence: Synthetic oligonucleotide
  Target: ATXN2; (-) strand; PAM type: NRG; PAM sequence: TAG
aggatttttatggctcttgc

SEQ ID NO: 33950 - DNA, 20 bp, Artificial Sequence
  Description of Artificial Sequence: Synthetic oligonucleotide
  Target: ATXN2; (-) strand; PAM type: NRG; PAM sequence: TGG
agagggcttcaggattttta

SEQ ID NO: 33951 - DNA, 20 bp, Artificial Sequence
  Description of Artificial Sequence: Synthetic oligonucleotide
  Target: ATXN2; (-) strand; PAM type: NRG; PAM sequence: AGG
ttactagttcagagggcttc

SEQ ID NO: 33952 - DNA, 20 bp, Artificial Sequence
  Description of Artificial Sequence: Synthetic oligonucleotide
  Target: ATXN2; (-) strand; PAM type: NRG; PAM sequence: CAG
tttactagttcagagggctt

SEQ ID NO: 33953 - DNA, 20 bp, Artificial Sequence
  Description of Artificial Sequence: Synthetic oligonucleotide
  Target: ATXN2; (-) strand; PAM type: NRG; PAM sequence: GGG
agtggttttactagttcaga

SEQ ID NO: 33954 - DNA, 20 bp, Artificial Sequence
  Description of Artificial Sequence: Synthetic oligonucleotide
  Target: ATXN2; (-) strand; PAM type: NRG; PAM sequence: AGG
gagtggttttactagttcag

SEQ ID NO: 33955 - DNA, 20 bp, Artificial Sequence
  Description of Artificial Sequence: Synthetic oligonucleotide
  Target: ATXN2; (-) strand; PAM type: NRG; PAM sequence: GAG
agagtggttttactagttca

SEQ ID NO: 33956 - DNA, 20 bp, Artificial Sequence
  Description of Artificial Sequence: Synthetic oligonucleotide
  Target: ATXN2; (-) strand; PAM type: NRG; PAM sequence: CAG
caagagtggttttactagtt

SEQ ID NO: 33957 - DNA, 20 bp, Artificial Sequence
  Description of Artificial Sequence: Synthetic oligonucleotide
  Target: ATXN2; (-) strand; PAM type: NRG; PAM sequence: TAG
gttaccaagagtggttttac

SEQ ID NO: 33958 - DNA, 20 bp, Artificial Sequence
  Description of Artificial Sequence: Synthetic oligonucleotide
  Target: ATXN2; (-) strand; PAM type: NRG; PAM sequence: TGG
ttagagaaagttaccaagag

SEQ ID NO: 33959 - DNA, 20 bp, Artificial Sequence
  Description of Artificial Sequence: Synthetic oligonucleotide
  Target: ATXN2; (-) strand; PAM type: NRG; PAM sequence: GAG
tccttagagaaagttaccaa

SEQ ID NO: 33960 - DNA, 20 bp, Artificial Sequence
  Description of Artificial Sequence: Synthetic oligonucleotide
  Target: ATXN2; (-) strand; PAM type: NRG; PAM sequence: AAG
tttccttagagaaagttacc

SEQ ID NO: 33961 - DNA, 20 bp, Artificial Sequence
  Description of Artificial Sequence: Synthetic oligonucleotide
  Target: ATXN2; (-) strand; PAM type: NRG; PAM sequence: AAG
tgtaattatttccttagaga

SEQ ID NO: 33962 - DNA, 20 bp, Artificial Sequence
  Description of Artificial Sequence: Synthetic oligonucleotide
  Target: ATXN2; (-) strand; PAM type: NRG; PAM sequence: GAG
tcagtgtaattatttcctta

SEQ ID NO: 33963 - DNA, 20 bp, Artificial Sequence
  Description of Artificial Sequence: Synthetic oligonucleotide
  Target: ATXN2; (-) strand; PAM type: NRG; PAM sequence: TAG
cttcagtgtaattatttcct

SEQ ID NO: 33964 - DNA, 20 bp, Artificial Sequence
  Description of Artificial Sequence: Synthetic oligonucleotide
  Target: ATXN2; (-) strand; PAM type: NRG; PAM sequence: CAG
ttttaaatagctttttgctt

SEQ ID NO: 33965 - DNA, 20 bp, Artificial Sequence
  Description of Artificial Sequence: Synthetic oligonucleotide
  Target: ATXN2; (-) strand; PAM type: NRG; PAM sequence: TAG
gtgcagtgaacatttttaaa

SEQ ID NO: 33966 - DNA, 20 bp, Artificial Sequence
  Description of Artificial Sequence: Synthetic oligonucleotide
  Target: ATXN2; (-) strand; PAM type: NRG; PAM sequence: CAG
ttttgttatagatagtggtg

SEQ ID NO: 33967 - DNA, 20 bp, Artificial Sequence
  Description of Artificial Sequence: Synthetic oligonucleotide
  Target: ATXN2; (-) strand; PAM type: NRG; PAM sequence: TGG
cacttttttgttatagatag

SEQ ID NO: 33968 - DNA, 20 bp, Artificial Sequence
  Description of Artificial Sequence: Synthetic oligonucleotide
  Target: ATXN2; (-) strand; PAM type: NRG; PAM sequence: TAG
ttccacttttttgttataga

SEQ ID NO: 33969 - DNA, 20 bp, Artificial Sequence
  Description of Artificial Sequence: Synthetic oligonucleotide
  Target: ATXN2; (-) strand; PAM type: NRG; PAM sequence: TAG
gggtttccacttttttgtta

SEQ ID NO: 33970 - DNA, 20 bp, Artificial Sequence
  Description of Artificial Sequence: Synthetic oligonucleotide
  Target: ATXN2; (-) strand; PAM type: NRG; PAM sequence: GGG
ccattctattgttgggaatt

SEQ ID NO: 33971 - DNA, 20 bp, Artificial Sequence
  Description of Artificial Sequence: Synthetic oligonucleotide
  Target: ATXN2; (-) strand; PAM type: NRG; PAM sequence: TGG
accattctattgttgggaat

SEQ ID NO: 33972 - DNA, 20 bp, Artificial Sequence
  Description of Artificial Sequence: Synthetic oligonucleotide
  Target: ATXN2; (-) strand; PAM type: NRG; PAM sequence: GGG
tacttaaccattctattgtt

SEQ ID NO: 33973 - DNA, 20 bp, Artificial Sequence
  Description of Artificial Sequence: Synthetic oligonucleotide
  Target: ATXN2; (-) strand; PAM type: NRG; PAM sequence: TGG
ttacttaaccattctattgt

SEQ ID NO: 33974 - DNA, 20 bp, Artificial Sequence
  Description of Artificial Sequence: Synthetic oligonucleotide
  Target: ATXN2; (-) strand; PAM type: NRG; PAM sequence: AGG
agccactgcgcccggctgta

SEQ ID NO: 33975 - DNA, 20 bp, Artificial Sequence
  Description of Artificial Sequence: Synthetic oligonucleotide
  Target: ATXN2; (-) strand; PAM type: NRG; PAM sequence: AAG
gagccactgcgcccggctgt

SEQ ID NO: 33976 - DNA, 20 bp, Artificial Sequence
  Description of Artificial Sequence: Synthetic oligonucleotide
  Target: ATXN2; (-) strand; PAM type: NRG; PAM sequence: CGG
caggcgtgagccactgcgcc

SEQ ID NO: 33977 - DNA, 20 bp, Artificial Sequence
  Description of Artificial Sequence: Synthetic oligonucleotide
  Target: ATXN2; (-) strand; PAM type: NRG; PAM sequence: GAG
agtgctgggattgcaggcgt

SEQ ID NO: 33978 - DNA, 20 bp, Artificial Sequence
  Description of Artificial Sequence: Synthetic oligonucleotide
  Target: ATXN2; (-) strand; PAM type: NRG; PAM sequence: AGG
tcccaaagtgctgggattgc

SEQ ID NO: 33979 - DNA, 20 bp, Artificial Sequence
  Description of Artificial Sequence: Synthetic oligonucleotide
  Target: ATXN2; (-) strand; PAM type: NRG; PAM sequence: CAG
ctcccaaagtgctgggattg

SEQ ID NO: 33980 - DNA, 20 bp, Artificial Sequence
  Description of Artificial Sequence: Synthetic oligonucleotide
  Target: ATXN2; (-) strand; PAM type: NRG; PAM sequence: GGG
cctcggcctcccaaagtgct

SEQ ID NO: 33981 - DNA, 20 bp, Artificial Sequence
  Description of Artificial Sequence: Synthetic oligonucleotide
  Target: ATXN2; (-) strand; PAM type: NRG; PAM sequence: TGG
gcctcggcctcccaaagtgc

SEQ ID NO: 33982 - DNA, 20 bp, Artificial Sequence
  Description of Artificial Sequence: Synthetic oligonucleotide
  Target: ATXN2; (-) strand; PAM type: NRG; PAM sequence: AAG
gcgcccgcctcggcctccca

SEQ ID NO: 33983 - DNA, 20 bp, Artificial Sequence
  Description of Artificial Sequence: Synthetic oligonucleotide
  Target: ATXN2; (-) strand; PAM type: NRG; PAM sequence: CGG
ctcaggtgatgcgcccgcct

SEQ ID NO: 33984 - DNA, 20 bp, Artificial Sequence
  Description of Artificial Sequence: Synthetic oligonucleotide
  Target: ATXN2; (-) strand; PAM type: NRG; PAM sequence: AGG
ggtctcgtactaccgacctc

SEQ ID NO: 33985 - DNA, 20 bp, Artificial Sequence
  Description of Artificial Sequence: Synthetic oligonucleotide
  Target: ATXN2; (-) strand; PAM type: NRG; PAM sequence: CAG
tggtctcgtactaccgacct

SEQ ID NO: 33986 - DNA, 20 bp, Artificial Sequence
  Description of Artificial Sequence: Synthetic oligonucleotide
  Target: ATXN2; (-) strand; PAM type: NRG; PAM sequence: TGG
tttcaccatgttggccagtt

SEQ ID NO: 33987 - DNA, 20 bp, Artificial Sequence
  Description of Artificial Sequence: Synthetic oligonucleotide
  Target: ATXN2; (-) strand; PAM type: NRG; PAM sequence: CAG
caaggtttcaccatgttggc

SEQ ID NO: 33988 - DNA, 20 bp, Artificial Sequence
  Description of Artificial Sequence: Synthetic oligonucleotide
  Target: ATXN2; (-) strand; PAM type: NRG; PAM sequence: TGG
gagacaaggtttcaccatgt

SEQ ID NO: 33989 - DNA, 20 bp, Artificial Sequence
  Description of Artificial Sequence: Synthetic oligonucleotide
  Target: ATXN2; (-) strand; PAM type: NRG; PAM sequence: AGG
ttgtatttttggtagagaca

SEQ ID NO: 33990 - DNA, 20 bp, Artificial Sequence
  Description of Artificial Sequence: Synthetic oligonucleotide
  Target: ATXN2; (-) strand; PAM type: NRG; PAM sequence: AAG
tttgtatttttggtagagac

SEQ ID NO: 33991 - DNA, 20 bp, Artificial Sequence
  Description of Artificial Sequence: Synthetic oligonucleotide
  Target: ATXN2; (-) strand; PAM type: NRG; PAM sequence: GAG
taatttttgtatttttggta

SEQ ID NO: 33992 - DNA, 20 bp, Artificial Sequence
  Description of Artificial Sequence: Synthetic oligonucleotide
  Target: ATXN2; (-) strand; PAM type: NRG; PAM sequence: TAG
gctaatttttgtatttttgg

SEQ ID NO: 33993 - DNA, 20 bp, Artificial Sequence
  Description of Artificial Sequence: Synthetic oligonucleotide
  Target: ATXN2; (-) strand; PAM type: NRG; PAM sequence: TGG
ttggctaatttttgtatttt

SEQ ID NO: 33994 - DNA, 20 bp, Artificial Sequence
  Description of Artificial Sequence: Synthetic oligonucleotide
  Target: ATXN2; (-) strand; PAM type: NRG; PAM sequence: TGG
caggaatgttccaccacgct

SEQ ID NO: 33995 - DNA, 20 bp, Artificial Sequence
  Description of Artificial Sequence: Synthetic oligonucleotide
  Target: ATXN2; (-) strand; PAM type: NRG; PAM sequence: AGG
tcttgagtagctggggctac

SEQ ID NO: 33996 - DNA, 20 bp, Artificial Sequence
  Description of Artificial Sequence: Synthetic oligonucleotide
  Target: ATXN2; (-) strand; PAM type: NRG; PAM sequence: CAG
ctcttgagtagctggggcta

SEQ ID NO: 33997 - DNA, 20 bp, Artificial Sequence
  Description of Artificial Sequence: Synthetic oligonucleotide
  Target: ATXN2; (-) strand; PAM type: NRG; PAM sequence: GGG
ctcagcctcttgagtagctg

SEQ ID NO: 33998 - DNA, 20 bp, Artificial Sequence
  Description of Artificial Sequence: Synthetic oligonucleotide
  Target: ATXN2; (-) strand; PAM type: NRG; PAM sequence: GGG
cctcagcctcttgagtagct

SEQ ID NO: 33999 - DNA, 20 bp, Artificial Sequence
  Description of Artificial Sequence: Synthetic oligonucleotide
  Target: ATXN2; (-) strand; PAM type: NRG; PAM sequence: TGG
acctcagcctcttgagtagc

SEQ ID NO: 34000 - DNA, 20 bp, Artificial Sequence
  Description of Artificial Sequence: Synthetic oligonucleotide
  Target: ATXN2; (-) strand; PAM type: NRG; PAM sequence: TAG
tcccacctcagcctcttgag

SEQ ID NO: 34001 - DNA, 20 bp, Artificial Sequence
  Description of Artificial Sequence: Synthetic oligonucleotide
  Target: ATXN2; (-) strand; PAM type: NRG; PAM sequence: GAG
ttctcccacctcagcctctt

SEQ ID NO: 34002 - DNA, 20 bp, Artificial Sequence
  Description of Artificial Sequence: Synthetic oligonucleotide
  Target: ATXN2; (-) strand; PAM type: NRG; PAM sequence: CAG
ttcaagcgattctcccacct

SEQ ID NO: 34003 - DNA, 20 bp, Artificial Sequence
  Description of Artificial Sequence: Synthetic oligonucleotide
  Target: ATXN2; (-) strand; PAM type: NRG; PAM sequence: AAG
agcctctgactcctgggttc

SEQ ID NO: 34004 - DNA, 20 bp, Artificial Sequence
  Description of Artificial Sequence: Synthetic oligonucleotide
  Target: ATXN2; (-) strand; PAM type: NRG; PAM sequence: GGG
cactgcagcctctgactcct

SEQ ID NO: 34005 - DNA, 20 bp, Artificial Sequence
  Description of Artificial Sequence: Synthetic oligonucleotide
  Target: ATXN2; (-) strand; PAM type: NRG; PAM sequence: TGG
tcactgcagcctctgactcc

SEQ ID NO: 34006 - DNA, 20 bp, Artificial Sequence
  Description of Artificial Sequence: Synthetic oligonucleotide
  Target: ATXN2; (-) strand; PAM type: NRG; PAM sequence: CAG
ggtacgatctcagctcactg

SEQ ID NO: 34007 - DNA, 20 bp, Artificial Sequence
  Description of Artificial Sequence: Synthetic oligonucleotide
  Target: ATXN2; (-) strand; PAM type: NRG; PAM sequence: CAG
gaagtgcagtggtacgatct

SEQ ID NO: 34008 - DNA, 20 bp, Artificial Sequence
  Description of Artificial Sequence: Synthetic oligonucleotide
  Target: ATXN2; (-) strand; PAM type: NRG; PAM sequence: TGG
ttgcccagtctgaagtgcag

SEQ ID NO: 34009 - DNA, 20 bp, Artificial Sequence
  Description of Artificial Sequence: Synthetic oligonucleotide
  Target: ATXN2; (-) strand; PAM type: NRG; PAM sequence: CAG
tgtttgcccagtctgaagtg

SEQ ID NO: 34010 - DNA, 20 bp, Artificial Sequence
  Description of Artificial Sequence: Synthetic oligonucleotide
  Target: ATXN2; (-) strand; PAM type: NRG; PAM sequence: AAG
ctcggtgtttgcccagtctg

SEQ ID NO: 34011 - DNA, 20 bp, Artificial Sequence
  Description of Artificial Sequence: Synthetic oligonucleotide
  Target: ATXN2; (-) strand; PAM type: NRG; PAM sequence: CAG
acagagtctcggtgtttgcc

SEQ ID NO: 34012 - DNA, 20 bp, Artificial Sequence
  Description of Artificial Sequence: Synthetic oligonucleotide
  Target: ATXN2; (-) strand; PAM type: NRG; PAM sequence: CGG
ttttttttgagacagagtct

SEQ ID NO: 34013 - DNA, 20 bp, Artificial Sequence
  Description of Artificial Sequence: Synthetic oligonucleotide
  Target: ATXN2; (-) strand; PAM type: NRG; PAM sequence: GAG
ttttttttttttttgagaca

SEQ ID NO: 34014 - DNA, 20 bp, Artificial Sequence
  Description of Artificial Sequence: Synthetic oligonucleotide
  Target: ATXN2; (-) strand; PAM type: NRG; PAM sequence: CAG
ttttttttttttttttgaga

SEQ ID NO: 34015 - DNA, 20 bp, Artificial Sequence
  Description of Artificial Sequence: Synthetic oligonucleotide
  Target: ATXN2; (-) strand; PAM type: NRG; PAM sequence: GAG
aaattttttttttttttttt

SEQ ID NO: 34016 - DNA, 20 bp, Artificial Sequence
  Description of Artificial Sequence: Synthetic oligonucleotide
  Target: ATXN2; (-) strand; PAM type: NRG; PAM sequence: TAG
tgtgtatgttattttgtagt

SEQ ID NO: 34017 - DNA, 20 bp, Artificial Sequence
  Description of Artificial Sequence: Synthetic oligonucleotide
  Target: ATXN2; (-) strand; PAM type: NRG; PAM sequence: TAG
tgattgtgtatgttattttg

SEQ ID NO: 34018 - DNA, 20 bp, Artificial Sequence
  Description of Artificial Sequence: Synthetic oligonucleotide
  Target: ATXN2; (-) strand; PAM type: NRG; PAM sequence: AGG
ttttcatttttatgtagtag

SEQ ID NO: 34019 - DNA, 20 bp, Artificial Sequence
  Description of Artificial Sequence: Synthetic oligonucleotide
  Target: ATXN2; (-) strand; PAM type: NRG; PAM sequence: GAG
cttttcatttttatgtagta

SEQ ID NO: 34020 - DNA, 20 bp, Artificial Sequence
  Description of Artificial Sequence: Synthetic oligonucleotide
  Target: ATXN2; (-) strand; PAM type: NRG; PAM sequence: TAG
accttttcatttttatgtag

SEQ ID NO: 34021 - DNA, 20 bp, Artificial Sequence
  Description of Artificial Sequence: Synthetic oligonucleotide
  Target: ATXN2; (-) strand; PAM type: NRG; PAM sequence: TAG
tttaccttttcatttttatg

SEQ ID NO: 34022 - DNA, 20 bp, Artificial Sequence
  Description of Artificial Sequence: Synthetic oligonucleotide
  Target: ATXN2; (-) strand; PAM type: NRG; PAM sequence: CAG
gagccactgcccccaaccat

SEQ ID NO: 34023 - DNA, 20 bp, Artificial Sequence
  Description of Artificial Sequence: Synthetic oligonucleotide
  Target: ATXN2; (-) strand; PAM type: NRG; PAM sequence: GAG
ccaggattacaggcaggaat

SEQ ID NO: 34024 - DNA, 20 bp, Artificial Sequence
  Description of Artificial Sequence: Synthetic oligonucleotide
  Target: ATXN2; (-) strand; PAM type: NRG; PAM sequence: AGG
aaagtgccaggattacaggc

SEQ ID NO: 34025 - DNA, 20 bp, Artificial Sequence
  Description of Artificial Sequence: Synthetic oligonucleotide
  Target: ATXN2; (-) strand; PAM type: NRG; PAM sequence: CAG
caaagtgccaggattacagg

SEQ ID NO: 34026 - DNA, 20 bp, Artificial Sequence
  Description of Artificial Sequence: Synthetic oligonucleotide
  Target: ATXN2; (-) strand; PAM type: NRG; PAM sequence: AGG
tcccaaagtgccaggattac

SEQ ID NO: 34027 - DNA, 20 bp, Artificial Sequence
  Description of Artificial Sequence: Synthetic oligonucleotide
  Target: ATXN2; (-) strand; PAM type: NRG; PAM sequence: CAG
ctcccaaagtgccaggatta

SEQ ID NO: 34028 - DNA, 20 bp, Artificial Sequence
  Description of Artificial Sequence: Synthetic oligonucleotide
  Target: ATXN2; (-) strand; PAM type: NRG; PAM sequence: AGG
cctcggcctcccaaagtgcc

SEQ ID NO: 34029 - DNA, 20 bp, Artificial Sequence
  Description of Artificial Sequence: Synthetic oligonucleotide
  Target: ATXN2; (-) strand; PAM type: NRG; PAM sequence: CAG
gcctcggcctcccaaagtgc

SEQ ID NO: 34030 - DNA, 20 bp, Artificial Sequence
  Description of Artificial Sequence: Synthetic oligonucleotide
  Target: ATXN2; (-) strand; PAM type: NRG; PAM sequence: AAG
tcgccagcctcggcctccca

SEQ ID NO: 34031 - DNA, 20 bp, Artificial Sequence
  Description of Artificial Sequence: Synthetic oligonucleotide
  Target: ATXN2; (-) strand; PAM type: NRG; PAM sequence: CGG
ctcaagtgattcgccagcct

SEQ ID NO: 34032 - DNA, 20 bp, Artificial Sequence
  Description of Artificial Sequence: Synthetic oligonucleotide
  Target: ATXN2; (-) strand; PAM type: NRG; PAM sequence: CAG
cctgacctcaagtgattcgc

SEQ ID NO: 34033 - DNA, 20 bp, Artificial Sequence
  Description of Artificial Sequence: Synthetic oligonucleotide
  Target: ATXN2; (-) strand; PAM type: NRG; PAM sequence: AAG
ctcgaactcctcctgacctc

SEQ ID NO: 34034 - DNA, 20 bp, Artificial Sequence
  Description of Artificial Sequence: Synthetic oligonucleotide
  Target: ATXN2; (-) strand; PAM type: NRG; PAM sequence: TGG
tttcaccatgttggccaggc

SEQ ID NO: 34035 - DNA, 20 bp, Artificial Sequence
  Description of Artificial Sequence: Synthetic oligonucleotide
  Target: ATXN2; (-) strand; PAM type: NRG; PAM sequence: AGG
ggggtttcaccatgttggcc

SEQ ID NO: 34036 - DNA, 20 bp, Artificial Sequence
  Description of Artificial Sequence: Synthetic oligonucleotide
  Target: ATXN2; (-) strand; PAM type: NRG; PAM sequence: CAG
tggggtttcaccatgttggc

SEQ ID NO: 34037 - DNA, 20 bp, Artificial Sequence
  Description of Artificial Sequence: Synthetic oligonucleotide
  Target: ATXN2; (-) strand; PAM type: NRG; PAM sequence: TGG
gagatggggtttcaccatgt

SEQ ID NO: 34038 - DNA, 20 bp, Artificial Sequence
  Description of Artificial Sequence: Synthetic oligonucleotide
  Target: ATXN2; (-) strand; PAM type: NRG; PAM sequence: GGG
ttgtatttttagtagagatg

SEQ ID NO: 34039 - DNA, 20 bp, Artificial Sequence
  Description of Artificial Sequence: Synthetic oligonucleotide
  Target: ATXN2; (-) strand; PAM type: NRG; PAM sequence: GGG
tttgtatttttagtagagat

SEQ ID NO: 34040 - DNA, 20 bp, Artificial Sequence
  Description of Artificial Sequence: Synthetic oligonucleotide
  Target: ATXN2; (-) strand; PAM type: NRG; PAM sequence: TGG
ttttgtatttttagtagaga

SEQ ID NO: 34041 - DNA, 20 bp, Artificial Sequence
  Description of Artificial Sequence: Synthetic oligonucleotide
  Target: ATXN2; (-) strand; PAM type: NRG; PAM sequence: GAG
caatttttgtatttttagta

SEQ ID NO: 34042 - DNA, 20 bp, Artificial Sequence
  Description of Artificial Sequence: Synthetic oligonucleotide
  Target: ATXN2; (-) strand; PAM type: NRG; PAM sequence: TAG
gccaatttttgtatttttag

SEQ ID NO: 34043 - DNA, 20 bp, Artificial Sequence
  Description of Artificial Sequence: Synthetic oligonucleotide
  Target: ATXN2; (-) strand; PAM type: NRG; PAM sequence: TAG
ctggccaatttttgtatttt

SEQ ID NO: 34044 - DNA, 20 bp, Artificial Sequence
  Description of Artificial Sequence: Synthetic oligonucleotide
  Target: ATXN2; (-) strand; PAM type: NRG; PAM sequence: TGG
caggcgtgagctactgcccc

SEQ ID NO: 34045 - DNA, 20 bp, Artificial Sequence
  Description of Artificial Sequence: Synthetic oligonucleotide
  Target: ATXN2; (-) strand; PAM type: NRG; PAM sequence: GAG
agtgctgggattacaggcgt

SEQ ID NO: 34046 - DNA, 20 bp, Artificial Sequence
  Description of Artificial Sequence: Synthetic oligonucleotide
  Target: ATXN2; (-) strand; PAM type: NRG; PAM sequence: AGG
tcccaaagtgctgggattac

SEQ ID NO: 34047 - DNA, 20 bp, Artificial Sequence
  Description of Artificial Sequence: Synthetic oligonucleotide
  Target: ATXN2; (-) strand; PAM type: NRG; PAM sequence: CAG
ctcccaaagtgctgggatta

SEQ ID NO: 34048 - DNA, 20 bp, Artificial Sequence
  Description of Artificial Sequence: Synthetic oligonucleotide
  Target: ATXN2; (-) strand; PAM type: NRG; PAM sequence: GGG
ccttggcctcccaaagtgct

SEQ ID NO: 34049 - DNA, 20 bp, Artificial Sequence
  Description of Artificial Sequence: Synthetic oligonucleotide
  Target: ATXN2; (-) strand; PAM type: NRG; PAM sequence: TGG
gccttggcctcccaaagtgc

SEQ ID NO: 34050 - DNA, 20 bp, Artificial Sequence
  Description of Artificial Sequence: Synthetic oligonucleotide
  Target: ATXN2; (-) strand; PAM type: NRG; PAM sequence: AAG
ccgcctgccttggcctccca

SEQ ID NO: 34051 - DNA, 20 bp, Artificial Sequence
  Description of Artificial Sequence: Synthetic oligonucleotide
  Target: ATXN2; (-) strand; PAM type: NRG; PAM sequence: TGG
ctcaagtgatccgcctgcct

SEQ ID NO: 34052 - DNA, 20 bp, Artificial Sequence
  Description of Artificial Sequence: Synthetic oligonucleotide
  Target: ATXN2; (-) strand; PAM type: NRG; PAM sequence: AAG
ggtctcgaactcctgacctc

SEQ ID NO: 34053 - DNA, 20 bp, Artificial Sequence
  Description of Artificial Sequence: Synthetic oligonucleotide
  Target: ATXN2; (-) strand; PAM type: NRG; PAM sequence: TGG
ttttgccatgttggccaggc

SEQ ID NO: 34054 - DNA, 20 bp, Artificial Sequence
  Description of Artificial Sequence: Synthetic oligonucleotide
  Target: ATXN2; (-) strand; PAM type: NRG; PAM sequence: AGG
gggattttgccatgttggcc

SEQ ID NO: 34055 - DNA, 20 bp, Artificial Sequence
  Description of Artificial Sequence: Synthetic oligonucleotide
  Target: ATXN2; (-) strand; PAM type: NRG; PAM sequence: CAG
cgggattttgccatgttggc

SEQ ID NO: 34056 - DNA, 20 bp, Artificial Sequence
  Description of Artificial Sequence: Synthetic oligonucleotide
  Target: ATXN2; (-) strand; PAM type: NRG; PAM sequence: TGG
aggacgggattttgccatgt

SEQ ID NO: 34057 - DNA, 20 bp, Artificial Sequence
  Description of Artificial Sequence: Synthetic oligonucleotide
  Target: ATXN2; (-) strand; PAM type: NRG; PAM sequence: GGG
tttgtatttttagtgaggac

SEQ ID NO: 34058 - DNA, 20 bp, Artificial Sequence
  Description of Artificial Sequence: Synthetic oligonucleotide
  Target: ATXN2; (-) strand; PAM type: NRG; PAM sequence: CGG
ttttgtatttttagtgagga

SEQ ID NO: 34059 - DNA, 20 bp, Artificial Sequence
  Description of Artificial Sequence: Synthetic oligonucleotide
  Target: ATXN2; (-) strand; PAM type: NRG; PAM sequence: AGG
atttttttgtatttttagtg

SEQ ID NO: 34060 - DNA, 20 bp, Artificial Sequence
  Description of Artificial Sequence: Synthetic oligonucleotide
  Target: ATXN2; (-) strand; PAM type: NRG; PAM sequence: GAG
aatttttttgtatttttagt

SEQ ID NO: 34061 - DNA, 20 bp, Artificial Sequence
  Description of Artificial Sequence: Synthetic oligonucleotide
  Target: ATXN2; (-) strand; PAM type: NRG; PAM sequence: TAG
ggctaatttttttgtatttt

SEQ ID NO: 34062 - DNA, 20 bp, Artificial Sequence
  Description of Artificial Sequence: Synthetic oligonucleotide
  Target: ATXN2; (-) strand; PAM type: NRG; PAM sequence: TGG
caggttcgtgctaccacacc

SEQ ID NO: 34063 - DNA, 20 bp, Artificial Sequence
  Description of Artificial Sequence: Synthetic oligonucleotide
  Target: ATXN2; (-) strand; PAM type: NRG; PAM sequence: AGG
tccccagtagctgggattac

SEQ ID NO: 34064 - DNA, 20 bp, Artificial Sequence
  Description of Artificial Sequence: Synthetic oligonucleotide
  Target: ATXN2; (-) strand; PAM type: NRG; PAM sequence: CAG
ctccccagtagctgggatta

SEQ ID NO: 34065 - DNA, 20 bp, Artificial Sequence
  Description of Artificial Sequence: Synthetic oligonucleotide
  Target: ATXN2; (-) strand; PAM type: NRG; PAM sequence: GGG
cctcagcctccccagtagct

SEQ ID NO: 34066 - DNA, 20 bp, Artificial Sequence
  Description of Artificial Sequence: Synthetic oligonucleotide
  Target: ATXN2; (-) strand; PAM type: NRG; PAM sequence: TGG
gcctcagcctccccagtagc

SEQ ID NO: 34067 - DNA, 20 bp, Artificial Sequence
  Description of Artificial Sequence: Synthetic oligonucleotide
  Target: ATXN2; (-) strand; PAM type: NRG; PAM sequence: TAG
tccagcctcagcctccccag

SEQ ID NO: 34068 - DNA, 20 bp, Artificial Sequence
  Description of Artificial Sequence: Synthetic oligonucleotide
  Target: ATXN2; (-) strand; PAM type: NRG; PAM sequence: CAG
ttctccagcctcagcctccc

SEQ ID NO: 34069 - DNA, 20 bp, Artificial Sequence
  Description of Artificial Sequence: Synthetic oligonucleotide
  Target: ATXN2; (-) strand; PAM type: NRG; PAM sequence: CAG
tttaagtgattctccagcct

SEQ ID NO: 34070 - DNA, 20 bp, Artificial Sequence
  Description of Artificial Sequence: Synthetic oligonucleotide
  Target: ATXN2; (-) strand; PAM type: NRG; PAM sequence: CAG
ggttcatttaagtgattctc

SEQ ID NO: 34071 - DNA, 20 bp, Artificial Sequence
  Description of Artificial Sequence: Synthetic oligonucleotide
  Target: ATXN2; (-) strand; PAM type: NRG; PAM sequence: AAG
tctgtctcctgggttcattt

SEQ ID NO: 34072 - DNA, 20 bp, Artificial Sequence
  Description of Artificial Sequence: Synthetic oligonucleotide
  Target: ATXN2; (-) strand; PAM type: NRG; PAM sequence: GGG
tactgcagtctctgtctcct

SEQ ID NO: 34073 - DNA, 20 bp, Artificial Sequence
  Description of Artificial Sequence: Synthetic oligonucleotide
  Target: ATXN2; (-) strand; PAM type: NRG; PAM sequence: TGG
ttactgcagtctctgtctcc

SEQ ID NO: 34074 - DNA, 20 bp, Artificial Sequence
  Description of Artificial Sequence: Synthetic oligonucleotide
  Target: ATXN2; (-) strand; PAM type: NRG; PAM sequence: CAG
ggcctgatctcagcttactg

SEQ ID NO: 34075 - DNA, 20 bp, Artificial Sequence
  Description of Artificial Sequence: Synthetic oligonucleotide
  Target: ATXN2; (-) strand; PAM type: NRG; PAM sequence: CAG
ggagtgcagtggcctgatct

SEQ ID NO: 34076 - DNA, 20 bp, Artificial Sequence
  Description of Artificial Sequence: Synthetic oligonucleotide
  Target: ATXN2; (-) strand; PAM type: NRG; PAM sequence: TGG
tcgcccaggctggagtgcag

SEQ ID NO: 34077 - DNA, 20 bp, Artificial Sequence
  Description of Artificial Sequence: Synthetic oligonucleotide
  Target: ATXN2; (-) strand; PAM type: NRG; PAM sequence: CAG
ctgtcgcccaggctggagtg

SEQ ID NO: 34078 - DNA, 20 bp, Artificial Sequence
  Description of Artificial Sequence: Synthetic oligonucleotide
  Target: ATXN2; (-) strand; PAM type: NRG; PAM sequence: GAG
tcactctgtcgcccaggctg

SEQ ID NO: 34079 - DNA, 20 bp, Artificial Sequence
  Description of Artificial Sequence: Synthetic oligonucleotide
  Target: ATXN2; (-) strand; PAM type: NRG; PAM sequence: TGG
tctcactctgtcgcccaggc

SEQ ID NO: 34080 - DNA, 20 bp, Artificial Sequence
  Description of Artificial Sequence: Synthetic oligonucleotide
  Target: ATXN2; (-) strand; PAM type: NRG; PAM sequence: AGG
ggaatctcactctgtcgccc

SEQ ID NO: 34081 - DNA, 20 bp, Artificial Sequence
  Description of Artificial Sequence: Synthetic oligonucleotide
  Target: ATXN2; (-) strand; PAM type: NRG; PAM sequence: CAG
tggaatctcactctgtcgcc

SEQ ID NO: 34082 - DNA, 20 bp, Artificial Sequence
  Description of Artificial Sequence: Synthetic oligonucleotide
  Target: ATXN2; (-) strand; PAM type: NRG; PAM sequence: TGG
gtgtgtgtgtgtgttttgga

SEQ ID NO: 34083 - DNA, 20 bp, Artificial Sequence
  Description of Artificial Sequence: Synthetic oligonucleotide
  Target: ATXN2; (-) strand; PAM type: NRG; PAM sequence: TGG
gtgtgtgtgtgtgtgtgttt

SEQ ID NO: 34084 - DNA, 20 bp, Artificial Sequence
  Description of Artificial Sequence: Synthetic oligonucleotide
  Target: ATXN2; (-) strand; PAM type: NRG; PAM sequence: TAG
agataatgtaatcacaatat

SEQ ID NO: 34085 - DNA, 20 bp, Artificial Sequence
  Description of Artificial Sequence: Synthetic oligonucleotide
  Target: ATXN2; (-) strand; PAM type: NRG; PAM sequence: AAG
tgaaggtggctgttttagga

SEQ ID NO: 34086 - DNA, 20 bp, Artificial Sequence
  Description of Artificial Sequence: Synthetic oligonucleotide
  Target: ATXN2; (-) strand; PAM type: NRG; PAM sequence: AGG
tttttgaaggtggctgtttt

SEQ ID NO: 34087 - DNA, 20 bp, Artificial Sequence
  Description of Artificial Sequence: Synthetic oligonucleotide
  Target: ATXN2; (-) strand; PAM type: NRG; PAM sequence: TAG
atttttgaaggtggctgttt

SEQ ID NO: 34088 - DNA, 20 bp, Artificial Sequence
  Description of Artificial Sequence: Synthetic oligonucleotide
  Target: ATXN2; (-) strand; PAM type: NRG; PAM sequence: TGG
gttatatatatttttgaagg

SEQ ID NO: 34089 - DNA, 20 bp, Artificial Sequence
  Description of Artificial Sequence: Synthetic oligonucleotide
  Target: ATXN2; (-) strand; PAM type: NRG; PAM sequence: AGG
tttgttatatatatttttga

SEQ ID NO: 34090 - DNA, 20 bp, Artificial Sequence
  Description of Artificial Sequence: Synthetic oligonucleotide
  Target: ATXN2; (-) strand; PAM type: NRG; PAM sequence: AAG
ctttgttatatatatttttg

SEQ ID NO: 34091 - DNA, 20 bp, Artificial Sequence
  Description of Artificial Sequence: Synthetic oligonucleotide
  Target: ATXN2; (-) strand; PAM type: NRG; PAM sequence: AAG
tagtttttcatgactttcag

SEQ ID NO: 34092 - DNA, 20 bp, Artificial Sequence
  Description of Artificial Sequence: Synthetic oligonucleotide
  Target: ATXN2; (-) strand; PAM type: NRG; PAM sequence: CAG
gaatagtttttcatgacttt

SEQ ID NO: 34093 - DNA, 20 bp, Artificial Sequence
  Description of Artificial Sequence: Synthetic oligonucleotide
  Target: ATXN2; (-) strand; PAM type: NRG; PAM sequence: TAG
tttgtgtgtgtgtgtgtgaa

SEQ ID NO: 34094 - DNA, 20 bp, Artificial Sequence
  Description of Artificial Sequence: Synthetic oligonucleotide
  Target: ATXN2; (-) strand; PAM type: NRG; PAM sequence: AAG
tggaaattcacatctgcttt

SEQ ID NO: 34095 - DNA, 20 bp, Artificial Sequence
  Description of Artificial Sequence: Synthetic oligonucleotide
  Target: ATXN2; (-) strand; PAM type: NRG; PAM sequence: TGG
gcaaaatatgcttgaaagtc

SEQ ID NO: 34096 - DNA, 20 bp, Artificial Sequence
  Description of Artificial Sequence: Synthetic oligonucleotide
  Target: ATXN2; (-) strand; PAM type: NRG; PAM sequence: AAG
agatagcaaaatatgcttga

SEQ ID NO: 34097 - DNA, 20 bp, Artificial Sequence
  Description of Artificial Sequence: Synthetic oligonucleotide
  Target: ATXN2; (-) strand; PAM type: NRG; PAM sequence: TAG
cggtttgacaagtttcgaga

SEQ ID NO: 34098 - DNA, 20 bp, Artificial Sequence
  Description of Artificial Sequence: Synthetic oligonucleotide
  Target: ATXN2; (-) strand; PAM type: NRG; PAM sequence: GAG
cattcggtttgacaagtttc

SEQ ID NO: 34099 - DNA, 20 bp, Artificial Sequence
  Description of Artificial Sequence: Synthetic oligonucleotide
  Target: ATXN2; (-) strand; PAM type: NRG; PAM sequence: AAG
aatgcagcattcggtttgac

SEQ ID NO: 34100 - DNA, 20 bp, Artificial Sequence
  Description of Artificial Sequence: Synthetic oligonucleotide
  Target: ATXN2; (-) strand; PAM type: NRG; PAM sequence: CGG
gtgaaaaaaaatgcagcatt

SEQ ID NO: 34101 - DNA, 20 bp, Artificial Sequence
  Description of Artificial Sequence: Synthetic oligonucleotide
  Target: ATXN2; (-) strand; PAM type: NRG; PAM sequence: CAG
agcaagggtgaaaaaaaatg

SEQ ID NO: 34102 - DNA, 20 bp, Artificial Sequence
  Description of Artificial Sequence: Synthetic oligonucleotide
  Target: ATXN2; (-) strand; PAM type: NRG; PAM sequence: GGG
aaataagtctctgagagcaa

SEQ ID NO: 34103 - DNA, 20 bp, Artificial Sequence
  Description of Artificial Sequence: Synthetic oligonucleotide
  Target: ATXN2; (-) strand; PAM type: NRG; PAM sequence: AGG
aaaataagtctctgagagca

SEQ ID NO: 34104 - DNA, 20 bp, Artificial Sequence
  Description of Artificial Sequence: Synthetic oligonucleotide
  Target: ATXN2; (-) strand; PAM type: NRG; PAM sequence: AAG
gaaaataagtctctgagagc

SEQ ID NO: 34105 - DNA, 20 bp, Artificial Sequence
  Description of Artificial Sequence: Synthetic oligonucleotide
  Target: ATXN2; (-) strand; PAM type: NRG; PAM sequence: GAG
cagtgaaaataagtctctga

SEQ ID NO: 34106 - DNA, 20 bp, Artificial Sequence
  Description of Artificial Sequence: Synthetic oligonucleotide
  Target: ATXN2; (-) strand; PAM type: NRG; PAM sequence: GAG
aacagtgaaaataagtctct

SEQ ID NO: 34107 - DNA, 20 bp, Artificial Sequence
  Description of Artificial Sequence: Synthetic oligonucleotide
  Target: ATXN2; (-) strand; PAM type: NRG; PAM sequence: AAG
tgcgtatcaacagtgaaaat

SEQ ID NO: 34108 - DNA, 20 bp, Artificial Sequence
  Description of Artificial Sequence: Synthetic oligonucleotide
  Target: ATXN2; (-) strand; PAM type: NRG; PAM sequence: CAG
cttaggtttgtgcgtatcaa

SEQ ID NO: 34109 - DNA, 20 bp, Artificial Sequence
  Description of Artificial Sequence: Synthetic oligonucleotide
  Target: ATXN2; (-) strand; PAM type: NRG; PAM sequence: AGG
cttctagaatctcctcactt

SEQ ID NO: 34110 - DNA, 20 bp, Artificial Sequence
  Description of Artificial Sequence: Synthetic oligonucleotide
  Target: ATXN2; (-) strand; PAM type: NRG; PAM sequence: TAG
gcttctagaatctcctcact

SEQ ID NO: 34111 - DNA, 20 bp, Artificial Sequence
  Description of Artificial Sequence: Synthetic oligonucleotide
  Target: ATXN2; (-) strand; PAM type: NRG; PAM sequence: TAG
tgtaaataagtttcagcttc

SEQ ID NO: 34112 - DNA, 20 bp, Artificial Sequence
  Description of Artificial Sequence: Synthetic oligonucleotide
  Target: ATXN2; (-) strand; PAM type: NRG; PAM sequence: CAG
cattccttgtaaataagttt

SEQ ID NO: 34113 - DNA, 20 bp, Artificial Sequence
  Description of Artificial Sequence: Synthetic oligonucleotide
  Target: ATXN2; (-) strand; PAM type: NRG; PAM sequence: AAG
ttcctgcattccttgtaaat

SEQ ID NO: 34114 - DNA, 20 bp, Artificial Sequence
  Description of Artificial Sequence: Synthetic oligonucleotide
  Target: ATXN2; (-) strand; PAM type: NRG; PAM sequence: TAG
acagatcgttaatgtacttg

SEQ ID NO: 34115 - DNA, 20 bp, Artificial Sequence
  Description of Artificial Sequence: Synthetic oligonucleotide
  Target: ATXN2; (-) strand; PAM type: NRG; PAM sequence: CAG
tgtgaagttttattcttgaa

SEQ ID NO: 34116 - DNA, 20 bp, Artificial Sequence
  Description of Artificial Sequence: Synthetic oligonucleotide
  Target: ATXN2; (-) strand; PAM type: NRG; PAM sequence: AAG
tgttggatttgtgtaatgtg

SEQ ID NO: 34117 - DNA, 20 bp, Artificial Sequence
  Description of Artificial Sequence: Synthetic oligonucleotide
  Target: ATXN2; (-) strand; PAM type: NRG; PAM sequence: TGG
tgaaattttgtttactgtgt

SEQ ID NO: 34118 - DNA, 20 bp, Artificial Sequence
  Description of Artificial Sequence: Synthetic oligonucleotide
  Target: ATXN2; (-) strand; PAM type: NRG; PAM sequence: AGG
ccttattctttctgatgaat

SEQ ID NO: 34119 - DNA, 20 bp, Artificial Sequence
  Description of Artificial Sequence: Synthetic oligonucleotide
  Target: ATXN2; (-) strand; PAM type: NRG; PAM sequence: TAG
cccttattctttctgatgaa

SEQ ID NO: 34120 - DNA, 20 bp, Artificial Sequence
  Description of Artificial Sequence: Synthetic oligonucleotide
  Target: ATXN2; (-) strand; PAM type: NRG; PAM sequence: CAG
tttacttgagacctaaatgg

SEQ ID NO: 34121 - DNA, 20 bp, Artificial Sequence
  Description of Artificial Sequence: Synthetic oligonucleotide
  Target: ATXN2; (-) strand; PAM type: NRG; PAM sequence: TGG
tcttttacttgagacctaaa

SEQ ID NO: 34122 - DNA, 20 bp, Artificial Sequence
  Description of Artificial Sequence: Synthetic oligonucleotide
  Target: ATXN2; (-) strand; PAM type: NRG; PAM sequence: GAG
tgctttaagttcttttactt

SEQ ID NO: 34123 - DNA, 20 bp, Artificial Sequence
  Description of Artificial Sequence: Synthetic oligonucleotide
  Target: ATXN2; (-) strand; PAM type: NRG; PAM sequence: AAG
tttagatttttccttgcttt

SEQ ID NO: 34124 - DNA, 20 bp, Artificial Sequence
  Description of Artificial Sequence: Synthetic oligonucleotide
  Target: ATXN2; (-) strand; PAM type: NRG; PAM sequence: TAG
acaacaatttaaggttaatt

SEQ ID NO: 34125 - DNA, 20 bp, Artificial Sequence
  Description of Artificial Sequence: Synthetic oligonucleotide
  Target: ATXN2; (-) strand; PAM type: NRG; PAM sequence: AGG
tgaggctttacaacaattta

SEQ ID NO: 34126 - DNA, 20 bp, Artificial Sequence
  Description of Artificial Sequence: Synthetic oligonucleotide
  Target: ATXN2; (-) strand; PAM type: NRG; PAM sequence: AAG
ttgaggctttacaacaattt

SEQ ID NO: 34127 - DNA, 20 bp, Artificial Sequence
  Description of Artificial Sequence: Synthetic oligonucleotide
  Target: ATXN2; (-) strand; PAM type: NRG; PAM sequence: AGG
ggtcttttttctgttccttg

SEQ ID NO: 34128 - DNA, 20 bp, Artificial Sequence
  Description of Artificial Sequence: Synthetic oligonucleotide
  Target: ATXN2; (-) strand; PAM type: NRG; PAM sequence: GAG
aggtcttttttctgttcctt

SEQ ID NO: 34129 - DNA, 20 bp, Artificial Sequence
  Description of Artificial Sequence: Synthetic oligonucleotide
  Target: ATXN2; (-) strand; PAM type: NRG; PAM sequence: AGG
tggaatgttttagtaccaca

SEQ ID NO: 34130 - DNA, 20 bp, Artificial Sequence
  Description of Artificial Sequence: Synthetic oligonucleotide
  Target: ATXN2; (-) strand; PAM type: NRG; PAM sequence: AAG
ttggaatgttttagtaccac

SEQ ID NO: 34131 - DNA, 20 bp, Artificial Sequence
  Description of Artificial Sequence: Synthetic oligonucleotide
  Target: ATXN2; (-) strand; PAM type: NRG; PAM sequence: TAG
caaagatatttggaatgttt

SEQ ID NO: 34132 - DNA, 20 bp, Artificial Sequence
  Description of Artificial Sequence: Synthetic oligonucleotide
  Target: ATXN2; (-) strand; PAM type: NRG; PAM sequence: TGG
tttgagtgatcaaagatatt

SEQ ID NO: 34133 - DNA, 20 bp, Artificial Sequence
  Description of Artificial Sequence: Synthetic oligonucleotide
  Target: ATXN2; (-) strand; PAM type: NRG; PAM sequence: AAG
ctgagtagtttgagtgatca

SEQ ID NO: 34134 - DNA, 20 bp, Artificial Sequence
  Description of Artificial Sequence: Synthetic oligonucleotide
  Target: ATXN2; (-) strand; PAM type: NRG; PAM sequence: GAG
aatttgctcctgagtagttt

SEQ ID NO: 34135 - DNA, 20 bp, Artificial Sequence
  Description of Artificial Sequence: Synthetic oligonucleotide
  Target: ATXN2; (-) strand; PAM type: NRG; PAM sequence: TAG
taagagaatttgctcctgag

SEQ ID NO: 34136 - DNA, 20 bp, Artificial Sequence
  Description of Artificial Sequence: Synthetic oligonucleotide
  Target: ATXN2; (-) strand; PAM type: NRG; PAM sequence: GAG
ttataagagaatttgctcct

SEQ ID NO: 34137 - DNA, 20 bp, Artificial Sequence
  Description of Artificial Sequence: Synthetic oligonucleotide
  Target: ATXN2; (-) strand; PAM type: NRG; PAM sequence: GAG
gcttaaaaattagattataa

SEQ ID NO: 34138 - DNA, 20 bp, Artificial Sequence
  Description of Artificial Sequence: Synthetic oligonucleotide
  Target: ATXN2; (-) strand; PAM type: NRG; PAM sequence: AAG
aggcttaaaaattagattat

SEQ ID NO: 34139 - DNA, 20 bp, Artificial Sequence
  Description of Artificial Sequence: Synthetic oligonucleotide
  Target: ATXN2; (-) strand; PAM type: NRG; PAM sequence: TAG
tgactactaggcttaaaaat

SEQ ID NO: 34140 - DNA, 20 bp, Artificial Sequence
  Description of Artificial Sequence: Synthetic oligonucleotide
  Target: ATXN2; (-) strand; PAM type: NRG; PAM sequence: AGG
attaagttgcattgactact

SEQ ID NO: 34141 - DNA, 20 bp, Artificial Sequence
  Description of Artificial Sequence: Synthetic oligonucleotide
  Target: ATXN2; (-) strand; PAM type: NRG; PAM sequence: TAG
tattaagttgcattgactac

SEQ ID NO: 34142 - DNA, 20 bp, Artificial Sequence
  Description of Artificial Sequence: Synthetic oligonucleotide
  Target: ATXN2; (-) strand; PAM type: NRG; PAM sequence: AAG
acattaaaactaaggttatt

SEQ ID NO: 34143 - DNA, 20 bp, Artificial Sequence
  Description of Artificial Sequence: Synthetic oligonucleotide
  Target: ATXN2; (-) strand; PAM type: NRG; PAM sequence: AGG
atatataaacattaaaacta

SEQ ID NO: 34144 - DNA, 20 bp, Artificial Sequence
  Description of Artificial Sequence: Synthetic oligonucleotide
  Target: ATXN2; (-) strand; PAM type: NRG; PAM sequence: AAG
aatatataaacattaaaact

SEQ ID NO: 34145 - DNA, 20 bp, Artificial Sequence
  Description of Artificial Sequence: Synthetic oligonucleotide
  Target: ATXN2; (-) strand; PAM type: NRG; PAM sequence: CAG
ggtattaggaagagatttgg

SEQ ID NO: 34146 - DNA, 20 bp, Artificial Sequence
  Description of Artificial Sequence: Synthetic oligonucleotide
  Target: ATXN2; (-) strand; PAM type: NRG; PAM sequence: TGG
ttaggtattaggaagagatt

SEQ ID NO: 34147 - DNA, 20 bp, Artificial Sequence
  Description of Artificial Sequence: Synthetic oligonucleotide
  Target: ATXN2; (-) strand; PAM type: NRG; PAM sequence: GAG
actttcttaggtattaggaa

SEQ ID NO: 34148 - DNA, 20 bp, Artificial Sequence
  Description of Artificial Sequence: Synthetic oligonucleotide
  Target: ATXN2; (-) strand; PAM type: NRG; PAM sequence: AAG
ttactttcttaggtattagg

SEQ ID NO: 34149 - DNA, 20 bp, Artificial Sequence
  Description of Artificial Sequence: Synthetic oligonucleotide
  Target: ATXN2; (-) strand; PAM type: NRG; PAM sequence: AGG
tttttactttcttaggtatt

SEQ ID NO: 34150 - DNA, 20 bp, Artificial Sequence
  Description of Artificial Sequence: Synthetic oligonucleotide
  Target: ATXN2; (-) strand; PAM type: NRG; PAM sequence: TAG
gtttttactttcttaggtat

SEQ ID NO: 34151 - DNA, 20 bp, Artificial Sequence
  Description of Artificial Sequence: Synthetic oligonucleotide
  Target: ATXN2; (-) strand; PAM type: NRG; PAM sequence: AGG
tattctgtttttactttctt

SEQ ID NO: 34152 - DNA, 20 bp, Artificial Sequence
  Description of Artificial Sequence: Synthetic oligonucleotide
  Target: ATXN2; (-) strand; PAM type: NRG; PAM sequence: TAG
gtattctgtttttactttct

SEQ ID NO: 34153 - DNA, 20 bp, Artificial Sequence
  Description of Artificial Sequence: Synthetic oligonucleotide
  Target: ATXN2; (-) strand; PAM type: NRG; PAM sequence: AGG
aaatacaacttttatagaaa

SEQ ID NO: 34154 - DNA, 20 bp, Artificial Sequence
  Description of Artificial Sequence: Synthetic oligonucleotide
  Target: ATXN2; (-) strand; PAM type: NRG; PAM sequence: AAG
aaaatacaacttttatagaa

SEQ ID NO: 34155 - DNA, 20 bp, Artificial Sequence
  Description of Artificial Sequence: Synthetic oligonucleotide
  Target: ATXN2; (-) strand; PAM type: NRG; PAM sequence: TAG
aatttaaaatacaactttta

SEQ ID NO: 34156 - DNA, 20 bp, Artificial Sequence
  Description of Artificial Sequence: Synthetic oligonucleotide
  Target: ATXN2; (-) strand; PAM type: NRG; PAM sequence: TAG
ttccctttttcgttggcatc

SEQ ID NO: 34157 - DNA, 20 bp, Artificial Sequence
  Description of Artificial Sequence: Synthetic oligonucleotide
  Target: ATXN2; (-) strand; PAM type: NRG; PAM sequence: TGG
cttcagtttccctttttcgt

SEQ ID NO: 34158 - DNA, 20 bp, Artificial Sequence
  Description of Artificial Sequence: Synthetic oligonucleotide
  Target: ATXN2; (-) strand; PAM type: NRG; PAM sequence: CAG
ttccccaagtagggtaactt

SEQ ID NO: 34159 - DNA, 20 bp, Artificial Sequence
  Description of Artificial Sequence: Synthetic oligonucleotide
  Target: ATXN2; (-) strand; PAM type: NRG; PAM sequence: GGG
agtgatcgtttccccaagta

SEQ ID NO: 34160 - DNA, 20 bp, Artificial Sequence
  Description of Artificial Sequence: Synthetic oligonucleotide
  Target: ATXN2; (-) strand; PAM type: NRG; PAM sequence: AGG
aagtgatcgtttccccaagt

SEQ ID NO: 34161 - DNA, 20 bp, Artificial Sequence
  Description of Artificial Sequence: Synthetic oligonucleotide
  Target: ATXN2; (-) strand; PAM type: NRG; PAM sequence: TAG
gaagtgatcgtttccccaag

SEQ ID NO: 34162 - DNA, 20 bp, Artificial Sequence
  Description of Artificial Sequence: Synthetic oligonucleotide
  Target: ATXN2; (-) strand; PAM type: NRG; PAM sequence: AAG
gatgaagtgatcgtttcccc

SEQ ID NO: 34163 - DNA, 20 bp, Artificial Sequence
  Description of Artificial Sequence: Synthetic oligonucleotide
  Target: ATXN2; (-) strand; PAM type: NRG; PAM sequence: AAG
tagccaaactagttcagatg

SEQ ID NO: 34164 - DNA, 20 bp, Artificial Sequence
  Description of Artificial Sequence: Synthetic oligonucleotide
  Target: ATXN2; (-) strand; PAM type: NRG; PAM sequence: CAG
actacttagccaaactagtt

SEQ ID NO: 34165 - DNA, 20 bp, Artificial Sequence
  Description of Artificial Sequence: Synthetic oligonucleotide
  Target: ATXN2; (-) strand; PAM type: NRG; PAM sequence: TAG
caaacactacttagccaaac

SEQ ID NO: 34166 - DNA, 20 bp, Artificial Sequence
  Description of Artificial Sequence: Synthetic oligonucleotide
  Target: ATXN2; (-) strand; PAM type: NRG; PAM sequence: TAG
gaagcatcccaaacactact

SEQ ID NO: 34167 - DNA, 20 bp, Artificial Sequence
  Description of Artificial Sequence: Synthetic oligonucleotide
  Target: ATXN2; (-) strand; PAM type: NRG; PAM sequence: AAG
cttccccttctctgagtctg

SEQ ID NO: 34168 - DNA, 20 bp, Artificial Sequence
  Description of Artificial Sequence: Synthetic oligonucleotide
  Target: ATXN2; (-) strand; PAM type: NRG; PAM sequence: GAG
gcccccccttccccttctct

SEQ ID NO: 34169 - DNA, 20 bp, Artificial Sequence
  Description of Artificial Sequence: Synthetic oligonucleotide
  Target: ATXN2; (-) strand; PAM type: NRG; PAM sequence: CGG
tcaaagggggcggaaacagt

SEQ ID NO: 34170 - DNA, 20 bp, Artificial Sequence
  Description of Artificial Sequence: Synthetic oligonucleotide
  Target: ATXN2; (-) strand; PAM type: NRG; PAM sequence: CAG
gccttcaaagggggcggaaa

SEQ ID NO: 34171 - DNA, 20 bp, Artificial Sequence
  Description of Artificial Sequence: Synthetic oligonucleotide
  Target: ATXN2; (-) strand; PAM type: NRG; PAM sequence: CGG
tctgctgccttcaaaggggg

SEQ ID NO: 34172 - DNA, 20 bp, Artificial Sequence
  Description of Artificial Sequence: Synthetic oligonucleotide
  Target: ATXN2; (-) strand; PAM type: NRG; PAM sequence: GGG
aattctgctgccttcaaagg

SEQ ID NO: 34173 - DNA, 20 bp, Artificial Sequence
  Description of Artificial Sequence: Synthetic oligonucleotide
  Target: ATXN2; (-) strand; PAM type: NRG; PAM sequence: GGG
gaattctgctgccttcaaag

SEQ ID NO: 34174 - DNA, 20 bp, Artificial Sequence
  Description of Artificial Sequence: Synthetic oligonucleotide
  Target: ATXN2; (-) strand; PAM type: NRG; PAM sequence: GGG
ggaattctgctgccttcaaa

SEQ ID NO: 34175 - DNA, 20 bp, Artificial Sequence
  Description of Artificial Sequence: Synthetic oligonucleotide
  Target: ATXN2; (-) strand; PAM type: NRG; PAM sequence: AGG
aggaattctgctgccttcaa

SEQ ID NO: 34176 - DNA, 20 bp, Artificial Sequence
  Description of Artificial Sequence: Synthetic oligonucleotide
  Target: ATXN2; (-) strand; PAM type: NRG; PAM sequence: AAG
aaggaattctgctgccttca

SEQ ID NO: 34177 - DNA, 20 bp, Artificial Sequence
  Description of Artificial Sequence: Synthetic oligonucleotide
  Target: ATXN2; (-) strand; PAM type: NRG; PAM sequence: AGG
gaggaatcagctggttttta

SEQ ID NO: 34178 - DNA, 20 bp, Artificial Sequence
  Description of Artificial Sequence: Synthetic oligonucleotide
  Target: ATXN2; (-) strand; PAM type: NRG; PAM sequence: AAG
agaggaatcagctggttttt

SEQ ID NO: 34179 - DNA, 20 bp, Artificial Sequence
  Description of Artificial Sequence: Synthetic oligonucleotide
  Target: ATXN2; (-) strand; PAM type: NRG; PAM sequence: TGG
ccccatcaagaggaatcagc

SEQ ID NO: 34180 - DNA, 20 bp, Artificial Sequence
  Description of Artificial Sequence: Synthetic oligonucleotide
  Target: ATXN2; (-) strand; PAM type: NRG; PAM sequence: CAG
aattccccatcaagaggaat

SEQ ID NO: 34181 - DNA, 20 bp, Artificial Sequence
  Description of Artificial Sequence: Synthetic oligonucleotide
  Target: ATXN2; (-) strand; PAM type: NRG; PAM sequence: AGG
agcagaaattccccatcaag

SEQ ID NO: 34182 - DNA, 20 bp, Artificial Sequence
  Description of Artificial Sequence: Synthetic oligonucleotide
  Target: ATXN2; (-) strand; PAM type: NRG; PAM sequence: GAG
cagcagaaattccccatcaa

SEQ ID NO: 34183 - DNA, 20 bp, Artificial Sequence
  Description of Artificial Sequence: Synthetic oligonucleotide
  Target: ATXN2; (-) strand; PAM type: NRG; PAM sequence: AAG
tacagcagaaattccccatc

SEQ ID NO: 34184 - DNA, 20 bp, Artificial Sequence
  Description of Artificial Sequence: Synthetic oligonucleotide
  Target: ATXN2; (-) strand; PAM type: NRG; PAM sequence: CAG
caaagaatttttatttacag

SEQ ID NO: 34185 - DNA, 20 bp, Artificial Sequence
  Description of Artificial Sequence: Synthetic oligonucleotide
  Target: ATXN2; (-) strand; PAM type: NRG; PAM sequence: CAG
ttccaaagaatttttattta

SEQ ID NO: 34186 - DNA, 20 bp, Artificial Sequence
  Description of Artificial Sequence: Synthetic oligonucleotide
  Target: ATXN2; (-) strand; PAM type: NRG; PAM sequence: AAG
ttttcagcaacccatttcca

SEQ ID NO: 34187 - DNA, 20 bp, Artificial Sequence
  Description of Artificial Sequence: Synthetic oligonucleotide
  Target: ATXN2; (-) strand; PAM type: NRG; PAM sequence: CAG
tctttttgaaaacacatttt

SEQ ID NO: 34188 - DNA, 20 bp, Artificial Sequence
  Description of Artificial Sequence: Synthetic oligonucleotide
  Target: ATXN2; (-) strand; PAM type: NRG; PAM sequence: GAG
agaggatttttcattcaccc

SEQ ID NO: 34189 - DNA, 20 bp, Artificial Sequence
  Description of Artificial Sequence: Synthetic oligonucleotide
  Target: ATXN2; (-) strand; PAM type: NRG; PAM sequence: AGG
gctttggaaggtggaataag

SEQ ID NO: 34190 - DNA, 20 bp, Artificial Sequence
  Description of Artificial Sequence: Synthetic oligonucleotide
  Target: ATXN2; (-) strand; PAM type: NRG; PAM sequence: GAG
ggctttggaaggtggaataa

SEQ ID NO: 34191 - DNA, 20 bp, Artificial Sequence
  Description of Artificial Sequence: Synthetic oligonucleotide
  Target: ATXN2; (-) strand; PAM type: NRG; PAM sequence: AAG
tgggctttggaaggtggaat

SEQ ID NO: 34192 - DNA, 20 bp, Artificial Sequence
  Description of Artificial Sequence: Synthetic oligonucleotide
  Target: ATXN2; (-) strand; PAM type: NRG; PAM sequence: TGG
gcatcttgggctttggaagg

SEQ ID NO: 34193 - DNA, 20 bp, Artificial Sequence
  Description of Artificial Sequence: Synthetic oligonucleotide
  Target: ATXN2; (-) strand; PAM type: NRG; PAM sequence: AGG
taggcatcttgggctttgga

SEQ ID NO: 34194 - DNA, 20 bp, Artificial Sequence
  Description of Artificial Sequence: Synthetic oligonucleotide
  Target: ATXN2; (-) strand; PAM type: NRG; PAM sequence: AAG
ataggcatcttgggctttgg

SEQ ID NO: 34195 - DNA, 20 bp, Artificial Sequence
  Description of Artificial Sequence: Synthetic oligonucleotide
  Target: ATXN2; (-) strand; PAM type: NRG; PAM sequence: TGG
taaataggcatcttgggctt

SEQ ID NO: 34196 - DNA, 20 bp, Artificial Sequence
  Description of Artificial Sequence: Synthetic oligonucleotide
  Target: ATXN2; (-) strand; PAM type: NRG; PAM sequence: GGG
cctccttaaataggcatctt

SEQ ID NO: 34197 - DNA, 20 bp, Artificial Sequence
  Description of Artificial Sequence: Synthetic oligonucleotide
  Target: ATXN2; (-) strand; PAM type: NRG; PAM sequence: TGG
tcctccttaaataggcatct

SEQ ID NO: 34198 - DNA, 20 bp, Artificial Sequence
  Description of Artificial Sequence: Synthetic oligonucleotide
  Target: ATXN2; (-) strand; PAM type: NRG; PAM sequence: AGG
gaccggcgtcctccttaaat

SEQ ID NO: 34199 - DNA, 20 bp, Artificial Sequence
  Description of Artificial Sequence: Synthetic oligonucleotide
  Target: ATXN2; (-) strand; PAM type: NRG; PAM sequence: TAG
tgaccggcgtcctccttaaa

SEQ ID NO: 34200 - DNA, 20 bp, Artificial Sequence
  Description of Artificial Sequence: Synthetic oligonucleotide
  Target: ATXN2; (-) strand; PAM type: NRG; PAM sequence: CGG
ccggcttgacggcgggtgac

SEQ ID NO: 34201 - DNA, 20 bp, Artificial Sequence
  Description of Artificial Sequence: Synthetic oligonucleotide
  Target: ATXN2; (-) strand; PAM type: NRG; PAM sequence: GGG
taggccgccggcttgacggc

SEQ ID NO: 34202 - DNA, 20 bp, Artificial Sequence
  Description of Artificial Sequence: Synthetic oligonucleotide
  Target: ATXN2; (-) strand; PAM type: NRG; PAM sequence: CGG
ctaggccgccggcttgacgg

SEQ ID NO: 34203 - DNA, 20 bp, Artificial Sequence
  Description of Artificial Sequence: Synthetic oligonucleotide
  Target: ATXN2; (-) strand; PAM type: NRG; PAM sequence: CGG
ggcctaggccgccggcttga

SEQ ID NO: 34204 - DNA, 20 bp, Artificial Sequence
  Description of Artificial Sequence: Synthetic oligonucleotide
  Target: ATXN2; (-) strand; PAM type: NRG; PAM sequence: CGG
cttctttaggcctaggccgc

SEQ ID NO: 34205 - DNA, 20 bp, Artificial Sequence
  Description of Artificial Sequence: Synthetic oligonucleotide
  Target: ATXN2; (-) strand; PAM type: NRG; PAM sequence: AGG
actgtgccttctttaggcct

SEQ ID NO: 34206 - DNA, 20 bp, Artificial Sequence
  Description of Artificial Sequence: Synthetic oligonucleotide
  Target: ATXN2; (-) strand; PAM type: NRG; PAM sequence: TAG
tactgtgccttctttaggcc

SEQ ID NO: 34207 - DNA, 20 bp, Artificial Sequence
  Description of Artificial Sequence: Synthetic oligonucleotide
  Target: ATXN2; (-) strand; PAM type: NRG; PAM sequence: AGG
ggcactactgtgccttcttt

SEQ ID NO: 34208 - DNA, 20 bp, Artificial Sequence
  Description of Artificial Sequence: Synthetic oligonucleotide
  Target: ATXN2; (-) strand; PAM type: NRG; PAM sequence: TAG
aggcactactgtgccttctt

SEQ ID NO: 34209 - DNA, 20 bp, Artificial Sequence
  Description of Artificial Sequence: Synthetic oligonucleotide
  Target: ATXN2; (-) strand; PAM type: NRG; PAM sequence: AGG
ctcaagtccatccgtgttgt

SEQ ID NO: 34210 - DNA, 20 bp, Artificial Sequence
  Description of Artificial Sequence: Synthetic oligonucleotide
  Target: ATXN2; (-) strand; PAM type: NRG; PAM sequence: TAG
cctcaagtccatccgtgttg

SEQ ID NO: 34211 - DNA, 20 bp, Artificial Sequence
  Description of Artificial Sequence: Synthetic oligonucleotide
  Target: ATXN2; (-) strand; PAM type: NRG; PAM sequence: AAG
gtccatttcccttgtgcctc

SEQ ID NO: 34212 - DNA, 20 bp, Artificial Sequence
  Description of Artificial Sequence: Synthetic oligonucleotide
  Target: ATXN2; (-) strand; PAM type: NRG; PAM sequence: AAG
agagcttaccaagggcacgc

SEQ ID NO: 34213 - DNA, 20 bp, Artificial Sequence
  Description of Artificial Sequence: Synthetic oligonucleotide
  Target: ATXN2; (-) strand; PAM type: NRG; PAM sequence: GGG
gtgccgccagagcttaccaa

SEQ ID NO: 34214 - DNA, 20 bp, Artificial Sequence
  Description of Artificial Sequence: Synthetic oligonucleotide
  Target: ATXN2; (-) strand; PAM type: NRG; PAM sequence: AGG
agtgccgccagagcttacca

SEQ ID NO: 34215 - DNA, 20 bp, Artificial Sequence
  Description of Artificial Sequence: Synthetic oligonucleotide
  Target: ATXN2; (-) strand; PAM type: NRG; PAM sequence: AAG
gagtgccgccagagcttacc

SEQ ID NO: 34216 - DNA, 20 bp, Artificial Sequence
  Description of Artificial Sequence: Synthetic oligonucleotide
  Target: ATXN2; (-) strand; PAM type: NRG; PAM sequence: GAG
taacttcgggagtgccgcca

SEQ ID NO: 34217 - DNA, 20 bp, Artificial Sequence
  Description of Artificial Sequence: Synthetic oligonucleotide
  Target: ATXN2; (-) strand; PAM type: NRG; PAM sequence: CAG
cttaacttcgggagtgccgc

SEQ ID NO: 34218 - DNA, 20 bp, Artificial Sequence
  Description of Artificial Sequence: Synthetic oligonucleotide
  Target: ATXN2; (-) strand; PAM type: NRG; PAM sequence: GAG
gccggtgtccttaacttcgg

SEQ ID NO: 34219 - DNA, 20 bp, Artificial Sequence
  Description of Artificial Sequence: Synthetic oligonucleotide
  Target: ATXN2; (-) strand; PAM type: NRG; PAM sequence: GGG
tggccggtgtccttaacttc

SEQ ID NO: 34220 - DNA, 20 bp, Artificial Sequence
  Description of Artificial Sequence: Synthetic oligonucleotide
  Target: ATXN2; (-) strand; PAM type: NRG; PAM sequence: CGG
gtggccggtgtccttaactt

SEQ ID NO: 34221 - DNA, 20 bp, Artificial Sequence
  Description of Artificial Sequence: Synthetic oligonucleotide
  Target: ATXN2; (-) strand; PAM type: NRG; PAM sequence: CGG
agactccattccattgtggc

SEQ ID NO: 34222 - DNA, 20 bp, Artificial Sequence
  Description of Artificial Sequence: Synthetic oligonucleotide
  Target: ATXN2; (-) strand; PAM type: NRG; PAM sequence: TGG
caatagactccattccattg

SEQ ID NO: 34223 - DNA, 20 bp, Artificial Sequence
  Description of Artificial Sequence: Synthetic oligonucleotide
  Target: ATXN2; (-) strand; PAM type: NRG; PAM sequence: TAG
aagggagaaggaaacgtcaa

SEQ ID NO: 34224 - DNA, 20 bp, Artificial Sequence
  Description of Artificial Sequence: Synthetic oligonucleotide
  Target: ATXN2; (-) strand; PAM type: NRG; PAM sequence: AGG
gcttagtgttcaaagggaga

SEQ ID NO: 34225 - DNA, 20 bp, Artificial Sequence
  Description of Artificial Sequence: Synthetic oligonucleotide
  Target: ATXN2; (-) strand; PAM type: NRG; PAM sequence: AAG
tgcttagtgttcaaagggag

SEQ ID NO: 34226 - DNA, 20 bp, Artificial Sequence
  Description of Artificial Sequence: Synthetic oligonucleotide
  Target: ATXN2; (-) strand; PAM type: NRG; PAM sequence: GAG
aaatgcttagtgttcaaagg

SEQ ID NO: 34227 - DNA, 20 bp, Artificial Sequence
  Description of Artificial Sequence: Synthetic oligonucleotide
  Target: ATXN2; (-) strand; PAM type: NRG; PAM sequence: GGG
gaaaatgcttagtgttcaaa

SEQ ID NO: 34228 - DNA, 20 bp, Artificial Sequence
  Description of Artificial Sequence: Synthetic oligonucleotide
  Target: ATXN2; (-) strand; PAM type: NRG; PAM sequence: AGG
agaaaatgcttagtgttcaa

SEQ ID NO: 34229 - DNA, 20 bp, Artificial Sequence
  Description of Artificial Sequence: Synthetic oligonucleotide
  Target: ATXN2; (-) strand; PAM type: NRG; PAM sequence: AAG
aagaaaatgcttagtgttca

SEQ ID NO: 34230 - DNA, 20 bp, Artificial Sequence
  Description of Artificial Sequence: Synthetic oligonucleotide
  Target: ATXN2; (-) strand; PAM type: NRG; PAM sequence: TAG
tcacgaactaagaaaatgct

SEQ ID NO: 34231 - DNA, 20 bp, Artificial Sequence
  Description of Artificial Sequence: Synthetic oligonucleotide
  Target: ATXN2; (-) strand; PAM type: NRG; PAM sequence: AAG
cagttcgtatttcacgaact

SEQ ID NO: 34232 - DNA, 20 bp, Artificial Sequence
  Description of Artificial Sequence: Synthetic oligonucleotide
  Target: ATXN2; (-) strand; PAM type: NRG; PAM sequence: CAG
tgggggtggcgggcggttgt

SEQ ID NO: 34233 - DNA, 20 bp, Artificial Sequence
  Description of Artificial Sequence: Synthetic oligonucleotide
  Target: ATXN2; (-) strand; PAM type: NRG; PAM sequence: CGG
ggcctgttgggggtggcggg

SEQ ID NO: 34234 - DNA, 20 bp, Artificial Sequence
  Description of Artificial Sequence: Synthetic oligonucleotide
  Target: ATXN2; (-) strand; PAM type: NRG; PAM sequence: GGG
gagggcctgttgggggtggc

SEQ ID NO: 34235 - DNA, 20 bp, Artificial Sequence
  Description of Artificial Sequence: Synthetic oligonucleotide
  Target: ATXN2; (-) strand; PAM type: NRG; PAM sequence: CGG
ggagggcctgttgggggtgg

SEQ ID NO: 34236 - DNA, 20 bp, Artificial Sequence
  Description of Artificial Sequence: Synthetic oligonucleotide
  Target: ATXN2; (-) strand; PAM type: NRG; PAM sequence: TGG
gcaggagggcctgttggggg

SEQ ID NO: 34237 - DNA, 20 bp, Artificial Sequence
  Description of Artificial Sequence: Synthetic oligonucleotide
  Target: ATXN2; (-) strand; PAM type: NRG; PAM sequence: GGG
tgtgcaggagggcctgttgg

SEQ ID NO: 34238 - DNA, 20 bp, Artificial Sequence
  Description of Artificial Sequence: Synthetic oligonucleotide
  Target: ATXN2; (-) strand; PAM type: NRG; PAM sequence: GGG
ttgtgcaggagggcctgttg

SEQ ID NO: 34239 - DNA, 20 bp, Artificial Sequence
  Description of Artificial Sequence: Synthetic oligonucleotide
  Target: ATXN2; (-) strand; PAM type: NRG; PAM sequence: GGG
tttgtgcaggagggcctgtt

SEQ ID NO: 34240 - DNA, 20 bp, Artificial Sequence
  Description of Artificial Sequence: Synthetic oligonucleotide
  Target: ATXN2; (-) strand; PAM type: NRG; PAM sequence: TGG
gtttgtgcaggagggcctgt

SEQ ID NO: 34241 - DNA, 20 bp, Artificial Sequence
  Description of Artificial Sequence: Synthetic oligonucleotide
  Target: ATXN2; (-) strand; PAM type: NRG; PAM sequence: GGG
gagggtgtgtttgtgcagga

SEQ ID NO: 34242 - DNA, 20 bp, Artificial Sequence
  Description of Artificial Sequence: Synthetic oligonucleotide
  Target: ATXN2; (-) strand; PAM type: NRG; PAM sequence: AGG
cgagggtgtgtttgtgcagg

SEQ ID NO: 34243 - DNA, 20 bp, Artificial Sequence
  Description of Artificial Sequence: Synthetic oligonucleotide
  Target: ATXN2; (-) strand; PAM type: NRG; PAM sequence: GAG
tcgagggtgtgtttgtgcag

SEQ ID NO: 34244 - DNA, 20 bp, Artificial Sequence
  Description of Artificial Sequence: Synthetic oligonucleotide
  Target: ATXN2; (-) strand; PAM type: NRG; PAM sequence: AGG
actcgagggtgtgtttgtgc

SEQ ID NO: 34245 - DNA, 20 bp, Artificial Sequence
  Description of Artificial Sequence: Synthetic oligonucleotide
  Target: ATXN2; (-) strand; PAM type: NRG; PAM sequence: CAG
gactcgagggtgtgtttgtg

SEQ ID NO: 34246 - DNA, 20 bp, Artificial Sequence
  Description of Artificial Sequence: Synthetic oligonucleotide
  Target: ATXN2; (-) strand; PAM type: NRG; PAM sequence: GGG
gctaactgggtttgactcga

SEQ ID NO: 34247 - DNA, 20 bp, Artificial Sequence
  Description of Artificial Sequence: Synthetic oligonucleotide
  Target: ATXN2; (-) strand; PAM type: NRG; PAM sequence: AGG
ggctaactgggtttgactcg

SEQ ID NO: 34248 - DNA, 20 bp, Artificial Sequence
  Description of Artificial Sequence: Synthetic oligonucleotide
  Target: ATXN2; (-) strand; PAM type: NRG; PAM sequence: GAG
cggctaactgggtttgactc

SEQ ID NO: 34249 - DNA, 20 bp, Artificial Sequence
  Description of Artificial Sequence: Synthetic oligonucleotide
  Target: ATXN2; (-) strand; PAM type: NRG; PAM sequence: GGG
cagtgttgtcccggctaact

SEQ ID NO: 34250 - DNA, 20 bp, Artificial Sequence
  Description of Artificial Sequence: Synthetic oligonucleotide
  Target: ATXN2; (-) strand; PAM type: NRG; PAM sequence: TGG
tcagtgttgtcccggctaac

SEQ ID NO: 34251 - DNA, 20 bp, Artificial Sequence
  Description of Artificial Sequence: Synthetic oligonucleotide
  Target: ATXN2; (-) strand; PAM type: NRG; PAM sequence: CGG
ctgggggctcagtgttgtcc

SEQ ID NO: 34252 - DNA, 20 bp, Artificial Sequence
  Description of Artificial Sequence: Synthetic oligonucleotide
  Target: ATXN2; (-) strand; PAM type: NRG; PAM sequence: CAG
tgtagtaggggctgggggct

SEQ ID NO: 34253 - DNA, 20 bp, Artificial Sequence
  Description of Artificial Sequence: Synthetic oligonucleotide
  Target: ATXN2; (-) strand; PAM type: NRG; PAM sequence: GGG
ggggttgtagtaggggctgg

SEQ ID NO: 34254 - DNA, 20 bp, Artificial Sequence
  Description of Artificial Sequence: Synthetic oligonucleotide
  Target: ATXN2; (-) strand; PAM type: NRG; PAM sequence: GGG
cggggttgtagtaggggctg

SEQ ID NO: 34255 - DNA, 20 bp, Artificial Sequence
  Description of Artificial Sequence: Synthetic oligonucleotide
  Target: ATXN2; (-) strand; PAM type: NRG; PAM sequence: GGG
ccggggttgtagtaggggct

SEQ ID NO: 34256 - DNA, 20 bp, Artificial Sequence
  Description of Artificial Sequence: Synthetic oligonucleotide
  Target: ATXN2; (-) strand; PAM type: NRG; PAM sequence: TGG
gccggggttgtagtaggggc

SEQ ID NO: 34257 - DNA, 20 bp, Artificial Sequence
  Description of Artificial Sequence: Synthetic oligonucleotide
  Target: ATXN2; (-) strand; PAM type: NRG; PAM sequence: GGG
ctaagccggggttgtagtag

SEQ ID NO: 34258 - DNA, 20 bp, Artificial Sequence
  Description of Artificial Sequence: Synthetic oligonucleotide
  Target: ATXN2; (-) strand; PAM type: NRG; PAM sequence: GGG
cctaagccggggttgtagta

SEQ ID NO: 34259 - DNA, 20 bp, Artificial Sequence
  Description of Artificial Sequence: Synthetic oligonucleotide
  Target: ATXN2; (-) strand; PAM type: NRG; PAM sequence: AGG
tcctaagccggggttgtagt

SEQ ID NO: 34260 - DNA, 20 bp, Artificial Sequence
  Description of Artificial Sequence: Synthetic oligonucleotide
  Target: ATXN2; (-) strand; PAM type: NRG; PAM sequence: TAG
ctcctaagccggggttgtag

SEQ ID NO: 34261 - DNA, 20 bp, Artificial Sequence
  Description of Artificial Sequence: Synthetic oligonucleotide
  Target: ATXN2; (-) strand; PAM type: NRG; PAM sequence: TAG
tccctcctaagccggggttg

SEQ ID NO: 34262 - DNA, 20 bp, Artificial Sequence
  Description of Artificial Sequence: Synthetic oligonucleotide
  Target: ATXN2; (-) strand; PAM type: NRG; PAM sequence: GGG
tctttttccctcctaagccg

SEQ ID NO: 34263 - DNA, 20 bp, Artificial Sequence
  Description of Artificial Sequence: Synthetic oligonucleotide
  Target: ATXN2; (-) strand; PAM type: NRG; PAM sequence: GGG
gtctttttccctcctaagcc

SEQ ID NO: 34264 - DNA, 20 bp, Artificial Sequence
  Description of Artificial Sequence: Synthetic oligonucleotide
  Target: ATXN2; (-) strand; PAM type: NRG; PAM sequence: CGG
cgtctttttccctcctaagc

SEQ ID NO: 34265 - DNA, 20 bp, Artificial Sequence
  Description of Artificial Sequence: Synthetic oligonucleotide
  Target: ATXN2; (-) strand; PAM type: NRG; PAM sequence: AAG
ctagcgtctttttccctcct

SEQ ID NO: 34266 - DNA, 20 bp, Artificial Sequence
  Description of Artificial Sequence: Synthetic oligonucleotide
  Target: ATXN2; (-) strand; PAM type: NRG; PAM sequence: TAG
gcagaaaggcgggtgtttac

SEQ ID NO: 34267 - DNA, 20 bp, Artificial Sequence
  Description of Artificial Sequence: Synthetic oligonucleotide
  Target: ATXN2; (-) strand; PAM type: NRG; PAM sequence: GGG
gttcctgaaggcagaaaggc

SEQ ID NO: 34268 - DNA, 20 bp, Artificial Sequence
  Description of Artificial Sequence: Synthetic oligonucleotide
  Target: ATXN2; (-) strand; PAM type: NRG; PAM sequence: CGG
ggttcctgaaggcagaaagg

SEQ ID NO: 34269 - DNA, 20 bp, Artificial Sequence
  Description of Artificial Sequence: Synthetic oligonucleotide
  Target: ATXN2; (-) strand; PAM type: NRG; PAM sequence: AGG
tcgggttcctgaaggcagaa

SEQ ID NO: 34270 - DNA, 20 bp, Artificial Sequence
  Description of Artificial Sequence: Synthetic oligonucleotide
  Target: ATXN2; (-) strand; PAM type: NRG; PAM sequence: AAG
gtcgggttcctgaaggcaga

SEQ ID NO: 34271 - DNA, 20 bp, Artificial Sequence
  Description of Artificial Sequence: Synthetic oligonucleotide
  Target: ATXN2; (-) strand; PAM type: NRG; PAM sequence: CAG
cgtggtcgggttcctgaagg

SEQ ID NO: 34272 - DNA, 20 bp, Artificial Sequence
  Description of Artificial Sequence: Synthetic oligonucleotide
  Target: ATXN2; (-) strand; PAM type: NRG; PAM sequence: AGG
ggacgtggtcgggttcctga

SEQ ID NO: 34273 - DNA, 20 bp, Artificial Sequence
  Description of Artificial Sequence: Synthetic oligonucleotide
  Target: ATXN2; (-) strand; PAM type: NRG; PAM sequence: AAG
gggacgtggtcgggttcctg

SEQ ID NO: 34274 - DNA, 20 bp, Artificial Sequence
  Description of Artificial Sequence: Synthetic oligonucleotide
  Target: ATXN2; (-) strand; PAM type: NRG; PAM sequence: GGG
ttgcagcaggggacgtggtc

SEQ ID NO: 34275 - DNA, 20 bp, Artificial Sequence
  Description of Artificial Sequence: Synthetic oligonucleotide
  Target: ATXN2; (-) strand; PAM type: NRG; PAM sequence: CGG
attgcagcaggggacgtggt

SEQ ID NO: 34276 - DNA, 20 bp, Artificial Sequence
  Description of Artificial Sequence: Synthetic oligonucleotide
  Target: ATXN2; (-) strand; PAM type: NRG; PAM sequence: TGG
agagattgcagcaggggacg

SEQ ID NO: 34277 - DNA, 20 bp, Artificial Sequence
  Description of Artificial Sequence: Synthetic oligonucleotide
  Target: ATXN2; (-) strand; PAM type: NRG; PAM sequence: GGG
ggagagagagattgcagcag

SEQ ID NO: 34278 - DNA, 20 bp, Artificial Sequence
  Description of Artificial Sequence: Synthetic oligonucleotide
  Target: ATXN2; (-) strand; PAM type: NRG; PAM sequence: GGG
aggagagagagattgcagca

SEQ ID NO: 34279 - DNA, 20 bp, Artificial Sequence
  Description of Artificial Sequence: Synthetic oligonucleotide
  Target: ATXN2; (-) strand; PAM type: NRG; PAM sequence: AGG
taggagagagagattgcagc

SEQ ID NO: 34280 - DNA, 20 bp, Artificial Sequence
  Description of Artificial Sequence: Synthetic oligonucleotide
  Target: ATXN2; (-) strand; PAM type: NRG; PAM sequence: CAG
ctaggagagagagattgcag

SEQ ID NO: 34281 - DNA, 20 bp, Artificial Sequence
  Description of Artificial Sequence: Synthetic oligonucleotide
  Target: ATXN2; (-) strand; PAM type: NRG; PAM sequence: CAG
atgctaggagagagagattg

SEQ ID NO: 34282 - DNA, 20 bp, Artificial Sequence
  Description of Artificial Sequence: Synthetic oligonucleotide
  Target: ATXN2; (-) strand; PAM type: NRG; PAM sequence: GAG
ttcggaaatgctaggagaga

SEQ ID NO: 34283 - DNA, 20 bp, Artificial Sequence
  Description of Artificial Sequence: Synthetic oligonucleotide
  Target: ATXN2; (-) strand; PAM type: NRG; PAM sequence: GAG
atttcggaaatgctaggaga

SEQ ID NO: 34284 - DNA, 20 bp, Artificial Sequence
  Description of Artificial Sequence: Synthetic oligonucleotide
  Target: ATXN2; (-) strand; PAM type: NRG; PAM sequence: GAG
caatttcggaaatgctagga

SEQ ID NO: 34285 - DNA, 20 bp, Artificial Sequence
  Description of Artificial Sequence: Synthetic oligonucleotide
  Target: ATXN2; (-) strand; PAM type: NRG; PAM sequence: GAG
cccaatttcggaaatgctag

SEQ ID NO: 34286 - DNA, 20 bp, Artificial Sequence
  Description of Artificial Sequence: Synthetic oligonucleotide
  Target: ATXN2; (-) strand; PAM type: NRG; PAM sequence: AGG
gccccaatttcggaaatgct

SEQ ID NO: 34287 - DNA, 20 bp, Artificial Sequence
  Description of Artificial Sequence: Synthetic oligonucleotide
  Target: ATXN2; (-) strand; PAM type: NRG; PAM sequence: TAG
cgccccaatttcggaaatgc

SEQ ID NO: 34288 - DNA, 20 bp, Artificial Sequence
  Description of Artificial Sequence: Synthetic oligonucleotide
  Target: ATXN2; (-) strand; PAM type: NRG; PAM sequence: CGG
cccaacccccgccccaattt

SEQ ID NO: 34289 - DNA, 20 bp, Artificial Sequence
  Description of Artificial Sequence: Synthetic oligonucleotide
  Target: ATXN2; (-) strand; PAM type: NRG; PAM sequence: GGG
cggtgctggtggcagggggc

SEQ ID NO: 34290 - DNA, 20 bp, Artificial Sequence
  Description of Artificial Sequence: Synthetic oligonucleotide
  Target: ATXN2; (-) strand; PAM type: NRG; PAM sequence: CGG
gcggtgctggtggcaggggg

SEQ ID NO: 34291 - DNA, 20 bp, Artificial Sequence
  Description of Artificial Sequence: Synthetic oligonucleotide
  Target: ATXN2; (-) strand; PAM type: NRG; PAM sequence: GGG
gtggcggtgctggtggcagg

SEQ ID NO: 34292 - DNA, 20 bp, Artificial Sequence
  Description of Artificial Sequence: Synthetic oligonucleotide
  Target: ATXN2; (-) strand; PAM type: NRG; PAM sequence: GGG
ggtggcggtgctggtggcag

SEQ ID NO: 34293 - DNA, 20 bp, Artificial Sequence
  Description of Artificial Sequence: Synthetic oligonucleotide
  Target: ATXN2; (-) strand; PAM type: NRG; PAM sequence: GGG
gggtggcggtgctggtggca

SEQ ID NO: 34294 - DNA, 20 bp, Artificial Sequence
  Description of Artificial Sequence: Synthetic oligonucleotide
  Target: ATXN2; (-) strand; PAM type: NRG; PAM sequence: AGG
ggggtggcggtgctggtggc

SEQ ID NO: 34295 - DNA, 20 bp, Artificial Sequence
  Description of Artificial Sequence: Synthetic oligonucleotide
  Target: ATXN2; (-) strand; PAM type: NRG; PAM sequence: CAG
cggggtggcggtgctggtgg

SEQ ID NO: 34296 - DNA, 20 bp, Artificial Sequence
  Description of Artificial Sequence: Synthetic oligonucleotide
  Target: ATXN2; (-) strand; PAM type: NRG; PAM sequence: TGG
atccggggtggcggtgctgg

SEQ ID NO: 34297 - DNA, 20 bp, Artificial Sequence
  Description of Artificial Sequence: Synthetic oligonucleotide
  Target: ATXN2; (-) strand; PAM type: NRG; PAM sequence: TGG
gagatccggggtggcggtgc

SEQ ID NO: 34298 - DNA, 20 bp, Artificial Sequence
  Description of Artificial Sequence: Synthetic oligonucleotide
  Target: ATXN2; (-) strand; PAM type: NRG; PAM sequence: CGG
accctggagatccggggtgg

SEQ ID NO: 34299 - DNA, 20 bp, Artificial Sequence
  Description of Artificial Sequence: Synthetic oligonucleotide
  Target: ATXN2; (-) strand; PAM type: NRG; PAM sequence: TGG
tggaccctggagatccgggg

SEQ ID NO: 34300 - DNA, 20 bp, Artificial Sequence
  Description of Artificial Sequence: Synthetic oligonucleotide
  Target: ATXN2; (-) strand; PAM type: NRG; PAM sequence: GGG
ggctggaccctggagatccg

SEQ ID NO: 34301 - DNA, 20 bp, Artificial Sequence
  Description of Artificial Sequence: Synthetic oligonucleotide
  Target: ATXN2; (-) strand; PAM type: NRG; PAM sequence: GGG
aggctggaccctggagatcc

SEQ ID NO: 34302 - DNA, 20 bp, Artificial Sequence
  Description of Artificial Sequence: Synthetic oligonucleotide
  Target: ATXN2; (-) strand; PAM type: NRG; PAM sequence: CGG
caggctggaccctggagatc

SEQ ID NO: 34303 - DNA, 20 bp, Artificial Sequence
  Description of Artificial Sequence: Synthetic oligonucleotide
  Target: ATXN2; (-) strand; PAM type: NRG; PAM sequence: GAG
tggacccaggctggaccctg

SEQ ID NO: 34304 - DNA, 20 bp, Artificial Sequence
  Description of Artificial Sequence: Synthetic oligonucleotide
  Target: ATXN2; (-) strand; PAM type: NRG; PAM sequence: TGG
gctggacccaggctggaccc

SEQ ID NO: 34305 - DNA, 20 bp, Artificial Sequence
  Description of Artificial Sequence: Synthetic oligonucleotide
  Target: ATXN2; (-) strand; PAM type: NRG; PAM sequence: TGG
ggtgagggctggacccaggc

SEQ ID NO: 34306 - DNA, 20 bp, Artificial Sequence
  Description of Artificial Sequence: Synthetic oligonucleotide
  Target: ATXN2; (-) strand; PAM type: NRG; PAM sequence: AGG
ggtgggtgagggctggaccc

SEQ ID NO: 34307 - DNA, 20 bp, Artificial Sequence
  Description of Artificial Sequence: Synthetic oligonucleotide
  Target: ATXN2; (-) strand; PAM type: NRG; PAM sequence: CAG
cggtgggtgagggctggacc

SEQ ID NO: 34308 - DNA, 20 bp, Artificial Sequence
  Description of Artificial Sequence: Synthetic oligonucleotide
  Target: ATXN2; (-) strand; PAM type: NRG; PAM sequence: TGG
gaacatcggtgggtgagggc

SEQ ID NO: 34309 - DNA, 20 bp, Artificial Sequence
  Description of Artificial Sequence: Synthetic oligonucleotide
  Target: ATXN2; (-) strand; PAM type: NRG; PAM sequence: GGG
tgtggaacatcggtgggtga

SEQ ID NO: 34310 - DNA, 20 bp, Artificial Sequence
  Description of Artificial Sequence: Synthetic oligonucleotide
  Target: ATXN2; (-) strand; PAM type: NRG; PAM sequence: AGG
ctgtggaacatcggtgggtg

SEQ ID NO: 34311 - DNA, 20 bp, Artificial Sequence
  Description of Artificial Sequence: Synthetic oligonucleotide
  Target: ATXN2; (-) strand; PAM type: NRG; PAM sequence: GAG
cctgtggaacatcggtgggt

SEQ ID NO: 34312 - DNA, 20 bp, Artificial Sequence
  Description of Artificial Sequence: Synthetic oligonucleotide
  Target: ATXN2; (-) strand; PAM type: NRG; PAM sequence: GGG
ggcgcctgtggaacatcggt

SEQ ID NO: 34313 - DNA, 20 bp, Artificial Sequence
  Description of Artificial Sequence: Synthetic oligonucleotide
  Target: ATXN2; (-) strand; PAM type: NRG; PAM sequence: TGG
aggcgcctgtggaacatcgg

SEQ ID NO: 34314 - DNA, 20 bp, Artificial Sequence
  Description of Artificial Sequence: Synthetic oligonucleotide
  Target: ATXN2; (-) strand; PAM type: NRG; PAM sequence: CGG
agaaggcgcctgtggaacat

SEQ ID NO: 34315 - DNA, 20 bp, Artificial Sequence
  Description of Artificial Sequence: Synthetic oligonucleotide
  Target: ATXN2; (-) strand; PAM type: NRG; PAM sequence: TGG
cgcagtggagaaggcgcctg

SEQ ID NO: 34316 - DNA, 20 bp, Artificial Sequence
  Description of Artificial Sequence: Synthetic oligonucleotide
  Target: ATXN2; (-) strand; PAM type: NRG; PAM sequence: AGG
gttcgaggccgcagtggaga

SEQ ID NO: 34317 - DNA, 20 bp, Artificial Sequence
  Description of Artificial Sequence: Synthetic oligonucleotide
  Target: ATXN2; (-) strand; PAM type: NRG; PAM sequence: AAG
tgttcgaggccgcagtggag

SEQ ID NO: 34318 - DNA, 20 bp, Artificial Sequence
  Description of Artificial Sequence: Synthetic oligonucleotide
  Target: ATXN2; (-) strand; PAM type: NRG; PAM sequence: GAG
tgctgttcgaggccgcagtg

SEQ ID NO: 34319 - DNA, 20 bp, Artificial Sequence
  Description of Artificial Sequence: Synthetic oligonucleotide
  Target: ATXN2; (-) strand; PAM type: NRG; PAM sequence: TGG
attgctgttcgaggccgcag

SEQ ID NO: 34320 - DNA, 20 bp, Artificial Sequence
  Description of Artificial Sequence: Synthetic oligonucleotide
  Target: ATXN2; (-) strand; PAM type: NRG; PAM sequence: CAG
cgcattgctgttcgaggccg

SEQ ID NO: 34321 - DNA, 20 bp, Artificial Sequence
  Description of Artificial Sequence: Synthetic oligonucleotide
  Target: ATXN2; (-) strand; PAM type: NRG; PAM sequence: AGG
ccgatccgcattgctgttcg

SEQ ID NO: 34322 - DNA, 20 bp, Artificial Sequence
  Description of Artificial Sequence: Synthetic oligonucleotide
  Target: ATXN2; (-) strand; PAM type: NRG; PAM sequence: GAG
gccgatccgcattgctgttc

SEQ ID NO: 34323 - DNA, 20 bp, Artificial Sequence
  Description of Artificial Sequence: Synthetic oligonucleotide
  Target: ATXN2; (-) strand; PAM type: NRG; PAM sequence: TGG
cctctccggcgcgcgggtgg

SEQ ID NO: 34324 - DNA, 20 bp, Artificial Sequence
  Description of Artificial Sequence: Synthetic oligonucleotide
  Target: ATXN2; (-) strand; PAM type: NRG; PAM sequence: TGG
agacctctccggcgcgcggg

SEQ ID NO: 34325 - DNA, 20 bp, Artificial Sequence
  Description of Artificial Sequence: Synthetic oligonucleotide
  Target: ATXN2; (-) strand; PAM type: NRG; PAM sequence: GGG
gccagacctctccggcgcgc

SEQ ID NO: 34326 - DNA, 20 bp, Artificial Sequence
  Description of Artificial Sequence: Synthetic oligonucleotide
  Target: ATXN2; (-) strand; PAM type: NRG; PAM sequence: CGG
cgccagacctctccggcgcg

SEQ ID NO: 34327 - DNA, 20 bp, Artificial Sequence
  Description of Artificial Sequence: Synthetic oligonucleotide
  Target: ATXN2; (-) strand; PAM type: NRG; PAM sequence: CGG
cttcccccgccagacctctc

SEQ ID NO: 34328 - DNA, 20 bp, Artificial Sequence
  Description of Artificial Sequence: Synthetic oligonucleotide
  Target: ATXN2; (-) strand; PAM type: NRG; PAM sequence: CAG
ggccttcctccttcccccgc

SEQ ID NO: 34329 - DNA, 20 bp, Artificial Sequence
  Description of Artificial Sequence: Synthetic oligonucleotide
  Target: ATXN2; (-) strand; PAM type: NRG; PAM sequence: CGG
gggagtgcccggccccgtcc

SEQ ID NO: 34330 - DNA, 20 bp, Artificial Sequence
  Description of Artificial Sequence: Synthetic oligonucleotide
  Target: ATXN2; (-) strand; PAM type: NRG; PAM sequence: CGG
gggaaggggtggggagtgcc

SEQ ID NO: 34331 - DNA, 20 bp, Artificial Sequence
  Description of Artificial Sequence: Synthetic oligonucleotide
  Target: ATXN2; (-) strand; PAM type: NRG; PAM sequence: GAG
tggggaagggaaggggtggg

SEQ ID NO: 34332 - DNA, 20 bp, Artificial Sequence
  Description of Artificial Sequence: Synthetic oligonucleotide
  Target: ATXN2; (-) strand; PAM type: NRG; PAM sequence: GGG
cctggggaagggaaggggtg

SEQ ID NO: 34333 - DNA, 20 bp, Artificial Sequence
  Description of Artificial Sequence: Synthetic oligonucleotide
  Target: ATXN2; (-) strand; PAM type: NRG; PAM sequence: GGG
acctggggaagggaaggggt

SEQ ID NO: 34334 - DNA, 20 bp, Artificial Sequence
  Description of Artificial Sequence: Synthetic oligonucleotide
  Target: ATXN2; (-) strand; PAM type: NRG; PAM sequence: TGG
cacctggggaagggaagggg

SEQ ID NO: 34335 - DNA, 20 bp, Artificial Sequence
  Description of Artificial Sequence: Synthetic oligonucleotide
  Target: ATXN2; (-) strand; PAM type: NRG; PAM sequence: GGG
ccccacctggggaagggaag

SEQ ID NO: 34336 - DNA, 20 bp, Artificial Sequence
  Description of Artificial Sequence: Synthetic oligonucleotide
  Target: ATXN2; (-) strand; PAM type: NRG; PAM sequence: GGG
cccccacctggggaagggaa

SEQ ID NO: 34337 - DNA, 20 bp, Artificial Sequence
  Description of Artificial Sequence: Synthetic oligonucleotide
  Target: ATXN2; (-) strand; PAM type: NRG; PAM sequence: AGG
tcccccacctggggaaggga

SEQ ID NO: 34338 - DNA, 20 bp, Artificial Sequence
  Description of Artificial Sequence: Synthetic oligonucleotide
  Target: ATXN2; (-) strand; PAM type: NRG; PAM sequence: AAG
ctcccccacctggggaaggg

SEQ ID NO: 34339 - DNA, 20 bp, Artificial Sequence
  Description of Artificial Sequence: Synthetic oligonucleotide
  Target: ATXN2; (-) strand; PAM type: NRG; PAM sequence: GGG
accctcccccacctggggaa

SEQ ID NO: 34340 - DNA, 20 bp, Artificial Sequence
  Description of Artificial Sequence: Synthetic oligonucleotide
  Target: ATXN2; (-) strand; PAM type: NRG; PAM sequence: AGG
caccctcccccacctgggga

SEQ ID NO: 34341 - DNA, 20 bp, Artificial Sequence
  Description of Artificial Sequence: Synthetic oligonucleotide
  Target: ATXN2; (-) strand; PAM type: NRG; PAM sequence: AAG
ccaccctcccccacctgggg

SEQ ID NO: 34342 - DNA, 20 bp, Artificial Sequence
  Description of Artificial Sequence: Synthetic oligonucleotide
  Target: ATXN2; (-) strand; PAM type: NRG; PAM sequence: GGG
gttccaccctcccccacctg

SEQ ID NO: 34343 - DNA, 20 bp, Artificial Sequence
  Description of Artificial Sequence: Synthetic oligonucleotide
  Target: ATXN2; (-) strand; PAM type: NRG; PAM sequence: GGG
cgttccaccctcccccacct

SEQ ID NO: 34344 - DNA, 20 bp, Artificial Sequence
  Description of Artificial Sequence: Synthetic oligonucleotide
  Target: ATXN2; (-) strand; PAM type: NRG; PAM sequence: TGG
gcgttccaccctcccccacc

SEQ ID NO: 34345 - DNA, 20 bp, Artificial Sequence
  Description of Artificial Sequence: Synthetic oligonucleotide
  Target: ATXN2; (-) strand; PAM type: NRG; PAM sequence: CAG
gggctccatgtggcctccgg

SEQ ID NO: 34346 - DNA, 20 bp, Artificial Sequence
  Description of Artificial Sequence: Synthetic oligonucleotide
  Target: ATXN2; (-) strand; PAM type: NRG; PAM sequence: CGG
gtggggctccatgtggcctc

SEQ ID NO: 34347 - DNA, 20 bp, Artificial Sequence
  Description of Artificial Sequence: Synthetic oligonucleotide
  Target: ATXN2; (-) strand; PAM type: NRG; PAM sequence: TGG
tgaaatcgtggggctccatg

SEQ ID NO: 34348 - DNA, 20 bp, Artificial Sequence
  Description of Artificial Sequence: Synthetic oligonucleotide
  Target: ATXN2; (-) strand; PAM type: NRG; PAM sequence: GGG
cgaactcccctgaaatcgtg

SEQ ID NO: 34349 - DNA, 20 bp, Artificial Sequence
  Description of Artificial Sequence: Synthetic oligonucleotide
  Target: ATXN2; (-) strand; PAM type: NRG; PAM sequence: GGG
ccgaactcccctgaaatcgt

SEQ ID NO: 34350 - DNA, 20 bp, Artificial Sequence
  Description of Artificial Sequence: Synthetic oligonucleotide
  Target: ATXN2; (-) strand; PAM type: NRG; PAM sequence: TGG
cccgaactcccctgaaatcg

SEQ ID NO: 34351 - DNA, 20 bp, Artificial Sequence
  Description of Artificial Sequence: Synthetic oligonucleotide
  Target: ATXN2; (-) strand; PAM type: NRG; PAM sequence: GGG
cgtgtccgaggcggcggcgg

SEQ ID NO: 34352 - DNA, 20 bp, Artificial Sequence
  Description of Artificial Sequence: Synthetic oligonucleotide
  Target: ATXN2; (-) strand; PAM type: NRG; PAM sequence: GGG
tcgtgtccgaggcggcggcg

SEQ ID NO: 34353 - DNA, 20 bp, Artificial Sequence
  Description of Artificial Sequence: Synthetic oligonucleotide
  Target: ATXN2; (-) strand; PAM type: NRG; PAM sequence: GGG
ttcgtgtccgaggcggcggc

SEQ ID NO: 34354 - DNA, 20 bp, Artificial Sequence
  Description of Artificial Sequence: Synthetic oligonucleotide
  Target: ATXN2; (-) strand; PAM type: NRG; PAM sequence: CGG
gttcgtgtccgaggcggcgg

SEQ ID NO: 34355 - DNA, 20 bp, Artificial Sequence
  Description of Artificial Sequence: Synthetic oligonucleotide
  Target: ATXN2; (-) strand; PAM type: NRG; PAM sequence: CGG
tgcgttcgtgtccgaggcgg

SEQ ID NO: 34356 - DNA, 20 bp, Artificial Sequence
  Description of Artificial Sequence: Synthetic oligonucleotide
  Target: ATXN2; (-) strand; PAM type: NRG; PAM sequence: CGG
ctctgcgttcgtgtccgagg

SEQ ID NO: 34357 - DNA, 20 bp, Artificial Sequence
  Description of Artificial Sequence: Synthetic oligonucleotide
  Target: ATXN2; (-) strand; PAM type: NRG; PAM sequence: AGG
cccctctgcgttcgtgtccg

SEQ ID NO: 34358 - DNA, 20 bp, Artificial Sequence
  Description of Artificial Sequence: Synthetic oligonucleotide
  Target: ATXN2; (-) strand; PAM type: NRG; PAM sequence: GAG
acccctctgcgttcgtgtcc

SEQ ID NO: 34359 - DNA, 20 bp, Artificial Sequence
  Description of Artificial Sequence: Synthetic oligonucleotide
  Target: ATXN2; (-) strand; PAM type: NRG; PAM sequence: TGG
gggtggagacaagtgggcct

SEQ ID NO: 34360 - DNA, 20 bp, Artificial Sequence
  Description of Artificial Sequence: Synthetic oligonucleotide
  Target: ATXN2; (-) strand; PAM type: NRG; PAM sequence: GGG
aggacggggtggagacaagt

SEQ ID NO: 34361 - DNA, 20 bp, Artificial Sequence
  Description of Artificial Sequence: Synthetic oligonucleotide
  Target: ATXN2; (-) strand; PAM type: NRG; PAM sequence: TGG
gaggacggggtggagacaag

SEQ ID NO: 34362 - DNA, 20 bp, Artificial Sequence
  Description of Artificial Sequence: Synthetic oligonucleotide
  Target: ATXN2; (-) strand; PAM type: NRG; PAM sequence: AAG
tcggaggacggggtggagac

SEQ ID NO: 34363 - DNA, 20 bp, Artificial Sequence
  Description of Artificial Sequence: Synthetic oligonucleotide
  Target: ATXN2; (-) strand; PAM type: NRG; PAM sequence: GAG
aaagatcggaggacggggtg

SEQ ID NO: 34364 - DNA, 20 bp, Artificial Sequence
  Description of Artificial Sequence: Synthetic oligonucleotide
  Target: ATXN2; (-) strand; PAM type: NRG; PAM sequence: TGG
ggaaagatcggaggacgggg

SEQ ID NO: 34365 - DNA, 20 bp, Artificial Sequence
  Description of Artificial Sequence: Synthetic oligonucleotide
  Target: ATXN2; (-) strand; PAM type: NRG; PAM sequence: GGG
ctgggaaagatcggaggacg

SEQ ID NO: 34366 - DNA, 20 bp, Artificial Sequence
  Description of Artificial Sequence: Synthetic oligonucleotide
  Target: ATXN2; (-) strand; PAM type: NRG; PAM sequence: GGG
cctgggaaagatcggaggac

SEQ ID NO: 34367 - DNA, 20 bp, Artificial Sequence
  Description of Artificial Sequence: Synthetic oligonucleotide
  Target: ATXN2; (-) strand; PAM type: NRG; PAM sequence: CGG
tcctgggaaagatcggagga

SEQ ID NO: 34368 - DNA, 20 bp, Artificial Sequence
  Description of Artificial Sequence: Synthetic oligonucleotide
  Target: ATXN2; (-) strand; PAM type: NRG; PAM sequence: AGG
cgagtcctgggaaagatcgg

SEQ ID NO: 34369 - DNA, 20 bp, Artificial Sequence
  Description of Artificial Sequence: Synthetic oligonucleotide
  Target: ATXN2; (-) strand; PAM type: NRG; PAM sequence: GAG
ccgagtcctgggaaagatcg

SEQ ID NO: 34370 - DNA, 20 bp, Artificial Sequence
  Description of Artificial Sequence: Synthetic oligonucleotide
  Target: ATXN2; (-) strand; PAM type: NRG; PAM sequence: CGG
ctccgagtcctgggaaagat

SEQ ID NO: 34371 - DNA, 20 bp, Artificial Sequence
  Description of Artificial Sequence: Synthetic oligonucleotide
  Target: ATXN2; (-) strand; PAM type: NRG; PAM sequence: AAG
gccccctccgagtcctggga

SEQ ID NO: 34372 - DNA, 20 bp, Artificial Sequence
  Description of Artificial Sequence: Synthetic oligonucleotide
  Target: ATXN2; (-) strand; PAM type: NRG; PAM sequence: GGG
ccccgccccctccgagtcct

SEQ ID NO: 34373 - DNA, 20 bp, Artificial Sequence
  Description of Artificial Sequence: Synthetic oligonucleotide
  Target: ATXN2; (-) strand; PAM type: NRG; PAM sequence: TGG
tccccgccccctccgagtcc

SEQ ID NO: 34374 - DNA, 20 bp, Artificial Sequence
  Description of Artificial Sequence: Synthetic oligonucleotide
  Target: ATXN2; (-) strand; PAM type: NRG; PAM sequence: GAG
gctctctccccgccccctcc

SEQ ID NO: 34375 - DNA, 20 bp, Artificial Sequence
  Description of Artificial Sequence: Synthetic oligonucleotide
  Target: ATXN2; (-) strand; PAM type: NRG; PAM sequence: GGG
ggaatcatcagggtctgtcg

SEQ ID NO: 34376 - DNA, 20 bp, Artificial Sequence
  Description of Artificial Sequence: Synthetic oligonucleotide
  Target: ATXN2; (-) strand; PAM type: NRG; PAM sequence: GGG
cggaatcatcagggtctgtc

SEQ ID NO: 34377 - DNA, 20 bp, Artificial Sequence
  Description of Artificial Sequence: Synthetic oligonucleotide
  Target: ATXN2; (-) strand; PAM type: NRG; PAM sequence: CGG
ccggaatcatcagggtctgt

SEQ ID NO: 34378 - DNA, 20 bp, Artificial Sequence
  Description of Artificial Sequence: Synthetic oligonucleotide
  Target: ATXN2; (-) strand; PAM type: NRG; PAM sequence: GGG
gggctcctccggaatcatca

SEQ ID NO: 34379 - DNA, 20 bp, Artificial Sequence
  Description of Artificial Sequence: Synthetic oligonucleotide
  Target: ATXN2; (-) strand; PAM type: NRG; PAM sequence: AGG
cgggctcctccggaatcatc

SEQ ID NO: 34380 - DNA, 20 bp, Artificial Sequence
  Description of Artificial Sequence: Synthetic oligonucleotide
  Target: ATXN2; (-) strand; PAM type: NRG; PAM sequence: CAG
ccgggctcctccggaatcat

SEQ ID NO: 34381 - DNA, 20 bp, Artificial Sequence
  Description of Artificial Sequence: Synthetic oligonucleotide
  Target: ATXN2; (-) strand; PAM type: NRG; PAM sequence: CGG
gggtaggcaccgggctcctc

SEQ ID NO: 34382 - DNA, 20 bp, Artificial Sequence
  Description of Artificial Sequence: Synthetic oligonucleotide
  Target: ATXN2; (-) strand; PAM type: NRG; PAM sequence: GGG
cggttaaaggggtaggcacc

SEQ ID NO: 34383 - DNA, 20 bp, Artificial Sequence
  Description of Artificial Sequence: Synthetic oligonucleotide
  Target: ATXN2; (-) strand; PAM type: NRG; PAM sequence: CGG
ccggttaaaggggtaggcac

SEQ ID NO: 34384 - DNA, 20 bp, Artificial Sequence
  Description of Artificial Sequence: Synthetic oligonucleotide
  Target: ATXN2; (-) strand; PAM type: NRG; PAM sequence: AGG
cccgtgccggttaaaggggt

SEQ ID NO: 34385 - DNA, 20 bp, Artificial Sequence
  Description of Artificial Sequence: Synthetic oligonucleotide
  Target: ATXN2; (-) strand; PAM type: NRG; PAM sequence: TAG
ccccgtgccggttaaagggg

SEQ ID NO: 34386 - DNA, 20 bp, Artificial Sequence
  Description of Artificial Sequence: Synthetic oligonucleotide
  Target: ATXN2; (-) strand; PAM type: NRG; PAM sequence: GGG
gtcccccgtgccggttaaag

SEQ ID NO: 34387 - DNA, 20 bp, Artificial Sequence
  Description of Artificial Sequence: Synthetic oligonucleotide
  Target: ATXN2; (-) strand; PAM type: NRG; PAM sequence: GGG
cgtcccccgtgccggttaaa

SEQ ID NO: 34388 - DNA, 20 bp, Artificial Sequence
  Description of Artificial Sequence: Synthetic oligonucleotide
  Target: ATXN2; (-) strand; PAM type: NRG; PAM sequence: AGG
gcgtcccccgtgccggttaa

SEQ ID NO: 34389 - DNA, 20 bp, Artificial Sequence
  Description of Artificial Sequence: Synthetic oligonucleotide
  Target: ATXN2; (-) strand; PAM type: NRG; PAM sequence: AAG
cgcgtcccccgtgccggtta

SEQ ID NO: 34390 - DNA, 20 bp, Artificial Sequence
  Description of Artificial Sequence: Synthetic oligonucleotide
  Target: ATXN2; (-) strand; PAM type: NRG; PAM sequence: CGG
tagggccgcgtcccccgtgc

SEQ ID NO: 34391 - DNA, 20 bp, Artificial Sequence
  Description of Artificial Sequence: Synthetic oligonucleotide
  Target: ATXN2; (-) strand; PAM type: NRG; PAM sequence: GGG
tctctggaggggagaagtta

SEQ ID NO: 34392 - DNA, 20 bp, Artificial Sequence
  Description of Artificial Sequence: Synthetic oligonucleotide
  Target: ATXN2; (-) strand; PAM type: NRG; PAM sequence: AGG
atctctggaggggagaagtt

SEQ ID NO: 34393 - DNA, 20 bp, Artificial Sequence
  Description of Artificial Sequence: Synthetic oligonucleotide
  Target: ATXN2; (-) strand; PAM type: NRG; PAM sequence: TAG
catctctggaggggagaagt

SEQ ID NO: 34394 - DNA, 20 bp, Artificial Sequence
  Description of Artificial Sequence: Synthetic oligonucleotide
  Target: ATXN2; (-) strand; PAM type: NRG; PAM sequence: AAG
gggacatctctggaggggag

SEQ ID NO: 34395 - DNA, 20 bp, Artificial Sequence
  Description of Artificial Sequence: Synthetic oligonucleotide
  Target: ATXN2; (-) strand; PAM type: NRG; PAM sequence: GAG
tgggggacatctctggaggg

SEQ ID NO: 34396 - DNA, 20 bp, Artificial Sequence
  Description of Artificial Sequence: Synthetic oligonucleotide
  Target: ATXN2; (-) strand; PAM type: NRG; PAM sequence: GGG
catgggggacatctctggag

SEQ ID NO: 34397 - DNA, 20 bp, Artificial Sequence
  Description of Artificial Sequence: Synthetic oligonucleotide
  Target: ATXN2; (-) strand; PAM type: NRG; PAM sequence: GGG
ccatgggggacatctctgga

SEQ ID NO: 34398 - DNA, 20 bp, Artificial Sequence
  Description of Artificial Sequence: Synthetic oligonucleotide
  Target: ATXN2; (-) strand; PAM type: NRG; PAM sequence: AGG
tccatgggggacatctctgg

SEQ ID NO: 34399 - DNA, 20 bp, Artificial Sequence
  Description of Artificial Sequence: Synthetic oligonucleotide
  Target: ATXN2; (-) strand; PAM type: NRG; PAM sequence: GAG
ctccatgggggacatctctg

SEQ ID NO: 34400 - DNA, 20 bp, Artificial Sequence
  Description of Artificial Sequence: Synthetic oligonucleotide
  Target: ATXN2; (-) strand; PAM type: NRG; PAM sequence: TGG
ccctccatgggggacatctc

SEQ ID NO: 34401 - DNA, 20 bp, Artificial Sequence
  Description of Artificial Sequence: Synthetic oligonucleotide
  Target: ATXN2; (-) strand; PAM type: NRG; PAM sequence: GGG
gaacatgtccccctccatgg

SEQ ID NO: 34402 - DNA, 20 bp, Artificial Sequence
  Description of Artificial Sequence: Synthetic oligonucleotide
  Target: ATXN2; (-) strand; PAM type: NRG; PAM sequence: GGG
ggaacatgtccccctccatg

SEQ ID NO: 34403 - DNA, 20 bp, Artificial Sequence
  Description of Artificial Sequence: Synthetic oligonucleotide
  Target: ATXN2; (-) strand; PAM type: NRG; PAM sequence: GGG
cggaacatgtccccctccat

SEQ ID NO: 34404 - DNA, 20 bp, Artificial Sequence
  Description of Artificial Sequence: Synthetic oligonucleotide
  Target: ATXN2; (-) strand; PAM type: NRG; PAM sequence: TGG
ccggaacatgtccccctcca

SEQ ID NO: 34405 - DNA, 20 bp, Artificial Sequence
  Description of Artificial Sequence: Synthetic oligonucleotide
  Target: ATXN2; (-) strand; PAM type: NRG; PAM sequence: CGG
gaggctgtggtggcgttttc

SEQ ID NO: 34406 - DNA, 20 bp, Artificial Sequence
  Description of Artificial Sequence: Synthetic oligonucleotide
  Target: ATXN2; (-) strand; PAM type: NRG; PAM sequence: TGG
gaggggtctggaggctgtgg

SEQ ID NO: 34407 - DNA, 20 bp, Artificial Sequence
  Description of Artificial Sequence: Synthetic oligonucleotide
  Target: ATXN2; (-) strand; PAM type: NRG; PAM sequence: TGG
ttggaggggtctggaggctg

SEQ ID NO: 34408 - DNA, 20 bp, Artificial Sequence
  Description of Artificial Sequence: Synthetic oligonucleotide
  Target: ATXN2; (-) strand; PAM type: NRG; PAM sequence: AGG
tgaacgttggaggggtctgg

SEQ ID NO: 34409 - DNA, 20 bp, Artificial Sequence
  Description of Artificial Sequence: Synthetic oligonucleotide
  Target: ATXN2; (-) strand; PAM type: NRG; PAM sequence: GAG
gtgaacgttggaggggtctg

SEQ ID NO: 34410 - DNA, 20 bp, Artificial Sequence
  Description of Artificial Sequence: Synthetic oligonucleotide
  Target: ATXN2; (-) strand; PAM type: NRG; PAM sequence: TGG
gtgtgaacgttggaggggtc

SEQ ID NO: 34411 - DNA, 20 bp, Artificial Sequence
  Description of Artificial Sequence: Synthetic oligonucleotide
  Target: ATXN2; (-) strand; PAM type: NRG; PAM sequence: GGG
tttaggtgtgaacgttggag

SEQ ID NO: 34412 - DNA, 20 bp, Artificial Sequence
  Description of Artificial Sequence: Synthetic oligonucleotide
  Target: ATXN2; (-) strand; PAM type: NRG; PAM sequence: GGG
gtttaggtgtgaacgttgga

SEQ ID NO: 34413 - DNA, 20 bp, Artificial Sequence
  Description of Artificial Sequence: Synthetic oligonucleotide
  Target: ATXN2; (-) strand; PAM type: NRG; PAM sequence: AGG
ggtttaggtgtgaacgttgg

SEQ ID NO: 34414 - DNA, 20 bp, Artificial Sequence
  Description of Artificial Sequence: Synthetic oligonucleotide
  Target: ATXN2; (-) strand; PAM type: NRG; PAM sequence: GAG
cggtttaggtgtgaacgttg

SEQ ID NO: 34415 - DNA, 20 bp, Artificial Sequence
  Description of Artificial Sequence: Synthetic oligonucleotide
  Target: ATXN2; (-) strand; PAM type: NRG; PAM sequence: TGG
cccggtttaggtgtgaacgt

SEQ ID NO: 34416 - DNA, 20 bp, Artificial Sequence
  Description of Artificial Sequence: Synthetic oligonucleotide
  Target: ATXN2; (-) strand; PAM type: NRG; PAM sequence: AGG
agctcctccactcccggttt

SEQ ID NO: 34417 - DNA, 20 bp, Artificial Sequence
  Description of Artificial Sequence: Synthetic oligonucleotide
  Target: ATXN2; (-) strand; PAM type: NRG; PAM sequence: TAG
cagctcctccactcccggtt

SEQ ID NO: 34418 - DNA, 20 bp, Artificial Sequence
  Description of Artificial Sequence: Synthetic oligonucleotide
  Target: ATXN2; (-) strand; PAM type: NRG; PAM sequence: CGG
tcgggcagctcctccactcc

SEQ ID NO: 34419 - DNA, 20 bp, Artificial Sequence
  Description of Artificial Sequence: Synthetic oligonucleotide
  Target: ATXN2; (-) strand; PAM type: NRG; PAM sequence: CAG
gcagcgtggggatgctcggg

SEQ ID NO: 34420 - DNA, 20 bp, Artificial Sequence
  Description of Artificial Sequence: Synthetic oligonucleotide
  Target: ATXN2; (-) strand; PAM type: NRG; PAM sequence: GGG
cccgcagcgtggggatgctc

SEQ ID NO: 34421 - DNA, 20 bp, Artificial Sequence
  Description of Artificial Sequence: Synthetic oligonucleotide
  Target: ATXN2; (-) strand; PAM type: NRG; PAM sequence: CGG
gcccgcagcgtggggatgct

SEQ ID NO: 34422 - DNA, 20 bp, Artificial Sequence
  Description of Artificial Sequence: Synthetic oligonucleotide
  Target: ATXN2; (-) strand; PAM type: NRG; PAM sequence: GGG
gatcctccgcccgcagcgtg

SEQ ID NO: 34423 - DNA, 20 bp, Artificial Sequence
  Description of Artificial Sequence: Synthetic oligonucleotide
  Target: ATXN2; (-) strand; PAM type: NRG; PAM sequence: GGG
cgatcctccgcccgcagcgt

SEQ ID NO: 34424 - DNA, 20 bp, Artificial Sequence
  Description of Artificial Sequence: Synthetic oligonucleotide
  Target: ATXN2; (-) strand; PAM type: NRG; PAM sequence: TGG
acgatcctccgcccgcagcg

SEQ ID NO: 34425 - DNA, 20 bp, Artificial Sequence
  Description of Artificial Sequence: Synthetic oligonucleotide
  Target: ATXN2; (-) strand; PAM type: NRG; PAM sequence: CAG
tccgcacgatcctccgcccg

SEQ ID NO: 34426 - DNA, 20 bp, Artificial Sequence
  Description of Artificial Sequence: Synthetic oligonucleotide
  Target: ATXN2; (-) strand; PAM type: NRG; PAM sequence: CGG
gtagcggcgatggtcagccc

SEQ ID NO: 34427 - DNA, 20 bp, Artificial Sequence
  Description of Artificial Sequence: Synthetic oligonucleotide
  Target: ATXN2; (-) strand; PAM type: NRG; PAM sequence: CAG
tctcgggtagcggcgatggt

SEQ ID NO: 34428 - DNA, 20 bp, Artificial Sequence
  Description of Artificial Sequence: Synthetic oligonucleotide
  Target: ATXN2; (-) strand; PAM type: NRG; PAM sequence: TGG
gggttctcgggtagcggcga

SEQ ID NO: 34429 - DNA, 20 bp, Artificial Sequence
  Description of Artificial Sequence: Synthetic oligonucleotide
  Target: ATXN2; (-) strand; PAM type: NRG; PAM sequence: CGG
tgggaggggttctcgggtag

SEQ ID NO: 34430 - DNA, 20 bp, Artificial Sequence
  Description of Artificial Sequence: Synthetic oligonucleotide
  Target: ATXN2; (-) strand; PAM type: NRG; PAM sequence: TAG
tgttgggaggggttctcggg

SEQ ID NO: 34431 - DNA, 20 bp, Artificial Sequence
  Description of Artificial Sequence: Synthetic oligonucleotide
  Target: ATXN2; (-) strand; PAM type: NRG; PAM sequence: GGG
gcgtgttgggaggggttctc

SEQ ID NO: 34432 - DNA, 20 bp, Artificial Sequence
  Description of Artificial Sequence: Synthetic oligonucleotide
  Target: ATXN2; (-) strand; PAM type: NRG; PAM sequence: CGG
cgcgtgttgggaggggttct

SEQ ID NO: 34433 - DNA, 20 bp, Artificial Sequence
  Description of Artificial Sequence: Synthetic oligonucleotide
  Target: ATXN2; (-) strand; PAM type: NRG; PAM sequence: GGG
ctccccacgcgtgttgggag

SEQ ID NO: 34434 - DNA, 20 bp, Artificial Sequence
  Description of Artificial Sequence: Synthetic oligonucleotide
  Target: ATXN2; (-) strand; PAM type: NRG; PAM sequence: GGG
cctccccacgcgtgttggga

SEQ ID NO: 34435 - DNA, 20 bp, Artificial Sequence
  Description of Artificial Sequence: Synthetic oligonucleotide
  Target: ATXN2; (-) strand; PAM type: NRG; PAM sequence: AGG
ccctccccacgcgtgttggg

SEQ ID NO: 34436 - DNA, 20 bp, Artificial Sequence
  Description of Artificial Sequence: Synthetic oligonucleotide
  Target: ATXN2; (-) strand; PAM type: NRG; PAM sequence: GAG
cccctccccacgcgtgttgg

SEQ ID NO: 34437 - DNA, 20 bp, Artificial Sequence
  Description of Artificial Sequence: Synthetic oligonucleotide
  Target: ATXN2; (-) strand; PAM type: NRG; PAM sequence: GGG
ctcccctccccacgcgtgtt

SEQ ID NO: 34438 - DNA, 20 bp, Artificial Sequence
  Description of Artificial Sequence: Synthetic oligonucleotide
  Target: ATXN2; (-) strand; PAM type: NRG; PAM sequence: TGG
cctcccctccccacgcgtgt

SEQ ID NO: 34439 - DNA, 20 bp, Artificial Sequence
  Description of Artificial Sequence: Synthetic oligonucleotide
  Target: ATXN2; (-) strand; PAM type: NRG; PAM sequence: CGG
gtcaagatggagggagcggg

SEQ ID NO: 34440 - DNA, 20 bp, Artificial Sequence
  Description of Artificial Sequence: Synthetic oligonucleotide
  Target: ATXN2; (-) strand; PAM type: NRG; PAM sequence: GGG
gcggtcaagatggagggagc

SEQ ID NO: 34441 - DNA, 20 bp, Artificial Sequence
  Description of Artificial Sequence: Synthetic oligonucleotide
  Target: ATXN2; (-) strand; PAM type: NRG; PAM sequence: CGG
ggcggtcaagatggagggag

SEQ ID NO: 34442 - DNA, 20 bp, Artificial Sequence
  Description of Artificial Sequence: Synthetic oligonucleotide
  Target: ATXN2; (-) strand; PAM type: NRG; PAM sequence: GAG
cccggcggtcaagatggagg

SEQ ID NO: 34443 - DNA, 20 bp, Artificial Sequence
  Description of Artificial Sequence: Synthetic oligonucleotide
  Target: ATXN2; (-) strand; PAM type: NRG; PAM sequence: GGG
cccccggcggtcaagatgga

SEQ ID NO: 34444 - DNA, 20 bp, Artificial Sequence
  Description of Artificial Sequence: Synthetic oligonucleotide
  Target: ATXN2; (-) strand; PAM type: NRG; PAM sequence: AGG
tcccccggcggtcaagatgg

SEQ ID NO: 34445 - DNA, 20 bp, Artificial Sequence
  Description of Artificial Sequence: Synthetic oligonucleotide
  Target: ATXN2; (-) strand; PAM type: NRG; PAM sequence: GAG
ctcccccggcggtcaagatg

SEQ ID NO: 34446 - DNA, 20 bp, Artificial Sequence
  Description of Artificial Sequence: Synthetic oligonucleotide
  Target: ATXN2; (-) strand; PAM type: NRG; PAM sequence: TGG
ccctcccccggcggtcaaga

SEQ ID NO: 34447 - DNA, 20 bp, Artificial Sequence
  Description of Artificial Sequence: Synthetic oligonucleotide
  Target: ATXN2; (-) strand; PAM type: NRG; PAM sequence: AAG
cgccccctcccccggcggtc

SEQ ID NO: 34448 - DNA, 20 bp, Artificial Sequence
  Description of Artificial Sequence: Synthetic oligonucleotide
  Target: ATXN2; (-) strand; PAM type: NRG; PAM sequence: CGG
atccccgccccctcccccgg

SEQ ID NO: 34449 - DNA, 20 bp, Artificial Sequence
  Description of Artificial Sequence: Synthetic oligonucleotide
  Target: ATXN2; (-) strand; PAM type: NRG; PAM sequence: CGG
agcatccccgccccctcccc

SEQ ID NO: 34450 - DNA, 20 bp, Artificial Sequence
  Description of Artificial Sequence: Synthetic oligonucleotide
  Target: ATXN2; (-) strand; PAM type: NRG; PAM sequence: CAG
caggcctgtccagcctcccg

SEQ ID NO: 34451 - DNA, 20 bp, Artificial Sequence
  Description of Artificial Sequence: Synthetic oligonucleotide
  Target: ATXN2; (-) strand; PAM type: NRG; PAM sequence: CAG
ctgggattgtcaggcctgtc

SEQ ID NO: 34452 - DNA, 20 bp, Artificial Sequence
  Description of Artificial Sequence: Synthetic oligonucleotide
  Target: ATXN2; (-) strand; PAM type: NRG; PAM sequence: AGG
cggggtcctctgggattgtc

SEQ ID NO: 34453 - DNA, 20 bp, Artificial Sequence
  Description of Artificial Sequence: Synthetic oligonucleotide
  Target: ATXN2; (-) strand; PAM type: NRG; PAM sequence: CAG
ccggggtcctctgggattgt

SEQ ID NO: 34454 - DNA, 20 bp, Artificial Sequence
  Description of Artificial Sequence: Synthetic oligonucleotide
  Target: ATXN2; (-) strand; PAM type: NRG; PAM sequence: GGG
gggcgcagccggggtcctct

SEQ ID NO: 34455 - DNA, 20 bp, Artificial Sequence
  Description of Artificial Sequence: Synthetic oligonucleotide
  Target: ATXN2; (-) strand; PAM type: NRG; PAM sequence: TGG
tgggcgcagccggggtcctc

SEQ ID NO: 34456 - DNA, 20 bp, Artificial Sequence
  Description of Artificial Sequence: Synthetic oligonucleotide
  Target: ATXN2; (-) strand; PAM type: NRG; PAM sequence: GGG
tcggccggtgggcgcagccg

SEQ ID NO: 34457 - DNA, 20 bp, Artificial Sequence
  Description of Artificial Sequence: Synthetic oligonucleotide
  Target: ATXN2; (-) strand; PAM type: NRG; PAM sequence: GGG
ctcggccggtgggcgcagcc

SEQ ID NO: 34458 - DNA, 20 bp, Artificial Sequence
  Description of Artificial Sequence: Synthetic oligonucleotide
  Target: ATXN2; (-) strand; PAM type: NRG; PAM sequence: CGG
gctcggccggtgggcgcagc

SEQ ID NO: 34459 - DNA, 20 bp, Artificial Sequence
  Description of Artificial Sequence: Synthetic oligonucleotide
  Target: ATXN2; (-) strand; PAM type: NRG; PAM sequence: CAG
cgaggctcggccggtgggcg

SEQ ID NO: 34460 - DNA, 20 bp, Artificial Sequence
  Description of Artificial Sequence: Synthetic oligonucleotide
  Target: ATXN2; (-) strand; PAM type: NRG; PAM sequence: GGG
agccccgaggctcggccggt

SEQ ID NO: 34461 - DNA, 20 bp, Artificial Sequence
  Description of Artificial Sequence: Synthetic oligonucleotide
  Target: ATXN2; (-) strand; PAM type: NRG; PAM sequence: TGG
gagccccgaggctcggccgg

SEQ ID NO: 34462 - DNA, 20 bp, Artificial Sequence
  Description of Artificial Sequence: Synthetic oligonucleotide
  Target: ATXN2; (-) strand; PAM type: NRG; PAM sequence: CGG
cctgagccccgaggctcggc

SEQ ID NO: 34463 - DNA, 20 bp, Artificial Sequence
  Description of Artificial Sequence: Synthetic oligonucleotide
  Target: ATXN2; (-) strand; PAM type: NRG; PAM sequence: CGG
cgggcctgagccccgaggct

SEQ ID NO: 34464 - DNA, 20 bp, Artificial Sequence
  Description of Artificial Sequence: Synthetic oligonucleotide
  Target: ATXN2; (-) strand; PAM type: NRG; PAM sequence: AGG
tcgctcgggcctgagccccg

SEQ ID NO: 34465 - DNA, 20 bp, Artificial Sequence
  Description of Artificial Sequence: Synthetic oligonucleotide
  Target: ATXN2; (-) strand; PAM type: NRG; PAM sequence: GAG
ctcgctcgggcctgagcccc

SEQ ID NO: 34466 - DNA, 20 bp, Artificial Sequence
  Description of Artificial Sequence: Synthetic oligonucleotide
  Target: ATXN2; (-) strand; PAM type: NRG; PAM sequence: GAG
ggggagactcgctcgggcct

SEQ ID NO: 34467 - DNA, 20 bp, Artificial Sequence
  Description of Artificial Sequence: Synthetic oligonucleotide
  Target: ATXN2; (-) strand; PAM type: NRG; PAM sequence: GGG
agcgcgggggagactcgctc

SEQ ID NO: 34468 - DNA, 20 bp, Artificial Sequence
  Description of Artificial Sequence: Synthetic oligonucleotide
  Target: ATXN2; (-) strand; PAM type: NRG; PAM sequence: CGG
cagcgcgggggagactcgct

SEQ ID NO: 34469 - DNA, 20 bp, Artificial Sequence
  Description of Artificial Sequence: Synthetic oligonucleotide
  Target: ATXN2; (-) strand; PAM type: NRG; PAM sequence: GAG
tgggggccggcagcgcgggg

SEQ ID NO: 34470 - DNA, 20 bp, Artificial Sequence
  Description of Artificial Sequence: Synthetic oligonucleotide
  Target: ATXN2; (-) strand; PAM type: NRG; PAM sequence: GGG
gctgggggccggcagcgcgg

SEQ ID NO: 34471 - DNA, 20 bp, Artificial Sequence
  Description of Artificial Sequence: Synthetic oligonucleotide
  Target: ATXN2; (-) strand; PAM type: NRG; PAM sequence: GGG
ggctgggggccggcagcgcg

SEQ ID NO: 34472 - DNA, 20 bp, Artificial Sequence
  Description of Artificial Sequence: Synthetic oligonucleotide
  Target: ATXN2; (-) strand; PAM type: NRG; PAM sequence: GGG
gggctgggggccggcagcgc

SEQ ID NO: 34473 - DNA, 20 bp, Artificial Sequence
  Description of Artificial Sequence: Synthetic oligonucleotide
  Target: ATXN2; (-) strand; PAM type: NRG; PAM sequence: CGG
tgggctgggggccggcagcg

SEQ ID NO: 34474 - DNA, 20 bp, Artificial Sequence
  Description of Artificial Sequence: Synthetic oligonucleotide
  Target: ATXN2; (-) strand; PAM type: NRG; PAM sequence: CAG
cggggtgggctgggggccgg

SEQ ID NO: 34475 - DNA, 20 bp, Artificial Sequence
  Description of Artificial Sequence: Synthetic oligonucleotide
  Target: ATXN2; (-) strand; PAM type: NRG; PAM sequence: CGG
acccggggtgggctgggggc

SEQ ID NO: 34476 - DNA, 20 bp, Artificial Sequence
  Description of Artificial Sequence: Synthetic oligonucleotide
  Target: ATXN2; (-) strand; PAM type: NRG; PAM sequence: GGG
ggctacccggggtgggctgg

SEQ ID NO: 34477 - DNA, 20 bp, Artificial Sequence
  Description of Artificial Sequence: Synthetic oligonucleotide
  Target: ATXN2; (-) strand; PAM type: NRG; PAM sequence: GGG
gggctacccggggtgggctg

SEQ ID NO: 34478 - DNA, 20 bp, Artificial Sequence
  Description of Artificial Sequence: Synthetic oligonucleotide
  Target: ATXN2; (-) strand; PAM type: NRG; PAM sequence: GGG
cgggctacccggggtgggct

SEQ ID NO: 34479 - DNA, 20 bp, Artificial Sequence
  Description of Artificial Sequence: Synthetic oligonucleotide
  Target: ATXN2; (-) strand; PAM type: NRG; PAM sequence: TGG
ccgggctacccggggtgggc

SEQ ID NO: 34480 - DNA, 20 bp, Artificial Sequence
  Description of Artificial Sequence: Synthetic oligonucleotide
  Target: ATXN2; (-) strand; PAM type: NRG; PAM sequence: GGG
cccgccgggctacccggggt

SEQ ID NO: 34481 - DNA, 20 bp, Artificial Sequence
  Description of Artificial Sequence: Synthetic oligonucleotide
  Target: ATXN2; (-) strand; PAM type: NRG; PAM sequence: TGG
acccgccgggctacccgggg

SEQ ID NO: 34482 - DNA, 20 bp, Artificial Sequence
  Description of Artificial Sequence: Synthetic oligonucleotide
  Target: ATXN2; (-) strand; PAM type: NRG; PAM sequence: GGG
gtgacccgccgggctacccg

SEQ ID NO: 34483 - DNA, 20 bp, Artificial Sequence
  Description of Artificial Sequence: Synthetic oligonucleotide
  Target: ATXN2; (-) strand; PAM type: NRG; PAM sequence: GGG
cgtgacccgccgggctaccc

SEQ ID NO: 34484 - DNA, 20 bp, Artificial Sequence
  Description of Artificial Sequence: Synthetic oligonucleotide
  Target: ATXN2; (-) strand; PAM type: NRG; PAM sequence: CGG
ccgtgacccgccgggctacc

SEQ ID NO: 34485 - DNA, 20 bp, Artificial Sequence
  Description of Artificial Sequence: Synthetic oligonucleotide
  Target: ATXN2; (-) strand; PAM type: NRG; PAM sequence: GGG
tccccgccccgtgacccgcc

SEQ ID NO: 34486 - DNA, 20 bp, Artificial Sequence
  Description of Artificial Sequence: Synthetic oligonucleotide
  Target: ATXN2; (-) strand; PAM type: NRG; PAM sequence: CGG
gtccccgccccgtgacccgc

SEQ ID NO: 34487 - DNA, 20 bp, Artificial Sequence
  Description of Artificial Sequence: Synthetic oligonucleotide
  Target: ATXN2; (-) strand; PAM type: NRG; PAM sequence: CGG
gcccggcgtcccctcccccg

SEQ ID NO: 34488 - DNA, 20 bp, Artificial Sequence
  Description of Artificial Sequence: Synthetic oligonucleotide
  Target: ATXN2; (-) strand; PAM type: NRG; PAM sequence: CGG
agccccctccgctccgggcc

SEQ ID NO: 34489 - DNA, 20 bp, Artificial Sequence
  Description of Artificial Sequence: Synthetic oligonucleotide
  Target: ATXN2; (-) strand; PAM type: NRG; PAM sequence: GGG
accccagccccctccgctcc

SEQ ID NO: 34490 - DNA, 20 bp, Artificial Sequence
  Description of Artificial Sequence: Synthetic oligonucleotide
  Target: ATXN2; (-) strand; PAM type: NRG; PAM sequence: CGG
caccccagccccctccgctc

SEQ ID NO: 34491 - DNA, 20 bp, Artificial Sequence
  Description of Artificial Sequence: Synthetic oligonucleotide
  Target: ATXN2; (-) strand; PAM type: NRG; PAM sequence: CAG
gcaggtgggtgtcggcaccc

SEQ ID NO: 34492 - DNA, 20 bp, Artificial Sequence
  Description of Artificial Sequence: Synthetic oligonucleotide
  Target: ATXN2; (-) strand; PAM type: NRG; PAM sequence: CGG
cggcctgggcaggtgggtgt

SEQ ID NO: 34493 - DNA, 20 bp, Artificial Sequence
  Description of Artificial Sequence: Synthetic oligonucleotide
  Target: ATXN2; (-) strand; PAM type: NRG; PAM sequence: GGG
gaggcccggcctgggcaggt

SEQ ID NO: 34494 - DNA, 20 bp, Artificial Sequence
  Description of Artificial Sequence: Synthetic oligonucleotide
  Target: ATXN2; (-) strand; PAM type: NRG; PAM sequence: TGG
ggaggcccggcctgggcagg

SEQ ID NO: 34495 - DNA, 20 bp, Artificial Sequence
  Description of Artificial Sequence: Synthetic oligonucleotide
  Target: ATXN2; (-) strand; PAM type: NRG; PAM sequence: AGG
gcgggaggcccggcctgggc

SEQ ID NO: 34496 - DNA, 20 bp, Artificial Sequence
  Description of Artificial Sequence: Synthetic oligonucleotide
  Target: ATXN2; (-) strand; PAM type: NRG; PAM sequence: CAG
ggcgggaggcccggcctggg

SEQ ID NO: 34497 - DNA, 20 bp, Artificial Sequence
  Description of Artificial Sequence: Synthetic oligonucleotide
  Target: ATXN2; (-) strand; PAM type: NRG; PAM sequence: GGG
ggcggcgggaggcccggcct

SEQ ID NO: 34498 - DNA, 20 bp, Artificial Sequence
  Description of Artificial Sequence: Synthetic oligonucleotide
  Target: ATXN2; (-) strand; PAM type: NRG; PAM sequence: TGG
cggcggcgggaggcccggcc

SEQ ID NO: 34499 - DNA, 20 bp, Artificial Sequence
  Description of Artificial Sequence: Synthetic oligonucleotide
  Target: ATXN2; (-) strand; PAM type: NRG; PAM sequence: CGG
acctccggcggcgggaggcc

SEQ ID NO: 34500 - DNA, 20 bp, Artificial Sequence
  Description of Artificial Sequence: Synthetic oligonucleotide
  Target: ATXN2; (-) strand; PAM type: NRG; PAM sequence: AGG
cggcgacctccggcggcggg

SEQ ID NO: 34501 - DNA, 20 bp, Artificial Sequence
  Description of Artificial Sequence: Synthetic oligonucleotide
  Target: ATXN2; (-) strand; PAM type: NRG; PAM sequence: GAG
gcggcgacctccggcggcgg

SEQ ID NO: 34502 - DNA, 20 bp, Artificial Sequence
  Description of Artificial Sequence: Synthetic oligonucleotide
  Target: ATXN2; (-) strand; PAM type: NRG; PAM sequence: GGG
tcgcggcgacctccggcggc

SEQ ID NO: 34503 - DNA, 20 bp, Artificial Sequence
  Description of Artificial Sequence: Synthetic oligonucleotide
  Target: ATXN2; (-) strand; PAM type: NRG; PAM sequence: CGG
gtcgcggcgacctccggcgg

SEQ ID NO: 34504 - DNA, 20 bp, Artificial Sequence
  Description of Artificial Sequence: Synthetic oligonucleotide
  Target: ATXN2; (-) strand; PAM type: NRG; PAM sequence: CGG
gtggtcgcggcgacctccgg

SEQ ID NO: 34505 - DNA, 20 bp, Artificial Sequence
  Description of Artificial Sequence: Synthetic oligonucleotide
  Target: ATXN2; (-) strand; PAM type: NRG; PAM sequence: CGG
tcggtggtcgcggcgacctc

SEQ ID NO: 34506 - DNA, 20 bp, Artificial Sequence
  Description of Artificial Sequence: Synthetic oligonucleotide
  Target: ATXN2; (-) strand; PAM type: NRG; PAM sequence: CGG
ggctccctcctcggtggtcg

SEQ ID NO: 34507 - DNA, 20 bp, Artificial Sequence
  Description of Artificial Sequence: Synthetic oligonucleotide
  Target: ATXN2; (-) strand; PAM type: NRG; PAM sequence: TGG
ggccacggctccctcctcgg

SEQ ID NO: 34508 - DNA, 20 bp, Artificial Sequence
  Description of Artificial Sequence: Synthetic oligonucleotide
  Target: ATXN2; (-) strand; PAM type: NRG; PAM sequence: CGG
ctcggccacggctccctcct

SEQ ID NO: 34509 - DNA, 20 bp, Artificial Sequence
  Description of Artificial Sequence: Synthetic oligonucleotide
  Target: ATXN2; (-) strand; PAM type: NRG; PAM sequence: CGG
ggtctcctcgtcctcggcca

SEQ ID NO: 34510 - DNA, 20 bp, Artificial Sequence
  Description of Artificial Sequence: Synthetic oligonucleotide
  Target: ATXN2; (-) strand; PAM type: NRG; PAM sequence: CGG
gtcctcggtctcctcgtcct

SEQ ID NO: 34511 - DNA, 20 bp, Artificial Sequence
  Description of Artificial Sequence: Synthetic oligonucleotide
  Target: ATXN2; (-) strand; PAM type: NRG; PAM sequence: CGG
gccttcgccgtcctcgtcct

SEQ ID NO: 34512 - DNA, 20 bp, Artificial Sequence
  Description of Artificial Sequence: Synthetic oligonucleotide
  Target: ATXN2; (-) strand; PAM type: NRG; PAM sequence: TAG
gcccggcggcagcggccttc

SEQ ID NO: 34513 - DNA, 20 bp, Artificial Sequence
  Description of Artificial Sequence: Synthetic oligonucleotide
  Target: ATXN2; (-) strand; PAM type: NRG; PAM sequence: CGG
gtccgcaagcccggcggcag

SEQ ID NO: 34514 - DNA, 20 bp, Artificial Sequence
  Description of Artificial Sequence: Synthetic oligonucleotide
  Target: ATXN2; (-) strand; PAM type: NRG; PAM sequence: CAG
aatgtccgcaagcccggcgg

SEQ ID NO: 34515 - DNA, 20 bp, Artificial Sequence
  Description of Artificial Sequence: Synthetic oligonucleotide
  Target: ATXN2; (-) strand; PAM type: NRG; PAM sequence: CGG
gccaatgtccgcaagcccgg

SEQ ID NO: 34516 - DNA, 20 bp, Artificial Sequence
  Description of Artificial Sequence: Synthetic oligonucleotide
  Target: ATXN2; (-) strand; PAM type: NRG; PAM sequence: CGG
gctgccaatgtccgcaagcc

SEQ ID NO: 34517 - DNA, 20 bp, Artificial Sequence
  Description of Artificial Sequence: Synthetic oligonucleotide
  Target: ATXN2; (-) strand; PAM type: NRG; PAM sequence: AAG
ccgcggctgccaatgtccgc

SEQ ID NO: 34518 - DNA, 20 bp, Artificial Sequence
  Description of Artificial Sequence: Synthetic oligonucleotide
  Target: ATXN2; (-) strand; PAM type: NRG; PAM sequence: CGG
gcagcagcagccgccgcccg

SEQ ID NO: 34519 - DNA, 20 bp, Artificial Sequence
  Description of Artificial Sequence: Synthetic oligonucleotide
  Target: ATXN2; (-) strand; PAM type: NRG; PAM sequence: CAG
agcagcagcagcagcagcag

SEQ ID NO: 34520 - DNA, 20 bp, Artificial Sequence
  Description of Artificial Sequence: Synthetic oligonucleotide
  Target: ATXN2; (-) strand; PAM type: NRG; PAM sequence: CAG
agcagcagcagcagcagcag

SEQ ID NO: 34521 - DNA, 20 bp, Artificial Sequence
  Description of Artificial Sequence: Synthetic oligonucleotide
  Target: ATXN2; (-) strand; PAM type: NRG; PAM sequence: CAG
aacagcagcagcagcagcag

SEQ ID NO: 34522 - DNA, 20 bp, Artificial Sequence
  Description of Artificial Sequence: Synthetic oligonucleotide
  Target: ATXN2; (-) strand; PAM type: NRG; PAM sequence: CAG
agcaacagcagcagcagcag

SEQ ID NO: 34523 - DNA, 20 bp, Artificial Sequence
  Description of Artificial Sequence: Synthetic oligonucleotide
  Target: ATXN2; (-) strand; PAM type: NRG; PAM sequence: CAG
agcagcaacagcagcagcag

SEQ ID NO: 34524 - DNA, 20 bp, Artificial Sequence
  Description of Artificial Sequence: Synthetic oligonucleotide
  Target: ATXN2; (-) strand; PAM type: NRG; PAM sequence: CAG
agcagcagcaacagcagcag

SEQ ID NO: 34525 - DNA, 20 bp, Artificial Sequence
  Description of Artificial Sequence: Synthetic oligonucleotide
  Target: ATXN2; (-) strand; PAM type: NRG; PAM sequence: CAG
agcagcagcagcaacagcag

SEQ ID NO: 34526 - DNA, 20 bp, Artificial Sequence
  Description of Artificial Sequence: Synthetic oligonucleotide
  Target: ATXN2; (-) strand; PAM type: NRG; PAM sequence: CAG
agcagcagcagcagcaacag

SEQ ID NO: 34527 - DNA, 20 bp, Artificial Sequence
  Description of Artificial Sequence: Synthetic oligonucleotide
  Target: ATXN2; (-) strand; PAM type: NRG; PAM sequence: CAG
agcagcagcagcagcagcaa

SEQ ID NO: 34528 - DNA, 20 bp, Artificial Sequence
  Description of Artificial Sequence: Synthetic oligonucleotide
  Target: ATXN2; (-) strand; PAM type: NRG; PAM sequence: CAG
agcagcagcagcagcagcag

SEQ ID NO: 34529 - DNA, 20 bp, Artificial Sequence
  Description of Artificial Sequence: Synthetic oligonucleotide
  Target: ATXN2; (-) strand; PAM type: NRG; PAM sequence: CAG
agcagcagcagcagcagcag

SEQ ID NO: 34530 - DNA, 20 bp, Artificial Sequence
  Description of Artificial Sequence: Synthetic oligonucleotide
  Target: ATXN2; (-) strand; PAM type: NRG; PAM sequence: CAG
agcagcagcagcagcagcag

SEQ ID NO: 34531 - DNA, 20 bp, Artificial Sequence
  Description of Artificial Sequence: Synthetic oligonucleotide
  Target: ATXN2; (-) strand; PAM type: NRG; PAM sequence: CAG
agcagcagcagcagcagcag

SEQ ID NO: 34532 - DNA, 20 bp, Artificial Sequence
  Description of Artificial Sequence: Synthetic oligonucleotide
  Target: ATXN2; (-) strand; PAM type: NRG; PAM sequence: CAG
agcagcagcagcagcagcag

SEQ ID NO: 34533 - DNA, 20 bp, Artificial Sequence
  Description of Artificial Sequence: Synthetic oligonucleotide
  Target: ATXN2; (-) strand; PAM type: NRG; PAM sequence: CAG
agcagcagcagcagcagcag

SEQ ID NO: 34534 - DNA, 20 bp, Artificial Sequence
  Description of Artificial Sequence: Synthetic oligonucleotide
  Target: ATXN2; (-) strand; PAM type: NRG; PAM sequence: CAG
cccagcagcagcagcagcag

SEQ ID NO: 34535 - DNA, 20 bp, Artificial Sequence
  Description of Artificial Sequence: Synthetic oligonucleotide
  Target: ATXN2; (-) strand; PAM type: NRG; PAM sequence: CAG
agccccagcagcagcagcag

SEQ ID NO: 34536 - DNA, 20 bp, Artificial Sequence
  Description of Artificial Sequence: Synthetic oligonucleotide
  Target: ATXN2; (-) strand; PAM type: NRG; PAM sequence: CAG
tgaagccccagcagcagcag

SEQ ID NO: 34537 - DNA, 20 bp, Artificial Sequence
  Description of Artificial Sequence: Synthetic oligonucleotide
  Target: ATXN2; (-) strand; PAM type: NRG; PAM sequence: CAG
cgctgaagccccagcagcag

SEQ ID NO: 34538 - DNA, 20 bp, Artificial Sequence
  Description of Artificial Sequence: Synthetic oligonucleotide
  Target: ATXN2; (-) strand; PAM type: NRG; PAM sequence: CAG
tgtcgctgaagccccagcag

SEQ ID NO: 34539 - DNA, 20 bp, Artificial Sequence
  Description of Artificial Sequence: Synthetic oligonucleotide
  Target: ATXN2; (-) strand; PAM type: NRG; PAM sequence: CAG
ccatgtcgctgaagccccag

SEQ ID NO: 34540 - DNA, 20 bp, Artificial Sequence
  Description of Artificial Sequence: Synthetic oligonucleotide
  Target: ATXN2; (-) strand; PAM type: NRG; PAM sequence: CAG
tcaccatgtcgctgaagccc

SEQ ID NO: 34541 - DNA, 20 bp, Artificial Sequence
  Description of Artificial Sequence: Synthetic oligonucleotide
  Target: ATXN2; (-) strand; PAM type: NRG; PAM sequence: AAG
ggcccctcaccatgtcgctg

SEQ ID NO: 34542 - DNA, 20 bp, Artificial Sequence
  Description of Artificial Sequence: Synthetic oligonucleotide
  Target: ATXN2; (-) strand; PAM type: NRG; PAM sequence: GGG
cggcgtgcgagccggtgtat

SEQ ID NO: 34543 - DNA, 20 bp, Artificial Sequence
  Description of Artificial Sequence: Synthetic oligonucleotide
  Target: ATXN2; (-) strand; PAM type: NRG; PAM sequence: TGG
ccggcgtgcgagccggtgta

SEQ ID NO: 34544 - DNA, 20 bp, Artificial Sequence
  Description of Artificial Sequence: Synthetic oligonucleotide
  Target: ATXN2; (-) strand; PAM type: NRG; PAM sequence: CGG
tccccgcccggcgtgcgagc

SEQ ID NO: 34545 - DNA, 20 bp, Artificial Sequence
  Description of Artificial Sequence: Synthetic oligonucleotide
  Target: ATXN2; (-) strand; PAM type: NRG; PAM sequence: GAG
gctgtccccgcccggcgtgc

SEQ ID NO: 34546 - DNA, 20 bp, Artificial Sequence
  Description of Artificial Sequence: Synthetic oligonucleotide
  Target: ATXN2; (-) strand; PAM type: NRG; PAM sequence: CGG
ggctcccggctgtccccgcc

SEQ ID NO: 34547 - DNA, 20 bp, Artificial Sequence
  Description of Artificial Sequence: Synthetic oligonucleotide
  Target: ATXN2; (-) strand; PAM type: NRG; PAM sequence: CGG
tccttggcgcgcccggctcc

SEQ ID NO: 34548 - DNA, 20 bp, Artificial Sequence
  Description of Artificial Sequence: Synthetic oligonucleotide
  Target: ATXN2; (-) strand; PAM type: NRG; PAM sequence: CGG
cggcgtctccttggcgcgcc

SEQ ID NO: 34549 - DNA, 20 bp, Artificial Sequence
  Description of Artificial Sequence: Synthetic oligonucleotide
  Target: ATXN2; (-) strand; PAM type: NRG; PAM sequence: TGG
gccgcgttccggcgtctcct

SEQ ID NO: 34550 - DNA, 20 bp, Artificial Sequence
  Description of Artificial Sequence: Synthetic oligonucleotide
  Target: ATXN2; (-) strand; PAM type: NRG; PAM sequence: CGG
cgcgcgtccccgccgcgttc

SEQ ID NO: 34551 - DNA, 20 bp, Artificial Sequence
  Description of Artificial Sequence: Synthetic oligonucleotide
  Target: ATXN2; (-) strand; PAM type: NRG; PAM sequence: CGG
ccaacccgcgcctccccgct

SEQ ID NO: 34552 - DNA, 20 bp, Artificial Sequence
  Description of Artificial Sequence: Synthetic oligonucleotide
  Target: ATXN2; (-) strand; PAM type: NRG; PAM sequence: CGG
cgccagcccgggcgcccctc

SEQ ID NO: 34553 - DNA, 20 bp, Artificial Sequence
  Description of Artificial Sequence: Synthetic oligonucleotide
  Target: ATXN2; (-) strand; PAM type: NRG; PAM sequence: GGG
cttctccccctcgccagccc

SEQ ID NO: 34554 - DNA, 20 bp, Artificial Sequence
  Description of Artificial Sequence: Synthetic oligonucleotide
  Target: ATXN2; (-) strand; PAM type: NRG; PAM sequence: CGG
ccttctccccctcgccagcc

SEQ ID NO: 34555 - DNA, 20 bp, Artificial Sequence
  Description of Artificial Sequence: Synthetic oligonucleotide
  Target: ATXN2; (-) strand; PAM type: NRG; PAM sequence: CAG
gtcctccttctccccctcgc

SEQ ID NO: 34556 - DNA, 20 bp, Artificial Sequence
  Description of Artificial Sequence: Synthetic oligonucleotide
  Target: ATXN2; (-) strand; PAM type: NRG; PAM sequence: GGG
ggcggctccttggtctcggc

SEQ ID NO: 34557 - DNA, 20 bp, Artificial Sequence
  Description of Artificial Sequence: Synthetic oligonucleotide
  Target: ATXN2; (-) strand; PAM type: NRG; PAM sequence: CGG
cggcggctccttggtctcgg

SEQ ID NO: 34558 - DNA, 20 bp, Artificial Sequence
  Description of Artificial Sequence: Synthetic oligonucleotide
  Target: ATXN2; (-) strand; PAM type: NRG; PAM sequence: CGG
tcccggcggctccttggtct

SEQ ID NO: 34559 - DNA, 20 bp, Artificial Sequence
  Description of Artificial Sequence: Synthetic oligonucleotide
  Target: ATXN2; (-) strand; PAM type: NRG; PAM sequence: TGG
cccggctcccggcggctcct

SEQ ID NO: 34560 - DNA, 20 bp, Artificial Sequence
  Description of Artificial Sequence: Synthetic oligonucleotide
  Target: ATXN2; (-) strand; PAM type: NRG; PAM sequence: CGG
cgtttcggcccggctcccgg

SEQ ID NO: 34561 - DNA, 20 bp, Artificial Sequence
  Description of Artificial Sequence: Synthetic oligonucleotide
  Target: ATXN2; (-) strand; PAM type: NRG; PAM sequence: CGG
gcgcgtttcggcccggctcc

SEQ ID NO: 34562 - DNA, 20 bp, Artificial Sequence
  Description of Artificial Sequence: Synthetic oligonucleotide
  Target: ATXN2; (-) strand; PAM type: NRG; PAM sequence: CGG
ggcggcggcgcgtttcggcc

SEQ ID NO: 34563 - DNA, 20 bp, Artificial Sequence
  Description of Artificial Sequence: Synthetic oligonucleotide
  Target: ATXN2; (-) strand; PAM type: NRG; PAM sequence: CGG
gcaacggcggcggcgcgttt

SEQ ID NO: 34564 - DNA, 20 bp, Artificial Sequence
  Description of Artificial Sequence: Synthetic oligonucleotide
  Target: ATXN2; (-) strand; PAM type: NRG; PAM sequence: CGG
ggtagcaacggcaacggcgg

SEQ ID NO: 34565 - DNA, 20 bp, Artificial Sequence
  Description of Artificial Sequence: Synthetic oligonucleotide
  Target: ATXN2; (-) strand; PAM type: NRG; PAM sequence: CGG
tttggtagcaacggcaacgg

SEQ ID NO: 34566 - DNA, 20 bp, Artificial Sequence
  Description of Artificial Sequence: Synthetic oligonucleotide
  Target: ATXN2; (-) strand; PAM type: NRG; PAM sequence: CGG
tgttttggtagcaacggcaa

SEQ ID NO: 34567 - DNA, 20 bp, Artificial Sequence
  Description of Artificial Sequence: Synthetic oligonucleotide
  Target: ATXN2; (-) strand; PAM type: NRG; PAM sequence: CGG
tcagactgttttggtagcaa

SEQ ID NO: 34568 - DNA, 20 bp, Artificial Sequence
  Description of Artificial Sequence: Synthetic oligonucleotide
  Target: ATXN2; (-) strand; PAM type: NRG; PAM sequence: TAG
tccgcctcagactgttttgg

SEQ ID NO: 34569 - DNA, 20 bp, Artificial Sequence
  Description of Artificial Sequence: Synthetic oligonucleotide
  Target: ATXN2; (-) strand; PAM type: NRG; PAM sequence: TGG
ccctccgcctcagactgttt

SEQ ID NO: 34570 - DNA, 20 bp, Artificial Sequence
  Description of Artificial Sequence: Synthetic oligonucleotide
  Target: ATXN2; (-) strand; PAM type: NRG; PAM sequence: CAG
gagctcgcctccctccgcct

SEQ ID NO: 34571 - DNA, 20 bp, Artificial Sequence
  Description of Artificial Sequence: Synthetic oligonucleotide
  Target: ATXN2; (-) strand; PAM type: NRG; PAM sequence: GAG
ggcccccctccctcccggca

SEQ ID NO: 34572 - DNA, 20 bp, Artificial Sequence
  Description of Artificial Sequence: Synthetic oligonucleotide
  Target: ATXN2; (-) strand; PAM type: NRG; PAM sequence: CAG
ccggcccccctccctcccgg

SEQ ID NO: 34573 - DNA, 20 bp, Artificial Sequence
  Description of Artificial Sequence: Synthetic oligonucleotide
  Target: ATXN2; (-) strand; PAM type: NRG; PAM sequence: CGG
gccccggcccccctccctcc

SEQ ID NO: 34574 - DNA, 20 bp, Artificial Sequence
  Description of Artificial Sequence: Synthetic oligonucleotide
  Target: ATXN2; (-) strand; PAM type: NRG; PAM sequence: CGG
gcccctcccccgcccggccc

SEQ ID NO: 34575 - DNA, 20 bp, Artificial Sequence
  Description of Artificial Sequence: Synthetic oligonucleotide
  Target: ATXN2; (-) strand; PAM type: NRG; PAM sequence: CGG
tccgccgcccctcccccgcc

SEQ ID NO: 34576 - DNA, 20 bp, Artificial Sequence
  Description of Artificial Sequence: Synthetic oligonucleotide
  Target: ATXN2; (-) strand; PAM type: NRG; PAM sequence: GGG
ggcggcggtggcgcggcccc

SEQ ID NO: 34577 - DNA, 20 bp, Artificial Sequence
  Description of Artificial Sequence: Synthetic oligonucleotide
  Target: ATXN2; (-) strand; PAM type: NRG; PAM sequence: CGG
gggcggcggtggcgcggccc

SEQ ID NO: 34578 - DNA, 20 bp, Artificial Sequence
  Description of Artificial Sequence: Synthetic oligonucleotide
  Target: ATXN2; (-) strand; PAM type: NRG; PAM sequence: CGG
cgggcggggcggcggtggcg

SEQ ID NO: 34579 - DNA, 20 bp, Artificial Sequence
  Description of Artificial Sequence: Synthetic oligonucleotide
  Target: ATXN2; (-) strand; PAM type: NRG; PAM sequence: TGG
cggagcgggcggggcggcgg

SEQ ID NO: 34580 - DNA, 20 bp, Artificial Sequence
  Description of Artificial Sequence: Synthetic oligonucleotide
  Target: ATXN2; (-) strand; PAM type: NRG; PAM sequence: CGG
cggcggagcgggcggggcgg

SEQ ID NO: 34581 - DNA, 20 bp, Artificial Sequence
  Description of Artificial Sequence: Synthetic oligonucleotide
  Target: ATXN2; (-) strand; PAM type: NRG; PAM sequence: CGG
gcgcggcggagcgggcgggg

SEQ ID NO: 34582 - DNA, 20 bp, Artificial Sequence
  Description of Artificial Sequence: Synthetic oligonucleotide
  Target: ATXN2; (-) strand; PAM type: NRG; PAM sequence: GGG
ccggcgcggcggagcgggcg

SEQ ID NO: 34583 - DNA, 20 bp, Artificial Sequence
  Description of Artificial Sequence: Synthetic oligonucleotide
  Target: ATXN2; (-) strand; PAM type: NRG; PAM sequence: GGG
gccggcgcggcggagcgggc

SEQ ID NO: 34584 - DNA, 20 bp, Artificial Sequence
  Description of Artificial Sequence: Synthetic oligonucleotide
  Target: ATXN2; (-) strand; PAM type: NRG; PAM sequence: CGG
ggccggcgcggcggagcggg

SEQ ID NO: 34585 - DNA, 20 bp, Artificial Sequence
  Description of Artificial Sequence: Synthetic oligonucleotide
  Target: ATXN2; (-) strand; PAM type: NRG; PAM sequence: GGG
agcggccggcgcggcggagc

SEQ ID NO: 34586 - DNA, 20 bp, Artificial Sequence
  Description of Artificial Sequence: Synthetic oligonucleotide
  Target: ATXN2; (-) strand; PAM type: NRG; PAM sequence: CGG
cagcggccggcgcggcggag

SEQ ID NO: 34587 - DNA, 20 bp, Artificial Sequence
  Description of Artificial Sequence: Synthetic oligonucleotide
  Target: ATXN2; (-) strand; PAM type: NRG; PAM sequence: GAG
ctccagcggccggcgcggcg

SEQ ID NO: 34588 - DNA, 20 bp, Artificial Sequence
  Description of Artificial Sequence: Synthetic oligonucleotide
  Target: ATXN2; (-) strand; PAM type: NRG; PAM sequence: CGG
cgctccagcggccggcgcgg

SEQ ID NO: 34589 - DNA, 20 bp, Artificial Sequence
  Description of Artificial Sequence: Synthetic oligonucleotide
  Target: ATXN2; (-) strand; PAM type: NRG; PAM sequence: CGG
gctcgctccagcggccggcg

SEQ ID NO: 34590 - DNA, 20 bp, Artificial Sequence
  Description of Artificial Sequence: Synthetic oligonucleotide
  Target: ATXN2; (-) strand; PAM type: NRG; PAM sequence: CGG
gtggcgctcgctccagcggc

SEQ ID NO: 34591 - DNA, 20 bp, Artificial Sequence
  Description of Artificial Sequence: Synthetic oligonucleotide
  Target: ATXN2; (-) strand; PAM type: NRG; PAM sequence: CGG
ccgggtggcgctcgctccag

SEQ ID NO: 34592 - DNA, 20 bp, Artificial Sequence
  Description of Artificial Sequence: Synthetic oligonucleotide
  Target: ATXN2; (-) strand; PAM type: NRG; PAM sequence: CAG
ggcccgggtggcgctcgctc

SEQ ID NO: 34593 - DNA, 20 bp, Artificial Sequence
  Description of Artificial Sequence: Synthetic oligonucleotide
  Target: ATXN2; (-) strand; PAM type: NRG; PAM sequence: TGG
ccgcagccaggtggcccggg

SEQ ID NO: 34594 - DNA, 20 bp, Artificial Sequence
  Description of Artificial Sequence: Synthetic oligonucleotide
  Target: ATXN2; (-) strand; PAM type: NRG; PAM sequence: GGG
tcgccgcagccaggtggccc

SEQ ID NO: 34595 - DNA, 20 bp, Artificial Sequence
  Description of Artificial Sequence: Synthetic oligonucleotide
  Target: ATXN2; (-) strand; PAM type: NRG; PAM sequence: CGG
ttcgccgcagccaggtggcc

SEQ ID NO: 34596 - DNA, 20 bp, Artificial Sequence
  Description of Artificial Sequence: Synthetic oligonucleotide
  Target: ATXN2; (-) strand; PAM type: NRG; PAM sequence: TGG
gccgcttcgccgcagccagg

SEQ ID NO: 34597 - DNA, 20 bp, Artificial Sequence
  Description of Artificial Sequence: Synthetic oligonucleotide
  Target: ATXN2; (-) strand; PAM type: NRG; PAM sequence: AGG
ctcgccgcttcgccgcagcc

SEQ ID NO: 34598 - DNA, 20 bp, Artificial Sequence
  Description of Artificial Sequence: Synthetic oligonucleotide
  Target: ATXN2; (-) strand; PAM type: NRG; PAM sequence: CAG
tctcgccgcttcgccgcagc

SEQ ID NO: 34599 - DNA, 20 bp, Artificial Sequence
  Description of Artificial Sequence: Synthetic oligonucleotide
  Target: ATXN2; (-) strand; PAM type: NRG; PAM sequence: CAG
cgagtctcgccgcttcgccg

SEQ ID NO: 34600 - DNA, 20 bp, Artificial Sequence
  Description of Artificial Sequence: Synthetic oligonucleotide
  Target: ATXN2; (-) strand; PAM type: NRG; PAM sequence: GAG
ggagtcccgcggtggccacc

SEQ ID NO: 34601 - DNA, 20 bp, Artificial Sequence
  Description of Artificial Sequence: Synthetic oligonucleotide
  Target: ATXN2; (-) strand; PAM type: NRG; PAM sequence: TGG
agctcctcggagtcccgcgg

SEQ ID NO: 34602 - DNA, 20 bp, Artificial Sequence
  Description of Artificial Sequence: Synthetic oligonucleotide
  Target: ATXN2; (-) strand; PAM type: NRG; PAM sequence: CGG
cgcagctcctcggagtcccg

SEQ ID NO: 34603 - DNA, 20 bp, Artificial Sequence
  Description of Artificial Sequence: Synthetic oligonucleotide
  Target: ATXN2; (-) strand; PAM type: NRG; PAM sequence: GAG
tcagcggccgcagctcctcg

SEQ ID NO: 34604 - DNA, 20 bp, Artificial Sequence
  Description of Artificial Sequence: Synthetic oligonucleotide
  Target: ATXN2; (-) strand; PAM type: NRG; PAM sequence: CGG
gctcagcggccgcagctcct

SEQ ID NO: 34605 - DNA, 20 bp, Artificial Sequence
  Description of Artificial Sequence: Synthetic oligonucleotide
  Target: ATXN2; (-) strand; PAM type: NRG; PAM sequence: CAG
tccgatgcgctcagcggccg

SEQ ID NO: 34606 - DNA, 20 bp, Artificial Sequence
  Description of Artificial Sequence: Synthetic oligonucleotide
  Target: ATXN2; (-) strand; PAM type: NRG; PAM sequence: CGG
ccgccctccgatgcgctcag

SEQ ID NO: 34607 - DNA, 20 bp, Artificial Sequence
  Description of Artificial Sequence: Synthetic oligonucleotide
  Target: ATXN2; (-) strand; PAM type: NRG; PAM sequence: CAG
cgcccgccctccgatgcgct

SEQ ID NO: 34608 - DNA, 20 bp, Artificial Sequence
  Description of Artificial Sequence: Synthetic oligonucleotide
  Target: ATXN2; (-) strand; PAM type: NRG; PAM sequence: CGG
tccgctcccacccggcgcct

SEQ ID NO: 34609 - DNA, 20 bp, Artificial Sequence
  Description of Artificial Sequence: Synthetic oligonucleotide
  Target: ATXN2; (-) strand; PAM type: NRG; PAM sequence: CGG
tccgcacctccgctcccacc

SEQ ID NO: 34610 - DNA, 20 bp, Artificial Sequence
  Description of Artificial Sequence: Synthetic oligonucleotide
  Target: ATXN2; (-) strand; PAM type: NRG; PAM sequence: GAG
cccctccgacttccggtaaa

SEQ ID NO: 34611 - DNA, 20 bp, Artificial Sequence
  Description of Artificial Sequence: Synthetic oligonucleotide
  Target: ATXN2; (-) strand; PAM type: NRG; PAM sequence: AAG
gacccctccgacttccggta

SEQ ID NO: 34612 - DNA, 20 bp, Artificial Sequence
  Description of Artificial Sequence: Synthetic oligonucleotide
  Target: ATXN2; (-) strand; PAM type: NRG; PAM sequence: CGG
cgtctgacccctccgacttc

SEQ ID NO: 34613 - DNA, 20 bp, Artificial Sequence
  Description of Artificial Sequence: Synthetic oligonucleotide
  Target: ATXN2; (-) strand; PAM type: NRG; PAM sequence: GGG
acgtgtccctcccggccccg

SEQ ID NO: 34614 - DNA, 20 bp, Artificial Sequence
  Description of Artificial Sequence: Synthetic oligonucleotide
  Target: ATXN2; (-) strand; PAM type: NRG; PAM sequence: GGG
cacgtgtccctcccggcccc

SEQ ID NO: 34615 - DNA, 20 bp, Artificial Sequence
  Description of Artificial Sequence: Synthetic oligonucleotide
  Target: ATXN2; (-) strand; PAM type: NRG; PAM sequence: CGG
tcacgtgtccctcccggccc

SEQ ID NO: 34616 - DNA, 20 bp, Artificial Sequence
  Description of Artificial Sequence: Synthetic oligonucleotide
  Target: ATXN2; (-) strand; PAM type: NRG; PAM sequence: CGG
cgctcctcacgtgtccctcc

SEQ ID NO: 34617 - DNA, 20 bp, Artificial Sequence
  Description of Artificial Sequence: Synthetic oligonucleotide
  Target: ATXN2; (-) strand; PAM type: NRG; PAM sequence: CAG
cgacccccgagaaagcaacc

SEQ ID NO: 34618 - DNA, 20 bp, Artificial Sequence
  Description of Artificial Sequence: Synthetic oligonucleotide
  Target: ATXN2; (-) strand; PAM type: NRG; PAM sequence: AAG
ccctcacccgacccccgaga

SEQ ID NO: 34619 - DNA, 20 bp, Artificial Sequence
  Description of Artificial Sequence: Synthetic oligonucleotide
  Target: ATXN2; (-) strand; PAM type: NRG; PAM sequence: GAG
ctggccctcacccgaccccc

SEQ ID NO: 34620 - DNA, 20 bp, Artificial Sequence
  Description of Artificial Sequence: Synthetic oligonucleotide
  Target: ATXN2; (-) strand; PAM type: NRG; PAM sequence: TGG
tccgggtagggaccgccgcc

SEQ ID NO: 34621 - DNA, 20 bp, Artificial Sequence
  Description of Artificial Sequence: Synthetic oligonucleotide
  Target: ATXN2; (-) strand; PAM type: NRG; PAM sequence: GGG
gaggaaggcggatccgggta

SEQ ID NO: 34622 - DNA, 20 bp, Artificial Sequence
  Description of Artificial Sequence: Synthetic oligonucleotide
  Target: ATXN2; (-) strand; PAM type: NRG; PAM sequence: AGG
tgaggaaggcggatccgggt

SEQ ID NO: 34623 - DNA, 20 bp, Artificial Sequence
  Description of Artificial Sequence: Synthetic oligonucleotide
  Target: ATXN2; (-) strand; PAM type: NRG; PAM sequence: TAG
ttgaggaaggcggatccggg

SEQ ID NO: 34624 - DNA, 20 bp, Artificial Sequence
  Description of Artificial Sequence: Synthetic oligonucleotide
  Target: ATXN2; (-) strand; PAM type: NRG; PAM sequence: GGG
gccttgaggaaggcggatcc

SEQ ID NO: 34625 - DNA, 20 bp, Artificial Sequence
  Description of Artificial Sequence: Synthetic oligonucleotide
  Target: ATXN2; (-) strand; PAM type: NRG; PAM sequence: CGG
cgccttgaggaaggcggatc

SEQ ID NO: 34626 - DNA, 20 bp, Artificial Sequence
  Description of Artificial Sequence: Synthetic oligonucleotide
  Target: ATXN2; (-) strand; PAM type: NRG; PAM sequence: CGG
cagacccgccttgaggaagg

SEQ ID NO: 34627 - DNA, 20 bp, Artificial Sequence
  Description of Artificial Sequence: Synthetic oligonucleotide
  Target: ATXN2; (-) strand; PAM type: NRG; PAM sequence: AGG
gggcagacccgccttgagga

SEQ ID NO: 34628 - DNA, 20 bp, Artificial Sequence
  Description of Artificial Sequence: Synthetic oligonucleotide
  Target: ATXN2; (-) strand; PAM type: NRG; PAM sequence: AAG
agggcagacccgccttgagg

SEQ ID NO: 34629 - DNA, 20 bp, Artificial Sequence
  Description of Artificial Sequence: Synthetic oligonucleotide
  Target: ATXN2; (-) strand; PAM type: NRG; PAM sequence: AGG
cgaagggcagacccgccttg

SEQ ID NO: 34630 - DNA, 20 bp, Artificial Sequence
  Description of Artificial Sequence: Synthetic oligonucleotide
  Target: ATXN2; (-) strand; PAM type: NRG; PAM sequence: GAG
ccgaagggcagacccgcctt

SEQ ID NO: 34631 - DNA, 20 bp, Artificial Sequence
  Description of Artificial Sequence: Synthetic oligonucleotide
  Target: ATXN2; (-) strand; PAM type: NRG; PAM sequence: CAG
gacacgccctccccgaaggg

SEQ ID NO: 34632 - DNA, 20 bp, Artificial Sequence
  Description of Artificial Sequence: Synthetic oligonucleotide
  Target: ATXN2; (-) strand; PAM type: NRG; PAM sequence: GGG
accgacacgccctccccgaa

SEQ ID NO: 34633 - DNA, 20 bp, Artificial Sequence
  Description of Artificial Sequence: Synthetic oligonucleotide
  Target: ATXN2; (-) strand; PAM type: NRG; PAM sequence: AGG
gaccgacacgccctccccga

SEQ ID NO: 34634 - DNA, 20 bp, Artificial Sequence
  Description of Artificial Sequence: Synthetic oligonucleotide
  Target: ATXN2; (-) strand; PAM type: NRG; PAM sequence: AAG
agaccgacacgccctccccg

SEQ ID NO: 34635 - DNA, 20 bp, Artificial Sequence
  Description of Artificial Sequence: Synthetic oligonucleotide
  Target: ATXN2; (-) strand; PAM type: NRG; PAM sequence: GAG
ccaggcaggccccagaggct

SEQ ID NO: 34636 - DNA, 20 bp, Artificial Sequence
  Description of Artificial Sequence: Synthetic oligonucleotide
  Target: ATXN2; (-) strand; PAM type: NRG; PAM sequence: AGG
ccacaccaggcaggccccag

SEQ ID NO: 34637 - DNA, 20 bp, Artificial Sequence
  Description of Artificial Sequence: Synthetic oligonucleotide
  Target: ATXN2; (-) strand; PAM type: NRG; PAM sequence: GAG
tccacaccaggcaggcccca

SEQ ID NO: 34638 - DNA, 20 bp, Artificial Sequence
  Description of Artificial Sequence: Synthetic oligonucleotide
  Target: ATXN2; (-) strand; PAM type: NRG; PAM sequence: CAG
cctccacaccaggcaggccc

SEQ ID NO: 34639 - DNA, 20 bp, Artificial Sequence
  Description of Artificial Sequence: Synthetic oligonucleotide
  Target: ATXN2; (-) strand; PAM type: NRG; PAM sequence: AGG
tcctgtcctccacaccaggc

SEQ ID NO: 34640 - DNA, 20 bp, Artificial Sequence
  Description of Artificial Sequence: Synthetic oligonucleotide
  Target: ATXN2; (-) strand; PAM type: NRG; PAM sequence: CAG
ctcctgtcctccacaccagg

SEQ ID NO: 34641 - DNA, 20 bp, Artificial Sequence
  Description of Artificial Sequence: Synthetic oligonucleotide
  Target: ATXN2; (-) strand; PAM type: NRG; PAM sequence: AGG
tctctcctgtcctccacacc

SEQ ID NO: 34642 - DNA, 20 bp, Artificial Sequence
  Description of Artificial Sequence: Synthetic oligonucleotide
  Target: ATXN2; (-) strand; PAM type: NRG; PAM sequence: CAG
ttctctcctgtcctccacac

SEQ ID NO: 34643 - DNA, 20 bp, Artificial Sequence
  Description of Artificial Sequence: Synthetic oligonucleotide
  Target: ATXN2; (-) strand; PAM type: NRG; PAM sequence: AAG
ctgaaggaatacagtaggag

SEQ ID NO: 34644 - DNA, 20 bp, Artificial Sequence
  Description of Artificial Sequence: Synthetic oligonucleotide
  Target: ATXN2; (-) strand; PAM type: NRG; PAM sequence: GAG
atgctgaaggaatacagtag

SEQ ID NO: 34645 - DNA, 20 bp, Artificial Sequence
  Description of Artificial Sequence: Synthetic oligonucleotide
  Target: ATXN2; (-) strand; PAM type: NRG; PAM sequence: AGG
agatgctgaaggaatacagt

SEQ ID NO: 34646 - DNA, 20 bp, Artificial Sequence
  Description of Artificial Sequence: Synthetic oligonucleotide
  Target: ATXN2; (-) strand; PAM type: NRG; PAM sequence: TAG
aagatgctgaaggaatacag

SEQ ID NO: 34647 - DNA, 20 bp, Artificial Sequence
  Description of Artificial Sequence: Synthetic oligonucleotide
  Target: ATXN2; (-) strand; PAM type: NRG; PAM sequence: CAG
gtgaagatgctgaaggaata

SEQ ID NO: 34648 - DNA, 20 bp, Artificial Sequence
  Description of Artificial Sequence: Synthetic oligonucleotide
  Target: ATXN2; (-) strand; PAM type: NRG; PAM sequence: AGG
cgcagaagtgaagatgctga

SEQ ID NO: 34649 - DNA, 20 bp, Artificial Sequence
  Description of Artificial Sequence: Synthetic oligonucleotide
  Target: ATXN2; (-) strand; PAM type: NRG; PAM sequence: AAG
ccgcagaagtgaagatgctg

SEQ ID NO: 34650 - DNA, 20 bp, Artificial Sequence
  Description of Artificial Sequence: Synthetic oligonucleotide
  Target: ATXN2; (-) strand; PAM type: NRG; PAM sequence: AAG
actaggtccccgcagaagtg

SEQ ID NO: 34651 - DNA, 20 bp, Artificial Sequence
  Description of Artificial Sequence: Synthetic oligonucleotide
  Target: ATXN2; (-) strand; PAM type: NRG; PAM sequence: AAG
ggcaaactaggtccccgcag

SEQ ID NO: 34652 - DNA, 20 bp, Artificial Sequence
  Description of Artificial Sequence: Synthetic oligonucleotide
  Target: ATXN2; (-) strand; PAM type: NRG; PAM sequence: CAG
gggggcaaactaggtccccg

SEQ ID NO: 34653 - DNA, 20 bp, Artificial Sequence
  Description of Artificial Sequence: Synthetic oligonucleotide
  Target: ATXN2; (-) strand; PAM type: NRG; PAM sequence: AGG
gcatcaggtgggggcaaact

SEQ ID NO: 34654 - DNA, 20 bp, Artificial Sequence
  Description of Artificial Sequence: Synthetic oligonucleotide
  Target: ATXN2; (-) strand; PAM type: NRG; PAM sequence: TAG
tgcatcaggtgggggcaaac

SEQ ID NO: 34655 - DNA, 20 bp, Artificial Sequence
  Description of Artificial Sequence: Synthetic oligonucleotide
  Target: ATXN2; (-) strand; PAM type: NRG; PAM sequence: GGG
ttctgggttgcatcaggtgg

SEQ ID NO: 34656 - DNA, 20 bp, Artificial Sequence
  Description of Artificial Sequence: Synthetic oligonucleotide
  Target: ATXN2; (-) strand; PAM type: NRG; PAM sequence: GGG
tttctgggttgcatcaggtg

SEQ ID NO: 34657 - DNA, 20 bp, Artificial Sequence
  Description of Artificial Sequence: Synthetic oligonucleotide
  Target: ATXN2; (-) strand; PAM type: NRG; PAM sequence: GGG
ttttctgggttgcatcaggt

SEQ ID NO: 34658 - DNA, 20 bp, Artificial Sequence
  Description of Artificial Sequence: Synthetic oligonucleotide
  Target: ATXN2; (-) strand; PAM type: NRG; PAM sequence: TGG
attttctgggttgcatcagg

SEQ ID NO: 34659 - DNA, 20 bp, Artificial Sequence
  Description of Artificial Sequence: Synthetic oligonucleotide
  Target: ATXN2; (-) strand; PAM type: NRG; PAM sequence: AGG
tccattttctgggttgcatc

SEQ ID NO: 34660 - DNA, 20 bp, Artificial Sequence
  Description of Artificial Sequence: Synthetic oligonucleotide
  Target: ATXN2; (-) strand; PAM type: NRG; PAM sequence: CAG
gtccattttctgggttgcat

SEQ ID NO: 34661 - DNA, 20 bp, Artificial Sequence
  Description of Artificial Sequence: Synthetic oligonucleotide
  Target: ATXN2; (-) strand; PAM type: NRG; PAM sequence: GGG
tcgcagtcagtccattttct

SEQ ID NO: 34662 - DNA, 20 bp, Artificial Sequence
  Description of Artificial Sequence: Synthetic oligonucleotide
  Target: ATXN2; (-) strand; PAM type: NRG; PAM sequence: TGG
ctcgcagtcagtccattttc

SEQ ID NO: 34663 - DNA, 20 bp, Artificial Sequence
  Description of Artificial Sequence: Synthetic oligonucleotide
  Target: ATXN2; (-) strand; PAM type: NRG; PAM sequence: CAG
cgccccaaggcactcgcagt

SEQ ID NO: 34664 - DNA, 20 bp, Artificial Sequence
  Description of Artificial Sequence: Synthetic oligonucleotide
  Target: ATXN2; (-) strand; PAM type: NRG; PAM sequence: CAG
tctccgccccaaggcactcg

SEQ ID NO: 34665 - DNA, 20 bp, Artificial Sequence
  Description of Artificial Sequence: Synthetic oligonucleotide
  Target: ATXN2; (-) strand; PAM type: NRG; PAM sequence: AGG
aagacacattctccgcccca

SEQ ID NO: 34666 - DNA, 20 bp, Artificial Sequence
  Description of Artificial Sequence: Synthetic oligonucleotide
  Target: ATXN2; (-) strand; PAM type: NRG; PAM sequence: AAG
caagacacattctccgcccc

SEQ ID NO: 34667 - DNA, 20 bp, Artificial Sequence
  Description of Artificial Sequence: Synthetic oligonucleotide
  Target: ATXN2; (-) strand; PAM type: NRG; PAM sequence: AAG
ctaggtgctttacacgtagc

SEQ ID NO: 34668 - DNA, 20 bp, Artificial Sequence
  Description of Artificial Sequence: Synthetic oligonucleotide
  Target: ATXN2; (-) strand; PAM type: NRG; PAM sequence: TAG
ggttctaggtgctttacacg

SEQ ID NO: 34669 - DNA, 20 bp, Artificial Sequence
  Description of Artificial Sequence: Synthetic oligonucleotide
  Target: ATXN2; (-) strand; PAM type: NRG; PAM sequence: AGG
cctgaatctggcagggttct

SEQ ID NO: 34670 - DNA, 20 bp, Artificial Sequence
  Description of Artificial Sequence: Synthetic oligonucleotide
  Target: ATXN2; (-) strand; PAM type: NRG; PAM sequence: TAG
ccctgaatctggcagggttc

SEQ ID NO: 34671 - DNA, 20 bp, Artificial Sequence
  Description of Artificial Sequence: Synthetic oligonucleotide
  Target: ATXN2; (-) strand; PAM type: NRG; PAM sequence: GGG
tgtgtcccctgaatctggca

SEQ ID NO: 34672 - DNA, 20 bp, Artificial Sequence
  Description of Artificial Sequence: Synthetic oligonucleotide
  Target: ATXN2; (-) strand; PAM type: NRG; PAM sequence: AGG
ctgtgtcccctgaatctggc

SEQ ID NO: 34673 - DNA, 20 bp, Artificial Sequence
  Description of Artificial Sequence: Synthetic oligonucleotide
  Target: ATXN2; (-) strand; PAM type: NRG; PAM sequence: CAG
gctgtgtcccctgaatctgg

SEQ ID NO: 34674 - DNA, 20 bp, Artificial Sequence
  Description of Artificial Sequence: Synthetic oligonucleotide
  Target: ATXN2; (-) strand; PAM type: NRG; PAM sequence: TGG
gatgctgtgtcccctgaatc

SEQ ID NO: 34675 - DNA, 20 bp, Artificial Sequence
  Description of Artificial Sequence: Synthetic oligonucleotide
  Target: ATXN2; (-) strand; PAM type: NRG; PAM sequence: AGG
ggggacggcaggaaaacggc

SEQ ID NO: 34676 - DNA, 20 bp, Artificial Sequence
  Description of Artificial Sequence: Synthetic oligonucleotide
  Target: ATXN2; (-) strand; PAM type: NRG; PAM sequence: CAG
gggggacggcaggaaaacgg

SEQ ID NO: 34677 - DNA, 20 bp, Artificial Sequence
  Description of Artificial Sequence: Synthetic oligonucleotide
  Target: ATXN2; (-) strand; PAM type: NRG; PAM sequence: CGG
ggcgggggacggcaggaaaa

SEQ ID NO: 34678 - DNA, 20 bp, Artificial Sequence
  Description of Artificial Sequence: Synthetic oligonucleotide
  Target: ATXN2; (-) strand; PAM type: NRG; PAM sequence: AGG
tgtggcgggcgggggacggc

SEQ ID NO: 34679 - DNA, 20 bp, Artificial Sequence
  Description of Artificial Sequence: Synthetic oligonucleotide
  Target: ATXN2; (-) strand; PAM type: NRG; PAM sequence: CAG
gtgtggcgggcgggggacgg

SEQ ID NO: 34680 - DNA, 20 bp, Artificial Sequence
  Description of Artificial Sequence: Synthetic oligonucleotide
  Target: ATXN2; (-) strand; PAM type: NRG; PAM sequence: CGG
actgtgtggcgggcggggga

SEQ ID NO: 34681 - DNA, 20 bp, Artificial Sequence
  Description of Artificial Sequence: Synthetic oligonucleotide
  Target: ATXN2; (-) strand; PAM type: NRG; PAM sequence: GGG
gcctactgtgtggcgggcgg

SEQ ID NO: 34682 - DNA, 20 bp, Artificial Sequence
  Description of Artificial Sequence: Synthetic oligonucleotide
  Target: ATXN2; (-) strand; PAM type: NRG; PAM sequence: GGG
cgcctactgtgtggcgggcg

SEQ ID NO: 34683 - DNA, 20 bp, Artificial Sequence
  Description of Artificial Sequence: Synthetic oligonucleotide
  Target: ATXN2; (-) strand; PAM type: NRG; PAM sequence: GGG
gcgcctactgtgtggcgggc

SEQ ID NO: 34684 - DNA, 20 bp, Artificial Sequence
  Description of Artificial Sequence: Synthetic oligonucleotide
  Target: ATXN2; (-) strand; PAM type: NRG; PAM sequence: CGG
agcgcctactgtgtggcggg

SEQ ID NO: 34685 - DNA, 20 bp, Artificial Sequence
  Description of Artificial Sequence: Synthetic oligonucleotide
  Target: ATXN2; (-) strand; PAM type: NRG; PAM sequence: GGG
tggagcgcctactgtgtggc

SEQ ID NO: 34686 - DNA, 20 bp, Artificial Sequence
  Description of Artificial Sequence: Synthetic oligonucleotide
  Target: ATXN2; (-) strand; PAM type: NRG; PAM sequence: CGG
ctggagcgcctactgtgtgg

SEQ ID NO: 34687 - DNA, 20 bp, Artificial Sequence
  Description of Artificial Sequence: Synthetic oligonucleotide
  Target: ATXN2; (-) strand; PAM type: NRG; PAM sequence: TGG
ccactggagcgcctactgtg

SEQ ID NO: 34688 - DNA, 20 bp, Artificial Sequence
  Description of Artificial Sequence: Synthetic oligonucleotide
  Target: ATXN2; (-) strand; PAM type: NRG; PAM sequence: GAG
gtagatgccccgagccactg

SEQ ID NO: 34689 - DNA, 20 bp, Artificial Sequence
  Description of Artificial Sequence: Synthetic oligonucleotide
  Target: ATXN2; (-) strand; PAM type: NRG; PAM sequence: TGG
tggtagatgccccgagccac

SEQ ID NO: 34690 - DNA, 20 bp, Artificial Sequence
  Description of Artificial Sequence: Synthetic oligonucleotide
  Target: ATXN2; (-) strand; PAM type: NRG; PAM sequence: GAG
gcctgcctggtagatgcccc

SEQ ID NO: 34691 - DNA, 20 bp, Artificial Sequence
  Description of Artificial Sequence: Synthetic oligonucleotide
  Target: ATXN2; (-) strand; PAM type: NRG; PAM sequence: TAG
ggacagcgcggcctgcctgg

SEQ ID NO: 34692 - DNA, 20 bp, Artificial Sequence
  Description of Artificial Sequence: Synthetic oligonucleotide
  Target: ATXN2; (-) strand; PAM type: NRG; PAM sequence: TGG
gcaggacagcgcggcctgcc

SEQ ID NO: 34693 - DNA, 20 bp, Artificial Sequence
  Description of Artificial Sequence: Synthetic oligonucleotide
  Target: ATXN2; (-) strand; PAM type: NRG; PAM sequence: CGG
cccggcagggcaggacagcg

SEQ ID NO: 34694 - DNA, 20 bp, Artificial Sequence
  Description of Artificial Sequence: Synthetic oligonucleotide
  Target: ATXN2; (-) strand; PAM type: NRG; PAM sequence: CAG
ccagccccggcagggcagga

SEQ ID NO: 34695 - DNA, 20 bp, Artificial Sequence
  Description of Artificial Sequence: Synthetic oligonucleotide
  Target: ATXN2; (-) strand; PAM type: NRG; PAM sequence: AGG
cactccagccccggcagggc

SEQ ID NO: 34696 - DNA, 20 bp, Artificial Sequence
  Description of Artificial Sequence: Synthetic oligonucleotide
  Target: ATXN2; (-) strand; PAM type: NRG; PAM sequence: CAG
ccactccagccccggcaggg

SEQ ID NO: 34697 - DNA, 20 bp, Artificial Sequence
  Description of Artificial Sequence: Synthetic oligonucleotide
  Target: ATXN2; (-) strand; PAM type: NRG; PAM sequence: GGG
gctccactccagccccggca

SEQ ID NO: 34698 - DNA, 20 bp, Artificial Sequence
  Description of Artificial Sequence: Synthetic oligonucleotide
  Target: ATXN2; (-) strand; PAM type: NRG; PAM sequence: AGG
tgctccactccagccccggc

SEQ ID NO: 34699 - DNA, 20 bp, Artificial Sequence
  Description of Artificial Sequence: Synthetic oligonucleotide
  Target: ATXN2; (-) strand; PAM type: NRG; PAM sequence: CAG
ttgctccactccagccccgg

SEQ ID NO: 34700 - DNA, 20 bp, Artificial Sequence
  Description of Artificial Sequence: Synthetic oligonucleotide
  Target: ATXN2; (-) strand; PAM type: NRG; PAM sequence: CGG
gggttgctccactccagccc

SEQ ID NO: 34701 - DNA, 20 bp, Artificial Sequence
  Description of Artificial Sequence: Synthetic oligonucleotide
  Target: ATXN2; (-) strand; PAM type: NRG; PAM sequence: CAG
cccggagggttgctccactc

SEQ ID NO: 34702 - DNA, 20 bp, Artificial Sequence
  Description of Artificial Sequence: Synthetic oligonucleotide
  Target: ATXN2; (-) strand; PAM type: NRG; PAM sequence: GGG
cagatgtgggtggccccgga

SEQ ID NO: 34703 - DNA, 20 bp, Artificial Sequence
  Description of Artificial Sequence: Synthetic oligonucleotide
  Target: ATXN2; (-) strand; PAM type: NRG; PAM sequence: AGG
ccagatgtgggtggccccgg

SEQ ID NO: 34704 - DNA, 20 bp, Artificial Sequence
  Description of Artificial Sequence: Synthetic oligonucleotide
  Target: ATXN2; (-) strand; PAM type: NRG; PAM sequence: GAG
cccagatgtgggtggccccg

SEQ ID NO: 34705 - DNA, 20 bp, Artificial Sequence
  Description of Artificial Sequence: Synthetic oligonucleotide
  Target: ATXN2; (-) strand; PAM type: NRG; PAM sequence: CGG
tacccagatgtgggtggccc

SEQ ID NO: 34706 - DNA, 20 bp, Artificial Sequence
  Description of Artificial Sequence: Synthetic oligonucleotide
  Target: ATXN2; (-) strand; PAM type: NRG; PAM sequence: TGG
aaaaggtacccagatgtggg

SEQ ID NO: 34707 - DNA, 20 bp, Artificial Sequence
  Description of Artificial Sequence: Synthetic oligonucleotide
  Target: ATXN2; (-) strand; PAM type: NRG; PAM sequence: GGG
gggaaaaggtacccagatgt

SEQ ID NO: 34708 - DNA, 20 bp, Artificial Sequence
  Description of Artificial Sequence: Synthetic oligonucleotide
  Target: ATXN2; (-) strand; PAM type: NRG; PAM sequence: TGG
ggggaaaaggtacccagatg

SEQ ID NO: 34709 - DNA, 20 bp, Artificial Sequence
  Description of Artificial Sequence: Synthetic oligonucleotide
  Target: ATXN2; (-) strand; PAM type: NRG; PAM sequence: CAG
aaaagtggggaaaaggtacc

SEQ ID NO: 34710 - DNA, 20 bp, Artificial Sequence
  Description of Artificial Sequence: Synthetic oligonucleotide
  Target: ATXN2; (-) strand; PAM type: NRG; PAM sequence: AGG
gggtggaaaaagtggggaaa

SEQ ID NO: 34711 - DNA, 20 bp, Artificial Sequence
  Description of Artificial Sequence: Synthetic oligonucleotide
  Target: ATXN2; (-) strand; PAM type: NRG; PAM sequence: AAG
ggggtggaaaaagtggggaa

SEQ ID NO: 34712 - DNA, 20 bp, Artificial Sequence
  Description of Artificial Sequence: Synthetic oligonucleotide
  Target: ATXN2; (-) strand; PAM type: NRG; PAM sequence: GGG
cggctggggtggaaaaagtg

SEQ ID NO: 34713 - DNA, 20 bp, Artificial Sequence
  Description of Artificial Sequence: Synthetic oligonucleotide
  Target: ATXN2; (-) strand; PAM type: NRG; PAM sequence: GGG
gcggctggggtggaaaaagt

SEQ ID NO: 34714 - DNA, 20 bp, Artificial Sequence
  Description of Artificial Sequence: Synthetic oligonucleotide
  Target: ATXN2; (-) strand; PAM type: NRG; PAM sequence: TGG
cgcggctggggtggaaaaag

SEQ ID NO: 34715 - DNA, 20 bp, Artificial Sequence
  Description of Artificial Sequence: Synthetic oligonucleotide
  Target: ATXN2; (-) strand; PAM type: NRG; PAM sequence: AAG
gtgcgcggctggggtggaaa

SEQ ID NO: 34716 - DNA, 20 bp, Artificial Sequence
  Description of Artificial Sequence: Synthetic oligonucleotide
  Target: ATXN2; (-) strand; PAM type: NRG; PAM sequence: TGG
gtgactgtgcgcggctgggg

SEQ ID NO: 34717 - DNA, 20 bp, Artificial Sequence
  Description of Artificial Sequence: Synthetic oligonucleotide
  Target: ATXN2; (-) strand; PAM type: NRG; PAM sequence: GGG
ctggtgactgtgcgcggctg

SEQ ID NO: 34718 - DNA, 20 bp, Artificial Sequence
  Description of Artificial Sequence: Synthetic oligonucleotide
  Target: ATXN2; (-) strand; PAM type: NRG; PAM sequence: GGG
tctggtgactgtgcgcggct

SEQ ID NO: 34719 - DNA, 20 bp, Artificial Sequence
  Description of Artificial Sequence: Synthetic oligonucleotide
  Target: ATXN2; (-) strand; PAM type: NRG; PAM sequence: TGG
ttctggtgactgtgcgcggc

SEQ ID NO: 34720 - DNA, 20 bp, Artificial Sequence
  Description of Artificial Sequence: Synthetic oligonucleotide
  Target: ATXN2; (-) strand; PAM type: NRG; PAM sequence: CGG
agttttctggtgactgtgcg

SEQ ID NO: 34721 - DNA, 20 bp, Artificial Sequence
  Description of Artificial Sequence: Synthetic oligonucleotide
  Target: ATXN2; (-) strand; PAM type: NRG; PAM sequence: TGG
agatacctaaaagagttttc

SEQ ID NO: 34722 - DNA, 20 bp, Artificial Sequence
  Description of Artificial Sequence: Synthetic oligonucleotide
  Target: ATXN2; (-) strand; PAM type: NRG; PAM sequence: GAG
tgaaggtcagatacctaaaa

SEQ ID NO: 34723 - DNA, 20 bp, Artificial Sequence
  Description of Artificial Sequence: Synthetic oligonucleotide
  Target: ATXN2; (-) strand; PAM type: NRG; PAM sequence: AAG
aatgaaggtcagatacctaa

SEQ ID NO: 34724 - DNA, 20 bp, Artificial Sequence
  Description of Artificial Sequence: Synthetic oligonucleotide
  Target: ATXN2; (-) strand; PAM type: NRG; PAM sequence: CAG
acataggttcaaatgaaggt

SEQ ID NO: 34725 - DNA, 20 bp, Artificial Sequence
  Description of Artificial Sequence: Synthetic oligonucleotide
  Target: ATXN2; (-) strand; PAM type: NRG; PAM sequence: AGG
gggaacataggttcaaatga

SEQ ID NO: 34726 - DNA, 20 bp, Artificial Sequence
  Description of Artificial Sequence: Synthetic oligonucleotide
  Target: ATXN2; (-) strand; PAM type: NRG; PAM sequence: AAG
agggaacataggttcaaatg

SEQ ID NO: 34727 - DNA, 20 bp, Artificial Sequence
  Description of Artificial Sequence: Synthetic oligonucleotide
  Target: ATXN2; (-) strand; PAM type: NRG; PAM sequence: AGG
aagttcaagtgagggaacat

SEQ ID NO: 34728 - DNA, 20 bp, Artificial Sequence
  Description of Artificial Sequence: Synthetic oligonucleotide
  Target: ATXN2; (-) strand; PAM type: NRG; PAM sequence: TAG
gaagttcaagtgagggaaca

SEQ ID NO: 34729 - DNA, 20 bp, Artificial Sequence
  Description of Artificial Sequence: Synthetic oligonucleotide
  Target: ATXN2; (-) strand; PAM type: NRG; PAM sequence: GGG
ggaaaaagaagttcaagtga

SEQ ID NO: 34730 - DNA, 20 bp, Artificial Sequence
  Description of Artificial Sequence: Synthetic oligonucleotide
  Target: ATXN2; (-) strand; PAM type: NRG; PAM sequence: AGG
aggaaaaagaagttcaagtg

SEQ ID NO: 34731 - DNA, 20 bp, Artificial Sequence
  Description of Artificial Sequence: Synthetic oligonucleotide
  Target: ATXN2; (-) strand; PAM type: NRG; PAM sequence: GAG
gaggaaaaagaagttcaagt

SEQ ID NO: 34732 - DNA, 20 bp, Artificial Sequence
  Description of Artificial Sequence: Synthetic oligonucleotide
  Target: ATXN2; (-) strand; PAM type: NRG; PAM sequence: AAG
gaatgaggaaaaagaagttc

SEQ ID NO: 34733 - DNA, 20 bp, Artificial Sequence
  Description of Artificial Sequence: Synthetic oligonucleotide
  Target: ATXN2; (-) strand; PAM type: NRG; PAM sequence: AAG
tctcatgaatgaggaaaaag

SEQ ID NO: 34734 - DNA, 20 bp, Artificial Sequence
  Description of Artificial Sequence: Synthetic oligonucleotide
  Target: ATXN2; (-) strand; PAM type: NRG; PAM sequence: AAG
gaatctcatgaatgaggaaa

SEQ ID NO: 34735 - DNA, 20 bp, Artificial Sequence
  Description of Artificial Sequence: Synthetic oligonucleotide
  Target: ATXN2; (-) strand; PAM type: NRG; PAM sequence: AGG
cctttagaatctcatgaatg

SEQ ID NO: 34736 - DNA, 20 bp, Artificial Sequence
  Description of Artificial Sequence: Synthetic oligonucleotide
  Target: ATXN2; (-) strand; PAM type: NRG; PAM sequence: GAG
tcctttagaatctcatgaat

SEQ ID NO: 34737 - DNA, 20 bp, Artificial Sequence
  Description of Artificial Sequence: Synthetic oligonucleotide
  Target: ATXN2; (-) strand; PAM type: NRG; PAM sequence: TAG
ccaatcccatatatttcctt

SEQ ID NO: 34738 - DNA, 20 bp, Artificial Sequence
  Description of Artificial Sequence: Synthetic oligonucleotide
  Target: ATXN2; (-) strand; PAM type: NRG; PAM sequence: CAG
cccattatccgtagttctac

SEQ ID NO: 34739 - DNA, 20 bp, Artificial Sequence
  Description of Artificial Sequence: Synthetic oligonucleotide
  Target: ATXN2; (-) strand; PAM type: NRG; PAM sequence: TAG
gagggagatcccattatccg

SEQ ID NO: 34740 - DNA, 20 bp, Artificial Sequence
  Description of Artificial Sequence: Synthetic oligonucleotide
  Target: ATXN2; (-) strand; PAM type: NRG; PAM sequence: GAG
cggctctgtctctaccgagg

SEQ ID NO: 34741 - DNA, 20 bp, Artificial Sequence
  Description of Artificial Sequence: Synthetic oligonucleotide
  Target: ATXN2; (-) strand; PAM type: NRG; PAM sequence: GGG
gtcggctctgtctctaccga

SEQ ID NO: 34742 - DNA, 20 bp, Artificial Sequence
  Description of Artificial Sequence: Synthetic oligonucleotide
  Target: ATXN2; (-) strand; PAM type: NRG; PAM sequence: AGG
ggtcggctctgtctctaccg

SEQ ID NO: 34743 - DNA, 20 bp, Artificial Sequence
  Description of Artificial Sequence: Synthetic oligonucleotide
  Target: ATXN2; (-) strand; PAM type: NRG; PAM sequence: GAG
aggtcggctctgtctctacc

SEQ ID NO: 34744 - DNA, 20 bp, Artificial Sequence
  Description of Artificial Sequence: Synthetic oligonucleotide
  Target: ATXN2; (-) strand; PAM type: NRG; PAM sequence: CGG
ttcgcacattgttttgaggt

SEQ ID NO: 34745 - DNA, 20 bp, Artificial Sequence
  Description of Artificial Sequence: Synthetic oligonucleotide
  Target: ATXN2; (-) strand; PAM type: NRG; PAM sequence: AGG
aaagttcgcacattgttttg

SEQ ID NO: 34746 - DNA, 20 bp, Artificial Sequence
  Description of Artificial Sequence: Synthetic oligonucleotide
  Target: ATXN2; (-) strand; PAM type: NRG; PAM sequence: GAG
taaagttcgcacattgtttt

SEQ ID NO: 34747 - DNA, 20 bp, Artificial Sequence
  Description of Artificial Sequence: Synthetic oligonucleotide
  Target: ATXN2; (-) strand; PAM type: NRG; PAM sequence: AAG
tctaaagggtccaaggtcta

SEQ ID NO: 34748 - DNA, 20 bp, Artificial Sequence
  Description of Artificial Sequence: Synthetic oligonucleotide
  Target: ATXN2; (-) strand; PAM type: NRG; PAM sequence: AGG
taaaacttctaaagggtcca

SEQ ID NO: 34749 - DNA, 20 bp, Artificial Sequence
  Description of Artificial Sequence: Synthetic oligonucleotide
  Target: ATXN2; (-) strand; PAM type: NRG; PAM sequence: AAG
ttaaaacttctaaagggtcc

SEQ ID NO: 34750 - DNA, 20 bp, Artificial Sequence
  Description of Artificial Sequence: Synthetic oligonucleotide
  Target: ATXN2; (-) strand; PAM type: NRG; PAM sequence: GGG
gttaaattaaaacttctaaa

SEQ ID NO: 34751 - DNA, 20 bp, Artificial Sequence
  Description of Artificial Sequence: Synthetic oligonucleotide
  Target: ATXN2; (-) strand; PAM type: NRG; PAM sequence: AGG
agttaaattaaaacttctaa

SEQ ID NO: 34752 - DNA, 20 bp, Artificial Sequence
  Description of Artificial Sequence: Synthetic oligonucleotide
  Target: ATXN2; (-) strand; PAM type: NRG; PAM sequence: AAG
aagttaaattaaaacttcta

SEQ ID NO: 34753 - DNA, 20 bp, Artificial Sequence
  Description of Artificial Sequence: Synthetic oligonucleotide
  Target: ATXN2; (-) strand; PAM type: NRG; PAM sequence: AAG
gtctactgtgctggctgggt

SEQ ID NO: 34754 - DNA, 20 bp, Artificial Sequence
  Description of Artificial Sequence: Synthetic oligonucleotide
  Target: ATXN2; (-) strand; PAM type: NRG; PAM sequence: GGG
aagagtctactgtgctggct

SEQ ID NO: 34755 - DNA, 20 bp, Artificial Sequence
  Description of Artificial Sequence: Synthetic oligonucleotide
  Target: ATXN2; (-) strand; PAM type: NRG; PAM sequence: TGG
aaagagtctactgtgctggc

SEQ ID NO: 34756 - DNA, 20 bp, Artificial Sequence
  Description of Artificial Sequence: Synthetic oligonucleotide
  Target: ATXN2; (-) strand; PAM type: NRG; PAM sequence: TGG
ttaaaaagagtctactgtgc

SEQ ID NO: 34757 - DNA, 20 bp, Artificial Sequence
  Description of Artificial Sequence: Synthetic oligonucleotide
  Target: ATXN2; (-) strand; PAM type: NRG; PAM sequence: GAG
actgcaacacattttaaaaa

SEQ ID NO: 34758 - DNA, 20 bp, Artificial Sequence
  Description of Artificial Sequence: Synthetic oligonucleotide
  Target: ATXN2; (-) strand; PAM type: NRG; PAM sequence: AAG
taactgcaacacattttaaa

SEQ ID NO: 34759 - DNA, 20 bp, Artificial Sequence
  Description of Artificial Sequence: Synthetic oligonucleotide
  Target: ATXN2; (-) strand; PAM type: NRG; PAM sequence: CAG
acctactttctacttgcttc

SEQ ID NO: 34760 - DNA, 20 bp, Artificial Sequence
  Description of Artificial Sequence: Synthetic oligonucleotide
  Target: ATXN2; (-) strand; PAM type: NRG; PAM sequence: AAG
ctgctcaaaaaaaaaaaaaa

SEQ ID NO: 34761 - DNA, 20 bp, Artificial Sequence
  Description of Artificial Sequence: Synthetic oligonucleotide
  Target: ATXN2; (-) strand; PAM type: NRG; PAM sequence: TAG
catttcactttaaaaaacaa

SEQ ID NO: 34762 - DNA, 20 bp, Artificial Sequence
  Description of Artificial Sequence: Synthetic oligonucleotide
  Target: ATXN2; (-) strand; PAM type: NRG; PAM sequence: AAG
tcttcccctattatttcctg

SEQ ID NO: 34763 - DNA, 20 bp, Artificial Sequence
  Description of Artificial Sequence: Synthetic oligonucleotide
  Target: ATXN2; (-) strand; PAM type: NRG; PAM sequence: TGG
taggacattgaggggaattt

SEQ ID NO: 34764 - DNA, 20 bp, Artificial Sequence
  Description of Artificial Sequence: Synthetic oligonucleotide
  Target: ATXN2; (-) strand; PAM type: NRG; PAM sequence: GGG
gacagttctaggacattgag

SEQ ID NO: 34765 - DNA, 20 bp, Artificial Sequence
  Description of Artificial Sequence: Synthetic oligonucleotide
  Target: ATXN2; (-) strand; PAM type: NRG; PAM sequence: GGG
ggacagttctaggacattga

SEQ ID NO: 34766 - DNA, 20 bp, Artificial Sequence
  Description of Artificial Sequence: Synthetic oligonucleotide
  Target: ATXN2; (-) strand; PAM type: NRG; PAM sequence: AGG
tggacagttctaggacattg

SEQ ID NO: 34767 - DNA, 20 bp, Artificial Sequence
  Description of Artificial Sequence: Synthetic oligonucleotide
  Target: ATXN2; (-) strand; PAM type: NRG; PAM sequence: GAG
ctggacagttctaggacatt

SEQ ID NO: 34768 - DNA, 20 bp, Artificial Sequence
  Description of Artificial Sequence: Synthetic oligonucleotide
  Target: ATXN2; (-) strand; PAM type: NRG; PAM sequence: AGG
acctttatctggacagttct

SEQ ID NO: 34769 - DNA, 20 bp, Artificial Sequence
  Description of Artificial Sequence: Synthetic oligonucleotide
  Target: ATXN2; (-) strand; PAM type: NRG; PAM sequence: TAG
tacctttatctggacagttc

SEQ ID NO: 34770 - DNA, 20 bp, Artificial Sequence
  Description of Artificial Sequence: Synthetic oligonucleotide
  Target: ATXN2; (-) strand; PAM type: NRG; PAM sequence: CAG
agtctttacctttatctgga

SEQ ID NO: 34771 - DNA, 20 bp, Artificial Sequence
  Description of Artificial Sequence: Synthetic oligonucleotide
  Target: ATXN2; (-) strand; PAM type: NRG; PAM sequence: TGG
tctaagtctttacctttatc

SEQ ID NO: 34772 - DNA, 20 bp, Artificial Sequence
  Description of Artificial Sequence: Synthetic oligonucleotide
  Target: ATXN2; (-) strand; PAM type: NRG; PAM sequence: AAG
atcattctccacgtttatct

SEQ ID NO: 34773 - DNA, 20 bp, Artificial Sequence
  Description of Artificial Sequence: Synthetic oligonucleotide
  Target: ATXN2; (-) strand; PAM type: NRG; PAM sequence: TGG
gttggactactgaaaactgc

SEQ ID NO: 34774 - DNA, 20 bp, Artificial Sequence
  Description of Artificial Sequence: Synthetic oligonucleotide
  Target: ATXN2; (-) strand; PAM type: NRG; PAM sequence: TGG
tctaggaggttaatttcagt

SEQ ID NO: 34775 - DNA, 20 bp, Artificial Sequence
  Description of Artificial Sequence: Synthetic oligonucleotide
  Target: ATXN2; (-) strand; PAM type: NRG; PAM sequence: CAG
actatctaggaggttaattt

SEQ ID NO: 34776 - DNA, 20 bp, Artificial Sequence
  Description of Artificial Sequence: Synthetic oligonucleotide
  Target: ATXN2; (-) strand; PAM type: NRG; PAM sequence: AGG
ttttgcctggactatctagg

SEQ ID NO: 34777 - DNA, 20 bp, Artificial Sequence
  Description of Artificial Sequence: Synthetic oligonucleotide
  Target: ATXN2; (-) strand; PAM type: NRG; PAM sequence: GAG
tttttgcctggactatctag

SEQ ID NO: 34778 - DNA, 20 bp, Artificial Sequence
  Description of Artificial Sequence: Synthetic oligonucleotide
  Target: ATXN2; (-) strand; PAM type: NRG; PAM sequence: AGG
catttttgcctggactatct

SEQ ID NO: 34779 - DNA, 20 bp, Artificial Sequence
  Description of Artificial Sequence: Synthetic oligonucleotide
  Target: ATXN2; (-) strand; PAM type: NRG; PAM sequence: TAG
tcatttttgcctggactatc

SEQ ID NO: 34780 - DNA, 20 bp, Artificial Sequence
  Description of Artificial Sequence: Synthetic oligonucleotide
  Target: ATXN2; (-) strand; PAM type: NRG; PAM sequence: TGG
atacaatgatcatttttgcc

SEQ ID NO: 34781 - DNA, 20 bp, Artificial Sequence
  Description of Artificial Sequence: Synthetic oligonucleotide
  Target: ATXN2; (-) strand; PAM type: NRG; PAM sequence: CAG
aaactgatttcctacattgg

SEQ ID NO: 34782 - DNA, 20 bp, Artificial Sequence
  Description of Artificial Sequence: Synthetic oligonucleotide
  Target: ATXN2; (-) strand; PAM type: NRG; PAM sequence: TGG
ataaaactgatttcctacat

SEQ ID NO: 34783 - DNA, 20 bp, Artificial Sequence
  Description of Artificial Sequence: Synthetic oligonucleotide
  Target: ATXN2; (-) strand; PAM type: NRG; PAM sequence: GGG
atctactttttaccttagat

SEQ ID NO: 34784 - DNA, 20 bp, Artificial Sequence
  Description of Artificial Sequence: Synthetic oligonucleotide
  Target: ATXN2; (-) strand; PAM type: NRG; PAM sequence: TGG
gatctactttttaccttaga

SEQ ID NO: 34785 - DNA, 20 bp, Artificial Sequence
  Description of Artificial Sequence: Synthetic oligonucleotide
  Target: ATXN2; (-) strand; PAM type: NRG; PAM sequence: TAG
ccttgatctactttttacct

SEQ ID NO: 34786 - DNA, 20 bp, Artificial Sequence
  Description of Artificial Sequence: Synthetic oligonucleotide
  Target: ATXN2; (-) strand; PAM type: NRG; PAM sequence: TGG
atttttaaagggttttgcaa

SEQ ID NO: 34787 - DNA, 20 bp, Artificial Sequence
  Description of Artificial Sequence: Synthetic oligonucleotide
  Target: ATXN2; (-) strand; PAM type: NRG; PAM sequence: GGG
aggctaggttaatttttaaa

SEQ ID NO: 34788 - DNA, 20 bp, Artificial Sequence
  Description of Artificial Sequence: Synthetic oligonucleotide
  Target: ATXN2; (-) strand; PAM type: NRG; PAM sequence: AGG
taggctaggttaatttttaa

SEQ ID NO: 34789 - DNA, 20 bp, Artificial Sequence
  Description of Artificial Sequence: Synthetic oligonucleotide
  Target: ATXN2; (-) strand; PAM type: NRG; PAM sequence: AAG
ctaggctaggttaattttta

SEQ ID NO: 34790 - DNA, 20 bp, Artificial Sequence
  Description of Artificial Sequence: Synthetic oligonucleotide
  Target: ATXN2; (-) strand; PAM type: NRG; PAM sequence: AGG
ttcaccatgttggctaggct

SEQ ID NO: 34791 - DNA, 20 bp, Artificial Sequence
  Description of Artificial Sequence: Synthetic oligonucleotide
  Target: ATXN2; (-) strand; PAM type: NRG; PAM sequence: TAG
tttcaccatgttggctaggc

SEQ ID NO: 34792 - DNA, 20 bp, Artificial Sequence
  Description of Artificial Sequence: Synthetic oligonucleotide
  Target: ATXN2; (-) strand; PAM type: NRG; PAM sequence: AGG
ggggtttcaccatgttggct

SEQ ID NO: 34793 - DNA, 20 bp, Artificial Sequence
  Description of Artificial Sequence: Synthetic oligonucleotide
  Target: ATXN2; (-) strand; PAM type: NRG; PAM sequence: TAG
cggggtttcaccatgttggc

SEQ ID NO: 34794 - DNA, 20 bp, Artificial Sequence
  Description of Artificial Sequence: Synthetic oligonucleotide
  Target: ATXN2; (-) strand; PAM type: NRG; PAM sequence: TGG
gagacggggtttcaccatgt

SEQ ID NO: 34795 - DNA, 20 bp, Artificial Sequence
  Description of Artificial Sequence: Synthetic oligonucleotide
  Target: ATXN2; (-) strand; PAM type: NRG; PAM sequence: GGG
ttatatttttggtagagacg

SEQ ID NO: 34796 - DNA, 20 bp, Artificial Sequence
  Description of Artificial Sequence: Synthetic oligonucleotide
  Target: ATXN2; (-) strand; PAM type: NRG; PAM sequence: GGG
tttatatttttggtagagac

SEQ ID NO: 34797 - DNA, 20 bp, Artificial Sequence
  Description of Artificial Sequence: Synthetic oligonucleotide
  Target: ATXN2; (-) strand; PAM type: NRG; PAM sequence: CGG
ttttatatttttggtagaga

SEQ ID NO: 34798 - DNA, 20 bp, Artificial Sequence
  Description of Artificial Sequence: Synthetic oligonucleotide
  Target: ATXN2; (-) strand; PAM type: NRG; PAM sequence: GAG
taatttttatatttttggta

SEQ ID NO: 34799 - DNA, 20 bp, Artificial Sequence
  Description of Artificial Sequence: Synthetic oligonucleotide
  Target: ATXN2; (-) strand; PAM type: NRG; PAM sequence: TAG
gctaatttttatatttttgg

SEQ ID NO: 34800 - DNA, 20 bp, Artificial Sequence
  Description of Artificial Sequence: Synthetic oligonucleotide
  Target: ATXN2; (-) strand; PAM type: NRG; PAM sequence: TGG
ccggctaatttttatatttt

SEQ ID NO: 34801 - DNA, 20 bp, Artificial Sequence
  Description of Artificial Sequence: Synthetic oligonucleotide
  Target: ATXN2; (-) strand; PAM type: NRG; PAM sequence: CGG
caggcgcccaccaccacacc

SEQ ID NO: 34802 - DNA, 20 bp, Artificial Sequence
  Description of Artificial Sequence: Synthetic oligonucleotide
  Target: ATXN2; (-) strand; PAM type: NRG; PAM sequence: AGG
tcccgagtagctgggattac

SEQ ID NO: 34803 - DNA, 20 bp, Artificial Sequence
  Description of Artificial Sequence: Synthetic oligonucleotide
  Target: ATXN2; (-) strand; PAM type: NRG; PAM sequence: CAG
ctcccgagtagctgggatta

SEQ ID NO: 34804 - DNA, 20 bp, Artificial Sequence
  Description of Artificial Sequence: Synthetic oligonucleotide
  Target: ATXN2; (-) strand; PAM type: NRG; PAM sequence: GGG
tatcagcctcccgagtagct

SEQ ID NO: 34805 - DNA, 20 bp, Artificial Sequence
  Description of Artificial Sequence: Synthetic oligonucleotide
  Target: ATXN2; (-) strand; PAM type: NRG; PAM sequence: TGG
gtatcagcctcccgagtagc

SEQ ID NO: 34806 - DNA, 20 bp, Artificial Sequence
  Description of Artificial Sequence: Synthetic oligonucleotide
  Target: ATXN2; (-) strand; PAM type: NRG; PAM sequence: TAG
tcctgtatcagcctcccgag

SEQ ID NO: 34807 - DNA, 20 bp, Artificial Sequence
  Description of Artificial Sequence: Synthetic oligonucleotide
  Target: ATXN2; (-) strand; PAM type: NRG; PAM sequence: GAG
ttctcctgtatcagcctccc

SEQ ID NO: 34808 - DNA, 20 bp, Artificial Sequence
  Description of Artificial Sequence: Synthetic oligonucleotide
  Target: ATXN2; (-) strand; PAM type: NRG; PAM sequence: CAG
ttcaagcaattctcctgtat

SEQ ID NO: 34809 - DNA, 20 bp, Artificial Sequence
  Description of Artificial Sequence: Synthetic oligonucleotide
  Target: ATXN2; (-) strand; PAM type: NRG; PAM sequence: AAG
aacctccacctcccggattc

SEQ ID NO: 34810 - DNA, 20 bp, Artificial Sequence
  Description of Artificial Sequence: Synthetic oligonucleotide
  Target: ATXN2; (-) strand; PAM type: NRG; PAM sequence: CGG
tgactgcaacctccacctcc

SEQ ID NO: 34811 - DNA, 20 bp, Artificial Sequence
  Description of Artificial Sequence: Synthetic oligonucleotide
  Target: ATXN2; (-) strand; PAM type: NRG; PAM sequence: CGG
caggctggagtgcatgatct

SEQ ID NO: 34812 - DNA, 20 bp, Artificial Sequence
  Description of Artificial Sequence: Synthetic oligonucleotide
  Target: ATXN2; (-) strand; PAM type: NRG; PAM sequence: GAG
tcgctctgtcgcccaggctg

SEQ ID NO: 34813 - DNA, 20 bp, Artificial Sequence
  Description of Artificial Sequence: Synthetic oligonucleotide
  Target: ATXN2; (-) strand; PAM type: NRG; PAM sequence: TGG
tctcgctctgtcgcccaggc

SEQ ID NO: 34814 - DNA, 20 bp, Artificial Sequence
  Description of Artificial Sequence: Synthetic oligonucleotide
  Target: ATXN2; (-) strand; PAM type: NRG; PAM sequence: AGG
ggagtctcgctctgtcgccc

SEQ ID NO: 34815 - DNA, 20 bp, Artificial Sequence
  Description of Artificial Sequence: Synthetic oligonucleotide
  Target: ATXN2; (-) strand; PAM type: NRG; PAM sequence: CAG
cggagtctcgctctgtcgcc

SEQ ID NO: 34816 - DNA, 20 bp, Artificial Sequence
  Description of Artificial Sequence: Synthetic oligonucleotide
  Target: ATXN2; (-) strand; PAM type: NRG; PAM sequence: GAG
tttatttattttttgagacg

SEQ ID NO: 34817 - DNA, 20 bp, Artificial Sequence
  Description of Artificial Sequence: Synthetic oligonucleotide
  Target: ATXN2; (-) strand; PAM type: NRG; PAM sequence: CGG
tatttatttattttttgaga

SEQ ID NO: 34818 - DNA, 20 bp, Artificial Sequence
  Description of Artificial Sequence: Synthetic oligonucleotide
  Target: ATXN2; (-) strand; PAM type: NRG; PAM sequence: GAG
tatttatttatttatttttt

SEQ ID NO: 34819 - DNA, 20 bp, Artificial Sequence
  Description of Artificial Sequence: Synthetic oligonucleotide
  Target: ATXN2; (-) strand; PAM type: NRG; PAM sequence: AGG
ttttagttccagtttccttt

SEQ ID NO: 34820 - DNA, 20 bp, Artificial Sequence
  Description of Artificial Sequence: Synthetic oligonucleotide
  Target: ATXN2; (-) strand; PAM type: NRG; PAM sequence: TAG
tttttagttccagtttcctt

SEQ ID NO: 34821 - DNA, 20 bp, Artificial Sequence
  Description of Artificial Sequence: Synthetic oligonucleotide
  Target: ATXN2; (-) strand; PAM type: NRG; PAM sequence: CAG
ttcaactggttttttagttc

SEQ ID NO: 34822 - DNA, 20 bp, Artificial Sequence
  Description of Artificial Sequence: Synthetic oligonucleotide
  Target: ATXN2; (-) strand; PAM type: NRG; PAM sequence: TAG
ttttgtttcaactggttttt

SEQ ID NO: 34823 - DNA, 20 bp, Artificial Sequence
  Description of Artificial Sequence: Synthetic oligonucleotide
  Target: ATXN2; (-) strand; PAM type: NRG; PAM sequence: TGG
aggtatttttttgtttcaac

SEQ ID NO: 34824 - DNA, 20 bp, Artificial Sequence
  Description of Artificial Sequence: Synthetic oligonucleotide
  Target: ATXN2; (-) strand; PAM type: NRG; PAM sequence: AGG
cctgtaccacagccgggtac

SEQ ID NO: 34825 - DNA, 20 bp, Artificial Sequence
  Description of Artificial Sequence: Synthetic oligonucleotide
  Target: ATXN2; (-) strand; PAM type: NRG; PAM sequence: CAG
gcctgtaccacagccgggta

SEQ ID NO: 34826 - DNA, 20 bp, Artificial Sequence
  Description of Artificial Sequence: Synthetic oligonucleotide
  Target: ATXN2; (-) strand; PAM type: NRG; PAM sequence: GGG
ccctggcctgtaccacagcc

SEQ ID NO: 34827 - DNA, 20 bp, Artificial Sequence
  Description of Artificial Sequence: Synthetic oligonucleotide
  Target: ATXN2; (-) strand; PAM type: NRG; PAM sequence: CGG
gccctggcctgtaccacagc

SEQ ID NO: 34828 - DNA, 20 bp, Artificial Sequence
  Description of Artificial Sequence: Synthetic oligonucleotide
  Target: ATXN2; (-) strand; PAM type: NRG; PAM sequence: CAG
agcagccctggcctgtacca

SEQ ID NO: 34829 - DNA, 20 bp, Artificial Sequence
  Description of Artificial Sequence: Synthetic oligonucleotide
  Target: ATXN2; (-) strand; PAM type: NRG; PAM sequence: TGG
gcttcccctcacagcagccc

SEQ ID NO: 34830 - DNA, 20 bp, Artificial Sequence
  Description of Artificial Sequence: Synthetic oligonucleotide
  Target: ATXN2; (-) strand; PAM type: NRG; PAM sequence: CAG
ccaggagcttcccctcacag

SEQ ID NO: 34831 - DNA, 20 bp, Artificial Sequence
  Description of Artificial Sequence: Synthetic oligonucleotide
  Target: ATXN2; (-) strand; PAM type: NRG; PAM sequence: CAG
tctccaggagcttcccctca

SEQ ID NO: 34832 - DNA, 20 bp, Artificial Sequence
  Description of Artificial Sequence: Synthetic oligonucleotide
  Target: ATXN2; (-) strand; PAM type: NRG; PAM sequence: GAG
ccccatgtcaccctctccag

SEQ ID NO: 34833 - DNA, 20 bp, Artificial Sequence
  Description of Artificial Sequence: Synthetic oligonucleotide
  Target: ATXN2; (-) strand; PAM type: NRG; PAM sequence: AGG
tgccccatgtcaccctctcc

SEQ ID NO: 34834 - DNA, 20 bp, Artificial Sequence
  Description of Artificial Sequence: Synthetic oligonucleotide
  Target: ATXN2; (-) strand; PAM type: NRG; PAM sequence: CAG
ctgccccatgtcaccctctc

SEQ ID NO: 34835 - DNA, 20 bp, Artificial Sequence
  Description of Artificial Sequence: Synthetic oligonucleotide
  Target: ATXN2; (-) strand; PAM type: NRG; PAM sequence: GGG
cctcatgcccatgctcattt

SEQ ID NO: 34836 - DNA, 20 bp, Artificial Sequence
  Description of Artificial Sequence: Synthetic oligonucleotide
  Target: ATXN2; (-) strand; PAM type: NRG; PAM sequence: TGG
tcctcatgcccatgctcatt

SEQ ID NO: 34837 - DNA, 20 bp, Artificial Sequence
  Description of Artificial Sequence: Synthetic oligonucleotide
  Target: ATXN2; (-) strand; PAM type: NRG; PAM sequence: AGG
cacctggagcgtttctcccc

SEQ ID NO: 34838 - DNA, 20 bp, Artificial Sequence
  Description of Artificial Sequence: Synthetic oligonucleotide
  Target: ATXN2; (-) strand; PAM type: NRG; PAM sequence: CAG
ccacctggagcgtttctccc

SEQ ID NO: 34839 - DNA, 20 bp, Artificial Sequence
  Description of Artificial Sequence: Synthetic oligonucleotide
  Target: ATXN2; (-) strand; PAM type: NRG; PAM sequence: GAG
ctcgctgtgccctccacctg

SEQ ID NO: 34840 - DNA, 20 bp, Artificial Sequence
  Description of Artificial Sequence: Synthetic oligonucleotide
  Target: ATXN2; (-) strand; PAM type: NRG; PAM sequence: TGG
ccctcgctgtgccctccacc

SEQ ID NO: 34841 - DNA, 20 bp, Artificial Sequence
  Description of Artificial Sequence: Synthetic oligonucleotide
  Target: ATXN2; (-) strand; PAM type: NRG; PAM sequence: GAG
ttcctcagactcccccctca

SEQ ID NO: 34842 - DNA, 20 bp, Artificial Sequence
  Description of Artificial Sequence: Synthetic oligonucleotide
  Target: ATXN2; (-) strand; PAM type: NRG; PAM sequence: CAG
tgttcctcagactcccccct

SEQ ID NO: 34843 - DNA, 20 bp, Artificial Sequence
  Description of Artificial Sequence: Synthetic oligonucleotide
  Target: ATXN2; (-) strand; PAM type: NRG; PAM sequence: CAG
caggcctccttgctgttcct

SEQ ID NO: 34844 - DNA, 20 bp, Artificial Sequence
  Description of Artificial Sequence: Synthetic oligonucleotide
  Target: ATXN2; (-) strand; PAM type: NRG; PAM sequence: AGG
ttgacgacctgctccattgc

SEQ ID NO: 34845 - DNA, 20 bp, Artificial Sequence
  Description of Artificial Sequence: Synthetic oligonucleotide
  Target: ATXN2; (-) strand; PAM type: NRG; PAM sequence: CAG
attgacgacctgctccattg

SEQ ID NO: 34846 - DNA, 20 bp, Artificial Sequence
  Description of Artificial Sequence: Synthetic oligonucleotide
  Target: ATXN2; (-) strand; PAM type: NRG; PAM sequence: GGG
tattaaagaaagaatataac

SEQ ID NO: 34847 - DNA, 20 bp, Artificial Sequence
  Description of Artificial Sequence: Synthetic oligonucleotide
  Target: ATXN2; (-) strand; PAM type: NRG; PAM sequence: CGG
ctattaaagaaagaatataa

SEQ ID NO: 34848 - DNA, 20 bp, Artificial Sequence
  Description of Artificial Sequence: Synthetic oligonucleotide
  Target: ATXN2; (-) strand; PAM type: NRG; PAM sequence: AAG
gtttgtatttctattaaaga

SEQ ID NO: 34849 - DNA, 20 bp, Artificial Sequence
  Description of Artificial Sequence: Synthetic oligonucleotide
  Target: ATXN2; (-) strand; PAM type: NRG; PAM sequence: AAG
aagtgtttgtatttctatta

SEQ ID NO: 34850 - DNA, 20 bp, Artificial Sequence
  Description of Artificial Sequence: Synthetic oligonucleotide
  Target: ATXN2; (-) strand; PAM type: NRG; PAM sequence: AAG
gtgagccaccgcgccaggcc

SEQ ID NO: 34851 - DNA, 20 bp, Artificial Sequence
  Description of Artificial Sequence: Synthetic oligonucleotide
  Target: ATXN2; (-) strand; PAM type: NRG; PAM sequence: AGG
caggtgtgagccaccgcgcc

SEQ ID NO: 34852 - DNA, 20 bp, Artificial Sequence
  Description of Artificial Sequence: Synthetic oligonucleotide
  Target: ATXN2; (-) strand; PAM type: NRG; PAM sequence: CAG
acaggtgtgagccaccgcgc

SEQ ID NO: 34853 - DNA, 20 bp, Artificial Sequence
  Description of Artificial Sequence: Synthetic oligonucleotide
  Target: ATXN2; (-) strand; PAM type: NRG; PAM sequence: GAG
agtgctgggattacaggtgt

SEQ ID NO: 34854 - DNA, 20 bp, Artificial Sequence
  Description of Artificial Sequence: Synthetic oligonucleotide
  Target: ATXN2; (-) strand; PAM type: NRG; PAM sequence: AGG
tcccagagtgctgggattac

SEQ ID NO: 34855 - DNA, 20 bp, Artificial Sequence
  Description of Artificial Sequence: Synthetic oligonucleotide
  Target: ATXN2; (-) strand; PAM type: NRG; PAM sequence: CAG
ctcccagagtgctgggatta

SEQ ID NO: 34856 - DNA, 20 bp, Artificial Sequence
  Description of Artificial Sequence: Synthetic oligonucleotide
  Target: ATXN2; (-) strand; PAM type: NRG; PAM sequence: GGG
cctcggcctcccagagtgct

SEQ ID NO: 34857 - DNA, 20 bp, Artificial Sequence
  Description of Artificial Sequence: Synthetic oligonucleotide
  Target: ATXN2; (-) strand; PAM type: NRG; PAM sequence: TGG
gcctcggcctcccagagtgc

SEQ ID NO: 34858 - DNA, 20 bp, Artificial Sequence
  Description of Artificial Sequence: Synthetic oligonucleotide
  Target: ATXN2; (-) strand; PAM type: NRG; PAM sequence: GAG
ccatccgcctcggcctccca

SEQ ID NO: 34859 - DNA, 20 bp, Artificial Sequence
  Description of Artificial Sequence: Synthetic oligonucleotide
  Target: ATXN2; (-) strand; PAM type: NRG; PAM sequence: CAG
atccatccgcctcggcctcc

SEQ ID NO: 34860 - DNA, 20 bp, Artificial Sequence
  Description of Artificial Sequence: Synthetic oligonucleotide
  Target: ATXN2; (-) strand; PAM type: NRG; PAM sequence: CGG
ctcaggtgatccatccgcct

SEQ ID NO: 34861 - DNA, 20 bp, Artificial Sequence
  Description of Artificial Sequence: Synthetic oligonucleotide
  Target: ATXN2; (-) strand; PAM type: NRG; PAM sequence: AGG
ggtcttgaactcctgacctc

SEQ ID NO: 34862 - DNA, 20 bp, Artificial Sequence
  Description of Artificial Sequence: Synthetic oligonucleotide
  Target: ATXN2; (-) strand; PAM type: NRG; PAM sequence: CAG
tggtcttgaactcctgacct

SEQ ID NO: 34863 - DNA, 20 bp, Artificial Sequence
  Description of Artificial Sequence: Synthetic oligonucleotide
  Target: ATXN2; (-) strand; PAM type: NRG; PAM sequence: TGG
tttcaccatgttggccacgc

SEQ ID NO: 34864 - DNA, 20 bp, Artificial Sequence
  Description of Artificial Sequence: Synthetic oligonucleotide
  Target: ATXN2; (-) strand; PAM type: NRG; PAM sequence: TGG
gcgatggggtttcaccatgt

SEQ ID NO: 34865 - DNA, 20 bp, Artificial Sequence
  Description of Artificial Sequence: Synthetic oligonucleotide
  Target: ATXN2; (-) strand; PAM type: NRG; PAM sequence: GGG
tcgtatttttagtagcgatg

SEQ ID NO: 34866 - DNA, 20 bp, Artificial Sequence
  Description of Artificial Sequence: Synthetic oligonucleotide
  Target: ATXN2; (-) strand; PAM type: NRG; PAM sequence: GGG
ttcgtatttttagtagcgat

SEQ ID NO: 34867 - DNA, 20 bp, Artificial Sequence
  Description of Artificial Sequence: Synthetic oligonucleotide
  Target: ATXN2; (-) strand; PAM type: NRG; PAM sequence: TGG
tttcgtatttttagtagcga

SEQ ID NO: 34868 - DNA, 20 bp, Artificial Sequence
  Description of Artificial Sequence: Synthetic oligonucleotide
  Target: ATXN2; (-) strand; PAM type: NRG; PAM sequence: TAG
taattttttcgtatttttag

SEQ ID NO: 34869 - DNA, 20 bp, Artificial Sequence
  Description of Artificial Sequence: Synthetic oligonucleotide
  Target: ATXN2; (-) strand; PAM type: NRG; PAM sequence: TAG
agctaattttttcgtatttt

SEQ ID NO: 34870 - DNA, 20 bp, Artificial Sequence
  Description of Artificial Sequence: Synthetic oligonucleotide
  Target: ATXN2; (-) strand; PAM type: NRG; PAM sequence: CAG
cagatgcccaccaccacgcc

SEQ ID NO: 34871 - DNA, 20 bp, Artificial Sequence
  Description of Artificial Sequence: Synthetic oligonucleotide
  Target: ATXN2; (-) strand; PAM type: NRG; PAM sequence: CAG
atcctgcgtagctgagatca

SEQ ID NO: 34872 - DNA, 20 bp, Artificial Sequence
  Description of Artificial Sequence: Synthetic oligonucleotide
  Target: ATXN2; (-) strand; PAM type: NRG; PAM sequence: GAG
cctcagcatcctgcgtagct

SEQ ID NO: 34873 - DNA, 20 bp, Artificial Sequence
  Description of Artificial Sequence: Synthetic oligonucleotide
  Target: ATXN2; (-) strand; PAM type: NRG; PAM sequence: TAG
tcctgcctcagcatcctgcg

SEQ ID NO: 34874 - DNA, 20 bp, Artificial Sequence
  Description of Artificial Sequence: Synthetic oligonucleotide
  Target: ATXN2; (-) strand; PAM type: NRG; PAM sequence: CAG
ttcaagcgattctcctgcct

SEQ ID NO: 34875 - DNA, 20 bp, Artificial Sequence
  Description of Artificial Sequence: Synthetic oligonucleotide
  Target: ATXN2; (-) strand; PAM type: NRG; PAM sequence: AAG
aacctccgcctcctgggttc

SEQ ID NO: 34876 - DNA, 20 bp, Artificial Sequence
  Description of Artificial Sequence: Synthetic oligonucleotide
  Target: ATXN2; (-) strand; PAM type: NRG; PAM sequence: GGG
cactgtaacctccgcctcct

SEQ ID NO: 34877 - DNA, 20 bp, Artificial Sequence
  Description of Artificial Sequence: Synthetic oligonucleotide
  Target: ATXN2; (-) strand; PAM type: NRG; PAM sequence: TGG
tcactgtaacctccgcctcc

SEQ ID NO: 34878 - DNA, 20 bp, Artificial Sequence
  Description of Artificial Sequence: Synthetic oligonucleotide
  Target: ATXN2; (-) strand; PAM type: NRG; PAM sequence: TGG
gagtgcagtggtgccctctt

SEQ ID NO: 34879 - DNA, 20 bp, Artificial Sequence
  Description of Artificial Sequence: Synthetic oligonucleotide
  Target: ATXN2; (-) strand; PAM type: NRG; PAM sequence: TGG
ttgcccaggctggagtgcag

SEQ ID NO: 34880 - DNA, 20 bp, Artificial Sequence
  Description of Artificial Sequence: Synthetic oligonucleotide
  Target: ATXN2; (-) strand; PAM type: NRG; PAM sequence: CAG
ttgttgcccaggctggagtg

SEQ ID NO: 34881 - DNA, 20 bp, Artificial Sequence
  Description of Artificial Sequence: Synthetic oligonucleotide
  Target: ATXN2; (-) strand; PAM type: NRG; PAM sequence: GAG
cgctcttgttgcccaggctg

SEQ ID NO: 34882 - DNA, 20 bp, Artificial Sequence
  Description of Artificial Sequence: Synthetic oligonucleotide
  Target: ATXN2; (-) strand; PAM type: NRG; PAM sequence: TGG
ttcgctcttgttgcccaggc

SEQ ID NO: 34883 - DNA, 20 bp, Artificial Sequence
  Description of Artificial Sequence: Synthetic oligonucleotide
  Target: ATXN2; (-) strand; PAM type: NRG; PAM sequence: AGG
aagtttcgctcttgttgccc

SEQ ID NO: 34884 - DNA, 20 bp, Artificial Sequence
  Description of Artificial Sequence: Synthetic oligonucleotide
  Target: ATXN2; (-) strand; PAM type: NRG; PAM sequence: CAG
aaagtttcgctcttgttgcc

SEQ ID NO: 34885 - DNA, 20 bp, Artificial Sequence
  Description of Artificial Sequence: Synthetic oligonucleotide
  Target: ATXN2; (-) strand; PAM type: NRG; PAM sequence: AAG
atttttattttttttagata

SEQ ID NO: 34886 - DNA, 20 bp, Artificial Sequence
  Description of Artificial Sequence: Synthetic oligonucleotide
  Target: ATXN2; (-) strand; PAM type: NRG; PAM sequence: TAG
ttttttatttttattttttt

SEQ ID NO: 34887 - DNA, 20 bp, Artificial Sequence
  Description of Artificial Sequence: Synthetic oligonucleotide
  Target: ATXN2; (-) strand; PAM type: NRG; PAM sequence: AAG
ccttgattccaatcagagaa

SEQ ID NO: 34888 - DNA, 20 bp, Artificial Sequence
  Description of Artificial Sequence: Synthetic oligonucleotide
  Target: ATXN2; (-) strand; PAM type: NRG; PAM sequence: GAG
tgggaccttgattccaatca

SEQ ID NO: 34889 - DNA, 20 bp, Artificial Sequence
  Description of Artificial Sequence: Synthetic oligonucleotide
  Target: ATXN2; (-) strand; PAM type: NRG; PAM sequence: CAG
tctgggaccttgattccaat

SEQ ID NO: 34890 - DNA, 20 bp, Artificial Sequence
  Description of Artificial Sequence: Synthetic oligonucleotide
  Target: ATXN2; (-) strand; PAM type: NRG; PAM sequence: GGG
tgttcttaagattgtattct

SEQ ID NO: 34891 - DNA, 20 bp, Artificial Sequence
  Description of Artificial Sequence: Synthetic oligonucleotide
  Target: ATXN2; (-) strand; PAM type: NRG; PAM sequence: TGG
ttgttcttaagattgtattc

SEQ ID NO: 34892 - DNA, 20 bp, Artificial Sequence
  Description of Artificial Sequence: Synthetic oligonucleotide
  Target: ATXN2; (-) strand; PAM type: NRG; PAM sequence: AAG
actggccaaaacttgttctt

SEQ ID NO: 34893 - DNA, 20 bp, Artificial Sequence
  Description of Artificial Sequence: Synthetic oligonucleotide
  Target: ATXN2; (-) strand; PAM type: NRG; PAM sequence: TGG
acaggcgtgagccaccacac

SEQ ID NO: 34894 - DNA, 20 bp, Artificial Sequence
  Description of Artificial Sequence: Synthetic oligonucleotide
  Target: ATXN2; (-) strand; PAM type: NRG; PAM sequence: GAG
agtgctgggattacaggcgt

SEQ ID NO: 34895 - DNA, 20 bp, Artificial Sequence
  Description of Artificial Sequence: Synthetic oligonucleotide
  Target: ATXN2; (-) strand; PAM type: NRG; PAM sequence: AGG
tcccaaagtgctgggattac

SEQ ID NO: 34896 - DNA, 20 bp, Artificial Sequence
  Description of Artificial Sequence: Synthetic oligonucleotide
  Target: ATXN2; (-) strand; PAM type: NRG; PAM sequence: CAG
ctcccaaagtgctgggatta

SEQ ID NO: 34897 - DNA, 20 bp, Artificial Sequence
  Description of Artificial Sequence: Synthetic oligonucleotide
  Target: ATXN2; (-) strand; PAM type: NRG; PAM sequence: GGG
ccactgcctcccaaagtgct

SEQ ID NO: 34898 - DNA, 20 bp, Artificial Sequence
  Description of Artificial Sequence: Synthetic oligonucleotide
  Target: ATXN2; (-) strand; PAM type: NRG; PAM sequence: TGG
gccactgcctcccaaagtgc

SEQ ID NO: 34899 - DNA, 20 bp, Artificial Sequence
  Description of Artificial Sequence: Synthetic oligonucleotide
  Target: ATXN2; (-) strand; PAM type: NRG; PAM sequence: AAG
ccaccggccactgcctccca

SEQ ID NO: 34900 - DNA, 20 bp, Artificial Sequence
  Description of Artificial Sequence: Synthetic oligonucleotide
  Target: ATXN2; (-) strand; PAM type: NRG; PAM sequence: CGG
cctgacctcaggtgatccac

SEQ ID NO: 34901 - DNA, 20 bp, Artificial Sequence
  Description of Artificial Sequence: Synthetic oligonucleotide
  Target: ATXN2; (-) strand; PAM type: NRG; PAM sequence: AGG
ggtctcgaactcctgacctc

SEQ ID NO: 34902 - DNA, 20 bp, Artificial Sequence
  Description of Artificial Sequence: Synthetic oligonucleotide
  Target: ATXN2; (-) strand; PAM type: NRG; PAM sequence: CAG
tggtctcgaactcctgacct

SEQ ID NO: 34903 - DNA, 20 bp, Artificial Sequence
  Description of Artificial Sequence: Synthetic oligonucleotide
  Target: ATXN2; (-) strand; PAM type: NRG; PAM sequence: TGG
ctactaaaaattggccaggc

SEQ ID NO: 34904 - DNA, 20 bp, Artificial Sequence
  Description of Artificial Sequence: Synthetic oligonucleotide
  Target: ATXN2; (-) strand; PAM type: NRG; PAM sequence: AGG
ggctctactaaaaattggcc

SEQ ID NO: 34905 - DNA, 20 bp, Artificial Sequence
  Description of Artificial Sequence: Synthetic oligonucleotide
  Target: ATXN2; (-) strand; PAM type: NRG; PAM sequence: CAG
gggctctactaaaaattggc

SEQ ID NO: 34906 - DNA, 20 bp, Artificial Sequence
  Description of Artificial Sequence: Synthetic oligonucleotide
  Target: ATXN2; (-) strand; PAM type: NRG; PAM sequence: TGG
agatgggctctactaaaaat

SEQ ID NO: 34907 - DNA, 20 bp, Artificial Sequence
  Description of Artificial Sequence: Synthetic oligonucleotide
  Target: ATXN2; (-) strand; PAM type: NRG; PAM sequence: GGG
tttgtatttttagtagagat

SEQ ID NO: 34908 - DNA, 20 bp, Artificial Sequence
  Description of Artificial Sequence: Synthetic oligonucleotide
  Target: ATXN2; (-) strand; PAM type: NRG; PAM sequence: TGG
ttttgtatttttagtagaga

SEQ ID NO: 34909 - DNA, 20 bp, Artificial Sequence
  Description of Artificial Sequence: Synthetic oligonucleotide
  Target: ATXN2; (-) strand; PAM type: NRG; PAM sequence: GAG
taatttttgtatttttagta

SEQ ID NO: 34910 - DNA, 20 bp, Artificial Sequence
  Description of Artificial Sequence: Synthetic oligonucleotide
  Target: ATXN2; (-) strand; PAM type: NRG; PAM sequence: TAG
gctaatttttgtatttttag

SEQ ID NO: 34911 - DNA, 20 bp, Artificial Sequence
  Description of Artificial Sequence: Synthetic oligonucleotide
  Target: ATXN2; (-) strand; PAM type: NRG; PAM sequence: TAG
ccagctaatttttgtatttt

SEQ ID NO: 34912 - DNA, 20 bp, Artificial Sequence
  Description of Artificial Sequence: Synthetic oligonucleotide
  Target: ATXN2; (-) strand; PAM type: NRG; PAM sequence: CAG
caggtgcgcatcaccacacc

SEQ ID NO: 34913 - DNA, 20 bp, Artificial Sequence
  Description of Artificial Sequence: Synthetic oligonucleotide
  Target: ATXN2; (-) strand; PAM type: NRG; PAM sequence: AGG
tcccaagtagctgggactac

SEQ ID NO: 34914 - DNA, 20 bp, Artificial Sequence
  Description of Artificial Sequence: Synthetic oligonucleotide
  Target: ATXN2; (-) strand; PAM type: NRG; PAM sequence: CAG
ctcccaagtagctgggacta

SEQ ID NO: 34915 - DNA, 20 bp, Artificial Sequence
  Description of Artificial Sequence: Synthetic oligonucleotide
  Target: ATXN2; (-) strand; PAM type: NRG; PAM sequence: GGG
cctcagcctcccaagtagct

SEQ ID NO: 34916 - DNA, 20 bp, Artificial Sequence
  Description of Artificial Sequence: Synthetic oligonucleotide
  Target: ATXN2; (-) strand; PAM type: NRG; PAM sequence: TGG
gcctcagcctcccaagtagc

SEQ ID NO: 34917 - DNA, 20 bp, Artificial Sequence
  Description of Artificial Sequence: Synthetic oligonucleotide
  Target: ATXN2; (-) strand; PAM type: NRG; PAM sequence: TAG
tcctgcctcagcctcccaag

SEQ ID NO: 34918 - DNA, 20 bp, Artificial Sequence
  Description of Artificial Sequence: Synthetic oligonucleotide
  Target: ATXN2; (-) strand; PAM type: NRG; PAM sequence: AAG
ttctcctgcctcagcctccc

SEQ ID NO: 34919 - DNA, 20 bp, Artificial Sequence
  Description of Artificial Sequence: Synthetic oligonucleotide
  Target: ATXN2; (-) strand; PAM type: NRG; PAM sequence: CAG
ttcacaccattctcctgcct

SEQ ID NO: 34920 - DNA, 20 bp, Artificial Sequence
  Description of Artificial Sequence: Synthetic oligonucleotide
  Target: ATXN2; (-) strand; PAM type: NRG; PAM sequence: AGG
cactgcaagcaccgcctccc

SEQ ID NO: 34921 - DNA, 20 bp, Artificial Sequence
  Description of Artificial Sequence: Synthetic oligonucleotide
  Target: ATXN2; (-) strand; PAM type: NRG; PAM sequence: CAG
tcactgcaagcaccgcctcc

SEQ ID NO: 34922 - DNA, 20 bp, Artificial Sequence
  Description of Artificial Sequence: Synthetic oligonucleotide
  Target: ATXN2; (-) strand; PAM type: NRG; PAM sequence: AAG
gtgtgatctccgctcactgc

SEQ ID NO: 34923 - DNA, 20 bp, Artificial Sequence
  Description of Artificial Sequence: Synthetic oligonucleotide
  Target: ATXN2; (-) strand; PAM type: NRG; PAM sequence: TGG
tcgcccaggctggagtgcag

SEQ ID NO: 34924 - DNA, 20 bp, Artificial Sequence
  Description of Artificial Sequence: Synthetic oligonucleotide
  Target: ATXN2; (-) strand; PAM type: NRG; PAM sequence: CAG
ctgtcgcccaggctggagtg

SEQ ID NO: 34925 - DNA, 20 bp, Artificial Sequence
  Description of Artificial Sequence: Synthetic oligonucleotide
  Target: ATXN2; (-) strand; PAM type: NRG; PAM sequence: GAG
tcgctctgtcgcccaggctg

SEQ ID NO: 34926 - DNA, 20 bp, Artificial Sequence
  Description of Artificial Sequence: Synthetic oligonucleotide
  Target: ATXN2; (-) strand; PAM type: NRG; PAM sequence: TGG
tctcgctctgtcgcccaggc

SEQ ID NO: 34927 - DNA, 20 bp, Artificial Sequence
  Description of Artificial Sequence: Synthetic oligonucleotide
  Target: ATXN2; (-) strand; PAM type: NRG; PAM sequence: AGG
ggagtctcgctctgtcgccc

SEQ ID NO: 34928 - DNA, 20 bp, Artificial Sequence
  Description of Artificial Sequence: Synthetic oligonucleotide
  Target: ATXN2; (-) strand; PAM type: NRG; PAM sequence: CAG
cggagtctcgctctgtcgcc

SEQ ID NO: 34929 - DNA, 20 bp, Artificial Sequence
  Description of Artificial Sequence: Synthetic oligonucleotide
  Target: ATXN2; (-) strand; PAM type: NRG; PAM sequence: GAG
actattttttttttgagacg

SEQ ID NO: 34930 - DNA, 20 bp, Artificial Sequence
  Description of Artificial Sequence: Synthetic oligonucleotide
  Target: ATXN2; (-) strand; PAM type: NRG; PAM sequence: CGG
ttactattttttttttgaga

SEQ ID NO: 34931 - DNA, 20 bp, Artificial Sequence
  Description of Artificial Sequence: Synthetic oligonucleotide
  Target: ATXN2; (-) strand; PAM type: NRG; PAM sequence: GAG
aaacttactatttttttttt

SEQ ID NO: 34932 - DNA, 20 bp, Artificial Sequence
  Description of Artificial Sequence: Synthetic oligonucleotide
  Target: ATXN2; (-) strand; PAM type: NRG; PAM sequence: AGG
taggccactgtatccagcct

SEQ ID NO: 34933 - DNA, 20 bp, Artificial Sequence
  Description of Artificial Sequence: Synthetic oligonucleotide
  Target: ATXN2; (-) strand; PAM type: NRG; PAM sequence: TAG
gtaggccactgtatccagcc

SEQ ID NO: 34934 - DNA, 20 bp, Artificial Sequence
  Description of Artificial Sequence: Synthetic oligonucleotide
  Target: ATXN2; (-) strand; PAM type: NRG; PAM sequence: CAG
taggtgtaggccactgtatc

SEQ ID NO: 34935 - DNA, 20 bp, Artificial Sequence
  Description of Artificial Sequence: Synthetic oligonucleotide
  Target: ATXN2; (-) strand; PAM type: NRG; PAM sequence: AGG
agtgctgggattataggtgt

SEQ ID NO: 34936 - DNA, 20 bp, Artificial Sequence
  Description of Artificial Sequence: Synthetic oligonucleotide
  Target: ATXN2; (-) strand; PAM type: NRG; PAM sequence: TAG
aagtgctgggattataggtg

SEQ ID NO: 34937 - DNA, 20 bp, Artificial Sequence
  Description of Artificial Sequence: Synthetic oligonucleotide
  Target: ATXN2; (-) strand; PAM type: NRG; PAM sequence: AGG
ttccaaagtgctgggattat

SEQ ID NO: 34938 - DNA, 20 bp, Artificial Sequence
  Description of Artificial Sequence: Synthetic oligonucleotide
  Target: ATXN2; (-) strand; PAM type: NRG; PAM sequence: TAG
cttccaaagtgctgggatta

SEQ ID NO: 34939 - DNA, 20 bp, Artificial Sequence
  Description of Artificial Sequence: Synthetic oligonucleotide
  Target: ATXN2; (-) strand; PAM type: NRG; PAM sequence: GGG
ccttggccttccaaagtgct

SEQ ID NO: 34940 - DNA, 20 bp, Artificial Sequence
  Description of Artificial Sequence: Synthetic oligonucleotide
  Target: ATXN2; (-) strand; PAM type: NRG; PAM sequence: TGG
gccttggccttccaaagtgc

SEQ ID NO: 34941 - DNA, 20 bp, Artificial Sequence
  Description of Artificial Sequence: Synthetic oligonucleotide
  Target: ATXN2; (-) strand; PAM type: NRG; PAM sequence: AAG
ctgcctgccttggccttcca

SEQ ID NO: 34942 - DNA, 20 bp, Artificial Sequence
  Description of Artificial Sequence: Synthetic oligonucleotide
  Target: ATXN2; (-) strand; PAM type: NRG; PAM sequence: TGG
ttcaaaggatctgcctgcct

SEQ ID NO: 34943 - DNA, 20 bp, Artificial Sequence
  Description of Artificial Sequence: Synthetic oligonucleotide
  Target: ATXN2; (-) strand; PAM type: NRG; PAM sequence: AGG
tctcctactccttggttcaa

SEQ ID NO: 34944 - DNA, 20 bp, Artificial Sequence
  Description of Artificial Sequence: Synthetic oligonucleotide
  Target: ATXN2; (-) strand; PAM type: NRG; PAM sequence: AAG
gtctcctactccttggttca

SEQ ID NO: 34945 - DNA, 20 bp, Artificial Sequence
  Description of Artificial Sequence: Synthetic oligonucleotide
  Target: ATXN2; (-) strand; PAM type: NRG; PAM sequence: TGG
caggctggtctcctactcct

SEQ ID NO: 34946 - DNA, 20 bp, Artificial Sequence
  Description of Artificial Sequence: Synthetic oligonucleotide
  Target: ATXN2; (-) strand; PAM type: NRG; PAM sequence: TGG
tctcactatgttgcccaggc

SEQ ID NO: 34947 - DNA, 20 bp, Artificial Sequence
  Description of Artificial Sequence: Synthetic oligonucleotide
  Target: ATXN2; (-) strand; PAM type: NRG; PAM sequence: AGG
agggtctcactatgttgccc

SEQ ID NO: 34948 - DNA, 20 bp, Artificial Sequence
  Description of Artificial Sequence: Synthetic oligonucleotide
  Target: ATXN2; (-) strand; PAM type: NRG; PAM sequence: CAG
gagggtctcactatgttgcc

SEQ ID NO: 34949 - DNA, 20 bp, Artificial Sequence
  Description of Artificial Sequence: Synthetic oligonucleotide
  Target: ATXN2; (-) strand; PAM type: NRG; PAM sequence: GGG
aaaattttttatggagagga

SEQ ID NO: 34950 - DNA, 20 bp, Artificial Sequence
  Description of Artificial Sequence: Synthetic oligonucleotide
  Target: ATXN2; (-) strand; PAM type: NRG; PAM sequence: AGG
aaaaattttttatggagagg

SEQ ID NO: 34951 - DNA, 20 bp, Artificial Sequence
  Description of Artificial Sequence: Synthetic oligonucleotide
  Target: ATXN2; (-) strand; PAM type: NRG; PAM sequence: GAG
gaaaaattttttatggagag

SEQ ID NO: 34952 - DNA, 20 bp, Artificial Sequence
  Description of Artificial Sequence: Synthetic oligonucleotide
  Target: ATXN2; (-) strand; PAM type: NRG; PAM sequence: AGG
ttgaaaaattttttatggag

SEQ ID NO: 34953 - DNA, 20 bp, Artificial Sequence
  Description of Artificial Sequence: Synthetic oligonucleotide
  Target: ATXN2; (-) strand; PAM type: NRG; PAM sequence: GAG
tttgaaaaattttttatgga

SEQ ID NO: 34954 - DNA, 20 bp, Artificial Sequence
  Description of Artificial Sequence: Synthetic oligonucleotide
  Target: ATXN2; (-) strand; PAM type: NRG; PAM sequence: GAG
attttgaaaaattttttatg

SEQ ID NO: 34955 - DNA, 20 bp, Artificial Sequence
  Description of Artificial Sequence: Synthetic oligonucleotide
  Target: ATXN2; (-) strand; PAM type: NRG; PAM sequence: TGG
taattttgaaaaatttttta

SEQ ID NO: 34956 - DNA, 20 bp, Artificial Sequence
  Description of Artificial Sequence: Synthetic oligonucleotide
  Target: ATXN2; (-) strand; PAM type: NRG; PAM sequence: AGG
ttctcagctatgtcagcttc

SEQ ID NO: 34957 - DNA, 20 bp, Artificial Sequence
  Description of Artificial Sequence: Synthetic oligonucleotide
  Target: ATXN2; (-) strand; PAM type: NRG; PAM sequence: CAG
tttctcagctatgtcagctt

SEQ ID NO: 34958 - DNA, 20 bp, Artificial Sequence
  Description of Artificial Sequence: Synthetic oligonucleotide
  Target: ATXN2; (-) strand; PAM type: NRG; PAM sequence: CAG
acaaactttctcagctatgt

SEQ ID NO: 34959 - DNA, 20 bp, Artificial Sequence
  Description of Artificial Sequence: Synthetic oligonucleotide
  Target: ATXN2; (-) strand; PAM type: NRG; PAM sequence: CAG
tgagttaaaacaaactttct

SEQ ID NO: 34960 - DNA, 20 bp, Artificial Sequence
  Description of Artificial Sequence: Synthetic oligonucleotide
  Target: ATXN2; (-) strand; PAM type: NRG; PAM sequence: GAG
agtttttattcaatggtagt

SEQ ID NO: 34961 - DNA, 20 bp, Artificial Sequence
  Description of Artificial Sequence: Synthetic oligonucleotide
  Target: ATXN2; (-) strand; PAM type: NRG; PAM sequence: TAG
attaagtttttattcaatgg

SEQ ID NO: 34962 - DNA, 20 bp, Artificial Sequence
  Description of Artificial Sequence: Synthetic oligonucleotide
  Target: ATXN2; (-) strand; PAM type: NRG; PAM sequence: TGG
actattaagtttttattcaa

SEQ ID NO: 34963 - DNA, 20 bp, Artificial Sequence
  Description of Artificial Sequence: Synthetic oligonucleotide
  Target: ATXN2; (-) strand; PAM type: NRG; PAM sequence: AAG
tatatcttgataaaactatt

SEQ ID NO: 34964 - DNA, 20 bp, Artificial Sequence
  Description of Artificial Sequence: Synthetic oligonucleotide
  Target: ATXN2; (-) strand; PAM type: NRG; PAM sequence: TAG
cacaaaataggtgaatttca

SEQ ID NO: 34965 - DNA, 20 bp, Artificial Sequence
  Description of Artificial Sequence: Synthetic oligonucleotide
  Target: ATXN2; (-) strand; PAM type: NRG; PAM sequence: AGG
cattaaattgtacacaaaat

SEQ ID NO: 34966 - DNA, 20 bp, Artificial Sequence
  Description of Artificial Sequence: Synthetic oligonucleotide
  Target: ATXN2; (-) strand; PAM type: NRG; PAM sequence: TAG
tcattaaattgtacacaaaa

SEQ ID NO: 34967 - DNA, 20 bp, Artificial Sequence
  Description of Artificial Sequence: Synthetic oligonucleotide
  Target: ATXN2; (-) strand; PAM type: NRG; PAM sequence: GAG
atttactgtgtaaatttact

SEQ ID NO: 34968 - DNA, 20 bp, Artificial Sequence
  Description of Artificial Sequence: Synthetic oligonucleotide
  Target: ATXN2; (-) strand; PAM type: NRG; PAM sequence: TGG
tgttctgaaattagtggcaa

SEQ ID NO: 34969 - DNA, 20 bp, Artificial Sequence
  Description of Artificial Sequence: Synthetic oligonucleotide
  Target: ATXN2; (-) strand; PAM type: NRG; PAM sequence: TGG
tggaaatgttctgaaattag

SEQ ID NO: 34970 - DNA, 20 bp, Artificial Sequence
  Description of Artificial Sequence: Synthetic oligonucleotide
  Target: ATXN2; (-) strand; PAM type: NRG; PAM sequence: TAG
taatggaaatgttctgaaat

SEQ ID NO: 34971 - DNA, 20 bp, Artificial Sequence
  Description of Artificial Sequence: Synthetic oligonucleotide
  Target: ATXN2; (-) strand; PAM type: NRG; PAM sequence: TGG
gaaggatctttttggggtaa

SEQ ID NO: 34972 - DNA, 20 bp, Artificial Sequence
  Description of Artificial Sequence: Synthetic oligonucleotide
  Target: ATXN2; (-) strand; PAM type: NRG; PAM sequence: GGG
catcgtgaaggatctttttg

SEQ ID NO: 34973 - DNA, 20 bp, Artificial Sequence
  Description of Artificial Sequence: Synthetic oligonucleotide
  Target: ATXN2; (-) strand; PAM type: NRG; PAM sequence: GGG
ccatcgtgaaggatcttttt

SEQ ID NO: 34974 - DNA, 20 bp, Artificial Sequence
  Description of Artificial Sequence: Synthetic oligonucleotide
  Target: ATXN2; (-) strand; PAM type: NRG; PAM sequence: TGG
accatcgtgaaggatctttt

SEQ ID NO: 34975 - DNA, 20 bp, Artificial Sequence
  Description of Artificial Sequence: Synthetic oligonucleotide
  Target: ATXN2; (-) strand; PAM type: NRG; PAM sequence: AGG
caaactgcccaccatcgtga

SEQ ID NO: 34976 - DNA, 20 bp, Artificial Sequence
  Description of Artificial Sequence: Synthetic oligonucleotide
  Target: ATXN2; (-) strand; PAM type: NRG; PAM sequence: AAG
ccaaactgcccaccatcgtg

SEQ ID NO: 34977 - DNA, 20 bp, Artificial Sequence
  Description of Artificial Sequence: Synthetic oligonucleotide
  Target: ATXN2; (-) strand; PAM type: NRG; PAM sequence: GGG
ggttgcctggggctaaggat

SEQ ID NO: 34978 - DNA, 20 bp, Artificial Sequence
  Description of Artificial Sequence: Synthetic oligonucleotide
  Target: ATXN2; (-) strand; PAM type: NRG; PAM sequence: TGG
tggttgcctggggctaagga

SEQ ID NO: 34979 - DNA, 20 bp, Artificial Sequence
  Description of Artificial Sequence: Synthetic oligonucleotide
  Target: ATXN2; (-) strand; PAM type: NRG; PAM sequence: AGG
tgagtggttgcctggggcta

SEQ ID NO: 34980 - DNA, 20 bp, Artificial Sequence
  Description of Artificial Sequence: Synthetic oligonucleotide
  Target: ATXN2; (-) strand; PAM type: NRG; PAM sequence: AAG
atgagtggttgcctggggct

SEQ ID NO: 34981 - DNA, 20 bp, Artificial Sequence
  Description of Artificial Sequence: Synthetic oligonucleotide
  Target: ATXN2; (-) strand; PAM type: NRG; PAM sequence: GGG
tgtagatgagtggttgcctg

SEQ ID NO: 34982 - DNA, 20 bp, Artificial Sequence
  Description of Artificial Sequence: Synthetic oligonucleotide
  Target: ATXN2; (-) strand; PAM type: NRG; PAM sequence: GGG
atgtagatgagtggttgcct

SEQ ID NO: 34983 - DNA, 20 bp, Artificial Sequence
  Description of Artificial Sequence: Synthetic oligonucleotide
  Target: ATXN2; (-) strand; PAM type: NRG; PAM sequence: TGG
aatgtagatgagtggttgcc

SEQ ID NO: 34984 - DNA, 20 bp, Artificial Sequence
  Description of Artificial Sequence: Synthetic oligonucleotide
  Target: ATXN2; (-) strand; PAM type: NRG; PAM sequence: TGG
agagagaaaatgtagatgag

SEQ ID NO: 34985 - DNA, 20 bp, Artificial Sequence
  Description of Artificial Sequence: Synthetic oligonucleotide
  Target: ATXN2; (-) strand; PAM type: NRG; PAM sequence: GAG
catagagagaaaatgtagat

SEQ ID NO: 34986 - DNA, 20 bp, Artificial Sequence
  Description of Artificial Sequence: Synthetic oligonucleotide
  Target: ATXN2; (-) strand; PAM type: NRG; PAM sequence: TAG
aaatccatagagagaaaatg

SEQ ID NO: 34987 - DNA, 20 bp, Artificial Sequence
  Description of Artificial Sequence: Synthetic oligonucleotide
  Target: ATXN2; (-) strand; PAM type: NRG; PAM sequence: GAG
aatctggacaaatccataga

SEQ ID NO: 34988 - DNA, 20 bp, Artificial Sequence
  Description of Artificial Sequence: Synthetic oligonucleotide
  Target: ATXN2; (-) strand; PAM type: NRG; PAM sequence: GAG
aaaatctggacaaatccata

SEQ ID NO: 34989 - DNA, 20 bp, Artificial Sequence
  Description of Artificial Sequence: Synthetic oligonucleotide
  Target: ATXN2; (-) strand; PAM type: NRG; PAM sequence: TAG
gaaaaatctggacaaatcca

SEQ ID NO: 34990 - DNA, 20 bp, Artificial Sequence
  Description of Artificial Sequence: Synthetic oligonucleotide
  Target: ATXN2; (-) strand; PAM type: NRG; PAM sequence: TGG
ttctacttatgtgaaaaatc

SEQ ID NO: 34991 - DNA, 20 bp, Artificial Sequence
  Description of Artificial Sequence: Synthetic oligonucleotide
  Target: ATXN2; (-) strand; PAM type: NRG; PAM sequence: AAG
cacaaaaggctgcatgctgt

SEQ ID NO: 34992 - DNA, 20 bp, Artificial Sequence
  Description of Artificial Sequence: Synthetic oligonucleotide
  Target: ATXN2; (-) strand; PAM type: NRG; PAM sequence: AGG
tgaaagaaggcagacacaaa

SEQ ID NO: 34993 - DNA, 20 bp, Artificial Sequence
  Description of Artificial Sequence: Synthetic oligonucleotide
  Target: ATXN2; (-) strand; PAM type: NRG; PAM sequence: AAG
atgaaagaaggcagacacaa

SEQ ID NO: 34994 - DNA, 20 bp, Artificial Sequence
  Description of Artificial Sequence: Synthetic oligonucleotide
  Target: ATXN2; (-) strand; PAM type: NRG; PAM sequence: CAG
ttatgacaaatgaaagaagg

SEQ ID NO: 34995 - DNA, 20 bp, Artificial Sequence
  Description of Artificial Sequence: Synthetic oligonucleotide
  Target: ATXN2; (-) strand; PAM type: NRG; PAM sequence: AGG
acattatgacaaatgaaaga

SEQ ID NO: 34996 - DNA, 20 bp, Artificial Sequence
  Description of Artificial Sequence: Synthetic oligonucleotide
  Target: ATXN2; (-) strand; PAM type: NRG; PAM sequence: AAG
aacattatgacaaatgaaag

SEQ ID NO: 34997 - DNA, 20 bp, Artificial Sequence
  Description of Artificial Sequence: Synthetic oligonucleotide
  Target: ATXN2; (-) strand; PAM type: NRG; PAM sequence: AAG
aaaaacattatgacaaatga

SEQ ID NO: 34998 - DNA, 20 bp, Artificial Sequence
  Description of Artificial Sequence: Synthetic oligonucleotide
  Target: ATXN2; (-) strand; PAM type: NRG; PAM sequence: TAG
actgctacatgccacaacct

SEQ ID NO: 34999 - DNA, 20 bp, Artificial Sequence
  Description of Artificial Sequence: Synthetic oligonucleotide
  Target: ATXN2; (-) strand; PAM type: NRG; PAM sequence: AGG
aatatgacatagcaataata

SEQ ID NO: 35000 - DNA, 20 bp, Artificial Sequence
  Description of Artificial Sequence: Synthetic oligonucleotide
  Target: ATXN2; (-) strand; PAM type: NRG; PAM sequence: AAG
gaatatgacatagcaataat

SEQ ID NO: 35001 - DNA, 20 bp, Artificial Sequence
  Description of Artificial Sequence: Synthetic oligonucleotide
  Target: ATXN2; (-) strand; PAM type: NRG; PAM sequence: TAG
tccatacatggaatatgaca

SEQ ID NO: 35002 - DNA, 20 bp, Artificial Sequence
  Description of Artificial Sequence: Synthetic oligonucleotide
  Target: ATXN2; (-) strand; PAM type: NRG; PAM sequence: TGG
aaatgtggtatgtccataca

SEQ ID NO: 35003 - DNA, 20 bp, Artificial Sequence
  Description of Artificial Sequence: Synthetic oligonucleotide
  Target: ATXN2; (-) strand; PAM type: NRG; PAM sequence: TGG
tggaaagtagacacaaaatg

SEQ ID NO: 35004 - DNA, 20 bp, Artificial Sequence
  Description of Artificial Sequence: Synthetic oligonucleotide
  Target: ATXN2; (-) strand; PAM type: NRG; PAM sequence: TAG
aaacatccacaattggaaag

SEQ ID NO: 35005 - DNA, 20 bp, Artificial Sequence
  Description of Artificial Sequence: Synthetic oligonucleotide
  Target: ATXN2; (-) strand; PAM type: NRG; PAM sequence: AAG
tctaaacatccacaattgga

SEQ ID NO: 35006 - DNA, 20 bp, Artificial Sequence
  Description of Artificial Sequence: Synthetic oligonucleotide
  Target: ATXN2; (-) strand; PAM type: NRG; PAM sequence: TGG
acaatctaaacatccacaat

SEQ ID NO: 35007 - DNA, 20 bp, Artificial Sequence
  Description of Artificial Sequence: Synthetic oligonucleotide
  Target: ATXN2; (-) strand; PAM type: NRG; PAM sequence: AAG
gcattttcataatactcaaa

SEQ ID NO: 35008 - DNA, 20 bp, Artificial Sequence
  Description of Artificial Sequence: Synthetic oligonucleotide
  Target: ATXN2; (-) strand; PAM type: NRG; PAM sequence: CAG
gccaccaatctcagccccag

SEQ ID NO: 35009 - DNA, 20 bp, Artificial Sequence
  Description of Artificial Sequence: Synthetic oligonucleotide
  Target: ATXN2; (-) strand; PAM type: NRG; PAM sequence: CAG
tgagccaccaatctcagccc

SEQ ID NO: 35010 - DNA, 20 bp, Artificial Sequence
  Description of Artificial Sequence: Synthetic oligonucleotide
  Target: ATXN2; (-) strand; PAM type: NRG; PAM sequence: CAG
caggagtgagccaccaatct

SEQ ID NO: 35011 - DNA, 20 bp, Artificial Sequence
  Description of Artificial Sequence: Synthetic oligonucleotide
  Target: ATXN2; (-) strand; PAM type: NRG; PAM sequence: GAG
agtgttgggattacaggagt

SEQ ID NO: 35012 - DNA, 20 bp, Artificial Sequence
  Description of Artificial Sequence: Synthetic oligonucleotide
  Target: ATXN2; (-) strand; PAM type: NRG; PAM sequence: GAG
ctaaagtgttgggattacag

SEQ ID NO: 35013 - DNA, 20 bp, Artificial Sequence
  Description of Artificial Sequence: Synthetic oligonucleotide
  Target: ATXN2; (-) strand; PAM type: NRG; PAM sequence: AGG
tcctaaagtgttgggattac

SEQ ID NO: 35014 - DNA, 20 bp, Artificial Sequence
  Description of Artificial Sequence: Synthetic oligonucleotide
  Target: ATXN2; (-) strand; PAM type: NRG; PAM sequence: CAG
atcctaaagtgttgggatta

SEQ ID NO: 35015 - DNA, 20 bp, Artificial Sequence
  Description of Artificial Sequence: Synthetic oligonucleotide
  Target: ATXN2; (-) strand; PAM type: NRG; PAM sequence: GGG
tctcggtatcctaaagtgtt

SEQ ID NO: 35016 - DNA, 20 bp, Artificial Sequence
  Description of Artificial Sequence: Synthetic oligonucleotide
  Target: ATXN2; (-) strand; PAM type: NRG; PAM sequence: TGG
atctcggtatcctaaagtgt

SEQ ID NO: 35017 - DNA, 20 bp, Artificial Sequence
  Description of Artificial Sequence: Synthetic oligonucleotide
  Target: ATXN2; (-) strand; PAM type: NRG; PAM sequence: AAG
cctcccatctcggtatccta

SEQ ID NO: 35018 - DNA, 20 bp, Artificial Sequence
  Description of Artificial Sequence: Synthetic oligonucleotide
  Target: ATXN2; (-) strand; PAM type: NRG; PAM sequence: CGG
ttcaagtgatcctcccatct

SEQ ID NO: 35019 - DNA, 20 bp, Artificial Sequence
  Description of Artificial Sequence: Synthetic oligonucleotide
  Target: ATXN2; (-) strand; PAM type: NRG; PAM sequence: AAG
tttcaaactccggggtattc

SEQ ID NO: 35020 - DNA, 20 bp, Artificial Sequence
  Description of Artificial Sequence: Synthetic oligonucleotide
  Target: ATXN2; (-) strand; PAM type: NRG; PAM sequence: GGG
caggctggtttcaaactccg

SEQ ID NO: 35021 - DNA, 20 bp, Artificial Sequence
  Description of Artificial Sequence: Synthetic oligonucleotide
  Target: ATXN2; (-) strand; PAM type: NRG; PAM sequence: GGG
ccaggctggtttcaaactcc

SEQ ID NO: 35022 - DNA, 20 bp, Artificial Sequence
  Description of Artificial Sequence: Synthetic oligonucleotide
  Target: ATXN2; (-) strand; PAM type: NRG; PAM sequence: CGG
cccaggctggtttcaaactc

SEQ ID NO: 35023 - DNA, 20 bp, Artificial Sequence
  Description of Artificial Sequence: Synthetic oligonucleotide
  Target: ATXN2; (-) strand; PAM type: NRG; PAM sequence: TGG
tctctctatgttgcccaggc

SEQ ID NO: 35024 - DNA, 20 bp, Artificial Sequence
  Description of Artificial Sequence: Synthetic oligonucleotide
  Target: ATXN2; (-) strand; PAM type: NRG; PAM sequence: AGG
agggtctctctatgttgccc

SEQ ID NO: 35025 - DNA, 20 bp, Artificial Sequence
  Description of Artificial Sequence: Synthetic oligonucleotide
  Target: ATXN2; (-) strand; PAM type: NRG; PAM sequence: CAG
cagggtctctctatgttgcc

SEQ ID NO: 35026 - DNA, 20 bp, Artificial Sequence
  Description of Artificial Sequence: Synthetic oligonucleotide
  Target: ATXN2; (-) strand; PAM type: NRG; PAM sequence: GGG
taaagtttttcatagagaca

SEQ ID NO: 35027 - DNA, 20 bp, Artificial Sequence
  Description of Artificial Sequence: Synthetic oligonucleotide
  Target: ATXN2; (-) strand; PAM type: NRG; PAM sequence: AGG
ttaaagtttttcatagagac

SEQ ID NO: 35028 - DNA, 20 bp, Artificial Sequence
  Description of Artificial Sequence: Synthetic oligonucleotide
  Target: ATXN2; (-) strand; PAM type: NRG; PAM sequence: CAG
tttaaagtttttcatagaga

SEQ ID NO: 35029 - DNA, 20 bp, Artificial Sequence
  Description of Artificial Sequence: Synthetic oligonucleotide
  Target: ATXN2; (-) strand; PAM type: NRG; PAM sequence: GAG
tatttttaaagtttttcata

SEQ ID NO: 35030 - DNA, 20 bp, Artificial Sequence
  Description of Artificial Sequence: Synthetic oligonucleotide
  Target: ATXN2; (-) strand; PAM type: NRG; PAM sequence: TAG
tttatttttaaagtttttca

SEQ ID NO: 35031 - DNA, 20 bp, Artificial Sequence
  Description of Artificial Sequence: Synthetic oligonucleotide
  Target: ATXN2; (-) strand; PAM type: NRG; PAM sequence: AAG
cagctaattttttattttta

SEQ ID NO: 35032 - DNA, 20 bp, Artificial Sequence
  Description of Artificial Sequence: Synthetic oligonucleotide
  Target: ATXN2; (-) strand; PAM type: NRG; PAM sequence: CAG
agccaccacgcccagccaac

SEQ ID NO: 35033 - DNA, 20 bp, Artificial Sequence
  Description of Artificial Sequence: Synthetic oligonucleotide
  Target: ATXN2; (-) strand; PAM type: NRG; PAM sequence: CAG
taggcatgagccaccacgcc

SEQ ID NO: 35034 - DNA, 20 bp, Artificial Sequence
  Description of Artificial Sequence: Synthetic oligonucleotide
  Target: ATXN2; (-) strand; PAM type: NRG; PAM sequence: GAG
agtgctgggattataggcat

SEQ ID NO: 35035 - DNA, 20 bp, Artificial Sequence
  Description of Artificial Sequence: Synthetic oligonucleotide
  Target: ATXN2; (-) strand; PAM type: NRG; PAM sequence: AGG
tcccaaagtgctgggattat

SEQ ID NO: 35036 - DNA, 20 bp, Artificial Sequence
  Description of Artificial Sequence: Synthetic oligonucleotide
  Target: ATXN2; (-) strand; PAM type: NRG; PAM sequence: TAG
ctcccaaagtgctgggatta

SEQ ID NO: 35037 - DNA, 20 bp, Artificial Sequence
  Description of Artificial Sequence: Synthetic oligonucleotide
  Target: ATXN2; (-) strand; PAM type: NRG; PAM sequence: GGG
cctcggcctcccaaagtgct

SEQ ID NO: 35038 - DNA, 20 bp, Artificial Sequence
  Description of Artificial Sequence: Synthetic oligonucleotide
  Target: ATXN2; (-) strand; PAM type: NRG; PAM sequence: TGG
acctcggcctcccaaagtgc

SEQ ID NO: 35039 - DNA, 20 bp, Artificial Sequence
  Description of Artificial Sequence: Synthetic oligonucleotide
  Target: ATXN2; (-) strand; PAM type: NRG; PAM sequence: AAG
ccacccacctcggcctccca

SEQ ID NO: 35040 - DNA, 20 bp, Artificial Sequence
  Description of Artificial Sequence: Synthetic oligonucleotide
  Target: ATXN2; (-) strand; PAM type: NRG; PAM sequence: CGG
ctcaggtgatccacccacct

SEQ ID NO: 35041 - DNA, 20 bp, Artificial Sequence
  Description of Artificial Sequence: Synthetic oligonucleotide
  Target: ATXN2; (-) strand; PAM type: NRG; PAM sequence: AGG
ggtctcgaactcctgatctc

SEQ ID NO: 35042 - DNA, 20 bp, Artificial Sequence
  Description of Artificial Sequence: Synthetic oligonucleotide
  Target: ATXN2; (-) strand; PAM type: NRG; PAM sequence: CAG
tggtctcgaactcctgatct

SEQ ID NO: 35043 - DNA, 20 bp, Artificial Sequence
  Description of Artificial Sequence: Synthetic oligonucleotide
  Target: ATXN2; (-) strand; PAM type: NRG; PAM sequence: TGG
tttcaccatgtaggccaggc

SEQ ID NO: 35044 - DNA, 20 bp, Artificial Sequence
  Description of Artificial Sequence: Synthetic oligonucleotide
  Target: ATXN2; (-) strand; PAM type: NRG; PAM sequence: AGG
gggatttcaccatgtaggcc

SEQ ID NO: 35045 - DNA, 20 bp, Artificial Sequence
  Description of Artificial Sequence: Synthetic oligonucleotide
  Target: ATXN2; (-) strand; PAM type: NRG; PAM sequence: CAG
cgggatttcaccatgtaggc

SEQ ID NO: 35046 - DNA, 20 bp, Artificial Sequence
  Description of Artificial Sequence: Synthetic oligonucleotide
  Target: ATXN2; (-) strand; PAM type: NRG; PAM sequence: AGG
gagacgggatttcaccatgt

SEQ ID NO: 35047 - DNA, 20 bp, Artificial Sequence
  Description of Artificial Sequence: Synthetic oligonucleotide
  Target: ATXN2; (-) strand; PAM type: NRG; PAM sequence: TAG
agagacgggatttcaccatg

SEQ ID NO: 35048 - DNA, 20 bp, Artificial Sequence
  Description of Artificial Sequence: Synthetic oligonucleotide
  Target: ATXN2; (-) strand; PAM type: NRG; PAM sequence: GGG
tttgtatttttagtagagac

SEQ ID NO: 35049 - DNA, 20 bp, Artificial Sequence
  Description of Artificial Sequence: Synthetic oligonucleotide
  Target: ATXN2; (-) strand; PAM type: NRG; PAM sequence: CGG
ttttgtatttttagtagaga

SEQ ID NO: 35050 - DNA, 20 bp, Artificial Sequence
  Description of Artificial Sequence: Synthetic oligonucleotide
  Target: ATXN2; (-) strand; PAM type: NRG; PAM sequence: GAG
aattttttgtatttttagta

SEQ ID NO: 35051 - DNA, 20 bp, Artificial Sequence
  Description of Artificial Sequence: Synthetic oligonucleotide
  Target: ATXN2; (-) strand; PAM type: NRG; PAM sequence: TAG
ctaattttttgtatttttag

SEQ ID NO: 35052 - DNA, 20 bp, Artificial Sequence
  Description of Artificial Sequence: Synthetic oligonucleotide
  Target: ATXN2; (-) strand; PAM type: NRG; PAM sequence: TAG
tggctaattttttgtatttt

SEQ ID NO: 35053 - DNA, 20 bp, Artificial Sequence
  Description of Artificial Sequence: Synthetic oligonucleotide
  Target: ATXN2; (-) strand; PAM type: NRG; PAM sequence: TGG
caggtgcccgccaccacgcc

SEQ ID NO: 35054 - DNA, 20 bp, Artificial Sequence
  Description of Artificial Sequence: Synthetic oligonucleotide
  Target: ATXN2; (-) strand; PAM type: NRG; PAM sequence: AGG
tcccaagtagctgagattac

SEQ ID NO: 35055 - DNA, 20 bp, Artificial Sequence
  Description of Artificial Sequence: Synthetic oligonucleotide
  Target: ATXN2; (-) strand; PAM type: NRG; PAM sequence: CAG
ctcccaagtagctgagatta

SEQ ID NO: 35056 - DNA, 20 bp, Artificial Sequence
  Description of Artificial Sequence: Synthetic oligonucleotide
  Target: ATXN2; (-) strand; PAM type: NRG; PAM sequence: GAG
cctcagcctcccaagtagct

SEQ ID NO: 35057 - DNA, 20 bp, Artificial Sequence
  Description of Artificial Sequence: Synthetic oligonucleotide
  Target: ATXN2; (-) strand; PAM type: NRG; PAM sequence: TAG
tcctgcctcagcctcccaag

SEQ ID NO: 35058 - DNA, 20 bp, Artificial Sequence
  Description of Artificial Sequence: Synthetic oligonucleotide
  Target: ATXN2; (-) strand; PAM type: NRG; PAM sequence: AAG
ttctcctgcctcagcctccc

SEQ ID NO: 35059 - DNA, 20 bp, Artificial Sequence
  Description of Artificial Sequence: Synthetic oligonucleotide
  Target: ATXN2; (-) strand; PAM type: NRG; PAM sequence: CAG
ttcaagcaattctcctgcct

SEQ ID NO: 35060 - DNA, 20 bp, Artificial Sequence
  Description of Artificial Sequence: Synthetic oligonucleotide
  Target: ATXN2; (-) strand; PAM type: NRG; PAM sequence: AAG
aacctccgcctcctgggttc

SEQ ID NO: 35061 - DNA, 20 bp, Artificial Sequence
  Description of Artificial Sequence: Synthetic oligonucleotide
  Target: ATXN2; (-) strand; PAM type: NRG; PAM sequence: GGG
cactgtaacctccgcctcct

SEQ ID NO: 35062 - DNA, 20 bp, Artificial Sequence
  Description of Artificial Sequence: Synthetic oligonucleotide
  Target: ATXN2; (-) strand; PAM type: NRG; PAM sequence: TGG
tcactgtaacctccgcctcc

SEQ ID NO: 35063 - DNA, 20 bp, Artificial Sequence
  Description of Artificial Sequence: Synthetic oligonucleotide
  Target: ATXN2; (-) strand; PAM type: NRG; PAM sequence: CGG
tcagtgcaatggtgcaatct

SEQ ID NO: 35064 - DNA, 20 bp, Artificial Sequence
  Description of Artificial Sequence: Synthetic oligonucleotide
  Target: ATXN2; (-) strand; PAM type: NRG; PAM sequence: TGG
tcacccaggcttcagtgcaa

SEQ ID NO: 35065 - DNA, 20 bp, Artificial Sequence
  Description of Artificial Sequence: Synthetic oligonucleotide
  Target: ATXN2; (-) strand; PAM type: NRG; PAM sequence: CAG
ttgctgtgtcacccaggctt

SEQ ID NO: 35066 - DNA, 20 bp, Artificial Sequence
  Description of Artificial Sequence: Synthetic oligonucleotide
  Target: ATXN2; (-) strand; PAM type: NRG; PAM sequence: AGG
agagtattgctgtgtcaccc

SEQ ID NO: 35067 - DNA, 20 bp, Artificial Sequence
  Description of Artificial Sequence: Synthetic oligonucleotide
  Target: ATXN2; (-) strand; PAM type: NRG; PAM sequence: CAG
cagagtattgctgtgtcacc

SEQ ID NO: 35068 - DNA, 20 bp, Artificial Sequence
  Description of Artificial Sequence: Synthetic oligonucleotide
  Target: ATXN2; (-) strand; PAM type: NRG; PAM sequence: GAG
tttttttttttttggagaca

SEQ ID NO: 35069 - DNA, 20 bp, Artificial Sequence
  Description of Artificial Sequence: Synthetic oligonucleotide
  Target: ATXN2; (-) strand; PAM type: NRG; PAM sequence: CAG
tttttttttttttttggaga

SEQ ID NO: 35070 - DNA, 20 bp, Artificial Sequence
  Description of Artificial Sequence: Synthetic oligonucleotide
  Target: ATXN2; (-) strand; PAM type: NRG; PAM sequence: GAG
tttttttttttttttttttg

SEQ ID NO: 35071 - DNA, 20 bp, Artificial Sequence
  Description of Artificial Sequence: Synthetic oligonucleotide
  Target: ATXN2; (-) strand; PAM type: NRG; PAM sequence: TGG
tttttttttttttttttttt

SEQ ID NO: 35072 - DNA, 20 bp, Artificial Sequence
  Description of Artificial Sequence: Synthetic oligonucleotide
  Target: ATXN2; (-) strand; PAM type: NRG; PAM sequence: CAG
taggtgcgtgtcaccatgac

SEQ ID NO: 35073 - DNA, 20 bp, Artificial Sequence
  Description of Artificial Sequence: Synthetic oligonucleotide
  Target: ATXN2; (-) strand; PAM type: NRG; PAM sequence: AGG
tccctagtagctgggactat

SEQ ID NO: 35074 - DNA, 20 bp, Artificial Sequence
  Description of Artificial Sequence: Synthetic oligonucleotide
  Target: ATXN2; (-) strand; PAM type: NRG; PAM sequence: TAG
ctccctagtagctgggacta

SEQ ID NO: 35075 - DNA, 20 bp, Artificial Sequence
  Description of Artificial Sequence: Synthetic oligonucleotide
  Target: ATXN2; (-) strand; PAM type: NRG; PAM sequence: GGG
cttcagcctccctagtagct

SEQ ID NO: 35076 - DNA, 20 bp, Artificial Sequence
  Description of Artificial Sequence: Synthetic oligonucleotide
  Target: ATXN2; (-) strand; PAM type: NRG; PAM sequence: TGG
gcttcagcctccctagtagc

SEQ ID NO: 35077 - DNA, 20 bp, Artificial Sequence
  Description of Artificial Sequence: Synthetic oligonucleotide
  Target: ATXN2; (-) strand; PAM type: NRG; PAM sequence: TAG
ttctgcttcagcctccctag

SEQ ID NO: 35078 - DNA, 20 bp, Artificial Sequence
  Description of Artificial Sequence: Synthetic oligonucleotide
  Target: ATXN2; (-) strand; PAM type: NRG; PAM sequence: TAG
tccttctgcttcagcctccc

SEQ ID NO: 35079 - DNA, 20 bp, Artificial Sequence
  Description of Artificial Sequence: Synthetic oligonucleotide
  Target: ATXN2; (-) strand; PAM type: NRG; PAM sequence: CAG
ctcaagcggtccttctgctt

SEQ ID NO: 35080 - DNA, 20 bp, Artificial Sequence
  Description of Artificial Sequence: Synthetic oligonucleotide
  Target: ATXN2; (-) strand; PAM type: NRG; PAM sequence: CGG
ctcgatctcctgggctcaag

SEQ ID NO: 35081 - DNA, 20 bp, Artificial Sequence
  Description of Artificial Sequence: Synthetic oligonucleotide
  Target: ATXN2; (-) strand; PAM type: NRG; PAM sequence: AAG
aacctcgatctcctgggctc

SEQ ID NO: 35082 - DNA, 20 bp, Artificial Sequence
  Description of Artificial Sequence: Synthetic oligonucleotide
  Target: ATXN2; (-) strand; PAM type: NRG; PAM sequence: GGG
cacagcaacctcgatctcct

SEQ ID NO: 35083 - DNA, 20 bp, Artificial Sequence
  Description of Artificial Sequence: Synthetic oligonucleotide
  Target: ATXN2; (-) strand; PAM type: NRG; PAM sequence: TGG
tcacagcaacctcgatctcc

SEQ ID NO: 35084 - DNA, 20 bp, Artificial Sequence
  Description of Artificial Sequence: Synthetic oligonucleotide
  Target: ATXN2; (-) strand; PAM type: NRG; PAM sequence: CAG
agtggcgcattcgtagctca

SEQ ID NO: 35085 - DNA, 20 bp, Artificial Sequence
  Description of Artificial Sequence: Synthetic oligonucleotide
  Target: ATXN2; (-) strand; PAM type: NRG; PAM sequence: TAG
agagtgcagtggcgcattcg

SEQ ID NO: 35086 - DNA, 20 bp, Artificial Sequence
  Description of Artificial Sequence: Synthetic oligonucleotide
  Target: ATXN2; (-) strand; PAM type: NRG; PAM sequence: TGG
ttgcccaggctagagtgcag

SEQ ID NO: 35087 - DNA, 20 bp, Artificial Sequence
  Description of Artificial Sequence: Synthetic oligonucleotide
  Target: ATXN2; (-) strand; PAM type: NRG; PAM sequence: CAG
ctgttgcccaggctagagtg

SEQ ID NO: 35088 - DNA, 20 bp, Artificial Sequence
  Description of Artificial Sequence: Synthetic oligonucleotide
  Target: ATXN2; (-) strand; PAM type: NRG; PAM sequence: GAG
ttggtctgttgcccaggcta

SEQ ID NO: 35089 - DNA, 20 bp, Artificial Sequence
  Description of Artificial Sequence: Synthetic oligonucleotide
  Target: ATXN2; (-) strand; PAM type: NRG; PAM sequence: TAG
tcttggtctgttgcccaggc

SEQ ID NO: 35090 - DNA, 20 bp, Artificial Sequence
  Description of Artificial Sequence: Synthetic oligonucleotide
  Target: ATXN2; (-) strand; PAM type: NRG; PAM sequence: AGG
agggtcttggtctgttgccc

SEQ ID NO: 35091 - DNA, 20 bp, Artificial Sequence
  Description of Artificial Sequence: Synthetic oligonucleotide
  Target: ATXN2; (-) strand; PAM type: NRG; PAM sequence: CAG
cagggtcttggtctgttgcc

SEQ ID NO: 35092 - DNA, 20 bp, Artificial Sequence
  Description of Artificial Sequence: Synthetic oligonucleotide
  Target: ATXN2; (-) strand; PAM type: NRG; PAM sequence: TGG
aactgaacgagacagggtct

SEQ ID NO: 35093 - DNA, 20 bp, Artificial Sequence
  Description of Artificial Sequence: Synthetic oligonucleotide
  Target: ATXN2; (-) strand; PAM type: NRG; PAM sequence: GGG
tctattaactgaacgagaca

SEQ ID NO: 35094 - DNA, 20 bp, Artificial Sequence
  Description of Artificial Sequence: Synthetic oligonucleotide
  Target: ATXN2; (-) strand; PAM type: NRG; PAM sequence: AGG
ctctattaactgaacgagac

SEQ ID NO: 35095 - DNA, 20 bp, Artificial Sequence
  Description of Artificial Sequence: Synthetic oligonucleotide
  Target: ATXN2; (-) strand; PAM type: NRG; PAM sequence: CAG
actctattaactgaacgaga

SEQ ID NO: 35096 - DNA, 20 bp, Artificial Sequence
  Description of Artificial Sequence: Synthetic oligonucleotide
  Target: ATXN2; (-) strand; PAM type: NRG; PAM sequence: GAG
agcaactctattaactgaac

SEQ ID NO: 35097 - DNA, 20 bp, Artificial Sequence
  Description of Artificial Sequence: Synthetic oligonucleotide
  Target: ATXN2; (-) strand; PAM type: NRG; PAM sequence: TAG
gtgtgtgtgtgtgtgtgttt

SEQ ID NO: 35098 - DNA, 20 bp, Artificial Sequence
  Description of Artificial Sequence: Synthetic oligonucleotide
  Target: ATXN2; (-) strand; PAM type: NRG; PAM sequence: CAG
atgttcacaaatgttcatag

SEQ ID NO: 35099 - DNA, 20 bp, Artificial Sequence
  Description of Artificial Sequence: Synthetic oligonucleotide
  Target: ATXN2; (-) strand; PAM type: NRG; PAM sequence: TAG
tatatgttcacaaatgttca

SEQ ID NO: 35100 - DNA, 20 bp, Artificial Sequence
  Description of Artificial Sequence: Synthetic oligonucleotide
  Target: ATXN2; (-) strand; PAM type: NRG; PAM sequence: AAG
tgaaaacatatatccacatg

SEQ ID NO: 35101 - DNA, 20 bp, Artificial Sequence
  Description of Artificial Sequence: Synthetic oligonucleotide
  Target: ATXN2; (-) strand; PAM type: NRG; PAM sequence: AAG
tcgtttgtaggaaccaaccc

SEQ ID NO: 35102 - DNA, 20 bp, Artificial Sequence
  Description of Artificial Sequence: Synthetic oligonucleotide
  Target: ATXN2; (-) strand; PAM type: NRG; PAM sequence: AGG
cacccaacaatttcgtttgt

SEQ ID NO: 35103 - DNA, 20 bp, Artificial Sequence
  Description of Artificial Sequence: Synthetic oligonucleotide
  Target: ATXN2; (-) strand; PAM type: NRG; PAM sequence: TAG
tcacccaacaatttcgtttg

SEQ ID NO: 35104 - DNA, 20 bp, Artificial Sequence
  Description of Artificial Sequence: Synthetic oligonucleotide
  Target: ATXN2; (-) strand; PAM type: NRG; PAM sequence: TAG
tctgaagtccagagaaaagg

SEQ ID NO: 35105 - DNA, 20 bp, Artificial Sequence
  Description of Artificial Sequence: Synthetic oligonucleotide
  Target: ATXN2; (-) strand; PAM type: NRG; PAM sequence: AGG
ccttctgaagtccagagaaa

SEQ ID NO: 35106 - DNA, 20 bp, Artificial Sequence
  Description of Artificial Sequence: Synthetic oligonucleotide
  Target: ATXN2; (-) strand; PAM type: NRG; PAM sequence: AAG
gccttctgaagtccagagaa

SEQ ID NO: 35107 - DNA, 20 bp, Artificial Sequence
  Description of Artificial Sequence: Synthetic oligonucleotide
  Target: ATXN2; (-) strand; PAM type: NRG; PAM sequence: GAG
cttaagccttctgaagtcca

SEQ ID NO: 35108 - DNA, 20 bp, Artificial Sequence
  Description of Artificial Sequence: Synthetic oligonucleotide
  Target: ATXN2; (-) strand; PAM type: NRG; PAM sequence: CAG
agcttaagccttctgaagtc

SEQ ID NO: 35109 - DNA, 20 bp, Artificial Sequence
  Description of Artificial Sequence: Synthetic oligonucleotide
  Target: ATXN2; (-) strand; PAM type: NRG; PAM sequence: AAG
tataaagcttaagccttctg

SEQ ID NO: 35110 - DNA, 20 bp, Artificial Sequence
  Description of Artificial Sequence: Synthetic oligonucleotide
  Target: ATXN2; (-) strand; PAM type: NRG; PAM sequence: AAG
gatattttcatataaagctt

SEQ ID NO: 35111 - DNA, 20 bp, Artificial Sequence
  Description of Artificial Sequence: Synthetic oligonucleotide
  Target: ATXN2; (-) strand; PAM type: NRG; PAM sequence: AAG
tactctgatattttcatata

SEQ ID NO: 35112 - DNA, 20 bp, Artificial Sequence
  Description of Artificial Sequence: Synthetic oligonucleotide
  Target: ATXN2; (-) strand; PAM type: NRG; PAM sequence: CAG
caggcatgagccaccgtgcc

SEQ ID NO: 35113 - DNA, 20 bp, Artificial Sequence
  Description of Artificial Sequence: Synthetic oligonucleotide
  Target: ATXN2; (-) strand; PAM type: NRG; PAM sequence: GAG
agtgctgggattacaggcat

SEQ ID NO: 35114 - DNA, 20 bp, Artificial Sequence
  Description of Artificial Sequence: Synthetic oligonucleotide
  Target: ATXN2; (-) strand; PAM type: NRG; PAM sequence: AGG
tcccaaagtgctgggattac

SEQ ID NO: 35115 - DNA, 20 bp, Artificial Sequence
  Description of Artificial Sequence: Synthetic oligonucleotide
  Target: ATXN2; (-) strand; PAM type: NRG; PAM sequence: CAG
ctcccaaagtgctgggatta

SEQ ID NO: 35116 - DNA, 20 bp, Artificial Sequence
  Description of Artificial Sequence: Synthetic oligonucleotide
  Target: ATXN2; (-) strand; PAM type: NRG; PAM sequence: GGG
cctcagtctcccaaagtgct

SEQ ID NO: 35117 - DNA, 20 bp, Artificial Sequence
  Description of Artificial Sequence: Synthetic oligonucleotide
  Target: ATXN2; (-) strand; PAM type: NRG; PAM sequence: TGG
acctcagtctcccaaagtgc

SEQ ID NO: 35118 - DNA, 20 bp, Artificial Sequence
  Description of Artificial Sequence: Synthetic oligonucleotide
  Target: ATXN2; (-) strand; PAM type: NRG; PAM sequence: AAG
cagcccacctcagtctccca

SEQ ID NO: 35119 - DNA, 20 bp, Artificial Sequence
  Description of Artificial Sequence: Synthetic oligonucleotide
  Target: ATXN2; (-) strand; PAM type: NRG; PAM sequence: CAG
ctcaggtgatcagcccacct

SEQ ID NO: 35120 - DNA, 20 bp, Artificial Sequence
  Description of Artificial Sequence: Synthetic oligonucleotide
  Target: ATXN2; (-) strand; PAM type: NRG; PAM sequence: CAG
atctcttgacctcaggtgat

SEQ ID NO: 35121 - DNA, 20 bp, Artificial Sequence
  Description of Artificial Sequence: Synthetic oligonucleotide
  Target: ATXN2; (-) strand; PAM type: NRG; PAM sequence: AGG
ggtctcgatctcttgacctc

SEQ ID NO: 35122 - DNA, 20 bp, Artificial Sequence
  Description of Artificial Sequence: Synthetic oligonucleotide
  Target: ATXN2; (-) strand; PAM type: NRG; PAM sequence: CAG
tggtctcgatctcttgacct

SEQ ID NO: 35123 - DNA, 20 bp, Artificial Sequence
  Description of Artificial Sequence: Synthetic oligonucleotide
  Target: ATXN2; (-) strand; PAM type: NRG; PAM sequence: TGG
tttcaccatgttggcaagga

SEQ ID NO: 35124 - DNA, 20 bp, Artificial Sequence
  Description of Artificial Sequence: Synthetic oligonucleotide
  Target: ATXN2; (-) strand; PAM type: NRG; PAM sequence: AGG
agggtttcaccatgttggca

SEQ ID NO: 35125 - DNA, 20 bp, Artificial Sequence
  Description of Artificial Sequence: Synthetic oligonucleotide
  Target: ATXN2; (-) strand; PAM type: NRG; PAM sequence: AAG
cagggtttcaccatgttggc

SEQ ID NO: 35126 - DNA, 20 bp, Artificial Sequence
  Description of Artificial Sequence: Synthetic oligonucleotide
  Target: ATXN2; (-) strand; PAM type: NRG; PAM sequence: TGG
gagacagggtttcaccatgt

SEQ ID NO: 35127 - DNA, 20 bp, Artificial Sequence
  Description of Artificial Sequence: Synthetic oligonucleotide
  Target: ATXN2; (-) strand; PAM type: NRG; PAM sequence: GGG
ttgtatttttaatagagaca

SEQ ID NO: 35128 - DNA, 20 bp, Artificial Sequence
  Description of Artificial Sequence: Synthetic oligonucleotide
  Target: ATXN2; (-) strand; PAM type: NRG; PAM sequence: AGG
tttgtatttttaatagagac

SEQ ID NO: 35129 - DNA, 20 bp, Artificial Sequence
  Description of Artificial Sequence: Synthetic oligonucleotide
  Target: ATXN2; (-) strand; PAM type: NRG; PAM sequence: CAG
ttttgtatttttaatagaga

SEQ ID NO: 35130 - DNA, 20 bp, Artificial Sequence
  Description of Artificial Sequence: Synthetic oligonucleotide
  Target: ATXN2; (-) strand; PAM type: NRG; PAM sequence: GAG
taatttttgtatttttaata

SEQ ID NO: 35131 - DNA, 20 bp, Artificial Sequence
  Description of Artificial Sequence: Synthetic oligonucleotide
  Target: ATXN2; (-) strand; PAM type: NRG; PAM sequence: TAG
gctaatttttgtatttttaa

SEQ ID NO: 35132 - DNA, 20 bp, Artificial Sequence
  Description of Artificial Sequence: Synthetic oligonucleotide
  Target: ATXN2; (-) strand; PAM type: NRG; PAM sequence: TGG
caggtgtgagccaccatgcc

SEQ ID NO: 35133 - DNA, 20 bp, Artificial Sequence
  Description of Artificial Sequence: Synthetic oligonucleotide
  Target: ATXN2; (-) strand; PAM type: NRG; PAM sequence: GAG
agtgctgggattacaggtgt

SEQ ID NO: 35134 - DNA, 20 bp, Artificial Sequence
  Description of Artificial Sequence: Synthetic oligonucleotide
  Target: ATXN2; (-) strand; PAM type: NRG; PAM sequence: AGG
tcccaaagtgctgggattac

SEQ ID NO: 35135 - DNA, 20 bp, Artificial Sequence
  Description of Artificial Sequence: Synthetic oligonucleotide
  Target: ATXN2; (-) strand; PAM type: NRG; PAM sequence: CAG
ctcccaaagtgctgggatta

SEQ ID NO: 35136 - DNA, 20 bp, Artificial Sequence
  Description of Artificial Sequence: Synthetic oligonucleotide
  Target: ATXN2; (-) strand; PAM type: NRG; PAM sequence: GGG
ccttggcctcccaaagtgct

SEQ ID NO: 35137 - DNA, 20 bp, Artificial Sequence
  Description of Artificial Sequence: Synthetic oligonucleotide
  Target: ATXN2; (-) strand; PAM type: NRG; PAM sequence: TGG
gccttggcctcccaaagtgc

SEQ ID NO: 35138 - DNA, 20 bp, Artificial Sequence
  Description of Artificial Sequence: Synthetic oligonucleotide
  Target: ATXN2; (-) strand; PAM type: NRG; PAM sequence: AAG
ctgcccgccttggcctccca

SEQ ID NO: 35139 - DNA, 20 bp, Artificial Sequence
  Description of Artificial Sequence: Synthetic oligonucleotide
  Target: ATXN2; (-) strand; PAM type: NRG; PAM sequence: TGG
acctcgtgatctgcccgcct

SEQ ID NO: 35140 - DNA, 20 bp, Artificial Sequence
  Description of Artificial Sequence: Synthetic oligonucleotide
  Target: ATXN2; (-) strand; PAM type: NRG; PAM sequence: TGG
tttcactgtgttagccagga

SEQ ID NO: 35141 - DNA, 20 bp, Artificial Sequence
  Description of Artificial Sequence: Synthetic oligonucleotide
  Target: ATXN2; (-) strand; PAM type: NRG; PAM sequence: AGG
ggggtttcactgtgttagcc

SEQ ID NO: 35142 - DNA, 20 bp, Artificial Sequence
  Description of Artificial Sequence: Synthetic oligonucleotide
  Target: ATXN2; (-) strand; PAM type: NRG; PAM sequence: CAG
cggggtttcactgtgttagc

SEQ ID NO: 35143 - DNA, 20 bp, Artificial Sequence
  Description of Artificial Sequence: Synthetic oligonucleotide
  Target: ATXN2; (-) strand; PAM type: NRG; PAM sequence: TAG
gagacggggtttcactgtgt

SEQ ID NO: 35144 - DNA, 20 bp, Artificial Sequence
  Description of Artificial Sequence: Synthetic oligonucleotide
  Target: ATXN2; (-) strand; PAM type: NRG; PAM sequence: GGG
ttgtatttttagtagagacg

SEQ ID NO: 35145 - DNA, 20 bp, Artificial Sequence
  Description of Artificial Sequence: Synthetic oligonucleotide
  Target: ATXN2; (-) strand; PAM type: NRG; PAM sequence: GGG
tttgtatttttagtagagac

SEQ ID NO: 35146 - DNA, 20 bp, Artificial Sequence
  Description of Artificial Sequence: Synthetic oligonucleotide
  Target: ATXN2; (-) strand; PAM type: NRG; PAM sequence: CGG
ttttgtatttttagtagaga

SEQ ID NO: 35147 - DNA, 20 bp, Artificial Sequence
  Description of Artificial Sequence: Synthetic oligonucleotide
  Target: ATXN2; (-) strand; PAM type: NRG; PAM sequence: GAG
atttttttgtatttttagta

SEQ ID NO: 35148 - DNA, 20 bp, Artificial Sequence
  Description of Artificial Sequence: Synthetic oligonucleotide
  Target: ATXN2; (-) strand; PAM type: NRG; PAM sequence: TAG
ctatttttttgtatttttag

SEQ ID NO: 35149 - DNA, 20 bp, Artificial Sequence
  Description of Artificial Sequence: Synthetic oligonucleotide
  Target: ATXN2; (-) strand; PAM type: NRG; PAM sequence: TAG
cacctatttttttgtatttt

SEQ ID NO: 35150 - DNA, 20 bp, Artificial Sequence
  Description of Artificial Sequence: Synthetic oligonucleotide
  Target: ATXN2; (-) strand; PAM type: NRG; PAM sequence: AGG
tcccaagtagctgggactac

SEQ ID NO: 35151 - DNA, 20 bp, Artificial Sequence
  Description of Artificial Sequence: Synthetic oligonucleotide
  Target: ATXN2; (-) strand; PAM type: NRG; PAM sequence: CAG
ctcccaagtagctgggacta

SEQ ID NO: 35152 - DNA, 20 bp, Artificial Sequence
  Description of Artificial Sequence: Synthetic oligonucleotide
  Target: ATXN2; (-) strand; PAM type: NRG; PAM sequence: GGG
cctcagcctcccaagtagct

SEQ ID NO: 35153 - DNA, 20 bp, Artificial Sequence
  Description of Artificial Sequence: Synthetic oligonucleotide
  Target: ATXN2; (-) strand; PAM type: NRG; PAM sequence: TGG
gcctcagcctcccaagtagc

SEQ ID NO: 35154 - DNA, 20 bp, Artificial Sequence
  Description of Artificial Sequence: Synthetic oligonucleotide
  Target: ATXN2; (-) strand; PAM type: NRG; PAM sequence: TAG
tcctgcctcagcctcccaag

SEQ ID NO: 35155 - DNA, 20 bp, Artificial Sequence
  Description of Artificial Sequence: Synthetic oligonucleotide
  Target: ATXN2; (-) strand; PAM type: NRG; PAM sequence: AAG
ttctcctgcctcagcctccc

SEQ ID NO: 35156 - DNA, 20 bp, Artificial Sequence
  Description of Artificial Sequence: Synthetic oligonucleotide
  Target: ATXN2; (-) strand; PAM type: NRG; PAM sequence: CAG
ttcatgccattctcctgcct

SEQ ID NO: 35157 - DNA, 20 bp, Artificial Sequence
  Description of Artificial Sequence: Synthetic oligonucleotide
  Target: ATXN2; (-) strand; PAM type: NRG; PAM sequence: GAG
cactgcaagctccgcctccc

SEQ ID NO: 35158 - DNA, 20 bp, Artificial Sequence
  Description of Artificial Sequence: Synthetic oligonucleotide
  Target: ATXN2; (-) strand; PAM type: NRG; PAM sequence: AAG
gcgccatctcacctcactgc

SEQ ID NO: 35159 - DNA, 20 bp, Artificial Sequence
  Description of Artificial Sequence: Synthetic oligonucleotide
  Target: ATXN2; (-) strand; PAM type: NRG; PAM sequence: TGG
ttgcccaggctggagtgcag

SEQ ID NO: 35160 - DNA, 20 bp, Artificial Sequence
  Description of Artificial Sequence: Synthetic oligonucleotide
  Target: ATXN2; (-) strand; PAM type: NRG; PAM sequence: CAG
ctgttgcccaggctggagtg

SEQ ID NO: 35161 - DNA, 20 bp, Artificial Sequence
  Description of Artificial Sequence: Synthetic oligonucleotide
  Target: ATXN2; (-) strand; PAM type: NRG; PAM sequence: GAG
tcgctctgttgcccaggctg

SEQ ID NO: 35162 - DNA, 20 bp, Artificial Sequence
  Description of Artificial Sequence: Synthetic oligonucleotide
  Target: ATXN2; (-) strand; PAM type: NRG; PAM sequence: TGG
tctcgctctgttgcccaggc

SEQ ID NO: 35163 - DNA, 20 bp, Artificial Sequence
  Description of Artificial Sequence: Synthetic oligonucleotide
  Target: ATXN2; (-) strand; PAM type: NRG; PAM sequence: AGG
agagtctcgctctgttgccc

SEQ ID NO: 35164 - DNA, 20 bp, Artificial Sequence
  Description of Artificial Sequence: Synthetic oligonucleotide
  Target: ATXN2; (-) strand; PAM type: NRG; PAM sequence: CAG
cagagtctcgctctgttgcc

SEQ ID NO: 35165 - DNA, 20 bp, Artificial Sequence
  Description of Artificial Sequence: Synthetic oligonucleotide
  Target: ATXN2; (-) strand; PAM type: NRG; PAM sequence: GAG
attttcttttttttgagaca

SEQ ID NO: 35166 - DNA, 20 bp, Artificial Sequence
  Description of Artificial Sequence: Synthetic oligonucleotide
  Target: ATXN2; (-) strand; PAM type: NRG; PAM sequence: CAG
gtattttcttttttttgaga

SEQ ID NO: 35167 - DNA, 20 bp, Artificial Sequence
  Description of Artificial Sequence: Synthetic oligonucleotide
  Target: ATXN2; (-) strand; PAM type: NRG; PAM sequence: GAG
ttttgtattttctttttttt

SEQ ID NO: 35168 - DNA, 20 bp, Artificial Sequence
  Description of Artificial Sequence: Synthetic oligonucleotide
  Target: ATXN2; (-) strand; PAM type: NRG; PAM sequence: CAG
caggcgcacaccaccatgcc

SEQ ID NO: 35169 - DNA, 20 bp, Artificial Sequence
  Description of Artificial Sequence: Synthetic oligonucleotide
  Target: ATXN2; (-) strand; PAM type: NRG; PAM sequence: AGG
tcccgagtagttaggactac

SEQ ID NO: 35170 - DNA, 20 bp, Artificial Sequence
  Description of Artificial Sequence: Synthetic oligonucleotide
  Target: ATXN2; (-) strand; PAM type: NRG; PAM sequence: CAG
ctcccgagtagttaggacta

SEQ ID NO: 35171 - DNA, 20 bp, Artificial Sequence
  Description of Artificial Sequence: Synthetic oligonucleotide
  Target: ATXN2; (-) strand; PAM type: NRG; PAM sequence: AGG
cctcagcctcccgagtagtt

SEQ ID NO: 35172 - DNA, 20 bp, Artificial Sequence
  Description of Artificial Sequence: Synthetic oligonucleotide
  Target: ATXN2; (-) strand; PAM type: NRG; PAM sequence: TAG
gcctcagcctcccgagtagt

SEQ ID NO: 35173 - DNA, 20 bp, Artificial Sequence
  Description of Artificial Sequence: Synthetic oligonucleotide
  Target: ATXN2; (-) strand; PAM type: NRG; PAM sequence: TAG
tcctgcctcagcctcccgag

SEQ ID NO: 35174 - DNA, 20 bp, Artificial Sequence
  Description of Artificial Sequence: Synthetic oligonucleotide
  Target: ATXN2; (-) strand; PAM type: NRG; PAM sequence: GAG
ttctcctgcctcagcctccc

SEQ ID NO: 35175 - DNA, 20 bp, Artificial Sequence
  Description of Artificial Sequence: Synthetic oligonucleotide
  Target: ATXN2; (-) strand; PAM type: NRG; PAM sequence: CAG
ttcaagcgattctcctgcct

SEQ ID NO: 35176 - DNA, 20 bp, Artificial Sequence
  Description of Artificial Sequence: Synthetic oligonucleotide
  Target: ATXN2; (-) strand; PAM type: NRG; PAM sequence: AAG
aacctctgcctgccaggttc

SEQ ID NO: 35177 - DNA, 20 bp, Artificial Sequence
  Description of Artificial Sequence: Synthetic oligonucleotide
  Target: ATXN2; (-) strand; PAM type: NRG; PAM sequence: AGG
cactgcaacctctgcctgcc

SEQ ID NO: 35178 - DNA, 20 bp, Artificial Sequence
  Description of Artificial Sequence: Synthetic oligonucleotide
  Target: ATXN2; (-) strand; PAM type: NRG; PAM sequence: CAG
tcactgcaacctctgcctgc

SEQ ID NO: 35179 - DNA, 20 bp, Artificial Sequence
  Description of Artificial Sequence: Synthetic oligonucleotide
  Target: ATXN2; (-) strand; PAM type: NRG; PAM sequence: TGG
gtcaccaggctggagtgcag

SEQ ID NO: 35180 - DNA, 20 bp, Artificial Sequence
  Description of Artificial Sequence: Synthetic oligonucleotide
  Target: ATXN2; (-) strand; PAM type: NRG; PAM sequence: CAG
tctgtcaccaggctggagtg

SEQ ID NO: 35181 - DNA, 20 bp, Artificial Sequence
  Description of Artificial Sequence: Synthetic oligonucleotide
  Target: ATXN2; (-) strand; PAM type: NRG; PAM sequence: GAG
gtcactctgtcaccaggctg

SEQ ID NO: 35182 - DNA, 20 bp, Artificial Sequence
  Description of Artificial Sequence: Synthetic oligonucleotide
  Target: ATXN2; (-) strand; PAM type: NRG; PAM sequence: TGG
gtgtcactctgtcaccaggc

SEQ ID NO: 35183 - DNA, 20 bp, Artificial Sequence
  Description of Artificial Sequence: Synthetic oligonucleotide
  Target: ATXN2; (-) strand; PAM type: NRG; PAM sequence: AGG
tggagtgtcactctgtcacc

SEQ ID NO: 35184 - DNA, 20 bp, Artificial Sequence
  Description of Artificial Sequence: Synthetic oligonucleotide
  Target: ATXN2; (-) strand; PAM type: NRG; PAM sequence: CAG
atggagtgtcactctgtcac

SEQ ID NO: 35185 - DNA, 20 bp, Artificial Sequence
  Description of Artificial Sequence: Synthetic oligonucleotide
  Target: ATXN2; (-) strand; PAM type: NRG; PAM sequence: GAG
tatattatttttttgagatg

SEQ ID NO: 35186 - DNA, 20 bp, Artificial Sequence
  Description of Artificial Sequence: Synthetic oligonucleotide
  Target: ATXN2; (-) strand; PAM type: NRG; PAM sequence: TGG
tatatattatttttttgaga

SEQ ID NO: 35187 - DNA, 20 bp, Artificial Sequence
  Description of Artificial Sequence: Synthetic oligonucleotide
  Target: ATXN2; (-) strand; PAM type: NRG; PAM sequence: GAG
tatatatatattattttttt

SEQ ID NO: 35188 - DNA, 20 bp, Artificial Sequence
  Description of Artificial Sequence: Synthetic oligonucleotide
  Target: ATXN2; (-) strand; PAM type: NRG; PAM sequence: AGG
ctgacacaccacttctttta

SEQ ID NO: 35189 - DNA, 20 bp, Artificial Sequence
  Description of Artificial Sequence: Synthetic oligonucleotide
  Target: ATXN2; (-) strand; PAM type: NRG; PAM sequence: AAG
cctgacacaccacttctttt

SEQ ID NO: 35190 - DNA, 20 bp, Artificial Sequence
  Description of Artificial Sequence: Synthetic oligonucleotide
  Target: ATXN2; (-) strand; PAM type: NRG; PAM sequence: AGG
atcatttgggaccgccatag

SEQ ID NO: 35191 - DNA, 20 bp, Artificial Sequence
  Description of Artificial Sequence: Synthetic oligonucleotide
  Target: ATXN2; (-) strand; PAM type: NRG; PAM sequence: GAG
aatcatttgggaccgccata

SEQ ID NO: 35192 - DNA, 20 bp, Artificial Sequence
  Description of Artificial Sequence: Synthetic oligonucleotide
  Target: ATXN2; (-) strand; PAM type: NRG; PAM sequence: TAG
agaatcatttgggaccgcca

SEQ ID NO: 35193 - DNA, 20 bp, Artificial Sequence
  Description of Artificial Sequence: Synthetic oligonucleotide
  Target: ATXN2; (-) strand; PAM type: NRG; PAM sequence: GGG
ccaggaggcaagaatcattt

SEQ ID NO: 35194 - DNA, 20 bp, Artificial Sequence
  Description of Artificial Sequence: Synthetic oligonucleotide
  Target: ATXN2; (-) strand; PAM type: NRG; PAM sequence: TGG
accaggaggcaagaatcatt

SEQ ID NO: 35195 - DNA, 20 bp, Artificial Sequence
  Description of Artificial Sequence: Synthetic oligonucleotide
  Target: ATXN2; (-) strand; PAM type: NRG; PAM sequence: AAG
gtgtctgaacaccaggaggc

SEQ ID NO: 35196 - DNA, 20 bp, Artificial Sequence
  Description of Artificial Sequence: Synthetic oligonucleotide
  Target: ATXN2; (-) strand; PAM type: NRG; PAM sequence: AGG
cacagtgtctgaacaccagg

SEQ ID NO: 35197 - DNA, 20 bp, Artificial Sequence
  Description of Artificial Sequence: Synthetic oligonucleotide
  Target: ATXN2; (-) strand; PAM type: NRG; PAM sequence: GAG
tcacagtgtctgaacaccag

SEQ ID NO: 35198 - DNA, 20 bp, Artificial Sequence
  Description of Artificial Sequence: Synthetic oligonucleotide
  Target: ATXN2; (-) strand; PAM type: NRG; PAM sequence: AGG
tttcacagtgtctgaacacc

SEQ ID NO: 35199 - DNA, 20 bp, Artificial Sequence
  Description of Artificial Sequence: Synthetic oligonucleotide
  Target: ATXN2; (-) strand; PAM type: NRG; PAM sequence: CAG
atttcacagtgtctgaacac

SEQ ID NO: 35200 - DNA, 20 bp, Artificial Sequence
  Description of Artificial Sequence: Synthetic oligonucleotide
  Target: ATXN2; (-) strand; PAM type: NRG; PAM sequence: CAG
ttcaggtggggaggatttca

SEQ ID NO: 35201 - DNA, 20 bp, Artificial Sequence
  Description of Artificial Sequence: Synthetic oligonucleotide
  Target: ATXN2; (-) strand; PAM type: NRG; PAM sequence: AGG
gttttaaaattcaggtgggg

SEQ ID NO: 35202 - DNA, 20 bp, Artificial Sequence
  Description of Artificial Sequence: Synthetic oligonucleotide
  Target: ATXN2; (-) strand; PAM type: NRG; PAM sequence: GAG
tgttttaaaattcaggtggg

SEQ ID NO: 35203 - DNA, 20 bp, Artificial Sequence
  Description of Artificial Sequence: Synthetic oligonucleotide
  Target: ATXN2; (-) strand; PAM type: NRG; PAM sequence: GGG
attgttttaaaattcaggtg

SEQ ID NO: 35204 - DNA, 20 bp, Artificial Sequence
  Description of Artificial Sequence: Synthetic oligonucleotide
  Target: ATXN2; (-) strand; PAM type: NRG; PAM sequence: GGG
tattgttttaaaattcaggt

SEQ ID NO: 35205 - DNA, 20 bp, Artificial Sequence
  Description of Artificial Sequence: Synthetic oligonucleotide
  Target: ATXN2; (-) strand; PAM type: NRG; PAM sequence: TGG
gtattgttttaaaattcagg

SEQ ID NO: 35206 - DNA, 20 bp, Artificial Sequence
  Description of Artificial Sequence: Synthetic oligonucleotide
  Target: ATXN2; (-) strand; PAM type: NRG; PAM sequence: AGG
aaagtattgttttaaaattc

SEQ ID NO: 35207 - DNA, 20 bp, Artificial Sequence
  Description of Artificial Sequence: Synthetic oligonucleotide
  Target: ATXN2; (-) strand; PAM type: NRG; PAM sequence: CAG
aaaagtattgttttaaaatt

SEQ ID NO: 35208 - DNA, 20 bp, Artificial Sequence
  Description of Artificial Sequence: Synthetic oligonucleotide
  Target: ATXN2; (-) strand; PAM type: NRG; PAM sequence: AAG
gtctcgaaaaaaaaaaaaaa

SEQ ID NO: 35209 - DNA, 20 bp, Artificial Sequence
  Description of Artificial Sequence: Synthetic oligonucleotide
  Target: ATXN2; (-) strand; PAM type: NRG; PAM sequence: AAG
tccagcctggttggcagagt

SEQ ID NO: 35210 - DNA, 20 bp, Artificial Sequence
  Description of Artificial Sequence: Synthetic oligonucleotide
  Target: ATXN2; (-) strand; PAM type: NRG; PAM sequence: GAG
gtactccagcctggttggca

SEQ ID NO: 35211 - DNA, 20 bp, Artificial Sequence
  Description of Artificial Sequence: Synthetic oligonucleotide
  Target: ATXN2; (-) strand; PAM type: NRG; PAM sequence: CAG
ctgtactccagcctggttgg

SEQ ID NO: 35212 - DNA, 20 bp, Artificial Sequence
  Description of Artificial Sequence: Synthetic oligonucleotide
  Target: ATXN2; (-) strand; PAM type: NRG; PAM sequence: TGG
gaactgtactccagcctggt

SEQ ID NO: 35213 - DNA, 20 bp, Artificial Sequence
  Description of Artificial Sequence: Synthetic oligonucleotide
  Target: ATXN2; (-) strand; PAM type: NRG; PAM sequence: TGG
tgtggaactgtactccagcc

SEQ ID NO: 35214 - DNA, 20 bp, Artificial Sequence
  Description of Artificial Sequence: Synthetic oligonucleotide
  Target: ATXN2; (-) strand; PAM type: NRG; PAM sequence: CAG
cagactgtggaactgtactc

SEQ ID NO: 35215 - DNA, 20 bp, Artificial Sequence
  Description of Artificial Sequence: Synthetic oligonucleotide
  Target: ATXN2; (-) strand; PAM type: NRG; PAM sequence: TGG
cgctgcagtgagccagactg

SEQ ID NO: 35216 - DNA, 20 bp, Artificial Sequence
  Description of Artificial Sequence: Synthetic oligonucleotide
  Target: ATXN2; (-) strand; PAM type: NRG; PAM sequence: CAG
aggcagacgctgcagtgagc

SEQ ID NO: 35217 - DNA, 20 bp, Artificial Sequence
  Description of Artificial Sequence: Synthetic oligonucleotide
  Target: ATXN2; (-) strand; PAM type: NRG; PAM sequence: GAG
tgggaggcagacgctgcagt

SEQ ID NO: 35218 - DNA, 20 bp, Artificial Sequence
  Description of Artificial Sequence: Synthetic oligonucleotide
  Target: ATXN2; (-) strand; PAM type: NRG; PAM sequence: CAG
cgcctgggaggcagacgctg

SEQ ID NO: 35219 - DNA, 20 bp, Artificial Sequence
  Description of Artificial Sequence: Synthetic oligonucleotide
  Target: ATXN2; (-) strand; PAM type: NRG; PAM sequence: CAG
gctcgggaccgcctgggagg

SEQ ID NO: 35220 - DNA, 20 bp, Artificial Sequence
  Description of Artificial Sequence: Synthetic oligonucleotide
  Target: ATXN2; (-) strand; PAM type: NRG; PAM sequence: AGG
attgctcgggaccgcctggg

SEQ ID NO: 35221 - DNA, 20 bp, Artificial Sequence
  Description of Artificial Sequence: Synthetic oligonucleotide
  Target: ATXN2; (-) strand; PAM type: NRG; PAM sequence: GAG
gattgctcgggaccgcctgg

SEQ ID NO: 35222 - DNA, 20 bp, Artificial Sequence
  Description of Artificial Sequence: Synthetic oligonucleotide
  Target: ATXN2; (-) strand; PAM type: NRG; PAM sequence: GGG
aggattgctcgggaccgcct

SEQ ID NO: 35223 - DNA, 20 bp, Artificial Sequence
  Description of Artificial Sequence: Synthetic oligonucleotide
  Target: ATXN2; (-) strand; PAM type: NRG; PAM sequence: TGG
gaggattgctcgggaccgcc

SEQ ID NO: 35224 - DNA, 20 bp, Artificial Sequence
  Description of Artificial Sequence: Synthetic oligonucleotide
  Target: ATXN2; (-) strand; PAM type: NRG; PAM sequence: GGG
ctgagatgggaggattgctc

SEQ ID NO: 35225 - DNA, 20 bp, Artificial Sequence
  Description of Artificial Sequence: Synthetic oligonucleotide
  Target: ATXN2; (-) strand; PAM type: NRG; PAM sequence: CGG
gctgagatgggaggattgct

SEQ ID NO: 35226 - DNA, 20 bp, Artificial Sequence
  Description of Artificial Sequence: Synthetic oligonucleotide
  Target: ATXN2; (-) strand; PAM type: NRG; PAM sequence: AGG
actctgaaggctgagatggg

SEQ ID NO: 35227 - DNA, 20 bp, Artificial Sequence
  Description of Artificial Sequence: Synthetic oligonucleotide
  Target: ATXN2; (-) strand; PAM type: NRG; PAM sequence: GAG
tactctgaaggctgagatgg

SEQ ID NO: 35228 - DNA, 20 bp, Artificial Sequence
  Description of Artificial Sequence: Synthetic oligonucleotide
  Target: ATXN2; (-) strand; PAM type: NRG; PAM sequence: GGG
gatactctgaaggctgagat

SEQ ID NO: 35229 - DNA, 20 bp, Artificial Sequence
  Description of Artificial Sequence: Synthetic oligonucleotide
  Target: ATXN2; (-) strand; PAM type: NRG; PAM sequence: TGG
tgatactctgaaggctgaga

SEQ ID NO: 35230 - DNA, 20 bp, Artificial Sequence
  Description of Artificial Sequence: Synthetic oligonucleotide
  Target: ATXN2; (-) strand; PAM type: NRG; PAM sequence: GAG
tccctgatactctgaaggct

SEQ ID NO: 35231 - DNA, 20 bp, Artificial Sequence
  Description of Artificial Sequence: Synthetic oligonucleotide
  Target: ATXN2; (-) strand; PAM type: NRG; PAM sequence: AGG
tgtagtccctgatactctga

SEQ ID NO: 35232 - DNA, 20 bp, Artificial Sequence
  Description of Artificial Sequence: Synthetic oligonucleotide
  Target: ATXN2; (-) strand; PAM type: NRG; PAM sequence: AAG
ctgtagtccctgatactctg

SEQ ID NO: 35233 - DNA, 20 bp, Artificial Sequence
  Description of Artificial Sequence: Synthetic oligonucleotide
  Target: ATXN2; (-) strand; PAM type: NRG; PAM sequence: TAG
ggtgtggtggtgcacgcctg

SEQ ID NO: 35234 - DNA, 20 bp, Artificial Sequence
  Description of Artificial Sequence: Synthetic oligonucleotide
  Target: ATXN2; (-) strand; PAM type: NRG; PAM sequence: TGG
caaaaattagctgggtgtgg

SEQ ID NO: 35235 - DNA, 20 bp, Artificial Sequence
  Description of Artificial Sequence: Synthetic oligonucleotide
  Target: ATXN2; (-) strand; PAM type: NRG; PAM sequence: TGG
taacaaaaattagctgggtg

SEQ ID NO: 35236 - DNA, 20 bp, Artificial Sequence
  Description of Artificial Sequence: Synthetic oligonucleotide
  Target: ATXN2; (-) strand; PAM type: NRG; PAM sequence: GGG
aaaactaacaaaaattagct

SEQ ID NO: 35237 - DNA, 20 bp, Artificial Sequence
  Description of Artificial Sequence: Synthetic oligonucleotide
  Target: ATXN2; (-) strand; PAM type: NRG; PAM sequence: TGG
caaaactaacaaaaattagc

SEQ ID NO: 35238 - DNA, 20 bp, Artificial Sequence
  Description of Artificial Sequence: Synthetic oligonucleotide
  Target: ATXN2; (-) strand; PAM type: NRG; PAM sequence: TAG
cccccaaaactaacaaaaat

SEQ ID NO: 35239 - DNA, 20 bp, Artificial Sequence
  Description of Artificial Sequence: Synthetic oligonucleotide
  Target: ATXN2; (-) strand; PAM type: NRG; PAM sequence: AAG
tccagcctgggcaagacagc

SEQ ID NO: 35240 - DNA, 20 bp, Artificial Sequence
  Description of Artificial Sequence: Synthetic oligonucleotide
  Target: ATXN2; (-) strand; PAM type: NRG; PAM sequence: CAG
gcattccagcctgggcaaga

SEQ ID NO: 35241 - DNA, 20 bp, Artificial Sequence
  Description of Artificial Sequence: Synthetic oligonucleotide
  Target: ATXN2; (-) strand; PAM type: NRG; PAM sequence: AAG
cactgcattccagcctgggc

SEQ ID NO: 35242 - DNA, 20 bp, Artificial Sequence
  Description of Artificial Sequence: Synthetic oligonucleotide
  Target: ATXN2; (-) strand; PAM type: NRG; PAM sequence: GGG
gtgccactgcattccagcct

SEQ ID NO: 35243 - DNA, 20 bp, Artificial Sequence
  Description of Artificial Sequence: Synthetic oligonucleotide
  Target: ATXN2; (-) strand; PAM type: NRG; PAM sequence: TGG
tgtgccactgcattccagcc

SEQ ID NO: 35244 - DNA, 20 bp, Artificial Sequence
  Description of Artificial Sequence: Synthetic oligonucleotide
  Target: ATXN2; (-) strand; PAM type: NRG; PAM sequence: CAG
gagattgtgccactgcattc

SEQ ID NO: 35245 - DNA, 20 bp, Artificial Sequence
  Description of Artificial Sequence: Synthetic oligonucleotide
  Target: ATXN2; (-) strand; PAM type: NRG; PAM sequence: GAG
ggtggaggttacagtgaact

SEQ ID NO: 35246 - DNA, 20 bp, Artificial Sequence
  Description of Artificial Sequence: Synthetic oligonucleotide
  Target: ATXN2; (-) strand; PAM type: NRG; PAM sequence: CAG
aacccaggaggtggaggtta

SEQ ID NO: 35247 - DNA, 20 bp, Artificial Sequence
  Description of Artificial Sequence: Synthetic oligonucleotide
  Target: ATXN2; (-) strand; PAM type: NRG; PAM sequence: AGG
cacttgaacccaggaggtgg

SEQ ID NO: 35248 - DNA, 20 bp, Artificial Sequence
  Description of Artificial Sequence: Synthetic oligonucleotide
  Target: ATXN2; (-) strand; PAM type: NRG; PAM sequence: GAG
tcacttgaacccaggaggtg

SEQ ID NO: 35249 - DNA, 20 bp, Artificial Sequence
  Description of Artificial Sequence: Synthetic oligonucleotide
  Target: ATXN2; (-) strand; PAM type: NRG; PAM sequence: TGG
gatcacttgaacccaggagg

SEQ ID NO: 35250 - DNA, 20 bp, Artificial Sequence
  Description of Artificial Sequence: Synthetic oligonucleotide
  Target: ATXN2; (-) strand; PAM type: NRG; PAM sequence: AGG
gaggatcacttgaacccagg

SEQ ID NO: 35251 - DNA, 20 bp, Artificial Sequence
  Description of Artificial Sequence: Synthetic oligonucleotide
  Target: ATXN2; (-) strand; PAM type: NRG; PAM sequence: GAG
ggaggatcacttgaacccag

SEQ ID NO: 35252 - DNA, 20 bp, Artificial Sequence
  Description of Artificial Sequence: Synthetic oligonucleotide
  Target: ATXN2; (-) strand; PAM type: NRG; PAM sequence: AGG
ggggaggatcacttgaaccc

SEQ ID NO: 35253 - DNA, 20 bp, Artificial Sequence
  Description of Artificial Sequence: Synthetic oligonucleotide
  Target: ATXN2; (-) strand; PAM type: NRG; PAM sequence: CAG
cggggaggatcacttgaacc

SEQ ID NO: 35254 - DNA, 20 bp, Artificial Sequence
  Description of Artificial Sequence: Synthetic oligonucleotide
  Target: ATXN2; (-) strand; PAM type: NRG; PAM sequence: AGG
acatggaaggctgagcgggg

SEQ ID NO: 35255 - DNA, 20 bp, Artificial Sequence
  Description of Artificial Sequence: Synthetic oligonucleotide
  Target: ATXN2; (-) strand; PAM type: NRG; PAM sequence: GAG
tacatggaaggctgagcggg

SEQ ID NO: 35256 - DNA, 20 bp, Artificial Sequence
  Description of Artificial Sequence: Synthetic oligonucleotide
  Target: ATXN2; (-) strand; PAM type: NRG; PAM sequence: GGG
gctacatggaaggctgagcg

SEQ ID NO: 35257 - DNA, 20 bp, Artificial Sequence
  Description of Artificial Sequence: Synthetic oligonucleotide
  Target: ATXN2; (-) strand; PAM type: NRG; PAM sequence: GGG
agctacatggaaggctgagc

SEQ ID NO: 35258 - DNA, 20 bp, Artificial Sequence
  Description of Artificial Sequence: Synthetic oligonucleotide
  Target: ATXN2; (-) strand; PAM type: NRG; PAM sequence: CGG
cagctacatggaaggctgag

SEQ ID NO: 35259 - DNA, 20 bp, Artificial Sequence
  Description of Artificial Sequence: Synthetic oligonucleotide
  Target: ATXN2; (-) strand; PAM type: NRG; PAM sequence: GAG
tcccagctacatggaaggct

SEQ ID NO: 35260 - DNA, 20 bp, Artificial Sequence
  Description of Artificial Sequence: Synthetic oligonucleotide
  Target: ATXN2; (-) strand; PAM type: NRG; PAM sequence: AGG
tataatcccagctacatgga

SEQ ID NO: 35261 - DNA, 20 bp, Artificial Sequence
  Description of Artificial Sequence: Synthetic oligonucleotide
  Target: ATXN2; (-) strand; PAM type: NRG; PAM sequence: AAG
ctataatcccagctacatgg

SEQ ID NO: 35262 - DNA, 20 bp, Artificial Sequence
  Description of Artificial Sequence: Synthetic oligonucleotide
  Target: ATXN2; (-) strand; PAM type: NRG; PAM sequence: TGG
tgcctataatcccagctaca

SEQ ID NO: 35263 - DNA, 20 bp, Artificial Sequence
  Description of Artificial Sequence: Synthetic oligonucleotide
  Target: ATXN2; (-) strand; PAM type: NRG; PAM sequence: CAG
gtggtgagtgcctataatcc

SEQ ID NO: 35264 - DNA, 20 bp, Artificial Sequence
  Description of Artificial Sequence: Synthetic oligonucleotide
  Target: ATXN2; (-) strand; PAM type: NRG; PAM sequence: GAG
aattagctggacatggtggt

SEQ ID NO: 35265 - DNA, 20 bp, Artificial Sequence
  Description of Artificial Sequence: Synthetic oligonucleotide
  Target: ATXN2; (-) strand; PAM type: NRG; PAM sequence: TGG
caaaaattagctggacatgg

SEQ ID NO: 35266 - DNA, 20 bp, Artificial Sequence
  Description of Artificial Sequence: Synthetic oligonucleotide
  Target: ATXN2; (-) strand; PAM type: NRG; PAM sequence: TGG
atacaaaaattagctggaca

SEQ ID NO: 35267 - DNA, 20 bp, Artificial Sequence
  Description of Artificial Sequence: Synthetic oligonucleotide
  Target: ATXN2; (-) strand; PAM type: NRG; PAM sequence: TGG
ctaaaaatacaaaaattagc

SEQ ID NO: 35268 - DNA, 20 bp, Artificial Sequence
  Description of Artificial Sequence: Synthetic oligonucleotide
  Target: ATXN2; (-) strand; PAM type: NRG; PAM sequence: TAG
tctactaaaaatacaaaaat

SEQ ID NO: 35269 - DNA, 20 bp, Artificial Sequence
  Description of Artificial Sequence: Synthetic oligonucleotide
  Target: ATXN2; (-) strand; PAM type: NRG; PAM sequence: TGG
tcacttgaggtgaggagttc

SEQ ID NO: 35270 - DNA, 20 bp, Artificial Sequence
  Description of Artificial Sequence: Synthetic oligonucleotide
  Target: ATXN2; (-) strand; PAM type: NRG; PAM sequence: GAG
ggcagatcacttgaggtgag

SEQ ID NO: 35271 - DNA, 20 bp, Artificial Sequence
  Description of Artificial Sequence: Synthetic oligonucleotide
  Target: ATXN2; (-) strand; PAM type: NRG; PAM sequence: AGG
caggcagatcacttgaggtg

SEQ ID NO: 35272 - DNA, 20 bp, Artificial Sequence
  Description of Artificial Sequence: Synthetic oligonucleotide
  Target: ATXN2; (-) strand; PAM type: NRG; PAM sequence: GAG
gcaggcagatcacttgaggt

SEQ ID NO: 35273 - DNA, 20 bp, Artificial Sequence
  Description of Artificial Sequence: Synthetic oligonucleotide
  Target: ATXN2; (-) strand; PAM type: NRG; PAM sequence: AGG
caaggcaggcagatcacttg

SEQ ID NO: 35274 - DNA, 20 bp, Artificial Sequence
  Description of Artificial Sequence: Synthetic oligonucleotide
  Target: ATXN2; (-) strand; PAM type: NRG; PAM sequence: GAG
ccaaggcaggcagatcactt

SEQ ID NO: 35275 - DNA, 20 bp, Artificial Sequence
  Description of Artificial Sequence: Synthetic oligonucleotide
  Target: ATXN2; (-) strand; PAM type: NRG; PAM sequence: CAG
ctttgggaggccaaggcagg

SEQ ID NO: 35276 - DNA, 20 bp, Artificial Sequence
  Description of Artificial Sequence: Synthetic oligonucleotide
  Target: ATXN2; (-) strand; PAM type: NRG; PAM sequence: AGG
gcactttgggaggccaaggc

SEQ ID NO: 35277 - DNA, 20 bp, Artificial Sequence
  Description of Artificial Sequence: Synthetic oligonucleotide
  Target: ATXN2; (-) strand; PAM type: NRG; PAM sequence: CAG
agcactttgggaggccaagg

SEQ ID NO: 35278 - DNA, 20 bp, Artificial Sequence
  Description of Artificial Sequence: Synthetic oligonucleotide
  Target: ATXN2; (+) strand; PAM type: NRG; PAM sequence: TAG
aaggtgggtaaaccaatagc

SEQ ID NO: 35279 - DNA, 20 bp, Artificial Sequence
  Description of Artificial Sequence: Synthetic oligonucleotide
  Target: ATXN2; (+) strand; PAM type: NRG; PAM sequence: AGG
aggtgggtaaaccaatagct

SEQ ID NO: 35280 - DNA, 20 bp, Artificial Sequence
  Description of Artificial Sequence: Synthetic oligonucleotide
  Target: ATXN2; (+) strand; PAM type: NRG; PAM sequence: TGG
atagctaggccattgtcttc

SEQ ID NO: 35281 - DNA, 20 bp, Artificial Sequence
  Description of Artificial Sequence: Synthetic oligonucleotide
  Target: ATXN2; (+) strand; PAM type: NRG; PAM sequence: GGG
tagctaggccattgtcttct

SEQ ID NO: 35282 - DNA, 20 bp, Artificial Sequence
  Description of Artificial Sequence: Synthetic oligonucleotide
  Target: ATXN2; (+) strand; PAM type: NRG; PAM sequence: TGG
ccattgtcttctgggtacgc

SEQ ID NO: 35283 - DNA, 20 bp, Artificial Sequence
  Description of Artificial Sequence: Synthetic oligonucleotide
  Target: ATXN2; (+) strand; PAM type: NRG; PAM sequence: CAG
cttctgggtacgctggaacc

SEQ ID NO: 35284 - DNA, 20 bp, Artificial Sequence
  Description of Artificial Sequence: Synthetic oligonucleotide
  Target: ATXN2; (+) strand; PAM type: NRG; PAM sequence: CAG
ggtacgctggaacccagact

SEQ ID NO: 35285 - DNA, 20 bp, Artificial Sequence
  Description of Artificial Sequence: Synthetic oligonucleotide
  Target: ATXN2; (+) strand; PAM type: NRG; PAM sequence: CAG
gctggaacccagactcagcc

SEQ ID NO: 35286 - DNA, 20 bp, Artificial Sequence
  Description of Artificial Sequence: Synthetic oligonucleotide
  Target: ATXN2; (+) strand; PAM type: NRG; PAM sequence: AGG
ctggaacccagactcagccc

SEQ ID NO: 35287 - DNA, 20 bp, Artificial Sequence
  Description of Artificial Sequence: Synthetic oligonucleotide
  Target: ATXN2; (+) strand; PAM type: NRG; PAM sequence: AAG
ccagactcagcccaggacat

SEQ ID NO: 35288 - DNA, 20 bp, Artificial Sequence
  Description of Artificial Sequence: Synthetic oligonucleotide
  Target: ATXN2; (+) strand; PAM type: NRG; PAM sequence: AGG
cagactcagcccaggacata

SEQ ID NO: 35289 - DNA, 20 bp, Artificial Sequence
  Description of Artificial Sequence: Synthetic oligonucleotide
  Target: ATXN2; (+) strand; PAM type: NRG; PAM sequence: TAG
actcagcccaggacataagg

SEQ ID NO: 35290 - DNA, 20 bp, Artificial Sequence
  Description of Artificial Sequence: Synthetic oligonucleotide
  Target: ATXN2; (+) strand; PAM type: NRG; PAM sequence: CAG
ccatcacccatcttatctaa

SEQ ID NO: 35291 - DNA, 20 bp, Artificial Sequence
  Description of Artificial Sequence: Synthetic oligonucleotide
  Target: ATXN2; (+) strand; PAM type: NRG; PAM sequence: AGG
catcacccatcttatctaac

SEQ ID NO: 35292 - DNA, 20 bp, Artificial Sequence
  Description of Artificial Sequence: Synthetic oligonucleotide
  Target: ATXN2; (+) strand; PAM type: NRG; PAM sequence: TGG
tatctaacaggtgcttctcc

SEQ ID NO: 35293 - DNA, 20 bp, Artificial Sequence
  Description of Artificial Sequence: Synthetic oligonucleotide
  Target: ATXN2; (+) strand; PAM type: NRG; PAM sequence: GGG
atctaacaggtgcttctcct

SEQ ID NO: 35294 - DNA, 20 bp, Artificial Sequence
  Description of Artificial Sequence: Synthetic oligonucleotide
  Target: ATXN2; (+) strand; PAM type: NRG; PAM sequence: GGG
tctaacaggtgcttctcctg

SEQ ID NO: 35295 - DNA, 20 bp, Artificial Sequence
  Description of Artificial Sequence: Synthetic oligonucleotide
  Target: ATXN2; (+) strand; PAM type: NRG; PAM sequence: GGG
ctaacaggtgcttctcctgg

SEQ ID NO: 35296 - DNA, 20 bp, Artificial Sequence
  Description of Artificial Sequence: Synthetic oligonucleotide
  Target: ATXN2; (+) strand; PAM type: NRG; PAM sequence: GGG
taacaggtgcttctcctggg

SEQ ID NO: 35297 - DNA, 20 bp, Artificial Sequence
  Description of Artificial Sequence: Synthetic oligonucleotide
  Target: ATXN2; (+) strand; PAM type: NRG; PAM sequence: TGG
tgcttctcctggggggctgc

SEQ ID NO: 35298 - DNA, 20 bp, Artificial Sequence
  Description of Artificial Sequence: Synthetic oligonucleotide
  Target: ATXN2; (+) strand; PAM type: NRG; PAM sequence: CGG
tcctggggggctgctggacc

SEQ ID NO: 35299 - DNA, 20 bp, Artificial Sequence
  Description of Artificial Sequence: Synthetic oligonucleotide
  Target: ATXN2; (+) strand; PAM type: NRG; PAM sequence: CAG
ggctgctggacccggcctgc

SEQ ID NO: 35300 - DNA, 20 bp, Artificial Sequence
  Description of Artificial Sequence: Synthetic oligonucleotide
  Target: ATXN2; (+) strand; PAM type: NRG; PAM sequence: AAG
tgctggacccggcctgccag

SEQ ID NO: 35301 - DNA, 20 bp, Artificial Sequence
  Description of Artificial Sequence: Synthetic oligonucleotide
  Target: ATXN2; (+) strand; PAM type: NRG; PAM sequence: CGG
ggacccggcctgccagaaga

SEQ ID NO: 35302 - DNA, 20 bp, Artificial Sequence
  Description of Artificial Sequence: Synthetic oligonucleotide
  Target: ATXN2; (+) strand; PAM type: NRG; PAM sequence: TGG
atttcctgtcctgctacccc

SEQ ID NO: 35303 - DNA, 20 bp, Artificial Sequence
  Description of Artificial Sequence: Synthetic oligonucleotide
  Target: ATXN2; (+) strand; PAM type: NRG; PAM sequence: CGG
tcctgctacccctggttcca

SEQ ID NO: 35304 - DNA, 20 bp, Artificial Sequence
  Description of Artificial Sequence: Synthetic oligonucleotide
  Target: ATXN2; (+) strand; PAM type: NRG; PAM sequence: CAG
tggttccacggccccatctc

SEQ ID NO: 35305 - DNA, 20 bp, Artificial Sequence
  Description of Artificial Sequence: Synthetic oligonucleotide
  Target: ATXN2; (+) strand; PAM type: NRG; PAM sequence: GAG
gttccacggccccatctcca

SEQ ID NO: 35306 - DNA, 20 bp, Artificial Sequence
  Description of Artificial Sequence: Synthetic oligonucleotide
  Target: ATXN2; (+) strand; PAM type: NRG; PAM sequence: AAG
cggccccatctccagagtga

SEQ ID NO: 35307 - DNA, 20 bp, Artificial Sequence
  Description of Artificial Sequence: Synthetic oligonucleotide
  Target: ATXN2; (+) strand; PAM type: NRG; PAM sequence: CAG
ccccatctccagagtgaaag

SEQ ID NO: 35308 - DNA, 20 bp, Artificial Sequence
  Description of Artificial Sequence: Synthetic oligonucleotide
  Target: ATXN2; (+) strand; PAM type: NRG; PAM sequence: CAG
tctccagagtgaaagcagct

SEQ ID NO: 35309 - DNA, 20 bp, Artificial Sequence
  Description of Artificial Sequence: Synthetic oligonucleotide
  Target: ATXN2; (+) strand; PAM type: NRG; PAM sequence: TGG
cagagtgaaagcagctcagc

SEQ ID NO: 35310 - DNA, 20 bp, Artificial Sequence
  Description of Artificial Sequence: Synthetic oligonucleotide
  Target: ATXN2; (+) strand; PAM type: NRG; PAM sequence: CAG
tgaaagcagctcagctggtt

SEQ ID NO: 35311 - DNA, 20 bp, Artificial Sequence
  Description of Artificial Sequence: Synthetic oligonucleotide
  Target: ATXN2; (+) strand; PAM type: NRG; PAM sequence: CAG
cagctcagctggttcagctg

SEQ ID NO: 35312 - DNA, 20 bp, Artificial Sequence
  Description of Artificial Sequence: Synthetic oligonucleotide
  Target: ATXN2; (+) strand; PAM type: NRG; PAM sequence: AGG
agctcagctggttcagctgc

SEQ ID NO: 35313 - DNA, 20 bp, Artificial Sequence
  Description of Artificial Sequence: Synthetic oligonucleotide
  Target: ATXN2; (+) strand; PAM type: NRG; PAM sequence: GGG
gctcagctggttcagctgca

SEQ ID NO: 35314 - DNA, 20 bp, Artificial Sequence
  Description of Artificial Sequence: Synthetic oligonucleotide
  Target: ATXN2; (+) strand; PAM type: NRG; PAM sequence: TGG
ctgcagggccctgatgctca

SEQ ID NO: 35315 - DNA, 20 bp, Artificial Sequence
  Description of Artificial Sequence: Synthetic oligonucleotide
  Target: ATXN2; (+) strand; PAM type: NRG; PAM sequence: GAG
gcagggccctgatgctcatg

SEQ ID NO: 35316 - DNA, 20 bp, Artificial Sequence
  Description of Artificial Sequence: Synthetic oligonucleotide
  Target: ATXN2; (+) strand; PAM type: NRG; PAM sequence: TGG
tgatgctcatggagtgttcc

SEQ ID NO: 35317 - DNA, 20 bp, Artificial Sequence
  Description of Artificial Sequence: Synthetic oligonucleotide
  Target: ATXN2; (+) strand; PAM type: NRG; PAM sequence: CGG
ctcatggagtgttcctggtg

SEQ ID NO: 35318 - DNA, 20 bp, Artificial Sequence
  Description of Artificial Sequence: Synthetic oligonucleotide
  Target: ATXN2; (+) strand; PAM type: NRG; PAM sequence: CAG
atggagtgttcctggtgcgg

SEQ ID NO: 35319 - DNA, 20 bp, Artificial Sequence
  Description of Artificial Sequence: Synthetic oligonucleotide
  Target: ATXN2; (+) strand; PAM type: NRG; PAM sequence: GAG
ggagtgttcctggtgcggca

SEQ ID NO: 35320 - DNA, 20 bp, Artificial Sequence
  Description of Artificial Sequence: Synthetic oligonucleotide
  Target: ATXN2; (+) strand; PAM type: NRG; PAM sequence: GAG
tgttcctggtgcggcagagc

SEQ ID NO: 35321 - DNA, 20 bp, Artificial Sequence
  Description of Artificial Sequence: Synthetic oligonucleotide
  Target: ATXN2; (+) strand; PAM type: NRG; PAM sequence: CGG
tggtgcggcagagcgagacg

SEQ ID NO: 35322 - DNA, 20 bp, Artificial Sequence
  Description of Artificial Sequence: Synthetic oligonucleotide
  Target: ATXN2; (+) strand; PAM type: NRG; PAM sequence: TGG
cggcagagcgagacgcggcg

SEQ ID NO: 35323 - DNA, 20 bp, Artificial Sequence
  Description of Artificial Sequence: Synthetic oligonucleotide
  Target: ATXN2; (+) strand; PAM type: NRG; PAM sequence: GGG
ggcagagcgagacgcggcgt

SEQ ID NO: 35324 - DNA, 20 bp, Artificial Sequence
  Description of Artificial Sequence: Synthetic oligonucleotide
  Target: ATXN2; (+) strand; PAM type: NRG; PAM sequence: GGG
gcagagcgagacgcggcgtg

SEQ ID NO: 35325 - DNA, 20 bp, Artificial Sequence
  Description of Artificial Sequence: Synthetic oligonucleotide
  Target: ATXN2; (+) strand; PAM type: NRG; PAM sequence: CAG
acgtgctcactttcaacttt

SEQ ID NO: 35326 - DNA, 20 bp, Artificial Sequence
  Description of Artificial Sequence: Synthetic oligonucleotide
  Target: ATXN2; (+) strand; PAM type: NRG; PAM sequence: AGG
cgtgctcactttcaactttc

SEQ ID NO: 35327 - DNA, 20 bp, Artificial Sequence
  Description of Artificial Sequence: Synthetic oligonucleotide
  Target: ATXN2; (+) strand; PAM type: NRG; PAM sequence: GGG
gtgctcactttcaactttca

SEQ ID NO: 35328 - DNA, 20 bp, Artificial Sequence
  Description of Artificial Sequence: Synthetic oligonucleotide
  Target: ATXN2; (+) strand; PAM type: NRG; PAM sequence: GGG
tgctcactttcaactttcag

SEQ ID NO: 35329 - DNA, 20 bp, Artificial Sequence
  Description of Artificial Sequence: Synthetic oligonucleotide
  Target: ATXN2; (+) strand; PAM type: NRG; PAM sequence: TAG
cactttcaactttcagggga

SEQ ID NO: 35330 - DNA, 20 bp, Artificial Sequence
  Description of Artificial Sequence: Synthetic oligonucleotide
  Target: ATXN2; (+) strand; PAM type: NRG; PAM sequence: AAG
tcaactttcaggggatagcc

SEQ ID NO: 35331 - DNA, 20 bp, Artificial Sequence
  Description of Artificial Sequence: Synthetic oligonucleotide
  Target: ATXN2; (+) strand; PAM type: NRG; PAM sequence: AGG
caactttcaggggatagcca

SEQ ID NO: 35332 - DNA, 20 bp, Artificial Sequence
  Description of Artificial Sequence: Synthetic oligonucleotide
  Target: ATXN2; (+) strand; PAM type: NRG; PAM sequence: TGG
ttcaggggatagccaaggta

SEQ ID NO: 35333 - DNA, 20 bp, Artificial Sequence
  Description of Artificial Sequence: Synthetic oligonucleotide
  Target: ATXN2; (+) strand; PAM type: NRG; PAM sequence: GGG
tcaggggatagccaaggtat

SEQ ID NO: 35334 - DNA, 20 bp, Artificial Sequence
  Description of Artificial Sequence: Synthetic oligonucleotide
  Target: ATXN2; (+) strand; PAM type: NRG; PAM sequence: GGG
caggggatagccaaggtatg

SEQ ID NO: 35335 - DNA, 20 bp, Artificial Sequence
  Description of Artificial Sequence: Synthetic oligonucleotide
  Target: ATXN2; (+) strand; PAM type: NRG; PAM sequence: TGG
gggatagccaaggtatgggg

SEQ ID NO: 35336 - DNA, 20 bp, Artificial Sequence
  Description of Artificial Sequence: Synthetic oligonucleotide
  Target: ATXN2; (+) strand; PAM type: NRG; PAM sequence: GGG
ggatagccaaggtatggggt

SEQ ID NO: 35337 - DNA, 20 bp, Artificial Sequence
  Description of Artificial Sequence: Synthetic oligonucleotide
  Target: ATXN2; (+) strand; PAM type: NRG; PAM sequence: GGG
gatagccaaggtatggggtg

SEQ ID NO: 35338 - DNA, 20 bp, Artificial Sequence
  Description of Artificial Sequence: Synthetic oligonucleotide
  Target: ATXN2; (+) strand; PAM type: NRG; PAM sequence: TGG
agccaaggtatggggtgggg

SEQ ID NO: 35339 - DNA, 20 bp, Artificial Sequence
  Description of Artificial Sequence: Synthetic oligonucleotide
  Target: ATXN2; (+) strand; PAM type: NRG; PAM sequence: GGG
gccaaggtatggggtggggt

SEQ ID NO: 35340 - DNA, 20 bp, Artificial Sequence
  Description of Artificial Sequence: Synthetic oligonucleotide
  Target: ATXN2; (+) strand; PAM type: NRG; PAM sequence: GGG
ccaaggtatggggtggggtg

SEQ ID NO: 35341 - DNA, 20 bp, Artificial Sequence
  Description of Artificial Sequence: Synthetic oligonucleotide
  Target: ATXN2; (+) strand; PAM type: NRG; PAM sequence: TGG
aggtatggggtggggtgggg

SEQ ID NO: 35342 - DNA, 20 bp, Artificial Sequence
  Description of Artificial Sequence: Synthetic oligonucleotide
  Target: ATXN2; (+) strand; PAM type: NRG; PAM sequence: GGG
ggtatggggtggggtggggt

SEQ ID NO: 35343 - DNA, 20 bp, Artificial Sequence
  Description of Artificial Sequence: Synthetic oligonucleotide
  Target: ATXN2; (+) strand; PAM type: NRG; PAM sequence: GGG
gtatggggtggggtggggtg

SEQ ID NO: 35344 - DNA, 20 bp, Artificial Sequence
  Description of Artificial Sequence: Synthetic oligonucleotide
  Target: ATXN2; (+) strand; PAM type: NRG; PAM sequence: TGG
tggggtggggtggggtgggg

SEQ ID NO: 35345 - DNA, 20 bp, Artificial Sequence
  Description of Artificial Sequence: Synthetic oligonucleotide
  Target: ATXN2; (+) strand; PAM type: NRG; PAM sequence: GGG
ggggtggggtggggtggggt

SEQ ID NO: 35346 - DNA, 20 bp, Artificial Sequence
  Description of Artificial Sequence: Synthetic oligonucleotide
  Target: ATXN2; (+) strand; PAM type: NRG; PAM sequence: GGG
gggtggggtggggtggggtg

SEQ ID NO: 35347 - DNA, 20 bp, Artificial Sequence
  Description of Artificial Sequence: Synthetic oligonucleotide
  Target: ATXN2; (+) strand; PAM type: NRG; PAM sequence: CAG
tggggtggggtggggtgggg

SEQ ID NO: 35348 - DNA, 20 bp, Artificial Sequence
  Description of Artificial Sequence: Synthetic oligonucleotide
  Target: ATXN2; (+) strand; PAM type: NRG; PAM sequence: AGG
ggggtggggtggggtggggc

SEQ ID NO: 35349 - DNA, 20 bp, Artificial Sequence
  Description of Artificial Sequence: Synthetic oligonucleotide
  Target: ATXN2; (+) strand; PAM type: NRG; PAM sequence: CAG
gtggggtggggtggggcagg

SEQ ID NO: 35350 - DNA, 20 bp, Artificial Sequence
  Description of Artificial Sequence: Synthetic oligonucleotide
  Target: ATXN2; (+) strand; PAM type: NRG; PAM sequence: AGG
tggggtggggtggggcaggc

SEQ ID NO: 35351 - DNA, 20 bp, Artificial Sequence
  Description of Artificial Sequence: Synthetic oligonucleotide
  Target: ATXN2; (+) strand; PAM type: NRG; PAM sequence: TGG
accgtgccacccctctccac

SEQ ID NO: 35352 - DNA, 20 bp, Artificial Sequence
  Description of Artificial Sequence: Synthetic oligonucleotide
  Target: ATXN2; (+) strand; PAM type: NRG; PAM sequence: GAG
cgtgccacccctctccactg

SEQ ID NO: 35353 - DNA, 20 bp, Artificial Sequence
  Description of Artificial Sequence: Synthetic oligonucleotide
  Target: ATXN2; (+) strand; PAM type: NRG; PAM sequence: CAG
cacccctctccactggagtt

SEQ ID NO: 35354 - DNA, 20 bp, Artificial Sequence
  Description of Artificial Sequence: Synthetic oligonucleotide
  Target: ATXN2; (+) strand; PAM type: NRG; PAM sequence: AGG
acccctctccactggagttc

SEQ ID NO: 35355 - DNA, 20 bp, Artificial Sequence
  Description of Artificial Sequence: Synthetic oligonucleotide
  Target: ATXN2; (+) strand; PAM type: NRG; PAM sequence: GGG
cccctctccactggagttca

SEQ ID NO: 35356 - DNA, 20 bp, Artificial Sequence
  Description of Artificial Sequence: Synthetic oligonucleotide
  Target: ATXN2; (+) strand; PAM type: NRG; PAM sequence: TAG
tccactggagttcagggtcc

SEQ ID NO: 35357 - DNA, 20 bp, Artificial Sequence
  Description of Artificial Sequence: Synthetic oligonucleotide
  Target: ATXN2; (+) strand; PAM type: NRG; PAM sequence: GAG
cactggagttcagggtccta

SEQ ID NO: 35358 - DNA, 20 bp, Artificial Sequence
  Description of Artificial Sequence: Synthetic oligonucleotide
  Target: ATXN2; (+) strand; PAM type: NRG; PAM sequence: AGG
actggagttcagggtcctag

SEQ ID NO: 35359 - DNA, 20 bp, Artificial Sequence
  Description of Artificial Sequence: Synthetic oligonucleotide
  Target: ATXN2; (+) strand; PAM type: NRG; PAM sequence: GGG
ctggagttcagggtcctaga

SEQ ID NO: 35360 - DNA, 20 bp, Artificial Sequence
  Description of Artificial Sequence: Synthetic oligonucleotide
  Target: ATXN2; (+) strand; PAM type: NRG; PAM sequence: CAG
agttcagggtcctagaggga

SEQ ID NO: 35361 - DNA, 20 bp, Artificial Sequence
  Description of Artificial Sequence: Synthetic oligonucleotide
  Target: ATXN2; (+) strand; PAM type: NRG; PAM sequence: GAG
gggtcctagagggacagccc

SEQ ID NO: 35362 - DNA, 20 bp, Artificial Sequence
  Description of Artificial Sequence: Synthetic oligonucleotide
  Target: ATXN2; (+) strand; PAM type: NRG; PAM sequence: CAG
cccaccatcctctcctccca

SEQ ID NO: 35363 - DNA, 20 bp, Artificial Sequence
  Description of Artificial Sequence: Synthetic oligonucleotide
  Target: ATXN2; (+) strand; PAM type: NRG; PAM sequence: CAG
gcacctgcgcctgtcgctga

SEQ ID NO: 35364 - DNA, 20 bp, Artificial Sequence
  Description of Artificial Sequence: Synthetic oligonucleotide
  Target: ATXN2; (+) strand; PAM type: NRG; PAM sequence: GAG
acctgcgcctgtcgctgaca

SEQ ID NO: 35365 - DNA, 20 bp, Artificial Sequence
  Description of Artificial Sequence: Synthetic oligonucleotide
  Target: ATXN2; (+) strand; PAM type: NRG; PAM sequence: CGG
tgcgcctgtcgctgacagag

SEQ ID NO: 35366 - DNA, 20 bp, Artificial Sequence
  Description of Artificial Sequence: Synthetic oligonucleotide
  Target: ATXN2; (+) strand; PAM type: NRG; PAM sequence: GGG
gcgcctgtcgctgacagagc

SEQ ID NO: 35367 - DNA, 20 bp, Artificial Sequence
  Description of Artificial Sequence: Synthetic oligonucleotide
  Target: ATXN2; (+) strand; PAM type: NRG; PAM sequence: GGG
cgcctgtcgctgacagagcg

SEQ ID NO: 35368 - DNA, 20 bp, Artificial Sequence
  Description of Artificial Sequence: Synthetic oligonucleotide
  Target: ATXN2; (+) strand; PAM type: NRG; PAM sequence: CAG
tgtcgctgacagagcggggc

SEQ ID NO: 35369 - DNA, 20 bp, Artificial Sequence
  Description of Artificial Sequence: Synthetic oligonucleotide
  Target: ATXN2; (+) strand; PAM type: NRG; PAM sequence: CAG
agcggggccagtgccgtgtg

SEQ ID NO: 35370 - DNA, 20 bp, Artificial Sequence
  Description of Artificial Sequence: Synthetic oligonucleotide
  Target: ATXN2; (+) strand; PAM type: NRG; PAM sequence: CGG
gcagcacctccactttccct

SEQ ID NO: 35371 - DNA, 20 bp, Artificial Sequence
  Description of Artificial Sequence: Synthetic oligonucleotide
  Target: ATXN2; (+) strand; PAM type: NRG; PAM sequence: TGG
cctccactttccctcggtcg

SEQ ID NO: 35372 - DNA, 20 bp, Artificial Sequence
  Description of Artificial Sequence: Synthetic oligonucleotide
  Target: ATXN2; (+) strand; PAM type: NRG; PAM sequence: CAG
tggacatgctccaccacttc

SEQ ID NO: 35373 - DNA, 20 bp, Artificial Sequence
  Description of Artificial Sequence: Synthetic oligonucleotide
  Target: ATXN2; (+) strand; PAM type: NRG; PAM sequence: GAG
agcgctcgcccatcccactc

SEQ ID NO: 35374 - DNA, 20 bp, Artificial Sequence
  Description of Artificial Sequence: Synthetic oligonucleotide
  Target: ATXN2; (+) strand; PAM type: NRG; PAM sequence: CGG
tcgcccatcccactcgagtg

SEQ ID NO: 35375 - DNA, 20 bp, Artificial Sequence
  Description of Artificial Sequence: Synthetic oligonucleotide
  Target: ATXN2; (+) strand; PAM type: NRG; PAM sequence: CGG
gcggcgccgcctgtgatgtc

SEQ ID NO: 35376 - DNA, 20 bp, Artificial Sequence
  Description of Artificial Sequence: Synthetic oligonucleotide
  Target: ATXN2; (+) strand; PAM type: NRG; PAM sequence: CAG
gcctgtgatgtccggctctc

SEQ ID NO: 35377 - DNA, 20 bp, Artificial Sequence
  Description of Artificial Sequence: Synthetic oligonucleotide
  Target: ATXN2; (+) strand; PAM type: NRG; PAM sequence: TGG
tgtccggctctccagctacg

SEQ ID NO: 35378 - DNA, 20 bp, Artificial Sequence
  Description of Artificial Sequence: Synthetic oligonucleotide
  Target: ATXN2; (+) strand; PAM type: NRG; PAM sequence: TAG
ccggctctccagctacgtgg

SEQ ID NO: 35379 - DNA, 20 bp, Artificial Sequence
  Description of Artificial Sequence: Synthetic oligonucleotide
  Target: ATXN2; (+) strand; PAM type: NRG; PAM sequence: CAG
ggtagtcgtctcccaaccac

SEQ ID NO: 35380 - DNA, 20 bp, Artificial Sequence
  Description of Artificial Sequence: Synthetic oligonucleotide
  Target: ATXN2; (+) strand; PAM type: NRG; PAM sequence: AGG
gtagtcgtctcccaaccacc

SEQ ID NO: 35381 - DNA, 20 bp, Artificial Sequence
  Description of Artificial Sequence: Synthetic oligonucleotide
  Target: ATXN2; (+) strand; PAM type: NRG; PAM sequence: AAG
gaccctactgccctttgctg

SEQ ID NO: 35382 - DNA, 20 bp, Artificial Sequence
  Description of Artificial Sequence: Synthetic oligonucleotide
  Target: ATXN2; (+) strand; PAM type: NRG; PAM sequence: AGG
accctactgccctttgctga

SEQ ID NO: 35383 - DNA, 20 bp, Artificial Sequence
  Description of Artificial Sequence: Synthetic oligonucleotide
  Target: ATXN2; (+) strand; PAM type: NRG; PAM sequence: GGG
ccctactgccctttgctgaa

SEQ ID NO: 35384 - DNA, 20 bp, Artificial Sequence
  Description of Artificial Sequence: Synthetic oligonucleotide
  Target: ATXN2; (+) strand; PAM type: NRG; PAM sequence: GGG
cctactgccctttgctgaag

SEQ ID NO: 35385 - DNA, 20 bp, Artificial Sequence
  Description of Artificial Sequence: Synthetic oligonucleotide
  Target: ATXN2; (+) strand; PAM type: NRG; PAM sequence: GGG
ctactgccctttgctgaagg

SEQ ID NO: 35386 - DNA, 20 bp, Artificial Sequence
  Description of Artificial Sequence: Synthetic oligonucleotide
  Target: ATXN2; (+) strand; PAM type: NRG; PAM sequence: TGG
ctgccctttgctgaaggggg

SEQ ID NO: 35387 - DNA, 20 bp, Artificial Sequence
  Description of Artificial Sequence: Synthetic oligonucleotide
  Target: ATXN2; (+) strand; PAM type: NRG; PAM sequence: TGG
ctgaagggggtggctgacac

SEQ ID NO: 35388 - DNA, 20 bp, Artificial Sequence
  Description of Artificial Sequence: Synthetic oligonucleotide
  Target: ATXN2; (+) strand; PAM type: NRG; PAM sequence: GGG
tgaagggggtggctgacact

SEQ ID NO: 35389 - DNA, 20 bp, Artificial Sequence
  Description of Artificial Sequence: Synthetic oligonucleotide
  Target: ATXN2; (+) strand; PAM type: NRG; PAM sequence: TAG
agggggtggctgacactggg

SEQ ID NO: 35390 - DNA, 20 bp, Artificial Sequence
  Description of Artificial Sequence: Synthetic oligonucleotide
  Target: ATXN2; (+) strand; PAM type: NRG; PAM sequence: GAG
ggggtggctgacactgggta

SEQ ID NO: 35391 - DNA, 20 bp, Artificial Sequence
  Description of Artificial Sequence: Synthetic oligonucleotide
  Target: ATXN2; (+) strand; PAM type: NRG; PAM sequence: AGG
gggtggctgacactgggtag

SEQ ID NO: 35392 - DNA, 20 bp, Artificial Sequence
  Description of Artificial Sequence: Synthetic oligonucleotide
  Target: ATXN2; (+) strand; PAM type: NRG; PAM sequence: GGG
ggtggctgacactgggtaga

SEQ ID NO: 35393 - DNA, 20 bp, Artificial Sequence
  Description of Artificial Sequence: Synthetic oligonucleotide
  Target: ATXN2; (+) strand; PAM type: NRG; PAM sequence: TAG
ggctgacactgggtagaggg

SEQ ID NO: 35394 - DNA, 20 bp, Artificial Sequence
  Description of Artificial Sequence: Synthetic oligonucleotide
  Target: ATXN2; (+) strand; PAM type: NRG; PAM sequence: GAG
ctgacactgggtagagggta

SEQ ID NO: 35395 - DNA, 20 bp, Artificial Sequence
  Description of Artificial Sequence: Synthetic oligonucleotide
  Target: ATXN2; (+) strand; PAM type: NRG; PAM sequence: AGG
tgacactgggtagagggtag

SEQ ID NO: 35396 - DNA, 20 bp, Artificial Sequence
  Description of Artificial Sequence: Synthetic oligonucleotide
  Target: ATXN2; (+) strand; PAM type: NRG; PAM sequence: CAG
tagagggtagaggcttgctg

SEQ ID NO: 35397 - DNA, 20 bp, Artificial Sequence
  Description of Artificial Sequence: Synthetic oligonucleotide
  Target: ATXN2; (+) strand; PAM type: NRG; PAM sequence: CAG
gtagaggcttgctgcagacc

SEQ ID NO: 35398 - DNA, 20 bp, Artificial Sequence
  Description of Artificial Sequence: Synthetic oligonucleotide
  Target: ATXN2; (+) strand; PAM type: NRG; PAM sequence: AGG
tagaggcttgctgcagaccc

SEQ ID NO: 35399 - DNA, 20 bp, Artificial Sequence
  Description of Artificial Sequence: Synthetic oligonucleotide
  Target: ATXN2; (+) strand; PAM type: NRG; PAM sequence: GGG
agaggcttgctgcagaccca

SEQ ID NO: 35400 - DNA, 20 bp, Artificial Sequence
  Description of Artificial Sequence: Synthetic oligonucleotide
  Target: ATXN2; (+) strand; PAM type: NRG; PAM sequence: GGG
gaggcttgctgcagacccag

SEQ ID NO: 35401 - DNA, 20 bp, Artificial Sequence
  Description of Artificial Sequence: Synthetic oligonucleotide
  Target: ATXN2; (+) strand; PAM type: NRG; PAM sequence: CAG
ttgctgcagacccaggggta

SEQ ID NO: 35402 - DNA, 20 bp, Artificial Sequence
  Description of Artificial Sequence: Synthetic oligonucleotide
  Target: ATXN2; (+) strand; PAM type: NRG; PAM sequence: AGG
tgctgcagacccaggggtac

SEQ ID NO: 35403 - DNA, 20 bp, Artificial Sequence
  Description of Artificial Sequence: Synthetic oligonucleotide
  Target: ATXN2; (+) strand; PAM type: NRG; PAM sequence: CAG
tatcttgttctgtgtcctgt

SEQ ID NO: 35404 - DNA, 20 bp, Artificial Sequence
  Description of Artificial Sequence: Synthetic oligonucleotide
  Target: ATXN2; (+) strand; PAM type: NRG; PAM sequence: AAG
gtcctgtcagcacttgcctc

SEQ ID NO: 35405 - DNA, 20 bp, Artificial Sequence
  Description of Artificial Sequence: Synthetic oligonucleotide
  Target: ATXN2; (+) strand; PAM type: NRG; PAM sequence: TGG
agcacttgcctcaagactga

SEQ ID NO: 35406 - DNA, 20 bp, Artificial Sequence
  Description of Artificial Sequence: Synthetic oligonucleotide
  Target: ATXN2; (+) strand; PAM type: NRG; PAM sequence: TGG
ttgcctcaagactgatggtg

SEQ ID NO: 35407 - DNA, 20 bp, Artificial Sequence
  Description of Artificial Sequence: Synthetic oligonucleotide
  Target: ATXN2; (+) strand; PAM type: NRG; PAM sequence: TGG
actgatggtgtggtctctct

SEQ ID NO: 35408 - DNA, 20 bp, Artificial Sequence
  Description of Artificial Sequence: Synthetic oligonucleotide
  Target: ATXN2; (+) strand; PAM type: NRG; PAM sequence: TAG
tctctcttggtcacttgtcc

SEQ ID NO: 35409 - DNA, 20 bp, Artificial Sequence
  Description of Artificial Sequence: Synthetic oligonucleotide
  Target: ATXN2; (+) strand; PAM type: NRG; PAM sequence: AGG
ctctcttggtcacttgtcct

SEQ ID NO: 35410 - DNA, 20 bp, Artificial Sequence
  Description of Artificial Sequence: Synthetic oligonucleotide
  Target: ATXN2; (+) strand; PAM type: NRG; PAM sequence: CGG
tgtcctaggttcctgcaaca

SEQ ID NO: 35411 - DNA, 20 bp, Artificial Sequence
  Description of Artificial Sequence: Synthetic oligonucleotide
  Target: ATXN2; (+) strand; PAM type: NRG; PAM sequence: TGG
tccctttctcccttcctcac

SEQ ID NO: 35412 - DNA, 20 bp, Artificial Sequence
  Description of Artificial Sequence: Synthetic oligonucleotide
  Target: ATXN2; (+) strand; PAM type: NRG; PAM sequence: GGG
ccctttctcccttcctcact

SEQ ID NO: 35413 - DNA, 20 bp, Artificial Sequence
  Description of Artificial Sequence: Synthetic oligonucleotide
  Target: ATXN2; (+) strand; PAM type: NRG; PAM sequence: CAG
ctcccttcctcactgggatt

SEQ ID NO: 35414 - DNA, 20 bp, Artificial Sequence
  Description of Artificial Sequence: Synthetic oligonucleotide
  Target: ATXN2; (+) strand; PAM type: NRG; PAM sequence: GAG
cccttcctcactgggattca

SEQ ID NO: 35415 - DNA, 20 bp, Artificial Sequence
  Description of Artificial Sequence: Synthetic oligonucleotide
  Target: ATXN2; (+) strand; PAM type: NRG; PAM sequence: TGG
attcagagtcccttcctcac

SEQ ID NO: 35416 - DNA, 20 bp, Artificial Sequence
  Description of Artificial Sequence: Synthetic oligonucleotide
  Target: ATXN2; (+) strand; PAM type: NRG; PAM sequence: GGG
ttcagagtcccttcctcact

SEQ ID NO: 35417 - DNA, 20 bp, Artificial Sequence
  Description of Artificial Sequence: Synthetic oligonucleotide
  Target: ATXN2; (+) strand; PAM type: NRG; PAM sequence: GGG
tcagagtcccttcctcactg

SEQ ID NO: 35418 - DNA, 20 bp, Artificial Sequence
  Description of Artificial Sequence: Synthetic oligonucleotide
  Target: ATXN2; (+) strand; PAM type: NRG; PAM sequence: CAG
gtcccttcctcactggggtt

SEQ ID NO: 35419 - DNA, 20 bp, Artificial Sequence
  Description of Artificial Sequence: Synthetic oligonucleotide
  Target: ATXN2; (+) strand; PAM type: NRG; PAM sequence: GAG
cccttcctcactggggttca

SEQ ID NO: 35420 - DNA, 20 bp, Artificial Sequence
  Description of Artificial Sequence: Synthetic oligonucleotide
  Target: ATXN2; (+) strand; PAM type: NRG; PAM sequence: TGG
tcctcactggggttcagagt

SEQ ID NO: 35421 - DNA, 20 bp, Artificial Sequence
  Description of Artificial Sequence: Synthetic oligonucleotide
  Target: ATXN2; (+) strand; PAM type: NRG; PAM sequence: GGG
cctcactggggttcagagtt

SEQ ID NO: 35422 - DNA, 20 bp, Artificial Sequence
  Description of Artificial Sequence: Synthetic oligonucleotide
  Target: ATXN2; (+) strand; PAM type: NRG; PAM sequence: TAG
gagttgggccttccccacct

SEQ ID NO: 35423 - DNA, 20 bp, Artificial Sequence
  Description of Artificial Sequence: Synthetic oligonucleotide
  Target: ATXN2; (+) strand; PAM type: NRG; PAM sequence: TGG
cttccccaccttagttcttc

SEQ ID NO: 35424 - DNA, 20 bp, Artificial Sequence
  Description of Artificial Sequence: Synthetic oligonucleotide
  Target: ATXN2; (+) strand; PAM type: NRG; PAM sequence: CGG
ttagttcttctggctgtccc

SEQ ID NO: 35425 - DNA, 20 bp, Artificial Sequence
  Description of Artificial Sequence: Synthetic oligonucleotide
  Target: ATXN2; (+) strand; PAM type: NRG; PAM sequence: GGG
tagttcttctggctgtcccc

SEQ ID NO: 35426 - DNA, 20 bp, Artificial Sequence
  Description of Artificial Sequence: Synthetic oligonucleotide
  Target: ATXN2; (+) strand; PAM type: NRG; PAM sequence: GGG
agttcttctggctgtccccg

SEQ ID NO: 35427 - DNA, 20 bp, Artificial Sequence
  Description of Artificial Sequence: Synthetic oligonucleotide
  Target: ATXN2; (+) strand; PAM type: NRG; PAM sequence: GGG
gttcttctggctgtccccgg

SEQ ID NO: 35428 - DNA, 20 bp, Artificial Sequence
  Description of Artificial Sequence: Synthetic oligonucleotide
  Target: ATXN2; (+) strand; PAM type: NRG; PAM sequence: CAG
tctggctgtccccgggggct

SEQ ID NO: 35429 - DNA, 20 bp, Artificial Sequence
  Description of Artificial Sequence: Synthetic oligonucleotide
  Target: ATXN2; (+) strand; PAM type: NRG; PAM sequence: CAG
ctgtccccgggggctcagcc

SEQ ID NO: 35430 - DNA, 20 bp, Artificial Sequence
  Description of Artificial Sequence: Synthetic oligonucleotide
  Target: ATXN2; (+) strand; PAM type: NRG; PAM sequence: GAG
gtccccgggggctcagccca

SEQ ID NO: 35431 - DNA, 20 bp, Artificial Sequence
  Description of Artificial Sequence: Synthetic oligonucleotide
  Target: ATXN2; (+) strand; PAM type: NRG; PAM sequence: AGG
tccccgggggctcagcccag

SEQ ID NO: 35432 - DNA, 20 bp, Artificial Sequence
  Description of Artificial Sequence: Synthetic oligonucleotide
  Target: ATXN2; (+) strand; PAM type: NRG; PAM sequence: GGG
ccccgggggctcagcccaga

SEQ ID NO: 35433 - DNA, 20 bp, Artificial Sequence
  Description of Artificial Sequence: Synthetic oligonucleotide
  Target: ATXN2; (+) strand; PAM type: NRG; PAM sequence: CAG
gctcagcccagagggtctcc

SEQ ID NO: 35434 - DNA, 20 bp, Artificial Sequence
  Description of Artificial Sequence: Synthetic oligonucleotide
  Target: ATXN2; (+) strand; PAM type: NRG; PAM sequence: AGG
ctcagcccagagggtctccc

SEQ ID NO: 35435 - DNA, 20 bp, Artificial Sequence
  Description of Artificial Sequence: Synthetic oligonucleotide
  Target: ATXN2; (+) strand; PAM type: NRG; PAM sequence: GGG
tcagcccagagggtctccca

SEQ ID NO: 35436 - DNA, 20 bp, Artificial Sequence
  Description of Artificial Sequence: Synthetic oligonucleotide
  Target: ATXN2; (+) strand; PAM type: NRG; PAM sequence: GAG
cagggcgatcctcacccccc

SEQ ID NO: 35437 - DNA, 20 bp, Artificial Sequence
  Description of Artificial Sequence: Synthetic oligonucleotide
  Target: ATXN2; (+) strand; PAM type: NRG; PAM sequence: CAG
ggcgatcctcaccccccgag

SEQ ID NO: 35438 - DNA, 20 bp, Artificial Sequence
  Description of Artificial Sequence: Synthetic oligonucleotide
  Target: ATXN2; (+) strand; PAM type: NRG; PAM sequence: TGG
ccccgagcagatcttccacc

SEQ ID NO: 35439 - DNA, 20 bp, Artificial Sequence
  Description of Artificial Sequence: Synthetic oligonucleotide
  Target: ATXN2; (+) strand; PAM type: NRG; PAM sequence: AAG
ccacctggtgccttcgcccg

SEQ ID NO: 35440 - DNA, 20 bp, Artificial Sequence
  Description of Artificial Sequence: Synthetic oligonucleotide
  Target: ATXN2; (+) strand; PAM type: NRG; PAM sequence: TGG
ggtgccttcgcccgaagaac

SEQ ID NO: 35441 - DNA, 20 bp, Artificial Sequence
  Description of Artificial Sequence: Synthetic oligonucleotide
  Target: ATXN2; (+) strand; PAM type: NRG; PAM sequence: CAG
tcgcccgaagaactggccaa

SEQ ID NO: 35442 - DNA, 20 bp, Artificial Sequence
  Description of Artificial Sequence: Synthetic oligonucleotide
  Target: ATXN2; (+) strand; PAM type: NRG; PAM sequence: CAG
aagaactggccaacagcctg

SEQ ID NO: 35443 - DNA, 20 bp, Artificial Sequence
  Description of Artificial Sequence: Synthetic oligonucleotide
  Target: ATXN2; (+) strand; PAM type: NRG; PAM sequence: TGG
ggccaacagcctgcagcacc

SEQ ID NO: 35444 - DNA, 20 bp, Artificial Sequence
  Description of Artificial Sequence: Synthetic oligonucleotide
  Target: ATXN2; (+) strand; PAM type: NRG; PAM sequence: GAG
ccaacagcctgcagcacctg

SEQ ID NO: 35445 - DNA, 20 bp, Artificial Sequence
  Description of Artificial Sequence: Synthetic oligonucleotide
  Target: ATXN2; (+) strand; PAM type: NRG; PAM sequence: GAG
gcctgcagcacctggagcat

SEQ ID NO: 35446 - DNA, 20 bp, Artificial Sequence
  Description of Artificial Sequence: Synthetic oligonucleotide
  Target: ATXN2; (+) strand; PAM type: NRG; PAM sequence: GAG
ggagcatgagcctgtgaatc

SEQ ID NO: 35447 - DNA, 20 bp, Artificial Sequence
  Description of Artificial Sequence: Synthetic oligonucleotide
  Target: ATXN2; (+) strand; PAM type: NRG; PAM sequence: CGG
atgagcctgtgaatcgagcc

SEQ ID NO: 35448 - DNA, 20 bp, Artificial Sequence
  Description of Artificial Sequence: Synthetic oligonucleotide
  Target: ATXN2; (+) strand; PAM type: NRG; PAM sequence: GGG
tgagcctgtgaatcgagccc

SEQ ID NO: 35449 - DNA, 20 bp, Artificial Sequence
  Description of Artificial Sequence: Synthetic oligonucleotide
  Target: ATXN2; (+) strand; PAM type: NRG; PAM sequence: CGG
tgtgaatcgagcccgggact

SEQ ID NO: 35450 - DNA, 20 bp, Artificial Sequence
  Description of Artificial Sequence: Synthetic oligonucleotide
  Target: ATXN2; (+) strand; PAM type: NRG; PAM sequence: TGG
ccgggactcggactacgaaa

SEQ ID NO: 35451 - DNA, 20 bp, Artificial Sequence
  Description of Artificial Sequence: Synthetic oligonucleotide
  Target: ATXN2; (+) strand; PAM type: NRG; PAM sequence: CGG
acgaaatggactcatcctcc

SEQ ID NO: 35452 - DNA, 20 bp, Artificial Sequence
  Description of Artificial Sequence: Synthetic oligonucleotide
  Target: ATXN2; (+) strand; PAM type: NRG; PAM sequence: GAG
gaaatggactcatcctcccg

SEQ ID NO: 35453 - DNA, 20 bp, Artificial Sequence
  Description of Artificial Sequence: Synthetic oligonucleotide
  Target: ATXN2; (+) strand; PAM type: NRG; PAM sequence: CGG
catcctcccggagccacctg

SEQ ID NO: 35454 - DNA, 20 bp, Artificial Sequence
  Description of Artificial Sequence: Synthetic oligonucleotide
  Target: ATXN2; (+) strand; PAM type: NRG; PAM sequence: GGG
atcctcccggagccacctgc

SEQ ID NO: 35455 - DNA, 20 bp, Artificial Sequence
  Description of Artificial Sequence: Synthetic oligonucleotide
  Target: ATXN2; (+) strand; PAM type: NRG; PAM sequence: TAG
ccggagccacctgcgggcca

SEQ ID NO: 35456 - DNA, 20 bp, Artificial Sequence
  Description of Artificial Sequence: Synthetic oligonucleotide
  Target: ATXN2; (+) strand; PAM type: NRG; PAM sequence: CAG
acctgcgggccatagacaat

SEQ ID NO: 35457 - DNA, 20 bp, Artificial Sequence
  Description of Artificial Sequence: Synthetic oligonucleotide
  Target: ATXN2; (+) strand; PAM type: NRG; PAM sequence: CAG
tcagtacacacctctctgac

SEQ ID NO: 35458 - DNA, 20 bp, Artificial Sequence
  Description of Artificial Sequence: Synthetic oligonucleotide
  Target: ATXN2; (+) strand; PAM type: NRG; PAM sequence: GAG
tacacacctctctgaccagt

SEQ ID NO: 35459 - DNA, 20 bp, Artificial Sequence
  Description of Artificial Sequence: Synthetic oligonucleotide
  Target: ATXN2; (+) strand; PAM type: NRG; PAM sequence: AGG
acacacctctctgaccagtg

SEQ ID NO: 35460 - DNA, 20 bp, Artificial Sequence
  Description of Artificial Sequence: Synthetic oligonucleotide
  Target: ATXN2; (+) strand; PAM type: NRG; PAM sequence: CAG
ctctgaccagtgaggaattc

SEQ ID NO: 35461 - DNA, 20 bp, Artificial Sequence
  Description of Artificial Sequence: Synthetic oligonucleotide
  Target: ATXN2; (+) strand; PAM type: NRG; PAM sequence: AGG
tctgaccagtgaggaattcc

SEQ ID NO: 35462 - DNA, 20 bp, Artificial Sequence
  Description of Artificial Sequence: Synthetic oligonucleotide
  Target: ATXN2; (+) strand; PAM type: NRG; PAM sequence: CAG
tgaggaattccaggcctcaa

SEQ ID NO: 35463 - DNA, 20 bp, Artificial Sequence
  Description of Artificial Sequence: Synthetic oligonucleotide
  Target: ATXN2; (+) strand; PAM type: NRG; PAM sequence: GAG
aggcctcaacagctgccctt

SEQ ID NO: 35464 - DNA, 20 bp, Artificial Sequence
  Description of Artificial Sequence: Synthetic oligonucleotide
  Target: ATXN2; (+) strand; PAM type: NRG; PAM sequence: AGG
ggcctcaacagctgcccttg

SEQ ID NO: 35465 - DNA, 20 bp, Artificial Sequence
  Description of Artificial Sequence: Synthetic oligonucleotide
  Target: ATXN2; (+) strand; PAM type: NRG; PAM sequence: GAG
cctcaacagctgcccttgag

SEQ ID NO: 35466 - DNA, 20 bp, Artificial Sequence
  Description of Artificial Sequence: Synthetic oligonucleotide
  Target: ATXN2; (+) strand; PAM type: NRG; PAM sequence: CAG
acagctgcccttgaggagca

SEQ ID NO: 35467 - DNA, 20 bp, Artificial Sequence
  Description of Artificial Sequence: Synthetic oligonucleotide
  Target: ATXN2; (+) strand; PAM type: NRG; PAM sequence: AGG
cagctgcccttgaggagcac

SEQ ID NO: 35468 - DNA, 20 bp, Artificial Sequence
  Description of Artificial Sequence: Synthetic oligonucleotide
  Target: ATXN2; (+) strand; PAM type: NRG; PAM sequence: CAG
ctgcccttgaggagcacagg

SEQ ID NO: 35469 - DNA, 20 bp, Artificial Sequence
  Description of Artificial Sequence: Synthetic oligonucleotide
  Target: ATXN2; (+) strand; PAM type: NRG; PAM sequence: AAG
cccttgaggagcacaggcag

SEQ ID NO: 35470 - DNA, 20 bp, Artificial Sequence
  Description of Artificial Sequence: Synthetic oligonucleotide
  Target: ATXN2; (+) strand; PAM type: NRG; PAM sequence: CAG
aattgatctttccttccttc

SEQ ID NO: 35471 - DNA, 20 bp, Artificial Sequence
  Description of Artificial Sequence: Synthetic oligonucleotide
  Target: ATXN2; (+) strand; PAM type: NRG; PAM sequence: GAG
ttgatctttccttccttcca

SEQ ID NO: 35472 - DNA, 20 bp, Artificial Sequence
  Description of Artificial Sequence: Synthetic oligonucleotide
  Target: ATXN2; (+) strand; PAM type: NRG; PAM sequence: AAG
tctttccttccttccagaga

SEQ ID NO: 35473 - DNA, 20 bp, Artificial Sequence
  Description of Artificial Sequence: Synthetic oligonucleotide
  Target: ATXN2; (+) strand; PAM type: NRG; PAM sequence: AAG
ttccttccagagaaagattt

SEQ ID NO: 35474 - DNA, 20 bp, Artificial Sequence
  Description of Artificial Sequence: Synthetic oligonucleotide
  Target: ATXN2; (+) strand; PAM type: NRG; PAM sequence: AGG
tccttccagagaaagattta

SEQ ID NO: 35475 - DNA, 20 bp, Artificial Sequence
  Description of Artificial Sequence: Synthetic oligonucleotide
  Target: ATXN2; (+) strand; PAM type: NRG; PAM sequence: GGG
ccttccagagaaagatttaa

SEQ ID NO: 35476 - DNA, 20 bp, Artificial Sequence
  Description of Artificial Sequence: Synthetic oligonucleotide
  Target: ATXN2; (+) strand; PAM type: NRG; PAM sequence: CAG
acactgttaactgctcgtgc

SEQ ID NO: 35477 - DNA, 20 bp, Artificial Sequence
  Description of Artificial Sequence: Synthetic oligonucleotide
  Target: ATXN2; (+) strand; PAM type: NRG; PAM sequence: TGG
gttaactgctcgtgccagtt

SEQ ID NO: 35478 - DNA, 20 bp, Artificial Sequence
  Description of Artificial Sequence: Synthetic oligonucleotide
  Target: ATXN2; (+) strand; PAM type: NRG; PAM sequence: AAG
aactgctcgtgccagtttgg

SEQ ID NO: 35479 - DNA, 20 bp, Artificial Sequence
  Description of Artificial Sequence: Synthetic oligonucleotide
  Target: ATXN2; (+) strand; PAM type: NRG; PAM sequence: TAG
tttggaagtgacccttctat

SEQ ID NO: 35480 - DNA, 20 bp, Artificial Sequence
  Description of Artificial Sequence: Synthetic oligonucleotide
  Target: ATXN2; (+) strand; PAM type: NRG; PAM sequence: AGG
ttggaagtgacccttctatt

SEQ ID NO: 35481 - DNA, 20 bp, Artificial Sequence
  Description of Artificial Sequence: Synthetic oligonucleotide
  Target: ATXN2; (+) strand; PAM type: NRG; PAM sequence: AAG
cccttctattaggcctgttg

SEQ ID NO: 35482 - DNA, 20 bp, Artificial Sequence
  Description of Artificial Sequence: Synthetic oligonucleotide
  Target: ATXN2; (+) strand; PAM type: NRG; PAM sequence: AGG
ccttctattaggcctgttga

SEQ ID NO: 35483 - DNA, 20 bp, Artificial Sequence
  Description of Artificial Sequence: Synthetic oligonucleotide
  Target: ATXN2; (+) strand; PAM type: NRG; PAM sequence: GGG
cttctattaggcctgttgaa

SEQ ID NO: 35484 - DNA, 20 bp, Artificial Sequence
  Description of Artificial Sequence: Synthetic oligonucleotide
  Target: ATXN2; (+) strand; PAM type: NRG; PAM sequence: TAG
cctgttgaagggccctcctg

SEQ ID NO: 35485 - DNA, 20 bp, Artificial Sequence
  Description of Artificial Sequence: Synthetic oligonucleotide
  Target: ATXN2; (+) strand; PAM type: NRG; PAM sequence: AGG
ctgttgaagggccctcctgt

SEQ ID NO: 35486 - DNA, 20 bp, Artificial Sequence
  Description of Artificial Sequence: Synthetic oligonucleotide
  Target: ATXN2; (+) strand; PAM type: NRG; PAM sequence: TGG
gtaggtttcatctatccacc

SEQ ID NO: 35487 - DNA, 20 bp, Artificial Sequence
  Description of Artificial Sequence: Synthetic oligonucleotide
  Target: ATXN2; (+) strand; PAM type: NRG; PAM sequence: CAG
ggctttctccttattgttta

SEQ ID NO: 35488 - DNA, 20 bp, Artificial Sequence
  Description of Artificial Sequence: Synthetic oligonucleotide
  Target: ATXN2; (+) strand; PAM type: NRG; PAM sequence: TAG
ctccttattgtttacagatg

SEQ ID NO: 35489 - DNA, 20 bp, Artificial Sequence
  Description of Artificial Sequence: Synthetic oligonucleotide
  Target: ATXN2; (+) strand; PAM type: NRG; PAM sequence: TAG
tttacagatgtagttcttgt

SEQ ID NO: 35490 - DNA, 20 bp, Artificial Sequence
  Description of Artificial Sequence: Synthetic oligonucleotide
  Target: ATXN2; (+) strand; PAM type: NRG; PAM sequence: GAG
tacagatgtagttcttgtta

SEQ ID NO: 35491 - DNA, 20 bp, Artificial Sequence
  Description of Artificial Sequence: Synthetic oligonucleotide
  Target: ATXN2; (+) strand; PAM type: NRG; PAM sequence: AGG
acagatgtagttcttgttag

SEQ ID NO: 35492 - DNA, 20 bp, Artificial Sequence
  Description of Artificial Sequence: Synthetic oligonucleotide
  Target: ATXN2; (+) strand; PAM type: NRG; PAM sequence: TAG
ttcttgttagaggatgccgc

SEQ ID NO: 35493 - DNA, 20 bp, Artificial Sequence
  Description of Artificial Sequence: Synthetic oligonucleotide
  Target: ATXN2; (+) strand; PAM type: NRG; PAM sequence: CGG
ggatgccgctagctcctgcc

SEQ ID NO: 35494 - DNA, 20 bp, Artificial Sequence
  Description of Artificial Sequence: Synthetic oligonucleotide
  Target: ATXN2; (+) strand; PAM type: NRG; PAM sequence: GGG
gatgccgctagctcctgccc

SEQ ID NO: 35495 - DNA, 20 bp, Artificial Sequence
  Description of Artificial Sequence: Synthetic oligonucleotide
  Target: ATXN2; (+) strand; PAM type: NRG; PAM sequence: GGG
atgccgctagctcctgcccg

SEQ ID NO: 35496 - DNA, 20 bp, Artificial Sequence
  Description of Artificial Sequence: Synthetic oligonucleotide
  Target: ATXN2; (+) strand; PAM type: NRG; PAM sequence: CAG
ctgcccggggtccctatgcc

SEQ ID NO: 35497 - DNA, 20 bp, Artificial Sequence
  Description of Artificial Sequence: Synthetic oligonucleotide
  Target: ATXN2; (+) strand; PAM type: NRG; PAM sequence: TAG
tgcccagtccccgttactct

SEQ ID NO: 35498 - DNA, 20 bp, Artificial Sequence
  Description of Artificial Sequence: Synthetic oligonucleotide
  Target: ATXN2; (+) strand; PAM type: NRG; PAM sequence: GAG
cccagtccccgttactctta

SEQ ID NO: 35499 - DNA, 20 bp, Artificial Sequence
  Description of Artificial Sequence: Synthetic oligonucleotide
  Target: ATXN2; (+) strand; PAM type: NRG; PAM sequence: AAG
gtccccgttactcttagaga

SEQ ID NO: 35500 - DNA, 20 bp, Artificial Sequence
  Description of Artificial Sequence: Synthetic oligonucleotide
  Target: ATXN2; (+) strand; PAM type: NRG; PAM sequence: AGG
tccccgttactcttagagaa

SEQ ID NO: 35501 - DNA, 20 bp, Artificial Sequence
  Description of Artificial Sequence: Synthetic oligonucleotide
  Target: ATXN2; (+) strand; PAM type: NRG; PAM sequence: GAG
cccgttactcttagagaaag

SEQ ID NO: 35502 - DNA, 20 bp, Artificial Sequence
  Description of Artificial Sequence: Synthetic oligonucleotide
  Target: ATXN2; (+) strand; PAM type: NRG; PAM sequence: TGG
ttactcttagagaaaggagt

SEQ ID NO: 35503 - DNA, 20 bp, Artificial Sequence
  Description of Artificial Sequence: Synthetic oligonucleotide
  Target: ATXN2; (+) strand; PAM type: NRG; PAM sequence: GGG
tactcttagagaaaggagtt

SEQ ID NO: 35504 - DNA, 20 bp, Artificial Sequence
  Description of Artificial Sequence: Synthetic oligonucleotide
  Target: ATXN2; (+) strand; PAM type: NRG; PAM sequence: GGG
actcttagagaaaggagttg

SEQ ID NO: 35505 - DNA, 20 bp, Artificial Sequence
  Description of Artificial Sequence: Synthetic oligonucleotide
  Target: ATXN2; (+) strand; PAM type: NRG; PAM sequence: GAG
ttagagaaaggagttggggt

SEQ ID NO: 35506 - DNA, 20 bp, Artificial Sequence
  Description of Artificial Sequence: Synthetic oligonucleotide
  Target: ATXN2; (+) strand; PAM type: NRG; PAM sequence: AGG
tagagaaaggagttggggtg

SEQ ID NO: 35507 - DNA, 20 bp, Artificial Sequence
  Description of Artificial Sequence: Synthetic oligonucleotide
  Target: ATXN2; (+) strand; PAM type: NRG; PAM sequence: GGG
agagaaaggagttggggtga

SEQ ID NO: 35508 - DNA, 20 bp, Artificial Sequence
  Description of Artificial Sequence: Synthetic oligonucleotide
  Target: ATXN2; (+) strand; PAM type: NRG; PAM sequence: CAG
aaaggagttggggtgagggc

SEQ ID NO: 35509 - DNA, 20 bp, Artificial Sequence
  Description of Artificial Sequence: Synthetic oligonucleotide
  Target: ATXN2; (+) strand; PAM type: NRG; PAM sequence: GAG
aggagttggggtgagggcca

SEQ ID NO: 35510 - DNA, 20 bp, Artificial Sequence
  Description of Artificial Sequence: Synthetic oligonucleotide
  Target: ATXN2; (+) strand; PAM type: NRG; PAM sequence: TGG
gttggggtgagggccagagc

SEQ ID NO: 35511 - DNA, 20 bp, Artificial Sequence
  Description of Artificial Sequence: Synthetic oligonucleotide
  Target: ATXN2; (+) strand; PAM type: NRG; PAM sequence: CAG
ggggtgagggccagagctgg

SEQ ID NO: 35512 - DNA, 20 bp, Artificial Sequence
  Description of Artificial Sequence: Synthetic oligonucleotide
  Target: ATXN2; (+) strand; PAM type: NRG; PAM sequence: TGG
gtgagggccagagctggcag

SEQ ID NO: 35513 - DNA, 20 bp, Artificial Sequence
  Description of Artificial Sequence: Synthetic oligonucleotide
  Target: ATXN2; (+) strand; PAM type: NRG; PAM sequence: CAG
ctttttcactgacactgtca

SEQ ID NO: 35514 - DNA, 20 bp, Artificial Sequence
  Description of Artificial Sequence: Synthetic oligonucleotide
  Target: ATXN2; (+) strand; PAM type: NRG; PAM sequence: CGG
tttcactgacactgtcacag

SEQ ID NO: 35515 - DNA, 20 bp, Artificial Sequence
  Description of Artificial Sequence: Synthetic oligonucleotide
  Target: ATXN2; (+) strand; PAM type: NRG; PAM sequence: CAG
gacactgtcacagcggatga

SEQ ID NO: 35516 - DNA, 20 bp, Artificial Sequence
  Description of Artificial Sequence: Synthetic oligonucleotide
  Target: ATXN2; (+) strand; PAM type: NRG; PAM sequence: CGG
agcggatgacagactttcta

SEQ ID NO: 35517 - DNA, 20 bp, Artificial Sequence
  Description of Artificial Sequence: Synthetic oligonucleotide
  Target: ATXN2; (+) strand; PAM type: NRG; PAM sequence: GGG
gcggatgacagactttctac

SEQ ID NO: 35518 - DNA, 20 bp, Artificial Sequence
  Description of Artificial Sequence: Synthetic oligonucleotide
  Target: ATXN2; (+) strand; PAM type: NRG; PAM sequence: GGG
cggatgacagactttctacg

SEQ ID NO: 35519 - DNA, 20 bp, Artificial Sequence
  Description of Artificial Sequence: Synthetic oligonucleotide
  Target: ATXN2; (+) strand; PAM type: NRG; PAM sequence: GAG
gatgacagactttctacggg

SEQ ID NO: 35520 - DNA, 20 bp, Artificial Sequence
  Description of Artificial Sequence: Synthetic oligonucleotide
  Target: ATXN2; (+) strand; PAM type: NRG; PAM sequence: AGG
atgacagactttctacgggg

SEQ ID NO: 35521 - DNA, 20 bp, Artificial Sequence
  Description of Artificial Sequence: Synthetic oligonucleotide
  Target: ATXN2; (+) strand; PAM type: NRG; PAM sequence: GAG
gacagactttctacggggag

SEQ ID NO: 35522 - DNA, 20 bp, Artificial Sequence
  Description of Artificial Sequence: Synthetic oligonucleotide
  Target: ATXN2; (+) strand; PAM type: NRG; PAM sequence: AGG
acagactttctacggggagg

SEQ ID NO: 35523 - DNA, 20 bp, Artificial Sequence
  Description of Artificial Sequence: Synthetic oligonucleotide
  Target: ATXN2; (+) strand; PAM type: NRG; PAM sequence: GGG
cagactttctacggggagga

SEQ ID NO: 35524 - DNA, 20 bp, Artificial Sequence
  Description of Artificial Sequence: Synthetic oligonucleotide
  Target: ATXN2; (+) strand; PAM type: NRG; PAM sequence: GGG
agactttctacggggaggag

SEQ ID NO: 35525 - DNA, 20 bp, Artificial Sequence
  Description of Artificial Sequence: Synthetic oligonucleotide
  Target: ATXN2; (+) strand; PAM type: NRG; PAM sequence: GGG
gactttctacggggaggagg

SEQ ID NO: 35526 - DNA, 20 bp, Artificial Sequence
  Description of Artificial Sequence: Synthetic oligonucleotide
  Target: ATXN2; (+) strand; PAM type: NRG; PAM sequence: GGG
actttctacggggaggaggg

SEQ ID NO: 35527 - DNA, 20 bp, Artificial Sequence
  Description of Artificial Sequence: Synthetic oligonucleotide
  Target: ATXN2; (+) strand; PAM type: NRG; PAM sequence: GGG
ctttctacggggaggagggg

SEQ ID NO: 35528 - DNA, 20 bp, Artificial Sequence
  Description of Artificial Sequence: Synthetic oligonucleotide
  Target: ATXN2; (+) strand; PAM type: NRG; PAM sequence: CAG
ggggaggagggggggatcat

SEQ ID NO: 35529 - DNA, 20 bp, Artificial Sequence
  Description of Artificial Sequence: Synthetic oligonucleotide
  Target: ATXN2; (+) strand; PAM type: NRG; PAM sequence: AGG
gggaggagggggggatcatc

SEQ ID NO: 35530 - DNA, 20 bp, Artificial Sequence
  Description of Artificial Sequence: Synthetic oligonucleotide
  Target: ATXN2; (+) strand; PAM type: NRG; PAM sequence: AAG
aggagggggggatcatcagg

SEQ ID NO: 35531 - DNA, 20 bp, Artificial Sequence
  Description of Artificial Sequence: Synthetic oligonucleotide
  Target: ATXN2; (+) strand; PAM type: NRG; PAM sequence: CAG
ggggggatcatcaggaagcc

SEQ ID NO: 35532 - DNA, 20 bp, Artificial Sequence
  Description of Artificial Sequence: Synthetic oligonucleotide
  Target: ATXN2; (+) strand; PAM type: NRG; PAM sequence: AAG
aggaagcccagaacactaac

SEQ ID NO: 35533 - DNA, 20 bp, Artificial Sequence
  Description of Artificial Sequence: Synthetic oligonucleotide
  Target: ATXN2; (+) strand; PAM type: NRG; PAM sequence: CGG
aagcccagaacactaacaag

SEQ ID NO: 35534 - DNA, 20 bp, Artificial Sequence
  Description of Artificial Sequence: Synthetic oligonucleotide
  Target: ATXN2; (+) strand; PAM type: NRG; PAM sequence: CAG
gcggttctcccatctaccgt

SEQ ID NO: 35535 - DNA, 20 bp, Artificial Sequence
  Description of Artificial Sequence: Synthetic oligonucleotide
  Target: ATXN2; (+) strand; PAM type: NRG; PAM sequence: TGG
ccatctaccgtcagtccaca

SEQ ID NO: 35536 - DNA, 20 bp, Artificial Sequence
  Description of Artificial Sequence: Synthetic oligonucleotide
  Target: ATXN2; (+) strand; PAM type: NRG; PAM sequence: CAG
tctaccgtcagtccacatgg

SEQ ID NO: 35537 - DNA, 20 bp, Artificial Sequence
  Description of Artificial Sequence: Synthetic oligonucleotide
  Target: ATXN2; (+) strand; PAM type: NRG; PAM sequence: AGG
ctaccgtcagtccacatggc

SEQ ID NO: 35538 - DNA, 20 bp, Artificial Sequence
  Description of Artificial Sequence: Synthetic oligonucleotide
  Target: ATXN2; (+) strand; PAM type: NRG; PAM sequence: CAG
ggtctgctgtgtccacacca

SEQ ID NO: 35539 - DNA, 20 bp, Artificial Sequence
  Description of Artificial Sequence: Synthetic oligonucleotide
  Target: ATXN2; (+) strand; PAM type: NRG; PAM sequence: CAG
tctaatcctgcttctactct

SEQ ID NO: 35540 - DNA, 20 bp, Artificial Sequence
  Description of Artificial Sequence: Synthetic oligonucleotide
  Target: ATXN2; (+) strand; PAM type: NRG; PAM sequence: TAG
cctgcttctactctcagctt

SEQ ID NO: 35541 - DNA, 20 bp, Artificial Sequence
  Description of Artificial Sequence: Synthetic oligonucleotide
  Target: ATXN2; (+) strand; PAM type: NRG; PAM sequence: AGG
ctgcttctactctcagcttt

SEQ ID NO: 35542 - DNA, 20 bp, Artificial Sequence
  Description of Artificial Sequence: Synthetic oligonucleotide
  Target: ATXN2; (+) strand; PAM type: NRG; PAM sequence: AAG
tactctcagctttaggacaa

SEQ ID NO: 35543 - DNA, 20 bp, Artificial Sequence
  Description of Artificial Sequence: Synthetic oligonucleotide
  Target: ATXN2; (+) strand; PAM type: NRG; PAM sequence: CAG
ctttaggacaaaagctctgt

SEQ ID NO: 35544 - DNA, 20 bp, Artificial Sequence
  Description of Artificial Sequence: Synthetic oligonucleotide
  Target: ATXN2; (+) strand; PAM type: NRG; PAM sequence: GAG
ttaggacaaaagctctgtca

SEQ ID NO: 35545 - DNA, 20 bp, Artificial Sequence
  Description of Artificial Sequence: Synthetic oligonucleotide
  Target: ATXN2; (+) strand; PAM type: NRG; PAM sequence: AGG
taggacaaaagctctgtcag

SEQ ID NO: 35546 - DNA, 20 bp, Artificial Sequence
  Description of Artificial Sequence: Synthetic oligonucleotide
  Target: ATXN2; (+) strand; PAM type: NRG; PAM sequence: AAG
aaaagctctgtcagaggcac

SEQ ID NO: 35547 - DNA, 20 bp, Artificial Sequence
  Description of Artificial Sequence: Synthetic oligonucleotide
  Target: ATXN2; (+) strand; PAM type: NRG; PAM sequence: AAG
tctgtcagaggcacaagctg

SEQ ID NO: 35548 - DNA, 20 bp, Artificial Sequence
  Description of Artificial Sequence: Synthetic oligonucleotide
  Target: ATXN2; (+) strand; PAM type: NRG; PAM sequence: AGG
ctgtcagaggcacaagctga

SEQ ID NO: 35549 - DNA, 20 bp, Artificial Sequence
  Description of Artificial Sequence: Synthetic oligonucleotide
  Target: ATXN2; (+) strand; PAM type: NRG; PAM sequence: CAG
tgatttaaaacattttacct

SEQ ID NO: 35550 - DNA, 20 bp, Artificial Sequence
  Description of Artificial Sequence: Synthetic oligonucleotide
  Target: ATXN2; (+) strand; PAM type: NRG; PAM sequence: AAG
acctcagactaatttcttta

SEQ ID NO: 35551 - DNA, 20 bp, Artificial Sequence
  Description of Artificial Sequence: Synthetic oligonucleotide
  Target: ATXN2; (+) strand; PAM type: NRG; PAM sequence: AGG
cctcagactaatttctttaa

SEQ ID NO: 35552 - DNA, 20 bp, Artificial Sequence
  Description of Artificial Sequence: Synthetic oligonucleotide
  Target: ATXN2; (+) strand; PAM type: NRG; PAM sequence: CAG
actaatttctttaaaggatt

SEQ ID NO: 35553 - DNA, 20 bp, Artificial Sequence
  Description of Artificial Sequence: Synthetic oligonucleotide
  Target: ATXN2; (+) strand; PAM type: NRG; PAM sequence: AGG
ctaatttctttaaaggattc

SEQ ID NO: 35554 - DNA, 20 bp, Artificial Sequence
  Description of Artificial Sequence: Synthetic oligonucleotide
  Target: ATXN2; (+) strand; PAM type: NRG; PAM sequence: CAG
aacttaaccactgcttattt

SEQ ID NO: 35555 - DNA, 20 bp, Artificial Sequence
  Description of Artificial Sequence: Synthetic oligonucleotide
  Target: ATXN2; (+) strand; PAM type: NRG; PAM sequence: TAG
taacacccatgctatttttg

SEQ ID NO: 35556 - DNA, 20 bp, Artificial Sequence
  Description of Artificial Sequence: Synthetic oligonucleotide
  Target: ATXN2; (+) strand; PAM type: NRG; PAM sequence: CAG
acccatgctatttttgtagt

SEQ ID NO: 35557 - DNA, 20 bp, Artificial Sequence
  Description of Artificial Sequence: Synthetic oligonucleotide
  Target: ATXN2; (+) strand; PAM type: NRG; PAM sequence: CAG
gctatttttgtagtcagaaa

SEQ ID NO: 35558 - DNA, 20 bp, Artificial Sequence
  Description of Artificial Sequence: Synthetic oligonucleotide
  Target: ATXN2; (+) strand; PAM type: NRG; PAM sequence: CAG
tgcaaaccctacctaattta

SEQ ID NO: 35559 - DNA, 20 bp, Artificial Sequence
  Description of Artificial Sequence: Synthetic oligonucleotide
  Target: ATXN2; (+) strand; PAM type: NRG; PAM sequence: GAG
ccctacctaatttacagtct

SEQ ID NO: 35560 - DNA, 20 bp, Artificial Sequence
  Description of Artificial Sequence: Synthetic oligonucleotide
  Target: ATXN2; (+) strand; PAM type: NRG; PAM sequence: CAG
acctaatttacagtctgagc

SEQ ID NO: 35561 - DNA, 20 bp, Artificial Sequence
  Description of Artificial Sequence: Synthetic oligonucleotide
  Target: ATXN2; (+) strand; PAM type: NRG; PAM sequence: TGG
tacagtctgagccagcatgc

SEQ ID NO: 35562 - DNA, 20 bp, Artificial Sequence
  Description of Artificial Sequence: Synthetic oligonucleotide
  Target: ATXN2; (+) strand; PAM type: NRG; PAM sequence: CGG
tggcttgtctactgcatcct

SEQ ID NO: 35563 - DNA, 20 bp, Artificial Sequence
  Description of Artificial Sequence: Synthetic oligonucleotide
  Target: ATXN2; (+) strand; PAM type: NRG; PAM sequence: GGG
ggcttgtctactgcatcctc

SEQ ID NO: 35564 - DNA, 20 bp, Artificial Sequence
  Description of Artificial Sequence: Synthetic oligonucleotide
  Target: ATXN2; (+) strand; PAM type: NRG; PAM sequence: CAG
tgtctactgcatcctcggga

SEQ ID NO: 35565 - DNA, 20 bp, Artificial Sequence
  Description of Artificial Sequence: Synthetic oligonucleotide
  Target: ATXN2; (+) strand; PAM type: NRG; PAM sequence: GAG
cgggacagtcacctgccact

SEQ ID NO: 35566 - DNA, 20 bp, Artificial Sequence
  Description of Artificial Sequence: Synthetic oligonucleotide
  Target: ATXN2; (+) strand; PAM type: NRG; PAM sequence: TGG
gacagtcacctgccactgag

SEQ ID NO: 35567 - DNA, 20 bp, Artificial Sequence
  Description of Artificial Sequence: Synthetic oligonucleotide
  Target: ATXN2; (+) strand; PAM type: NRG; PAM sequence: AAG
cactgtccttcctaaatgtc

SEQ ID NO: 35568 - DNA, 20 bp, Artificial Sequence
  Description of Artificial Sequence: Synthetic oligonucleotide
  Target: ATXN2; (+) strand; PAM type: NRG; PAM sequence: AAG
tgtccttcctaaatgtcaag

SEQ ID NO: 35569 - DNA, 20 bp, Artificial Sequence
  Description of Artificial Sequence: Synthetic oligonucleotide
  Target: ATXN2; (+) strand; PAM type: NRG; PAM sequence: AAG
ttcctaaatgtcaagaagtg

SEQ ID NO: 35570 - DNA, 20 bp, Artificial Sequence
  Description of Artificial Sequence: Synthetic oligonucleotide
  Target: ATXN2; (+) strand; PAM type: NRG; PAM sequence: CAG
agtgaagtatgtcacccttt

SEQ ID NO: 35571 - DNA, 20 bp, Artificial Sequence
  Description of Artificial Sequence: Synthetic oligonucleotide
  Target: ATXN2; (+) strand; PAM type: NRG; PAM sequence: AGG
gtgaagtatgtcaccctttc

SEQ ID NO: 35572 - DNA, 20 bp, Artificial Sequence
  Description of Artificial Sequence: Synthetic oligonucleotide
  Target: ATXN2; (+) strand; PAM type: NRG; PAM sequence: GGG
tgaagtatgtcaccctttca

SEQ ID NO: 35573 - DNA, 20 bp, Artificial Sequence
  Description of Artificial Sequence: Synthetic oligonucleotide
  Target: ATXN2; (+) strand; PAM type: NRG; PAM sequence: CAG
gtcaccctttcagggaaatt

SEQ ID NO: 35574 - DNA, 20 bp, Artificial Sequence
  Description of Artificial Sequence: Synthetic oligonucleotide
  Target: ATXN2; (+) strand; PAM type: NRG; PAM sequence: AGG
tcaccctttcagggaaattc

SEQ ID NO: 35575 - DNA, 20 bp, Artificial Sequence
  Description of Artificial Sequence: Synthetic oligonucleotide
  Target: ATXN2; (+) strand; PAM type: NRG; PAM sequence: TAG
aattcaggcaattactgaaa

SEQ ID NO: 35576 - DNA, 20 bp, Artificial Sequence
  Description of Artificial Sequence: Synthetic oligonucleotide
  Target: ATXN2; (+) strand; PAM type: NRG; PAM sequence: AGG
attcaggcaattactgaaat

SEQ ID NO: 35577 - DNA, 20 bp, Artificial Sequence
  Description of Artificial Sequence: Synthetic oligonucleotide
  Target: ATXN2; (+) strand; PAM type: NRG; PAM sequence: GAG
tcaggcaattactgaaatag

SEQ ID NO: 35578 - DNA, 20 bp, Artificial Sequence
  Description of Artificial Sequence: Synthetic oligonucleotide
  Target: ATXN2; (+) strand; PAM type: NRG; PAM sequence: AGG
caggcaattactgaaatagg

SEQ ID NO: 35579 - DNA, 20 bp, Artificial Sequence
  Description of Artificial Sequence: Synthetic oligonucleotide
  Target: ATXN2; (+) strand; PAM type: NRG; PAM sequence: GGG
aggcaattactgaaatagga

SEQ ID NO: 35580 - DNA, 20 bp, Artificial Sequence
  Description of Artificial Sequence: Synthetic oligonucleotide
  Target: ATXN2; (+) strand; PAM type: NRG; PAM sequence: TGG
caattactgaaataggaggg

SEQ ID NO: 35581 - DNA, 20 bp, Artificial Sequence
  Description of Artificial Sequence: Synthetic oligonucleotide
  Target: ATXN2; (+) strand; PAM type: NRG; PAM sequence: AAG
tactgaaataggagggtggc

SEQ ID NO: 35582 - DNA, 20 bp, Artificial Sequence
  Description of Artificial Sequence: Synthetic oligonucleotide
  Target: ATXN2; (+) strand; PAM type: NRG; PAM sequence: CAG
aaataggagggtggcaagaa

SEQ ID NO: 35583 - DNA, 20 bp, Artificial Sequence
  Description of Artificial Sequence: Synthetic oligonucleotide
  Target: ATXN2; (+) strand; PAM type: NRG; PAM sequence: TGG
tggcaagaacagttctatcc

SEQ ID NO: 35584 - DNA, 20 bp, Artificial Sequence
  Description of Artificial Sequence: Synthetic oligonucleotide
  Target: ATXN2; (+) strand; PAM type: NRG; PAM sequence: TGG
gtgccttacgaataaaaaac

SEQ ID NO: 35585 - DNA, 20 bp, Artificial Sequence
  Description of Artificial Sequence: Synthetic oligonucleotide
  Target: ATXN2; (+) strand; PAM type: NRG; PAM sequence: TGG
acgaataaaaaactggattc

SEQ ID NO: 35586 - DNA, 20 bp, Artificial Sequence
  Description of Artificial Sequence: Synthetic oligonucleotide
  Target: ATXN2; (+) strand; PAM type: NRG; PAM sequence: CAG
aaaaactggattctggttta

SEQ ID NO: 35587 - DNA, 20 bp, Artificial Sequence
  Description of Artificial Sequence: Synthetic oligonucleotide
  Target: ATXN2; (+) strand; PAM type: NRG; PAM sequence: CAG
aactggattctggtttacag

SEQ ID NO: 35588 - DNA, 20 bp, Artificial Sequence
  Description of Artificial Sequence: Synthetic oligonucleotide
  Target: ATXN2; (+) strand; PAM type: NRG; PAM sequence: CAG
tctggtttacagcagcttta

SEQ ID NO: 35589 - DNA, 20 bp, Artificial Sequence
  Description of Artificial Sequence: Synthetic oligonucleotide
  Target: ATXN2; (+) strand; PAM type: NRG; PAM sequence: TAG
ttacagcagctttacagtga

SEQ ID NO: 35590 - DNA, 20 bp, Artificial Sequence
  Description of Artificial Sequence: Synthetic oligonucleotide
  Target: ATXN2; (+) strand; PAM type: NRG; PAM sequence: TGG
acagtgatagttaaattaac

SEQ ID NO: 35591 - DNA, 20 bp, Artificial Sequence
  Description of Artificial Sequence: Synthetic oligonucleotide
  Target: ATXN2; (+) strand; PAM type: NRG; PAM sequence: GGG
cagtgatagttaaattaact

SEQ ID NO: 35592 - DNA, 20 bp, Artificial Sequence
  Description of Artificial Sequence: Synthetic oligonucleotide
  Target: ATXN2; (+) strand; PAM type: NRG; PAM sequence: GGG
agtgatagttaaattaactg

SEQ ID NO: 35593 - DNA, 20 bp, Artificial Sequence
  Description of Artificial Sequence: Synthetic oligonucleotide
  Target: ATXN2; (+) strand; PAM type: NRG; PAM sequence: TAG
atagttaaattaactggggc

SEQ ID NO: 35594 - DNA, 20 bp, Artificial Sequence
  Description of Artificial Sequence: Synthetic oligonucleotide
  Target: ATXN2; (+) strand; PAM type: NRG; PAM sequence: AGG
tagttaaattaactggggct

SEQ ID NO: 35595 - DNA, 20 bp, Artificial Sequence
  Description of Artificial Sequence: Synthetic oligonucleotide
  Target: ATXN2; (+) strand; PAM type: NRG; PAM sequence: GGG
agttaaattaactggggcta

SEQ ID NO: 35596 - DNA, 20 bp, Artificial Sequence
  Description of Artificial Sequence: Synthetic oligonucleotide
  Target: ATXN2; (+) strand; PAM type: NRG; PAM sequence: GGG
gttaaattaactggggctag

SEQ ID NO: 35597 - DNA, 20 bp, Artificial Sequence
  Description of Artificial Sequence: Synthetic oligonucleotide
  Target: ATXN2; (+) strand; PAM type: NRG; PAM sequence: AAG
aaattaactggggctagggg

SEQ ID NO: 35598 - DNA, 20 bp, Artificial Sequence
  Description of Artificial Sequence: Synthetic oligonucleotide
  Target: ATXN2; (+) strand; PAM type: NRG; PAM sequence: GAG
attaactggggctaggggaa

SEQ ID NO: 35599 - DNA, 20 bp, Artificial Sequence
  Description of Artificial Sequence: Synthetic oligonucleotide
  Target: ATXN2; (+) strand; PAM type: NRG; PAM sequence: AAG
actggggctaggggaagagc

SEQ ID NO: 35600 - DNA, 20 bp, Artificial Sequence
  Description of Artificial Sequence: Synthetic oligonucleotide
  Target: ATXN2; (+) strand; PAM type: NRG; PAM sequence: AAG
ctaggggaagagcaagcaaa

SEQ ID NO: 35601 - DNA, 20 bp, Artificial Sequence
  Description of Artificial Sequence: Synthetic oligonucleotide
  Target: ATXN2; (+) strand; PAM type: NRG; PAM sequence: AGG
taggggaagagcaagcaaaa

SEQ ID NO: 35602 - DNA, 20 bp, Artificial Sequence
  Description of Artificial Sequence: Synthetic oligonucleotide
  Target: ATXN2; (+) strand; PAM type: NRG; PAM sequence: GGG
aggggaagagcaagcaaaaa

SEQ ID NO: 35603 - DNA, 20 bp, Artificial Sequence
  Description of Artificial Sequence: Synthetic oligonucleotide
  Target: ATXN2; (+) strand; PAM type: NRG; PAM sequence: AAG
ggaagagcaagcaaaaaggg

SEQ ID NO: 35604 - DNA, 20 bp, Artificial Sequence
  Description of Artificial Sequence: Synthetic oligonucleotide
  Target: ATXN2; (+) strand; PAM type: NRG; PAM sequence: AAG
agagcaagcaaaaagggaag

SEQ ID NO: 35605 - DNA, 20 bp, Artificial Sequence
  Description of Artificial Sequence: Synthetic oligonucleotide
  Target: ATXN2; (+) strand; PAM type: NRG; PAM sequence: AGG
gagcaagcaaaaagggaaga

SEQ ID NO: 35606 - DNA, 20 bp, Artificial Sequence
  Description of Artificial Sequence: Synthetic oligonucleotide
  Target: ATXN2; (+) strand; PAM type: NRG; PAM sequence: TAG
aaaaagggaagaaggactcc

SEQ ID NO: 35607 - DNA, 20 bp, Artificial Sequence
  Description of Artificial Sequence: Synthetic oligonucleotide
  Target: ATXN2; (+) strand; PAM type: NRG; PAM sequence: AGG
aaaagggaagaaggactcct

SEQ ID NO: 35608 - DNA, 20 bp, Artificial Sequence
  Description of Artificial Sequence: Synthetic oligonucleotide
  Target: ATXN2; (+) strand; PAM type: NRG; PAM sequence: TAG
aaggactcctaggccctttc

SEQ ID NO: 35609 - DNA, 20 bp, Artificial Sequence
  Description of Artificial Sequence: Synthetic oligonucleotide
  Target: ATXN2; (+) strand; PAM type: NRG; PAM sequence: CAG
gccctttctagtaaatcctt

SEQ ID NO: 35610 - DNA, 20 bp, Artificial Sequence
  Description of Artificial Sequence: Synthetic oligonucleotide
  Target: ATXN2; (+) strand; PAM type: NRG; PAM sequence: AAG
ctagtaaatccttcagcaac

SEQ ID NO: 35611 - DNA, 20 bp, Artificial Sequence
  Description of Artificial Sequence: Synthetic oligonucleotide
  Target: ATXN2; (+) strand; PAM type: NRG; PAM sequence: AGG
tagtaaatccttcagcaaca

SEQ ID NO: 35612 - DNA, 20 bp, Artificial Sequence
  Description of Artificial Sequence: Synthetic oligonucleotide
  Target: ATXN2; (+) strand; PAM type: NRG; PAM sequence: TGG
aaatccttcagcaacaaggc

SEQ ID NO: 35613 - DNA, 20 bp, Artificial Sequence
  Description of Artificial Sequence: Synthetic oligonucleotide
  Target: ATXN2; (+) strand; PAM type: NRG; PAM sequence: TGG
cttcagcaacaaggctggct

SEQ ID NO: 35614 - DNA, 20 bp, Artificial Sequence
  Description of Artificial Sequence: Synthetic oligonucleotide
  Target: ATXN2; (+) strand; PAM type: NRG; PAM sequence: AAG
aggctggcttggtgccctcc

SEQ ID NO: 35615 - DNA, 20 bp, Artificial Sequence
  Description of Artificial Sequence: Synthetic oligonucleotide
  Target: ATXN2; (+) strand; PAM type: NRG; PAM sequence: TGG
ggtgccctccaagcatctaa

SEQ ID NO: 35616 - DNA, 20 bp, Artificial Sequence
  Description of Artificial Sequence: Synthetic oligonucleotide
  Target: ATXN2; (+) strand; PAM type: NRG; PAM sequence: AAG
ggcttattaaattatcccac

SEQ ID NO: 35617 - DNA, 20 bp, Artificial Sequence
  Description of Artificial Sequence: Synthetic oligonucleotide
  Target: ATXN2; (+) strand; PAM type: NRG; PAM sequence: TGG
ttattaaattatcccacaag

SEQ ID NO: 35618 - DNA, 20 bp, Artificial Sequence
  Description of Artificial Sequence: Synthetic oligonucleotide
  Target: ATXN2; (+) strand; PAM type: NRG; PAM sequence: GGG
tattaaattatcccacaagt

SEQ ID NO: 35619 - DNA, 20 bp, Artificial Sequence
  Description of Artificial Sequence: Synthetic oligonucleotide
  Target: ATXN2; (+) strand; PAM type: NRG; PAM sequence: TAG
attatcccacaagtgggttt

SEQ ID NO: 35620 - DNA, 20 bp, Artificial Sequence
  Description of Artificial Sequence: Synthetic oligonucleotide
  Target: ATXN2; (+) strand; PAM type: NRG; PAM sequence: AGG
ttatcccacaagtgggtttt

SEQ ID NO: 35621 - DNA, 20 bp, Artificial Sequence
  Description of Artificial Sequence: Synthetic oligonucleotide
  Target: ATXN2; (+) strand; PAM type: NRG; PAM sequence: GAG
gggttttaggctcctttttt

SEQ ID NO: 35622 - DNA, 20 bp, Artificial Sequence
  Description of Artificial Sequence: Synthetic oligonucleotide
  Target: ATXN2; (+) strand; PAM type: NRG; PAM sequence: TGG
gctccttttttgagccaaaa

SEQ ID NO: 35623 - DNA, 20 bp, Artificial Sequence
  Description of Artificial Sequence: Synthetic oligonucleotide
  Target: ATXN2; (+) strand; PAM type: NRG; PAM sequence: AAG
ccttttttgagccaaaatgg

SEQ ID NO: 35624 - DNA, 20 bp, Artificial Sequence
  Description of Artificial Sequence: Synthetic oligonucleotide
  Target: ATXN2; (+) strand; PAM type: NRG; PAM sequence: TGG
ttttgagccaaaatggaagc

SEQ ID NO: 35625 - DNA, 20 bp, Artificial Sequence
  Description of Artificial Sequence: Synthetic oligonucleotide
  Target: ATXN2; (+) strand; PAM type: NRG; PAM sequence: GGG
tttgagccaaaatggaagct

SEQ ID NO: 35626 - DNA, 20 bp, Artificial Sequence
  Description of Artificial Sequence: Synthetic oligonucleotide
  Target: ATXN2; (+) strand; PAM type: NRG; PAM sequence: TGG
caaaatggaagctgggaatc

SEQ ID NO: 35627 - DNA, 20 bp, Artificial Sequence
  Description of Artificial Sequence: Synthetic oligonucleotide
  Target: ATXN2; (+) strand; PAM type: NRG; PAM sequence: GAG
aatctggtgccataactaat

SEQ ID NO: 35628 - DNA, 20 bp, Artificial Sequence
  Description of Artificial Sequence: Synthetic oligonucleotide
  Target: ATXN2; (+) strand; PAM type: NRG; PAM sequence: TAG
ctaatgagaaactcctttaa

SEQ ID NO: 35629 - DNA, 20 bp, Artificial Sequence
  Description of Artificial Sequence: Synthetic oligonucleotide
  Target: ATXN2; (+) strand; PAM type: NRG; PAM sequence: CAG
ctcctttaatagcccacaat

SEQ ID NO: 35630 - DNA, 20 bp, Artificial Sequence
  Description of Artificial Sequence: Synthetic oligonucleotide
  Target: ATXN2; (+) strand; PAM type: NRG; PAM sequence: TAG
ccacaatcagtgttctgttc

SEQ ID NO: 35631 - DNA, 20 bp, Artificial Sequence
  Description of Artificial Sequence: Synthetic oligonucleotide
  Target: ATXN2; (+) strand; PAM type: NRG; PAM sequence: TGG
aatcagtgttctgttctagc

SEQ ID NO: 35632 - DNA, 20 bp, Artificial Sequence
  Description of Artificial Sequence: Synthetic oligonucleotide
  Target: ATXN2; (+) strand; PAM type: NRG; PAM sequence: TGG
ctagctggctactgcttcac

SEQ ID NO: 35633 - DNA, 20 bp, Artificial Sequence
  Description of Artificial Sequence: Synthetic oligonucleotide
  Target: ATXN2; (+) strand; PAM type: NRG; PAM sequence: GAG
ggctactgcttcactggatt

SEQ ID NO: 35634 - DNA, 20 bp, Artificial Sequence
  Description of Artificial Sequence: Synthetic oligonucleotide
  Target: ATXN2; (+) strand; PAM type: NRG; PAM sequence: TGG
tatctatctccttgcacaca

SEQ ID NO: 35635 - DNA, 20 bp, Artificial Sequence
  Description of Artificial Sequence: Synthetic oligonucleotide
  Target: ATXN2; (+) strand; PAM type: NRG; PAM sequence: GGG
atctatctccttgcacacat

SEQ ID NO: 35636 - DNA, 20 bp, Artificial Sequence
  Description of Artificial Sequence: Synthetic oligonucleotide
  Target: ATXN2; (+) strand; PAM type: NRG; PAM sequence: CAG
cacacacaatctccaccatc

SEQ ID NO: 35637 - DNA, 20 bp, Artificial Sequence
  Description of Artificial Sequence: Synthetic oligonucleotide
  Target: ATXN2; (+) strand; PAM type: NRG; PAM sequence: AGG
acacacaatctccaccatcc

SEQ ID NO: 35638 - DNA, 20 bp, Artificial Sequence
  Description of Artificial Sequence: Synthetic oligonucleotide
  Target: ATXN2; (+) strand; PAM type: NRG; PAM sequence: GGG
cacacaatctccaccatcca

SEQ ID NO: 35639 - DNA, 20 bp, Artificial Sequence
  Description of Artificial Sequence: Synthetic oligonucleotide
  Target: ATXN2; (+) strand; PAM type: NRG; PAM sequence: GAG
cacaatctccaccatccagg

SEQ ID NO: 35640 - DNA, 20 bp, Artificial Sequence
  Description of Artificial Sequence: Synthetic oligonucleotide
  Target: ATXN2; (+) strand; PAM type: NRG; PAM sequence: AGG
acaatctccaccatccaggg

SEQ ID NO: 35641 - DNA, 20 bp, Artificial Sequence
  Description of Artificial Sequence: Synthetic oligonucleotide
  Target: ATXN2; (+) strand; PAM type: NRG; PAM sequence: AAG
caccatccagggaggtcctg

SEQ ID NO: 35642 - DNA, 20 bp, Artificial Sequence
  Description of Artificial Sequence: Synthetic oligonucleotide
  Target: ATXN2; (+) strand; PAM type: NRG; PAM sequence: AAG
agtcaaatctctatctatac

SEQ ID NO: 35643 - DNA, 20 bp, Artificial Sequence
  Description of Artificial Sequence: Synthetic oligonucleotide
  Target: ATXN2; (+) strand; PAM type: NRG; PAM sequence: TAG
tatacaagtgatacaattca

SEQ ID NO: 35644 - DNA, 20 bp, Artificial Sequence
  Description of Artificial Sequence: Synthetic oligonucleotide
  Target: ATXN2; (+) strand; PAM type: NRG; PAM sequence: AGG
atacaagtgatacaattcat

SEQ ID NO: 35645 - DNA, 20 bp, Artificial Sequence
  Description of Artificial Sequence: Synthetic oligonucleotide
  Target: ATXN2; (+) strand; PAM type: NRG; PAM sequence: GGG
tacaagtgatacaattcata

SEQ ID NO: 35646 - DNA, 20 bp, Artificial Sequence
  Description of Artificial Sequence: Synthetic oligonucleotide
  Target: ATXN2; (+) strand; PAM type: NRG; PAM sequence: GGG
acaagtgatacaattcatag

SEQ ID NO: 35647 - DNA, 20 bp, Artificial Sequence
  Description of Artificial Sequence: Synthetic oligonucleotide
  Target: ATXN2; (+) strand; PAM type: NRG; PAM sequence: GGG
caagtgatacaattcatagg

SEQ ID NO: 35648 - DNA, 20 bp, Artificial Sequence
  Description of Artificial Sequence: Synthetic oligonucleotide
  Target: ATXN2; (+) strand; PAM type: NRG; PAM sequence: TGG
tgatacaattcatagggggc

SEQ ID NO: 35649 - DNA, 20 bp, Artificial Sequence
  Description of Artificial Sequence: Synthetic oligonucleotide
  Target: ATXN2; (+) strand; PAM type: NRG; PAM sequence: CAG
catagggggctggctcctcc

SEQ ID NO: 35650 - DNA, 20 bp, Artificial Sequence
  Description of Artificial Sequence: Synthetic oligonucleotide
  Target: ATXN2; (+) strand; PAM type: NRG; PAM sequence: TGG
ggctcctcccagaacctgtc

SEQ ID NO: 35651 - DNA, 20 bp, Artificial Sequence
  Description of Artificial Sequence: Synthetic oligonucleotide
  Target: ATXN2; (+) strand; PAM type: NRG; PAM sequence: GAG
ctcctcccagaacctgtctg

SEQ ID NO: 35652 - DNA, 20 bp, Artificial Sequence
  Description of Artificial Sequence: Synthetic oligonucleotide
  Target: ATXN2; (+) strand; PAM type: NRG; PAM sequence: AGG
tcctcccagaacctgtctgg

SEQ ID NO: 35653 - DNA, 20 bp, Artificial Sequence
  Description of Artificial Sequence: Synthetic oligonucleotide
  Target: ATXN2; (+) strand; PAM type: NRG; PAM sequence: CAG
ccagaacctgtctggaggct

SEQ ID NO: 35654 - DNA, 20 bp, Artificial Sequence
  Description of Artificial Sequence: Synthetic oligonucleotide
  Target: ATXN2; (+) strand; PAM type: NRG; PAM sequence: CGG
cctgtctggaggctcagaaa

SEQ ID NO: 35655 - DNA, 20 bp, Artificial Sequence
  Description of Artificial Sequence: Synthetic oligonucleotide
  Target: ATXN2; (+) strand; PAM type: NRG; PAM sequence: GGG
ctgtctggaggctcagaaac

SEQ ID NO: 35656 - DNA, 20 bp, Artificial Sequence
  Description of Artificial Sequence: Synthetic oligonucleotide
  Target: ATXN2; (+) strand; PAM type: NRG; PAM sequence: GGG
tgtctggaggctcagaaacg

SEQ ID NO: 35657 - DNA, 20 bp, Artificial Sequence
  Description of Artificial Sequence: Synthetic oligonucleotide
  Target: ATXN2; (+) strand; PAM type: NRG; PAM sequence: GGG
gtctggaggctcagaaacgg

SEQ ID NO: 35658 - DNA, 20 bp, Artificial Sequence
  Description of Artificial Sequence: Synthetic oligonucleotide
  Target: ATXN2; (+) strand; PAM type: NRG; PAM sequence: CAG
tggaggctcagaaacggggg

SEQ ID NO: 35659 - DNA, 20 bp, Artificial Sequence
  Description of Artificial Sequence: Synthetic oligonucleotide
  Target: ATXN2; (+) strand; PAM type: NRG; PAM sequence: CAG
ctcagaaacgggggcagtga

SEQ ID NO: 35660 - DNA, 20 bp, Artificial Sequence
  Description of Artificial Sequence: Synthetic oligonucleotide
  Target: ATXN2; (+) strand; PAM type: NRG; PAM sequence: TGG
agaaacgggggcagtgacag

SEQ ID NO: 35661 - DNA, 20 bp, Artificial Sequence
  Description of Artificial Sequence: Synthetic oligonucleotide
  Target: ATXN2; (+) strand; PAM type: NRG; PAM sequence: GAG
aaacgggggcagtgacagtg

SEQ ID NO: 35662 - DNA, 20 bp, Artificial Sequence
  Description of Artificial Sequence: Synthetic oligonucleotide
  Target: ATXN2; (+) strand; PAM type: NRG; PAM sequence: CAG
gggggcagtgacagtggagt

SEQ ID NO: 35663 - DNA, 20 bp, Artificial Sequence
  Description of Artificial Sequence: Synthetic oligonucleotide
  Target: ATXN2; (+) strand; PAM type: NRG; PAM sequence: TGG
acagtggagtcagctgctct

SEQ ID NO: 35664 - DNA, 20 bp, Artificial Sequence
  Description of Artificial Sequence: Synthetic oligonucleotide
  Target: ATXN2; (+) strand; PAM type: NRG; PAM sequence: GGG
cagtggagtcagctgctctt

SEQ ID NO: 35665 - DNA, 20 bp, Artificial Sequence
  Description of Artificial Sequence: Synthetic oligonucleotide
  Target: ATXN2; (+) strand; PAM type: NRG; PAM sequence: CAG
agtcagctgctcttgggtgc

SEQ ID NO: 35666 - DNA, 20 bp, Artificial Sequence
  Description of Artificial Sequence: Synthetic oligonucleotide
  Target: ATXN2; (+) strand; PAM type: NRG; PAM sequence: CAG
cagctgctcttgggtgccag

SEQ ID NO: 35667 - DNA, 20 bp, Artificial Sequence
  Description of Artificial Sequence: Synthetic oligonucleotide
  Target: ATXN2; (+) strand; PAM type: NRG; PAM sequence: GAG
gctgctcttgggtgccagca

SEQ ID NO: 35668 - DNA, 20 bp, Artificial Sequence
  Description of Artificial Sequence: Synthetic oligonucleotide
  Target: ATXN2; (+) strand; PAM type: NRG; PAM sequence: CAG
tgggtgccagcagagccatt

SEQ ID NO: 35669 - DNA, 20 bp, Artificial Sequence
  Description of Artificial Sequence: Synthetic oligonucleotide
  Target: ATXN2; (+) strand; PAM type: NRG; PAM sequence: CAG
gagccattcagtacaacccc

SEQ ID NO: 35670 - DNA, 20 bp, Artificial Sequence
  Description of Artificial Sequence: Synthetic oligonucleotide
  Target: ATXN2; (+) strand; PAM type: NRG; PAM sequence: AGG
agccattcagtacaaccccc

SEQ ID NO: 35671 - DNA, 20 bp, Artificial Sequence
  Description of Artificial Sequence: Synthetic oligonucleotide
  Target: ATXN2; (+) strand; PAM type: NRG; PAM sequence: CAG
cagtacaacccccaggctca

SEQ ID NO: 35672 - DNA, 20 bp, Artificial Sequence
  Description of Artificial Sequence: Synthetic oligonucleotide
  Target: ATXN2; (+) strand; PAM type: NRG; PAM sequence: CAG
tacaacccccaggctcacag

SEQ ID NO: 35673 - DNA, 20 bp, Artificial Sequence
  Description of Artificial Sequence: Synthetic oligonucleotide
  Target: ATXN2; (+) strand; PAM type: NRG; PAM sequence: TGG
aacccccaggctcacagcag

SEQ ID NO: 35674 - DNA, 20 bp, Artificial Sequence
  Description of Artificial Sequence: Synthetic oligonucleotide
  Target: ATXN2; (+) strand; PAM type: NRG; PAM sequence: TAG
aggctcacagcagtggcttc

SEQ ID NO: 35675 - DNA, 20 bp, Artificial Sequence
  Description of Artificial Sequence: Synthetic oligonucleotide
  Target: ATXN2; (+) strand; PAM type: NRG; PAM sequence: AGG
ggctcacagcagtggcttct

SEQ ID NO: 35676 - DNA, 20 bp, Artificial Sequence
  Description of Artificial Sequence: Synthetic oligonucleotide
  Target: ATXN2; (+) strand; PAM type: NRG; PAM sequence: TGG
agcagtggcttctaggaaac

SEQ ID NO: 35677 - DNA, 20 bp, Artificial Sequence
  Description of Artificial Sequence: Synthetic oligonucleotide
  Target: ATXN2; (+) strand; PAM type: NRG; PAM sequence: GGG
gcagtggcttctaggaaact

SEQ ID NO: 35678 - DNA, 20 bp, Artificial Sequence
  Description of Artificial Sequence: Synthetic oligonucleotide
  Target: ATXN2; (+) strand; PAM type: NRG; PAM sequence: GAG
agtggcttctaggaaactgg

SEQ ID NO: 35679 - DNA, 20 bp, Artificial Sequence
  Description of Artificial Sequence: Synthetic oligonucleotide
  Target: ATXN2; (+) strand; PAM type: NRG; PAM sequence: TAG
cttctaggaaactgggagtt

SEQ ID NO: 35680 - DNA, 20 bp, Artificial Sequence
  Description of Artificial Sequence: Synthetic oligonucleotide
  Target: ATXN2; (+) strand; PAM type: NRG; PAM sequence: CAG
aggaaactgggagtttagat

SEQ ID NO: 35681 - DNA, 20 bp, Artificial Sequence
  Description of Artificial Sequence: Synthetic oligonucleotide
  Target: ATXN2; (+) strand; PAM type: NRG; PAM sequence: CAG
gggagtttagatcagcttta

SEQ ID NO: 35682 - DNA, 20 bp, Artificial Sequence
  Description of Artificial Sequence: Synthetic oligonucleotide
  Target: ATXN2; (+) strand; PAM type: NRG; PAM sequence: CAG
agctttacagatacatcgat

SEQ ID NO: 35683 - DNA, 20 bp, Artificial Sequence
  Description of Artificial Sequence: Synthetic oligonucleotide
  Target: ATXN2; (+) strand; PAM type: NRG; PAM sequence: GAG
ctttacagatacatcgatca

SEQ ID NO: 35684 - DNA, 20 bp, Artificial Sequence
  Description of Artificial Sequence: Synthetic oligonucleotide
  Target: ATXN2; (+) strand; PAM type: NRG; PAM sequence: AGG
tttacagatacatcgatcag

SEQ ID NO: 35685 - DNA, 20 bp, Artificial Sequence
  Description of Artificial Sequence: Synthetic oligonucleotide
  Target: ATXN2; (+) strand; PAM type: NRG; PAM sequence: CAG
cagaggctaaaatgaaacct

SEQ ID NO: 35686 - DNA, 20 bp, Artificial Sequence
  Description of Artificial Sequence: Synthetic oligonucleotide
  Target: ATXN2; (+) strand; PAM type: NRG; PAM sequence: TAG
aaacctcagcctaaaactca

SEQ ID NO: 35687 - DNA, 20 bp, Artificial Sequence
  Description of Artificial Sequence: Synthetic oligonucleotide
  Target: ATXN2; (+) strand; PAM type: NRG; PAM sequence: AGG
aacctcagcctaaaactcat

SEQ ID NO: 35688 - DNA, 20 bp, Artificial Sequence
  Description of Artificial Sequence: Synthetic oligonucleotide
  Target: ATXN2; (+) strand; PAM type: NRG; PAM sequence: TGG
aactcataggactgactgcc

SEQ ID NO: 35689 - DNA, 20 bp, Artificial Sequence
  Description of Artificial Sequence: Synthetic oligonucleotide
  Target: ATXN2; (+) strand; PAM type: NRG; PAM sequence: GGG
actcataggactgactgcct

SEQ ID NO: 35690 - DNA, 20 bp, Artificial Sequence
  Description of Artificial Sequence: Synthetic oligonucleotide
  Target: ATXN2; (+) strand; PAM type: NRG; PAM sequence: GAG
tcataggactgactgcctgg

SEQ ID NO: 35691 - DNA, 20 bp, Artificial Sequence
  Description of Artificial Sequence: Synthetic oligonucleotide
  Target: ATXN2; (+) strand; PAM type: NRG; PAM sequence: AGG
cataggactgactgcctggg

SEQ ID NO: 35692 - DNA, 20 bp, Artificial Sequence
  Description of Artificial Sequence: Synthetic oligonucleotide
  Target: ATXN2; (+) strand; PAM type: NRG; PAM sequence: GAG
taggactgactgcctgggag

SEQ ID NO: 35693 - DNA, 20 bp, Artificial Sequence
  Description of Artificial Sequence: Synthetic oligonucleotide
  Target: ATXN2; (+) strand; PAM type: NRG; PAM sequence: AGG
aggactgactgcctgggagg

SEQ ID NO: 35694 - DNA, 20 bp, Artificial Sequence
  Description of Artificial Sequence: Synthetic oligonucleotide
  Target: ATXN2; (+) strand; PAM type: NRG; PAM sequence: GGG
ggactgactgcctgggagga

SEQ ID NO: 35695 - DNA, 20 bp, Artificial Sequence
  Description of Artificial Sequence: Synthetic oligonucleotide
  Target: ATXN2; (+) strand; PAM type: NRG; PAM sequence: TAG
tgactgcctgggaggagggt

SEQ ID NO: 35696 - DNA, 20 bp, Artificial Sequence
  Description of Artificial Sequence: Synthetic oligonucleotide
  Target: ATXN2; (+) strand; PAM type: NRG; PAM sequence: AGG
gactgcctgggaggagggtt

SEQ ID NO: 35697 - DNA, 20 bp, Artificial Sequence
  Description of Artificial Sequence: Synthetic oligonucleotide
  Target: ATXN2; (+) strand; PAM type: NRG; PAM sequence: TAG
ctgcttcttccacttatact

SEQ ID NO: 35698 - DNA, 20 bp, Artificial Sequence
  Description of Artificial Sequence: Synthetic oligonucleotide
  Target: ATXN2; (+) strand; PAM type: NRG; PAM sequence: AAG
atacttagtctctgtgctcc

SEQ ID NO: 35699 - DNA, 20 bp, Artificial Sequence
  Description of Artificial Sequence: Synthetic oligonucleotide
  Target: ATXN2; (+) strand; PAM type: NRG; PAM sequence: GAG
acttagtctctgtgctccaa

SEQ ID NO: 35700 - DNA, 20 bp, Artificial Sequence
  Description of Artificial Sequence: Synthetic oligonucleotide
  Target: ATXN2; (+) strand; PAM type: NRG; PAM sequence: AGG
cttagtctctgtgctccaag

SEQ ID NO: 35701 - DNA, 20 bp, Artificial Sequence
  Description of Artificial Sequence: Synthetic oligonucleotide
  Target: ATXN2; (+) strand; PAM type: NRG; PAM sequence: TAG
agaggtcaaatttttgcttc

SEQ ID NO: 35702 - DNA, 20 bp, Artificial Sequence
  Description of Artificial Sequence: Synthetic oligonucleotide
  Target: ATXN2; (+) strand; PAM type: NRG; PAM sequence: TGG
ttttgcttctagaatttcct

SEQ ID NO: 35703 - DNA, 20 bp, Artificial Sequence
  Description of Artificial Sequence: Synthetic oligonucleotide
  Target: ATXN2; (+) strand; PAM type: NRG; PAM sequence: GGG
tttgcttctagaatttcctt

SEQ ID NO: 35704 - DNA, 20 bp, Artificial Sequence
  Description of Artificial Sequence: Synthetic oligonucleotide
  Target: ATXN2; (+) strand; PAM type: NRG; PAM sequence: GGG
ttgcttctagaatttccttg

SEQ ID NO: 35705 - DNA, 20 bp, Artificial Sequence
  Description of Artificial Sequence: Synthetic oligonucleotide
  Target: ATXN2; (+) strand; PAM type: NRG; PAM sequence: CAG
agaatttccttggggtcttt

SEQ ID NO: 35706 - DNA, 20 bp, Artificial Sequence
  Description of Artificial Sequence: Synthetic oligonucleotide
  Target: ATXN2; (+) strand; PAM type: NRG; PAM sequence: GAG
aatttccttggggtctttca

SEQ ID NO: 35707 - DNA, 20 bp, Artificial Sequence
  Description of Artificial Sequence: Synthetic oligonucleotide
  Target: ATXN2; (+) strand; PAM type: NRG; PAM sequence: AGG
atttccttggggtctttcag

SEQ ID NO: 35708 - DNA, 20 bp, Artificial Sequence
  Description of Artificial Sequence: Synthetic oligonucleotide
  Target: ATXN2; (+) strand; PAM type: NRG; PAM sequence: GGG
tttccttggggtctttcaga

SEQ ID NO: 35709 - DNA, 20 bp, Artificial Sequence
  Description of Artificial Sequence: Synthetic oligonucleotide
  Target: ATXN2; (+) strand; PAM type: NRG; PAM sequence: TGG
ccttggggtctttcagaggg

SEQ ID NO: 35710 - DNA, 20 bp, Artificial Sequence
  Description of Artificial Sequence: Synthetic oligonucleotide
  Target: ATXN2; (+) strand; PAM type: NRG; PAM sequence: GGG
cttggggtctttcagagggt

SEQ ID NO: 35711 - DNA, 20 bp, Artificial Sequence
  Description of Artificial Sequence: Synthetic oligonucleotide
  Target: ATXN2; (+) strand; PAM type: NRG; PAM sequence: GGG
ttggggtctttcagagggtg

SEQ ID NO: 35712 - DNA, 20 bp, Artificial Sequence
  Description of Artificial Sequence: Synthetic oligonucleotide
  Target: ATXN2; (+) strand; PAM type: NRG; PAM sequence: GGG
tggggtctttcagagggtgg

SEQ ID NO: 35713 - DNA, 20 bp, Artificial Sequence
  Description of Artificial Sequence: Synthetic oligonucleotide
  Target: ATXN2; (+) strand; PAM type: NRG; PAM sequence: GAG
cttttctttttttttttttt

SEQ ID NO: 35714 - DNA, 20 bp, Artificial Sequence
  Description of Artificial Sequence: Synthetic oligonucleotide
  Target: ATXN2; (+) strand; PAM type: NRG; PAM sequence: TGG
tcttttttttttttttgaga

SEQ ID NO: 35715 - DNA, 20 bp, Artificial Sequence
  Description of Artificial Sequence: Synthetic oligonucleotide
  Target: ATXN2; (+) strand; PAM type: NRG; PAM sequence: GAG
ttttttttttttttgagatg

SEQ ID NO: 35716 - DNA, 20 bp, Artificial Sequence
  Description of Artificial Sequence: Synthetic oligonucleotide
  Target: ATXN2; (+) strand; PAM type: NRG; PAM sequence: CGG
atggagtttctcttgtcaac

SEQ ID NO: 35717 - DNA, 20 bp, Artificial Sequence
  Description of Artificial Sequence: Synthetic oligonucleotide
  Target: ATXN2; (+) strand; PAM type: NRG; PAM sequence: GGG
tggagtttctcttgtcaacc

SEQ ID NO: 35718 - DNA, 20 bp, Artificial Sequence
  Description of Artificial Sequence: Synthetic oligonucleotide
  Target: ATXN2; (+) strand; PAM type: NRG; PAM sequence: TGG
gtttctcttgtcaaccgggc

SEQ ID NO: 35719 - DNA, 20 bp, Artificial Sequence
  Description of Artificial Sequence: Synthetic oligonucleotide
  Target: ATXN2; (+) strand; PAM type: NRG; PAM sequence: GAG
ttctcttgtcaaccgggctg

SEQ ID NO: 35720 - DNA, 20 bp, Artificial Sequence
  Description of Artificial Sequence: Synthetic oligonucleotide
  Target: ATXN2; (+) strand; PAM type: NRG; PAM sequence: CAG
ttgtcaaccgggctggagtg

SEQ ID NO: 35721 - DNA, 20 bp, Artificial Sequence
  Description of Artificial Sequence: Synthetic oligonucleotide
  Target: ATXN2; (+) strand; PAM type: NRG; PAM sequence: TGG
tcaaccgggctggagtgcag

SEQ ID NO: 35722 - DNA, 20 bp, Artificial Sequence
  Description of Artificial Sequence: Synthetic oligonucleotide
  Target: ATXN2; (+) strand; PAM type: NRG; PAM sequence: TGG
ggagtgcagtggtgcaatct

SEQ ID NO: 35723 - DNA, 20 bp, Artificial Sequence
  Description of Artificial Sequence: Synthetic oligonucleotide
  Target: ATXN2; (+) strand; PAM type: NRG; PAM sequence: TGG
cactgcaacctccaccttcc

SEQ ID NO: 35724 - DNA, 20 bp, Artificial Sequence
  Description of Artificial Sequence: Synthetic oligonucleotide
  Target: ATXN2; (+) strand; PAM type: NRG; PAM sequence: AAG
aacctccaccttcctggttc

SEQ ID NO: 35725 - DNA, 20 bp, Artificial Sequence
  Description of Artificial Sequence: Synthetic oligonucleotide
  Target: ATXN2; (+) strand; PAM type: NRG; PAM sequence: AAG
cgattctgcctcgacctctc

SEQ ID NO: 35726 - DNA, 20 bp, Artificial Sequence
  Description of Artificial Sequence: Synthetic oligonucleotide
  Target: ATXN2; (+) strand; PAM type: NRG; PAM sequence: TAG
ttctgcctcgacctctcaag

SEQ ID NO: 35727 - DNA, 20 bp, Artificial Sequence
  Description of Artificial Sequence: Synthetic oligonucleotide
  Target: ATXN2; (+) strand; PAM type: NRG; PAM sequence: TGG
gcctcgacctctcaagtagc

SEQ ID NO: 35728 - DNA, 20 bp, Artificial Sequence
  Description of Artificial Sequence: Synthetic oligonucleotide
  Target: ATXN2; (+) strand; PAM type: NRG; PAM sequence: GGG
cctcgacctctcaagtagct

SEQ ID NO: 35729 - DNA, 20 bp, Artificial Sequence
  Description of Artificial Sequence: Synthetic oligonucleotide
  Target: ATXN2; (+) strand; PAM type: NRG; PAM sequence: AAG
tctcaagtagctgggattac

SEQ ID NO: 35730 - DNA, 20 bp, Artificial Sequence
  Description of Artificial Sequence: Synthetic oligonucleotide
  Target: ATXN2; (+) strand; PAM type: NRG; PAM sequence: CAG
gtagctgggattacaagcac

SEQ ID NO: 35731 - DNA, 20 bp, Artificial Sequence
  Description of Artificial Sequence: Synthetic oligonucleotide
  Target: ATXN2; (+) strand; PAM type: NRG; PAM sequence: TGG
caagcaccagccaccatgcc

SEQ ID NO: 35732 - DNA, 20 bp, Artificial Sequence
  Description of Artificial Sequence: Synthetic oligonucleotide
  Target: ATXN2; (+) strand; PAM type: NRG; PAM sequence: TAG
cctggctaattttgtatttt

SEQ ID NO: 35733 - DNA, 20 bp, Artificial Sequence
  Description of Artificial Sequence: Synthetic oligonucleotide
  Target: ATXN2; (+) strand; PAM type: NRG; PAM sequence: TAG
ggctaattttgtatttttag

SEQ ID NO: 35734 - DNA, 20 bp, Artificial Sequence
  Description of Artificial Sequence: Synthetic oligonucleotide
  Target: ATXN2; (+) strand; PAM type: NRG; PAM sequence: GAG
ctaattttgtatttttagta

SEQ ID NO: 35735 - DNA, 20 bp, Artificial Sequence
  Description of Artificial Sequence: Synthetic oligonucleotide
  Target: ATXN2; (+) strand; PAM type: NRG; PAM sequence: CAG
ttttgtatttttagtagaga

SEQ ID NO: 35736 - DNA, 20 bp, Artificial Sequence
  Description of Artificial Sequence: Synthetic oligonucleotide
  Target: ATXN2; (+) strand; PAM type: NRG; PAM sequence: AGG
tttgtatttttagtagagac

SEQ ID NO: 35737 - DNA, 20 bp, Artificial Sequence
  Description of Artificial Sequence: Synthetic oligonucleotide
  Target: ATXN2; (+) strand; PAM type: NRG; PAM sequence: GGG
ttgtatttttagtagagaca

SEQ ID NO: 35738 - DNA, 20 bp, Artificial Sequence
  Description of Artificial Sequence: Synthetic oligonucleotide
  Target: ATXN2; (+) strand; PAM type: NRG; PAM sequence: TGG
gagacagggtttcaccatgt

SEQ ID NO: 35739 - DNA, 20 bp, Artificial Sequence
  Description of Artificial Sequence: Synthetic oligonucleotide
  Target: ATXN2; (+) strand; PAM type: NRG; PAM sequence: CAG
cagggtttcaccatgttggc

SEQ ID NO: 35740 - DNA, 20 bp, Artificial Sequence
  Description of Artificial Sequence: Synthetic oligonucleotide
  Target: ATXN2; (+) strand; PAM type: NRG; PAM sequence: AGG
agggtttcaccatgttggcc

SEQ ID NO: 35741 - DNA, 20 bp, Artificial Sequence
  Description of Artificial Sequence: Synthetic oligonucleotide
  Target: ATXN2; (+) strand; PAM type: NRG; PAM sequence: TGG
tttcaccatgttggccaggc

SEQ ID NO: 35742 - DNA, 20 bp, Artificial Sequence
  Description of Artificial Sequence: Synthetic oligonucleotide
  Target: ATXN2; (+) strand; PAM type: NRG; PAM sequence: CAG
tggtctcgaatgtctgacct

SEQ ID NO: 35743 - DNA, 20 bp, Artificial Sequence
  Description of Artificial Sequence: Synthetic oligonucleotide
  Target: ATXN2; (+) strand; PAM type: NRG; PAM sequence: AGG
ggtctcgaatgtctgacctc

SEQ ID NO: 35744 - DNA, 20 bp, Artificial Sequence
  Description of Artificial Sequence: Synthetic oligonucleotide
  Target: ATXN2; (+) strand; PAM type: NRG; PAM sequence: TGG
ctcaggtgatccacccgcct

SEQ ID NO: 35745 - DNA, 20 bp, Artificial Sequence
  Description of Artificial Sequence: Synthetic oligonucleotide
  Target: ATXN2; (+) strand; PAM type: NRG; PAM sequence: AAG
ccacccgccttggcctccca

SEQ ID NO: 35746 - DNA, 20 bp, Artificial Sequence
  Description of Artificial Sequence: Synthetic oligonucleotide
  Target: ATXN2; (+) strand; PAM type: NRG; PAM sequence: TGG
gccttggcctcccaaagtgc

SEQ ID NO: 35747 - DNA, 20 bp, Artificial Sequence
  Description of Artificial Sequence: Synthetic oligonucleotide
  Target: ATXN2; (+) strand; PAM type: NRG; PAM sequence: GGG
ccttggcctcccaaagtgct

SEQ ID NO: 35748 - DNA, 20 bp, Artificial Sequence
  Description of Artificial Sequence: Synthetic oligonucleotide
  Target: ATXN2; (+) strand; PAM type: NRG; PAM sequence: CAG
ctcccaaagtgctgggatta

SEQ ID NO: 35749 - DNA, 20 bp, Artificial Sequence
  Description of Artificial Sequence: Synthetic oligonucleotide
  Target: ATXN2; (+) strand; PAM type: NRG; PAM sequence: AGG
tcccaaagtgctgggattac

SEQ ID NO: 35750 - DNA, 20 bp, Artificial Sequence
  Description of Artificial Sequence: Synthetic oligonucleotide
  Target: ATXN2; (+) strand; PAM type: NRG; PAM sequence: GAG
agtgctgggattacaggcgc

SEQ ID NO: 35751 - DNA, 20 bp, Artificial Sequence
  Description of Artificial Sequence: Synthetic oligonucleotide
  Target: ATXN2; (+) strand; PAM type: NRG; PAM sequence: CAG
caggcgcgagccaccgcgcc

SEQ ID NO: 35752 - DNA, 20 bp, Artificial Sequence
  Description of Artificial Sequence: Synthetic oligonucleotide
  Target: ATXN2; (+) strand; PAM type: NRG; PAM sequence: TAG
cgcccagcctacaccacttt

SEQ ID NO: 35753 - DNA, 20 bp, Artificial Sequence
  Description of Artificial Sequence: Synthetic oligonucleotide
  Target: ATXN2; (+) strand; PAM type: NRG; PAM sequence: TGG
acttttagtaccaacactct

SEQ ID NO: 35754 - DNA, 20 bp, Artificial Sequence
  Description of Artificial Sequence: Synthetic oligonucleotide
  Target: ATXN2; (+) strand; PAM type: NRG; PAM sequence: GGG
cttttagtaccaacactctt

SEQ ID NO: 35755 - DNA, 20 bp, Artificial Sequence
  Description of Artificial Sequence: Synthetic oligonucleotide
  Target: ATXN2; (+) strand; PAM type: NRG; PAM sequence: TGG
aacactcttgggtgatttca

SEQ ID NO: 35756 - DNA, 20 bp, Artificial Sequence
  Description of Artificial Sequence: Synthetic oligonucleotide
  Target: ATXN2; (+) strand; PAM type: NRG; PAM sequence: AAG
gggtgatttcatggacccta

SEQ ID NO: 35757 - DNA, 20 bp, Artificial Sequence
  Description of Artificial Sequence: Synthetic oligonucleotide
  Target: ATXN2; (+) strand; PAM type: NRG; PAM sequence: CAG
tgatttcatggaccctaaag

SEQ ID NO: 35758 - DNA, 20 bp, Artificial Sequence
  Description of Artificial Sequence: Synthetic oligonucleotide
  Target: ATXN2; (+) strand; PAM type: NRG; PAM sequence: CAG
aagcagacctgacactgatc

SEQ ID NO: 35759 - DNA, 20 bp, Artificial Sequence
  Description of Artificial Sequence: Synthetic oligonucleotide
  Target: ATXN2; (+) strand; PAM type: NRG; PAM sequence: CAG
ctgacactgatccagatttg

SEQ ID NO: 35760 - DNA, 20 bp, Artificial Sequence
  Description of Artificial Sequence: Synthetic oligonucleotide
  Target: ATXN2; (+) strand; PAM type: NRG; PAM sequence: AAG
cagatttgcagtccattttt

SEQ ID NO: 35761 - DNA, 20 bp, Artificial Sequence
  Description of Artificial Sequence: Synthetic oligonucleotide
  Target: ATXN2; (+) strand; PAM type: NRG; PAM sequence: AGG
agatttgcagtccattttta

SEQ ID NO: 35762 - DNA, 20 bp, Artificial Sequence
  Description of Artificial Sequence: Synthetic oligonucleotide
  Target: ATXN2; (+) strand; PAM type: NRG; PAM sequence: AAG
cacctgtctttatttcctca

SEQ ID NO: 35763 - DNA, 20 bp, Artificial Sequence
  Description of Artificial Sequence: Synthetic oligonucleotide
  Target: ATXN2; (+) strand; PAM type: NRG; PAM sequence: AAG
gtctttatttcctcaaagtc

SEQ ID NO: 35764 - DNA, 20 bp, Artificial Sequence
  Description of Artificial Sequence: Synthetic oligonucleotide
  Target: ATXN2; (+) strand; PAM type: NRG; PAM sequence: CAG
tttatttcctcaaagtcaag

SEQ ID NO: 35765 - DNA, 20 bp, Artificial Sequence
  Description of Artificial Sequence: Synthetic oligonucleotide
  Target: ATXN2; (+) strand; PAM type: NRG; PAM sequence: TGG
caaagtcaagcagctttctc

SEQ ID NO: 35766 - DNA, 20 bp, Artificial Sequence
  Description of Artificial Sequence: Synthetic oligonucleotide
  Target: ATXN2; (+) strand; PAM type: NRG; PAM sequence: TAG
tctggaaaatgaatgctaat

SEQ ID NO: 35767 - DNA, 20 bp, Artificial Sequence
  Description of Artificial Sequence: Synthetic oligonucleotide
  Target: ATXN2; (+) strand; PAM type: NRG; PAM sequence: AAG
tgctaattagtgtgaaccaa

SEQ ID NO: 35768 - DNA, 20 bp, Artificial Sequence
  Description of Artificial Sequence: Synthetic oligonucleotide
  Target: ATXN2; (+) strand; PAM type: NRG; PAM sequence: GAG
ctaattagtgtgaaccaaaa

SEQ ID NO: 35769 - DNA, 20 bp, Artificial Sequence
  Description of Artificial Sequence: Synthetic oligonucleotide
  Target: ATXN2; (+) strand; PAM type: NRG; PAM sequence: AAG
ttagtgtgaaccaaaagagt

SEQ ID NO: 35770 - DNA, 20 bp, Artificial Sequence
  Description of Artificial Sequence: Synthetic oligonucleotide
  Target: ATXN2; (+) strand; PAM type: NRG; PAM sequence: AAG
tgtgaaccaaaagagtaagt

SEQ ID NO: 35771 - DNA, 20 bp, Artificial Sequence
  Description of Artificial Sequence: Synthetic oligonucleotide
  Target: ATXN2; (+) strand; PAM type: NRG; PAM sequence: GAG
tgaaccaaaagagtaagtaa

SEQ ID NO: 35772 - DNA, 20 bp, Artificial Sequence
  Description of Artificial Sequence: Synthetic oligonucleotide
  Target: ATXN2; (+) strand; PAM type: NRG; PAM sequence: AAG
aaagagtaagtaagagtctg

SEQ ID NO: 35773 - DNA, 20 bp, Artificial Sequence
  Description of Artificial Sequence: Synthetic oligonucleotide
  Target: ATXN2; (+) strand; PAM type: NRG; PAM sequence: AAG
aagagtctgaagttttttta

SEQ ID NO: 35774 - DNA, 20 bp, Artificial Sequence
  Description of Artificial Sequence: Synthetic oligonucleotide
  Target: ATXN2; (+) strand; PAM type: NRG; PAM sequence: AGG
agagtctgaagtttttttaa

SEQ ID NO: 35775 - DNA, 20 bp, Artificial Sequence
  Description of Artificial Sequence: Synthetic oligonucleotide
  Target: ATXN2; (+) strand; PAM type: NRG; PAM sequence: GAG
agtctgaagtttttttaaag

SEQ ID NO: 35776 - DNA, 20 bp, Artificial Sequence
  Description of Artificial Sequence: Synthetic oligonucleotide
  Target: ATXN2; (+) strand; PAM type: NRG; PAM sequence: AAG
tgaagtttttttaaaggaga

SEQ ID NO: 35777 - DNA, 20 bp, Artificial Sequence
  Description of Artificial Sequence: Synthetic oligonucleotide
  Target: ATXN2; (+) strand; PAM type: NRG; PAM sequence: TGG
ttaaaggagaaagcttatta

SEQ ID NO: 35778 - DNA, 20 bp, Artificial Sequence
  Description of Artificial Sequence: Synthetic oligonucleotide
  Target: ATXN2; (+) strand; PAM type: NRG; PAM sequence: AAG
aggagaaagcttattatgga

SEQ ID NO: 35779 - DNA, 20 bp, Artificial Sequence
  Description of Artificial Sequence: Synthetic oligonucleotide
  Target: ATXN2; (+) strand; PAM type: NRG; PAM sequence: TGG
agcttattatggaaagtcac

SEQ ID NO: 35780 - DNA, 20 bp, Artificial Sequence
  Description of Artificial Sequence: Synthetic oligonucleotide
  Target: ATXN2; (+) strand; PAM type: NRG; PAM sequence: CAG
cactggtcctcccctccgca

SEQ ID NO: 35781 - DNA, 20 bp, Artificial Sequence
  Description of Artificial Sequence: Synthetic oligonucleotide
  Target: ATXN2; (+) strand; PAM type: NRG; PAM sequence: AGG
actggtcctcccctccgcac

SEQ ID NO: 35782 - DNA, 20 bp, Artificial Sequence
  Description of Artificial Sequence: Synthetic oligonucleotide
  Target: ATXN2; (+) strand; PAM type: NRG; PAM sequence: AAG
gtcctcccctccgcacagga

SEQ ID NO: 35783 - DNA, 20 bp, Artificial Sequence
  Description of Artificial Sequence: Synthetic oligonucleotide
  Target: ATXN2; (+) strand; PAM type: NRG; PAM sequence: AGG
tcctcccctccgcacaggaa

SEQ ID NO: 35784 - DNA, 20 bp, Artificial Sequence
  Description of Artificial Sequence: Synthetic oligonucleotide
  Target: ATXN2; (+) strand; PAM type: NRG; PAM sequence: CAG
ctccgcacaggaaaggtacc

SEQ ID NO: 35785 - DNA, 20 bp, Artificial Sequence
  Description of Artificial Sequence: Synthetic oligonucleotide
  Target: ATXN2; (+) strand; PAM type: NRG; PAM sequence: TAG
cgcacaggaaaggtacccag

SEQ ID NO: 35786 - DNA, 20 bp, Artificial Sequence
  Description of Artificial Sequence: Synthetic oligonucleotide
  Target: ATXN2; (+) strand; PAM type: NRG; PAM sequence: AAG
agtagataatgaaccaaatt

SEQ ID NO: 35787 - DNA, 20 bp, Artificial Sequence
  Description of Artificial Sequence: Synthetic oligonucleotide
  Target: ATXN2; (+) strand; PAM type: NRG; PAM sequence: CAG
caaattaagttccctccctc

SEQ ID NO: 35788 - DNA, 20 bp, Artificial Sequence
  Description of Artificial Sequence: Synthetic oligonucleotide
  Target: ATXN2; (+) strand; PAM type: NRG; PAM sequence: CAG
ttaagttccctccctccagc

SEQ ID NO: 35789 - DNA, 20 bp, Artificial Sequence
  Description of Artificial Sequence: Synthetic oligonucleotide
  Target: ATXN2; (+) strand; PAM type: NRG; PAM sequence: AAG
agttccctccctccagccag

SEQ ID NO: 35790 - DNA, 20 bp, Artificial Sequence
  Description of Artificial Sequence: Synthetic oligonucleotide
  Target: ATXN2; (+) strand; PAM type: NRG; PAM sequence: TGG
ccagccagaagttaaacatc

SEQ ID NO: 35791 - DNA, 20 bp, Artificial Sequence
  Description of Artificial Sequence: Synthetic oligonucleotide
  Target: ATXN2; (+) strand; PAM type: NRG; PAM sequence: GGG
cagccagaagttaaacatct

SEQ ID NO: 35792 - DNA, 20 bp, Artificial Sequence
  Description of Artificial Sequence: Synthetic oligonucleotide
  Target: ATXN2; (+) strand; PAM type: NRG; PAM sequence: CAG
gggatatgacgtcttcatgc

SEQ ID NO: 35793 - DNA, 20 bp, Artificial Sequence
  Description of Artificial Sequence: Synthetic oligonucleotide
  Target: ATXN2; (+) strand; PAM type: NRG; PAM sequence: AGG
ggatatgacgtcttcatgcc

SEQ ID NO: 35794 - DNA, 20 bp, Artificial Sequence
  Description of Artificial Sequence: Synthetic oligonucleotide
  Target: ATXN2; (+) strand; PAM type: NRG; PAM sequence: GGG
gatatgacgtcttcatgcca

SEQ ID NO: 35795 - DNA, 20 bp, Artificial Sequence
  Description of Artificial Sequence: Synthetic oligonucleotide
  Target: ATXN2; (+) strand; PAM type: NRG; PAM sequence: GGG
atatgacgtcttcatgccag

SEQ ID NO: 35796 - DNA, 20 bp, Artificial Sequence
  Description of Artificial Sequence: Synthetic oligonucleotide
  Target: ATXN2; (+) strand; PAM type: NRG; PAM sequence: TAG
tgccaggggcactcatttct

SEQ ID NO: 35797 - DNA, 20 bp, Artificial Sequence
  Description of Artificial Sequence: Synthetic oligonucleotide
  Target: ATXN2; (+) strand; PAM type: NRG; PAM sequence: CAG
caggggcactcatttcttag

SEQ ID NO: 35798 - DNA, 20 bp, Artificial Sequence
  Description of Artificial Sequence: Synthetic oligonucleotide
  Target: ATXN2; (+) strand; PAM type: NRG; PAM sequence: CAG
gcctctctacatacatctct

SEQ ID NO: 35799 - DNA, 20 bp, Artificial Sequence
  Description of Artificial Sequence: Synthetic oligonucleotide
  Target: ATXN2; (+) strand; PAM type: NRG; PAM sequence: AGG
cctctctacatacatctctc

SEQ ID NO: 35800 - DNA, 20 bp, Artificial Sequence
  Description of Artificial Sequence: Synthetic oligonucleotide
  Target: ATXN2; (+) strand; PAM type: NRG; PAM sequence: TGG
ctctacatacatctctcagg

SEQ ID NO: 35801 - DNA, 20 bp, Artificial Sequence
  Description of Artificial Sequence: Synthetic oligonucleotide
  Target: ATXN2; (+) strand; PAM type: NRG; PAM sequence: AAG
tacatctctcaggtggtgcc

SEQ ID NO: 35802 - DNA, 20 bp, Artificial Sequence
  Description of Artificial Sequence: Synthetic oligonucleotide
  Target: ATXN2; (+) strand; PAM type: NRG; PAM sequence: GAG
catctctcaggtggtgccaa

SEQ ID NO: 35803 - DNA, 20 bp, Artificial Sequence
  Description of Artificial Sequence: Synthetic oligonucleotide
  Target: ATXN2; (+) strand; PAM type: NRG; PAM sequence: AGG
atctctcaggtggtgccaag

SEQ ID NO: 35804 - DNA, 20 bp, Artificial Sequence
  Description of Artificial Sequence: Synthetic oligonucleotide
  Target: ATXN2; (+) strand; PAM type: NRG; PAM sequence: CAG
ggtggtgccaagaggcacac

SEQ ID NO: 35805 - DNA, 20 bp, Artificial Sequence
  Description of Artificial Sequence: Synthetic oligonucleotide
  Target: ATXN2; (+) strand; PAM type: NRG; PAM sequence: AGG
gtggtgccaagaggcacacc

SEQ ID NO: 35806 - DNA, 20 bp, Artificial Sequence
  Description of Artificial Sequence: Synthetic oligonucleotide
  Target: ATXN2; (+) strand; PAM type: NRG; PAM sequence: TAG
gtgccaagaggcacaccagg

SEQ ID NO: 35807 - DNA, 20 bp, Artificial Sequence
  Description of Artificial Sequence: Synthetic oligonucleotide
  Target: ATXN2; (+) strand; PAM type: NRG; PAM sequence: GAG
gccaagaggcacaccaggta

SEQ ID NO: 35808 - DNA, 20 bp, Artificial Sequence
  Description of Artificial Sequence: Synthetic oligonucleotide
  Target: ATXN2; (+) strand; PAM type: NRG; PAM sequence: TAG
cacaccaggtagagcaaact

SEQ ID NO: 35809 - DNA, 20 bp, Artificial Sequence
  Description of Artificial Sequence: Synthetic oligonucleotide
  Target: ATXN2; (+) strand; PAM type: NRG; PAM sequence: CAG
accaggtagagcaaacttag

SEQ ID NO: 35810 - DNA, 20 bp, Artificial Sequence
  Description of Artificial Sequence: Synthetic oligonucleotide
  Target: ATXN2; (+) strand; PAM type: NRG; PAM sequence: CAG
aacttagcagctctgactaa

SEQ ID NO: 35811 - DNA, 20 bp, Artificial Sequence
  Description of Artificial Sequence: Synthetic oligonucleotide
  Target: ATXN2; (+) strand; PAM type: NRG; PAM sequence: AGG
acttagcagctctgactaac

SEQ ID NO: 35812 - DNA, 20 bp, Artificial Sequence
  Description of Artificial Sequence: Synthetic oligonucleotide
  Target: ATXN2; (+) strand; PAM type: NRG; PAM sequence: AAG
gctctgactaacaggctgca

SEQ ID NO: 35813 - DNA, 20 bp, Artificial Sequence
  Description of Artificial Sequence: Synthetic oligonucleotide
  Target: ATXN2; (+) strand; PAM type: NRG; PAM sequence: AAG
actaacaggctgcaaagtgc

SEQ ID NO: 35814 - DNA, 20 bp, Artificial Sequence
  Description of Artificial Sequence: Synthetic oligonucleotide
  Target: ATXN2; (+) strand; PAM type: NRG; PAM sequence: CAG
caggctgcaaagtgcaagtt

SEQ ID NO: 35815 - DNA, 20 bp, Artificial Sequence
  Description of Artificial Sequence: Synthetic oligonucleotide
  Target: ATXN2; (+) strand; PAM type: NRG; PAM sequence: TGG
aagtgcaagttcagattctg

SEQ ID NO: 35816 - DNA, 20 bp, Artificial Sequence
  Description of Artificial Sequence: Synthetic oligonucleotide
  Target: ATXN2; (+) strand; PAM type: NRG; PAM sequence: CAG
tgcaagttcagattctgtgg

SEQ ID NO: 35817 - DNA, 20 bp, Artificial Sequence
  Description of Artificial Sequence: Synthetic oligonucleotide
  Target: ATXN2; (+) strand; PAM type: NRG; PAM sequence: GAG
caagttcagattctgtggca

SEQ ID NO: 35818 - DNA, 20 bp, Artificial Sequence
  Description of Artificial Sequence: Synthetic oligonucleotide
  Target: ATXN2; (+) strand; PAM type: NRG; PAM sequence: TGG
cagattctgtggcagagatt

SEQ ID NO: 35819 - DNA, 20 bp, Artificial Sequence
  Description of Artificial Sequence: Synthetic oligonucleotide
  Target: ATXN2; (+) strand; PAM type: NRG; PAM sequence: AAG
attctgtggcagagatttgg

SEQ ID NO: 35820 - DNA, 20 bp, Artificial Sequence
  Description of Artificial Sequence: Synthetic oligonucleotide
  Target: ATXN2; (+) strand; PAM type: NRG; PAM sequence: AGG
ttctgtggcagagatttgga

SEQ ID NO: 35821 - DNA, 20 bp, Artificial Sequence
  Description of Artificial Sequence: Synthetic oligonucleotide
  Target: ATXN2; (+) strand; PAM type: NRG; PAM sequence: CAG
atttggaaggcacccacctc

SEQ ID NO: 35822 - DNA, 20 bp, Artificial Sequence
  Description of Artificial Sequence: Synthetic oligonucleotide
  Target: ATXN2; (+) strand; PAM type: NRG; PAM sequence: AAG
ctccagactgcttcccgtcc

SEQ ID NO: 35823 - DNA, 20 bp, Artificial Sequence
  Description of Artificial Sequence: Synthetic oligonucleotide
  Target: ATXN2; (+) strand; PAM type: NRG; PAM sequence: CAG
ctgcttcccgtccaagttac

SEQ ID NO: 35824 - DNA, 20 bp, Artificial Sequence
  Description of Artificial Sequence: Synthetic oligonucleotide
  Target: ATXN2; (+) strand; PAM type: NRG; PAM sequence: AGG
tgcttcccgtccaagttacc

SEQ ID NO: 35825 - DNA, 20 bp, Artificial Sequence
  Description of Artificial Sequence: Synthetic oligonucleotide
  Target: ATXN2; (+) strand; PAM type: NRG; PAM sequence: CAG
tcccgtccaagttaccagga

SEQ ID NO: 35826 - DNA, 20 bp, Artificial Sequence
  Description of Artificial Sequence: Synthetic oligonucleotide
  Target: ATXN2; (+) strand; PAM type: NRG; PAM sequence: CAG
acagctcaaaaacatgctga

SEQ ID NO: 35827 - DNA, 20 bp, Artificial Sequence
  Description of Artificial Sequence: Synthetic oligonucleotide
  Target: ATXN2; (+) strand; PAM type: NRG; PAM sequence: TGG
atgctgacagaaaactccca

SEQ ID NO: 35828 - DNA, 20 bp, Artificial Sequence
  Description of Artificial Sequence: Synthetic oligonucleotide
  Target: ATXN2; (+) strand; PAM type: NRG; PAM sequence: TAG
acagaaaactcccatggctc

SEQ ID NO: 35829 - DNA, 20 bp, Artificial Sequence
  Description of Artificial Sequence: Synthetic oligonucleotide
  Target: ATXN2; (+) strand; PAM type: NRG; PAM sequence: AGG
cagaaaactcccatggctct

SEQ ID NO: 35830 - DNA, 20 bp, Artificial Sequence
  Description of Artificial Sequence: Synthetic oligonucleotide
  Target: ATXN2; (+) strand; PAM type: NRG; PAM sequence: AAG
aaaactcccatggctctagg

SEQ ID NO: 35831 - DNA, 20 bp, Artificial Sequence
  Description of Artificial Sequence: Synthetic oligonucleotide
  Target: ATXN2; (+) strand; PAM type: NRG; PAM sequence: AAG
actcccatggctctaggaag

SEQ ID NO: 35832 - DNA, 20 bp, Artificial Sequence
  Description of Artificial Sequence: Synthetic oligonucleotide
  Target: ATXN2; (+) strand; PAM type: NRG; PAM sequence: AAG
ctctaggaagaagtgacact

SEQ ID NO: 35833 - DNA, 20 bp, Artificial Sequence
  Description of Artificial Sequence: Synthetic oligonucleotide
  Target: ATXN2; (+) strand; PAM type: NRG; PAM sequence: TGG
agccaacacctttctttatg

SEQ ID NO: 35834 - DNA, 20 bp, Artificial Sequence
  Description of Artificial Sequence: Synthetic oligonucleotide
  Target: ATXN2; (+) strand; PAM type: NRG; PAM sequence: GGG
gccaacacctttctttatgt

SEQ ID NO: 35835 - DNA, 20 bp, Artificial Sequence
  Description of Artificial Sequence: Synthetic oligonucleotide
  Target: ATXN2; (+) strand; PAM type: NRG; PAM sequence: GAG
caacacctttctttatgtgg

SEQ ID NO: 35836 - DNA, 20 bp, Artificial Sequence
  Description of Artificial Sequence: Synthetic oligonucleotide
  Target: ATXN2; (+) strand; PAM type: NRG; PAM sequence: CAG
cacctttctttatgtgggag

SEQ ID NO: 35837 - DNA, 20 bp, Artificial Sequence
  Description of Artificial Sequence: Synthetic oligonucleotide
  Target: ATXN2; (+) strand; PAM type: NRG; PAM sequence: CAG
tctttatgtgggagcagaat

SEQ ID NO: 35838 - DNA, 20 bp, Artificial Sequence
  Description of Artificial Sequence: Synthetic oligonucleotide
  Target: ATXN2; (+) strand; PAM type: NRG; PAM sequence: AAG
gggagcagaatcagctgatg

SEQ ID NO: 35839 - DNA, 20 bp, Artificial Sequence
  Description of Artificial Sequence: Synthetic oligonucleotide
  Target: ATXN2; (+) strand; PAM type: NRG; PAM sequence: AGG
ggagcagaatcagctgatga

SEQ ID NO: 35840 - DNA, 20 bp, Artificial Sequence
  Description of Artificial Sequence: Synthetic oligonucleotide
  Target: ATXN2; (+) strand; PAM type: NRG; PAM sequence: GGG
gagcagaatcagctgatgaa

SEQ ID NO: 35841 - DNA, 20 bp, Artificial Sequence
  Description of Artificial Sequence: Synthetic oligonucleotide
  Target: ATXN2; (+) strand; PAM type: NRG; PAM sequence: GGG
agcagaatcagctgatgaag

SEQ ID NO: 35842 - DNA, 20 bp, Artificial Sequence
  Description of Artificial Sequence: Synthetic oligonucleotide
  Target: ATXN2; (+) strand; PAM type: NRG; PAM sequence: TGG
agaatcagctgatgaagggg

SEQ ID NO: 35843 - DNA, 20 bp, Artificial Sequence
  Description of Artificial Sequence: Synthetic oligonucleotide
  Target: ATXN2; (+) strand; PAM type: NRG; PAM sequence: GGG
gaatcagctgatgaaggggt

SEQ ID NO: 35844 - DNA, 20 bp, Artificial Sequence
  Description of Artificial Sequence: Synthetic oligonucleotide
  Target: ATXN2; (+) strand; PAM type: NRG; PAM sequence: CAG
tcagctgatgaaggggtggg

SEQ ID NO: 35845 - DNA, 20 bp, Artificial Sequence
  Description of Artificial Sequence: Synthetic oligonucleotide
  Target: ATXN2; (+) strand; PAM type: NRG; PAM sequence: CAG
gctgatgaaggggtgggcag

SEQ ID NO: 35846 - DNA, 20 bp, Artificial Sequence
  Description of Artificial Sequence: Synthetic oligonucleotide
  Target: ATXN2; (+) strand; PAM type: NRG; PAM sequence: TGG
tgaaggggtgggcagcagtg

SEQ ID NO: 35847 - DNA, 20 bp, Artificial Sequence
  Description of Artificial Sequence: Synthetic oligonucleotide
  Target: ATXN2; (+) strand; PAM type: NRG; PAM sequence: GGG
gaaggggtgggcagcagtgt

SEQ ID NO: 35848 - DNA, 20 bp, Artificial Sequence
  Description of Artificial Sequence: Synthetic oligonucleotide
  Target: ATXN2; (+) strand; PAM type: NRG; PAM sequence: GGG
aaggggtgggcagcagtgtg

SEQ ID NO: 35849 - DNA, 20 bp, Artificial Sequence
  Description of Artificial Sequence: Synthetic oligonucleotide
  Target: ATXN2; (+) strand; PAM type: NRG; PAM sequence: CAG
gggtgggcagcagtgtgggg

SEQ ID NO: 35850 - DNA, 20 bp, Artificial Sequence
  Description of Artificial Sequence: Synthetic oligonucleotide
  Target: ATXN2; (+) strand; PAM type: NRG; PAM sequence: AGG
ggtgggcagcagtgtggggc

SEQ ID NO: 35851 - DNA, 20 bp, Artificial Sequence
  Description of Artificial Sequence: Synthetic oligonucleotide
  Target: ATXN2; (+) strand; PAM type: NRG; PAM sequence: TGG
gtgtggggcaggcaccccac

SEQ ID NO: 35852 - DNA, 20 bp, Artificial Sequence
  Description of Artificial Sequence: Synthetic oligonucleotide
  Target: ATXN2; (+) strand; PAM type: NRG; PAM sequence: CAG
ggcaggcaccccactggctg

SEQ ID NO: 35853 - DNA, 20 bp, Artificial Sequence
  Description of Artificial Sequence: Synthetic oligonucleotide
  Target: ATXN2; (+) strand; PAM type: NRG; PAM sequence: TAG
ggcaccccactggctgcagc

SEQ ID NO: 35854 - DNA, 20 bp, Artificial Sequence
  Description of Artificial Sequence: Synthetic oligonucleotide
  Target: ATXN2; (+) strand; PAM type: NRG; PAM sequence: TAG
tggctgcagctagcccacca

SEQ ID NO: 35855 - DNA, 20 bp, Artificial Sequence
  Description of Artificial Sequence: Synthetic oligonucleotide
  Target: ATXN2; (+) strand; PAM type: NRG; PAM sequence: AGG
ggctgcagctagcccaccat

SEQ ID NO: 35856 - DNA, 20 bp, Artificial Sequence
  Description of Artificial Sequence: Synthetic oligonucleotide
  Target: ATXN2; (+) strand; PAM type: NRG; PAM sequence: CAG
cagctagcccaccataggca

SEQ ID NO: 35857 - DNA, 20 bp, Artificial Sequence
  Description of Artificial Sequence: Synthetic oligonucleotide
  Target: ATXN2; (+) strand; PAM type: NRG; PAM sequence: CAG
acatcccaccactctccttc

SEQ ID NO: 35858 - DNA, 20 bp, Artificial Sequence
  Description of Artificial Sequence: Synthetic oligonucleotide
  Target: ATXN2; (+) strand; PAM type: NRG; PAM sequence: CAG
actctccttccagtcctgac

SEQ ID NO: 35859 - DNA, 20 bp, Artificial Sequence
  Description of Artificial Sequence: Synthetic oligonucleotide
  Target: ATXN2; (+) strand; PAM type: NRG; PAM sequence: AGG
ctctccttccagtcctgacc

SEQ ID NO: 35860 - DNA, 20 bp, Artificial Sequence
  Description of Artificial Sequence: Synthetic oligonucleotide
  Target: ATXN2; (+) strand; PAM type: NRG; PAM sequence: CAG
ttccagtcctgaccaggccc

SEQ ID NO: 35861 - DNA, 20 bp, Artificial Sequence
  Description of Artificial Sequence: Synthetic oligonucleotide
  Target: ATXN2; (+) strand; PAM type: NRG; PAM sequence: CGG
agtcctgaccaggccccagc

SEQ ID NO: 35862 - DNA, 20 bp, Artificial Sequence
  Description of Artificial Sequence: Synthetic oligonucleotide
  Target: ATXN2; (+) strand; PAM type: NRG; PAM sequence: GAG
cccagccggcaacttctacc

SEQ ID NO: 35863 - DNA, 20 bp, Artificial Sequence
  Description of Artificial Sequence: Synthetic oligonucleotide
  Target: ATXN2; (+) strand; PAM type: NRG; PAM sequence: GAG
cagccggcaacttctaccga

SEQ ID NO: 35864 - DNA, 20 bp, Artificial Sequence
  Description of Artificial Sequence: Synthetic oligonucleotide
  Target: ATXN2; (+) strand; PAM type: NRG; PAM sequence: TGG
gcaacttctaccgagagcca

SEQ ID NO: 35865 - DNA, 20 bp, Artificial Sequence
  Description of Artificial Sequence: Synthetic oligonucleotide
  Target: ATXN2; (+) strand; PAM type: NRG; PAM sequence: TGG
gccatggctcaacaccaaac

SEQ ID NO: 35866 - DNA, 20 bp, Artificial Sequence
  Description of Artificial Sequence: Synthetic oligonucleotide
  Target: ATXN2; (+) strand; PAM type: NRG; PAM sequence: CAG
tggctcaacaccaaactgga

SEQ ID NO: 35867 - DNA, 20 bp, Artificial Sequence
  Description of Artificial Sequence: Synthetic oligonucleotide
  Target: ATXN2; (+) strand; PAM type: NRG; PAM sequence: TAG
ctcaacaccaaactggacag

SEQ ID NO: 35868 - DNA, 20 bp, Artificial Sequence
  Description of Artificial Sequence: Synthetic oligonucleotide
  Target: ATXN2; (+) strand; PAM type: NRG; PAM sequence: CAG
agtagacatcatgatccctc

SEQ ID NO: 35869 - DNA, 20 bp, Artificial Sequence
  Description of Artificial Sequence: Synthetic oligonucleotide
  Target: ATXN2; (+) strand; PAM type: NRG; PAM sequence: TAG
gacatcatgatccctccagt

SEQ ID NO: 35870 - DNA, 20 bp, Artificial Sequence
  Description of Artificial Sequence: Synthetic oligonucleotide
  Target: ATXN2; (+) strand; PAM type: NRG; PAM sequence: CAG
cctccagttagctctaatta

SEQ ID NO: 35871 - DNA, 20 bp, Artificial Sequence
  Description of Artificial Sequence: Synthetic oligonucleotide
  Target: ATXN2; (+) strand; PAM type: NRG; PAM sequence: CAG
gctctaattacagaccccac

SEQ ID NO: 35872 - DNA, 20 bp, Artificial Sequence
  Description of Artificial Sequence: Synthetic oligonucleotide
  Target: ATXN2; (+) strand; PAM type: NRG; PAM sequence: CAG
aattacagaccccaccagta

SEQ ID NO: 35873 - DNA, 20 bp, Artificial Sequence
  Description of Artificial Sequence: Synthetic oligonucleotide
  Target: ATXN2; (+) strand; PAM type: NRG; PAM sequence: CAG
accccaccagtacagcttga

SEQ ID NO: 35874 - DNA, 20 bp, Artificial Sequence
  Description of Artificial Sequence: Synthetic oligonucleotide
  Target: ATXN2; (+) strand; PAM type: NRG; PAM sequence: CGG
cagtacagcttgacagctcc

SEQ ID NO: 35875 - DNA, 20 bp, Artificial Sequence
  Description of Artificial Sequence: Synthetic oligonucleotide
  Target: ATXN2; (+) strand; PAM type: NRG; PAM sequence: CAG
attgaacttttacaaactaa

SEQ ID NO: 35876 - DNA, 20 bp, Artificial Sequence
  Description of Artificial Sequence: Synthetic oligonucleotide
  Target: ATXN2; (+) strand; PAM type: NRG; PAM sequence: CAG
ttttacaaactaacagtcac

SEQ ID NO: 35877 - DNA, 20 bp, Artificial Sequence
  Description of Artificial Sequence: Synthetic oligonucleotide
  Target: ATXN2; (+) strand; PAM type: NRG; PAM sequence: AAG
actaacagtcaccagcacca

SEQ ID NO: 35878 - DNA, 20 bp, Artificial Sequence
  Description of Artificial Sequence: Synthetic oligonucleotide
  Target: ATXN2; (+) strand; PAM type: NRG; PAM sequence: AAG
gtcaccagcaccaaagaatt

SEQ ID NO: 35879 - DNA, 20 bp, Artificial Sequence
  Description of Artificial Sequence: Synthetic oligonucleotide
  Target: ATXN2; (+) strand; PAM type: NRG; PAM sequence: TAG
aactaacctgccttgaattt

SEQ ID NO: 35880 - DNA, 20 bp, Artificial Sequence
  Description of Artificial Sequence: Synthetic oligonucleotide
  Target: ATXN2; (+) strand; PAM type: NRG; PAM sequence: CAG
acctgccttgaattttagac

SEQ ID NO: 35881 - DNA, 20 bp, Artificial Sequence
  Description of Artificial Sequence: Synthetic oligonucleotide
  Target: ATXN2; (+) strand; PAM type: NRG; PAM sequence: TGG
ttttagaccagcaatccata

SEQ ID NO: 35882 - DNA, 20 bp, Artificial Sequence
  Description of Artificial Sequence: Synthetic oligonucleotide
  Target: ATXN2; (+) strand; PAM type: NRG; PAM sequence: TGG
gcaatccatatggctttatc

SEQ ID NO: 35883 - DNA, 20 bp, Artificial Sequence
  Description of Artificial Sequence: Synthetic oligonucleotide
  Target: ATXN2; (+) strand; PAM type: NRG; PAM sequence: TGG
cttctgcctttgatcatttc

SEQ ID NO: 35884 - DNA, 20 bp, Artificial Sequence
  Description of Artificial Sequence: Synthetic oligonucleotide
  Target: ATXN2; (+) strand; PAM type: NRG; PAM sequence: TAG
ctttgatcatttctggaccg

SEQ ID NO: 35885 - DNA, 20 bp, Artificial Sequence
  Description of Artificial Sequence: Synthetic oligonucleotide
  Target: ATXN2; (+) strand; PAM type: NRG; PAM sequence: AGG
tttgatcatttctggaccgt

SEQ ID NO: 35886 - DNA, 20 bp, Artificial Sequence
  Description of Artificial Sequence: Synthetic oligonucleotide
  Target: ATXN2; (+) strand; PAM type: NRG; PAM sequence: AAG
catttctggaccgtaggaaa

SEQ ID NO: 35887 - DNA, 20 bp, Artificial Sequence
  Description of Artificial Sequence: Synthetic oligonucleotide
  Target: ATXN2; (+) strand; PAM type: NRG; PAM sequence: AGG
atttctggaccgtaggaaaa

SEQ ID NO: 35888 - DNA, 20 bp, Artificial Sequence
  Description of Artificial Sequence: Synthetic oligonucleotide
  Target: ATXN2; (+) strand; PAM type: NRG; PAM sequence: TAG
tggaccgtaggaaaaaggaa

SEQ ID NO: 35889 - DNA, 20 bp, Artificial Sequence
  Description of Artificial Sequence: Synthetic oligonucleotide
  Target: ATXN2; (+) strand; PAM type: NRG; PAM sequence: TGG
aatagcaatcattaaaatct

SEQ ID NO: 35890 - DNA, 20 bp, Artificial Sequence
  Description of Artificial Sequence: Synthetic oligonucleotide
  Target: ATXN2; (+) strand; PAM type: NRG; PAM sequence: GGG
atagcaatcattaaaatctt

SEQ ID NO: 35891 - DNA, 20 bp, Artificial Sequence
  Description of Artificial Sequence: Synthetic oligonucleotide
  Target: ATXN2; (+) strand; PAM type: NRG; PAM sequence: CAG
caatcattaaaatcttgggc

SEQ ID NO: 35892 - DNA, 20 bp, Artificial Sequence
  Description of Artificial Sequence: Synthetic oligonucleotide
  Target: ATXN2; (+) strand; PAM type: NRG; PAM sequence: GAG
atcattaaaatcttgggcca

SEQ ID NO: 35893 - DNA, 20 bp, Artificial Sequence
  Description of Artificial Sequence: Synthetic oligonucleotide
  Target: ATXN2; (+) strand; PAM type: NRG; PAM sequence: CAG
agaacactatttttacataa

SEQ ID NO: 35894 - DNA, 20 bp, Artificial Sequence
  Description of Artificial Sequence: Synthetic oligonucleotide
  Target: ATXN2; (+) strand; PAM type: NRG; PAM sequence: AAG
cataacagtttcttaaccta

SEQ ID NO: 35895 - DNA, 20 bp, Artificial Sequence
  Description of Artificial Sequence: Synthetic oligonucleotide
  Target: ATXN2; (+) strand; PAM type: NRG; PAM sequence: AAG
cagtttcttaacctaaagtc

SEQ ID NO: 35896 - DNA, 20 bp, Artificial Sequence
  Description of Artificial Sequence: Synthetic oligonucleotide
  Target: ATXN2; (+) strand; PAM type: NRG; PAM sequence: AGG
agtttcttaacctaaagtca

SEQ ID NO: 35897 - DNA, 20 bp, Artificial Sequence
  Description of Artificial Sequence: Synthetic oligonucleotide
  Target: ATXN2; (+) strand; PAM type: NRG; PAM sequence: TGG
ttaacctaaagtcaaggcct

SEQ ID NO: 35898 - DNA, 20 bp, Artificial Sequence
  Description of Artificial Sequence: Synthetic oligonucleotide
  Target: ATXN2; (+) strand; PAM type: NRG; PAM sequence: GAG
aaggccttggactcttccct

SEQ ID NO: 35899 - DNA, 20 bp, Artificial Sequence
  Description of Artificial Sequence: Synthetic oligonucleotide
  Target: ATXN2; (+) strand; PAM type: NRG; PAM sequence: AGG
aggccttggactcttccctg

SEQ ID NO: 35900 - DNA, 20 bp, Artificial Sequence
  Description of Artificial Sequence: Synthetic oligonucleotide
  Target: ATXN2; (+) strand; PAM type: NRG; PAM sequence: GGG
ggccttggactcttccctga

SEQ ID NO: 35901 - DNA, 20 bp, Artificial Sequence
  Description of Artificial Sequence: Synthetic oligonucleotide
  Target: ATXN2; (+) strand; PAM type: NRG; PAM sequence: GAG
ctcttccctgagggttgcct

SEQ ID NO: 35902 - DNA, 20 bp, Artificial Sequence
  Description of Artificial Sequence: Synthetic oligonucleotide
  Target: ATXN2; (+) strand; PAM type: NRG; PAM sequence: CAG
attccttcatgctttctatt

SEQ ID NO: 35903 - DNA, 20 bp, Artificial Sequence
  Description of Artificial Sequence: Synthetic oligonucleotide
  Target: ATXN2; (+) strand; PAM type: NRG; PAM sequence: AGG
ttccttcatgctttctattc

SEQ ID NO: 35904 - DNA, 20 bp, Artificial Sequence
  Description of Artificial Sequence: Synthetic oligonucleotide
  Target: ATXN2; (+) strand; PAM type: NRG; PAM sequence: AAG
catgctttctattcaggact

SEQ ID NO: 35905 - DNA, 20 bp, Artificial Sequence
  Description of Artificial Sequence: Synthetic oligonucleotide
  Target: ATXN2; (+) strand; PAM type: NRG; PAM sequence: TAG
gtcccttactgcaaatgtgt

SEQ ID NO: 35906 - DNA, 20 bp, Artificial Sequence
  Description of Artificial Sequence: Synthetic oligonucleotide
  Target: ATXN2; (+) strand; PAM type: NRG; PAM sequence: AAG
ttagctctaacatctcccac

SEQ ID NO: 35907 - DNA, 20 bp, Artificial Sequence
  Description of Artificial Sequence: Synthetic oligonucleotide
  Target: ATXN2; (+) strand; PAM type: NRG; PAM sequence: TAG
ctctaacatctcccacaagc

SEQ ID NO: 35908 - DNA, 20 bp, Artificial Sequence
  Description of Artificial Sequence: Synthetic oligonucleotide
  Target: ATXN2; (+) strand; PAM type: NRG; PAM sequence: GAG
ctaacatctcccacaagcta

SEQ ID NO: 35909 - DNA, 20 bp, Artificial Sequence
  Description of Artificial Sequence: Synthetic oligonucleotide
  Target: ATXN2; (+) strand; PAM type: NRG; PAM sequence: AGG
taacatctcccacaagctag

SEQ ID NO: 35910 - DNA, 20 bp, Artificial Sequence
  Description of Artificial Sequence: Synthetic oligonucleotide
  Target: ATXN2; (+) strand; PAM type: NRG; PAM sequence: GAG
cacaagctagaggaacttgc

SEQ ID NO: 35911 - DNA, 20 bp, Artificial Sequence
  Description of Artificial Sequence: Synthetic oligonucleotide
  Target: ATXN2; (+) strand; PAM type: NRG; PAM sequence: AAG
gaacttgcgagtatattaac

SEQ ID NO: 35912 - DNA, 20 bp, Artificial Sequence
  Description of Artificial Sequence: Synthetic oligonucleotide
  Target: ATXN2; (+) strand; PAM type: NRG; PAM sequence: AGG
aacttgcgagtatattaaca

SEQ ID NO: 35913 - DNA, 20 bp, Artificial Sequence
  Description of Artificial Sequence: Synthetic oligonucleotide
  Target: ATXN2; (+) strand; PAM type: NRG; PAM sequence: TGG
cacatctgacatcctgtgtt

SEQ ID NO: 35914 - DNA, 20 bp, Artificial Sequence
  Description of Artificial Sequence: Synthetic oligonucleotide
  Target: ATXN2; (+) strand; PAM type: NRG; PAM sequence: TAG
tctgacatcctgtgtttggt

SEQ ID NO: 35915 - DNA, 20 bp, Artificial Sequence
  Description of Artificial Sequence: Synthetic oligonucleotide
  Target: ATXN2; (+) strand; PAM type: NRG; PAM sequence: CAG
ctgtgtttggttagaatata

SEQ ID NO: 35916 - DNA, 20 bp, Artificial Sequence
  Description of Artificial Sequence: Synthetic oligonucleotide
  Target: ATXN2; (+) strand; PAM type: NRG; PAM sequence: AAG
cagcacattgtgataacata

SEQ ID NO: 35917 - DNA, 20 bp, Artificial Sequence
  Description of Artificial Sequence: Synthetic oligonucleotide
  Target: ATXN2; (+) strand; PAM type: NRG; PAM sequence: TGG
cacattgtgataacataaag

SEQ ID NO: 35918 - DNA, 20 bp, Artificial Sequence
  Description of Artificial Sequence: Synthetic oligonucleotide
  Target: ATXN2; (+) strand; PAM type: NRG; PAM sequence: TAG
ggattcatcttgtatcatta

SEQ ID NO: 35919 - DNA, 20 bp, Artificial Sequence
  Description of Artificial Sequence: Synthetic oligonucleotide
  Target: ATXN2; (+) strand; PAM type: NRG; PAM sequence: AGG
gattcatcttgtatcattat

SEQ ID NO: 35920 - DNA, 20 bp, Artificial Sequence
  Description of Artificial Sequence: Synthetic oligonucleotide
  Target: ATXN2; (+) strand; PAM type: NRG; PAM sequence: CAG
tcatcttgtatcattatagg

SEQ ID NO: 35921 - DNA, 20 bp, Artificial Sequence
  Description of Artificial Sequence: Synthetic oligonucleotide
  Target: ATXN2; (+) strand; PAM type: NRG; PAM sequence: AAG
tcttgtatcattataggcag

SEQ ID NO: 35922 - DNA, 20 bp, Artificial Sequence
  Description of Artificial Sequence: Synthetic oligonucleotide
  Target: ATXN2; (+) strand; PAM type: NRG; PAM sequence: AGG
cttgtatcattataggcaga

SEQ ID NO: 35923 - DNA, 20 bp, Artificial Sequence
  Description of Artificial Sequence: Synthetic oligonucleotide
  Target: ATXN2; (+) strand; PAM type: NRG; PAM sequence: TGG
cattataggcagaaggtatt

SEQ ID NO: 35924 - DNA, 20 bp, Artificial Sequence
  Description of Artificial Sequence: Synthetic oligonucleotide
  Target: ATXN2; (+) strand; PAM type: NRG; PAM sequence: AAG
tattgttttatgtactgtac

SEQ ID NO: 35925 - DNA, 20 bp, Artificial Sequence
  Description of Artificial Sequence: Synthetic oligonucleotide
  Target: ATXN2; (+) strand; PAM type: NRG; PAM sequence: AAG
attgctatatgtgaattaaa

SEQ ID NO: 35926 - DNA, 20 bp, Artificial Sequence
  Description of Artificial Sequence: Synthetic oligonucleotide
  Target: ATXN2; (+) strand; PAM type: NRG; PAM sequence: CAG
tatgtgaattaaaaagtttt

SEQ ID NO: 35927 - DNA, 20 bp, Artificial Sequence
  Description of Artificial Sequence: Synthetic oligonucleotide
  Target: ATXN2; (+) strand; PAM type: NRG; PAM sequence: AAG
atttgctgtcataatattta

SEQ ID NO: 35928 - DNA, 20 bp, Artificial Sequence
  Description of Artificial Sequence: Synthetic oligonucleotide
  Target: ATXN2; (+) strand; PAM type: NRG; PAM sequence: AGG
tttgctgtcataatatttaa

SEQ ID NO: 35929 - DNA, 20 bp, Artificial Sequence
  Description of Artificial Sequence: Synthetic oligonucleotide
  Target: ATXN2; (+) strand; PAM type: NRG; PAM sequence: AAG
taatatttaaaggctctatt

SEQ ID NO: 35930 - DNA, 20 bp, Artificial Sequence
  Description of Artificial Sequence: Synthetic oligonucleotide
  Target: ATXN2; (+) strand; PAM type: NRG; PAM sequence: TGG
taaaggctctattaagacca

SEQ ID NO: 35931 - DNA, 20 bp, Artificial Sequence
  Description of Artificial Sequence: Synthetic oligonucleotide
  Target: ATXN2; (+) strand; PAM type: NRG; PAM sequence: TGG
ttgtcctccccgttgcaatc

SEQ ID NO: 35932 - DNA, 20 bp, Artificial Sequence
  Description of Artificial Sequence: Synthetic oligonucleotide
  Target: ATXN2; (+) strand; PAM type: NRG; PAM sequence: GGG
tgtcctccccgttgcaatct

SEQ ID NO: 35933 - DNA, 20 bp, Artificial Sequence
  Description of Artificial Sequence: Synthetic oligonucleotide
  Target: ATXN2; (+) strand; PAM type: NRG; PAM sequence: GAG
gaatactaacaaatgcttat

SEQ ID NO: 35934 - DNA, 20 bp, Artificial Sequence
  Description of Artificial Sequence: Synthetic oligonucleotide
  Target: ATXN2; (+) strand; PAM type: NRG; PAM sequence: AAG
atgagtccatccatgtcaat

SEQ ID NO: 35935 - DNA, 20 bp, Artificial Sequence
  Description of Artificial Sequence: Synthetic oligonucleotide
  Target: ATXN2; (+) strand; PAM type: NRG; PAM sequence: CAG
agtccatccatgtcaataag

SEQ ID NO: 35936 - DNA, 20 bp, Artificial Sequence
  Description of Artificial Sequence: Synthetic oligonucleotide
  Target: ATXN2; (+) strand; PAM type: NRG; PAM sequence: CAG
tgtacatctttgtatctttt

SEQ ID NO: 35937 - DNA, 20 bp, Artificial Sequence
  Description of Artificial Sequence: Synthetic oligonucleotide
  Target: ATXN2; (+) strand; PAM type: NRG; PAM sequence: TGG
ttttcagccttcatgccctc

SEQ ID NO: 35938 - DNA, 20 bp, Artificial Sequence
  Description of Artificial Sequence: Synthetic oligonucleotide
  Target: ATXN2; (+) strand; PAM type: NRG; PAM sequence: GAG
ctttattgcaatttttttct

SEQ ID NO: 35939 - DNA, 20 bp, Artificial Sequence
  Description of Artificial Sequence: Synthetic oligonucleotide
  Target: ATXN2; (+) strand; PAM type: NRG; PAM sequence: TGG
gagtgtctcctgccccctac

SEQ ID NO: 35940 - DNA, 20 bp, Artificial Sequence
  Description of Artificial Sequence: Synthetic oligonucleotide
  Target: ATXN2; (+) strand; PAM type: NRG; PAM sequence: AAG
tctcctgccccctactggta

SEQ ID NO: 35941 - DNA, 20 bp, Artificial Sequence
  Description of Artificial Sequence: Synthetic oligonucleotide
  Target: ATXN2; (+) strand; PAM type: NRG; PAM sequence: TAG
cctgccccctactggtaaag

SEQ ID NO: 35942 - DNA, 20 bp, Artificial Sequence
  Description of Artificial Sequence: Synthetic oligonucleotide
  Target: ATXN2; (+) strand; PAM type: NRG; PAM sequence: TGG
aagtagaaaaatgcccgaat

SEQ ID NO: 35943 - DNA, 20 bp, Artificial Sequence
  Description of Artificial Sequence: Synthetic oligonucleotide
  Target: ATXN2; (+) strand; PAM type: NRG; PAM sequence: GGG
agtagaaaaatgcccgaatt

SEQ ID NO: 35944 - DNA, 20 bp, Artificial Sequence
  Description of Artificial Sequence: Synthetic oligonucleotide
  Target: ATXN2; (+) strand; PAM type: NRG; PAM sequence: CAG
atgcccgaattgggaacttc

SEQ ID NO: 35945 - DNA, 20 bp, Artificial Sequence
  Description of Artificial Sequence: Synthetic oligonucleotide
  Target: ATXN2; (+) strand; PAM type: NRG; PAM sequence: TGG
ccagctaatgacactcattt

SEQ ID NO: 35946 - DNA, 20 bp, Artificial Sequence
  Description of Artificial Sequence: Synthetic oligonucleotide
  Target: ATXN2; (+) strand; PAM type: NRG; PAM sequence: CAG
taatgacactcattttggtt

SEQ ID NO: 35947 - DNA, 20 bp, Artificial Sequence
  Description of Artificial Sequence: Synthetic oligonucleotide
  Target: ATXN2; (+) strand; PAM type: NRG; PAM sequence: AGG
aatgacactcattttggttc

SEQ ID NO: 35948 - DNA, 20 bp, Artificial Sequence
  Description of Artificial Sequence: Synthetic oligonucleotide
  Target: ATXN2; (+) strand; PAM type: NRG; PAM sequence: GAG
tgacactcattttggttcag

SEQ ID NO: 35949 - DNA, 20 bp, Artificial Sequence
  Description of Artificial Sequence: Synthetic oligonucleotide
  Target: ATXN2; (+) strand; PAM type: NRG; PAM sequence: AAG
ttggttcaggagatattaaa

SEQ ID NO: 35950 - DNA, 20 bp, Artificial Sequence
  Description of Artificial Sequence: Synthetic oligonucleotide
  Target: ATXN2; (+) strand; PAM type: NRG; PAM sequence: AGG
tggttcaggagatattaaaa

SEQ ID NO: 35951 - DNA, 20 bp, Artificial Sequence
  Description of Artificial Sequence: Synthetic oligonucleotide
  Target: ATXN2; (+) strand; PAM type: NRG; PAM sequence: AAG
ttcaggagatattaaaaagg

SEQ ID NO: 35952 - DNA, 20 bp, Artificial Sequence
  Description of Artificial Sequence: Synthetic oligonucleotide
  Target: ATXN2; (+) strand; PAM type: NRG; PAM sequence: CAG
gatattaaaaaggaagctta

SEQ ID NO: 35953 - DNA, 20 bp, Artificial Sequence
  Description of Artificial Sequence: Synthetic oligonucleotide
  Target: ATXN2; (+) strand; PAM type: NRG; PAM sequence: CGG
aaaaaggaagcttacagaat

SEQ ID NO: 35954 - DNA, 20 bp, Artificial Sequence
  Description of Artificial Sequence: Synthetic oligonucleotide
  Target: ATXN2; (+) strand; PAM type: NRG; PAM sequence: CAG
gaagcttacagaatcggtgt

SEQ ID NO: 35955 - DNA, 20 bp, Artificial Sequence
  Description of Artificial Sequence: Synthetic oligonucleotide
  Target: ATXN2; (+) strand; PAM type: NRG; PAM sequence: GAG
tacagaatcggtgtcagccc

SEQ ID NO: 35956 - DNA, 20 bp, Artificial Sequence
  Description of Artificial Sequence: Synthetic oligonucleotide
  Target: ATXN2; (+) strand; PAM type: NRG; PAM sequence: AGG
acagaatcggtgtcagcccg

SEQ ID NO: 35957 - DNA, 20 bp, Artificial Sequence
  Description of Artificial Sequence: Synthetic oligonucleotide
  Target: ATXN2; (+) strand; PAM type: NRG; PAM sequence: TGG
tcggtgtcagcccgaggatg

SEQ ID NO: 35958 - DNA, 20 bp, Artificial Sequence
  Description of Artificial Sequence: Synthetic oligonucleotide
  Target: ATXN2; (+) strand; PAM type: NRG; PAM sequence: CAG
agcccgaggatgtggaattt

SEQ ID NO: 35959 - DNA, 20 bp, Artificial Sequence
  Description of Artificial Sequence: Synthetic oligonucleotide
  Target: ATXN2; (+) strand; PAM type: NRG; PAM sequence: TGG
atttcagtgctgcccaactc

SEQ ID NO: 35960 - DNA, 20 bp, Artificial Sequence
  Description of Artificial Sequence: Synthetic oligonucleotide
  Target: ATXN2; (+) strand; PAM type: NRG; PAM sequence: AAG
ggccaaccttcctcctcctg

SEQ ID NO: 35961 - DNA, 20 bp, Artificial Sequence
  Description of Artificial Sequence: Synthetic oligonucleotide
  Target: ATXN2; (+) strand; PAM type: NRG; PAM sequence: CAG
caaccttcctcctcctgaag

SEQ ID NO: 35962 - DNA, 20 bp, Artificial Sequence
  Description of Artificial Sequence: Synthetic oligonucleotide
  Target: ATXN2; (+) strand; PAM type: NRG; PAM sequence: AAG
agcagatctctaatccacca

SEQ ID NO: 35963 - DNA, 20 bp, Artificial Sequence
  Description of Artificial Sequence: Synthetic oligonucleotide
  Target: ATXN2; (+) strand; PAM type: NRG; PAM sequence: GAG
cagatctctaatccaccaaa

SEQ ID NO: 35964 - DNA, 20 bp, Artificial Sequence
  Description of Artificial Sequence: Synthetic oligonucleotide
  Target: ATXN2; (+) strand; PAM type: NRG; PAM sequence: TAG
ctctaatccaccaaagagaa

SEQ ID NO: 35965 - DNA, 20 bp, Artificial Sequence
  Description of Artificial Sequence: Synthetic oligonucleotide
  Target: ATXN2; (+) strand; PAM type: NRG; PAM sequence: CAG
atccaccaaagagaatagct

SEQ ID NO: 35966 - DNA, 20 bp, Artificial Sequence
  Description of Artificial Sequence: Synthetic oligonucleotide
  Target: ATXN2; (+) strand; PAM type: NRG; PAM sequence: TAG
agctcagtcttgtctttttc

SEQ ID NO: 35967 - DNA, 20 bp, Artificial Sequence
  Description of Artificial Sequence: Synthetic oligonucleotide
  Target: ATXN2; (+) strand; PAM type: NRG; PAM sequence: GAG
ctcagtcttgtctttttcta

SEQ ID NO: 35968 - DNA, 20 bp, Artificial Sequence
  Description of Artificial Sequence: Synthetic oligonucleotide
  Target: ATXN2; (+) strand; PAM type: NRG; PAM sequence: CAG
tttctagagataccttgaac

SEQ ID NO: 35969 - DNA, 20 bp, Artificial Sequence
  Description of Artificial Sequence: Synthetic oligonucleotide
  Target: ATXN2; (+) strand; PAM type: NRG; PAM sequence: AAG
agataccttgaaccagaact

SEQ ID NO: 35970 - DNA, 20 bp, Artificial Sequence
  Description of Artificial Sequence: Synthetic oligonucleotide
  Target: ATXN2; (+) strand; PAM type: NRG; PAM sequence: AGG
gataccttgaaccagaacta

SEQ ID NO: 35971 - DNA, 20 bp, Artificial Sequence
  Description of Artificial Sequence: Synthetic oligonucleotide
  Target: ATXN2; (+) strand; PAM type: NRG; PAM sequence: GGG
ataccttgaaccagaactaa

SEQ ID NO: 35972 - DNA, 20 bp, Artificial Sequence
  Description of Artificial Sequence: Synthetic oligonucleotide
  Target: ATXN2; (+) strand; PAM type: NRG; PAM sequence: AAG
ttgaaccagaactaagggtg

SEQ ID NO: 35973 - DNA, 20 bp, Artificial Sequence
  Description of Artificial Sequence: Synthetic oligonucleotide
  Target: ATXN2; (+) strand; PAM type: NRG; PAM sequence: AAG
aaccagaactaagggtgaag

SEQ ID NO: 35974 - DNA, 20 bp, Artificial Sequence
  Description of Artificial Sequence: Synthetic oligonucleotide
  Target: ATXN2; (+) strand; PAM type: NRG; PAM sequence: CAG
gaagaagaaaaatcatttca

SEQ ID NO: 35975 - DNA, 20 bp, Artificial Sequence
  Description of Artificial Sequence: Synthetic oligonucleotide
  Target: ATXN2; (+) strand; PAM type: NRG; PAM sequence: CGG
atcatttcacagctaccttc

SEQ ID NO: 35976 - DNA, 20 bp, Artificial Sequence
  Description of Artificial Sequence: Synthetic oligonucleotide
  Target: ATXN2; (+) strand; PAM type: NRG; PAM sequence: GGG
tcatttcacagctaccttcc

SEQ ID NO: 35977 - DNA, 20 bp, Artificial Sequence
  Description of Artificial Sequence: Synthetic oligonucleotide
  Target: ATXN2; (+) strand; PAM type: NRG; PAM sequence: TAG
ggatattcaaaatgcaccct

SEQ ID NO: 35978 - DNA, 20 bp, Artificial Sequence
  Description of Artificial Sequence: Synthetic oligonucleotide
  Target: ATXN2; (+) strand; PAM type: NRG; PAM sequence: AAG
agcacacctgctttgatatt

SEQ ID NO: 35979 - DNA, 20 bp, Artificial Sequence
  Description of Artificial Sequence: Synthetic oligonucleotide
  Target: ATXN2; (+) strand; PAM type: NRG; PAM sequence: AAG
ttgatattaagtatcctaca

SEQ ID NO: 35980 - DNA, 20 bp, Artificial Sequence
  Description of Artificial Sequence: Synthetic oligonucleotide
  Target: ATXN2; (+) strand; PAM type: NRG; PAM sequence: AAG
atattaagtatcctacaaag

SEQ ID NO: 35981 - DNA, 20 bp, Artificial Sequence
  Description of Artificial Sequence: Synthetic oligonucleotide
  Target: ATXN2; (+) strand; PAM type: NRG; PAM sequence: TAG
ttaagtatcctacaaagaag

SEQ ID NO: 35982 - DNA, 20 bp, Artificial Sequence
  Description of Artificial Sequence: Synthetic oligonucleotide
  Target: ATXN2; (+) strand; PAM type: NRG; PAM sequence: CAG
ctacaaagaagtagcttata

SEQ ID NO: 35983 - DNA, 20 bp, Artificial Sequence
  Description of Artificial Sequence: Synthetic oligonucleotide
  Target: ATXN2; (+) strand; PAM type: NRG; PAM sequence: CAG
cagacacacactaacttgat

SEQ ID NO: 35984 - DNA, 20 bp, Artificial Sequence
  Description of Artificial Sequence: Synthetic oligonucleotide
  Target: ATXN2; (+) strand; PAM type: NRG; PAM sequence: AAG
ttattttttaaatttttttt

SEQ ID NO: 35985 - DNA, 20 bp, Artificial Sequence
  Description of Artificial Sequence: Synthetic oligonucleotide
  Target: ATXN2; (+) strand; PAM type: NRG; PAM sequence: AAG
tttattttatattatctaca

SEQ ID NO: 35986 - DNA, 20 bp, Artificial Sequence
  Description of Artificial Sequence: Synthetic oligonucleotide
  Target: ATXN2; (+) strand; PAM type: NRG; PAM sequence: AAG
ttatattatctacaaagtaa

SEQ ID NO: 35987 - DNA, 20 bp, Artificial Sequence
  Description of Artificial Sequence: Synthetic oligonucleotide
  Target: ATXN2; (+) strand; PAM type: NRG; PAM sequence: AAG
aagtttttcccttaacttaa

SEQ ID NO: 35988 - DNA, 20 bp, Artificial Sequence
  Description of Artificial Sequence: Synthetic oligonucleotide
  Target: ATXN2; (+) strand; PAM type: NRG; PAM sequence: TAG
acttaaaagttgaaccactg

SEQ ID NO: 35989 - DNA, 20 bp, Artificial Sequence
  Description of Artificial Sequence: Synthetic oligonucleotide
  Target: ATXN2; (+) strand; PAM type: NRG; PAM sequence: CAG
aaaagttgaaccactgtaga

SEQ ID NO: 35990 - DNA, 20 bp, Artificial Sequence
  Description of Artificial Sequence: Synthetic oligonucleotide
  Target: ATXN2; (+) strand; PAM type: NRG; PAM sequence: CAG
atttataaataataatccgt

SEQ ID NO: 35991 - DNA, 20 bp, Artificial Sequence
  Description of Artificial Sequence: Synthetic oligonucleotide
  Target: ATXN2; (+) strand; PAM type: NRG; PAM sequence: CGG
ataataatccgtcagtttga

SEQ ID NO: 35992 - DNA, 20 bp, Artificial Sequence
  Description of Artificial Sequence: Synthetic oligonucleotide
  Target: ATXN2; (+) strand; PAM type: NRG; PAM sequence: AAG
taatccgtcagtttgacggt

SEQ ID NO: 35993 - DNA, 20 bp, Artificial Sequence
  Description of Artificial Sequence: Synthetic oligonucleotide
  Target: ATXN2; (+) strand; PAM type: NRG; PAM sequence: AAG
gaatttactgaaactttgtc

SEQ ID NO: 35994 - DNA, 20 bp, Artificial Sequence
  Description of Artificial Sequence: Synthetic oligonucleotide
  Target: ATXN2; (+) strand; PAM type: NRG; PAM sequence: TAG
tactgaaactttgtcaagtt

SEQ ID NO: 35995 - DNA, 20 bp, Artificial Sequence
  Description of Artificial Sequence: Synthetic oligonucleotide
  Target: ATXN2; (+) strand; PAM type: NRG; PAM sequence: AAG
aactttgtcaagtttagtaa

SEQ ID NO: 35996 - DNA, 20 bp, Artificial Sequence
  Description of Artificial Sequence: Synthetic oligonucleotide
  Target: ATXN2; (+) strand; PAM type: NRG; PAM sequence: AGG
actttgtcaagtttagtaaa

SEQ ID NO: 35997 - DNA, 20 bp, Artificial Sequence
  Description of Artificial Sequence: Synthetic oligonucleotide
  Target: ATXN2; (+) strand; PAM type: NRG; PAM sequence: GGG
ctttgtcaagtttagtaaaa

SEQ ID NO: 35998 - DNA, 20 bp, Artificial Sequence
  Description of Artificial Sequence: Synthetic oligonucleotide
  Target: ATXN2; (+) strand; PAM type: NRG; PAM sequence: AAG
gtttagtaaaagggcgttcc

SEQ ID NO: 35999 - DNA, 20 bp, Artificial Sequence
  Description of Artificial Sequence: Synthetic oligonucleotide
  Target: ATXN2; (+) strand; PAM type: NRG; PAM sequence: TAG
tttttttttttttttttttt

SEQ ID NO: 36000 - DNA, 20 bp, Artificial Sequence
  Description of Artificial Sequence: Synthetic oligonucleotide
  Target: ATXN2; (+) strand; PAM type: NRG; PAM sequence: CAG
ttttttttttttttttttag

SEQ ID NO: 36001 - DNA, 20 bp, Artificial Sequence
  Description of Artificial Sequence: Synthetic oligonucleotide
  Target: ATXN2; (+) strand; PAM type: NRG; PAM sequence: TAG
ttttttttttttagcagtaa

SEQ ID NO: 36002 - DNA, 20 bp, Artificial Sequence
  Description of Artificial Sequence: Synthetic oligonucleotide
  Target: ATXN2; (+) strand; PAM type: NRG; PAM sequence: CAG
tttttttttagcagtaatag

SEQ ID NO: 36003 - DNA, 20 bp, Artificial Sequence
  Description of Artificial Sequence: Synthetic oligonucleotide
  Target: ATXN2; (+) strand; PAM type: NRG; PAM sequence: AAG
tttttagcagtaatagcagc

SEQ ID NO: 36004 - DNA, 20 bp, Artificial Sequence
  Description of Artificial Sequence: Synthetic oligonucleotide
  Target: ATXN2; (+) strand; PAM type: NRG; PAM sequence: TAG
actcttgttacttcttttgc

SEQ ID NO: 36005 - DNA, 20 bp, Artificial Sequence
  Description of Artificial Sequence: Synthetic oligonucleotide
  Target: ATXN2; (+) strand; PAM type: NRG; PAM sequence: AAG
ctgatgtgttcatgactttc

SEQ ID NO: 36006 - DNA, 20 bp, Artificial Sequence
  Description of Artificial Sequence: Synthetic oligonucleotide
  Target: ATXN2; (+) strand; PAM type: NRG; PAM sequence: AGG
tgatgtgttcatgactttca

SEQ ID NO: 36007 - DNA, 20 bp, Artificial Sequence
  Description of Artificial Sequence: Synthetic oligonucleotide
  Target: ATXN2; (+) strand; PAM type: NRG; PAM sequence: GGG
gatgtgttcatgactttcaa

SEQ ID NO: 36008 - DNA, 20 bp, Artificial Sequence
  Description of Artificial Sequence: Synthetic oligonucleotide
  Target: ATXN2; (+) strand; PAM type: NRG; PAM sequence: CAG
attaaaaaataaataacttc

SEQ ID NO: 36009 - DNA, 20 bp, Artificial Sequence
  Description of Artificial Sequence: Synthetic oligonucleotide
  Target: ATXN2; (+) strand; PAM type: NRG; PAM sequence: CGG
aaataaataacttccagttt

SEQ ID NO: 36010 - DNA, 20 bp, Artificial Sequence
  Description of Artificial Sequence: Synthetic oligonucleotide
  Target: ATXN2; (+) strand; PAM type: NRG; PAM sequence: AAG
aaataacttccagtttcggc

SEQ ID NO: 36011 - DNA, 20 bp, Artificial Sequence
  Description of Artificial Sequence: Synthetic oligonucleotide
  Target: ATXN2; (+) strand; PAM type: NRG; PAM sequence: CAG
taacttccagtttcggcaag

SEQ ID NO: 36012 - DNA, 20 bp, Artificial Sequence
  Description of Artificial Sequence: Synthetic oligonucleotide
  Target: ATXN2; (+) strand; PAM type: NRG; PAM sequence: GAG
acttccagtttcggcaagca

SEQ ID NO: 36013 - DNA, 20 bp, Artificial Sequence
  Description of Artificial Sequence: Synthetic oligonucleotide
  Target: ATXN2; (+) strand; PAM type: NRG; PAM sequence: TGG
ccagtttcggcaagcagagc

SEQ ID NO: 36014 - DNA, 20 bp, Artificial Sequence
  Description of Artificial Sequence: Synthetic oligonucleotide
  Target: ATXN2; (+) strand; PAM type: NRG; PAM sequence: GGG
cagtttcggcaagcagagct

SEQ ID NO: 36015 - DNA, 20 bp, Artificial Sequence
  Description of Artificial Sequence: Synthetic oligonucleotide
  Target: ATXN2; (+) strand; PAM type: NRG; PAM sequence: GGG
agtttcggcaagcagagctg

SEQ ID NO: 36016 - DNA, 20 bp, Artificial Sequence
  Description of Artificial Sequence: Synthetic oligonucleotide
  Target: ATXN2; (+) strand; PAM type: NRG; PAM sequence: CGG
aagcagagctggggtacctg

SEQ ID NO: 36017 - DNA, 20 bp, Artificial Sequence
  Description of Artificial Sequence: Synthetic oligonucleotide
  Target: ATXN2; (+) strand; PAM type: NRG; PAM sequence: GGG
agcagagctggggtacctgc

SEQ ID NO: 36018 - DNA, 20 bp, Artificial Sequence
  Description of Artificial Sequence: Synthetic oligonucleotide
  Target: ATXN2; (+) strand; PAM type: NRG; PAM sequence: CAG
gtacctgcgggactctgaaa

SEQ ID NO: 36019 - DNA, 20 bp, Artificial Sequence
  Description of Artificial Sequence: Synthetic oligonucleotide
  Target: ATXN2; (+) strand; PAM type: NRG; PAM sequence: TGG
cgggactctgaaacagcata

SEQ ID NO: 36020 - DNA, 20 bp, Artificial Sequence
  Description of Artificial Sequence: Synthetic oligonucleotide
  Target: ATXN2; (+) strand; PAM type: NRG; PAM sequence: TGG
tgaaacagcatatggaatta

SEQ ID NO: 36021 - DNA, 20 bp, Artificial Sequence
  Description of Artificial Sequence: Synthetic oligonucleotide
  Target: ATXN2; (+) strand; PAM type: NRG; PAM sequence: TAG
cagcatatggaattatggaa

SEQ ID NO: 36022 - DNA, 20 bp, Artificial Sequence
  Description of Artificial Sequence: Synthetic oligonucleotide
  Target: ATXN2; (+) strand; PAM type: NRG; PAM sequence: AAG
ggaattatggaatagccccc

SEQ ID NO: 36023 - DNA, 20 bp, Artificial Sequence
  Description of Artificial Sequence: Synthetic oligonucleotide
  Target: ATXN2; (+) strand; PAM type: NRG; PAM sequence: CGG
agttcctaaatgcctctact

SEQ ID NO: 36024 - DNA, 20 bp, Artificial Sequence
  Description of Artificial Sequence: Synthetic oligonucleotide
  Target: ATXN2; (+) strand; PAM type: NRG; PAM sequence: AAG
taaatgcctctactcggtcc

SEQ ID NO: 36025 - DNA, 20 bp, Artificial Sequence
  Description of Artificial Sequence: Synthetic oligonucleotide
  Target: ATXN2; (+) strand; PAM type: NRG; PAM sequence: AAG
gtccaagtatcttccactgc

SEQ ID NO: 36026 - DNA, 20 bp, Artificial Sequence
  Description of Artificial Sequence: Synthetic oligonucleotide
  Target: ATXN2; (+) strand; PAM type: NRG; PAM sequence: TAG
ttccactgcaagtgaactgt

SEQ ID NO: 36027 - DNA, 20 bp, Artificial Sequence
  Description of Artificial Sequence: Synthetic oligonucleotide
  Target: ATXN2; (+) strand; PAM type: NRG; PAM sequence: TGG
tgaactgttagcattcctat

SEQ ID NO: 36028 - DNA, 20 bp, Artificial Sequence
  Description of Artificial Sequence: Synthetic oligonucleotide
  Target: ATXN2; (+) strand; PAM type: NRG; PAM sequence: AAG
gcattcctattggatgttac

SEQ ID NO: 36029 - DNA, 20 bp, Artificial Sequence
  Description of Artificial Sequence: Synthetic oligonucleotide
  Target: ATXN2; (+) strand; PAM type: NRG; PAM sequence: TAG
aaacaaaataaatgaaattc

SEQ ID NO: 36030 - DNA, 20 bp, Artificial Sequence
  Description of Artificial Sequence: Synthetic oligonucleotide
  Target: ATXN2; (+) strand; PAM type: NRG; PAM sequence: CAG
attctagttttctgtgcttc

SEQ ID NO: 36031 - DNA, 20 bp, Artificial Sequence
  Description of Artificial Sequence: Synthetic oligonucleotide
  Target: ATXN2; (+) strand; PAM type: NRG; PAM sequence: TGG
tagttttctgtgcttccagt

SEQ ID NO: 36032 - DNA, 20 bp, Artificial Sequence
  Description of Artificial Sequence: Synthetic oligonucleotide
  Target: ATXN2; (+) strand; PAM type: NRG; PAM sequence: TAG
ttttctgtgcttccagttgg

SEQ ID NO: 36033 - DNA, 20 bp, Artificial Sequence
  Description of Artificial Sequence: Synthetic oligonucleotide
  Target: ATXN2; (+) strand; PAM type: NRG; PAM sequence: AAG
tctgtgcttccagttggtag

SEQ ID NO: 36034 - DNA, 20 bp, Artificial Sequence
  Description of Artificial Sequence: Synthetic oligonucleotide
  Target: ATXN2; (+) strand; PAM type: NRG; PAM sequence: CAG
gtgcttccagttggtagaag

SEQ ID NO: 36035 - DNA, 20 bp, Artificial Sequence
  Description of Artificial Sequence: Synthetic oligonucleotide
  Target: ATXN2; (+) strand; PAM type: NRG; PAM sequence: TAG
cttccagttggtagaagcag

SEQ ID NO: 36036 - DNA, 20 bp, Artificial Sequence
  Description of Artificial Sequence: Synthetic oligonucleotide
  Target: ATXN2; (+) strand; PAM type: NRG; PAM sequence: AAG
ccagttggtagaagcagtag

SEQ ID NO: 36037 - DNA, 20 bp, Artificial Sequence
  Description of Artificial Sequence: Synthetic oligonucleotide
  Target: ATXN2; (+) strand; PAM type: NRG; PAM sequence: AGG
cagttggtagaagcagtaga

SEQ ID NO: 36038 - DNA, 20 bp, Artificial Sequence
  Description of Artificial Sequence: Synthetic oligonucleotide
  Target: ATXN2; (+) strand; PAM type: NRG; PAM sequence: GGG
agttggtagaagcagtagaa

SEQ ID NO: 36039 - DNA, 20 bp, Artificial Sequence
  Description of Artificial Sequence: Synthetic oligonucleotide
  Target: ATXN2; (+) strand; PAM type: NRG; PAM sequence: GAG
ttggtagaagcagtagaagg

SEQ ID NO: 36040 - DNA, 20 bp, Artificial Sequence
  Description of Artificial Sequence: Synthetic oligonucleotide
  Target: ATXN2; (+) strand; PAM type: NRG; PAM sequence: AGG
tggtagaagcagtagaaggg

SEQ ID NO: 36041 - DNA, 20 bp, Artificial Sequence
  Description of Artificial Sequence: Synthetic oligonucleotide
  Target: ATXN2; (+) strand; PAM type: NRG; PAM sequence: GAG
gtagaagcagtagaagggag

SEQ ID NO: 36042 - DNA, 20 bp, Artificial Sequence
  Description of Artificial Sequence: Synthetic oligonucleotide
  Target: ATXN2; (+) strand; PAM type: NRG; PAM sequence: AGG
tagaagcagtagaagggagg

SEQ ID NO: 36043 - DNA, 20 bp, Artificial Sequence
  Description of Artificial Sequence: Synthetic oligonucleotide
  Target: ATXN2; (+) strand; PAM type: NRG; PAM sequence: GGG
agaagcagtagaagggagga

SEQ ID NO: 36044 - DNA, 20 bp, Artificial Sequence
  Description of Artificial Sequence: Synthetic oligonucleotide
  Target: ATXN2; (+) strand; PAM type: NRG; PAM sequence: TGG
gtagaagggaggagggaatt

SEQ ID NO: 36045 - DNA, 20 bp, Artificial Sequence
  Description of Artificial Sequence: Synthetic oligonucleotide
  Target: ATXN2; (+) strand; PAM type: NRG; PAM sequence: CGG
gaggagggaatttggccttt

SEQ ID NO: 36046 - DNA, 20 bp, Artificial Sequence
  Description of Artificial Sequence: Synthetic oligonucleotide
  Target: ATXN2; (+) strand; PAM type: NRG; PAM sequence: CAG
atttggcctttcggttcctc

SEQ ID NO: 36047 - DNA, 20 bp, Artificial Sequence
  Description of Artificial Sequence: Synthetic oligonucleotide
  Target: ATXN2; (+) strand; PAM type: NRG; PAM sequence: AGG
tttggcctttcggttcctcc

SEQ ID NO: 36048 - DNA, 20 bp, Artificial Sequence
  Description of Artificial Sequence: Synthetic oligonucleotide
  Target: ATXN2; (+) strand; PAM type: NRG; PAM sequence: GGG
ttggcctttcggttcctcca

SEQ ID NO: 36049 - DNA, 20 bp, Artificial Sequence
  Description of Artificial Sequence: Synthetic oligonucleotide
  Target: ATXN2; (+) strand; PAM type: NRG; PAM sequence: CAG
gcctttcggttcctccaggg

SEQ ID NO: 36050 - DNA, 20 bp, Artificial Sequence
  Description of Artificial Sequence: Synthetic oligonucleotide
  Target: ATXN2; (+) strand; PAM type: NRG; PAM sequence: TGG
ggcagccttacaactgctgt

SEQ ID NO: 36051 - DNA, 20 bp, Artificial Sequence
  Description of Artificial Sequence: Synthetic oligonucleotide
  Target: ATXN2; (+) strand; PAM type: NRG; PAM sequence: TGG
agccttacaactgctgttgg

SEQ ID NO: 36052 - DNA, 20 bp, Artificial Sequence
  Description of Artificial Sequence: Synthetic oligonucleotide
  Target: ATXN2; (+) strand; PAM type: NRG; PAM sequence: TGG
cttacaactgctgttggtgg

SEQ ID NO: 36053 - DNA, 20 bp, Artificial Sequence
  Description of Artificial Sequence: Synthetic oligonucleotide
  Target: ATXN2; (+) strand; PAM type: NRG; PAM sequence: GGG
ttacaactgctgttggtggt

SEQ ID NO: 36054 - DNA, 20 bp, Artificial Sequence
  Description of Artificial Sequence: Synthetic oligonucleotide
  Target: ATXN2; (+) strand; PAM type: NRG; PAM sequence: AAG
tggtgggcttgtactgtaaa

SEQ ID NO: 36055 - DNA, 20 bp, Artificial Sequence
  Description of Artificial Sequence: Synthetic oligonucleotide
  Target: ATXN2; (+) strand; PAM type: NRG; PAM sequence: AAG
ggcttgtactgtaaaaagaa

SEQ ID NO: 36056 - DNA, 20 bp, Artificial Sequence
  Description of Artificial Sequence: Synthetic oligonucleotide
  Target: ATXN2; (+) strand; PAM type: NRG; PAM sequence: CAG
aagaaaagcgaacattgaaa

SEQ ID NO: 36057 - DNA, 20 bp, Artificial Sequence
  Description of Artificial Sequence: Synthetic oligonucleotide
  Target: ATXN2; (+) strand; PAM type: NRG; PAM sequence: TGG
cgaacattgaaacagaaaac

SEQ ID NO: 36058 - DNA, 20 bp, Artificial Sequence
  Description of Artificial Sequence: Synthetic oligonucleotide
  Target: ATXN2; (+) strand; PAM type: NRG; PAM sequence: CAG
aaactggcaacaccacacat

SEQ ID NO: 36059 - DNA, 20 bp, Artificial Sequence
  Description of Artificial Sequence: Synthetic oligonucleotide
  Target: ATXN2; (+) strand; PAM type: NRG; PAM sequence: TAG
ggcaacaccacacatcagcc

SEQ ID NO: 36060 - DNA, 20 bp, Artificial Sequence
  Description of Artificial Sequence: Synthetic oligonucleotide
  Target: ATXN2; (+) strand; PAM type: NRG; PAM sequence: CAG
acatcagcctagtgtctctg

SEQ ID NO: 36061 - DNA, 20 bp, Artificial Sequence
  Description of Artificial Sequence: Synthetic oligonucleotide
  Target: ATXN2; (+) strand; PAM type: NRG; PAM sequence: TAG
attgtaaactatcctcgtgc

SEQ ID NO: 36062 - DNA, 20 bp, Artificial Sequence
  Description of Artificial Sequence: Synthetic oligonucleotide
  Target: ATXN2; (+) strand; PAM type: NRG; PAM sequence: AAG
tccccctcccatctgcacca

SEQ ID NO: 36063 - DNA, 20 bp, Artificial Sequence
  Description of Artificial Sequence: Synthetic oligonucleotide
  Target: ATXN2; (+) strand; PAM type: NRG; PAM sequence: TGG
ccctcccatctgcaccaaag

SEQ ID NO: 36064 - DNA, 20 bp, Artificial Sequence
  Description of Artificial Sequence: Synthetic oligonucleotide
  Target: ATXN2; (+) strand; PAM type: NRG; PAM sequence: GGG
cctcccatctgcaccaaagt

SEQ ID NO: 36065 - DNA, 20 bp, Artificial Sequence
  Description of Artificial Sequence: Synthetic oligonucleotide
  Target: ATXN2; (+) strand; PAM type: NRG; PAM sequence: GGG
ctcccatctgcaccaaagtg

SEQ ID NO: 36066 - DNA, 20 bp, Artificial Sequence
  Description of Artificial Sequence: Synthetic oligonucleotide
  Target: ATXN2; (+) strand; PAM type: NRG; PAM sequence: GAG
cccatctgcaccaaagtggg

SEQ ID NO: 36067 - DNA, 20 bp, Artificial Sequence
  Description of Artificial Sequence: Synthetic oligonucleotide
  Target: ATXN2; (+) strand; PAM type: NRG; PAM sequence: AGG
ccatctgcaccaaagtgggg

SEQ ID NO: 36068 - DNA, 20 bp, Artificial Sequence
  Description of Artificial Sequence: Synthetic oligonucleotide
  Target: ATXN2; (+) strand; PAM type: NRG; PAM sequence: GGG
catctgcaccaaagtgggga

SEQ ID NO: 36069 - DNA, 20 bp, Artificial Sequence
  Description of Artificial Sequence: Synthetic oligonucleotide
  Target: ATXN2; (+) strand; PAM type: NRG; PAM sequence: TGG
tgcaccaaagtggggagggt

SEQ ID NO: 36070 - DNA, 20 bp, Artificial Sequence
  Description of Artificial Sequence: Synthetic oligonucleotide
  Target: ATXN2; (+) strand; PAM type: NRG; PAM sequence: GGG
gcaccaaagtggggagggtt

SEQ ID NO: 36071 - DNA, 20 bp, Artificial Sequence
  Description of Artificial Sequence: Synthetic oligonucleotide
  Target: ATXN2; (+) strand; PAM type: NRG; PAM sequence: TGG
ccaaagtggggagggttggg

SEQ ID NO: 36072 - DNA, 20 bp, Artificial Sequence
  Description of Artificial Sequence: Synthetic oligonucleotide
  Target: ATXN2; (+) strand; PAM type: NRG; PAM sequence: GGG
caaagtggggagggttgggt

SEQ ID NO: 36073 - DNA, 20 bp, Artificial Sequence
  Description of Artificial Sequence: Synthetic oligonucleotide
  Target: ATXN2; (+) strand; PAM type: NRG; PAM sequence: TGG
agtggggagggttgggtggg

SEQ ID NO: 36074 - DNA, 20 bp, Artificial Sequence
  Description of Artificial Sequence: Synthetic oligonucleotide
  Target: ATXN2; (+) strand; PAM type: NRG; PAM sequence: GGG
gtggggagggttgggtgggt

SEQ ID NO: 36075 - DNA, 20 bp, Artificial Sequence
  Description of Artificial Sequence: Synthetic oligonucleotide
  Target: ATXN2; (+) strand; PAM type: NRG; PAM sequence: TAG
gggagggttgggtgggtggg

SEQ ID NO: 36076 - DNA, 20 bp, Artificial Sequence
  Description of Artificial Sequence: Synthetic oligonucleotide
  Target: ATXN2; (+) strand; PAM type: NRG; PAM sequence: CAG
gtgggtgggtagaaacaaac

SEQ ID NO: 36077 - DNA, 20 bp, Artificial Sequence
  Description of Artificial Sequence: Synthetic oligonucleotide
  Target: ATXN2; (+) strand; PAM type: NRG; PAM sequence: CAG
gtgggtagaaacaaaccagt

SEQ ID NO: 36078 - DNA, 20 bp, Artificial Sequence
  Description of Artificial Sequence: Synthetic oligonucleotide
  Target: ATXN2; (+) strand; PAM type: NRG; PAM sequence: CAG
agtcagacgtaaaaccactt

SEQ ID NO: 36079 - DNA, 20 bp, Artificial Sequence
  Description of Artificial Sequence: Synthetic oligonucleotide
  Target: ATXN2; (+) strand; PAM type: NRG; PAM sequence: CAG
accacttcagataaaactcc

SEQ ID NO: 36080 - DNA, 20 bp, Artificial Sequence
  Description of Artificial Sequence: Synthetic oligonucleotide
  Target: ATXN2; (+) strand; PAM type: NRG; PAM sequence: AAG
acttcagataaaactcccag

SEQ ID NO: 36081 - DNA, 20 bp, Artificial Sequence
  Description of Artificial Sequence: Synthetic oligonucleotide
  Target: ATXN2; (+) strand; PAM type: NRG; PAM sequence: TGG
actcccagaagacttgttca

SEQ ID NO: 36082 - DNA, 20 bp, Artificial Sequence
  Description of Artificial Sequence: Synthetic oligonucleotide
  Target: ATXN2; (+) strand; PAM type: NRG; PAM sequence: GGG
ctcccagaagacttgttcat

SEQ ID NO: 36083 - DNA, 20 bp, Artificial Sequence
  Description of Artificial Sequence: Synthetic oligonucleotide
  Target: ATXN2; (+) strand; PAM type: NRG; PAM sequence: GGG
tcccagaagacttgttcatg

SEQ ID NO: 36084 - DNA, 20 bp, Artificial Sequence
  Description of Artificial Sequence: Synthetic oligonucleotide
  Target: ATXN2; (+) strand; PAM type: NRG; PAM sequence: TAG
cagaagacttgttcatgggg

SEQ ID NO: 36085 - DNA, 20 bp, Artificial Sequence
  Description of Artificial Sequence: Synthetic oligonucleotide
  Target: ATXN2; (+) strand; PAM type: NRG; PAM sequence: AAG
ttgttcatggggtagaaaaa

SEQ ID NO: 36086 - DNA, 20 bp, Artificial Sequence
  Description of Artificial Sequence: Synthetic oligonucleotide
  Target: ATXN2; (+) strand; PAM type: NRG; PAM sequence: AGG
tgttcatggggtagaaaaaa

SEQ ID NO: 36087 - DNA, 20 bp, Artificial Sequence
  Description of Artificial Sequence: Synthetic oligonucleotide
  Target: ATXN2; (+) strand; PAM type: NRG; PAM sequence: TAG
caaaccccctccccaaatat

SEQ ID NO: 36088 - DNA, 20 bp, Artificial Sequence
  Description of Artificial Sequence: Synthetic oligonucleotide
  Target: ATXN2; (+) strand; PAM type: NRG; PAM sequence: AAG
cccctccccaaatattagcc

SEQ ID NO: 36089 - DNA, 20 bp, Artificial Sequence
  Description of Artificial Sequence: Synthetic oligonucleotide
  Target: ATXN2; (+) strand; PAM type: NRG; PAM sequence: CAG
cccaaatattagccaagcac

SEQ ID NO: 36090 - DNA, 20 bp, Artificial Sequence
  Description of Artificial Sequence: Synthetic oligonucleotide
  Target: ATXN2; (+) strand; PAM type: NRG; PAM sequence: CAG
ccaagcaccagtattgcttt

SEQ ID NO: 36091 - DNA, 20 bp, Artificial Sequence
  Description of Artificial Sequence: Synthetic oligonucleotide
  Target: ATXN2; (+) strand; PAM type: NRG; PAM sequence: CAG
cagtattgctttcagaataa

SEQ ID NO: 36092 - DNA, 20 bp, Artificial Sequence
  Description of Artificial Sequence: Synthetic oligonucleotide
  Target: ATXN2; (+) strand; PAM type: NRG; PAM sequence: AGG
agtattgctttcagaataac

SEQ ID NO: 36093 - DNA, 20 bp, Artificial Sequence
  Description of Artificial Sequence: Synthetic oligonucleotide
  Target: ATXN2; (+) strand; PAM type: NRG; PAM sequence: CAG
ttgctttcagaataacaggt

SEQ ID NO: 36094 - DNA, 20 bp, Artificial Sequence
  Description of Artificial Sequence: Synthetic oligonucleotide
  Target: ATXN2; (+) strand; PAM type: NRG; PAM sequence: AAG
gaataacaggtcagactgtg

SEQ ID NO: 36095 - DNA, 20 bp, Artificial Sequence
  Description of Artificial Sequence: Synthetic oligonucleotide
  Target: ATXN2; (+) strand; PAM type: NRG; PAM sequence: TGG
cagactgtgaagtatcgcca

SEQ ID NO: 36096 - DNA, 20 bp, Artificial Sequence
  Description of Artificial Sequence: Synthetic oligonucleotide
  Target: ATXN2; (+) strand; PAM type: NRG; PAM sequence: CAG
actgtgaagtatcgccatgg

SEQ ID NO: 36097 - DNA, 20 bp, Artificial Sequence
  Description of Artificial Sequence: Synthetic oligonucleotide
  Target: ATXN2; (+) strand; PAM type: NRG; PAM sequence: AAG
gtatcgccatggcagccatc

SEQ ID NO: 36098 - DNA, 20 bp, Artificial Sequence
  Description of Artificial Sequence: Synthetic oligonucleotide
  Target: ATXN2; (+) strand; PAM type: NRG; PAM sequence: TAG
tcgccatggcagccatcaag

SEQ ID NO: 36099 - DNA, 20 bp, Artificial Sequence
  Description of Artificial Sequence: Synthetic oligonucleotide
  Target: ATXN2; (+) strand; PAM type: NRG; PAM sequence: TAG
ccatggcagccatcaagtag

SEQ ID NO: 36100 - DNA, 20 bp, Artificial Sequence
  Description of Artificial Sequence: Synthetic oligonucleotide
  Target: ATXN2; (+) strand; PAM type: NRG; PAM sequence: GAG
atggcagccatcaagtagta

SEQ ID NO: 36101 - DNA, 20 bp, Artificial Sequence
  Description of Artificial Sequence: Synthetic oligonucleotide
  Target: ATXN2; (+) strand; PAM type: NRG; PAM sequence: CAG
caagtagtagagcacaatca

SEQ ID NO: 36102 - DNA, 20 bp, Artificial Sequence
  Description of Artificial Sequence: Synthetic oligonucleotide
  Target: ATXN2; (+) strand; PAM type: NRG; PAM sequence: AGG
aagtagtagagcacaatcac

SEQ ID NO: 36103 - DNA, 20 bp, Artificial Sequence
  Description of Artificial Sequence: Synthetic oligonucleotide
  Target: ATXN2; (+) strand; PAM type: NRG; PAM sequence: GGG
agtagtagagcacaatcaca

SEQ ID NO: 36104 - DNA, 20 bp, Artificial Sequence
  Description of Artificial Sequence: Synthetic oligonucleotide
  Target: ATXN2; (+) strand; PAM type: NRG; PAM sequence: CAG
acagggcgctctcccctgtt

SEQ ID NO: 36105 - DNA, 20 bp, Artificial Sequence
  Description of Artificial Sequence: Synthetic oligonucleotide
  Target: ATXN2; (+) strand; PAM type: NRG; PAM sequence: AGG
cagggcgctctcccctgttc

SEQ ID NO: 36106 - DNA, 20 bp, Artificial Sequence
  Description of Artificial Sequence: Synthetic oligonucleotide
  Target: ATXN2; (+) strand; PAM type: NRG; PAM sequence: GGG
agggcgctctcccctgttca

SEQ ID NO: 36107 - DNA, 20 bp, Artificial Sequence
  Description of Artificial Sequence: Synthetic oligonucleotide
  Target: ATXN2; (+) strand; PAM type: NRG; PAM sequence: GGG
gggcgctctcccctgttcag

SEQ ID NO: 36108 - DNA, 20 bp, Artificial Sequence
  Description of Artificial Sequence: Synthetic oligonucleotide
  Target: ATXN2; (+) strand; PAM type: NRG; PAM sequence: TGG
gctctcccctgttcaggggc

SEQ ID NO: 36109 - DNA, 20 bp, Artificial Sequence
  Description of Artificial Sequence: Synthetic oligonucleotide
  Target: ATXN2; (+) strand; PAM type: NRG; PAM sequence: GGG
ctctcccctgttcaggggct

SEQ ID NO: 36110 - DNA, 20 bp, Artificial Sequence
  Description of Artificial Sequence: Synthetic oligonucleotide
  Target: ATXN2; (+) strand; PAM type: NRG; PAM sequence: GGG
tctcccctgttcaggggctg

SEQ ID NO: 36111 - DNA, 20 bp, Artificial Sequence
  Description of Artificial Sequence: Synthetic oligonucleotide
  Target: ATXN2; (+) strand; PAM type: NRG; PAM sequence: AAG
tggggctaacgctacactca

SEQ ID NO: 36112 - DNA, 20 bp, Artificial Sequence
  Description of Artificial Sequence: Synthetic oligonucleotide
  Target: ATXN2; (+) strand; PAM type: NRG; PAM sequence: CAG
gctaacgctacactcaaagc

SEQ ID NO: 36113 - DNA, 20 bp, Artificial Sequence
  Description of Artificial Sequence: Synthetic oligonucleotide
  Target: ATXN2; (+) strand; PAM type: NRG; PAM sequence: CAG
actcaaagccagtccatcca

SEQ ID NO: 36114 - DNA, 20 bp, Artificial Sequence
  Description of Artificial Sequence: Synthetic oligonucleotide
  Target: ATXN2; (+) strand; PAM type: NRG; PAM sequence: CAG
gtccatccacagcgctttct

SEQ ID NO: 36115 - DNA, 20 bp, Artificial Sequence
  Description of Artificial Sequence: Synthetic oligonucleotide
  Target: ATXN2; (+) strand; PAM type: NRG; PAM sequence: CAG
catccacagcgctttctcag

SEQ ID NO: 36116 - DNA, 20 bp, Artificial Sequence
  Description of Artificial Sequence: Synthetic oligonucleotide
  Target: ATXN2; (+) strand; PAM type: NRG; PAM sequence: CAG
tttctcagcagtatcttctc

SEQ ID NO: 36117 - DNA, 20 bp, Artificial Sequence
  Description of Artificial Sequence: Synthetic oligonucleotide
  Target: ATXN2; (+) strand; PAM type: NRG; PAM sequence: GAG
tctcagcagtatcttctcca

SEQ ID NO: 36118 - DNA, 20 bp, Artificial Sequence
  Description of Artificial Sequence: Synthetic oligonucleotide
  Target: ATXN2; (+) strand; PAM type: NRG; PAM sequence: TGG
gctacaatcaaactctgcca

SEQ ID NO: 36119 - DNA, 20 bp, Artificial Sequence
  Description of Artificial Sequence: Synthetic oligonucleotide
  Target: ATXN2; (+) strand; PAM type: NRG; PAM sequence: CAG
ggtaataaccccccacatgt

SEQ ID NO: 36120 - DNA, 20 bp, Artificial Sequence
  Description of Artificial Sequence: Synthetic oligonucleotide
  Target: ATXN2; (+) strand; PAM type: NRG; PAM sequence: TGG
ccccccacatgtcagacttt

SEQ ID NO: 36121 - DNA, 20 bp, Artificial Sequence
  Description of Artificial Sequence: Synthetic oligonucleotide
  Target: ATXN2; (+) strand; PAM type: NRG; PAM sequence: GGG
cccccacatgtcagactttt

SEQ ID NO: 36122 - DNA, 20 bp, Artificial Sequence
  Description of Artificial Sequence: Synthetic oligonucleotide
  Target: ATXN2; (+) strand; PAM type: NRG; PAM sequence: CAG
catgtcagacttttgggact

SEQ ID NO: 36123 - DNA, 20 bp, Artificial Sequence
  Description of Artificial Sequence: Synthetic oligonucleotide
  Target: ATXN2; (+) strand; PAM type: NRG; PAM sequence: AGG
atgtcagacttttgggactc

SEQ ID NO: 36124 - DNA, 20 bp, Artificial Sequence
  Description of Artificial Sequence: Synthetic oligonucleotide
  Target: ATXN2; (+) strand; PAM type: NRG; PAM sequence: AAG
tcagacttttgggactcagg

SEQ ID NO: 36125 - DNA, 20 bp, Artificial Sequence
  Description of Artificial Sequence: Synthetic oligonucleotide
  Target: ATXN2; (+) strand; PAM type: NRG; PAM sequence: AGG
cagacttttgggactcagga

SEQ ID NO: 36126 - DNA, 20 bp, Artificial Sequence
  Description of Artificial Sequence: Synthetic oligonucleotide
  Target: ATXN2; (+) strand; PAM type: NRG; PAM sequence: CAG
aaggaaaacactgccctgtc

SEQ ID NO: 36127 - DNA, 20 bp, Artificial Sequence
  Description of Artificial Sequence: Synthetic oligonucleotide
  Target: ATXN2; (+) strand; PAM type: NRG; PAM sequence: AAG
cctgtccagcctgtcataac

SEQ ID NO: 36128 - DNA, 20 bp, Artificial Sequence
  Description of Artificial Sequence: Synthetic oligonucleotide
  Target: ATXN2; (+) strand; PAM type: NRG; PAM sequence: AGG
ctgtccagcctgtcataaca

SEQ ID NO: 36129 - DNA, 20 bp, Artificial Sequence
  Description of Artificial Sequence: Synthetic oligonucleotide
  Target: ATXN2; (+) strand; PAM type: NRG; PAM sequence: AAG
tccagcctgtcataacaagg

SEQ ID NO: 36130 - DNA, 20 bp, Artificial Sequence
  Description of Artificial Sequence: Synthetic oligonucleotide
  Target: ATXN2; (+) strand; PAM type: NRG; PAM sequence: AGG
ccagcctgtcataacaagga

SEQ ID NO: 36131 - DNA, 20 bp, Artificial Sequence
  Description of Artificial Sequence: Synthetic oligonucleotide
  Target: ATXN2; (+) strand; PAM type: NRG; PAM sequence: GAG
cataacaaggaaggccaact

SEQ ID NO: 36132 - DNA, 20 bp, Artificial Sequence
  Description of Artificial Sequence: Synthetic oligonucleotide
  Target: ATXN2; (+) strand; PAM type: NRG; PAM sequence: TAG
aaggaaggccaactgagtcc

SEQ ID NO: 36133 - DNA, 20 bp, Artificial Sequence
  Description of Artificial Sequence: Synthetic oligonucleotide
  Target: ATXN2; (+) strand; PAM type: NRG; PAM sequence: AGG
aggaaggccaactgagtcct

SEQ ID NO: 36134 - DNA, 20 bp, Artificial Sequence
  Description of Artificial Sequence: Synthetic oligonucleotide
  Target: ATXN2; (+) strand; PAM type: NRG; PAM sequence: CAG
actgagtcctaggcatgcat

SEQ ID NO: 36135 - DNA, 20 bp, Artificial Sequence
  Description of Artificial Sequence: Synthetic oligonucleotide
  Target: ATXN2; (+) strand; PAM type: NRG; PAM sequence: AGG
ctgagtcctaggcatgcatc

SEQ ID NO: 36136 - DNA, 20 bp, Artificial Sequence
  Description of Artificial Sequence: Synthetic oligonucleotide
  Target: ATXN2; (+) strand; PAM type: NRG; PAM sequence: AAG
tgctgctgctgcttctcatc

SEQ ID NO: 36137 - DNA, 20 bp, Artificial Sequence
  Description of Artificial Sequence: Synthetic oligonucleotide
  Target: ATXN2; (+) strand; PAM type: NRG; PAM sequence: CAG
agccaaatcctgtataccat

SEQ ID NO: 36138 - DNA, 20 bp, Artificial Sequence
  Description of Artificial Sequence: Synthetic oligonucleotide
  Target: ATXN2; (+) strand; PAM type: NRG; PAM sequence: CAG
gtataccatcagaacacaca

SEQ ID NO: 36139 - DNA, 20 bp, Artificial Sequence
  Description of Artificial Sequence: Synthetic oligonucleotide
  Target: ATXN2; (+) strand; PAM type: NRG; PAM sequence: CGG
catcagaacacacacagact

SEQ ID NO: 36140 - DNA, 20 bp, Artificial Sequence
  Description of Artificial Sequence: Synthetic oligonucleotide
  Target: ATXN2; (+) strand; PAM type: NRG; PAM sequence: CGG
acacacacagactcggctcc

SEQ ID NO: 36141 - DNA, 20 bp, Artificial Sequence
  Description of Artificial Sequence: Synthetic oligonucleotide
  Target: ATXN2; (+) strand; PAM type: NRG; PAM sequence: AAG
cacacagactcggctcccgg

SEQ ID NO: 36142 - DNA, 20 bp, Artificial Sequence
  Description of Artificial Sequence: Synthetic oligonucleotide
  Target: ATXN2; (+) strand; PAM type: NRG; PAM sequence: CAG
gactcggctcccggaagcct

SEQ ID NO: 36143 - DNA, 20 bp, Artificial Sequence
  Description of Artificial Sequence: Synthetic oligonucleotide
  Target: ATXN2; (+) strand; PAM type: NRG; PAM sequence: AGG
actcggctcccggaagcctc

SEQ ID NO: 36144 - DNA, 20 bp, Artificial Sequence
  Description of Artificial Sequence: Synthetic oligonucleotide
  Target: ATXN2; (+) strand; PAM type: NRG; PAM sequence: CAG
tgatgctgaactgatcgtca

SEQ ID NO: 36145 - DNA, 20 bp, Artificial Sequence
  Description of Artificial Sequence: Synthetic oligonucleotide
  Target: ATXN2; (+) strand; PAM type: NRG; PAM sequence: TGG
gtccctcctgtgcacactcc

SEQ ID NO: 36146 - DNA, 20 bp, Artificial Sequence
  Description of Artificial Sequence: Synthetic oligonucleotide
  Target: ATXN2; (+) strand; PAM type: NRG; PAM sequence: CGG
ctcctgtgcacactcctgga

SEQ ID NO: 36147 - DNA, 20 bp, Artificial Sequence
  Description of Artificial Sequence: Synthetic oligonucleotide
  Target: ATXN2; (+) strand; PAM type: NRG; PAM sequence: GGG
tcctgtgcacactcctggac

SEQ ID NO: 36148 - DNA, 20 bp, Artificial Sequence
  Description of Artificial Sequence: Synthetic oligonucleotide
  Target: ATXN2; (+) strand; PAM type: NRG; PAM sequence: TAG
cactcctggacgggtcttgc

SEQ ID NO: 36149 - DNA, 20 bp, Artificial Sequence
  Description of Artificial Sequence: Synthetic oligonucleotide
  Target: ATXN2; (+) strand; PAM type: NRG; PAM sequence: CGG
gtcttgctagttctcaaatg

SEQ ID NO: 36150 - DNA, 20 bp, Artificial Sequence
  Description of Artificial Sequence: Synthetic oligonucleotide
  Target: ATXN2; (+) strand; PAM type: NRG; PAM sequence: GGG
tcttgctagttctcaaatgc

SEQ ID NO: 36151 - DNA, 20 bp, Artificial Sequence
  Description of Artificial Sequence: Synthetic oligonucleotide
  Target: ATXN2; (+) strand; PAM type: NRG; PAM sequence: GGG
cttgctagttctcaaatgcg

SEQ ID NO: 36152 - DNA, 20 bp, Artificial Sequence
  Description of Artificial Sequence: Synthetic oligonucleotide
  Target: ATXN2; (+) strand; PAM type: NRG; PAM sequence: AAG
gttctcaaatgcggggcttg

SEQ ID NO: 36153 - DNA, 20 bp, Artificial Sequence
  Description of Artificial Sequence: Synthetic oligonucleotide
  Target: ATXN2; (+) strand; PAM type: NRG; PAM sequence: TGG
aaatgcggggcttgaagcac

SEQ ID NO: 36154 - DNA, 20 bp, Artificial Sequence
  Description of Artificial Sequence: Synthetic oligonucleotide
  Target: ATXN2; (+) strand; PAM type: NRG; PAM sequence: GAG
gcctgccattccacctgtgc

SEQ ID NO: 36155 - DNA, 20 bp, Artificial Sequence
  Description of Artificial Sequence: Synthetic oligonucleotide
  Target: ATXN2; (+) strand; PAM type: NRG; PAM sequence: CAG
tgccattccacctgtgcgag

SEQ ID NO: 36156 - DNA, 20 bp, Artificial Sequence
  Description of Artificial Sequence: Synthetic oligonucleotide
  Target: ATXN2; (+) strand; PAM type: NRG; PAM sequence: TGG
cctgtgcgagcagaatgctt

SEQ ID NO: 36157 - DNA, 20 bp, Artificial Sequence
  Description of Artificial Sequence: Synthetic oligonucleotide
  Target: ATXN2; (+) strand; PAM type: NRG; PAM sequence: GGG
ctgtgcgagcagaatgcttt

SEQ ID NO: 36158 - DNA, 20 bp, Artificial Sequence
  Description of Artificial Sequence: Synthetic oligonucleotide
  Target: ATXN2; (+) strand; PAM type: NRG; PAM sequence: GGG
tgtgcgagcagaatgctttg

SEQ ID NO: 36159 - DNA, 20 bp, Artificial Sequence
  Description of Artificial Sequence: Synthetic oligonucleotide
  Target: ATXN2; (+) strand; PAM type: NRG; PAM sequence: CGG
cagaatgctttggggtgccc

SEQ ID NO: 36160 - DNA, 20 bp, Artificial Sequence
  Description of Artificial Sequence: Synthetic oligonucleotide
  Target: ATXN2; (+) strand; PAM type: NRG; PAM sequence: CGG
aatgctttggggtgccccgg

SEQ ID NO: 36161 - DNA, 20 bp, Artificial Sequence
  Description of Artificial Sequence: Synthetic oligonucleotide
  Target: ATXN2; (+) strand; PAM type: NRG; PAM sequence: AAG
gcacacacacgcctcacctg

SEQ ID NO: 36162 - DNA, 20 bp, Artificial Sequence
  Description of Artificial Sequence: Synthetic oligonucleotide
  Target: ATXN2; (+) strand; PAM type: NRG; PAM sequence: AGG
cacacacacgcctcacctga

SEQ ID NO: 36163 - DNA, 20 bp, Artificial Sequence
  Description of Artificial Sequence: Synthetic oligonucleotide
  Target: ATXN2; (+) strand; PAM type: NRG; PAM sequence: GGG
acacacacgcctcacctgaa

SEQ ID NO: 36164 - DNA, 20 bp, Artificial Sequence
  Description of Artificial Sequence: Synthetic oligonucleotide
  Target: ATXN2; (+) strand; PAM type: NRG; PAM sequence: TAG
cacctgaagggtgcgtcata

SEQ ID NO: 36165 - DNA, 20 bp, Artificial Sequence
  Description of Artificial Sequence: Synthetic oligonucleotide
  Target: ATXN2; (+) strand; PAM type: NRG; PAM sequence: AGG
acctgaagggtgcgtcatat

SEQ ID NO: 36166 - DNA, 20 bp, Artificial Sequence
  Description of Artificial Sequence: Synthetic oligonucleotide
  Target: ATXN2; (+) strand; PAM type: NRG; PAM sequence: GGG
cctgaagggtgcgtcatata

SEQ ID NO: 36167 - DNA, 20 bp, Artificial Sequence
  Description of Artificial Sequence: Synthetic oligonucleotide
  Target: ATXN2; (+) strand; PAM type: NRG; PAM sequence: GGG
ctgaagggtgcgtcatatag

SEQ ID NO: 36168 - DNA, 20 bp, Artificial Sequence
  Description of Artificial Sequence: Synthetic oligonucleotide
  Target: ATXN2; (+) strand; PAM type: NRG; PAM sequence: GAG
aggggaaatgcgctgttgtc

SEQ ID NO: 36169 - DNA, 20 bp, Artificial Sequence
  Description of Artificial Sequence: Synthetic oligonucleotide
  Target: ATXN2; (+) strand; PAM type: NRG; PAM sequence: TGG
aaatgcgctgttgtcgagac

SEQ ID NO: 36170 - DNA, 20 bp, Artificial Sequence
  Description of Artificial Sequence: Synthetic oligonucleotide
  Target: ATXN2; (+) strand; PAM type: NRG; PAM sequence: TGG
cgctgttgtcgagactggaa

SEQ ID NO: 36171 - DNA, 20 bp, Artificial Sequence
  Description of Artificial Sequence: Synthetic oligonucleotide
  Target: ATXN2; (+) strand; PAM type: NRG; PAM sequence: GGG
gctgttgtcgagactggaat

SEQ ID NO: 36172 - DNA, 20 bp, Artificial Sequence
  Description of Artificial Sequence: Synthetic oligonucleotide
  Target: ATXN2; (+) strand; PAM type: NRG; PAM sequence: TAG
gtcgagactggaatgggctg

SEQ ID NO: 36173 - DNA, 20 bp, Artificial Sequence
  Description of Artificial Sequence: Synthetic oligonucleotide
  Target: ATXN2; (+) strand; PAM type: NRG; PAM sequence: GAG
aatgggctgtagtgcacttt

SEQ ID NO: 36174 - DNA, 20 bp, Artificial Sequence
  Description of Artificial Sequence: Synthetic oligonucleotide
  Target: ATXN2; (+) strand; PAM type: NRG; PAM sequence: GAG
ggctgtagtgcactttgagc

SEQ ID NO: 36175 - DNA, 20 bp, Artificial Sequence
  Description of Artificial Sequence: Synthetic oligonucleotide
  Target: ATXN2; (+) strand; PAM type: NRG; PAM sequence: AGG
gctgtagtgcactttgagcg

SEQ ID NO: 36176 - DNA, 20 bp, Artificial Sequence
  Description of Artificial Sequence: Synthetic oligonucleotide
  Target: ATXN2; (+) strand; PAM type: NRG; PAM sequence: GGG
ctgtagtgcactttgagcga

SEQ ID NO: 36177 - DNA, 20 bp, Artificial Sequence
  Description of Artificial Sequence: Synthetic oligonucleotide
  Target: ATXN2; (+) strand; PAM type: NRG; PAM sequence: CGG
tagtgcactttgagcgaggg

SEQ ID NO: 36178 - DNA, 20 bp, Artificial Sequence
  Description of Artificial Sequence: Synthetic oligonucleotide
  Target: ATXN2; (+) strand; PAM type: NRG; PAM sequence: TGG
cactttgagcgagggcggcc

SEQ ID NO: 36179 - DNA, 20 bp, Artificial Sequence
  Description of Artificial Sequence: Synthetic oligonucleotide
  Target: ATXN2; (+) strand; PAM type: NRG; PAM sequence: GGG
actttgagcgagggcggcct

SEQ ID NO: 36180 - DNA, 20 bp, Artificial Sequence
  Description of Artificial Sequence: Synthetic oligonucleotide
  Target: ATXN2; (+) strand; PAM type: NRG; PAM sequence: GGG
ctttgagcgagggcggcctg

SEQ ID NO: 36181 - DNA, 20 bp, Artificial Sequence
  Description of Artificial Sequence: Synthetic oligonucleotide
  Target: ATXN2; (+) strand; PAM type: NRG; PAM sequence: CGG
gagggcggcctggggaccgc

SEQ ID NO: 36182 - DNA, 20 bp, Artificial Sequence
  Description of Artificial Sequence: Synthetic oligonucleotide
  Target: ATXN2; (+) strand; PAM type: NRG; PAM sequence: GGG
agggcggcctggggaccgcc

SEQ ID NO: 36183 - DNA, 20 bp, Artificial Sequence
  Description of Artificial Sequence: Synthetic oligonucleotide
  Target: ATXN2; (+) strand; PAM type: NRG; PAM sequence: TGG
gcggcctggggaccgccggg

SEQ ID NO: 36184 - DNA, 20 bp, Artificial Sequence
  Description of Artificial Sequence: Synthetic oligonucleotide
  Target: ATXN2; (+) strand; PAM type: NRG; PAM sequence: TAG
ccgggtggctgtgtcgtcat

SEQ ID NO: 36185 - DNA, 20 bp, Artificial Sequence
  Description of Artificial Sequence: Synthetic oligonucleotide
  Target: ATXN2; (+) strand; PAM type: NRG; PAM sequence: TGG
tgtgtcgtcattagcatcat

SEQ ID NO: 36186 - DNA, 20 bp, Artificial Sequence
  Description of Artificial Sequence: Synthetic oligonucleotide
  Target: ATXN2; (+) strand; PAM type: NRG; PAM sequence: TGG
tcattagcatcattggcgca

SEQ ID NO: 36187 - DNA, 20 bp, Artificial Sequence
  Description of Artificial Sequence: Synthetic oligonucleotide
  Target: ATXN2; (+) strand; PAM type: NRG; PAM sequence: GGG
cattagcatcattggcgcat

SEQ ID NO: 36188 - DNA, 20 bp, Artificial Sequence
  Description of Artificial Sequence: Synthetic oligonucleotide
  Target: ATXN2; (+) strand; PAM type: NRG; PAM sequence: CAG
tagcatcattggcgcatggg

SEQ ID NO: 36189 - DNA, 20 bp, Artificial Sequence
  Description of Artificial Sequence: Synthetic oligonucleotide
  Target: ATXN2; (+) strand; PAM type: NRG; PAM sequence: TGG
atcattggcgcatgggcagt

SEQ ID NO: 36190 - DNA, 20 bp, Artificial Sequence
  Description of Artificial Sequence: Synthetic oligonucleotide
  Target: ATXN2; (+) strand; PAM type: NRG; PAM sequence: GAG
tggcgcatgggcagttggat

SEQ ID NO: 36191 - DNA, 20 bp, Artificial Sequence
  Description of Artificial Sequence: Synthetic oligonucleotide
  Target: ATXN2; (+) strand; PAM type: NRG; PAM sequence: AAG
cgcatgggcagttggatgag

SEQ ID NO: 36192 - DNA, 20 bp, Artificial Sequence
  Description of Artificial Sequence: Synthetic oligonucleotide
  Target: ATXN2; (+) strand; PAM type: NRG; PAM sequence: AGG
gcatgggcagttggatgaga

SEQ ID NO: 36193 - DNA, 20 bp, Artificial Sequence
  Description of Artificial Sequence: Synthetic oligonucleotide
  Target: ATXN2; (+) strand; PAM type: NRG; PAM sequence: GAG
aaccattcctgactgtacat

SEQ ID NO: 36194 - DNA, 20 bp, Artificial Sequence
  Description of Artificial Sequence: Synthetic oligonucleotide
  Target: ATXN2; (+) strand; PAM type: NRG; PAM sequence: CAG
gactgtacatgagcctgaaa

SEQ ID NO: 36195 - DNA, 20 bp, Artificial Sequence
  Description of Artificial Sequence: Synthetic oligonucleotide
  Target: ATXN2; (+) strand; PAM type: NRG; PAM sequence: GAG
ctgtacatgagcctgaaaca

SEQ ID NO: 36196 - DNA, 20 bp, Artificial Sequence
  Description of Artificial Sequence: Synthetic oligonucleotide
  Target: ATXN2; (+) strand; PAM type: NRG; PAM sequence: GAG
gtacatgagcctgaaacaga

SEQ ID NO: 36197 - DNA, 20 bp, Artificial Sequence
  Description of Artificial Sequence: Synthetic oligonucleotide
  Target: ATXN2; (+) strand; PAM type: NRG; PAM sequence: CAG
agagagctcttttacgcata

SEQ ID NO: 36198 - DNA, 20 bp, Artificial Sequence
  Description of Artificial Sequence: Synthetic oligonucleotide
  Target: ATXN2; (+) strand; PAM type: NRG; PAM sequence: AGG
gagagctcttttacgcatac

SEQ ID NO: 36199 - DNA, 20 bp, Artificial Sequence
  Description of Artificial Sequence: Synthetic oligonucleotide
  Target: ATXN2; (+) strand; PAM type: NRG; PAM sequence: CGG
acgcatacaggcaacatctc

SEQ ID NO: 36200 - DNA, 20 bp, Artificial Sequence
  Description of Artificial Sequence: Synthetic oligonucleotide
  Target: ATXN2; (+) strand; PAM type: NRG; PAM sequence: TGG
gtcaactgtgttcctttcac

SEQ ID NO: 36201 - DNA, 20 bp, Artificial Sequence
  Description of Artificial Sequence: Synthetic oligonucleotide
  Target: ATXN2; (+) strand; PAM type: NRG; PAM sequence: GGG
tcaactgtgttcctttcact

SEQ ID NO: 36202 - DNA, 20 bp, Artificial Sequence
  Description of Artificial Sequence: Synthetic oligonucleotide
  Target: ATXN2; (+) strand; PAM type: NRG; PAM sequence: TGG
ctgtgttcctttcactgggc

SEQ ID NO: 36203 - DNA, 20 bp, Artificial Sequence
  Description of Artificial Sequence: Synthetic oligonucleotide
  Target: ATXN2; (+) strand; PAM type: NRG; PAM sequence: GGG
tgtgttcctttcactgggct

SEQ ID NO: 36204 - DNA, 20 bp, Artificial Sequence
  Description of Artificial Sequence: Synthetic oligonucleotide
  Target: ATXN2; (+) strand; PAM type: NRG; PAM sequence: CAG
tttcactgggctgggactct

SEQ ID NO: 36205 - DNA, 20 bp, Artificial Sequence
  Description of Artificial Sequence: Synthetic oligonucleotide
  Target: ATXN2; (+) strand; PAM type: NRG; PAM sequence: AGG
ttcactgggctgggactctc

SEQ ID NO: 36206 - DNA, 20 bp, Artificial Sequence
  Description of Artificial Sequence: Synthetic oligonucleotide
  Target: ATXN2; (+) strand; PAM type: NRG; PAM sequence: AAG
ctgggctgggactctcagga

SEQ ID NO: 36207 - DNA, 20 bp, Artificial Sequence
  Description of Artificial Sequence: Synthetic oligonucleotide
  Target: ATXN2; (+) strand; PAM type: NRG; PAM sequence: AGG
tgggctgggactctcaggaa

SEQ ID NO: 36208 - DNA, 20 bp, Artificial Sequence
  Description of Artificial Sequence: Synthetic oligonucleotide
  Target: ATXN2; (+) strand; PAM type: NRG; PAM sequence: GGG
gggctgggactctcaggaaa

SEQ ID NO: 36209 - DNA, 20 bp, Artificial Sequence
  Description of Artificial Sequence: Synthetic oligonucleotide
  Target: ATXN2; (+) strand; PAM type: NRG; PAM sequence: CGG
ggactctcaggaaagggcaa

SEQ ID NO: 36210 - DNA, 20 bp, Artificial Sequence
  Description of Artificial Sequence: Synthetic oligonucleotide
  Target: ATXN2; (+) strand; PAM type: NRG; PAM sequence: TGG
ctctcaggaaagggcaacgg

SEQ ID NO: 36211 - DNA, 20 bp, Artificial Sequence
  Description of Artificial Sequence: Synthetic oligonucleotide
  Target: ATXN2; (+) strand; PAM type: NRG; PAM sequence: GGG
tctcaggaaagggcaacggt

SEQ ID NO: 36212 - DNA, 20 bp, Artificial Sequence
  Description of Artificial Sequence: Synthetic oligonucleotide
  Target: ATXN2; (+) strand; PAM type: NRG; PAM sequence: CAG
gaaagggcaacggtgggcct

SEQ ID NO: 36213 - DNA, 20 bp, Artificial Sequence
  Description of Artificial Sequence: Synthetic oligonucleotide
  Target: ATXN2; (+) strand; PAM type: NRG; PAM sequence: AGG
aaagggcaacggtgggcctc

SEQ ID NO: 36214 - DNA, 20 bp, Artificial Sequence
  Description of Artificial Sequence: Synthetic oligonucleotide
  Target: ATXN2; (+) strand; PAM type: NRG; PAM sequence: GGG
aagggcaacggtgggcctca

SEQ ID NO: 36215 - DNA, 20 bp, Artificial Sequence
  Description of Artificial Sequence: Synthetic oligonucleotide
  Target: ATXN2; (+) strand; PAM type: NRG; PAM sequence: CAG
caacggtgggcctcagggcc

SEQ ID NO: 36216 - DNA, 20 bp, Artificial Sequence
  Description of Artificial Sequence: Synthetic oligonucleotide
  Target: ATXN2; (+) strand; PAM type: NRG; PAM sequence: TGG
cagggcccagttctgttctc

SEQ ID NO: 36217 - DNA, 20 bp, Artificial Sequence
  Description of Artificial Sequence: Synthetic oligonucleotide
  Target: ATXN2; (+) strand; PAM type: NRG; PAM sequence: GGG
agggcccagttctgttctct

SEQ ID NO: 36218 - DNA, 20 bp, Artificial Sequence
  Description of Artificial Sequence: Synthetic oligonucleotide
  Target: ATXN2; (+) strand; PAM type: NRG; PAM sequence: GGG
gggcccagttctgttctctg

SEQ ID NO: 36219 - DNA, 20 bp, Artificial Sequence
  Description of Artificial Sequence: Synthetic oligonucleotide
  Target: ATXN2; (+) strand; PAM type: NRG; PAM sequence: TAG
tgttctctggggacaatctc

SEQ ID NO: 36220 - DNA, 20 bp, Artificial Sequence
  Description of Artificial Sequence: Synthetic oligonucleotide
  Target: ATXN2; (+) strand; PAM type: NRG; PAM sequence: TAG
tctctggggacaatctctag

SEQ ID NO: 36221 - DNA, 20 bp, Artificial Sequence
  Description of Artificial Sequence: Synthetic oligonucleotide
  Target: ATXN2; (+) strand; PAM type: NRG; PAM sequence: AAG
gtagattatctattgacctg

SEQ ID NO: 36222 - DNA, 20 bp, Artificial Sequence
  Description of Artificial Sequence: Synthetic oligonucleotide
  Target: ATXN2; (+) strand; PAM type: NRG; PAM sequence: TGG
ctgaagacgcgcttcacctt

SEQ ID NO: 36223 - DNA, 20 bp, Artificial Sequence
  Description of Artificial Sequence: Synthetic oligonucleotide
  Target: ATXN2; (+) strand; PAM type: NRG; PAM sequence: GGG
tgaagacgcgcttcaccttt

SEQ ID NO: 36224 - DNA, 20 bp, Artificial Sequence
  Description of Artificial Sequence: Synthetic oligonucleotide
  Target: ATXN2; (+) strand; PAM type: NRG; PAM sequence: CAG
agacgcgcttcacctttggg

SEQ ID NO: 36225 - DNA, 20 bp, Artificial Sequence
  Description of Artificial Sequence: Synthetic oligonucleotide
  Target: ATXN2; (+) strand; PAM type: NRG; PAM sequence: AAG
cacctttgggcagatcctgc

SEQ ID NO: 36226 - DNA, 20 bp, Artificial Sequence
  Description of Artificial Sequence: Synthetic oligonucleotide
  Target: ATXN2; (+) strand; PAM type: NRG; PAM sequence: AGG
acctttgggcagatcctgca

SEQ ID NO: 36227 - DNA, 20 bp, Artificial Sequence
  Description of Artificial Sequence: Synthetic oligonucleotide
  Target: ATXN2; (+) strand; PAM type: NRG; PAM sequence: GGG
cctttgggcagatcctgcaa

SEQ ID NO: 36228 - DNA, 20 bp, Artificial Sequence
  Description of Artificial Sequence: Synthetic oligonucleotide
  Target: ATXN2; (+) strand; PAM type: NRG; PAM sequence: CAG
tgggcagatcctgcaagggt

SEQ ID NO: 36229 - DNA, 20 bp, Artificial Sequence
  Description of Artificial Sequence: Synthetic oligonucleotide
  Target: ATXN2; (+) strand; PAM type: NRG; PAM sequence: AGG
gggcagatcctgcaagggtc

SEQ ID NO: 36230 - DNA, 20 bp, Artificial Sequence
  Description of Artificial Sequence: Synthetic oligonucleotide
  Target: ATXN2; (+) strand; PAM type: NRG; PAM sequence: GGG
ggcagatcctgcaagggtca

SEQ ID NO: 36231 - DNA, 20 bp, Artificial Sequence
  Description of Artificial Sequence: Synthetic oligonucleotide
  Target: ATXN2; (+) strand; PAM type: NRG; PAM sequence: GAG
cagatcctgcaagggtcagg

SEQ ID NO: 36232 - DNA, 20 bp, Artificial Sequence
  Description of Artificial Sequence: Synthetic oligonucleotide
  Target: ATXN2; (+) strand; PAM type: NRG; PAM sequence: CAG
atcctgcaagggtcagggag

SEQ ID NO: 36233 - DNA, 20 bp, Artificial Sequence
  Description of Artificial Sequence: Synthetic oligonucleotide
  Target: ATXN2; (+) strand; PAM type: NRG; PAM sequence: AGG
tcctgcaagggtcagggagc

SEQ ID NO: 36234 - DNA, 20 bp, Artificial Sequence
  Description of Artificial Sequence: Synthetic oligonucleotide
  Target: ATXN2; (+) strand; PAM type: NRG; PAM sequence: AAG
agggtcagggagcaggcaac

SEQ ID NO: 36235 - DNA, 20 bp, Artificial Sequence
  Description of Artificial Sequence: Synthetic oligonucleotide
  Target: ATXN2; (+) strand; PAM type: NRG; PAM sequence: GAG
tcagggagcaggcaacaagt

SEQ ID NO: 36236 - DNA, 20 bp, Artificial Sequence
  Description of Artificial Sequence: Synthetic oligonucleotide
  Target: ATXN2; (+) strand; PAM type: NRG; PAM sequence: TGG
gagcaggcaacaagtgagcc

SEQ ID NO: 36237 - DNA, 20 bp, Artificial Sequence
  Description of Artificial Sequence: Synthetic oligonucleotide
  Target: ATXN2; (+) strand; PAM type: NRG; PAM sequence: GGG
agcaggcaacaagtgagcct

SEQ ID NO: 36238 - DNA, 20 bp, Artificial Sequence
  Description of Artificial Sequence: Synthetic oligonucleotide
  Target: ATXN2; (+) strand; PAM type: NRG; PAM sequence: TAG
aggcaacaagtgagcctggg

SEQ ID NO: 36239 - DNA, 20 bp, Artificial Sequence
  Description of Artificial Sequence: Synthetic oligonucleotide
  Target: ATXN2; (+) strand; PAM type: NRG; PAM sequence: AAG
caacaagtgagcctgggtag

SEQ ID NO: 36240 - DNA, 20 bp, Artificial Sequence
  Description of Artificial Sequence: Synthetic oligonucleotide
  Target: ATXN2; (+) strand; PAM type: NRG; PAM sequence: CAG
aagtgagcctgggtagaagt

SEQ ID NO: 36241 - DNA, 20 bp, Artificial Sequence
  Description of Artificial Sequence: Synthetic oligonucleotide
  Target: ATXN2; (+) strand; PAM type: NRG; PAM sequence: AGG
agtgagcctgggtagaagtc

SEQ ID NO: 36242 - DNA, 20 bp, Artificial Sequence
  Description of Artificial Sequence: Synthetic oligonucleotide
  Target: ATXN2; (+) strand; PAM type: NRG; PAM sequence: GGG
gtgagcctgggtagaagtca

SEQ ID NO: 36243 - DNA, 20 bp, Artificial Sequence
  Description of Artificial Sequence: Synthetic oligonucleotide
  Target: ATXN2; (+) strand; PAM type: NRG; PAM sequence: TGG
tgatcattgtattctatgta

SEQ ID NO: 36244 - DNA, 20 bp, Artificial Sequence
  Description of Artificial Sequence: Synthetic oligonucleotide
  Target: ATXN2; (+) strand; PAM type: NRG; PAM sequence: GGG
gatcattgtattctatgtat

SEQ ID NO: 36245 - DNA, 20 bp, Artificial Sequence
  Description of Artificial Sequence: Synthetic oligonucleotide
  Target: ATXN2; (+) strand; PAM type: NRG; PAM sequence: GGG
atcattgtattctatgtatg

SEQ ID NO: 36246 - DNA, 20 bp, Artificial Sequence
  Description of Artificial Sequence: Synthetic oligonucleotide
  Target: ATXN2; (+) strand; PAM type: NRG; PAM sequence: AAG
ttgtattctatgtatggggt

SEQ ID NO: 36247 - DNA, 20 bp, Artificial Sequence
  Description of Artificial Sequence: Synthetic oligonucleotide
  Target: ATXN2; (+) strand; PAM type: NRG; PAM sequence: AAG
tatggggtaagatcttcaca

SEQ ID NO: 36248 - DNA, 20 bp, Artificial Sequence
  Description of Artificial Sequence: Synthetic oligonucleotide
  Target: ATXN2; (+) strand; PAM type: NRG; PAM sequence: TAG
ggtaagatcttcacaaagat

SEQ ID NO: 36249 - DNA, 20 bp, Artificial Sequence
  Description of Artificial Sequence: Synthetic oligonucleotide
  Target: ATXN2; (+) strand; PAM type: NRG; PAM sequence: TGG
tcttcacaaagattagacac

SEQ ID NO: 36250 - DNA, 20 bp, Artificial Sequence
  Description of Artificial Sequence: Synthetic oligonucleotide
  Target: ATXN2; (+) strand; PAM type: NRG; PAM sequence: AAG
aaagattagacactggatcc

SEQ ID NO: 36251 - DNA, 20 bp, Artificial Sequence
  Description of Artificial Sequence: Synthetic oligonucleotide
  Target: ATXN2; (+) strand; PAM type: NRG; PAM sequence: AGG
aagattagacactggatcca

SEQ ID NO: 36252 - DNA, 20 bp, Artificial Sequence
  Description of Artificial Sequence: Synthetic oligonucleotide
  Target: ATXN2; (+) strand; PAM type: NRG; PAM sequence: GGG
agattagacactggatccaa

SEQ ID NO: 36253 - DNA, 20 bp, Artificial Sequence
  Description of Artificial Sequence: Synthetic oligonucleotide
  Target: ATXN2; (+) strand; PAM type: NRG; PAM sequence: CAG
ttagacactggatccaaggg

SEQ ID NO: 36254 - DNA, 20 bp, Artificial Sequence
  Description of Artificial Sequence: Synthetic oligonucleotide
  Target: ATXN2; (+) strand; PAM type: NRG; PAM sequence: AAG
ttctcaacttaatatcatac

SEQ ID NO: 36255 - DNA, 20 bp, Artificial Sequence
  Description of Artificial Sequence: Synthetic oligonucleotide
  Target: ATXN2; (+) strand; PAM type: NRG; PAM sequence: CAG
tacaagattcaatgatgctt

SEQ ID NO: 36256 - DNA, 20 bp, Artificial Sequence
  Description of Artificial Sequence: Synthetic oligonucleotide
  Target: ATXN2; (+) strand; PAM type: NRG; PAM sequence: CAG
attcaatgatgcttcagaat

SEQ ID NO: 36257 - DNA, 20 bp, Artificial Sequence
  Description of Artificial Sequence: Synthetic oligonucleotide
  Target: ATXN2; (+) strand; PAM type: NRG; PAM sequence: AGG
ttcaatgatgcttcagaatc

SEQ ID NO: 36258 - DNA, 20 bp, Artificial Sequence
  Description of Artificial Sequence: Synthetic oligonucleotide
  Target: ATXN2; (+) strand; PAM type: NRG; PAM sequence: TGG
ttcagaatcaggctgccatg

SEQ ID NO: 36259 - DNA, 20 bp, Artificial Sequence
  Description of Artificial Sequence: Synthetic oligonucleotide
  Target: ATXN2; (+) strand; PAM type: NRG; PAM sequence: GGG
tcagaatcaggctgccatgt

SEQ ID NO: 36260 - DNA, 20 bp, Artificial Sequence
  Description of Artificial Sequence: Synthetic oligonucleotide
  Target: ATXN2; (+) strand; PAM type: NRG; PAM sequence: GGG
cagaatcaggctgccatgtg

SEQ ID NO: 36261 - DNA, 20 bp, Artificial Sequence
  Description of Artificial Sequence: Synthetic oligonucleotide
  Target: ATXN2; (+) strand; PAM type: NRG; PAM sequence: GAG
caggctgccatgtggggcct

SEQ ID NO: 36262 - DNA, 20 bp, Artificial Sequence
  Description of Artificial Sequence: Synthetic oligonucleotide
  Target: ATXN2; (+) strand; PAM type: NRG; PAM sequence: AGG
aggctgccatgtggggcctg

SEQ ID NO: 36263 - DNA, 20 bp, Artificial Sequence
  Description of Artificial Sequence: Synthetic oligonucleotide
  Target: ATXN2; (+) strand; PAM type: NRG; PAM sequence: TAG
ctgccatgtggggcctgagg

SEQ ID NO: 36264 - DNA, 20 bp, Artificial Sequence
  Description of Artificial Sequence: Synthetic oligonucleotide
  Target: ATXN2; (+) strand; PAM type: NRG; PAM sequence: CAG
tggggcctgaggtagttttg

SEQ ID NO: 36265 - DNA, 20 bp, Artificial Sequence
  Description of Artificial Sequence: Synthetic oligonucleotide
  Target: ATXN2; (+) strand; PAM type: NRG; PAM sequence: TAG
cagataacatccctttcaaa

SEQ ID NO: 36266 - DNA, 20 bp, Artificial Sequence
  Description of Artificial Sequence: Synthetic oligonucleotide
  Target: ATXN2; (+) strand; PAM type: NRG; PAM sequence: AGG
agataacatccctttcaaat

SEQ ID NO: 36267 - DNA, 20 bp, Artificial Sequence
  Description of Artificial Sequence: Synthetic oligonucleotide
  Target: ATXN2; (+) strand; PAM type: NRG; PAM sequence: CAG
atccctttcaaataggaaaa

SEQ ID NO: 36268 - DNA, 20 bp, Artificial Sequence
  Description of Artificial Sequence: Synthetic oligonucleotide
  Target: ATXN2; (+) strand; PAM type: NRG; PAM sequence: AAG
ggaaaacagattacattaat

SEQ ID NO: 36269 - DNA, 20 bp, Artificial Sequence
  Description of Artificial Sequence: Synthetic oligonucleotide
  Target: ATXN2; (+) strand; PAM type: NRG; PAM sequence: CAG
aaacagattacattaataag

SEQ ID NO: 36270 - DNA, 20 bp, Artificial Sequence
  Description of Artificial Sequence: Synthetic oligonucleotide
  Target: ATXN2; (+) strand; PAM type: NRG; PAM sequence: GAG
acagattacattaataagca

SEQ ID NO: 36271 - DNA, 20 bp, Artificial Sequence
  Description of Artificial Sequence: Synthetic oligonucleotide
  Target: ATXN2; (+) strand; PAM type: NRG; PAM sequence: CAG
ttaataagcagagactgtca

SEQ ID NO: 36272 - DNA, 20 bp, Artificial Sequence
  Description of Artificial Sequence: Synthetic oligonucleotide
  Target: ATXN2; (+) strand; PAM type: NRG; PAM sequence: AAG
aagcagagactgtcacagtc

SEQ ID NO: 36273 - DNA, 20 bp, Artificial Sequence
  Description of Artificial Sequence: Synthetic oligonucleotide
  Target: ATXN2; (+) strand; PAM type: NRG; PAM sequence: TGG
agtcaagtatgtgaattact

SEQ ID NO: 36274 - DNA, 20 bp, Artificial Sequence
  Description of Artificial Sequence: Synthetic oligonucleotide
  Target: ATXN2; (+) strand; PAM type: NRG; PAM sequence: TGG
tgcctctctccctctgcttc

SEQ ID NO: 36275 - DNA, 20 bp, Artificial Sequence
  Description of Artificial Sequence: Synthetic oligonucleotide
  Target: ATXN2; (+) strand; PAM type: NRG; PAM sequence: CAG
tctgcttctggtctgctcac

SEQ ID NO: 36276 - DNA, 20 bp, Artificial Sequence
  Description of Artificial Sequence: Synthetic oligonucleotide
  Target: ATXN2; (+) strand; PAM type: NRG; PAM sequence: AGG
ctgcttctggtctgctcacc

SEQ ID NO: 36277 - DNA, 20 bp, Artificial Sequence
  Description of Artificial Sequence: Synthetic oligonucleotide
  Target: ATXN2; (+) strand; PAM type: NRG; PAM sequence: CAG
cttctggtctgctcaccagg

SEQ ID NO: 36278 - DNA, 20 bp, Artificial Sequence
  Description of Artificial Sequence: Synthetic oligonucleotide
  Target: ATXN2; (+) strand; PAM type: NRG; PAM sequence: AAG
tctgctcaccaggcagtgaa

SEQ ID NO: 36279 - DNA, 20 bp, Artificial Sequence
  Description of Artificial Sequence: Synthetic oligonucleotide
  Target: ATXN2; (+) strand; PAM type: NRG; PAM sequence: GAG
tgctcaccaggcagtgaaaa

SEQ ID NO: 36280 - DNA, 20 bp, Artificial Sequence
  Description of Artificial Sequence: Synthetic oligonucleotide
  Target: ATXN2; (+) strand; PAM type: NRG; PAM sequence: TAG
aggcagtgaaaagagactct

SEQ ID NO: 36281 - DNA, 20 bp, Artificial Sequence
  Description of Artificial Sequence: Synthetic oligonucleotide
  Target: ATXN2; (+) strand; PAM type: NRG; PAM sequence: AGG
ggcagtgaaaagagactctt

SEQ ID NO: 36282 - DNA, 20 bp, Artificial Sequence
  Description of Artificial Sequence: Synthetic oligonucleotide
  Target: ATXN2; (+) strand; PAM type: NRG; PAM sequence: CAG
ttaggcccccgtgactctct

SEQ ID NO: 36283 - DNA, 20 bp, Artificial Sequence
  Description of Artificial Sequence: Synthetic oligonucleotide
  Target: ATXN2; (+) strand; PAM type: NRG; PAM sequence: GAG
aggcccccgtgactctctca

SEQ ID NO: 36284 - DNA, 20 bp, Artificial Sequence
  Description of Artificial Sequence: Synthetic oligonucleotide
  Target: ATXN2; (+) strand; PAM type: NRG; PAM sequence: TGG
ctctctcagagatatgctga

SEQ ID NO: 36285 - DNA, 20 bp, Artificial Sequence
  Description of Artificial Sequence: Synthetic oligonucleotide
  Target: ATXN2; (+) strand; PAM type: NRG; PAM sequence: GAG
ctctcagagatatgctgatg

SEQ ID NO: 36286 - DNA, 20 bp, Artificial Sequence
  Description of Artificial Sequence: Synthetic oligonucleotide
  Target: ATXN2; (+) strand; PAM type: NRG; PAM sequence: CAG
tcagagatatgctgatggag

SEQ ID NO: 36287 - DNA, 20 bp, Artificial Sequence
  Description of Artificial Sequence: Synthetic oligonucleotide
  Target: ATXN2; (+) strand; PAM type: NRG; PAM sequence: AGG
cagagatatgctgatggagc

SEQ ID NO: 36288 - DNA, 20 bp, Artificial Sequence
  Description of Artificial Sequence: Synthetic oligonucleotide
  Target: ATXN2; (+) strand; PAM type: NRG; PAM sequence: GAG
gagatatgctgatggagcag

SEQ ID NO: 36289 - DNA, 20 bp, Artificial Sequence
  Description of Artificial Sequence: Synthetic oligonucleotide
  Target: ATXN2; (+) strand; PAM type: NRG; PAM sequence: AGG
agatatgctgatggagcagg

SEQ ID NO: 36290 - DNA, 20 bp, Artificial Sequence
  Description of Artificial Sequence: Synthetic oligonucleotide
  Target: ATXN2; (+) strand; PAM type: NRG; PAM sequence: GAG
atatgctgatggagcaggag

SEQ ID NO: 36291 - DNA, 20 bp, Artificial Sequence
  Description of Artificial Sequence: Synthetic oligonucleotide
  Target: ATXN2; (+) strand; PAM type: NRG; PAM sequence: AGG
tatgctgatggagcaggagg

SEQ ID NO: 36292 - DNA, 20 bp, Artificial Sequence
  Description of Artificial Sequence: Synthetic oligonucleotide
  Target: ATXN2; (+) strand; PAM type: NRG; PAM sequence: GAG
tgctgatggagcaggaggag

SEQ ID NO: 36293 - DNA, 20 bp, Artificial Sequence
  Description of Artificial Sequence: Synthetic oligonucleotide
  Target: ATXN2; (+) strand; PAM type: NRG; PAM sequence: AGG
gctgatggagcaggaggagg

SEQ ID NO: 36294 - DNA, 20 bp, Artificial Sequence
  Description of Artificial Sequence: Synthetic oligonucleotide
  Target: ATXN2; (+) strand; PAM type: NRG; PAM sequence: GAG
tgatggagcaggaggaggag

SEQ ID NO: 36295 - DNA, 20 bp, Artificial Sequence
  Description of Artificial Sequence: Synthetic oligonucleotide
  Target: ATXN2; (+) strand; PAM type: NRG; PAM sequence: AGG
gatggagcaggaggaggagg

SEQ ID NO: 36296 - DNA, 20 bp, Artificial Sequence
  Description of Artificial Sequence: Synthetic oligonucleotide
  Target: ATXN2; (+) strand; PAM type: NRG; PAM sequence: GAG
tggagcaggaggaggaggag

SEQ ID NO: 36297 - DNA, 20 bp, Artificial Sequence
  Description of Artificial Sequence: Synthetic oligonucleotide
  Target: ATXN2; (+) strand; PAM type: NRG; PAM sequence: TGG
gcaggaggaggaggaggagt

SEQ ID NO: 36298 - DNA, 20 bp, Artificial Sequence
  Description of Artificial Sequence: Synthetic oligonucleotide
  Target: ATXN2; (+) strand; PAM type: NRG; PAM sequence: GAG
aggaggaggaggaggagttg

SEQ ID NO: 36299 - DNA, 20 bp, Artificial Sequence
  Description of Artificial Sequence: Synthetic oligonucleotide
  Target: ATXN2; (+) strand; PAM type: NRG; PAM sequence: TGG
ggaggagttggagtttttaa

SEQ ID NO: 36300 - DNA, 20 bp, Artificial Sequence
  Description of Artificial Sequence: Synthetic oligonucleotide
  Target: ATXN2; (+) strand; PAM type: NRG; PAM sequence: CAG
gttggagtttttaatggctc

SEQ ID NO: 36301 - DNA, 20 bp, Artificial Sequence
  Description of Artificial Sequence: Synthetic oligonucleotide
  Target: ATXN2; (+) strand; PAM type: NRG; PAM sequence: GAG
gagtttttaatggctccagt

SEQ ID NO: 36302 - DNA, 20 bp, Artificial Sequence
  Description of Artificial Sequence: Synthetic oligonucleotide
  Target: ATXN2; (+) strand; PAM type: NRG; PAM sequence: TGG
ttttaatggctccagtgaga

SEQ ID NO: 36303 - DNA, 20 bp, Artificial Sequence
  Description of Artificial Sequence: Synthetic oligonucleotide
  Target: ATXN2; (+) strand; PAM type: NRG; PAM sequence: AAG
aatggctccagtgagatgga

SEQ ID NO: 36304 - DNA, 20 bp, Artificial Sequence
  Description of Artificial Sequence: Synthetic oligonucleotide
  Target: ATXN2; (+) strand; PAM type: NRG; PAM sequence: AGG
atggctccagtgagatggaa

SEQ ID NO: 36305 - DNA, 20 bp, Artificial Sequence
  Description of Artificial Sequence: Synthetic oligonucleotide
  Target: ATXN2; (+) strand; PAM type: NRG; PAM sequence: GAG
ggctccagtgagatggaaag

SEQ ID NO: 36306 - DNA, 20 bp, Artificial Sequence
  Description of Artificial Sequence: Synthetic oligonucleotide
  Target: ATXN2; (+) strand; PAM type: NRG; PAM sequence: AAG
agatggaaaggagtaacctg

SEQ ID NO: 36307 - DNA, 20 bp, Artificial Sequence
  Description of Artificial Sequence: Synthetic oligonucleotide
  Target: ATXN2; (+) strand; PAM type: NRG; PAM sequence: TGG
aggagtaacctgaagtcatc

SEQ ID NO: 36308 - DNA, 20 bp, Artificial Sequence
  Description of Artificial Sequence: Synthetic oligonucleotide
  Target: ATXN2; (+) strand; PAM type: NRG; PAM sequence: GGG
ggagtaacctgaagtcatct

SEQ ID NO: 36309 - DNA, 20 bp, Artificial Sequence
  Description of Artificial Sequence: Synthetic oligonucleotide
  Target: ATXN2; (+) strand; PAM type: NRG; PAM sequence: CAG
taacctgaagtcatctgggc

SEQ ID NO: 36310 - DNA, 20 bp, Artificial Sequence
  Description of Artificial Sequence: Synthetic oligonucleotide
  Target: ATXN2; (+) strand; PAM type: NRG; PAM sequence: CAG
tgaagtcatctgggccagcc

SEQ ID NO: 36311 - DNA, 20 bp, Artificial Sequence
  Description of Artificial Sequence: Synthetic oligonucleotide
  Target: ATXN2; (+) strand; PAM type: NRG; PAM sequence: AAG
cagcccagcgtctctgtacc

SEQ ID NO: 36312 - DNA, 20 bp, Artificial Sequence
  Description of Artificial Sequence: Synthetic oligonucleotide
  Target: ATXN2; (+) strand; PAM type: NRG; PAM sequence: TGG
tctctgtaccaagttcaacc

SEQ ID NO: 36313 - DNA, 20 bp, Artificial Sequence
  Description of Artificial Sequence: Synthetic oligonucleotide
  Target: ATXN2; (+) strand; PAM type: NRG; PAM sequence: AAG
acctggtctcactcactgtc

SEQ ID NO: 36314 - DNA, 20 bp, Artificial Sequence
  Description of Artificial Sequence: Synthetic oligonucleotide
  Target: ATXN2; (+) strand; PAM type: NRG; PAM sequence: TGG
ggtctcactcactgtcaagt

SEQ ID NO: 36315 - DNA, 20 bp, Artificial Sequence
  Description of Artificial Sequence: Synthetic oligonucleotide
  Target: ATXN2; (+) strand; PAM type: NRG; PAM sequence: AAG
tcactcactgtcaagttgga

SEQ ID NO: 36316 - DNA, 20 bp, Artificial Sequence
  Description of Artificial Sequence: Synthetic oligonucleotide
  Target: ATXN2; (+) strand; PAM type: NRG; PAM sequence: AGG
cactcactgtcaagttggaa

SEQ ID NO: 36317 - DNA, 20 bp, Artificial Sequence
  Description of Artificial Sequence: Synthetic oligonucleotide
  Target: ATXN2; (+) strand; PAM type: NRG; PAM sequence: TAG
tcaagttggaaaggtgattt

SEQ ID NO: 36318 - DNA, 20 bp, Artificial Sequence
  Description of Artificial Sequence: Synthetic oligonucleotide
  Target: ATXN2; (+) strand; PAM type: NRG; PAM sequence: CAG
gttggaaaggtgattttagt

SEQ ID NO: 36319 - DNA, 20 bp, Artificial Sequence
  Description of Artificial Sequence: Synthetic oligonucleotide
  Target: ATXN2; (+) strand; PAM type: NRG; PAM sequence: CAG
gtgattttagtcagcccaaa

SEQ ID NO: 36320 - DNA, 20 bp, Artificial Sequence
  Description of Artificial Sequence: Synthetic oligonucleotide
  Target: ATXN2; (+) strand; PAM type: NRG; PAM sequence: TGG
ttttagtcagcccaaacagc

SEQ ID NO: 36321 - DNA, 20 bp, Artificial Sequence
  Description of Artificial Sequence: Synthetic oligonucleotide
  Target: ATXN2; (+) strand; PAM type: NRG; PAM sequence: CAG
cagcccaaacagctggattc

SEQ ID NO: 36322 - DNA, 20 bp, Artificial Sequence
  Description of Artificial Sequence: Synthetic oligonucleotide
  Target: ATXN2; (+) strand; PAM type: NRG; PAM sequence: CAG
acagctggattccagctctg

SEQ ID NO: 36323 - DNA, 20 bp, Artificial Sequence
  Description of Artificial Sequence: Synthetic oligonucleotide
  Target: ATXN2; (+) strand; PAM type: NRG; PAM sequence: AGG
cagctggattccagctctgc

SEQ ID NO: 36324 - DNA, 20 bp, Artificial Sequence
  Description of Artificial Sequence: Synthetic oligonucleotide
  Target: ATXN2; (+) strand; PAM type: NRG; PAM sequence: GGG
agctggattccagctctgca

SEQ ID NO: 36325 - DNA, 20 bp, Artificial Sequence
  Description of Artificial Sequence: Synthetic oligonucleotide
  Target: ATXN2; (+) strand; PAM type: NRG; PAM sequence: GGG
gctggattccagctctgcag

SEQ ID NO: 36326 - DNA, 20 bp, Artificial Sequence
  Description of Artificial Sequence: Synthetic oligonucleotide
  Target: ATXN2; (+) strand; PAM type: NRG; PAM sequence: GGG
ctggattccagctctgcagg

SEQ ID NO: 36327 - DNA, 20 bp, Artificial Sequence
  Description of Artificial Sequence: Synthetic oligonucleotide
  Target: ATXN2; (+) strand; PAM type: NRG; PAM sequence: TGG
attccagctctgcagggggt

SEQ ID NO: 36328 - DNA, 20 bp, Artificial Sequence
  Description of Artificial Sequence: Synthetic oligonucleotide
  Target: ATXN2; (+) strand; PAM type: NRG; PAM sequence: CAG
ccagctctgcagggggttgg

SEQ ID NO: 36329 - DNA, 20 bp, Artificial Sequence
  Description of Artificial Sequence: Synthetic oligonucleotide
  Target: ATXN2; (+) strand; PAM type: NRG; PAM sequence: AGG
cagctctgcagggggttggc

SEQ ID NO: 36330 - DNA, 20 bp, Artificial Sequence
  Description of Artificial Sequence: Synthetic oligonucleotide
  Target: ATXN2; (+) strand; PAM type: NRG; PAM sequence: GGG
agctctgcagggggttggca

SEQ ID NO: 36331 - DNA, 20 bp, Artificial Sequence
  Description of Artificial Sequence: Synthetic oligonucleotide
  Target: ATXN2; (+) strand; PAM type: NRG; PAM sequence: CAG
ctgcagggggttggcagggc

SEQ ID NO: 36332 - DNA, 20 bp, Artificial Sequence
  Description of Artificial Sequence: Synthetic oligonucleotide
  Target: ATXN2; (+) strand; PAM type: NRG; PAM sequence: AGG
tgcagggggttggcagggcc

SEQ ID NO: 36333 - DNA, 20 bp, Artificial Sequence
  Description of Artificial Sequence: Synthetic oligonucleotide
  Target: ATXN2; (+) strand; PAM type: NRG; PAM sequence: AAG
agggggttggcagggccagg

SEQ ID NO: 36334 - DNA, 20 bp, Artificial Sequence
  Description of Artificial Sequence: Synthetic oligonucleotide
  Target: ATXN2; (+) strand; PAM type: NRG; PAM sequence: GAG
ggggttggcagggccaggaa

SEQ ID NO: 36335 - DNA, 20 bp, Artificial Sequence
  Description of Artificial Sequence: Synthetic oligonucleotide
  Target: ATXN2; (+) strand; PAM type: NRG; PAM sequence: TAG
tcccacactgtgcactgttc

SEQ ID NO: 36336 - DNA, 20 bp, Artificial Sequence
  Description of Artificial Sequence: Synthetic oligonucleotide
  Target: ATXN2; (+) strand; PAM type: NRG; PAM sequence: AAG
gcactgttctagactacgat

SEQ ID NO: 36337 - DNA, 20 bp, Artificial Sequence
  Description of Artificial Sequence: Synthetic oligonucleotide
  Target: ATXN2; (+) strand; PAM type: NRG; PAM sequence: TGG
ttctagactacgataagcct

SEQ ID NO: 36338 - DNA, 20 bp, Artificial Sequence
  Description of Artificial Sequence: Synthetic oligonucleotide
  Target: ATXN2; (+) strand; PAM type: NRG; PAM sequence: CGG
tttactctcacatattcaaa

SEQ ID NO: 36339 - DNA, 20 bp, Artificial Sequence
  Description of Artificial Sequence: Synthetic oligonucleotide
  Target: ATXN2; (+) strand; PAM type: NRG; PAM sequence: GGG
ttactctcacatattcaaac

SEQ ID NO: 36340 - DNA, 20 bp, Artificial Sequence
  Description of Artificial Sequence: Synthetic oligonucleotide
  Target: ATXN2; (+) strand; PAM type: NRG; PAM sequence: TGG
cacatattcaaacgggcaca

SEQ ID NO: 36341 - DNA, 20 bp, Artificial Sequence
  Description of Artificial Sequence: Synthetic oligonucleotide
  Target: ATXN2; (+) strand; PAM type: NRG; PAM sequence: GAG
aacgggcacatggcaaattt

SEQ ID NO: 36342 - DNA, 20 bp, Artificial Sequence
  Description of Artificial Sequence: Synthetic oligonucleotide
  Target: ATXN2; (+) strand; PAM type: NRG; PAM sequence: CAG
tgttaacctttttgcccttt

SEQ ID NO: 36343 - DNA, 20 bp, Artificial Sequence
  Description of Artificial Sequence: Synthetic oligonucleotide
  Target: ATXN2; (+) strand; PAM type: NRG; PAM sequence: CAG
ttgccctttcagcacaaaaa

SEQ ID NO: 36344 - DNA, 20 bp, Artificial Sequence
  Description of Artificial Sequence: Synthetic oligonucleotide
  Target: ATXN2; (+) strand; PAM type: NRG; PAM sequence: GAG
gccctttcagcacaaaaaca

SEQ ID NO: 36345 - DNA, 20 bp, Artificial Sequence
  Description of Artificial Sequence: Synthetic oligonucleotide
  Target: ATXN2; (+) strand; PAM type: NRG; PAM sequence: GAG
tttcagcacaaaaacagagt

SEQ ID NO: 36346 - DNA, 20 bp, Artificial Sequence
  Description of Artificial Sequence: Synthetic oligonucleotide
  Target: ATXN2; (+) strand; PAM type: NRG; PAM sequence: AGG
ttcagcacaaaaacagagtg

SEQ ID NO: 36347 - DNA, 20 bp, Artificial Sequence
  Description of Artificial Sequence: Synthetic oligonucleotide
  Target: ATXN2; (+) strand; PAM type: NRG; PAM sequence: TAG
acaaaaacagagtgaggttt

SEQ ID NO: 36348 - DNA, 20 bp, Artificial Sequence
  Description of Artificial Sequence: Synthetic oligonucleotide
  Target: ATXN2; (+) strand; PAM type: NRG; PAM sequence: AGG
caaaaacagagtgaggtttt

SEQ ID NO: 36349 - DNA, 20 bp, Artificial Sequence
  Description of Artificial Sequence: Synthetic oligonucleotide
  Target: ATXN2; (+) strand; PAM type: NRG; PAM sequence: GGG
aaaaacagagtgaggtttta

SEQ ID NO: 36350 - DNA, 20 bp, Artificial Sequence
  Description of Artificial Sequence: Synthetic oligonucleotide
  Target: ATXN2; (+) strand; PAM type: NRG; PAM sequence: AAG
gggatccctgacttacatgt

SEQ ID NO: 36351 - DNA, 20 bp, Artificial Sequence
  Description of Artificial Sequence: Synthetic oligonucleotide
  Target: ATXN2; (+) strand; PAM type: NRG; PAM sequence: TAG
tgtaagttcacatgcctact

SEQ ID NO: 36352 - DNA, 20 bp, Artificial Sequence
  Description of Artificial Sequence: Synthetic oligonucleotide
  Target: ATXN2; (+) strand; PAM type: NRG; PAM sequence: CAG
tcacatgcctacttagccac

SEQ ID NO: 36353 - DNA, 20 bp, Artificial Sequence
  Description of Artificial Sequence: Synthetic oligonucleotide
  Target: ATXN2; (+) strand; PAM type: NRG; PAM sequence: TGG
cctacttagccaccagcctc

SEQ ID NO: 36354 - DNA, 20 bp, Artificial Sequence
  Description of Artificial Sequence: Synthetic oligonucleotide
  Target: ATXN2; (+) strand; PAM type: NRG; PAM sequence: TAG
acttagccaccagcctctgg

SEQ ID NO: 36355 - DNA, 20 bp, Artificial Sequence
  Description of Artificial Sequence: Synthetic oligonucleotide
  Target: ATXN2; (+) strand; PAM type: NRG; PAM sequence: CAG
cagcctctggtagacaccta

SEQ ID NO: 36356 - DNA, 20 bp, Artificial Sequence
  Description of Artificial Sequence: Synthetic oligonucleotide
  Target: ATXN2; (+) strand; PAM type: NRG; PAM sequence: AGG
agcctctggtagacacctac

SEQ ID NO: 36357 - DNA, 20 bp, Artificial Sequence
  Description of Artificial Sequence: Synthetic oligonucleotide
  Target: ATXN2; (+) strand; PAM type: NRG; PAM sequence: CAG
ggtagacacctacaggaccc

SEQ ID NO: 36358 - DNA, 20 bp, Artificial Sequence
  Description of Artificial Sequence: Synthetic oligonucleotide
  Target: ATXN2; (+) strand; PAM type: NRG; PAM sequence: AAG
acaggaccccagctcttatg

SEQ ID NO: 36359 - DNA, 20 bp, Artificial Sequence
  Description of Artificial Sequence: Synthetic oligonucleotide
  Target: ATXN2; (+) strand; PAM type: NRG; PAM sequence: TGG
ctgactccaccaaaccacgc

SEQ ID NO: 36360 - DNA, 20 bp, Artificial Sequence
  Description of Artificial Sequence: Synthetic oligonucleotide
  Target: ATXN2; (+) strand; PAM type: NRG; PAM sequence: CGG
ccaaaccacgctggcccaca

SEQ ID NO: 36361 - DNA, 20 bp, Artificial Sequence
  Description of Artificial Sequence: Synthetic oligonucleotide
  Target: ATXN2; (+) strand; PAM type: NRG; PAM sequence: CGG
ctggcccacacggaccaaac

SEQ ID NO: 36362 - DNA, 20 bp, Artificial Sequence
  Description of Artificial Sequence: Synthetic oligonucleotide
  Target: ATXN2; (+) strand; PAM type: NRG; PAM sequence: AAG
cttccctccccactatcaaa

SEQ ID NO: 36363 - DNA, 20 bp, Artificial Sequence
  Description of Artificial Sequence: Synthetic oligonucleotide
  Target: ATXN2; (+) strand; PAM type: NRG; PAM sequence: CAG
atcaaaaagcaaatcaactg

SEQ ID NO: 36364 - DNA, 20 bp, Artificial Sequence
  Description of Artificial Sequence: Synthetic oligonucleotide
  Target: ATXN2; (+) strand; PAM type: NRG; PAM sequence: CAG
aactgcagtgcgctacacca

SEQ ID NO: 36365 - DNA, 20 bp, Artificial Sequence
  Description of Artificial Sequence: Synthetic oligonucleotide
  Target: ATXN2; (+) strand; PAM type: NRG; PAM sequence: CAG
accacagaacctaaactttg

SEQ ID NO: 36366 - DNA, 20 bp, Artificial Sequence
  Description of Artificial Sequence: Synthetic oligonucleotide
  Target: ATXN2; (+) strand; PAM type: NRG; PAM sequence: AGG
ccacagaacctaaactttgc

SEQ ID NO: 36367 - DNA, 20 bp, Artificial Sequence
  Description of Artificial Sequence: Synthetic oligonucleotide
  Target: ATXN2; (+) strand; PAM type: NRG; PAM sequence: GGG
cacagaacctaaactttgca

SEQ ID NO: 36368 - DNA, 20 bp, Artificial Sequence
  Description of Artificial Sequence: Synthetic oligonucleotide
  Target: ATXN2; (+) strand; PAM type: NRG; PAM sequence: GAG
gaacctaaactttgcagggt

SEQ ID NO: 36369 - DNA, 20 bp, Artificial Sequence
  Description of Artificial Sequence: Synthetic oligonucleotide
  Target: ATXN2; (+) strand; PAM type: NRG; PAM sequence: AGG
aacctaaactttgcagggtg

SEQ ID NO: 36370 - DNA, 20 bp, Artificial Sequence
  Description of Artificial Sequence: Synthetic oligonucleotide
  Target: ATXN2; (+) strand; PAM type: NRG; PAM sequence: CAG
gtgaggacgcccaaacttcc

SEQ ID NO: 36371 - DNA, 20 bp, Artificial Sequence
  Description of Artificial Sequence: Synthetic oligonucleotide
  Target: ATXN2; (+) strand; PAM type: NRG; PAM sequence: GAG
gaggacgcccaaacttccca

SEQ ID NO: 36372 - DNA, 20 bp, Artificial Sequence
  Description of Artificial Sequence: Synthetic oligonucleotide
  Target: ATXN2; (+) strand; PAM type: NRG; PAM sequence: TGG
gcccaaacttcccagagctg

SEQ ID NO: 36373 - DNA, 20 bp, Artificial Sequence
  Description of Artificial Sequence: Synthetic oligonucleotide
  Target: ATXN2; (+) strand; PAM type: NRG; PAM sequence: AAG
agctgtggaactctacttac

SEQ ID NO: 36374 - DNA, 20 bp, Artificial Sequence
  Description of Artificial Sequence: Synthetic oligonucleotide
  Target: ATXN2; (+) strand; PAM type: NRG; PAM sequence: AGG
gctgtggaactctacttaca

SEQ ID NO: 36375 - DNA, 20 bp, Artificial Sequence
  Description of Artificial Sequence: Synthetic oligonucleotide
  Target: ATXN2; (+) strand; PAM type: NRG; PAM sequence: TAG
gtggaactctacttacaagg

SEQ ID NO: 36376 - DNA, 20 bp, Artificial Sequence
  Description of Artificial Sequence: Synthetic oligonucleotide
  Target: ATXN2; (+) strand; PAM type: NRG; PAM sequence: GAG
tacttacaaggtagccttct

SEQ ID NO: 36377 - DNA, 20 bp, Artificial Sequence
  Description of Artificial Sequence: Synthetic oligonucleotide
  Target: ATXN2; (+) strand; PAM type: NRG; PAM sequence: GAG
cttacaaggtagccttctga

SEQ ID NO: 36378 - DNA, 20 bp, Artificial Sequence
  Description of Artificial Sequence: Synthetic oligonucleotide
  Target: ATXN2; (+) strand; PAM type: NRG; PAM sequence: TAG
caaggtagccttctgagaga

SEQ ID NO: 36379 - DNA, 20 bp, Artificial Sequence
  Description of Artificial Sequence: Synthetic oligonucleotide
  Target: ATXN2; (+) strand; PAM type: NRG; PAM sequence: GAG
tctgagagatagatccaact

SEQ ID NO: 36380 - DNA, 20 bp, Artificial Sequence
  Description of Artificial Sequence: Synthetic oligonucleotide
  Target: ATXN2; (+) strand; PAM type: NRG; PAM sequence: TAG
atccaactgagtcgcatctc

SEQ ID NO: 36381 - DNA, 20 bp, Artificial Sequence
  Description of Artificial Sequence: Synthetic oligonucleotide
  Target: ATXN2; (+) strand; PAM type: NRG; PAM sequence: CAG
atctctagcccacaccttgc

SEQ ID NO: 36382 - DNA, 20 bp, Artificial Sequence
  Description of Artificial Sequence: Synthetic oligonucleotide
  Target: ATXN2; (+) strand; PAM type: NRG; PAM sequence: GAG
ctctagcccacaccttgcca

SEQ ID NO: 36383 - DNA, 20 bp, Artificial Sequence
  Description of Artificial Sequence: Synthetic oligonucleotide
  Target: ATXN2; (+) strand; PAM type: NRG; PAM sequence: TGG
acaccttgccagagcctcac

SEQ ID NO: 36384 - DNA, 20 bp, Artificial Sequence
  Description of Artificial Sequence: Synthetic oligonucleotide
  Target: ATXN2; (+) strand; PAM type: NRG; PAM sequence: CAG
ctcactggcgcactatttaa

SEQ ID NO: 36385 - DNA, 20 bp, Artificial Sequence
  Description of Artificial Sequence: Synthetic oligonucleotide
  Target: ATXN2; (+) strand; PAM type: NRG; PAM sequence: AGG
tcactggcgcactatttaac

SEQ ID NO: 36386 - DNA, 20 bp, Artificial Sequence
  Description of Artificial Sequence: Synthetic oligonucleotide
  Target: ATXN2; (+) strand; PAM type: NRG; PAM sequence: TGG
gcgcactatttaacaggaaa

SEQ ID NO: 36387 - DNA, 20 bp, Artificial Sequence
  Description of Artificial Sequence: Synthetic oligonucleotide
  Target: ATXN2; (+) strand; PAM type: NRG; PAM sequence: TGG
acaggaaatggaattcattg

SEQ ID NO: 36388 - DNA, 20 bp, Artificial Sequence
  Description of Artificial Sequence: Synthetic oligonucleotide
  Target: ATXN2; (+) strand; PAM type: NRG; PAM sequence: CAG
ggaaatggaattcattgtgg

SEQ ID NO: 36389 - DNA, 20 bp, Artificial Sequence
  Description of Artificial Sequence: Synthetic oligonucleotide
  Target: ATXN2; (+) strand; PAM type: NRG; PAM sequence: AGG
gaaatggaattcattgtggc

SEQ ID NO: 36390 - DNA, 20 bp, Artificial Sequence
  Description of Artificial Sequence: Synthetic oligonucleotide
  Target: ATXN2; (+) strand; PAM type: NRG; PAM sequence: TAG
tcattgtggcaggtctcact

SEQ ID NO: 36391 - DNA, 20 bp, Artificial Sequence
  Description of Artificial Sequence: Synthetic oligonucleotide
  Target: ATXN2; (+) strand; PAM type: NRG; PAM sequence: CAG
ggtctcacttagacccgcct

SEQ ID NO: 36392 - DNA, 20 bp, Artificial Sequence
  Description of Artificial Sequence: Synthetic oligonucleotide
  Target: ATXN2; (+) strand; PAM type: NRG; PAM sequence: GAG
tctcacttagacccgcctca

SEQ ID NO: 36393 - DNA, 20 bp, Artificial Sequence
  Description of Artificial Sequence: Synthetic oligonucleotide
  Target: ATXN2; (+) strand; PAM type: NRG; PAM sequence: GAG
tcacttagacccgcctcaga

SEQ ID NO: 36394 - DNA, 20 bp, Artificial Sequence
  Description of Artificial Sequence: Synthetic oligonucleotide
  Target: ATXN2; (+) strand; PAM type: NRG; PAM sequence: AAG
ctcagagagttctgttatga

SEQ ID NO: 36395 - DNA, 20 bp, Artificial Sequence
  Description of Artificial Sequence: Synthetic oligonucleotide
  Target: ATXN2; (+) strand; PAM type: NRG; PAM sequence: TAG
agagagttctgttatgaaag

SEQ ID NO: 36396 - DNA, 20 bp, Artificial Sequence
  Description of Artificial Sequence: Synthetic oligonucleotide
  Target: ATXN2; (+) strand; PAM type: NRG; PAM sequence: CAG
gagttctgttatgaaagtag

SEQ ID NO: 36397 - DNA, 20 bp, Artificial Sequence
  Description of Artificial Sequence: Synthetic oligonucleotide
  Target: ATXN2; (+) strand; PAM type: NRG; PAM sequence: GAG
gttctgttatgaaagtagca

SEQ ID NO: 36398 - DNA, 20 bp, Artificial Sequence
  Description of Artificial Sequence: Synthetic oligonucleotide
  Target: ATXN2; (+) strand; PAM type: NRG; PAM sequence: CAG
agtagcagagacatctaata

SEQ ID NO: 36399 - DNA, 20 bp, Artificial Sequence
  Description of Artificial Sequence: Synthetic oligonucleotide
  Target: ATXN2; (+) strand; PAM type: NRG; PAM sequence: CAG
tacagccaattcacccgtaa

SEQ ID NO: 36400 - DNA, 20 bp, Artificial Sequence
  Description of Artificial Sequence: Synthetic oligonucleotide
  Target: ATXN2; (+) strand; PAM type: NRG; PAM sequence: CAG
caattcacccgtaacagccc

SEQ ID NO: 36401 - DNA, 20 bp, Artificial Sequence
  Description of Artificial Sequence: Synthetic oligonucleotide
  Target: ATXN2; (+) strand; PAM type: NRG; PAM sequence: AGG
aattcacccgtaacagcccc

SEQ ID NO: 36402 - DNA, 20 bp, Artificial Sequence
  Description of Artificial Sequence: Synthetic oligonucleotide
  Target: ATXN2; (+) strand; PAM type: NRG; PAM sequence: GGG
attcacccgtaacagcccca

SEQ ID NO: 36403 - DNA, 20 bp, Artificial Sequence
  Description of Artificial Sequence: Synthetic oligonucleotide
  Target: ATXN2; (+) strand; PAM type: NRG; PAM sequence: GAG
tcacccgtaacagccccagg

SEQ ID NO: 36404 - DNA, 20 bp, Artificial Sequence
  Description of Artificial Sequence: Synthetic oligonucleotide
  Target: ATXN2; (+) strand; PAM type: NRG; PAM sequence: AGG
cacccgtaacagccccaggg

SEQ ID NO: 36405 - DNA, 20 bp, Artificial Sequence
  Description of Artificial Sequence: Synthetic oligonucleotide
  Target: ATXN2; (+) strand; PAM type: NRG; PAM sequence: GGG
acccgtaacagccccaggga

SEQ ID NO: 36406 - DNA, 20 bp, Artificial Sequence
  Description of Artificial Sequence: Synthetic oligonucleotide
  Target: ATXN2; (+) strand; PAM type: NRG; PAM sequence: AAG
acagccccagggagggcctc

SEQ ID NO: 36407 - DNA, 20 bp, Artificial Sequence
  Description of Artificial Sequence: Synthetic oligonucleotide
  Target: ATXN2; (+) strand; PAM type: NRG; PAM sequence: AGG
cagccccagggagggcctca

SEQ ID NO: 36408 - DNA, 20 bp, Artificial Sequence
  Description of Artificial Sequence: Synthetic oligonucleotide
  Target: ATXN2; (+) strand; PAM type: NRG; PAM sequence: CAG
cccagggagggcctcaaggc

SEQ ID NO: 36409 - DNA, 20 bp, Artificial Sequence
  Description of Artificial Sequence: Synthetic oligonucleotide
  Target: ATXN2; (+) strand; PAM type: NRG; PAM sequence: TAG
gagggcctcaaggccagcgt

SEQ ID NO: 36410 - DNA, 20 bp, Artificial Sequence
  Description of Artificial Sequence: Synthetic oligonucleotide
  Target: ATXN2; (+) strand; PAM type: NRG; PAM sequence: GAG
gggcctcaaggccagcgtta

SEQ ID NO: 36411 - DNA, 20 bp, Artificial Sequence
  Description of Artificial Sequence: Synthetic oligonucleotide
  Target: ATXN2; (+) strand; PAM type: NRG; PAM sequence: CAG
ccagcgttagagcccaactt

SEQ ID NO: 36412 - DNA, 20 bp, Artificial Sequence
  Description of Artificial Sequence: Synthetic oligonucleotide
  Target: ATXN2; (+) strand; PAM type: NRG; PAM sequence: CAG
gttagagcccaacttcagtg

SEQ ID NO: 36413 - DNA, 20 bp, Artificial Sequence
  Description of Artificial Sequence: Synthetic oligonucleotide
  Target: ATXN2; (+) strand; PAM type: NRG; PAM sequence: AAG
tgcagctccttctcctcatt

SEQ ID NO: 36414 - DNA, 20 bp, Artificial Sequence
  Description of Artificial Sequence: Synthetic oligonucleotide
  Target: ATXN2; (+) strand; PAM type: NRG; PAM sequence: TGG
tcctcattaagacaatcccc

SEQ ID NO: 36415 - DNA, 20 bp, Artificial Sequence
  Description of Artificial Sequence: Synthetic oligonucleotide
  Target: ATXN2; (+) strand; PAM type: NRG; PAM sequence: GGG
cctcattaagacaatcccct

SEQ ID NO: 36416 - DNA, 20 bp, Artificial Sequence
  Description of Artificial Sequence: Synthetic oligonucleotide
  Target: ATXN2; (+) strand; PAM type: NRG; PAM sequence: TGG
taagacaatcccctgggccc

SEQ ID NO: 36417 - DNA, 20 bp, Artificial Sequence
  Description of Artificial Sequence: Synthetic oligonucleotide
  Target: ATXN2; (+) strand; PAM type: NRG; PAM sequence: GAG
agacaatcccctgggccctg

SEQ ID NO: 36418 - DNA, 20 bp, Artificial Sequence
  Description of Artificial Sequence: Synthetic oligonucleotide
  Target: ATXN2; (+) strand; PAM type: NRG; PAM sequence: CAG
atcccctgggccctggagtg

SEQ ID NO: 36419 - DNA, 20 bp, Artificial Sequence
  Description of Artificial Sequence: Synthetic oligonucleotide
  Target: ATXN2; (+) strand; PAM type: NRG; PAM sequence: AGG
tcccctgggccctggagtgc

SEQ ID NO: 36420 - DNA, 20 bp, Artificial Sequence
  Description of Artificial Sequence: Synthetic oligonucleotide
  Target: ATXN2; (+) strand; PAM type: NRG; PAM sequence: GGG
cccctgggccctggagtgca

SEQ ID NO: 36421 - DNA, 20 bp, Artificial Sequence
  Description of Artificial Sequence: Synthetic oligonucleotide
  Target: ATXN2; (+) strand; PAM type: NRG; PAM sequence: CAG
tggagtgcagggacctttgt

SEQ ID NO: 36422 - DNA, 20 bp, Artificial Sequence
  Description of Artificial Sequence: Synthetic oligonucleotide
  Target: ATXN2; (+) strand; PAM type: NRG; PAM sequence: CAG
agtgcagggacctttgtcag

SEQ ID NO: 36423 - DNA, 20 bp, Artificial Sequence
  Description of Artificial Sequence: Synthetic oligonucleotide
  Target: ATXN2; (+) strand; PAM type: NRG; PAM sequence: CAG
acctttgtcagcagctgatg

SEQ ID NO: 36424 - DNA, 20 bp, Artificial Sequence
  Description of Artificial Sequence: Synthetic oligonucleotide
  Target: ATXN2; (+) strand; PAM type: NRG; PAM sequence: CAG
ttgtcagcagctgatgcaga

SEQ ID NO: 36425 - DNA, 20 bp, Artificial Sequence
  Description of Artificial Sequence: Synthetic oligonucleotide
  Target: ATXN2; (+) strand; PAM type: NRG; PAM sequence: GAG
tgatgcagacagcaaccact

SEQ ID NO: 36426 - DNA, 20 bp, Artificial Sequence
  Description of Artificial Sequence: Synthetic oligonucleotide
  Target: ATXN2; (+) strand; PAM type: NRG; PAM sequence: TGG
gcagacagcaaccactgaga

SEQ ID NO: 36427 - DNA, 20 bp, Artificial Sequence
  Description of Artificial Sequence: Synthetic oligonucleotide
  Target: ATXN2; (+) strand; PAM type: NRG; PAM sequence: AAG
acagcaaccactgagatggc

SEQ ID NO: 36428 - DNA, 20 bp, Artificial Sequence
  Description of Artificial Sequence: Synthetic oligonucleotide
  Target: ATXN2; (+) strand; PAM type: NRG; PAM sequence: TAG
gcaagcacacctttcacctg

SEQ ID NO: 36429 - DNA, 20 bp, Artificial Sequence
  Description of Artificial Sequence: Synthetic oligonucleotide
  Target: ATXN2; (+) strand; PAM type: NRG; PAM sequence: CAG
agcacacctttcacctgtag

SEQ ID NO: 36430 - DNA, 20 bp, Artificial Sequence
  Description of Artificial Sequence: Synthetic oligonucleotide
  Target: ATXN2; (+) strand; PAM type: NRG; PAM sequence: TGG
tcacctgtagcagcttacac

SEQ ID NO: 36431 - DNA, 20 bp, Artificial Sequence
  Description of Artificial Sequence: Synthetic oligonucleotide
  Target: ATXN2; (+) strand; PAM type: NRG; PAM sequence: GAG
acctgtagcagcttacactg

SEQ ID NO: 36432 - DNA, 20 bp, Artificial Sequence
  Description of Artificial Sequence: Synthetic oligonucleotide
  Target: ATXN2; (+) strand; PAM type: NRG; PAM sequence: AGG
cctgtagcagcttacactgg

SEQ ID NO: 36433 - DNA, 20 bp, Artificial Sequence
  Description of Artificial Sequence: Synthetic oligonucleotide
  Target: ATXN2; (+) strand; PAM type: NRG; PAM sequence: GAG
tagcagcttacactggaggt

SEQ ID NO: 36434 - DNA, 20 bp, Artificial Sequence
  Description of Artificial Sequence: Synthetic oligonucleotide
  Target: ATXN2; (+) strand; PAM type: NRG; PAM sequence: AAG
tacactggaggtgagctcca

SEQ ID NO: 36435 - DNA, 20 bp, Artificial Sequence
  Description of Artificial Sequence: Synthetic oligonucleotide
  Target: ATXN2; (+) strand; PAM type: NRG; PAM sequence: CAG
ggtgagctccaaagtgcttc

SEQ ID NO: 36436 - DNA, 20 bp, Artificial Sequence
  Description of Artificial Sequence: Synthetic oligonucleotide
  Target: ATXN2; (+) strand; PAM type: NRG; PAM sequence: AGG
gtgagctccaaagtgcttcc

SEQ ID NO: 36437 - DNA, 20 bp, Artificial Sequence
  Description of Artificial Sequence: Synthetic oligonucleotide
  Target: ATXN2; (+) strand; PAM type: NRG; PAM sequence: GGG
tgagctccaaagtgcttcca

SEQ ID NO: 36438 - DNA, 20 bp, Artificial Sequence
  Description of Artificial Sequence: Synthetic oligonucleotide
  Target: ATXN2; (+) strand; PAM type: NRG; PAM sequence: AAG
tgcttccagggctgctctta

SEQ ID NO: 36439 - DNA, 20 bp, Artificial Sequence
  Description of Artificial Sequence: Synthetic oligonucleotide
  Target: ATXN2; (+) strand; PAM type: NRG; PAM sequence: TGG
gggctgctcttaaagaaaaa

SEQ ID NO: 36440 - DNA, 20 bp, Artificial Sequence
  Description of Artificial Sequence: Synthetic oligonucleotide
  Target: ATXN2; (+) strand; PAM type: NRG; PAM sequence: GGG
ggctgctcttaaagaaaaat

SEQ ID NO: 36441 - DNA, 20 bp, Artificial Sequence
  Description of Artificial Sequence: Synthetic oligonucleotide
  Target: ATXN2; (+) strand; PAM type: NRG; PAM sequence: TGG
taaagaaaaatgggaccacc

SEQ ID NO: 36442 - DNA, 20 bp, Artificial Sequence
  Description of Artificial Sequence: Synthetic oligonucleotide
  Target: ATXN2; (+) strand; PAM type: NRG; PAM sequence: GGG
aaagaaaaatgggaccacct

SEQ ID NO: 36443 - DNA, 20 bp, Artificial Sequence
  Description of Artificial Sequence: Synthetic oligonucleotide
  Target: ATXN2; (+) strand; PAM type: NRG; PAM sequence: CAG
tgggaccacctgggtgcttc

SEQ ID NO: 36444 - DNA, 20 bp, Artificial Sequence
  Description of Artificial Sequence: Synthetic oligonucleotide
  Target: ATXN2; (+) strand; PAM type: NRG; PAM sequence: TAG
acctgggtgcttccagcttc

SEQ ID NO: 36445 - DNA, 20 bp, Artificial Sequence
  Description of Artificial Sequence: Synthetic oligonucleotide
  Target: ATXN2; (+) strand; PAM type: NRG; PAM sequence: AAG
gttacactgcaccaatgtcc

SEQ ID NO: 36446 - DNA, 20 bp, Artificial Sequence
  Description of Artificial Sequence: Synthetic oligonucleotide
  Target: ATXN2; (+) strand; PAM type: NRG; PAM sequence: AGG
ttacactgcaccaatgtcca

SEQ ID NO: 36447 - DNA, 20 bp, Artificial Sequence
  Description of Artificial Sequence: Synthetic oligonucleotide
  Target: ATXN2; (+) strand; PAM type: NRG; PAM sequence: AAG
ctgcaccaatgtccaaggcc

SEQ ID NO: 36448 - DNA, 20 bp, Artificial Sequence
  Description of Artificial Sequence: Synthetic oligonucleotide
  Target: ATXN2; (+) strand; PAM type: NRG; PAM sequence: AAG
gtccaaggccaagccctctc

SEQ ID NO: 36449 - DNA, 20 bp, Artificial Sequence
  Description of Artificial Sequence: Synthetic oligonucleotide
  Target: ATXN2; (+) strand; PAM type: NRG; PAM sequence: GAG
ccaaggccaagccctctcaa

SEQ ID NO: 36450 - DNA, 20 bp, Artificial Sequence
  Description of Artificial Sequence: Synthetic oligonucleotide
  Target: ATXN2; (+) strand; PAM type: NRG; PAM sequence: TGG
cctctcaagagtacaactta

SEQ ID NO: 36451 - DNA, 20 bp, Artificial Sequence
  Description of Artificial Sequence: Synthetic oligonucleotide
  Target: ATXN2; (+) strand; PAM type: NRG; PAM sequence: AAG
aagagtacaacttatggtca

SEQ ID NO: 36452 - DNA, 20 bp, Artificial Sequence
  Description of Artificial Sequence: Synthetic oligonucleotide
  Target: ATXN2; (+) strand; PAM type: NRG; PAM sequence: CAG
agtacaacttatggtcaaag

SEQ ID NO: 36453 - DNA, 20 bp, Artificial Sequence
  Description of Artificial Sequence: Synthetic oligonucleotide
  Target: ATXN2; (+) strand; PAM type: NRG; PAM sequence: TGG
ttatggtcaaagcagatata

SEQ ID NO: 36454 - DNA, 20 bp, Artificial Sequence
  Description of Artificial Sequence: Synthetic oligonucleotide
  Target: ATXN2; (+) strand; PAM type: NRG; PAM sequence: CAG
aaagcagatatatggataac

SEQ ID NO: 36455 - DNA, 20 bp, Artificial Sequence
  Description of Artificial Sequence: Synthetic oligonucleotide
  Target: ATXN2; (+) strand; PAM type: NRG; PAM sequence: AGG
aagcagatatatggataacc

SEQ ID NO: 36456 - DNA, 20 bp, Artificial Sequence
  Description of Artificial Sequence: Synthetic oligonucleotide
  Target: ATXN2; (+) strand; PAM type: NRG; PAM sequence: GGG
agcagatatatggataacca

SEQ ID NO: 36457 - DNA, 20 bp, Artificial Sequence
  Description of Artificial Sequence: Synthetic oligonucleotide
  Target: ATXN2; (+) strand; PAM type: NRG; PAM sequence: TGG
ggataaccagggaaaacaat

SEQ ID NO: 36458 - DNA, 20 bp, Artificial Sequence
  Description of Artificial Sequence: Synthetic oligonucleotide
  Target: ATXN2; (+) strand; PAM type: NRG; PAM sequence: GAG
ataaccagggaaaacaattg

SEQ ID NO: 36459 - DNA, 20 bp, Artificial Sequence
  Description of Artificial Sequence: Synthetic oligonucleotide
  Target: ATXN2; (+) strand; PAM type: NRG; PAM sequence: GAG
aaccagggaaaacaattgga

SEQ ID NO: 36460 - DNA, 20 bp, Artificial Sequence
  Description of Artificial Sequence: Synthetic oligonucleotide
  Target: ATXN2; (+) strand; PAM type: NRG; PAM sequence: TGG
aacaattggagagatgtgtc

SEQ ID NO: 36461 - DNA, 20 bp, Artificial Sequence
  Description of Artificial Sequence: Synthetic oligonucleotide
  Target: ATXN2; (+) strand; PAM type: NRG; PAM sequence: GAG
gatgtgtctggaactcatgt

SEQ ID NO: 36462 - DNA, 20 bp, Artificial Sequence
  Description of Artificial Sequence: Synthetic oligonucleotide
  Target: ATXN2; (+) strand; PAM type: NRG; PAM sequence: AAG
aactcatgtgagtaacaatc

SEQ ID NO: 36463 - DNA, 20 bp, Artificial Sequence
  Description of Artificial Sequence: Synthetic oligonucleotide
  Target: ATXN2; (+) strand; PAM type: NRG; PAM sequence: CAG
gtgagtaacaatcaagttga

SEQ ID NO: 36464 - DNA, 20 bp, Artificial Sequence
  Description of Artificial Sequence: Synthetic oligonucleotide
  Target: ATXN2; (+) strand; PAM type: NRG; PAM sequence: AGG
tgagtaacaatcaagttgac

SEQ ID NO: 36465 - DNA, 20 bp, Artificial Sequence
  Description of Artificial Sequence: Synthetic oligonucleotide
  Target: ATXN2; (+) strand; PAM type: NRG; PAM sequence: CGG
acaatcaagttgacaggccc

SEQ ID NO: 36466 - DNA, 20 bp, Artificial Sequence
  Description of Artificial Sequence: Synthetic oligonucleotide
  Target: ATXN2; (+) strand; PAM type: NRG; PAM sequence: TAG
atcaagttgacaggccccgg

SEQ ID NO: 36467 - DNA, 20 bp, Artificial Sequence
  Description of Artificial Sequence: Synthetic oligonucleotide
  Target: ATXN2; (+) strand; PAM type: NRG; PAM sequence: CGG
acaggccccggtagtcactt

SEQ ID NO: 36468 - DNA, 20 bp, Artificial Sequence
  Description of Artificial Sequence: Synthetic oligonucleotide
  Target: ATXN2; (+) strand; PAM type: NRG; PAM sequence: GAG
aggccccggtagtcacttcg

SEQ ID NO: 36469 - DNA, 20 bp, Artificial Sequence
  Description of Artificial Sequence: Synthetic oligonucleotide
  Target: ATXN2; (+) strand; PAM type: NRG; PAM sequence: GAG
gccccggtagtcacttcgga

SEQ ID NO: 36470 - DNA, 20 bp, Artificial Sequence
  Description of Artificial Sequence: Synthetic oligonucleotide
  Target: ATXN2; (+) strand; PAM type: NRG; PAM sequence: GAG
ggtagtcacttcggagagct

SEQ ID NO: 36471 - DNA, 20 bp, Artificial Sequence
  Description of Artificial Sequence: Synthetic oligonucleotide
  Target: ATXN2; (+) strand; PAM type: NRG; PAM sequence: AAG
cggagagctgagactctgtg

SEQ ID NO: 36472 - DNA, 20 bp, Artificial Sequence
  Description of Artificial Sequence: Synthetic oligonucleotide
  Target: ATXN2; (+) strand; PAM type: NRG; PAM sequence: AGG
ggagagctgagactctgtga

SEQ ID NO: 36473 - DNA, 20 bp, Artificial Sequence
  Description of Artificial Sequence: Synthetic oligonucleotide
  Target: ATXN2; (+) strand; PAM type: NRG; PAM sequence: TGG
tgaaggccatcatccctgcc

SEQ ID NO: 36474 - DNA, 20 bp, Artificial Sequence
  Description of Artificial Sequence: Synthetic oligonucleotide
  Target: ATXN2; (+) strand; PAM type: NRG; PAM sequence: AAG
atcatccctgcctggcttcc

SEQ ID NO: 36475 - DNA, 20 bp, Artificial Sequence
  Description of Artificial Sequence: Synthetic oligonucleotide
  Target: ATXN2; (+) strand; PAM type: NRG; PAM sequence: AGG
tcatccctgcctggcttcca

SEQ ID NO: 36476 - DNA, 20 bp, Artificial Sequence
  Description of Artificial Sequence: Synthetic oligonucleotide
  Target: ATXN2; (+) strand; PAM type: NRG; PAM sequence: AAG
ccctgcctggcttccaaggt

SEQ ID NO: 36477 - DNA, 20 bp, Artificial Sequence
  Description of Artificial Sequence: Synthetic oligonucleotide
  Target: ATXN2; (+) strand; PAM type: NRG; PAM sequence: TAG
tggcttccaaggtaagtgtg

SEQ ID NO: 36478 - DNA, 20 bp, Artificial Sequence
  Description of Artificial Sequence: Synthetic oligonucleotide
  Target: ATXN2; (+) strand; PAM type: NRG; PAM sequence: AGG
ggcttccaaggtaagtgtgt

SEQ ID NO: 36479 - DNA, 20 bp, Artificial Sequence
  Description of Artificial Sequence: Synthetic oligonucleotide
  Target: ATXN2; (+) strand; PAM type: NRG; PAM sequence: GGG
gcttccaaggtaagtgtgta

SEQ ID NO: 36480 - DNA, 20 bp, Artificial Sequence
  Description of Artificial Sequence: Synthetic oligonucleotide
  Target: ATXN2; (+) strand; PAM type: NRG; PAM sequence: GGG
cttccaaggtaagtgtgtag

SEQ ID NO: 36481 - DNA, 20 bp, Artificial Sequence
  Description of Artificial Sequence: Synthetic oligonucleotide
  Target: ATXN2; (+) strand; PAM type: NRG; PAM sequence: TAG
tatatatgtacacatatata

SEQ ID NO: 36482 - DNA, 20 bp, Artificial Sequence
  Description of Artificial Sequence: Synthetic oligonucleotide
  Target: ATXN2; (+) strand; PAM type: NRG; PAM sequence: TAG
atatgtacacatatatatag

SEQ ID NO: 36483 - DNA, 20 bp, Artificial Sequence
  Description of Artificial Sequence: Synthetic oligonucleotide
  Target: ATXN2; (+) strand; PAM type: NRG; PAM sequence: GAG
gtacacatatatatagtagt

SEQ ID NO: 36484 - DNA, 20 bp, Artificial Sequence
  Description of Artificial Sequence: Synthetic oligonucleotide
  Target: ATXN2; (+) strand; PAM type: NRG; PAM sequence: AGG
tacacatatatatagtagtg

SEQ ID NO: 36485 - DNA, 20 bp, Artificial Sequence
  Description of Artificial Sequence: Synthetic oligonucleotide
  Target: ATXN2; (+) strand; PAM type: NRG; PAM sequence: TAG
tatatagtagtgaggctata

SEQ ID NO: 36486 - DNA, 20 bp, Artificial Sequence
  Description of Artificial Sequence: Synthetic oligonucleotide
  Target: ATXN2; (+) strand; PAM type: NRG; PAM sequence: TAG
gtagtgaggctatatagaca

SEQ ID NO: 36487 - DNA, 20 bp, Artificial Sequence
  Description of Artificial Sequence: Synthetic oligonucleotide
  Target: ATXN2; (+) strand; PAM type: NRG; PAM sequence: AAG
gaggctatatagacatagca

SEQ ID NO: 36488 - DNA, 20 bp, Artificial Sequence
  Description of Artificial Sequence: Synthetic oligonucleotide
  Target: ATXN2; (+) strand; PAM type: NRG; PAM sequence: CAG
gctatatagacatagcaaag

SEQ ID NO: 36489 - DNA, 20 bp, Artificial Sequence
  Description of Artificial Sequence: Synthetic oligonucleotide
  Target: ATXN2; (+) strand; PAM type: NRG; PAM sequence: CAG
tagacatagcaaagcagaca

SEQ ID NO: 36490 - DNA, 20 bp, Artificial Sequence
  Description of Artificial Sequence: Synthetic oligonucleotide
  Target: ATXN2; (+) strand; PAM type: NRG; PAM sequence: AAG
catagcaaagcagacacaga

SEQ ID NO: 36491 - DNA, 20 bp, Artificial Sequence
  Description of Artificial Sequence: Synthetic oligonucleotide
  Target: ATXN2; (+) strand; PAM type: NRG; PAM sequence: AGG
atagcaaagcagacacagaa

SEQ ID NO: 36492 - DNA, 20 bp, Artificial Sequence
  Description of Artificial Sequence: Synthetic oligonucleotide
  Target: ATXN2; (+) strand; PAM type: NRG; PAM sequence: AAG
caaagcagacacagaaagga

SEQ ID NO: 36493 - DNA, 20 bp, Artificial Sequence
  Description of Artificial Sequence: Synthetic oligonucleotide
  Target: ATXN2; (+) strand; PAM type: NRG; PAM sequence: AAG
agcagacacagaaaggaaag

SEQ ID NO: 36494 - DNA, 20 bp, Artificial Sequence
  Description of Artificial Sequence: Synthetic oligonucleotide
  Target: ATXN2; (+) strand; PAM type: NRG; PAM sequence: AGG
gcagacacagaaaggaaaga

SEQ ID NO: 36495 - DNA, 20 bp, Artificial Sequence
  Description of Artificial Sequence: Synthetic oligonucleotide
  Target: ATXN2; (+) strand; PAM type: NRG; PAM sequence: TGG
cacagaaaggaaagaaggac

SEQ ID NO: 36496 - DNA, 20 bp, Artificial Sequence
  Description of Artificial Sequence: Synthetic oligonucleotide
  Target: ATXN2; (+) strand; PAM type: NRG; PAM sequence: GGG
acagaaaggaaagaaggact

SEQ ID NO: 36497 - DNA, 20 bp, Artificial Sequence
  Description of Artificial Sequence: Synthetic oligonucleotide
  Target: ATXN2; (+) strand; PAM type: NRG; PAM sequence: CAG
agaaggactgggttgcattc

SEQ ID NO: 36498 - DNA, 20 bp, Artificial Sequence
  Description of Artificial Sequence: Synthetic oligonucleotide
  Target: ATXN2; (+) strand; PAM type: NRG; PAM sequence: GAG
aaggactgggttgcattcca

SEQ ID NO: 36499 - DNA, 20 bp, Artificial Sequence
  Description of Artificial Sequence: Synthetic oligonucleotide
  Target: ATXN2; (+) strand; PAM type: NRG; PAM sequence: AAG
tgggttgcattccagagtca

SEQ ID NO: 36500 - DNA, 20 bp, Artificial Sequence
  Description of Artificial Sequence: Synthetic oligonucleotide
  Target: ATXN2; (+) strand; PAM type: NRG; PAM sequence: AAG
ccagagtcaaagatattttt

SEQ ID NO: 36501 - DNA, 20 bp, Artificial Sequence
  Description of Artificial Sequence: Synthetic oligonucleotide
  Target: ATXN2; (+) strand; PAM type: NRG; PAM sequence: AGG
cagagtcaaagatattttta

SEQ ID NO: 36502 - DNA, 20 bp, Artificial Sequence
  Description of Artificial Sequence: Synthetic oligonucleotide
  Target: ATXN2; (+) strand; PAM type: NRG; PAM sequence: CAG
caaagatatttttaaggtct

SEQ ID NO: 36503 - DNA, 20 bp, Artificial Sequence
  Description of Artificial Sequence: Synthetic oligonucleotide
  Target: ATXN2; (+) strand; PAM type: NRG; PAM sequence: TGG
gatatttttaaggtctcagt

SEQ ID NO: 36504 - DNA, 20 bp, Artificial Sequence
  Description of Artificial Sequence: Synthetic oligonucleotide
  Target: ATXN2; (+) strand; PAM type: NRG; PAM sequence: AAG
aggtctcagttggaaaacta

SEQ ID NO: 36505 - DNA, 20 bp, Artificial Sequence
  Description of Artificial Sequence: Synthetic oligonucleotide
  Target: ATXN2; (+) strand; PAM type: NRG; PAM sequence: AGG
ggtctcagttggaaaactaa

SEQ ID NO: 36506 - DNA, 20 bp, Artificial Sequence
  Description of Artificial Sequence: Synthetic oligonucleotide
  Target: ATXN2; (+) strand; PAM type: NRG; PAM sequence: CAG
aaactaaaggactgaccaat

SEQ ID NO: 36507 - DNA, 20 bp, Artificial Sequence
  Description of Artificial Sequence: Synthetic oligonucleotide
  Target: ATXN2; (+) strand; PAM type: NRG; PAM sequence: TAG
aaaccacacaaacattccct

SEQ ID NO: 36508 - DNA, 20 bp, Artificial Sequence
  Description of Artificial Sequence: Synthetic oligonucleotide
  Target: ATXN2; (+) strand; PAM type: NRG; PAM sequence: AGG
aaccacacaaacattccctt

SEQ ID NO: 36509 - DNA, 20 bp, Artificial Sequence
  Description of Artificial Sequence: Synthetic oligonucleotide
  Target: ATXN2; (+) strand; PAM type: NRG; PAM sequence: GGG
accacacaaacattccctta

SEQ ID NO: 36510 - DNA, 20 bp, Artificial Sequence
  Description of Artificial Sequence: Synthetic oligonucleotide
  Target: ATXN2; (+) strand; PAM type: NRG; PAM sequence: CAG
cacaaacattcccttagggc

SEQ ID NO: 36511 - DNA, 20 bp, Artificial Sequence
  Description of Artificial Sequence: Synthetic oligonucleotide
  Target: ATXN2; (+) strand; PAM type: NRG; PAM sequence: GAG
gggccagatcacgtgtattt

SEQ ID NO: 36512 - DNA, 20 bp, Artificial Sequence
  Description of Artificial Sequence: Synthetic oligonucleotide
  Target: ATXN2; (+) strand; PAM type: NRG; PAM sequence: GAG
gccagatcacgtgtatttga

SEQ ID NO: 36513 - DNA, 20 bp, Artificial Sequence
  Description of Artificial Sequence: Synthetic oligonucleotide
  Target: ATXN2; (+) strand; PAM type: NRG; PAM sequence: AGG
ccagatcacgtgtatttgag

SEQ ID NO: 36514 - DNA, 20 bp, Artificial Sequence
  Description of Artificial Sequence: Synthetic oligonucleotide
  Target: ATXN2; (+) strand; PAM type: NRG; PAM sequence: GGG
cagatcacgtgtatttgaga

SEQ ID NO: 36515 - DNA, 20 bp, Artificial Sequence
  Description of Artificial Sequence: Synthetic oligonucleotide
  Target: ATXN2; (+) strand; PAM type: NRG; PAM sequence: AAG
tcacgtgtatttgagaggga

SEQ ID NO: 36516 - DNA, 20 bp, Artificial Sequence
  Description of Artificial Sequence: Synthetic oligonucleotide
  Target: ATXN2; (+) strand; PAM type: NRG; PAM sequence: AGG
cacgtgtatttgagagggaa

SEQ ID NO: 36517 - DNA, 20 bp, Artificial Sequence
  Description of Artificial Sequence: Synthetic oligonucleotide
  Target: ATXN2; (+) strand; PAM type: NRG; PAM sequence: GGG
acgtgtatttgagagggaaa

SEQ ID NO: 36518 - DNA, 20 bp, Artificial Sequence
  Description of Artificial Sequence: Synthetic oligonucleotide
  Target: ATXN2; (+) strand; PAM type: NRG; PAM sequence: GAG
gtgtatttgagagggaaagg

SEQ ID NO: 36519 - DNA, 20 bp, Artificial Sequence
  Description of Artificial Sequence: Synthetic oligonucleotide
  Target: ATXN2; (+) strand; PAM type: NRG; PAM sequence: CAG
atttgagagggaaagggaga

SEQ ID NO: 36520 - DNA, 20 bp, Artificial Sequence
  Description of Artificial Sequence: Synthetic oligonucleotide
  Target: ATXN2; (+) strand; PAM type: NRG; PAM sequence: AGG
tttgagagggaaagggagac

SEQ ID NO: 36521 - DNA, 20 bp, Artificial Sequence
  Description of Artificial Sequence: Synthetic oligonucleotide
  Target: ATXN2; (+) strand; PAM type: NRG; PAM sequence: TGG
gggaaagggagacaggcaaa

SEQ ID NO: 36522 - DNA, 20 bp, Artificial Sequence
  Description of Artificial Sequence: Synthetic oligonucleotide
  Target: ATXN2; (+) strand; PAM type: NRG; PAM sequence: CAG
caggcaaatggcatgacaca

SEQ ID NO: 36523 - DNA, 20 bp, Artificial Sequence
  Description of Artificial Sequence: Synthetic oligonucleotide
  Target: ATXN2; (+) strand; PAM type: NRG; PAM sequence: AGG
aggcaaatggcatgacacac

SEQ ID NO: 36524 - DNA, 20 bp, Artificial Sequence
  Description of Artificial Sequence: Synthetic oligonucleotide
  Target: ATXN2; (+) strand; PAM type: NRG; PAM sequence: GGG
ggcaaatggcatgacacaca

SEQ ID NO: 36525 - DNA, 20 bp, Artificial Sequence
  Description of Artificial Sequence: Synthetic oligonucleotide
  Target: ATXN2; (+) strand; PAM type: NRG; PAM sequence: TAG
gcatgacacacagggtttcc

SEQ ID NO: 36526 - DNA, 20 bp, Artificial Sequence
  Description of Artificial Sequence: Synthetic oligonucleotide
  Target: ATXN2; (+) strand; PAM type: NRG; PAM sequence: TGG
gacacacagggtttcctagc

SEQ ID NO: 36527 - DNA, 20 bp, Artificial Sequence
  Description of Artificial Sequence: Synthetic oligonucleotide
  Target: ATXN2; (+) strand; PAM type: NRG; PAM sequence: GGG
acacacagggtttcctagct

SEQ ID NO: 36528 - DNA, 20 bp, Artificial Sequence
  Description of Artificial Sequence: Synthetic oligonucleotide
  Target: ATXN2; (+) strand; PAM type: NRG; PAM sequence: GAG
acacagggtttcctagctgg

SEQ ID NO: 36529 - DNA, 20 bp, Artificial Sequence
  Description of Artificial Sequence: Synthetic oligonucleotide
  Target: ATXN2; (+) strand; PAM type: NRG; PAM sequence: GAG
acagggtttcctagctggga

SEQ ID NO: 36530 - DNA, 20 bp, Artificial Sequence
  Description of Artificial Sequence: Synthetic oligonucleotide
  Target: ATXN2; (+) strand; PAM type: NRG; PAM sequence: TAG
ttcctagctgggagagcctc

SEQ ID NO: 36531 - DNA, 20 bp, Artificial Sequence
  Description of Artificial Sequence: Synthetic oligonucleotide
  Target: ATXN2; (+) strand; PAM type: NRG; PAM sequence: TGG
gataaccttcacattctact

SEQ ID NO: 36532 - DNA, 20 bp, Artificial Sequence
  Description of Artificial Sequence: Synthetic oligonucleotide
  Target: ATXN2; (+) strand; PAM type: NRG; PAM sequence: CAG
cacattctacttggccttca

SEQ ID NO: 36533 - DNA, 20 bp, Artificial Sequence
  Description of Artificial Sequence: Synthetic oligonucleotide
  Target: ATXN2; (+) strand; PAM type: NRG; PAM sequence: AAG
ttctacttggccttcacaga

SEQ ID NO: 36534 - DNA, 20 bp, Artificial Sequence
  Description of Artificial Sequence: Synthetic oligonucleotide
  Target: ATXN2; (+) strand; PAM type: NRG; PAM sequence: TGG
acttggccttcacagaaagt

SEQ ID NO: 36535 - DNA, 20 bp, Artificial Sequence
  Description of Artificial Sequence: Synthetic oligonucleotide
  Target: ATXN2; (+) strand; PAM type: NRG; PAM sequence: AAG
ccttcacagaaagttggcta

SEQ ID NO: 36536 - DNA, 20 bp, Artificial Sequence
  Description of Artificial Sequence: Synthetic oligonucleotide
  Target: ATXN2; (+) strand; PAM type: NRG; PAM sequence: TGG
cacagaaagttggctaaagc

SEQ ID NO: 36537 - DNA, 20 bp, Artificial Sequence
  Description of Artificial Sequence: Synthetic oligonucleotide
  Target: ATXN2; (+) strand; PAM type: NRG; PAM sequence: GAG
ggctaaagctggtattacct

SEQ ID NO: 36538 - DNA, 20 bp, Artificial Sequence
  Description of Artificial Sequence: Synthetic oligonucleotide
  Target: ATXN2; (+) strand; PAM type: NRG; PAM sequence: AGG
gctaaagctggtattacctg

SEQ ID NO: 36539 - DNA, 20 bp, Artificial Sequence
  Description of Artificial Sequence: Synthetic oligonucleotide
  Target: ATXN2; (+) strand; PAM type: NRG; PAM sequence: TGG
ctggtattacctgaggtacg

SEQ ID NO: 36540 - DNA, 20 bp, Artificial Sequence
  Description of Artificial Sequence: Synthetic oligonucleotide
  Target: ATXN2; (+) strand; PAM type: NRG; PAM sequence: GGG
tggtattacctgaggtacgt

SEQ ID NO: 36541 - DNA, 20 bp, Artificial Sequence
  Description of Artificial Sequence: Synthetic oligonucleotide
  Target: ATXN2; (+) strand; PAM type: NRG; PAM sequence: TGG
cctgaggtacgtgggccatg

SEQ ID NO: 36542 - DNA, 20 bp, Artificial Sequence
  Description of Artificial Sequence: Synthetic oligonucleotide
  Target: ATXN2; (+) strand; PAM type: NRG; PAM sequence: GGG
ctgaggtacgtgggccatgt

SEQ ID NO: 36543 - DNA, 20 bp, Artificial Sequence
  Description of Artificial Sequence: Synthetic oligonucleotide
  Target: ATXN2; (+) strand; PAM type: NRG; PAM sequence: GGG
tgaggtacgtgggccatgtg

SEQ ID NO: 36544 - DNA, 20 bp, Artificial Sequence
  Description of Artificial Sequence: Synthetic oligonucleotide
  Target: ATXN2; (+) strand; PAM type: NRG; PAM sequence: TGG
ggtacgtgggccatgtgggg

SEQ ID NO: 36545 - DNA, 20 bp, Artificial Sequence
  Description of Artificial Sequence: Synthetic oligonucleotide
  Target: ATXN2; (+) strand; PAM type: NRG; PAM sequence: GGG
gtacgtgggccatgtggggt

SEQ ID NO: 36546 - DNA, 20 bp, Artificial Sequence
  Description of Artificial Sequence: Synthetic oligonucleotide
  Target: ATXN2; (+) strand; PAM type: NRG; PAM sequence: TGG
gtgggccatgtggggtgggt

SEQ ID NO: 36547 - DNA, 20 bp, Artificial Sequence
  Description of Artificial Sequence: Synthetic oligonucleotide
  Target: ATXN2; (+) strand; PAM type: NRG; PAM sequence: CGG
tggggtgggttggtatacgc

SEQ ID NO: 36548 - DNA, 20 bp, Artificial Sequence
  Description of Artificial Sequence: Synthetic oligonucleotide
  Target: ATXN2; (+) strand; PAM type: NRG; PAM sequence: GAG
ggtatacgccggctgaacgt

SEQ ID NO: 36549 - DNA, 20 bp, Artificial Sequence
  Description of Artificial Sequence: Synthetic oligonucleotide
  Target: ATXN2; (+) strand; PAM type: NRG; PAM sequence: AAG
atacgccggctgaacgtgag

SEQ ID NO: 36550 - DNA, 20 bp, Artificial Sequence
  Description of Artificial Sequence: Synthetic oligonucleotide
  Target: ATXN2; (+) strand; PAM type: NRG; PAM sequence: AGG
tacgccggctgaacgtgaga

SEQ ID NO: 36551 - DNA, 20 bp, Artificial Sequence
  Description of Artificial Sequence: Synthetic oligonucleotide
  Target: ATXN2; (+) strand; PAM type: NRG; PAM sequence: TGG
ccggctgaacgtgagaagga

SEQ ID NO: 36552 - DNA, 20 bp, Artificial Sequence
  Description of Artificial Sequence: Synthetic oligonucleotide
  Target: ATXN2; (+) strand; PAM type: NRG; PAM sequence: AAG
cgtgagaaggatggatcgta

SEQ ID NO: 36553 - DNA, 20 bp, Artificial Sequence
  Description of Artificial Sequence: Synthetic oligonucleotide
  Target: ATXN2; (+) strand; PAM type: NRG; PAM sequence: CAG
agaaggatggatcgtaaaga

SEQ ID NO: 36554 - DNA, 20 bp, Artificial Sequence
  Description of Artificial Sequence: Synthetic oligonucleotide
  Target: ATXN2; (+) strand; PAM type: NRG; PAM sequence: TGG
aagacagtctgttgtgctgc

SEQ ID NO: 36555 - DNA, 20 bp, Artificial Sequence
  Description of Artificial Sequence: Synthetic oligonucleotide
  Target: ATXN2; (+) strand; PAM type: NRG; PAM sequence: GGG
agacagtctgttgtgctgct

SEQ ID NO: 36556 - DNA, 20 bp, Artificial Sequence
  Description of Artificial Sequence: Synthetic oligonucleotide
  Target: ATXN2; (+) strand; PAM type: NRG; PAM sequence: TGG
gctgctgggaaactattctg

SEQ ID NO: 36557 - DNA, 20 bp, Artificial Sequence
  Description of Artificial Sequence: Synthetic oligonucleotide
  Target: ATXN2; (+) strand; PAM type: NRG; PAM sequence: TGG
attctgtggcgactgcgtgt

SEQ ID NO: 36558 - DNA, 20 bp, Artificial Sequence
  Description of Artificial Sequence: Synthetic oligonucleotide
  Target: ATXN2; (+) strand; PAM type: NRG; PAM sequence: GAG
tctgtggcgactgcgtgttg

SEQ ID NO: 36559 - DNA, 20 bp, Artificial Sequence
  Description of Artificial Sequence: Synthetic oligonucleotide
  Target: ATXN2; (+) strand; PAM type: NRG; PAM sequence: AGG
ctgtggcgactgcgtgttgg

SEQ ID NO: 36560 - DNA, 20 bp, Artificial Sequence
  Description of Artificial Sequence: Synthetic oligonucleotide
  Target: ATXN2; (+) strand; PAM type: NRG; PAM sequence: CAG
tggcgactgcgtgttggagg

SEQ ID NO: 36561 - DNA, 20 bp, Artificial Sequence
  Description of Artificial Sequence: Synthetic oligonucleotide
  Target: ATXN2; (+) strand; PAM type: NRG; PAM sequence: AGG
ggcgactgcgtgttggaggc

SEQ ID NO: 36562 - DNA, 20 bp, Artificial Sequence
  Description of Artificial Sequence: Synthetic oligonucleotide
  Target: ATXN2; (+) strand; PAM type: NRG; PAM sequence: TGG
cgtgttggaggcaggtgtca

SEQ ID NO: 36563 - DNA, 20 bp, Artificial Sequence
  Description of Artificial Sequence: Synthetic oligonucleotide
  Target: ATXN2; (+) strand; PAM type: NRG; PAM sequence: GAG
tgttggaggcaggtgtcatg

SEQ ID NO: 36564 - DNA, 20 bp, Artificial Sequence
  Description of Artificial Sequence: Synthetic oligonucleotide
  Target: ATXN2; (+) strand; PAM type: NRG; PAM sequence: AGG
gttggaggcaggtgtcatgg

SEQ ID NO: 36565 - DNA, 20 bp, Artificial Sequence
  Description of Artificial Sequence: Synthetic oligonucleotide
  Target: ATXN2; (+) strand; PAM type: NRG; PAM sequence: GGG
ttggaggcaggtgtcatgga

SEQ ID NO: 36566 - DNA, 20 bp, Artificial Sequence
  Description of Artificial Sequence: Synthetic oligonucleotide
  Target: ATXN2; (+) strand; PAM type: NRG; PAM sequence: TGG
gaggcaggtgtcatggaggg

SEQ ID NO: 36567 - DNA, 20 bp, Artificial Sequence
  Description of Artificial Sequence: Synthetic oligonucleotide
  Target: ATXN2; (+) strand; PAM type: NRG; PAM sequence: GAG
ggcaggtgtcatggagggtg

SEQ ID NO: 36568 - DNA, 20 bp, Artificial Sequence
  Description of Artificial Sequence: Synthetic oligonucleotide
  Target: ATXN2; (+) strand; PAM type: NRG; PAM sequence: TGG
ggtgtcatggagggtggagt

SEQ ID NO: 36569 - DNA, 20 bp, Artificial Sequence
  Description of Artificial Sequence: Synthetic oligonucleotide
  Target: ATXN2; (+) strand; PAM type: NRG; PAM sequence: AAG
atggagggtggagttggcgc

SEQ ID NO: 36570 - DNA, 20 bp, Artificial Sequence
  Description of Artificial Sequence: Synthetic oligonucleotide
  Target: ATXN2; (+) strand; PAM type: NRG; PAM sequence: TGG
gagttggcgcaagccccgcg

SEQ ID NO: 36571 - DNA, 20 bp, Artificial Sequence
  Description of Artificial Sequence: Synthetic oligonucleotide
  Target: ATXN2; (+) strand; PAM type: NRG; PAM sequence: TGG
cgcaagccccgcgtggtaaa

SEQ ID NO: 36572 - DNA, 20 bp, Artificial Sequence
  Description of Artificial Sequence: Synthetic oligonucleotide
  Target: ATXN2; (+) strand; PAM type: NRG; PAM sequence: TGG
taaatggctgactgctgctg

SEQ ID NO: 36573 - DNA, 20 bp, Artificial Sequence
  Description of Artificial Sequence: Synthetic oligonucleotide
  Target: ATXN2; (+) strand; PAM type: NRG; PAM sequence: TGG
ggctgactgctgctgtggac

SEQ ID NO: 36574 - DNA, 20 bp, Artificial Sequence
  Description of Artificial Sequence: Synthetic oligonucleotide
  Target: ATXN2; (+) strand; PAM type: NRG; PAM sequence: CAG
gactgctgctgtggactggc

SEQ ID NO: 36575 - DNA, 20 bp, Artificial Sequence
  Description of Artificial Sequence: Synthetic oligonucleotide
  Target: ATXN2; (+) strand; PAM type: NRG; PAM sequence: TGG
gctgctgtggactggccaga

SEQ ID NO: 36576 - DNA, 20 bp, Artificial Sequence
  Description of Artificial Sequence: Synthetic oligonucleotide
  Target: ATXN2; (+) strand; PAM type: NRG; PAM sequence: GAG
tgctgtggactggccagatg

SEQ ID NO: 36577 - DNA, 20 bp, Artificial Sequence
  Description of Artificial Sequence: Synthetic oligonucleotide
  Target: ATXN2; (+) strand; PAM type: NRG; PAM sequence: GAG
ctgtggactggccagatgga

SEQ ID NO: 36578 - DNA, 20 bp, Artificial Sequence
  Description of Artificial Sequence: Synthetic oligonucleotide
  Target: ATXN2; (+) strand; PAM type: NRG; PAM sequence: TGG
gactggccagatggagagcc

SEQ ID NO: 36579 - DNA, 20 bp, Artificial Sequence
  Description of Artificial Sequence: Synthetic oligonucleotide
  Target: ATXN2; (+) strand; PAM type: NRG; PAM sequence: GGG
actggccagatggagagcct

SEQ ID NO: 36580 - DNA, 20 bp, Artificial Sequence
  Description of Artificial Sequence: Synthetic oligonucleotide
  Target: ATXN2; (+) strand; PAM type: NRG; PAM sequence: CGG
ggccagatggagagcctggg

SEQ ID NO: 36581 - DNA, 20 bp, Artificial Sequence
  Description of Artificial Sequence: Synthetic oligonucleotide
  Target: ATXN2; (+) strand; PAM type: NRG; PAM sequence: TGG
gatggagagcctgggcggcc

SEQ ID NO: 36582 - DNA, 20 bp, Artificial Sequence
  Description of Artificial Sequence: Synthetic oligonucleotide
  Target: ATXN2; (+) strand; PAM type: NRG; PAM sequence: TGG
cctgggcggcctggtgctga

SEQ ID NO: 36583 - DNA, 20 bp, Artificial Sequence
  Description of Artificial Sequence: Synthetic oligonucleotide
  Target: ATXN2; (+) strand; PAM type: NRG; PAM sequence: AAG
ctggtgctgatggtgctgca

SEQ ID NO: 36584 - DNA, 20 bp, Artificial Sequence
  Description of Artificial Sequence: Synthetic oligonucleotide
  Target: ATXN2; (+) strand; PAM type: NRG; PAM sequence: CAG
ctgatggtgctgcaaagcga

SEQ ID NO: 36585 - DNA, 20 bp, Artificial Sequence
  Description of Artificial Sequence: Synthetic oligonucleotide
  Target: ATXN2; (+) strand; PAM type: NRG; PAM sequence: AGG
tgatggtgctgcaaagcgac

SEQ ID NO: 36586 - DNA, 20 bp, Artificial Sequence
  Description of Artificial Sequence: Synthetic oligonucleotide
  Target: ATXN2; (+) strand; PAM type: NRG; PAM sequence: AAG
ggtgctgcaaagcgacagga

SEQ ID NO: 36587 - DNA, 20 bp, Artificial Sequence
  Description of Artificial Sequence: Synthetic oligonucleotide
  Target: ATXN2; (+) strand; PAM type: NRG; PAM sequence: GAG
caaagcgacaggaaagaatt

SEQ ID NO: 36588 - DNA, 20 bp, Artificial Sequence
  Description of Artificial Sequence: Synthetic oligonucleotide
  Target: ATXN2; (+) strand; PAM type: NRG; PAM sequence: GAG
aagcgacaggaaagaattga

SEQ ID NO: 36589 - DNA, 20 bp, Artificial Sequence
  Description of Artificial Sequence: Synthetic oligonucleotide
  Target: ATXN2; (+) strand; PAM type: NRG; PAM sequence: AGG
agcgacaggaaagaattgag

SEQ ID NO: 36590 - DNA, 20 bp, Artificial Sequence
  Description of Artificial Sequence: Synthetic oligonucleotide
  Target: ATXN2; (+) strand; PAM type: NRG; PAM sequence: AAG
aggaaaacttctttaatgaa

SEQ ID NO: 36591 - DNA, 20 bp, Artificial Sequence
  Description of Artificial Sequence: Synthetic oligonucleotide
  Target: ATXN2; (+) strand; PAM type: NRG; PAM sequence: CAG
aaaacttctttaatgaaaag

SEQ ID NO: 36592 - DNA, 20 bp, Artificial Sequence
  Description of Artificial Sequence: Synthetic oligonucleotide
  Target: ATXN2; (+) strand; PAM type: NRG; PAM sequence: AAG
ttctttaatgaaaagcagcc

SEQ ID NO: 36593 - DNA, 20 bp, Artificial Sequence
  Description of Artificial Sequence: Synthetic oligonucleotide
  Target: ATXN2; (+) strand; PAM type: NRG; PAM sequence: AGG
tctttaatgaaaagcagcca

SEQ ID NO: 36594 - DNA, 20 bp, Artificial Sequence
  Description of Artificial Sequence: Synthetic oligonucleotide
  Target: ATXN2; (+) strand; PAM type: NRG; PAM sequence: GGG
ctttaatgaaaagcagccaa

SEQ ID NO: 36595 - DNA, 20 bp, Artificial Sequence
  Description of Artificial Sequence: Synthetic oligonucleotide
  Target: ATXN2; (+) strand; PAM type: NRG; PAM sequence: AAG
gcagccaagggatacccaca

SEQ ID NO: 36596 - DNA, 20 bp, Artificial Sequence
  Description of Artificial Sequence: Synthetic oligonucleotide
  Target: ATXN2; (+) strand; PAM type: NRG; PAM sequence: AAG
caagggatacccacaaagct

SEQ ID NO: 36597 - DNA, 20 bp, Artificial Sequence
  Description of Artificial Sequence: Synthetic oligonucleotide
  Target: ATXN2; (+) strand; PAM type: NRG; PAM sequence: TGG
aaagctaagctttgcacact

SEQ ID NO: 36598 - DNA, 20 bp, Artificial Sequence
  Description of Artificial Sequence: Synthetic oligonucleotide
  Target: ATXN2; (+) strand; PAM type: NRG; PAM sequence: GGG
aagctaagctttgcacactt

SEQ ID NO: 36599 - DNA, 20 bp, Artificial Sequence
  Description of Artificial Sequence: Synthetic oligonucleotide
  Target: ATXN2; (+) strand; PAM type: NRG; PAM sequence: GAG
tgcacacttgggcctatgat

SEQ ID NO: 36600 - DNA, 20 bp, Artificial Sequence
  Description of Artificial Sequence: Synthetic oligonucleotide
  Target: ATXN2; (+) strand; PAM type: NRG; PAM sequence: AGG
gcacacttgggcctatgatg

SEQ ID NO: 36601 - DNA, 20 bp, Artificial Sequence
  Description of Artificial Sequence: Synthetic oligonucleotide
  Target: ATXN2; (+) strand; PAM type: NRG; PAM sequence: GGG
cacacttgggcctatgatga

SEQ ID NO: 36602 - DNA, 20 bp, Artificial Sequence
  Description of Artificial Sequence: Synthetic oligonucleotide
  Target: ATXN2; (+) strand; PAM type: NRG; PAM sequence: TGG
gggcctatgatgagggtcac

SEQ ID NO: 36603 - DNA, 20 bp, Artificial Sequence
  Description of Artificial Sequence: Synthetic oligonucleotide
  Target: ATXN2; (+) strand; PAM type: NRG; PAM sequence: AAG
ctatgatgagggtcactgga

SEQ ID NO: 36604 - DNA, 20 bp, Artificial Sequence
  Description of Artificial Sequence: Synthetic oligonucleotide
  Target: ATXN2; (+) strand; PAM type: NRG; PAM sequence: CAG
atgagggtcactggaaagta

SEQ ID NO: 36605 - DNA, 20 bp, Artificial Sequence
  Description of Artificial Sequence: Synthetic oligonucleotide
  Target: ATXN2; (+) strand; PAM type: NRG; PAM sequence: AGG
tgagggtcactggaaagtac

SEQ ID NO: 36606 - DNA, 20 bp, Artificial Sequence
  Description of Artificial Sequence: Synthetic oligonucleotide
  Target: ATXN2; (+) strand; PAM type: NRG; PAM sequence: GAG
agggtcactggaaagtacag

SEQ ID NO: 36607 - DNA, 20 bp, Artificial Sequence
  Description of Artificial Sequence: Synthetic oligonucleotide
  Target: ATXN2; (+) strand; PAM type: NRG; PAM sequence: CAG
ggaaagtacaggagaatgta

SEQ ID NO: 36608 - DNA, 20 bp, Artificial Sequence
  Description of Artificial Sequence: Synthetic oligonucleotide
  Target: ATXN2; (+) strand; PAM type: NRG; PAM sequence: AGG
gaaagtacaggagaatgtac

SEQ ID NO: 36609 - DNA, 20 bp, Artificial Sequence
  Description of Artificial Sequence: Synthetic oligonucleotide
  Target: ATXN2; (+) strand; PAM type: NRG; PAM sequence: GGG
aaagtacaggagaatgtaca

SEQ ID NO: 36610 - DNA, 20 bp, Artificial Sequence
  Description of Artificial Sequence: Synthetic oligonucleotide
  Target: ATXN2; (+) strand; PAM type: NRG; PAM sequence: TGG
gtacaggagaatgtacaggg

SEQ ID NO: 36611 - DNA, 20 bp, Artificial Sequence
  Description of Artificial Sequence: Synthetic oligonucleotide
  Target: ATXN2; (+) strand; PAM type: NRG; PAM sequence: AAG
aggagaatgtacagggtggt

SEQ ID NO: 36612 - DNA, 20 bp, Artificial Sequence
  Description of Artificial Sequence: Synthetic oligonucleotide
  Target: ATXN2; (+) strand; PAM type: NRG; PAM sequence: GAG
gagaatgtacagggtggtaa

SEQ ID NO: 36613 - DNA, 20 bp, Artificial Sequence
  Description of Artificial Sequence: Synthetic oligonucleotide
  Target: ATXN2; (+) strand; PAM type: NRG; PAM sequence: AAG
atgtacagggtggtaagagc

SEQ ID NO: 36614 - DNA, 20 bp, Artificial Sequence
  Description of Artificial Sequence: Synthetic oligonucleotide
  Target: ATXN2; (+) strand; PAM type: NRG; PAM sequence: AGG
tgtacagggtggtaagagca

SEQ ID NO: 36615 - DNA, 20 bp, Artificial Sequence
  Description of Artificial Sequence: Synthetic oligonucleotide
  Target: ATXN2; (+) strand; PAM type: NRG; PAM sequence: TGG
cagggtggtaagagcaaggc

SEQ ID NO: 36616 - DNA, 20 bp, Artificial Sequence
  Description of Artificial Sequence: Synthetic oligonucleotide
  Target: ATXN2; (+) strand; PAM type: NRG; PAM sequence: GAG
gggtggtaagagcaaggctg

SEQ ID NO: 36617 - DNA, 20 bp, Artificial Sequence
  Description of Artificial Sequence: Synthetic oligonucleotide
  Target: ATXN2; (+) strand; PAM type: NRG; PAM sequence: AGG
ggtggtaagagcaaggctgg

SEQ ID NO: 36618 - DNA, 20 bp, Artificial Sequence
  Description of Artificial Sequence: Synthetic oligonucleotide
  Target: ATXN2; (+) strand; PAM type: NRG; PAM sequence: TGG
ggctggaggtgcctcccatc

SEQ ID NO: 36619 - DNA, 20 bp, Artificial Sequence
  Description of Artificial Sequence: Synthetic oligonucleotide
  Target: ATXN2; (+) strand; PAM type: NRG; PAM sequence: TAG
ccatctggacaactcctttc

SEQ ID NO: 36620 - DNA, 20 bp, Artificial Sequence
  Description of Artificial Sequence: Synthetic oligonucleotide
  Target: ATXN2; (+) strand; PAM type: NRG; PAM sequence: AGG
catctggacaactcctttct

SEQ ID NO: 36621 - DNA, 20 bp, Artificial Sequence
  Description of Artificial Sequence: Synthetic oligonucleotide
  Target: ATXN2; (+) strand; PAM type: NRG; PAM sequence: GGG
atctggacaactcctttcta

SEQ ID NO: 36622 - DNA, 20 bp, Artificial Sequence
  Description of Artificial Sequence: Synthetic oligonucleotide
  Target: ATXN2; (+) strand; PAM type: NRG; PAM sequence: CAG
gacaactcctttctagggta

SEQ ID NO: 36623 - DNA, 20 bp, Artificial Sequence
  Description of Artificial Sequence: Synthetic oligonucleotide
  Target: ATXN2; (+) strand; PAM type: NRG; PAM sequence: AAG
aactcctttctagggtacag

SEQ ID NO: 36624 - DNA, 20 bp, Artificial Sequence
  Description of Artificial Sequence: Synthetic oligonucleotide
  Target: ATXN2; (+) strand; PAM type: NRG; PAM sequence: CAG
gggtacagaagcctgattct

SEQ ID NO: 36625 - DNA, 20 bp, Artificial Sequence
  Description of Artificial Sequence: Synthetic oligonucleotide
  Target: ATXN2; (+) strand; PAM type: NRG; PAM sequence: TGG
cagaagcctgattctcagtc

SEQ ID NO: 36626 - DNA, 20 bp, Artificial Sequence
  Description of Artificial Sequence: Synthetic oligonucleotide
  Target: ATXN2; (+) strand; PAM type: NRG; PAM sequence: CAG
aagcctgattctcagtctgg

SEQ ID NO: 36627 - DNA, 20 bp, Artificial Sequence
  Description of Artificial Sequence: Synthetic oligonucleotide
  Target: ATXN2; (+) strand; PAM type: NRG; PAM sequence: TAG
ctgattctcagtctggcagt

SEQ ID NO: 36628 - DNA, 20 bp, Artificial Sequence
  Description of Artificial Sequence: Synthetic oligonucleotide
  Target: ATXN2; (+) strand; PAM type: NRG; PAM sequence: GAG
tctggcagttagaaacttct

SEQ ID NO: 36629 - DNA, 20 bp, Artificial Sequence
  Description of Artificial Sequence: Synthetic oligonucleotide
  Target: ATXN2; (+) strand; PAM type: NRG; PAM sequence: AAG
acttctgagcatacatacta

SEQ ID NO: 36630 - DNA, 20 bp, Artificial Sequence
  Description of Artificial Sequence: Synthetic oligonucleotide
  Target: ATXN2; (+) strand; PAM type: NRG; PAM sequence: AAG
catacatactaaagtcaaaa

SEQ ID NO: 36631 - DNA, 20 bp, Artificial Sequence
  Description of Artificial Sequence: Synthetic oligonucleotide
  Target: ATXN2; (+) strand; PAM type: NRG; PAM sequence: CAG
gtcaaaaaagactactgccc

SEQ ID NO: 36632 - DNA, 20 bp, Artificial Sequence
  Description of Artificial Sequence: Synthetic oligonucleotide
  Target: ATXN2; (+) strand; PAM type: NRG; PAM sequence: AGG
tcaaaaaagactactgcccc

SEQ ID NO: 36633 - DNA, 20 bp, Artificial Sequence
  Description of Artificial Sequence: Synthetic oligonucleotide
  Target: ATXN2; (+) strand; PAM type: NRG; PAM sequence: GGG
caaaaaagactactgcccca

SEQ ID NO: 36634 - DNA, 20 bp, Artificial Sequence
  Description of Artificial Sequence: Synthetic oligonucleotide
  Target: ATXN2; (+) strand; PAM type: NRG; PAM sequence: TAG
ctactgccccagggaactga

SEQ ID NO: 36635 - DNA, 20 bp, Artificial Sequence
  Description of Artificial Sequence: Synthetic oligonucleotide
  Target: ATXN2; (+) strand; PAM type: NRG; PAM sequence: AAG
cagggaactgatagatatca

SEQ ID NO: 36636 - DNA, 20 bp, Artificial Sequence
  Description of Artificial Sequence: Synthetic oligonucleotide
  Target: ATXN2; (+) strand; PAM type: NRG; PAM sequence: TAG
acatctttaactgcctccat

SEQ ID NO: 36637 - DNA, 20 bp, Artificial Sequence
  Description of Artificial Sequence: Synthetic oligonucleotide
  Target: ATXN2; (+) strand; PAM type: NRG; PAM sequence: AAG
tccattagcaaacataattc

SEQ ID NO: 36638 - DNA, 20 bp, Artificial Sequence
  Description of Artificial Sequence: Synthetic oligonucleotide
  Target: ATXN2; (+) strand; PAM type: NRG; PAM sequence: AAG
attagcaaacataattcaag

SEQ ID NO: 36639 - DNA, 20 bp, Artificial Sequence
  Description of Artificial Sequence: Synthetic oligonucleotide
  Target: ATXN2; (+) strand; PAM type: NRG; PAM sequence: TAG
aacataattcaagaagctca

SEQ ID NO: 36640 - DNA, 20 bp, Artificial Sequence
  Description of Artificial Sequence: Synthetic oligonucleotide
  Target: ATXN2; (+) strand; PAM type: NRG; PAM sequence: AGG
acataattcaagaagctcat

SEQ ID NO: 36641 - DNA, 20 bp, Artificial Sequence
  Description of Artificial Sequence: Synthetic oligonucleotide
  Target: ATXN2; (+) strand; PAM type: NRG; PAM sequence: TAG
taacctcatcacataaacct

SEQ ID NO: 36642 - DNA, 20 bp, Artificial Sequence
  Description of Artificial Sequence: Synthetic oligonucleotide
  Target: ATXN2; (+) strand; PAM type: NRG; PAM sequence: AAG
cataaaccttagaaattaaa

SEQ ID NO: 36643 - DNA, 20 bp, Artificial Sequence
  Description of Artificial Sequence: Synthetic oligonucleotide
  Target: ATXN2; (+) strand; PAM type: NRG; PAM sequence: AAG
cttagaaattaaaaagtccc

SEQ ID NO: 36644 - DNA, 20 bp, Artificial Sequence
  Description of Artificial Sequence: Synthetic oligonucleotide
  Target: ATXN2; (+) strand; PAM type: NRG; PAM sequence: TAG
attaaaaagtcccaagcaaa

SEQ ID NO: 36645 - DNA, 20 bp, Artificial Sequence
  Description of Artificial Sequence: Synthetic oligonucleotide
  Target: ATXN2; (+) strand; PAM type: NRG; PAM sequence: AGG
ttaaaaagtcccaagcaaat

SEQ ID NO: 36646 - DNA, 20 bp, Artificial Sequence
  Description of Artificial Sequence: Synthetic oligonucleotide
  Target: ATXN2; (+) strand; PAM type: NRG; PAM sequence: AAG
atttgatttttcattactgc

SEQ ID NO: 36647 - DNA, 20 bp, Artificial Sequence
  Description of Artificial Sequence: Synthetic oligonucleotide
  Target: ATXN2; (+) strand; PAM type: NRG; PAM sequence: CAG
ttttcattactgcaagtttc

SEQ ID NO: 36648 - DNA, 20 bp, Artificial Sequence
  Description of Artificial Sequence: Synthetic oligonucleotide
  Target: ATXN2; (+) strand; PAM type: NRG; PAM sequence: GAG
ttcattactgcaagtttcca

SEQ ID NO: 36649 - DNA, 20 bp, Artificial Sequence
  Description of Artificial Sequence: Synthetic oligonucleotide
  Target: ATXN2; (+) strand; PAM type: NRG; PAM sequence: GAG
ttttaattttttattttttt

SEQ ID NO: 36650 - DNA, 20 bp, Artificial Sequence
  Description of Artificial Sequence: Synthetic oligonucleotide
  Target: ATXN2; (+) strand; PAM type: NRG; PAM sequence: CAG
aattttttatttttttgaga

SEQ ID NO: 36651 - DNA, 20 bp, Artificial Sequence
  Description of Artificial Sequence: Synthetic oligonucleotide
  Target: ATXN2; (+) strand; PAM type: NRG; PAM sequence: GAG
ttttttatttttttgagaca

SEQ ID NO: 36652 - DNA, 20 bp, Artificial Sequence
  Description of Artificial Sequence: Synthetic oligonucleotide
  Target: ATXN2; (+) strand; PAM type: NRG; PAM sequence: AAG
acagagtctcgctgttgtcc

SEQ ID NO: 36653 - DNA, 20 bp, Artificial Sequence
  Description of Artificial Sequence: Synthetic oligonucleotide
  Target: ATXN2; (+) strand; PAM type: NRG; PAM sequence: TGG
agtctcgctgttgtccaagc

SEQ ID NO: 36654 - DNA, 20 bp, Artificial Sequence
  Description of Artificial Sequence: Synthetic oligonucleotide
  Target: ATXN2; (+) strand; PAM type: NRG; PAM sequence: GAG
tctcgctgttgtccaagctg

SEQ ID NO: 36655 - DNA, 20 bp, Artificial Sequence
  Description of Artificial Sequence: Synthetic oligonucleotide
  Target: ATXN2; (+) strand; PAM type: NRG; PAM sequence: CAG
ctgttgtccaagctggagtg

SEQ ID NO: 36656 - DNA, 20 bp, Artificial Sequence
  Description of Artificial Sequence: Synthetic oligonucleotide
  Target: ATXN2; (+) strand; PAM type: NRG; PAM sequence: TGG
ttgtccaagctggagtgcag

SEQ ID NO: 36657 - DNA, 20 bp, Artificial Sequence
  Description of Artificial Sequence: Synthetic oligonucleotide
  Target: ATXN2; (+) strand; PAM type: NRG; PAM sequence: AAG
gcgcgatctctgctcactgc

SEQ ID NO: 36658 - DNA, 20 bp, Artificial Sequence
  Description of Artificial Sequence: Synthetic oligonucleotide
  Target: ATXN2; (+) strand; PAM type: NRG; PAM sequence: CGG
tcactgcaagctccgcctcc

SEQ ID NO: 36659 - DNA, 20 bp, Artificial Sequence
  Description of Artificial Sequence: Synthetic oligonucleotide
  Target: ATXN2; (+) strand; PAM type: NRG; PAM sequence: GGG
cactgcaagctccgcctccc

SEQ ID NO: 36660 - DNA, 20 bp, Artificial Sequence
  Description of Artificial Sequence: Synthetic oligonucleotide
  Target: ATXN2; (+) strand; PAM type: NRG; PAM sequence: CAG
ttcacgccattctccttcct

SEQ ID NO: 36661 - DNA, 20 bp, Artificial Sequence
  Description of Artificial Sequence: Synthetic oligonucleotide
  Target: ATXN2; (+) strand; PAM type: NRG; PAM sequence: GAG
ttctccttcctcagcctccc

SEQ ID NO: 36662 - DNA, 20 bp, Artificial Sequence
  Description of Artificial Sequence: Synthetic oligonucleotide
  Target: ATXN2; (+) strand; PAM type: NRG; PAM sequence: AAG
tccttcctcagcctcccgag

SEQ ID NO: 36663 - DNA, 20 bp, Artificial Sequence
  Description of Artificial Sequence: Synthetic oligonucleotide
  Target: ATXN2; (+) strand; PAM type: NRG; PAM sequence: TGG
tcctcagcctcccgagaagc

SEQ ID NO: 36664 - DNA, 20 bp, Artificial Sequence
  Description of Artificial Sequence: Synthetic oligonucleotide
  Target: ATXN2; (+) strand; PAM type: NRG; PAM sequence: GGG
cctcagcctcccgagaagct

SEQ ID NO: 36665 - DNA, 20 bp, Artificial Sequence
  Description of Artificial Sequence: Synthetic oligonucleotide
  Target: ATXN2; (+) strand; PAM type: NRG; PAM sequence: CAG
ctcccgagaagctgggacta

SEQ ID NO: 36666 - DNA, 20 bp, Artificial Sequence
  Description of Artificial Sequence: Synthetic oligonucleotide
  Target: ATXN2; (+) strand; PAM type: NRG; PAM sequence: AGG
tcccgagaagctgggactac

SEQ ID NO: 36667 - DNA, 20 bp, Artificial Sequence
  Description of Artificial Sequence: Synthetic oligonucleotide
  Target: ATXN2; (+) strand; PAM type: NRG; PAM sequence: CGG
caggcgcccaccaccacgcc

SEQ ID NO: 36668 - DNA, 20 bp, Artificial Sequence
  Description of Artificial Sequence: Synthetic oligonucleotide
  Target: ATXN2; (+) strand; PAM type: NRG; PAM sequence: TAG
taatttttttgtatttttat

SEQ ID NO: 36669 - DNA, 20 bp, Artificial Sequence
  Description of Artificial Sequence: Synthetic oligonucleotide
  Target: ATXN2; (+) strand; PAM type: NRG; PAM sequence: GAG
atttttttgtatttttatta

SEQ ID NO: 36670 - DNA, 20 bp, Artificial Sequence
  Description of Artificial Sequence: Synthetic oligonucleotide
  Target: ATXN2; (+) strand; PAM type: NRG; PAM sequence: CGG
ttttgtatttttattagaga

SEQ ID NO: 36671 - DNA, 20 bp, Artificial Sequence
  Description of Artificial Sequence: Synthetic oligonucleotide
  Target: ATXN2; (+) strand; PAM type: NRG; PAM sequence: GAG
ttgtatttttattagagacg

SEQ ID NO: 36672 - DNA, 20 bp, Artificial Sequence
  Description of Artificial Sequence: Synthetic oligonucleotide
  Target: ATXN2; (+) strand; PAM type: NRG; PAM sequence: CAG
ttattagagacggagtttca

SEQ ID NO: 36673 - DNA, 20 bp, Artificial Sequence
  Description of Artificial Sequence: Synthetic oligonucleotide
  Target: ATXN2; (+) strand; PAM type: NRG; PAM sequence: CAG
cggagtttcacagtgttcgc

SEQ ID NO: 36674 - DNA, 20 bp, Artificial Sequence
  Description of Artificial Sequence: Synthetic oligonucleotide
  Target: ATXN2; (+) strand; PAM type: NRG; PAM sequence: AGG
ggagtttcacagtgttcgcc

SEQ ID NO: 36675 - DNA, 20 bp, Artificial Sequence
  Description of Artificial Sequence: Synthetic oligonucleotide
  Target: ATXN2; (+) strand; PAM type: NRG; PAM sequence: TGG
tttcacagtgttcgccagga

SEQ ID NO: 36676 - DNA, 20 bp, Artificial Sequence
  Description of Artificial Sequence: Synthetic oligonucleotide
  Target: ATXN2; (+) strand; PAM type: NRG; PAM sequence: CGG
acctcgtgatccacccgcct

SEQ ID NO: 36677 - DNA, 20 bp, Artificial Sequence
  Description of Artificial Sequence: Synthetic oligonucleotide
  Target: ATXN2; (+) strand; PAM type: NRG; PAM sequence: AAG
ccacccgcctcggcctccca

SEQ ID NO: 36678 - DNA, 20 bp, Artificial Sequence
  Description of Artificial Sequence: Synthetic oligonucleotide
  Target: ATXN2; (+) strand; PAM type: NRG; PAM sequence: TGG
cccgcctcggcctcccaaag

SEQ ID NO: 36679 - DNA, 20 bp, Artificial Sequence
  Description of Artificial Sequence: Synthetic oligonucleotide
  Target: ATXN2; (+) strand; PAM type: NRG; PAM sequence: TGG
gcctcggcctcccaaagtgg

SEQ ID NO: 36680 - DNA, 20 bp, Artificial Sequence
  Description of Artificial Sequence: Synthetic oligonucleotide
  Target: ATXN2; (+) strand; PAM type: NRG; PAM sequence: GGG
cctcggcctcccaaagtggt

SEQ ID NO: 36681 - DNA, 20 bp, Artificial Sequence
  Description of Artificial Sequence: Synthetic oligonucleotide
  Target: ATXN2; (+) strand; PAM type: NRG; PAM sequence: CAG
ctcccaaagtggtgggatta

SEQ ID NO: 36682 - DNA, 20 bp, Artificial Sequence
  Description of Artificial Sequence: Synthetic oligonucleotide
  Target: ATXN2; (+) strand; PAM type: NRG; PAM sequence: AGG
tcccaaagtggtgggattac

SEQ ID NO: 36683 - DNA, 20 bp, Artificial Sequence
  Description of Artificial Sequence: Synthetic oligonucleotide
  Target: ATXN2; (+) strand; PAM type: NRG; PAM sequence: GAG
agtggtgggattacaggcgt

SEQ ID NO: 36684 - DNA, 20 bp, Artificial Sequence
  Description of Artificial Sequence: Synthetic oligonucleotide
  Target: ATXN2; (+) strand; PAM type: NRG; PAM sequence: CAG
caggcgtgagccactgcgcc

SEQ ID NO: 36685 - DNA, 20 bp, Artificial Sequence
  Description of Artificial Sequence: Synthetic oligonucleotide
  Target: ATXN2; (+) strand; PAM type: NRG; PAM sequence: CAG
gattcttaaaaccaccaccc

SEQ ID NO: 36686 - DNA, 20 bp, Artificial Sequence
  Description of Artificial Sequence: Synthetic oligonucleotide
  Target: ATXN2; (+) strand; PAM type: NRG; PAM sequence: AGG
attcttaaaaccaccacccc

SEQ ID NO: 36687 - DNA, 20 bp, Artificial Sequence
  Description of Artificial Sequence: Synthetic oligonucleotide
  Target: ATXN2; (+) strand; PAM type: NRG; PAM sequence: GGG
ttcttaaaaccaccacccca

SEQ ID NO: 36688 - DNA, 20 bp, Artificial Sequence
  Description of Artificial Sequence: Synthetic oligonucleotide
  Target: ATXN2; (+) strand; PAM type: NRG; PAM sequence: GGG
tcttaaaaccaccaccccag

SEQ ID NO: 36689 - DNA, 20 bp, Artificial Sequence
  Description of Artificial Sequence: Synthetic oligonucleotide
  Target: ATXN2; (+) strand; PAM type: NRG; PAM sequence: CAG
aaaccaccaccccaggggca

SEQ ID NO: 36690 - DNA, 20 bp, Artificial Sequence
  Description of Artificial Sequence: Synthetic oligonucleotide
  Target: ATXN2; (+) strand; PAM type: NRG; PAM sequence: GAG
acagctgtatccatcttcac

SEQ ID NO: 36691 - DNA, 20 bp, Artificial Sequence
  Description of Artificial Sequence: Synthetic oligonucleotide
  Target: ATXN2; (+) strand; PAM type: NRG; PAM sequence: AGG
cagctgtatccatcttcacg

SEQ ID NO: 36692 - DNA, 20 bp, Artificial Sequence
  Description of Artificial Sequence: Synthetic oligonucleotide
  Target: ATXN2; (+) strand; PAM type: NRG; PAM sequence: GGG
agctgtatccatcttcacga

SEQ ID NO: 36693 - DNA, 20 bp, Artificial Sequence
  Description of Artificial Sequence: Synthetic oligonucleotide
  Target: ATXN2; (+) strand; PAM type: NRG; PAM sequence: TGG
tgtatccatcttcacgaggg

SEQ ID NO: 36694 - DNA, 20 bp, Artificial Sequence
  Description of Artificial Sequence: Synthetic oligonucleotide
  Target: ATXN2; (+) strand; PAM type: NRG; PAM sequence: TGG
tgttctgacgatgcgatacc

SEQ ID NO: 36695 - DNA, 20 bp, Artificial Sequence
  Description of Artificial Sequence: Synthetic oligonucleotide
  Target: ATXN2; (+) strand; PAM type: NRG; PAM sequence: AAG
gatgcgatacctggcacctg

SEQ ID NO: 36696 - DNA, 20 bp, Artificial Sequence
  Description of Artificial Sequence: Synthetic oligonucleotide
  Target: ATXN2; (+) strand; PAM type: NRG; PAM sequence: AAG
cgatacctggcacctgaaga

SEQ ID NO: 36697 - DNA, 20 bp, Artificial Sequence
  Description of Artificial Sequence: Synthetic oligonucleotide
  Target: ATXN2; (+) strand; PAM type: NRG; PAM sequence: CAG
tggcacctgaagaaagcact

SEQ ID NO: 36698 - DNA, 20 bp, Artificial Sequence
  Description of Artificial Sequence: Synthetic oligonucleotide
  Target: ATXN2; (+) strand; PAM type: NRG; PAM sequence: TAG
tgaagaaagcactcagatac

SEQ ID NO: 36699 - DNA, 20 bp, Artificial Sequence
  Description of Artificial Sequence: Synthetic oligonucleotide
  Target: ATXN2; (+) strand; PAM type: NRG; PAM sequence: AGG
gaagaaagcactcagatact

SEQ ID NO: 36700 - DNA, 20 bp, Artificial Sequence
  Description of Artificial Sequence: Synthetic oligonucleotide
  Target: ATXN2; (+) strand; PAM type: NRG; PAM sequence: AAG
agcactcagatactaggata

SEQ ID NO: 36701 - DNA, 20 bp, Artificial Sequence
  Description of Artificial Sequence: Synthetic oligonucleotide
  Target: ATXN2; (+) strand; PAM type: NRG; PAM sequence: AAG
actcagatactaggataaag

SEQ ID NO: 36702 - DNA, 20 bp, Artificial Sequence
  Description of Artificial Sequence: Synthetic oligonucleotide
  Target: ATXN2; (+) strand; PAM type: NRG; PAM sequence: CAG
gataaagaagccactccatg

SEQ ID NO: 36703 - DNA, 20 bp, Artificial Sequence
  Description of Artificial Sequence: Synthetic oligonucleotide
  Target: ATXN2; (+) strand; PAM type: NRG; PAM sequence: GAG
gccactccatgcagacctct

SEQ ID NO: 36704 - DNA, 20 bp, Artificial Sequence
  Description of Artificial Sequence: Synthetic oligonucleotide
  Target: ATXN2; (+) strand; PAM type: NRG; PAM sequence: CAG
ctgagttgcccttacctgaa

SEQ ID NO: 36705 - DNA, 20 bp, Artificial Sequence
  Description of Artificial Sequence: Synthetic oligonucleotide
  Target: ATXN2; (+) strand; PAM type: NRG; PAM sequence: AGG
tgagttgcccttacctgaac

SEQ ID NO: 36706 - DNA, 20 bp, Artificial Sequence
  Description of Artificial Sequence: Synthetic oligonucleotide
  Target: ATXN2; (+) strand; PAM type: NRG; PAM sequence: TGG
tgcccttacctgaacaggac

SEQ ID NO: 36707 - DNA, 20 bp, Artificial Sequence
  Description of Artificial Sequence: Synthetic oligonucleotide
  Target: ATXN2; (+) strand; PAM type: NRG; PAM sequence: GGG
gcccttacctgaacaggact

SEQ ID NO: 36708 - DNA, 20 bp, Artificial Sequence
  Description of Artificial Sequence: Synthetic oligonucleotide
  Target: ATXN2; (+) strand; PAM type: NRG; PAM sequence: CAG
tacctgaacaggactgggtg

SEQ ID NO: 36709 - DNA, 20 bp, Artificial Sequence
  Description of Artificial Sequence: Synthetic oligonucleotide
  Target: ATXN2; (+) strand; PAM type: NRG; PAM sequence: AGG
acctgaacaggactgggtgc

SEQ ID NO: 36710 - DNA, 20 bp, Artificial Sequence
  Description of Artificial Sequence: Synthetic oligonucleotide
  Target: ATXN2; (+) strand; PAM type: NRG; PAM sequence: TGG
caggatgacttccaccatgt

SEQ ID NO: 36711 - DNA, 20 bp, Artificial Sequence
  Description of Artificial Sequence: Synthetic oligonucleotide
  Target: ATXN2; (+) strand; PAM type: NRG; PAM sequence: CAG
atgttggctttgctgctgtc

SEQ ID NO: 36712 - DNA, 20 bp, Artificial Sequence
  Description of Artificial Sequence: Synthetic oligonucleotide
  Target: ATXN2; (+) strand; PAM type: NRG; PAM sequence: TGG
ttggctttgctgctgtccag

SEQ ID NO: 36713 - DNA, 20 bp, Artificial Sequence
  Description of Artificial Sequence: Synthetic oligonucleotide
  Target: ATXN2; (+) strand; PAM type: NRG; PAM sequence: GGG
tggctttgctgctgtccagt

SEQ ID NO: 36714 - DNA, 20 bp, Artificial Sequence
  Description of Artificial Sequence: Synthetic oligonucleotide
  Target: ATXN2; (+) strand; PAM type: NRG; PAM sequence: GGG
ggctttgctgctgtccagtg

SEQ ID NO: 36715 - DNA, 20 bp, Artificial Sequence
  Description of Artificial Sequence: Synthetic oligonucleotide
  Target: ATXN2; (+) strand; PAM type: NRG; PAM sequence: GGG
gctttgctgctgtccagtgg

SEQ ID NO: 36716 - DNA, 20 bp, Artificial Sequence
  Description of Artificial Sequence: Synthetic oligonucleotide
  Target: ATXN2; (+) strand; PAM type: NRG; PAM sequence: TAG
ttgctgctgtccagtggggg

SEQ ID NO: 36717 - DNA, 20 bp, Artificial Sequence
  Description of Artificial Sequence: Synthetic oligonucleotide
  Target: ATXN2; (+) strand; PAM type: NRG; PAM sequence: AAG
ctgtccagtgggggtagctg

SEQ ID NO: 36718 - DNA, 20 bp, Artificial Sequence
  Description of Artificial Sequence: Synthetic oligonucleotide
  Target: ATXN2; (+) strand; PAM type: NRG; PAM sequence: AGG
tgtccagtgggggtagctga

SEQ ID NO: 36719 - DNA, 20 bp, Artificial Sequence
  Description of Artificial Sequence: Synthetic oligonucleotide
  Target: ATXN2; (+) strand; PAM type: NRG; PAM sequence: GAG
agtgggggtagctgaaggct

SEQ ID NO: 36720 - DNA, 20 bp, Artificial Sequence
  Description of Artificial Sequence: Synthetic oligonucleotide
  Target: ATXN2; (+) strand; PAM type: NRG; PAM sequence: AGG
gtgggggtagctgaaggctg

SEQ ID NO: 36721 - DNA, 20 bp, Artificial Sequence
  Description of Artificial Sequence: Synthetic oligonucleotide
  Target: ATXN2; (+) strand; PAM type: NRG; PAM sequence: GGG
tgggggtagctgaaggctga

SEQ ID NO: 36722 - DNA, 20 bp, Artificial Sequence
  Description of Artificial Sequence: Synthetic oligonucleotide
  Target: ATXN2; (+) strand; PAM type: NRG; PAM sequence: TGG
gtagctgaaggctgagggtg

SEQ ID NO: 36723 - DNA, 20 bp, Artificial Sequence
  Description of Artificial Sequence: Synthetic oligonucleotide
  Target: ATXN2; (+) strand; PAM type: NRG; PAM sequence: GAG
agctgaaggctgagggtgtg

SEQ ID NO: 36724 - DNA, 20 bp, Artificial Sequence
  Description of Artificial Sequence: Synthetic oligonucleotide
  Target: ATXN2; (+) strand; PAM type: NRG; PAM sequence: TGG
ggctgagggtgtggagtatg

SEQ ID NO: 36725 - DNA, 20 bp, Artificial Sequence
  Description of Artificial Sequence: Synthetic oligonucleotide
  Target: ATXN2; (+) strand; PAM type: NRG; PAM sequence: GGG
gctgagggtgtggagtatgt

SEQ ID NO: 36726 - DNA, 20 bp, Artificial Sequence
  Description of Artificial Sequence: Synthetic oligonucleotide
  Target: ATXN2; (+) strand; PAM type: NRG; PAM sequence: CAG
gggtgtggagtatgtgggtg

SEQ ID NO: 36727 - DNA, 20 bp, Artificial Sequence
  Description of Artificial Sequence: Synthetic oligonucleotide
  Target: ATXN2; (+) strand; PAM type: NRG; PAM sequence: AGG
ggtgtggagtatgtgggtgc

SEQ ID NO: 36728 - DNA, 20 bp, Artificial Sequence
  Description of Artificial Sequence: Synthetic oligonucleotide
  Target: ATXN2; (+) strand; PAM type: NRG; PAM sequence: GGG
gtgtggagtatgtgggtgca

SEQ ID NO: 36729 - DNA, 20 bp, Artificial Sequence
  Description of Artificial Sequence: Synthetic oligonucleotide
  Target: ATXN2; (+) strand; PAM type: NRG; PAM sequence: TAG
tggagtatgtgggtgcaggg

SEQ ID NO: 36730 - DNA, 20 bp, Artificial Sequence
  Description of Artificial Sequence: Synthetic oligonucleotide
  Target: ATXN2; (+) strand; PAM type: NRG; PAM sequence: TAG
atgtgggtgcagggtagcgt

SEQ ID NO: 36731 - DNA, 20 bp, Artificial Sequence
  Description of Artificial Sequence: Synthetic oligonucleotide
  Target: ATXN2; (+) strand; PAM type: NRG; PAM sequence: AGG
tgtgggtgcagggtagcgtt

SEQ ID NO: 36732 - DNA, 20 bp, Artificial Sequence
  Description of Artificial Sequence: Synthetic oligonucleotide
  Target: ATXN2; (+) strand; PAM type: NRG; PAM sequence: GGG
gtgggtgcagggtagcgtta

SEQ ID NO: 36733 - DNA, 20 bp, Artificial Sequence
  Description of Artificial Sequence: Synthetic oligonucleotide
  Target: ATXN2; (+) strand; PAM type: NRG; PAM sequence: GAG
gttagggtgcgcatactgct

SEQ ID NO: 36734 - DNA, 20 bp, Artificial Sequence
  Description of Artificial Sequence: Synthetic oligonucleotide
  Target: ATXN2; (+) strand; PAM type: NRG; PAM sequence: AAG
gggtgcgcatactgctgagc

SEQ ID NO: 36735 - DNA, 20 bp, Artificial Sequence
  Description of Artificial Sequence: Synthetic oligonucleotide
  Target: ATXN2; (+) strand; PAM type: NRG; PAM sequence: AGG
ggtgcgcatactgctgagca

SEQ ID NO: 36736 - DNA, 20 bp, Artificial Sequence
  Description of Artificial Sequence: Synthetic oligonucleotide
  Target: ATXN2; (+) strand; PAM type: NRG; PAM sequence: GGG
gtgcgcatactgctgagcaa

SEQ ID NO: 36737 - DNA, 20 bp, Artificial Sequence
  Description of Artificial Sequence: Synthetic oligonucleotide
  Target: ATXN2; (+) strand; PAM type: NRG; PAM sequence: GAG
gcgcatactgctgagcaagg

SEQ ID NO: 36738 - DNA, 20 bp, Artificial Sequence
  Description of Artificial Sequence: Synthetic oligonucleotide
  Target: ATXN2; (+) strand; PAM type: NRG; PAM sequence: TGG
ctgctgagcaagggagcccg

SEQ ID NO: 36739 - DNA, 20 bp, Artificial Sequence
  Description of Artificial Sequence: Synthetic oligonucleotide
  Target: ATXN2; (+) strand; PAM type: NRG; PAM sequence: AAG
aagggagcccgtggaaacta

SEQ ID NO: 36740 - DNA, 20 bp, Artificial Sequence
  Description of Artificial Sequence: Synthetic oligonucleotide
  Target: ATXN2; (+) strand; PAM type: NRG; PAM sequence: AAG
gcccgtggaaactaaagtga

SEQ ID NO: 36741 - DNA, 20 bp, Artificial Sequence
  Description of Artificial Sequence: Synthetic oligonucleotide
  Target: ATXN2; (+) strand; PAM type: NRG; PAM sequence: AAG
ggaaactaaagtgaaagaaa

SEQ ID NO: 36742 - DNA, 20 bp, Artificial Sequence
  Description of Artificial Sequence: Synthetic oligonucleotide
  Target: ATXN2; (+) strand; PAM type: NRG; PAM sequence: AGG
gaaactaaagtgaaagaaaa

SEQ ID NO: 36743 - DNA, 20 bp, Artificial Sequence
  Description of Artificial Sequence: Synthetic oligonucleotide
  Target: ATXN2; (+) strand; PAM type: NRG; PAM sequence: GAG
aactaaagtgaaagaaaaag

SEQ ID NO: 36744 - DNA, 20 bp, Artificial Sequence
  Description of Artificial Sequence: Synthetic oligonucleotide
  Target: ATXN2; (+) strand; PAM type: NRG; PAM sequence: TGG
catcaactgaactttcttga

SEQ ID NO: 36745 - DNA, 20 bp, Artificial Sequence
  Description of Artificial Sequence: Synthetic oligonucleotide
  Target: ATXN2; (+) strand; PAM type: NRG; PAM sequence: TAG
cacgccactaccaatttcta

SEQ ID NO: 36746 - DNA, 20 bp, Artificial Sequence
  Description of Artificial Sequence: Synthetic oligonucleotide
  Target: ATXN2; (+) strand; PAM type: NRG; PAM sequence: AAG
atccattgtcttgaaaaaat

SEQ ID NO: 36747 - DNA, 20 bp, Artificial Sequence
  Description of Artificial Sequence: Synthetic oligonucleotide
  Target: ATXN2; (+) strand; PAM type: NRG; PAM sequence: TAG
ttgtcttgaaaaaataagtg

SEQ ID NO: 36748 - DNA, 20 bp, Artificial Sequence
  Description of Artificial Sequence: Synthetic oligonucleotide
  Target: ATXN2; (+) strand; PAM type: NRG; PAM sequence: CAG
taagtgtagctattgcttaa

SEQ ID NO: 36749 - DNA, 20 bp, Artificial Sequence
  Description of Artificial Sequence: Synthetic oligonucleotide
  Target: ATXN2; (+) strand; PAM type: NRG; PAM sequence: TAG
gtagctattgcttaacagac

SEQ ID NO: 36750 - DNA, 20 bp, Artificial Sequence
  Description of Artificial Sequence: Synthetic oligonucleotide
  Target: ATXN2; (+) strand; PAM type: NRG; PAM sequence: TGG
ttgcttaacagactagcatt

SEQ ID NO: 36751 - DNA, 20 bp, Artificial Sequence
  Description of Artificial Sequence: Synthetic oligonucleotide
  Target: ATXN2; (+) strand; PAM type: NRG; PAM sequence: CAG
agcatttggttcatataata

SEQ ID NO: 36752 - DNA, 20 bp, Artificial Sequence
  Description of Artificial Sequence: Synthetic oligonucleotide
  Target: ATXN2; (+) strand; PAM type: NRG; PAM sequence: TAG
atatgatattaaaatcaaat

SEQ ID NO: 36753 - DNA, 20 bp, Artificial Sequence
  Description of Artificial Sequence: Synthetic oligonucleotide
  Target: ATXN2; (+) strand; PAM type: NRG; PAM sequence: CGG
tagtttgcatttactcttaa

SEQ ID NO: 36754 - DNA, 20 bp, Artificial Sequence
  Description of Artificial Sequence: Synthetic oligonucleotide
  Target: ATXN2; (+) strand; PAM type: NRG; PAM sequence: TAG
catttactcttaacggtcac

SEQ ID NO: 36755 - DNA, 20 bp, Artificial Sequence
  Description of Artificial Sequence: Synthetic oligonucleotide
  Target: ATXN2; (+) strand; PAM type: NRG; PAM sequence: AGG
atttactcttaacggtcact

SEQ ID NO: 36756 - DNA, 20 bp, Artificial Sequence
  Description of Artificial Sequence: Synthetic oligonucleotide
  Target: ATXN2; (+) strand; PAM type: NRG; PAM sequence: AAG
ggtcactaggttttcccaaa

SEQ ID NO: 36757 - DNA, 20 bp, Artificial Sequence
  Description of Artificial Sequence: Synthetic oligonucleotide
  Target: ATXN2; (+) strand; PAM type: NRG; PAM sequence: AGG
gtcactaggttttcccaaaa

SEQ ID NO: 36758 - DNA, 20 bp, Artificial Sequence
  Description of Artificial Sequence: Synthetic oligonucleotide
  Target: ATXN2; (+) strand; PAM type: NRG; PAM sequence: AAG
tttcccaaaaaggcaacttg

SEQ ID NO: 36759 - DNA, 20 bp, Artificial Sequence
  Description of Artificial Sequence: Synthetic oligonucleotide
  Target: ATXN2; (+) strand; PAM type: NRG; PAM sequence: AGG
ttcccaaaaaggcaacttga

SEQ ID NO: 36760 - DNA, 20 bp, Artificial Sequence
  Description of Artificial Sequence: Synthetic oligonucleotide
  Target: ATXN2; (+) strand; PAM type: NRG; PAM sequence: TAG
aaaaaggcaacttgaaggca

SEQ ID NO: 36761 - DNA, 20 bp, Artificial Sequence
  Description of Artificial Sequence: Synthetic oligonucleotide
  Target: ATXN2; (+) strand; PAM type: NRG; PAM sequence: AGG
aaaaggcaacttgaaggcat

SEQ ID NO: 36762 - DNA, 20 bp, Artificial Sequence
  Description of Artificial Sequence: Synthetic oligonucleotide
  Target: ATXN2; (+) strand; PAM type: NRG; PAM sequence: CAG
aggcaacttgaaggcatagg

SEQ ID NO: 36763 - DNA, 20 bp, Artificial Sequence
  Description of Artificial Sequence: Synthetic oligonucleotide
  Target: ATXN2; (+) strand; PAM type: NRG; PAM sequence: AAG
taggcagaaactactcaaac

SEQ ID NO: 36764 - DNA, 20 bp, Artificial Sequence
  Description of Artificial Sequence: Synthetic oligonucleotide
  Target: ATXN2; (+) strand; PAM type: NRG; PAM sequence: TAG
ctactcaaacaagtgcattt

SEQ ID NO: 36765 - DNA, 20 bp, Artificial Sequence
  Description of Artificial Sequence: Synthetic oligonucleotide
  Target: ATXN2; (+) strand; PAM type: NRG; PAM sequence: AGG
tactcaaacaagtgcatttt

SEQ ID NO: 36766 - DNA, 20 bp, Artificial Sequence
  Description of Artificial Sequence: Synthetic oligonucleotide
  Target: ATXN2; (+) strand; PAM type: NRG; PAM sequence: TAG
cattttaggtgcacactctt

SEQ ID NO: 36767 - DNA, 20 bp, Artificial Sequence
  Description of Artificial Sequence: Synthetic oligonucleotide
  Target: ATXN2; (+) strand; PAM type: NRG; PAM sequence: AAG
aggtgcacactctttagctc

SEQ ID NO: 36768 - DNA, 20 bp, Artificial Sequence
  Description of Artificial Sequence: Synthetic oligonucleotide
  Target: ATXN2; (+) strand; PAM type: NRG; PAM sequence: AGG
ggtgcacactctttagctca

SEQ ID NO: 36769 - DNA, 20 bp, Artificial Sequence
  Description of Artificial Sequence: Synthetic oligonucleotide
  Target: ATXN2; (+) strand; PAM type: NRG; PAM sequence: CAG
ctttagctcaaggccatcat

SEQ ID NO: 36770 - DNA, 20 bp, Artificial Sequence
  Description of Artificial Sequence: Synthetic oligonucleotide
  Target: ATXN2; (+) strand; PAM type: NRG; PAM sequence: AGG
tttagctcaaggccatcatc

SEQ ID NO: 36771 - DNA, 20 bp, Artificial Sequence
  Description of Artificial Sequence: Synthetic oligonucleotide
  Target: ATXN2; (+) strand; PAM type: NRG; PAM sequence: TGG
acctcaccatgctactgccc

SEQ ID NO: 36772 - DNA, 20 bp, Artificial Sequence
  Description of Artificial Sequence: Synthetic oligonucleotide
  Target: ATXN2; (+) strand; PAM type: NRG; PAM sequence: GAG
ctcaccatgctactgccctg

SEQ ID NO: 36773 - DNA, 20 bp, Artificial Sequence
  Description of Artificial Sequence: Synthetic oligonucleotide
  Target: ATXN2; (+) strand; PAM type: NRG; PAM sequence: GAG
ctgccctggagcaatgtcct

SEQ ID NO: 36774 - DNA, 20 bp, Artificial Sequence
  Description of Artificial Sequence: Synthetic oligonucleotide
  Target: ATXN2; (+) strand; PAM type: NRG; PAM sequence: AGG
tgccctggagcaatgtcctg

SEQ ID NO: 36775 - DNA, 20 bp, Artificial Sequence
  Description of Artificial Sequence: Synthetic oligonucleotide
  Target: ATXN2; (+) strand; PAM type: NRG; PAM sequence: GGG
gccctggagcaatgtcctga

SEQ ID NO: 36776 - DNA, 20 bp, Artificial Sequence
  Description of Artificial Sequence: Synthetic oligonucleotide
  Target: ATXN2; (+) strand; PAM type: NRG; PAM sequence: CAG
ggagcaatgtcctgagggca

SEQ ID NO: 36777 - DNA, 20 bp, Artificial Sequence
  Description of Artificial Sequence: Synthetic oligonucleotide
  Target: ATXN2; (+) strand; PAM type: NRG; PAM sequence: TGG
cctgagggcacagactatat

SEQ ID NO: 36778 - DNA, 20 bp, Artificial Sequence
  Description of Artificial Sequence: Synthetic oligonucleotide
  Target: ATXN2; (+) strand; PAM type: NRG; PAM sequence: GGG
ctgagggcacagactatatt

SEQ ID NO: 36779 - DNA, 20 bp, Artificial Sequence
  Description of Artificial Sequence: Synthetic oligonucleotide
  Target: ATXN2; (+) strand; PAM type: NRG; PAM sequence: TGG
ggcacagactatattgggtg

SEQ ID NO: 36780 - DNA, 20 bp, Artificial Sequence
  Description of Artificial Sequence: Synthetic oligonucleotide
  Target: ATXN2; (+) strand; PAM type: NRG; PAM sequence: TGG
acagactatattgggtgtgg

SEQ ID NO: 36781 - DNA, 20 bp, Artificial Sequence
  Description of Artificial Sequence: Synthetic oligonucleotide
  Target: ATXN2; (+) strand; PAM type: NRG; PAM sequence: GGG
cagactatattgggtgtggt

SEQ ID NO: 36782 - DNA, 20 bp, Artificial Sequence
  Description of Artificial Sequence: Synthetic oligonucleotide
  Target: ATXN2; (+) strand; PAM type: NRG; PAM sequence: GGG
agactatattgggtgtggtg

SEQ ID NO: 36783 - DNA, 20 bp, Artificial Sequence
  Description of Artificial Sequence: Synthetic oligonucleotide
  Target: ATXN2; (+) strand; PAM type: NRG; PAM sequence: GGG
gactatattgggtgtggtgg

SEQ ID NO: 36784 - DNA, 20 bp, Artificial Sequence
  Description of Artificial Sequence: Synthetic oligonucleotide
  Target: ATXN2; (+) strand; PAM type: NRG; PAM sequence: TGG
atattgggtgtggtggggga

SEQ ID NO: 36785 - DNA, 20 bp, Artificial Sequence
  Description of Artificial Sequence: Synthetic oligonucleotide
  Target: ATXN2; (+) strand; PAM type: NRG; PAM sequence: GGG
tattgggtgtggtgggggat

SEQ ID NO: 36786 - DNA, 20 bp, Artificial Sequence
  Description of Artificial Sequence: Synthetic oligonucleotide
  Target: ATXN2; (+) strand; PAM type: NRG; PAM sequence: GGG
attgggtgtggtgggggatg

SEQ ID NO: 36787 - DNA, 20 bp, Artificial Sequence
  Description of Artificial Sequence: Synthetic oligonucleotide
  Target: ATXN2; (+) strand; PAM type: NRG; PAM sequence: GGG
ttgggtgtggtgggggatgg

SEQ ID NO: 36788 - DNA, 20 bp, Artificial Sequence
  Description of Artificial Sequence: Synthetic oligonucleotide
  Target: ATXN2; (+) strand; PAM type: NRG; PAM sequence: CGG
tgtggtgggggatgggggtg

SEQ ID NO: 36789 - DNA, 20 bp, Artificial Sequence
  Description of Artificial Sequence: Synthetic oligonucleotide
  Target: ATXN2; (+) strand; PAM type: NRG; PAM sequence: GGG
gtggtgggggatgggggtgc

SEQ ID NO: 36790 - DNA, 20 bp, Artificial Sequence
  Description of Artificial Sequence: Synthetic oligonucleotide
  Target: ATXN2; (+) strand; PAM type: NRG; PAM sequence: TGG
gggggtgcgggcactgtgta

SEQ ID NO: 36791 - DNA, 20 bp, Artificial Sequence
  Description of Artificial Sequence: Synthetic oligonucleotide
  Target: ATXN2; (+) strand; PAM type: NRG; PAM sequence: TGG
cgggcactgtgtatggtatg

SEQ ID NO: 36792 - DNA, 20 bp, Artificial Sequence
  Description of Artificial Sequence: Synthetic oligonucleotide
  Target: ATXN2; (+) strand; PAM type: NRG; PAM sequence: AAG
cactgtgtatggtatgtggc

SEQ ID NO: 36793 - DNA, 20 bp, Artificial Sequence
  Description of Artificial Sequence: Synthetic oligonucleotide
  Target: ATXN2; (+) strand; PAM type: NRG; PAM sequence: AGG
actgtgtatggtatgtggca

SEQ ID NO: 36794 - DNA, 20 bp, Artificial Sequence
  Description of Artificial Sequence: Synthetic oligonucleotide
  Target: ATXN2; (+) strand; PAM type: NRG; PAM sequence: CAG
tgtatggtatgtggcaaggc

SEQ ID NO: 36795 - DNA, 20 bp, Artificial Sequence
  Description of Artificial Sequence: Synthetic oligonucleotide
  Target: ATXN2; (+) strand; PAM type: NRG; PAM sequence: AGG
gtatggtatgtggcaaggcc

SEQ ID NO: 36796 - DNA, 20 bp, Artificial Sequence
  Description of Artificial Sequence: Synthetic oligonucleotide
  Target: ATXN2; (+) strand; PAM type: NRG; PAM sequence: GGG
tatggtatgtggcaaggcca

SEQ ID NO: 36797 - DNA, 20 bp, Artificial Sequence
  Description of Artificial Sequence: Synthetic oligonucleotide
  Target: ATXN2; (+) strand; PAM type: NRG; PAM sequence: CAG
caaggccagggatctatcat

SEQ ID NO: 36798 - DNA, 20 bp, Artificial Sequence
  Description of Artificial Sequence: Synthetic oligonucleotide
  Target: ATXN2; (+) strand; PAM type: NRG; PAM sequence: AGG
aaggccagggatctatcatc

SEQ ID NO: 36799 - DNA, 20 bp, Artificial Sequence
  Description of Artificial Sequence: Synthetic oligonucleotide
  Target: ATXN2; (+) strand; PAM type: NRG; PAM sequence: GGG
aggccagggatctatcatca

SEQ ID NO: 36800 - DNA, 20 bp, Artificial Sequence
  Description of Artificial Sequence: Synthetic oligonucleotide
  Target: ATXN2; (+) strand; PAM type: NRG; PAM sequence: AAG
gggatctatcatcagggccg

SEQ ID NO: 36801 - DNA, 20 bp, Artificial Sequence
  Description of Artificial Sequence: Synthetic oligonucleotide
  Target: ATXN2; (+) strand; PAM type: NRG; PAM sequence: AGG
ggatctatcatcagggccga

SEQ ID NO: 36802 - DNA, 20 bp, Artificial Sequence
  Description of Artificial Sequence: Synthetic oligonucleotide
  Target: ATXN2; (+) strand; PAM type: NRG; PAM sequence: CAG
tcatcagggccgaaggacca

SEQ ID NO: 36803 - DNA, 20 bp, Artificial Sequence
  Description of Artificial Sequence: Synthetic oligonucleotide
  Target: ATXN2; (+) strand; PAM type: NRG; PAM sequence: CAG
cgaaggaccacagtctctct

SEQ ID NO: 36804 - DNA, 20 bp, Artificial Sequence
  Description of Artificial Sequence: Synthetic oligonucleotide
  Target: ATXN2; (+) strand; PAM type: NRG; PAM sequence: CAG
cagtctctctcagctaatca

SEQ ID NO: 36805 - DNA, 20 bp, Artificial Sequence
  Description of Artificial Sequence: Synthetic oligonucleotide
  Target: ATXN2; (+) strand; PAM type: NRG; PAM sequence: AGG
agtctctctcagctaatcac

SEQ ID NO: 36806 - DNA, 20 bp, Artificial Sequence
  Description of Artificial Sequence: Synthetic oligonucleotide
  Target: ATXN2; (+) strand; PAM type: NRG; PAM sequence: GAG
tctctctcagctaatcacag

SEQ ID NO: 36807 - DNA, 20 bp, Artificial Sequence
  Description of Artificial Sequence: Synthetic oligonucleotide
  Target: ATXN2; (+) strand; PAM type: NRG; PAM sequence: CAG
acaggagcccttctgccact

SEQ ID NO: 36808 - DNA, 20 bp, Artificial Sequence
  Description of Artificial Sequence: Synthetic oligonucleotide
  Target: ATXN2; (+) strand; PAM type: NRG; PAM sequence: AAG
gccactcagtttactttccc

SEQ ID NO: 36809 - DNA, 20 bp, Artificial Sequence
  Description of Artificial Sequence: Synthetic oligonucleotide
  Target: ATXN2; (+) strand; PAM type: NRG; PAM sequence: TGG
tttactttcccaagccctaa

SEQ ID NO: 36810 - DNA, 20 bp, Artificial Sequence
  Description of Artificial Sequence: Synthetic oligonucleotide
  Target: ATXN2; (+) strand; PAM type: NRG; PAM sequence: GAG
tactttcccaagccctaatg

SEQ ID NO: 36811 - DNA, 20 bp, Artificial Sequence
  Description of Artificial Sequence: Synthetic oligonucleotide
  Target: ATXN2; (+) strand; PAM type: NRG; PAM sequence: AGG
actttcccaagccctaatgg

SEQ ID NO: 36812 - DNA, 20 bp, Artificial Sequence
  Description of Artificial Sequence: Synthetic oligonucleotide
  Target: ATXN2; (+) strand; PAM type: NRG; PAM sequence: TAG
tttgctttatgaaataaata

SEQ ID NO: 36813 - DNA, 20 bp, Artificial Sequence
  Description of Artificial Sequence: Synthetic oligonucleotide
  Target: ATXN2; (+) strand; PAM type: NRG; PAM sequence: AAG
tttatgaaataaatatagaa

SEQ ID NO: 36814 - DNA, 20 bp, Artificial Sequence
  Description of Artificial Sequence: Synthetic oligonucleotide
  Target: ATXN2; (+) strand; PAM type: NRG; PAM sequence: GAG
agaaaagtaaactcccttct

SEQ ID NO: 36815 - DNA, 20 bp, Artificial Sequence
  Description of Artificial Sequence: Synthetic oligonucleotide
  Target: ATXN2; (+) strand; PAM type: NRG; PAM sequence: CAG
aaactcccttctgagtgccc

SEQ ID NO: 36816 - DNA, 20 bp, Artificial Sequence
  Description of Artificial Sequence: Synthetic oligonucleotide
  Target: ATXN2; (+) strand; PAM type: NRG; PAM sequence: TGG
ttctgagtgccccagccctt

SEQ ID NO: 36817 - DNA, 20 bp, Artificial Sequence
  Description of Artificial Sequence: Synthetic oligonucleotide
  Target: ATXN2; (+) strand; PAM type: NRG; PAM sequence: AAG
gagtgccccagccctttgga

SEQ ID NO: 36818 - DNA, 20 bp, Artificial Sequence
  Description of Artificial Sequence: Synthetic oligonucleotide
  Target: ATXN2; (+) strand; PAM type: NRG; PAM sequence: TAG
ccctttggaaagaaatttac

SEQ ID NO: 36819 - DNA, 20 bp, Artificial Sequence
  Description of Artificial Sequence: Synthetic oligonucleotide
  Target: ATXN2; (+) strand; PAM type: NRG; PAM sequence: AAG
aatttactagactaacttca

SEQ ID NO: 36820 - DNA, 20 bp, Artificial Sequence
  Description of Artificial Sequence: Synthetic oligonucleotide
  Target: ATXN2; (+) strand; PAM type: NRG; PAM sequence: AGG
atttactagactaacttcaa

SEQ ID NO: 36821 - DNA, 20 bp, Artificial Sequence
  Description of Artificial Sequence: Synthetic oligonucleotide
  Target: ATXN2; (+) strand; PAM type: NRG; PAM sequence: TGG
aacttcaaaggacaacatga

SEQ ID NO: 36822 - DNA, 20 bp, Artificial Sequence
  Description of Artificial Sequence: Synthetic oligonucleotide
  Target: ATXN2; (+) strand; PAM type: NRG; PAM sequence: GGG
acttcaaaggacaacatgat

SEQ ID NO: 36823 - DNA, 20 bp, Artificial Sequence
  Description of Artificial Sequence: Synthetic oligonucleotide
  Target: ATXN2; (+) strand; PAM type: NRG; PAM sequence: CAG
caaaggacaacatgatgggc

SEQ ID NO: 36824 - DNA, 20 bp, Artificial Sequence
  Description of Artificial Sequence: Synthetic oligonucleotide
  Target: ATXN2; (+) strand; PAM type: NRG; PAM sequence: AAG
ggccagtttaaatcaaaata

SEQ ID NO: 36825 - DNA, 20 bp, Artificial Sequence
  Description of Artificial Sequence: Synthetic oligonucleotide
  Target: ATXN2; (+) strand; PAM type: NRG; PAM sequence: AAG
gtttaaatcaaaataaagat

SEQ ID NO: 36826 - DNA, 20 bp, Artificial Sequence
  Description of Artificial Sequence: Synthetic oligonucleotide
  Target: ATXN2; (+) strand; PAM type: NRG; PAM sequence: AAG
aaaataaagataagaactga

SEQ ID NO: 36827 - DNA, 20 bp, Artificial Sequence
  Description of Artificial Sequence: Synthetic oligonucleotide
  Target: ATXN2; (+) strand; PAM type: NRG; PAM sequence: CAG
taaagataagaactgaaagc

SEQ ID NO: 36828 - DNA, 20 bp, Artificial Sequence
  Description of Artificial Sequence: Synthetic oligonucleotide
  Target: ATXN2; (+) strand; PAM type: NRG; PAM sequence: CAG
agccagttctttgtgaatct

SEQ ID NO: 36829 - DNA, 20 bp, Artificial Sequence
  Description of Artificial Sequence: Synthetic oligonucleotide
  Target: ATXN2; (+) strand; PAM type: NRG; PAM sequence: TGG
gttctttgtgaatctcagcg

SEQ ID NO: 36830 - DNA, 20 bp, Artificial Sequence
  Description of Artificial Sequence: Synthetic oligonucleotide
  Target: ATXN2; (+) strand; PAM type: NRG; PAM sequence: GGG
ttctttgtgaatctcagcgt

SEQ ID NO: 36831 - DNA, 20 bp, Artificial Sequence
  Description of Artificial Sequence: Synthetic oligonucleotide
  Target: ATXN2; (+) strand; PAM type: NRG; PAM sequence: TGG
tctcagcgtgggccaaacct

SEQ ID NO: 36832 - DNA, 20 bp, Artificial Sequence
  Description of Artificial Sequence: Synthetic oligonucleotide
  Target: ATXN2; (+) strand; PAM type: NRG; PAM sequence: CAG
aaccatttcttcatgtcttt

SEQ ID NO: 36833 - DNA, 20 bp, Artificial Sequence
  Description of Artificial Sequence: Synthetic oligonucleotide
  Target: ATXN2; (+) strand; PAM type: NRG; PAM sequence: GAG
tttgttttttgttttttttt

SEQ ID NO: 36834 - DNA, 20 bp, Artificial Sequence
  Description of Artificial Sequence: Synthetic oligonucleotide
  Target: ATXN2; (+) strand; PAM type: NRG; PAM sequence: AAG
tttgtttttttttgagatat

SEQ ID NO: 36835 - DNA, 20 bp, Artificial Sequence
  Description of Artificial Sequence: Synthetic oligonucleotide
  Target: ATXN2; (+) strand; PAM type: NRG; PAM sequence: CAG
gtctcactcactctgttgcc

SEQ ID NO: 36836 - DNA, 20 bp, Artificial Sequence
  Description of Artificial Sequence: Synthetic oligonucleotide
  Target: ATXN2; (+) strand; PAM type: NRG; PAM sequence: AGG
tctcactcactctgttgccc

SEQ ID NO: 36837 - DNA, 20 bp, Artificial Sequence
  Description of Artificial Sequence: Synthetic oligonucleotide
  Target: ATXN2; (+) strand; PAM type: NRG; PAM sequence: CAG
tcactgcaacctctgcctcc

SEQ ID NO: 36838 - DNA, 20 bp, Artificial Sequence
  Description of Artificial Sequence: Synthetic oligonucleotide
  Target: ATXN2; (+) strand; PAM type: NRG; PAM sequence: AGG
cactgcaacctctgcctccc

SEQ ID NO: 36839 - DNA, 20 bp, Artificial Sequence
  Description of Artificial Sequence: Synthetic oligonucleotide
  Target: ATXN2; (+) strand; PAM type: NRG; PAM sequence: AAG
aacctctgcctcccaggttc

SEQ ID NO: 36840 - DNA, 20 bp, Artificial Sequence
  Description of Artificial Sequence: Synthetic oligonucleotide
  Target: ATXN2; (+) strand; PAM type: NRG; PAM sequence: CAG
ttcaagcaattctcctgcct

SEQ ID NO: 36841 - DNA, 20 bp, Artificial Sequence
  Description of Artificial Sequence: Synthetic oligonucleotide
  Target: ATXN2; (+) strand; PAM type: NRG; PAM sequence: GAG
ttctcctgcctcagcctccc

SEQ ID NO: 36842 - DNA, 20 bp, Artificial Sequence
  Description of Artificial Sequence: Synthetic oligonucleotide
  Target: ATXN2; (+) strand; PAM type: NRG; PAM sequence: TAG
tcctgcctcagcctcccgag

SEQ ID NO: 36843 - DNA, 20 bp, Artificial Sequence
  Description of Artificial Sequence: Synthetic oligonucleotide
  Target: ATXN2; (+) strand; PAM type: NRG; PAM sequence: GAG
cctcagcctcccgagtagct

SEQ ID NO: 36844 - DNA, 20 bp, Artificial Sequence
  Description of Artificial Sequence: Synthetic oligonucleotide
  Target: ATXN2; (+) strand; PAM type: NRG; PAM sequence: CAG
ctcccgagtagctgagatta

SEQ ID NO: 36845 - DNA, 20 bp, Artificial Sequence
  Description of Artificial Sequence: Synthetic oligonucleotide
  Target: ATXN2; (+) strand; PAM type: NRG; PAM sequence: AGG
tcccgagtagctgagattac

SEQ ID NO: 36846 - DNA, 20 bp, Artificial Sequence
  Description of Artificial Sequence: Synthetic oligonucleotide
  Target: ATXN2; (+) strand; PAM type: NRG; PAM sequence: CAG
caggcatgtgccaccacgcc

SEQ ID NO: 36847 - DNA, 20 bp, Artificial Sequence
  Description of Artificial Sequence: Synthetic oligonucleotide
  Target: ATXN2; (+) strand; PAM type: NRG; PAM sequence: TAG
ccagctaatttttgtatttt

SEQ ID NO: 36848 - DNA, 20 bp, Artificial Sequence
  Description of Artificial Sequence: Synthetic oligonucleotide
  Target: ATXN2; (+) strand; PAM type: NRG; PAM sequence: TAG
gctaatttttgtatttttag

SEQ ID NO: 36849 - DNA, 20 bp, Artificial Sequence
  Description of Artificial Sequence: Synthetic oligonucleotide
  Target: ATXN2; (+) strand; PAM type: NRG; PAM sequence: GAG
taatttttgtatttttagta

SEQ ID NO: 36850 - DNA, 20 bp, Artificial Sequence
  Description of Artificial Sequence: Synthetic oligonucleotide
  Target: ATXN2; (+) strand; PAM type: NRG; PAM sequence: TGG
ttttgtatttttagtagaga

SEQ ID NO: 36851 - DNA, 20 bp, Artificial Sequence
  Description of Artificial Sequence: Synthetic oligonucleotide
  Target: ATXN2; (+) strand; PAM type: NRG; PAM sequence: GGG
tttgtatttttagtagagat

SEQ ID NO: 36852 - DNA, 20 bp, Artificial Sequence
  Description of Artificial Sequence: Synthetic oligonucleotide
  Target: ATXN2; (+) strand; PAM type: NRG; PAM sequence: GGG
ttgtatttttagtagagatg

SEQ ID NO: 36853 - DNA, 20 bp, Artificial Sequence
  Description of Artificial Sequence: Synthetic oligonucleotide
  Target: ATXN2; (+) strand; PAM type: NRG; PAM sequence: TGG
gagatggggtttcgccatgc

SEQ ID NO: 36854 - DNA, 20 bp, Artificial Sequence
  Description of Artificial Sequence: Synthetic oligonucleotide
  Target: ATXN2; (+) strand; PAM type: NRG; PAM sequence: CAG
tggggtttcgccatgctggc

SEQ ID NO: 36855 - DNA, 20 bp, Artificial Sequence
  Description of Artificial Sequence: Synthetic oligonucleotide
  Target: ATXN2; (+) strand; PAM type: NRG; PAM sequence: AGG
ggggtttcgccatgctggcc

SEQ ID NO: 36856 - DNA, 20 bp, Artificial Sequence
  Description of Artificial Sequence: Synthetic oligonucleotide
  Target: ATXN2; (+) strand; PAM type: NRG; PAM sequence: CAG
ctcaaatgatccgcccactt

SEQ ID NO: 36857 - DNA, 20 bp, Artificial Sequence
  Description of Artificial Sequence: Synthetic oligonucleotide
  Target: ATXN2; (+) strand; PAM type: NRG; PAM sequence: AAG
ccgcccacttcagcctccca

SEQ ID NO: 36858 - DNA, 20 bp, Artificial Sequence
  Description of Artificial Sequence: Synthetic oligonucleotide
  Target: ATXN2; (+) strand; PAM type: NRG; PAM sequence: TGG
acttcagcctcccaaagtgc

SEQ ID NO: 36859 - DNA, 20 bp, Artificial Sequence
  Description of Artificial Sequence: Synthetic oligonucleotide
  Target: ATXN2; (+) strand; PAM type: NRG; PAM sequence: GGG
cttcagcctcccaaagtgct

SEQ ID NO: 36860 - DNA, 20 bp, Artificial Sequence
  Description of Artificial Sequence: Synthetic oligonucleotide
  Target: ATXN2; (+) strand; PAM type: NRG; PAM sequence: CAG
ctcccaaagtgctgggatta

SEQ ID NO: 36861 - DNA, 20 bp, Artificial Sequence
  Description of Artificial Sequence: Synthetic oligonucleotide
  Target: ATXN2; (+) strand; PAM type: NRG; PAM sequence: GAG
agtgctgggattacagacgt

SEQ ID NO: 36862 - DNA, 20 bp, Artificial Sequence
  Description of Artificial Sequence: Synthetic oligonucleotide
  Target: ATXN2; (+) strand; PAM type: NRG; PAM sequence: TGG
cagacgtgagccaccgtgcc

SEQ ID NO: 36863 - DNA, 20 bp, Artificial Sequence
  Description of Artificial Sequence: Synthetic oligonucleotide
  Target: ATXN2; (+) strand; PAM type: NRG; PAM sequence: CAG
ctgttcatgtgcttcaaaaa

SEQ ID NO: 36864 - DNA, 20 bp, Artificial Sequence
  Description of Artificial Sequence: Synthetic oligonucleotide
  Target: ATXN2; (+) strand; PAM type: NRG; PAM sequence: AAG
tcatgtgcttcaaaaacagt

SEQ ID NO: 36865 - DNA, 20 bp, Artificial Sequence
  Description of Artificial Sequence: Synthetic oligonucleotide
  Target: ATXN2; (+) strand; PAM type: NRG; PAM sequence: GAG
tgcttcaaaaacagtaagtt

SEQ ID NO: 36866 - DNA, 20 bp, Artificial Sequence
  Description of Artificial Sequence: Synthetic oligonucleotide
  Target: ATXN2; (+) strand; PAM type: NRG; PAM sequence: CAG
aaaaacagtaagttgagaat

SEQ ID NO: 36867 - DNA, 20 bp, Artificial Sequence
  Description of Artificial Sequence: Synthetic oligonucleotide
  Target: ATXN2; (+) strand; PAM type: NRG; PAM sequence: AAG
aacagtaagttgagaatcag

SEQ ID NO: 36868 - DNA, 20 bp, Artificial Sequence
  Description of Artificial Sequence: Synthetic oligonucleotide
  Target: ATXN2; (+) strand; PAM type: NRG; PAM sequence: CAG
agtaagttgagaatcagaag

SEQ ID NO: 36869 - DNA, 20 bp, Artificial Sequence
  Description of Artificial Sequence: Synthetic oligonucleotide
  Target: ATXN2; (+) strand; PAM type: NRG; PAM sequence: GAG
taagttgagaatcagaagca

SEQ ID NO: 36870 - DNA, 20 bp, Artificial Sequence
  Description of Artificial Sequence: Synthetic oligonucleotide
  Target: ATXN2; (+) strand; PAM type: NRG; PAM sequence: TAG
gttgagaatcagaagcagag

SEQ ID NO: 36871 - DNA, 20 bp, Artificial Sequence
  Description of Artificial Sequence: Synthetic oligonucleotide
  Target: ATXN2; (+) strand; PAM type: NRG; PAM sequence: AGG
ttgagaatcagaagcagagt

SEQ ID NO: 36872 - DNA, 20 bp, Artificial Sequence
  Description of Artificial Sequence: Synthetic oligonucleotide
  Target: ATXN2; (+) strand; PAM type: NRG; PAM sequence: CAG
taggatgtgttcactgcttc

SEQ ID NO: 36873 - DNA, 20 bp, Artificial Sequence
  Description of Artificial Sequence: Synthetic oligonucleotide
  Target: ATXN2; (+) strand; PAM type: NRG; PAM sequence: TGG
ttcactgcttccagtgacta

SEQ ID NO: 36874 - DNA, 20 bp, Artificial Sequence
  Description of Artificial Sequence: Synthetic oligonucleotide
  Target: ATXN2; (+) strand; PAM type: NRG; PAM sequence: CAG
ctgcttccagtgactatgga

SEQ ID NO: 36875 - DNA, 20 bp, Artificial Sequence
  Description of Artificial Sequence: Synthetic oligonucleotide
  Target: ATXN2; (+) strand; PAM type: NRG; PAM sequence: GAG
gataaaaaactaacctccac

SEQ ID NO: 36876 - DNA, 20 bp, Artificial Sequence
  Description of Artificial Sequence: Synthetic oligonucleotide
  Target: ATXN2; (+) strand; PAM type: NRG; PAM sequence: AGG
ataaaaaactaacctccacg

SEQ ID NO: 36877 - DNA, 20 bp, Artificial Sequence
  Description of Artificial Sequence: Synthetic oligonucleotide
  Target: ATXN2; (+) strand; PAM type: NRG; PAM sequence: GAG
actaacctccacgaggcaat

SEQ ID NO: 36878 - DNA, 20 bp, Artificial Sequence
  Description of Artificial Sequence: Synthetic oligonucleotide
  Target: ATXN2; (+) strand; PAM type: NRG; PAM sequence: GAG
cctccacgaggcaatgagct

SEQ ID NO: 36879 - DNA, 20 bp, Artificial Sequence
  Description of Artificial Sequence: Synthetic oligonucleotide
  Target: ATXN2; (+) strand; PAM type: NRG; PAM sequence: TAG
acgaggcaatgagctgagaa

SEQ ID NO: 36880 - DNA, 20 bp, Artificial Sequence
  Description of Artificial Sequence: Synthetic oligonucleotide
  Target: ATXN2; (+) strand; PAM type: NRG; PAM sequence: GAG
gaggcaatgagctgagaata

SEQ ID NO: 36881 - DNA, 20 bp, Artificial Sequence
  Description of Artificial Sequence: Synthetic oligonucleotide
  Target: ATXN2; (+) strand; PAM type: NRG; PAM sequence: AAG
gctgagaatagagcgttctc

SEQ ID NO: 36882 - DNA, 20 bp, Artificial Sequence
  Description of Artificial Sequence: Synthetic oligonucleotide
  Target: ATXN2; (+) strand; PAM type: NRG; PAM sequence: TAG
gagcgttctcaagacaactc

SEQ ID NO: 36883 - DNA, 20 bp, Artificial Sequence
  Description of Artificial Sequence: Synthetic oligonucleotide
  Target: ATXN2; (+) strand; PAM type: NRG; PAM sequence: AAG
gttctcaagacaactctagc

SEQ ID NO: 36884 - DNA, 20 bp, Artificial Sequence
  Description of Artificial Sequence: Synthetic oligonucleotide
  Target: ATXN2; (+) strand; PAM type: NRG; PAM sequence: AGG
ttctcaagacaactctagca

SEQ ID NO: 36885 - DNA, 20 bp, Artificial Sequence
  Description of Artificial Sequence: Synthetic oligonucleotide
  Target: ATXN2; (+) strand; PAM type: NRG; PAM sequence: TAG
aagacaactctagcaaggta

SEQ ID NO: 36886 - DNA, 20 bp, Artificial Sequence
  Description of Artificial Sequence: Synthetic oligonucleotide
  Target: ATXN2; (+) strand; PAM type: NRG; PAM sequence: CAG
ctctagcaaggtatagttcc

SEQ ID NO: 36887 - DNA, 20 bp, Artificial Sequence
  Description of Artificial Sequence: Synthetic oligonucleotide
  Target: ATXN2; (+) strand; PAM type: NRG; PAM sequence: GAG
atagttcccagccctctctt

SEQ ID NO: 36888 - DNA, 20 bp, Artificial Sequence
  Description of Artificial Sequence: Synthetic oligonucleotide
  Target: ATXN2; (+) strand; PAM type: NRG; PAM sequence: AAG
aacaaatcctaaaatccctc

SEQ ID NO: 36889 - DNA, 20 bp, Artificial Sequence
  Description of Artificial Sequence: Synthetic oligonucleotide
  Target: ATXN2; (+) strand; PAM type: NRG; PAM sequence: AAG
ctaaaatccctcaagataat

SEQ ID NO: 36890 - DNA, 20 bp, Artificial Sequence
  Description of Artificial Sequence: Synthetic oligonucleotide
  Target: ATXN2; (+) strand; PAM type: NRG; PAM sequence: CAG
caagataataagcccataca

SEQ ID NO: 36891 - DNA, 20 bp, Artificial Sequence
  Description of Artificial Sequence: Synthetic oligonucleotide
  Target: ATXN2; (+) strand; PAM type: NRG; PAM sequence: TAG
acacagaaatgattccaaaa

SEQ ID NO: 36892 - DNA, 20 bp, Artificial Sequence
  Description of Artificial Sequence: Synthetic oligonucleotide
  Target: ATXN2; (+) strand; PAM type: NRG; PAM sequence: TAG
acattcttcatataacgtgt

SEQ ID NO: 36893 - DNA, 20 bp, Artificial Sequence
  Description of Artificial Sequence: Synthetic oligonucleotide
  Target: ATXN2; (+) strand; PAM type: NRG; PAM sequence: CAG
atataacgtgttagcaaaca

SEQ ID NO: 36894 - DNA, 20 bp, Artificial Sequence
  Description of Artificial Sequence: Synthetic oligonucleotide
  Target: ATXN2; (+) strand; PAM type: NRG; PAM sequence: CAG
ttagcaaacacagacatatg

SEQ ID NO: 36895 - DNA, 20 bp, Artificial Sequence
  Description of Artificial Sequence: Synthetic oligonucleotide
  Target: ATXN2; (+) strand; PAM type: NRG; PAM sequence: AGG
tagcaaacacagacatatgc

SEQ ID NO: 36896 - DNA, 20 bp, Artificial Sequence
  Description of Artificial Sequence: Synthetic oligonucleotide
  Target: ATXN2; (+) strand; PAM type: NRG; PAM sequence: TGG
cagacatatgcaggactgat

SEQ ID NO: 36897 - DNA, 20 bp, Artificial Sequence
  Description of Artificial Sequence: Synthetic oligonucleotide
  Target: ATXN2; (+) strand; PAM type: NRG; PAM sequence: GAG
catatgcaggactgattggt

SEQ ID NO: 36898 - DNA, 20 bp, Artificial Sequence
  Description of Artificial Sequence: Synthetic oligonucleotide
  Target: ATXN2; (+) strand; PAM type: NRG; PAM sequence: GAG
tatgcaggactgattggtga

SEQ ID NO: 36899 - DNA, 20 bp, Artificial Sequence
  Description of Artificial Sequence: Synthetic oligonucleotide
  Target: ATXN2; (+) strand; PAM type: NRG; PAM sequence: AAG
gcaggactgattggtgagag

SEQ ID NO: 36900 - DNA, 20 bp, Artificial Sequence
  Description of Artificial Sequence: Synthetic oligonucleotide
  Target: ATXN2; (+) strand; PAM type: NRG; PAM sequence: AAG
gactgattggtgagagaagc

SEQ ID NO: 36901 - DNA, 20 bp, Artificial Sequence
  Description of Artificial Sequence: Synthetic oligonucleotide
  Target: ATXN2; (+) strand; PAM type: NRG; PAM sequence: CAG
attggtgagagaagcaagca

SEQ ID NO: 36902 - DNA, 20 bp, Artificial Sequence
  Description of Artificial Sequence: Synthetic oligonucleotide
  Target: ATXN2; (+) strand; PAM type: NRG; PAM sequence: TGG
gagagaagcaagcacagctt

SEQ ID NO: 36903 - DNA, 20 bp, Artificial Sequence
  Description of Artificial Sequence: Synthetic oligonucleotide
  Target: ATXN2; (+) strand; PAM type: NRG; PAM sequence: GGG
agagaagcaagcacagcttt

SEQ ID NO: 36904 - DNA, 20 bp, Artificial Sequence
  Description of Artificial Sequence: Synthetic oligonucleotide
  Target: ATXN2; (+) strand; PAM type: NRG; PAM sequence: AAG
gaagcaagcacagctttggg

SEQ ID NO: 36905 - DNA, 20 bp, Artificial Sequence
  Description of Artificial Sequence: Synthetic oligonucleotide
  Target: ATXN2; (+) strand; PAM type: NRG; PAM sequence: GAG
agcaagcacagctttgggaa

SEQ ID NO: 36906 - DNA, 20 bp, Artificial Sequence
  Description of Artificial Sequence: Synthetic oligonucleotide
  Target: ATXN2; (+) strand; PAM type: NRG; PAM sequence: AGG
gcaagcacagctttgggaag

SEQ ID NO: 36907 - DNA, 20 bp, Artificial Sequence
  Description of Artificial Sequence: Synthetic oligonucleotide
  Target: ATXN2; (+) strand; PAM type: NRG; PAM sequence: TAG
agctttgggaagaggcaccc

SEQ ID NO: 36908 - DNA, 20 bp, Artificial Sequence
  Description of Artificial Sequence: Synthetic oligonucleotide
  Target: ATXN2; (+) strand; PAM type: NRG; PAM sequence: CAG
gggaagaggcaccctagttc

SEQ ID NO: 36909 - DNA, 20 bp, Artificial Sequence
  Description of Artificial Sequence: Synthetic oligonucleotide
  Target: ATXN2; (+) strand; PAM type: NRG; PAM sequence: CAG
aagaggcaccctagttccag

SEQ ID NO: 36910 - DNA, 20 bp, Artificial Sequence
  Description of Artificial Sequence: Synthetic oligonucleotide
  Target: ATXN2; (+) strand; PAM type: NRG; PAM sequence: TGG
gcaccctagttccagcagtc

SEQ ID NO: 36911 - DNA, 20 bp, Artificial Sequence
  Description of Artificial Sequence: Synthetic oligonucleotide
  Target: ATXN2; (+) strand; PAM type: NRG; PAM sequence: TAG
ccctagttccagcagtctgg

SEQ ID NO: 36912 - DNA, 20 bp, Artificial Sequence
  Description of Artificial Sequence: Synthetic oligonucleotide
  Target: ATXN2; (+) strand; PAM type: NRG; PAM sequence: AGG
cctagttccagcagtctggt

SEQ ID NO: 36913 - DNA, 20 bp, Artificial Sequence
  Description of Artificial Sequence: Synthetic oligonucleotide
  Target: ATXN2; (+) strand; PAM type: NRG; PAM sequence: AAG
gttccagcagtctggtaggc

SEQ ID NO: 36914 - DNA, 20 bp, Artificial Sequence
  Description of Artificial Sequence: Synthetic oligonucleotide
  Target: ATXN2; (+) strand; PAM type: NRG; PAM sequence: AGG
ttccagcagtctggtaggca

SEQ ID NO: 36915 - DNA, 20 bp, Artificial Sequence
  Description of Artificial Sequence: Synthetic oligonucleotide
  Target: ATXN2; (+) strand; PAM type: NRG; PAM sequence: GAG
gtctggtaggcaaggctgcc

SEQ ID NO: 36916 - DNA, 20 bp, Artificial Sequence
  Description of Artificial Sequence: Synthetic oligonucleotide
  Target: ATXN2; (+) strand; PAM type: NRG; PAM sequence: CAG
aggcaaggctgccgagtcac

SEQ ID NO: 36917 - DNA, 20 bp, Artificial Sequence
  Description of Artificial Sequence: Synthetic oligonucleotide
  Target: ATXN2; (+) strand; PAM type: NRG; PAM sequence: TAG
aggctgccgagtcaccagca

SEQ ID NO: 36918 - DNA, 20 bp, Artificial Sequence
  Description of Artificial Sequence: Synthetic oligonucleotide
  Target: ATXN2; (+) strand; PAM type: NRG; PAM sequence: CGG
tgccgagtcaccagcataga

SEQ ID NO: 36919 - DNA, 20 bp, Artificial Sequence
  Description of Artificial Sequence: Synthetic oligonucleotide
  Target: ATXN2; (+) strand; PAM type: NRG; PAM sequence: TGG
gtcaccagcatagacggctc

SEQ ID NO: 36920 - DNA, 20 bp, Artificial Sequence
  Description of Artificial Sequence: Synthetic oligonucleotide
  Target: ATXN2; (+) strand; PAM type: NRG; PAM sequence: GGG
tcaccagcatagacggctct

SEQ ID NO: 36921 - DNA, 20 bp, Artificial Sequence
  Description of Artificial Sequence: Synthetic oligonucleotide
  Target: ATXN2; (+) strand; PAM type: NRG; PAM sequence: TGG
ctgggtatattccacgtaaa

SEQ ID NO: 36922 - DNA, 20 bp, Artificial Sequence
  Description of Artificial Sequence: Synthetic oligonucleotide
  Target: ATXN2; (+) strand; PAM type: NRG; PAM sequence: CAG
tattccacgtaaatggtgtg

SEQ ID NO: 36923 - DNA, 20 bp, Artificial Sequence
  Description of Artificial Sequence: Synthetic oligonucleotide
  Target: ATXN2; (+) strand; PAM type: NRG; PAM sequence: GAG
ttccacgtaaatggtgtgca

SEQ ID NO: 36924 - DNA, 20 bp, Artificial Sequence
  Description of Artificial Sequence: Synthetic oligonucleotide
  Target: ATXN2; (+) strand; PAM type: NRG; PAM sequence: AGG
tccacgtaaatggtgtgcag

SEQ ID NO: 36925 - DNA, 20 bp, Artificial Sequence
  Description of Artificial Sequence: Synthetic oligonucleotide
  Target: ATXN2; (+) strand; PAM type: NRG; PAM sequence: GGG
ccacgtaaatggtgtgcaga

SEQ ID NO: 36926 - DNA, 20 bp, Artificial Sequence
  Description of Artificial Sequence: Synthetic oligonucleotide
  Target: ATXN2; (+) strand; PAM type: NRG; PAM sequence: TAG
gtaaatggtgtgcagagggt

SEQ ID NO: 36927 - DNA, 20 bp, Artificial Sequence
  Description of Artificial Sequence: Synthetic oligonucleotide
  Target: ATXN2; (+) strand; PAM type: NRG; PAM sequence: AGG
taaatggtgtgcagagggtt

SEQ ID NO: 36928 - DNA, 20 bp, Artificial Sequence
  Description of Artificial Sequence: Synthetic oligonucleotide
  Target: ATXN2; (+) strand; PAM type: NRG; PAM sequence: TAG
tggtgtgcagagggttaggc

SEQ ID NO: 36929 - DNA, 20 bp, Artificial Sequence
  Description of Artificial Sequence: Synthetic oligonucleotide
  Target: ATXN2; (+) strand; PAM type: NRG; PAM sequence: AGG
ggtgtgcagagggttaggct

SEQ ID NO: 36930 - DNA, 20 bp, Artificial Sequence
  Description of Artificial Sequence: Synthetic oligonucleotide
  Target: ATXN2; (+) strand; PAM type: NRG; PAM sequence: TGG
agagggttaggctaggcaca

SEQ ID NO: 36931 - DNA, 20 bp, Artificial Sequence
  Description of Artificial Sequence: Synthetic oligonucleotide
  Target: ATXN2; (+) strand; PAM type: NRG; PAM sequence: GAG
agggttaggctaggcacatg

SEQ ID NO: 36932 - DNA, 20 bp, Artificial Sequence
  Description of Artificial Sequence: Synthetic oligonucleotide
  Target: ATXN2; (+) strand; PAM type: NRG; PAM sequence: CAG
gttaggctaggcacatggag

SEQ ID NO: 36933 - DNA, 20 bp, Artificial Sequence
  Description of Artificial Sequence: Synthetic oligonucleotide
  Target: ATXN2; (+) strand; PAM type: NRG; PAM sequence: TAG
atggagcagttctataatcc

SEQ ID NO: 36934 - DNA, 20 bp, Artificial Sequence
  Description of Artificial Sequence: Synthetic oligonucleotide
  Target: ATXN2; (+) strand; PAM type: NRG; PAM sequence: AGG
tggagcagttctataatcct

SEQ ID NO: 36935 - DNA, 20 bp, Artificial Sequence
  Description of Artificial Sequence: Synthetic oligonucleotide
  Target: ATXN2; (+) strand; PAM type: NRG; PAM sequence: TAG
ttctataatcctaggtgttg

SEQ ID NO: 36936 - DNA, 20 bp, Artificial Sequence
  Description of Artificial Sequence: Synthetic oligonucleotide
  Target: ATXN2; (+) strand; PAM type: NRG; PAM sequence: AGG
tctataatcctaggtgttgt

SEQ ID NO: 36937 - DNA, 20 bp, Artificial Sequence
  Description of Artificial Sequence: Synthetic oligonucleotide
  Target: ATXN2; (+) strand; PAM type: NRG; PAM sequence: GGG
ctataatcctaggtgttgta

SEQ ID NO: 36938 - DNA, 20 bp, Artificial Sequence
  Description of Artificial Sequence: Synthetic oligonucleotide
  Target: ATXN2; (+) strand; PAM type: NRG; PAM sequence: AAG
atcctaggtgttgtagggct

SEQ ID NO: 36939 - DNA, 20 bp, Artificial Sequence
  Description of Artificial Sequence: Synthetic oligonucleotide
  Target: ATXN2; (+) strand; PAM type: NRG; PAM sequence: AGG
tcctaggtgttgtagggcta

SEQ ID NO: 36940 - DNA, 20 bp, Artificial Sequence
  Description of Artificial Sequence: Synthetic oligonucleotide
  Target: ATXN2; (+) strand; PAM type: NRG; PAM sequence: GGG
cctaggtgttgtagggctaa

SEQ ID NO: 36941 - DNA, 20 bp, Artificial Sequence
  Description of Artificial Sequence: Synthetic oligonucleotide
  Target: ATXN2; (+) strand; PAM type: NRG; PAM sequence: CAG
gctaagggccaccaactctc

SEQ ID NO: 36942 - DNA, 20 bp, Artificial Sequence
  Description of Artificial Sequence: Synthetic oligonucleotide
  Target: ATXN2; (+) strand; PAM type: NRG; PAM sequence: CAG
caccaactctccagccctaa

SEQ ID NO: 36943 - DNA, 20 bp, Artificial Sequence
  Description of Artificial Sequence: Synthetic oligonucleotide
  Target: ATXN2; (+) strand; PAM type: NRG; PAM sequence: CAG
agccctaacagttacgtctc

SEQ ID NO: 36944 - DNA, 20 bp, Artificial Sequence
  Description of Artificial Sequence: Synthetic oligonucleotide
  Target: ATXN2; (+) strand; PAM type: NRG; PAM sequence: AAG
cagttacgtctccagctgca

SEQ ID NO: 36945 - DNA, 20 bp, Artificial Sequence
  Description of Artificial Sequence: Synthetic oligonucleotide
  Target: ATXN2; (+) strand; PAM type: NRG; PAM sequence: TAG
ccagctgcaaagctatctct

SEQ ID NO: 36946 - DNA, 20 bp, Artificial Sequence
  Description of Artificial Sequence: Synthetic oligonucleotide
  Target: ATXN2; (+) strand; PAM type: NRG; PAM sequence: CAG
gctgcaaagctatctcttag

SEQ ID NO: 36947 - DNA, 20 bp, Artificial Sequence
  Description of Artificial Sequence: Synthetic oligonucleotide
  Target: ATXN2; (+) strand; PAM type: NRG; PAM sequence: AGG
ctgcaaagctatctcttagc

SEQ ID NO: 36948 - DNA, 20 bp, Artificial Sequence
  Description of Artificial Sequence: Synthetic oligonucleotide
  Target: ATXN2; (+) strand; PAM type: NRG; PAM sequence: GGG
tgcaaagctatctcttagca

SEQ ID NO: 36949 - DNA, 20 bp, Artificial Sequence
  Description of Artificial Sequence: Synthetic oligonucleotide
  Target: ATXN2; (+) strand; PAM type: NRG; PAM sequence: GGG
gcaaagctatctcttagcag

SEQ ID NO: 36950 - DNA, 20 bp, Artificial Sequence
  Description of Artificial Sequence: Synthetic oligonucleotide
  Target: ATXN2; (+) strand; PAM type: NRG; PAM sequence: AAG
agctatctcttagcagggga

SEQ ID NO: 36951 - DNA, 20 bp, Artificial Sequence
  Description of Artificial Sequence: Synthetic oligonucleotide
  Target: ATXN2; (+) strand; PAM type: NRG; PAM sequence: AGG
gctatctcttagcaggggaa

SEQ ID NO: 36952 - DNA, 20 bp, Artificial Sequence
  Description of Artificial Sequence: Synthetic oligonucleotide
  Target: ATXN2; (+) strand; PAM type: NRG; PAM sequence: GGG
ctatctcttagcaggggaaa

SEQ ID NO: 36953 - DNA, 20 bp, Artificial Sequence
  Description of Artificial Sequence: Synthetic oligonucleotide
  Target: ATXN2; (+) strand; PAM type: NRG; PAM sequence: AAG
ctcttagcaggggaaagggc

SEQ ID NO: 36954 - DNA, 20 bp, Artificial Sequence
  Description of Artificial Sequence: Synthetic oligonucleotide
  Target: ATXN2; (+) strand; PAM type: NRG; PAM sequence: AGG
tcttagcaggggaaagggca

SEQ ID NO: 36955 - DNA, 20 bp, Artificial Sequence
  Description of Artificial Sequence: Synthetic oligonucleotide
  Target: ATXN2; (+) strand; PAM type: NRG; PAM sequence: AAG
gcaggggaaagggcaaggca

SEQ ID NO: 36956 - DNA, 20 bp, Artificial Sequence
  Description of Artificial Sequence: Synthetic oligonucleotide
  Target: ATXN2; (+) strand; PAM type: NRG; PAM sequence: GAG
aggggaaagggcaaggcaaa

SEQ ID NO: 36957 - DNA, 20 bp, Artificial Sequence
  Description of Artificial Sequence: Synthetic oligonucleotide
  Target: ATXN2; (+) strand; PAM type: NRG; PAM sequence: CAG
gaaagggcaaggcaaagagc

SEQ ID NO: 36958 - DNA, 20 bp, Artificial Sequence
  Description of Artificial Sequence: Synthetic oligonucleotide
  Target: ATXN2; (+) strand; PAM type: NRG; PAM sequence: TAG
gcaaggcaaagagccagttc

SEQ ID NO: 36959 - DNA, 20 bp, Artificial Sequence
  Description of Artificial Sequence: Synthetic oligonucleotide
  Target: ATXN2; (+) strand; PAM type: NRG; PAM sequence: AGG
caaggcaaagagccagttct

SEQ ID NO: 36960 - DNA, 20 bp, Artificial Sequence
  Description of Artificial Sequence: Synthetic oligonucleotide
  Target: ATXN2; (+) strand; PAM type: NRG; PAM sequence: CAG
tgcatccactgccaatgcca

SEQ ID NO: 36961 - DNA, 20 bp, Artificial Sequence
  Description of Artificial Sequence: Synthetic oligonucleotide
  Target: ATXN2; (+) strand; PAM type: NRG; PAM sequence: TGG
tccactgccaatgccacagc

SEQ ID NO: 36962 - DNA, 20 bp, Artificial Sequence
  Description of Artificial Sequence: Synthetic oligonucleotide
  Target: ATXN2; (+) strand; PAM type: NRG; PAM sequence: CAG
cattaatattccttcatatc

SEQ ID NO: 36963 - DNA, 20 bp, Artificial Sequence
  Description of Artificial Sequence: Synthetic oligonucleotide
  Target: ATXN2; (+) strand; PAM type: NRG; PAM sequence: TAG
atattccttcatatccagtt

SEQ ID NO: 36964 - DNA, 20 bp, Artificial Sequence
  Description of Artificial Sequence: Synthetic oligonucleotide
  Target: ATXN2; (+) strand; PAM type: NRG; PAM sequence: TGG
ccttcatatccagtttagac

SEQ ID NO: 36965 - DNA, 20 bp, Artificial Sequence
  Description of Artificial Sequence: Synthetic oligonucleotide
  Target: ATXN2; (+) strand; PAM type: NRG; PAM sequence: CAG
tatccagtttagactggata

SEQ ID NO: 36966 - DNA, 20 bp, Artificial Sequence
  Description of Artificial Sequence: Synthetic oligonucleotide
  Target: ATXN2; (+) strand; PAM type: NRG; PAM sequence: CAG
ccagtttagactggatacag

SEQ ID NO: 36967 - DNA, 20 bp, Artificial Sequence
  Description of Artificial Sequence: Synthetic oligonucleotide
  Target: ATXN2; (+) strand; PAM type: NRG; PAM sequence: TGG
cagcagctttgtttatacac

SEQ ID NO: 36968 - DNA, 20 bp, Artificial Sequence
  Description of Artificial Sequence: Synthetic oligonucleotide
  Target: ATXN2; (+) strand; PAM type: NRG; PAM sequence: GGG
agcagctttgtttatacact

SEQ ID NO: 36969 - DNA, 20 bp, Artificial Sequence
  Description of Artificial Sequence: Synthetic oligonucleotide
  Target: ATXN2; (+) strand; PAM type: NRG; PAM sequence: CAG
tatacactgggaaaattttc

SEQ ID NO: 36970 - DNA, 20 bp, Artificial Sequence
  Description of Artificial Sequence: Synthetic oligonucleotide
  Target: ATXN2; (+) strand; PAM type: NRG; PAM sequence: TAG
tgggaaaattttccagactg

SEQ ID NO: 36971 - DNA, 20 bp, Artificial Sequence
  Description of Artificial Sequence: Synthetic oligonucleotide
  Target: ATXN2; (+) strand; PAM type: NRG; PAM sequence: AGG
gggaaaattttccagactgt

SEQ ID NO: 36972 - DNA, 20 bp, Artificial Sequence
  Description of Artificial Sequence: Synthetic oligonucleotide
  Target: ATXN2; (+) strand; PAM type: NRG; PAM sequence: CAG
ctgtaggaattaacatatgc

SEQ ID NO: 36973 - DNA, 20 bp, Artificial Sequence
  Description of Artificial Sequence: Synthetic oligonucleotide
  Target: ATXN2; (+) strand; PAM type: NRG; PAM sequence: AAG
atatgccagaatattttaac

SEQ ID NO: 36974 - DNA, 20 bp, Artificial Sequence
  Description of Artificial Sequence: Synthetic oligonucleotide
  Target: ATXN2; (+) strand; PAM type: NRG; PAM sequence: TGG
atattttaacaagaaaactg

SEQ ID NO: 36975 - DNA, 20 bp, Artificial Sequence
  Description of Artificial Sequence: Synthetic oligonucleotide
  Target: ATXN2; (+) strand; PAM type: NRG; PAM sequence: TAG
acaagaaaactgtggcaaca

SEQ ID NO: 36976 - DNA, 20 bp, Artificial Sequence
  Description of Artificial Sequence: Synthetic oligonucleotide
  Target: ATXN2; (+) strand; PAM type: NRG; PAM sequence: AAG
catagtctctgaatgttttt

SEQ ID NO: 36977 - DNA, 20 bp, Artificial Sequence
  Description of Artificial Sequence: Synthetic oligonucleotide
  Target: ATXN2; (+) strand; PAM type: NRG; PAM sequence: GAG
tagtctctgaatgtttttaa

SEQ ID NO: 36978 - DNA, 20 bp, Artificial Sequence
  Description of Artificial Sequence: Synthetic oligonucleotide
  Target: ATXN2; (+) strand; PAM type: NRG; PAM sequence: TAG
tctctgaatgtttttaagag

SEQ ID NO: 36979 - DNA, 20 bp, Artificial Sequence
  Description of Artificial Sequence: Synthetic oligonucleotide
  Target: ATXN2; (+) strand; PAM type: NRG; PAM sequence: TGG
taagagtagtgaacgtcttc

SEQ ID NO: 36980 - DNA, 20 bp, Artificial Sequence
  Description of Artificial Sequence: Synthetic oligonucleotide
  Target: ATXN2; (+) strand; PAM type: NRG; PAM sequence: GGG
aagagtagtgaacgtcttct

SEQ ID NO: 36981 - DNA, 20 bp, Artificial Sequence
  Description of Artificial Sequence: Synthetic oligonucleotide
  Target: ATXN2; (+) strand; PAM type: NRG; PAM sequence: GAG
gagtagtgaacgtcttctgg

SEQ ID NO: 36982 - DNA, 20 bp, Artificial Sequence
  Description of Artificial Sequence: Synthetic oligonucleotide
  Target: ATXN2; (+) strand; PAM type: NRG; PAM sequence: TAG
agtgaacgtcttctgggagc

SEQ ID NO: 36983 - DNA, 20 bp, Artificial Sequence
  Description of Artificial Sequence: Synthetic oligonucleotide
  Target: ATXN2; (+) strand; PAM type: NRG; PAM sequence: AAG
caaatgatgtacaaacgatg

SEQ ID NO: 36984 - DNA, 20 bp, Artificial Sequence
  Description of Artificial Sequence: Synthetic oligonucleotide
  Target: ATXN2; (+) strand; PAM type: NRG; PAM sequence: GAG
acaaacgatgaagccttcct

SEQ ID NO: 36985 - DNA, 20 bp, Artificial Sequence
  Description of Artificial Sequence: Synthetic oligonucleotide
  Target: ATXN2; (+) strand; PAM type: NRG; PAM sequence: CAG
tgaagccttcctgagcttca

SEQ ID NO: 36986 - DNA, 20 bp, Artificial Sequence
  Description of Artificial Sequence: Synthetic oligonucleotide
  Target: ATXN2; (+) strand; PAM type: NRG; PAM sequence: AAG
cctgagcttcacagtcccat

SEQ ID NO: 36987 - DNA, 20 bp, Artificial Sequence
  Description of Artificial Sequence: Synthetic oligonucleotide
  Target: ATXN2; (+) strand; PAM type: NRG; PAM sequence: AAG
tcacagtcccataagtctat

SEQ ID NO: 36988 - DNA, 20 bp, Artificial Sequence
  Description of Artificial Sequence: Synthetic oligonucleotide
  Target: ATXN2; (+) strand; PAM type: NRG; PAM sequence: CAG
agtcccataagtctataaga

SEQ ID NO: 36989 - DNA, 20 bp, Artificial Sequence
  Description of Artificial Sequence: Synthetic oligonucleotide
  Target: ATXN2; (+) strand; PAM type: NRG; PAM sequence: TGG
acagtcctttttttctaact

SEQ ID NO: 36990 - DNA, 20 bp, Artificial Sequence
  Description of Artificial Sequence: Synthetic oligonucleotide
  Target: ATXN2; (+) strand; PAM type: NRG; PAM sequence: TGG
gtcctttttttctaacttgg

SEQ ID NO: 36991 - DNA, 20 bp, Artificial Sequence
  Description of Artificial Sequence: Synthetic oligonucleotide
  Target: ATXN2; (+) strand; PAM type: NRG; PAM sequence: CAG
ctaacttggtggcttattaa

SEQ ID NO: 36992 - DNA, 20 bp, Artificial Sequence
  Description of Artificial Sequence: Synthetic oligonucleotide
  Target: ATXN2; (+) strand; PAM type: NRG; PAM sequence: AGG
taacttggtggcttattaac

SEQ ID NO: 36993 - DNA, 20 bp, Artificial Sequence
  Description of Artificial Sequence: Synthetic oligonucleotide
  Target: ATXN2; (+) strand; PAM type: NRG; PAM sequence: AAG
ccatcatcatcatactcatt

SEQ ID NO: 36994 - DNA, 20 bp, Artificial Sequence
  Description of Artificial Sequence: Synthetic oligonucleotide
  Target: ATXN2; (+) strand; PAM type: NRG; PAM sequence: CAG
atactcattaagtttacttc

SEQ ID NO: 36995 - DNA, 20 bp, Artificial Sequence
  Description of Artificial Sequence: Synthetic oligonucleotide
  Target: ATXN2; (+) strand; PAM type: NRG; PAM sequence: AAG
agtttacttccagctcctcc

SEQ ID NO: 36996 - DNA, 20 bp, Artificial Sequence
  Description of Artificial Sequence: Synthetic oligonucleotide
  Target: ATXN2; (+) strand; PAM type: NRG; PAM sequence: TAG
tccagctcctccaagttgta

SEQ ID NO: 36997 - DNA, 20 bp, Artificial Sequence
  Description of Artificial Sequence: Synthetic oligonucleotide
  Target: ATXN2; (+) strand; PAM type: NRG; PAM sequence: AGG
ccagctcctccaagttgtat

SEQ ID NO: 36998 - DNA, 20 bp, Artificial Sequence
  Description of Artificial Sequence: Synthetic oligonucleotide
  Target: ATXN2; (+) strand; PAM type: NRG; PAM sequence: TGG
aagttgtataggcactgact

SEQ ID NO: 36999 - DNA, 20 bp, Artificial Sequence
  Description of Artificial Sequence: Synthetic oligonucleotide
  Target: ATXN2; (+) strand; PAM type: NRG; PAM sequence: AAG
taggcactgacttggtctaa

SEQ ID NO: 37000 - DNA, 20 bp, Artificial Sequence
  Description of Artificial Sequence: Synthetic oligonucleotide
  Target: ATXN2; (+) strand; PAM type: NRG; PAM sequence: GAG
ttgatgtaaatttcgaacct

SEQ ID NO: 37001 - DNA, 20 bp, Artificial Sequence
  Description of Artificial Sequence: Synthetic oligonucleotide
  Target: ATXN2; (+) strand; PAM type: NRG; PAM sequence: CAG
tttatttgtttaatttttga

SEQ ID NO: 37002 - DNA, 20 bp, Artificial Sequence
  Description of Artificial Sequence: Synthetic oligonucleotide
  Target: ATXN2; (+) strand; PAM type: NRG; PAM sequence: GAG
tatttgtttaatttttgaca

SEQ ID NO: 37003 - DNA, 20 bp, Artificial Sequence
  Description of Artificial Sequence: Synthetic oligonucleotide
  Target: ATXN2; (+) strand; PAM type: NRG; PAM sequence: CAG
cagagtctcgctctgttgcc

SEQ ID NO: 37004 - DNA, 20 bp, Artificial Sequence
  Description of Artificial Sequence: Synthetic oligonucleotide
  Target: ATXN2; (+) strand; PAM type: NRG; PAM sequence: AGG
agagtctcgctctgttgccc

SEQ ID NO: 37005 - DNA, 20 bp, Artificial Sequence
  Description of Artificial Sequence: Synthetic oligonucleotide
  Target: ATXN2; (+) strand; PAM type: NRG; PAM sequence: TGG
tctcgctctgttgcccaggc

SEQ ID NO: 37006 - DNA, 20 bp, Artificial Sequence
  Description of Artificial Sequence: Synthetic oligonucleotide
  Target: ATXN2; (+) strand; PAM type: NRG; PAM sequence: GAG
tcgctctgttgcccaggctg

SEQ ID NO: 37007 - DNA, 20 bp, Artificial Sequence
  Description of Artificial Sequence: Synthetic oligonucleotide
  Target: ATXN2; (+) strand; PAM type: NRG; PAM sequence: CAG
ctgttgcccaggctggagtg

SEQ ID NO: 37008 - DNA, 20 bp, Artificial Sequence
  Description of Artificial Sequence: Synthetic oligonucleotide
  Target: ATXN2; (+) strand; PAM type: NRG; PAM sequence: AGG
tgttgcccaggctggagtgc

SEQ ID NO: 37009 - DNA, 20 bp, Artificial Sequence
  Description of Artificial Sequence: Synthetic oligonucleotide
  Target: ATXN2; (+) strand; PAM type: NRG; PAM sequence: GGG
gttgcccaggctggagtgca

SEQ ID NO: 37010 - DNA, 20 bp, Artificial Sequence
  Description of Artificial Sequence: Synthetic oligonucleotide
  Target: ATXN2; (+) strand; PAM type: NRG; PAM sequence: GGG
ttgcccaggctggagtgcag

SEQ ID NO: 37011 - DNA, 20 bp, Artificial Sequence
  Description of Artificial Sequence: Synthetic oligonucleotide
  Target: ATXN2; (+) strand; PAM type: NRG; PAM sequence: CGG
ggagtgcaggggcaccatct

SEQ ID NO: 37012 - DNA, 20 bp, Artificial Sequence
  Description of Artificial Sequence: Synthetic oligonucleotide
  Target: ATXN2; (+) strand; PAM type: NRG; PAM sequence: CGG
tcactgcaacctccgcctcc

SEQ ID NO: 37013 - DNA, 20 bp, Artificial Sequence
  Description of Artificial Sequence: Synthetic oligonucleotide
  Target: ATXN2; (+) strand; PAM type: NRG; PAM sequence: GGG
cactgcaacctccgcctccc

SEQ ID NO: 37014 - DNA, 20 bp, Artificial Sequence
  Description of Artificial Sequence: Synthetic oligonucleotide
  Target: ATXN2; (+) strand; PAM type: NRG; PAM sequence: AAG
aacctccgcctcccgggttc

SEQ ID NO: 37015 - DNA, 20 bp, Artificial Sequence
  Description of Artificial Sequence: Synthetic oligonucleotide
  Target: ATXN2; (+) strand; PAM type: NRG; PAM sequence: CAG
ttcaagcgattctcctgcct

SEQ ID NO: 37016 - DNA, 20 bp, Artificial Sequence
  Description of Artificial Sequence: Synthetic oligonucleotide
  Target: ATXN2; (+) strand; PAM type: NRG; PAM sequence: GAG
ttctcctgcctcagcctgcc

SEQ ID NO: 37017 - DNA, 20 bp, Artificial Sequence
  Description of Artificial Sequence: Synthetic oligonucleotide
  Target: ATXN2; (+) strand; PAM type: NRG; PAM sequence: TAG
tcctgcctcagcctgccgag

SEQ ID NO: 37018 - DNA, 20 bp, Artificial Sequence
  Description of Artificial Sequence: Synthetic oligonucleotide
  Target: ATXN2; (+) strand; PAM type: NRG; PAM sequence: TGG
gcctcagcctgccgagtagc

SEQ ID NO: 37019 - DNA, 20 bp, Artificial Sequence
  Description of Artificial Sequence: Synthetic oligonucleotide
  Target: ATXN2; (+) strand; PAM type: NRG; PAM sequence: TAG
ctgccgagtagctggaacta

SEQ ID NO: 37020 - DNA, 20 bp, Artificial Sequence
  Description of Artificial Sequence: Synthetic oligonucleotide
  Target: ATXN2; (+) strand; PAM type: NRG; PAM sequence: AGG
tgccgagtagctggaactat

SEQ ID NO: 37021 - DNA, 20 bp, Artificial Sequence
  Description of Artificial Sequence: Synthetic oligonucleotide
  Target: ATXN2; (+) strand; PAM type: NRG; PAM sequence: AAG
gagtagctggaactataggc

SEQ ID NO: 37022 - DNA, 20 bp, Artificial Sequence
  Description of Artificial Sequence: Synthetic oligonucleotide
  Target: ATXN2; (+) strand; PAM type: NRG; PAM sequence: TGG
taggcaagcatcaccatgcc

SEQ ID NO: 37023 - DNA, 20 bp, Artificial Sequence
  Description of Artificial Sequence: Synthetic oligonucleotide
  Target: ATXN2; (+) strand; PAM type: NRG; PAM sequence: TAG
ctggctgatttttgtatttt

SEQ ID NO: 37024 - DNA, 20 bp, Artificial Sequence
  Description of Artificial Sequence: Synthetic oligonucleotide
  Target: ATXN2; (+) strand; PAM type: NRG; PAM sequence: TAG
gctgatttttgtatttttag

SEQ ID NO: 37025 - DNA, 20 bp, Artificial Sequence
  Description of Artificial Sequence: Synthetic oligonucleotide
  Target: ATXN2; (+) strand; PAM type: NRG; PAM sequence: GAG
tgatttttgtatttttagta

SEQ ID NO: 37026 - DNA, 20 bp, Artificial Sequence
  Description of Artificial Sequence: Synthetic oligonucleotide
  Target: ATXN2; (+) strand; PAM type: NRG; PAM sequence: CGG
ttttgtatttttagtagaga

SEQ ID NO: 37027 - DNA, 20 bp, Artificial Sequence
  Description of Artificial Sequence: Synthetic oligonucleotide
  Target: ATXN2; (+) strand; PAM type: NRG; PAM sequence: GGG
tttgtatttttagtagagac

SEQ ID NO: 37028 - DNA, 20 bp, Artificial Sequence
  Description of Artificial Sequence: Synthetic oligonucleotide
  Target: ATXN2; (+) strand; PAM type: NRG; PAM sequence: TGG
agagacgggtttcaccatgt

SEQ ID NO: 37029 - DNA, 20 bp, Artificial Sequence
  Description of Artificial Sequence: Synthetic oligonucleotide
  Target: ATXN2; (+) strand; PAM type: NRG; PAM sequence: CAG
acgggtttcaccatgttggc

SEQ ID NO: 37030 - DNA, 20 bp, Artificial Sequence
  Description of Artificial Sequence: Synthetic oligonucleotide
  Target: ATXN2; (+) strand; PAM type: NRG; PAM sequence: AGG
cgggtttcaccatgttggcc

SEQ ID NO: 37031 - DNA, 20 bp, Artificial Sequence
  Description of Artificial Sequence: Synthetic oligonucleotide
  Target: ATXN2; (+) strand; PAM type: NRG; PAM sequence: TGG
tttcaccatgttggccaggc

SEQ ID NO: 37032 - DNA, 20 bp, Artificial Sequence
  Description of Artificial Sequence: Synthetic oligonucleotide
  Target: ATXN2; (+) strand; PAM type: NRG; PAM sequence: TGG
ccaggctggtctcgaactac

SEQ ID NO: 37033 - DNA, 20 bp, Artificial Sequence
  Description of Artificial Sequence: Synthetic oligonucleotide
  Target: ATXN2; (+) strand; PAM type: NRG; PAM sequence: AAG
ggtctcgaactactggcctc

SEQ ID NO: 37034 - DNA, 20 bp, Artificial Sequence
  Description of Artificial Sequence: Synthetic oligonucleotide
  Target: ATXN2; (+) strand; PAM type: NRG; PAM sequence: CGG
ctcaagtgatccatccgcct

SEQ ID NO: 37035 - DNA, 20 bp, Artificial Sequence
  Description of Artificial Sequence: Synthetic oligonucleotide
  Target: ATXN2; (+) strand; PAM type: NRG; PAM sequence: AAG
ccatccgcctcggcctccca

SEQ ID NO: 37036 - DNA, 20 bp, Artificial Sequence
  Description of Artificial Sequence: Synthetic oligonucleotide
  Target: ATXN2; (+) strand; PAM type: NRG; PAM sequence: TGG
gcctcggcctcccaaagtgc

SEQ ID NO: 37037 - DNA, 20 bp, Artificial Sequence
  Description of Artificial Sequence: Synthetic oligonucleotide
  Target: ATXN2; (+) strand; PAM type: NRG; PAM sequence: GGG
cctcggcctcccaaagtgct

SEQ ID NO: 37038 - DNA, 20 bp, Artificial Sequence
  Description of Artificial Sequence: Synthetic oligonucleotide
  Target: ATXN2; (+) strand; PAM type: NRG; PAM sequence: CAG
ctcccaaagtgctgggatta

SEQ ID NO: 37039 - DNA, 20 bp, Artificial Sequence
  Description of Artificial Sequence: Synthetic oligonucleotide
  Target: ATXN2; (+) strand; PAM type: NRG; PAM sequence: AGG
tcccaaagtgctgggattac

SEQ ID NO: 37040 - DNA, 20 bp, Artificial Sequence
  Description of Artificial Sequence: Synthetic oligonucleotide
  Target: ATXN2; (+) strand; PAM type: NRG; PAM sequence: GAG
agtgctgggattacaggcat

SEQ ID NO: 37041 - DNA, 20 bp, Artificial Sequence
  Description of Artificial Sequence: Synthetic oligonucleotide
  Target: ATXN2; (+) strand; PAM type: NRG; PAM sequence: CGG
caggcatgagccactgcgcc

SEQ ID NO: 37042 - DNA, 20 bp, Artificial Sequence
  Description of Artificial Sequence: Synthetic oligonucleotide
  Target: ATXN2; (+) strand; PAM type: NRG; PAM sequence: GAG
ggccatgtttgtttattttt

SEQ ID NO: 37043 - DNA, 20 bp, Artificial Sequence
  Description of Artificial Sequence: Synthetic oligonucleotide
  Target: ATXN2; (+) strand; PAM type: NRG; PAM sequence: CAG
gtttgtttatttttgagacc

SEQ ID NO: 37044 - DNA, 20 bp, Artificial Sequence
  Description of Artificial Sequence: Synthetic oligonucleotide
  Target: ATXN2; (+) strand; PAM type: NRG; PAM sequence: CAG
gacccagtcttgctgtcacc

SEQ ID NO: 37045 - DNA, 20 bp, Artificial Sequence
  Description of Artificial Sequence: Synthetic oligonucleotide
  Target: ATXN2; (+) strand; PAM type: NRG; PAM sequence: AGG
acccagtcttgctgtcaccc

SEQ ID NO: 37046 - DNA, 20 bp, Artificial Sequence
  Description of Artificial Sequence: Synthetic oligonucleotide
  Target: ATXN2; (+) strand; PAM type: NRG; PAM sequence: TGG
agtcttgctgtcacccaggc

SEQ ID NO: 37047 - DNA, 20 bp, Artificial Sequence
  Description of Artificial Sequence: Synthetic oligonucleotide
  Target: ATXN2; (+) strand; PAM type: NRG; PAM sequence: GAG
tcttgctgtcacccaggctg

SEQ ID NO: 37048 - DNA, 20 bp, Artificial Sequence
  Description of Artificial Sequence: Synthetic oligonucleotide
  Target: ATXN2; (+) strand; PAM type: NRG; PAM sequence: CAG
ctgtcacccaggctggagtg

SEQ ID NO: 37049 - DNA, 20 bp, Artificial Sequence
  Description of Artificial Sequence: Synthetic oligonucleotide
  Target: ATXN2; (+) strand; PAM type: NRG; PAM sequence: TGG
tcacccaggctggagtgcag

SEQ ID NO: 37050 - DNA, 20 bp, Artificial Sequence
  Description of Artificial Sequence: Synthetic oligonucleotide
  Target: ATXN2; (+) strand; PAM type: NRG; PAM sequence: GAG
acccaggctggagtgcagtg

SEQ ID NO: 37051 - DNA, 20 bp, Artificial Sequence
  Description of Artificial Sequence: Synthetic oligonucleotide
  Target: ATXN2; (+) strand; PAM type: NRG; PAM sequence: CGG
ggagtgcagtggagcgatct

SEQ ID NO: 37052 - DNA, 20 bp, Artificial Sequence
  Description of Artificial Sequence: Synthetic oligonucleotide
  Target: ATXN2; (+) strand; PAM type: NRG; PAM sequence: CAG
ggagcgatctcggctcactg

SEQ ID NO: 37053 - DNA, 20 bp, Artificial Sequence
  Description of Artificial Sequence: Synthetic oligonucleotide
  Target: ATXN2; (+) strand; PAM type: NRG; PAM sequence: TGG
tcactgcagcctccgcctcc

SEQ ID NO: 37054 - DNA, 20 bp, Artificial Sequence
  Description of Artificial Sequence: Synthetic oligonucleotide
  Target: ATXN2; (+) strand; PAM type: NRG; PAM sequence: GGG
cactgcagcctccgcctcct

SEQ ID NO: 37055 - DNA, 20 bp, Artificial Sequence
  Description of Artificial Sequence: Synthetic oligonucleotide
  Target: ATXN2; (+) strand; PAM type: NRG; PAM sequence: AAG
agcctccgcctcctgggtta

SEQ ID NO: 37056 - DNA, 20 bp, Artificial Sequence
  Description of Artificial Sequence: Synthetic oligonucleotide
  Target: ATXN2; (+) strand; PAM type: NRG; PAM sequence: CAG
ttaaagtgatactcctgctt

SEQ ID NO: 37057 - DNA, 20 bp, Artificial Sequence
  Description of Artificial Sequence: Synthetic oligonucleotide
  Target: ATXN2; (+) strand; PAM type: NRG; PAM sequence: GAG
atactcctgcttcagcctct

SEQ ID NO: 37058 - DNA, 20 bp, Artificial Sequence
  Description of Artificial Sequence: Synthetic oligonucleotide
  Target: ATXN2; (+) strand; PAM type: NRG; PAM sequence: TAG
ctcctgcttcagcctctgag

SEQ ID NO: 37059 - DNA, 20 bp, Artificial Sequence
  Description of Artificial Sequence: Synthetic oligonucleotide
  Target: ATXN2; (+) strand; PAM type: NRG; PAM sequence: TGG
tgcttcagcctctgagtagc

SEQ ID NO: 37060 - DNA, 20 bp, Artificial Sequence
  Description of Artificial Sequence: Synthetic oligonucleotide
  Target: ATXN2; (+) strand; PAM type: NRG; PAM sequence: GGG
gcttcagcctctgagtagct

SEQ ID NO: 37061 - DNA, 20 bp, Artificial Sequence
  Description of Artificial Sequence: Synthetic oligonucleotide
  Target: ATXN2; (+) strand; PAM type: NRG; PAM sequence: TGG
tctgagtagctgggattacc

SEQ ID NO: 37062 - DNA, 20 bp, Artificial Sequence
  Description of Artificial Sequence: Synthetic oligonucleotide
  Target: ATXN2; (+) strand; PAM type: NRG; PAM sequence: TAG
ctggctaatttttgtatttt

SEQ ID NO: 37063 - DNA, 20 bp, Artificial Sequence
  Description of Artificial Sequence: Synthetic oligonucleotide
  Target: ATXN2; (+) strand; PAM type: NRG; PAM sequence: TAG
gctaatttttgtatttttag

SEQ ID NO: 37064 - DNA, 20 bp, Artificial Sequence
  Description of Artificial Sequence: Synthetic oligonucleotide
  Target: ATXN2; (+) strand; PAM type: NRG; PAM sequence: GAG
taatttttgtatttttagta

SEQ ID NO: 37065 - DNA, 20 bp, Artificial Sequence
  Description of Artificial Sequence: Synthetic oligonucleotide
  Target: ATXN2; (+) strand; PAM type: NRG; PAM sequence: CGG
ttttgtatttttagtagaga

SEQ ID NO: 37066 - DNA, 20 bp, Artificial Sequence
  Description of Artificial Sequence: Synthetic oligonucleotide
  Target: ATXN2; (+) strand; PAM type: NRG; PAM sequence: GGG
tttgtatttttagtagagac

SEQ ID NO: 37067 - DNA, 20 bp, Artificial Sequence
  Description of Artificial Sequence: Synthetic oligonucleotide
  Target: ATXN2; (+) strand; PAM type: NRG; PAM sequence: GGG
ttgtatttttagtagagacg

SEQ ID NO: 37068 - DNA, 20 bp, Artificial Sequence
  Description of Artificial Sequence: Synthetic oligonucleotide
  Target: ATXN2; (+) strand; PAM type: NRG; PAM sequence: TGG
gagacggggtttcaccatgt

SEQ ID NO: 37069 - DNA, 20 bp, Artificial Sequence
  Description of Artificial Sequence: Synthetic oligonucleotide
  Target: ATXN2; (+) strand; PAM type: NRG; PAM sequence: CAG
cggggtttcaccatgttggc

SEQ ID NO: 37070 - DNA, 20 bp, Artificial Sequence
  Description of Artificial Sequence: Synthetic oligonucleotide
  Target: ATXN2; (+) strand; PAM type: NRG; PAM sequence: AGG
ggggtttcaccatgttggcc

SEQ ID NO: 37071 - DNA, 20 bp, Artificial Sequence
  Description of Artificial Sequence: Synthetic oligonucleotide
  Target: ATXN2; (+) strand; PAM type: NRG; PAM sequence: TGG
tttcaccatgttggccaggc

SEQ ID NO: 37072 - DNA, 20 bp, Artificial Sequence
  Description of Artificial Sequence: Synthetic oligonucleotide
  Target: ATXN2; (+) strand; PAM type: NRG; PAM sequence: TGG
ccaggctggtctcaaactcc

SEQ ID NO: 37073 - DNA, 20 bp, Artificial Sequence
  Description of Artificial Sequence: Synthetic oligonucleotide
  Target: ATXN2; (+) strand; PAM type: NRG; PAM sequence: AAG
ggtctcaaactcctggcctc

SEQ ID NO: 37074 - DNA, 20 bp, Artificial Sequence
  Description of Artificial Sequence: Synthetic oligonucleotide
  Target: ATXN2; (+) strand; PAM type: NRG; PAM sequence: CGG
ctcaagtgatccgtccatct

SEQ ID NO: 37075 - DNA, 20 bp, Artificial Sequence
  Description of Artificial Sequence: Synthetic oligonucleotide
  Target: ATXN2; (+) strand; PAM type: NRG; PAM sequence: AAG
ccgtccatctcggcctccca

SEQ ID NO: 37076 - DNA, 20 bp, Artificial Sequence
  Description of Artificial Sequence: Synthetic oligonucleotide
  Target: ATXN2; (+) strand; PAM type: NRG; PAM sequence: TGG
atctcggcctcccaaagtgt

SEQ ID NO: 37077 - DNA, 20 bp, Artificial Sequence
  Description of Artificial Sequence: Synthetic oligonucleotide
  Target: ATXN2; (+) strand; PAM type: NRG; PAM sequence: GGG
tctcggcctcccaaagtgtt

SEQ ID NO: 37078 - DNA, 20 bp, Artificial Sequence
  Description of Artificial Sequence: Synthetic oligonucleotide
  Target: ATXN2; (+) strand; PAM type: NRG; PAM sequence: CAG
ctcccaaagtgttgggatta

SEQ ID NO: 37079 - DNA, 20 bp, Artificial Sequence
  Description of Artificial Sequence: Synthetic oligonucleotide
  Target: ATXN2; (+) strand; PAM type: NRG; PAM sequence: AGG
tcccaaagtgttgggattac

SEQ ID NO: 37080 - DNA, 20 bp, Artificial Sequence
  Description of Artificial Sequence: Synthetic oligonucleotide
  Target: ATXN2; (+) strand; PAM type: NRG; PAM sequence: GAG
agtgttgggattacaggtgt

SEQ ID NO: 37081 - DNA, 20 bp, Artificial Sequence
  Description of Artificial Sequence: Synthetic oligonucleotide
  Target: ATXN2; (+) strand; PAM type: NRG; PAM sequence: CGG
caggtgtgagcaactgcacc

SEQ ID NO: 37082 - DNA, 20 bp, Artificial Sequence
  Description of Artificial Sequence: Synthetic oligonucleotide
  Target: ATXN2; (+) strand; PAM type: NRG; PAM sequence: AAG
tttatttttgaataataaaa

SEQ ID NO: 37083 - DNA, 20 bp, Artificial Sequence
  Description of Artificial Sequence: Synthetic oligonucleotide
  Target: ATXN2; (+) strand; PAM type: NRG; PAM sequence: TAG
aataataaaaaagccacatg

SEQ ID NO: 37084 - DNA, 20 bp, Artificial Sequence
  Description of Artificial Sequence: Synthetic oligonucleotide
  Target: ATXN2; (+) strand; PAM type: NRG; PAM sequence: AAG
taaaaaagccacatgtagct

SEQ ID NO: 37085 - DNA, 20 bp, Artificial Sequence
  Description of Artificial Sequence: Synthetic oligonucleotide
  Target: ATXN2; (+) strand; PAM type: NRG; PAM sequence: TAG
aaaagccacatgtagctaag

SEQ ID NO: 37086 - DNA, 20 bp, Artificial Sequence
  Description of Artificial Sequence: Synthetic oligonucleotide
  Target: ATXN2; (+) strand; PAM type: NRG; PAM sequence: CGG
atgtagctaagtagctaata

SEQ ID NO: 37087 - DNA, 20 bp, Artificial Sequence
  Description of Artificial Sequence: Synthetic oligonucleotide
  Target: ATXN2; (+) strand; PAM type: NRG; PAM sequence: TGG
tagctaagtagctaatacgg

SEQ ID NO: 37088 - DNA, 20 bp, Artificial Sequence
  Description of Artificial Sequence: Synthetic oligonucleotide
  Target: ATXN2; (+) strand; PAM type: NRG; PAM sequence: CAG
taagtagctaatacggtgga

SEQ ID NO: 37089 - DNA, 20 bp, Artificial Sequence
  Description of Artificial Sequence: Synthetic oligonucleotide
  Target: ATXN2; (+) strand; PAM type: NRG; PAM sequence: CAG
agctaatacggtggacagtg

SEQ ID NO: 37090 - DNA, 20 bp, Artificial Sequence
  Description of Artificial Sequence: Synthetic oligonucleotide
  Target: ATXN2; (+) strand; PAM type: NRG; PAM sequence: GAG
tgcagttttgttgttgtttt

SEQ ID NO: 37091 - DNA, 20 bp, Artificial Sequence
  Description of Artificial Sequence: Synthetic oligonucleotide
  Target: ATXN2; (+) strand; PAM type: NRG; PAM sequence: CGG
gttttgttgttgttttgaga

SEQ ID NO: 37092 - DNA, 20 bp, Artificial Sequence
  Description of Artificial Sequence: Synthetic oligonucleotide
  Target: ATXN2; (+) strand; PAM type: NRG; PAM sequence: GAG
tttgttgttgttttgagacg

SEQ ID NO: 37093 - DNA, 20 bp, Artificial Sequence
  Description of Artificial Sequence: Synthetic oligonucleotide
  Target: ATXN2; (+) strand; PAM type: NRG; PAM sequence: CAG
cggagtctcgctctgttgcc

SEQ ID NO: 37094 - DNA, 20 bp, Artificial Sequence
  Description of Artificial Sequence: Synthetic oligonucleotide
  Target: ATXN2; (+) strand; PAM type: NRG; PAM sequence: AGG
ggagtctcgctctgttgccc

SEQ ID NO: 37095 - DNA, 20 bp, Artificial Sequence
  Description of Artificial Sequence: Synthetic oligonucleotide
  Target: ATXN2; (+) strand; PAM type: NRG; PAM sequence: GGG
gagtctcgctctgttgccca

SEQ ID NO: 37096 - DNA, 20 bp, Artificial Sequence
  Description of Artificial Sequence: Synthetic oligonucleotide
  Target: ATXN2; (+) strand; PAM type: NRG; PAM sequence: TGG
tctcgctctgttgcccaggg

SEQ ID NO: 37097 - DNA, 20 bp, Artificial Sequence
  Description of Artificial Sequence: Synthetic oligonucleotide
  Target: ATXN2; (+) strand; PAM type: NRG; PAM sequence: GAG
tcgctctgttgcccagggtg

SEQ ID NO: 37098 - DNA, 20 bp, Artificial Sequence
  Description of Artificial Sequence: Synthetic oligonucleotide
  Target: ATXN2; (+) strand; PAM type: NRG; PAM sequence: CAG
ctgttgcccagggtggagtg

SEQ ID NO: 37099 - DNA, 20 bp, Artificial Sequence
  Description of Artificial Sequence: Synthetic oligonucleotide
  Target: ATXN2; (+) strand; PAM type: NRG; PAM sequence: TGG
ttgcccagggtggagtgcag

SEQ ID NO: 37100 - DNA, 20 bp, Artificial Sequence
  Description of Artificial Sequence: Synthetic oligonucleotide
  Target: ATXN2; (+) strand; PAM type: NRG; PAM sequence: CAG
ggagtgcagtggcgtgatat

SEQ ID NO: 37101 - DNA, 20 bp, Artificial Sequence
  Description of Artificial Sequence: Synthetic oligonucleotide
  Target: ATXN2; (+) strand; PAM type: NRG; PAM sequence: CGG
tcaccgcaacctctgcctcc

SEQ ID NO: 37102 - DNA, 20 bp, Artificial Sequence
  Description of Artificial Sequence: Synthetic oligonucleotide
  Target: ATXN2; (+) strand; PAM type: NRG; PAM sequence: GGG
caccgcaacctctgcctccc

SEQ ID NO: 37103 - DNA, 20 bp, Artificial Sequence
  Description of Artificial Sequence: Synthetic oligonucleotide
  Target: ATXN2; (+) strand; PAM type: NRG; PAM sequence: AAG
aacctctgcctcccgggttc

SEQ ID NO: 37104 - DNA, 20 bp, Artificial Sequence
  Description of Artificial Sequence: Synthetic oligonucleotide
  Target: ATXN2; (+) strand; PAM type: NRG; PAM sequence: CAG
ttcaagcgattctcctgtgt

SEQ ID NO: 37105 - DNA, 20 bp, Artificial Sequence
  Description of Artificial Sequence: Synthetic oligonucleotide
  Target: ATXN2; (+) strand; PAM type: NRG; PAM sequence: GAG
ttctcctgtgtcagcctcct

SEQ ID NO: 37106 - DNA, 20 bp, Artificial Sequence
  Description of Artificial Sequence: Synthetic oligonucleotide
  Target: ATXN2; (+) strand; PAM type: NRG; PAM sequence: TAG
tcctgtgtcagcctcctgag

SEQ ID NO: 37107 - DNA, 20 bp, Artificial Sequence
  Description of Artificial Sequence: Synthetic oligonucleotide
  Target: ATXN2; (+) strand; PAM type: NRG; PAM sequence: TAG
gtgtcagcctcctgagtagc

SEQ ID NO: 37108 - DNA, 20 bp, Artificial Sequence
  Description of Artificial Sequence: Synthetic oligonucleotide
  Target: ATXN2; (+) strand; PAM type: NRG; PAM sequence: AGG
tgtcagcctcctgagtagct

SEQ ID NO: 37109 - DNA, 20 bp, Artificial Sequence
  Description of Artificial Sequence: Synthetic oligonucleotide
  Target: ATXN2; (+) strand; PAM type: NRG; PAM sequence: CAG
ctcctgagtagctaggacta

SEQ ID NO: 37110 - DNA, 20 bp, Artificial Sequence
  Description of Artificial Sequence: Synthetic oligonucleotide
  Target: ATXN2; (+) strand; PAM type: NRG; PAM sequence: AGG
tcctgagtagctaggactac

SEQ ID NO: 37111 - DNA, 20 bp, Artificial Sequence
  Description of Artificial Sequence: Synthetic oligonucleotide
  Target: ATXN2; (+) strand; PAM type: NRG; PAM sequence: TGG
gctaggactacaggcgcgcc

SEQ ID NO: 37112 - DNA, 20 bp, Artificial Sequence
  Description of Artificial Sequence: Synthetic oligonucleotide
  Target: ATXN2; (+) strand; PAM type: NRG; PAM sequence: TAG
ggctaacttttttgtatttt

SEQ ID NO: 37113 - DNA, 20 bp, Artificial Sequence
  Description of Artificial Sequence: Synthetic oligonucleotide
  Target: ATXN2; (+) strand; PAM type: NRG; PAM sequence: TAG
taacttttttgtatttttag

SEQ ID NO: 37114 - DNA, 20 bp, Artificial Sequence
  Description of Artificial Sequence: Synthetic oligonucleotide
  Target: ATXN2; (+) strand; PAM type: NRG; PAM sequence: GAG
acttttttgtatttttagta

SEQ ID NO: 37115 - DNA, 20 bp, Artificial Sequence
  Description of Artificial Sequence: Synthetic oligonucleotide
  Target: ATXN2; (+) strand; PAM type: NRG; PAM sequence: CAG
ttttgtatttttagtagaga

SEQ ID NO: 37116 - DNA, 20 bp, Artificial Sequence
  Description of Artificial Sequence: Synthetic oligonucleotide
  Target: ATXN2; (+) strand; PAM type: NRG; PAM sequence: AGG
tttgtatttttagtagagac

SEQ ID NO: 37117 - DNA, 20 bp, Artificial Sequence
  Description of Artificial Sequence: Synthetic oligonucleotide
  Target: ATXN2; (+) strand; PAM type: NRG; PAM sequence: GGG
ttgtatttttagtagagaca

SEQ ID NO: 37118 - DNA, 20 bp, Artificial Sequence
  Description of Artificial Sequence: Synthetic oligonucleotide
  Target: ATXN2; (+) strand; PAM type: NRG; PAM sequence: TGG
gagacagggtttcaccatgt

SEQ ID NO: 37119 - DNA, 20 bp, Artificial Sequence
  Description of Artificial Sequence: Synthetic oligonucleotide
  Target: ATXN2; (+) strand; PAM type: NRG; PAM sequence: TGG
agggtttcaccatgttggtc

SEQ ID NO: 37120 - DNA, 20 bp, Artificial Sequence
  Description of Artificial Sequence: Synthetic oligonucleotide
  Target: ATXN2; (+) strand; PAM type: NRG; PAM sequence: TGG
tttcaccatgttggtctggc

SEQ ID NO: 37121 - DNA, 20 bp, Artificial Sequence
  Description of Artificial Sequence: Synthetic oligonucleotide
  Target: ATXN2; (+) strand; PAM type: NRG; PAM sequence: CAG
tggtcttgaactcctgacct

SEQ ID NO: 37122 - DNA, 20 bp, Artificial Sequence
  Description of Artificial Sequence: Synthetic oligonucleotide
  Target: ATXN2; (+) strand; PAM type: NRG; PAM sequence: AGG
ggtcttgaactcctgacctc

SEQ ID NO: 37123 - DNA, 20 bp, Artificial Sequence
  Description of Artificial Sequence: Synthetic oligonucleotide
  Target: ATXN2; (+) strand; PAM type: NRG; PAM sequence: TGG
ctcaggtgatccacttgtct

SEQ ID NO: 37124 - DNA, 20 bp, Artificial Sequence
  Description of Artificial Sequence: Synthetic oligonucleotide
  Target: ATXN2; (+) strand; PAM type: NRG; PAM sequence: AAG
ccacttgtcttggcctccca

SEQ ID NO: 37125 - DNA, 20 bp, Artificial Sequence
  Description of Artificial Sequence: Synthetic oligonucleotide
  Target: ATXN2; (+) strand; PAM type: NRG; PAM sequence: TGG
gtcttggcctcccaaagtgc

SEQ ID NO: 37126 - DNA, 20 bp, Artificial Sequence
  Description of Artificial Sequence: Synthetic oligonucleotide
  Target: ATXN2; (+) strand; PAM type: NRG; PAM sequence: GGG
tcttggcctcccaaagtgct

SEQ ID NO: 37127 - DNA, 20 bp, Artificial Sequence
  Description of Artificial Sequence: Synthetic oligonucleotide
  Target: ATXN2; (+) strand; PAM type: NRG; PAM sequence: CAG
ctcccaaagtgctgggacta

SEQ ID NO: 37128 - DNA, 20 bp, Artificial Sequence
  Description of Artificial Sequence: Synthetic oligonucleotide
  Target: ATXN2; (+) strand; PAM type: NRG; PAM sequence: AGG
tcccaaagtgctgggactac

SEQ ID NO: 37129 - DNA, 20 bp, Artificial Sequence
  Description of Artificial Sequence: Synthetic oligonucleotide
  Target: ATXN2; (+) strand; PAM type: NRG; PAM sequence: GAG
agtgctgggactacaggcgt

SEQ ID NO: 37130 - DNA, 20 bp, Artificial Sequence
  Description of Artificial Sequence: Synthetic oligonucleotide
  Target: ATXN2; (+) strand; PAM type: NRG; PAM sequence: CAG
caggcgtgagccaccgcgcc

SEQ ID NO: 37131 - DNA, 20 bp, Artificial Sequence
  Description of Artificial Sequence: Synthetic oligonucleotide
  Target: ATXN2; (+) strand; PAM type: NRG; PAM sequence: TGG
ccagccacaaaatgttctac

SEQ ID NO: 37132 - DNA, 20 bp, Artificial Sequence
  Description of Artificial Sequence: Synthetic oligonucleotide
  Target: ATXN2; (+) strand; PAM type: NRG; PAM sequence: TAG
ccacaaaatgttctactgga

SEQ ID NO: 37133 - DNA, 20 bp, Artificial Sequence
  Description of Artificial Sequence: Synthetic oligonucleotide
  Target: ATXN2; (+) strand; PAM type: NRG; PAM sequence: CAG
ctactggatagtgatgtcta

SEQ ID NO: 37134 - DNA, 20 bp, Artificial Sequence
  Description of Artificial Sequence: Synthetic oligonucleotide
  Target: ATXN2; (+) strand; PAM type: NRG; PAM sequence: TGG
gtgatgtctacagttgtcca

SEQ ID NO: 37135 - DNA, 20 bp, Artificial Sequence
  Description of Artificial Sequence: Synthetic oligonucleotide
  Target: ATXN2; (+) strand; PAM type: NRG; PAM sequence: TAG
gtcccctactgttaaaccat

SEQ ID NO: 37136 - DNA, 20 bp, Artificial Sequence
  Description of Artificial Sequence: Synthetic oligonucleotide
  Target: ATXN2; (+) strand; PAM type: NRG; PAM sequence: CAG
actaacccctaccgccaccc

SEQ ID NO: 37137 - DNA, 20 bp, Artificial Sequence
  Description of Artificial Sequence: Synthetic oligonucleotide
  Target: ATXN2; (+) strand; PAM type: NRG; PAM sequence: AAG
gtaacaatctaaatctgtct

SEQ ID NO: 37138 - DNA, 20 bp, Artificial Sequence
  Description of Artificial Sequence: Synthetic oligonucleotide
  Target: ATXN2; (+) strand; PAM type: NRG; PAM sequence: AGG
taacaatctaaatctgtcta

SEQ ID NO: 37139 - DNA, 20 bp, Artificial Sequence
  Description of Artificial Sequence: Synthetic oligonucleotide
  Target: ATXN2; (+) strand; PAM type: NRG; PAM sequence: AAG
atctaaatctgtctaaggaa

SEQ ID NO: 37140 - DNA, 20 bp, Artificial Sequence
  Description of Artificial Sequence: Synthetic oligonucleotide
  Target: ATXN2; (+) strand; PAM type: NRG; PAM sequence: TGG
caaatcccaaattctgttca

SEQ ID NO: 37141 - DNA, 20 bp, Artificial Sequence
  Description of Artificial Sequence: Synthetic oligonucleotide
  Target: ATXN2; (+) strand; PAM type: NRG; PAM sequence: GAG
aatcccaaattctgttcatg

SEQ ID NO: 37142 - DNA, 20 bp, Artificial Sequence
  Description of Artificial Sequence: Synthetic oligonucleotide
  Target: ATXN2; (+) strand; PAM type: NRG; PAM sequence: AGG
atcccaaattctgttcatgg

SEQ ID NO: 37143 - DNA, 20 bp, Artificial Sequence
  Description of Artificial Sequence: Synthetic oligonucleotide
  Target: ATXN2; (+) strand; PAM type: NRG; PAM sequence: AAG
tctgttcatggaggttcata

SEQ ID NO: 37144 - DNA, 20 bp, Artificial Sequence
  Description of Artificial Sequence: Synthetic oligonucleotide
  Target: ATXN2; (+) strand; PAM type: NRG; PAM sequence: CAG
catggaggttcataaagata

SEQ ID NO: 37145 - DNA, 20 bp, Artificial Sequence
  Description of Artificial Sequence: Synthetic oligonucleotide
  Target: ATXN2; (+) strand; PAM type: NRG; PAM sequence: CGG
aggttcataaagatacagta

SEQ ID NO: 37146 - DNA, 20 bp, Artificial Sequence
  Description of Artificial Sequence: Synthetic oligonucleotide
  Target: ATXN2; (+) strand; PAM type: NRG; PAM sequence: CAG
aaagatacagtacggaatct

SEQ ID NO: 37147 - DNA, 20 bp, Artificial Sequence
  Description of Artificial Sequence: Synthetic oligonucleotide
  Target: ATXN2; (+) strand; PAM type: NRG; PAM sequence: GAG
agatacagtacggaatctca

SEQ ID NO: 37148 - DNA, 20 bp, Artificial Sequence
  Description of Artificial Sequence: Synthetic oligonucleotide
  Target: ATXN2; (+) strand; PAM type: NRG; PAM sequence: AGG
gatacagtacggaatctcag

SEQ ID NO: 37149 - DNA, 20 bp, Artificial Sequence
  Description of Artificial Sequence: Synthetic oligonucleotide
  Target: ATXN2; (+) strand; PAM type: NRG; PAM sequence: AAG
ttttgtaactttatttattc

SEQ ID NO: 37150 - DNA, 20 bp, Artificial Sequence
  Description of Artificial Sequence: Synthetic oligonucleotide
  Target: ATXN2; (+) strand; PAM type: NRG; PAM sequence: AAG
tcaagaaattttgtactaaa

SEQ ID NO: 37151 - DNA, 20 bp, Artificial Sequence
  Description of Artificial Sequence: Synthetic oligonucleotide
  Target: ATXN2; (+) strand; PAM type: NRG; PAM sequence: AAG
ttcacttttaaataccttct

SEQ ID NO: 37152 - DNA, 20 bp, Artificial Sequence
  Description of Artificial Sequence: Synthetic oligonucleotide
  Target: ATXN2; (+) strand; PAM type: NRG; PAM sequence: AAG
ttttaaataccttctaagca

SEQ ID NO: 37153 - DNA, 20 bp, Artificial Sequence
  Description of Artificial Sequence: Synthetic oligonucleotide
  Target: ATXN2; (+) strand; PAM type: NRG; PAM sequence: AAG
taccttctaagcaaagtatt

SEQ ID NO: 37154 - DNA, 20 bp, Artificial Sequence
  Description of Artificial Sequence: Synthetic oligonucleotide
  Target: ATXN2; (+) strand; PAM type: NRG; PAM sequence: AAG
aaagtattaagaatattaaa

SEQ ID NO: 37155 - DNA, 20 bp, Artificial Sequence
  Description of Artificial Sequence: Synthetic oligonucleotide
  Target: ATXN2; (+) strand; PAM type: NRG; PAM sequence: TAG
ttaaaaagtaacaataaata

SEQ ID NO: 37156 - DNA, 20 bp, Artificial Sequence
  Description of Artificial Sequence: Synthetic oligonucleotide
  Target: ATXN2; (+) strand; PAM type: NRG; PAM sequence: AAG
cccatgaaatctcataattt

SEQ ID NO: 37157 - DNA, 20 bp, Artificial Sequence
  Description of Artificial Sequence: Synthetic oligonucleotide
  Target: ATXN2; (+) strand; PAM type: NRG; PAM sequence: TGG
aatttaagttattcatcaac

SEQ ID NO: 37158 - DNA, 20 bp, Artificial Sequence
  Description of Artificial Sequence: Synthetic oligonucleotide
  Target: ATXN2; (+) strand; PAM type: NRG; PAM sequence: AAG
aaaaatcttaaaatcatttg

SEQ ID NO: 37159 - DNA, 20 bp, Artificial Sequence
  Description of Artificial Sequence: Synthetic oligonucleotide
  Target: ATXN2; (+) strand; PAM type: NRG; PAM sequence: GAG
aaatcttaaaatcatttgaa

SEQ ID NO: 37160 - DNA, 20 bp, Artificial Sequence
  Description of Artificial Sequence: Synthetic oligonucleotide
  Target: ATXN2; (+) strand; PAM type: NRG; PAM sequence: AAG
ttaaaatcatttgaagagaa

SEQ ID NO: 37161 - DNA, 20 bp, Artificial Sequence
  Description of Artificial Sequence: Synthetic oligonucleotide
  Target: ATXN2; (+) strand; PAM type: NRG; PAM sequence: AAG
atcatttgaagagaaaagta

SEQ ID NO: 37162 - DNA, 20 bp, Artificial Sequence
  Description of Artificial Sequence: Synthetic oligonucleotide
  Target: ATXN2; (+) strand; PAM type: NRG; PAM sequence: AAG
tttttactatgcatttttaa

SEQ ID NO: 37163 - DNA, 20 bp, Artificial Sequence
  Description of Artificial Sequence: Synthetic oligonucleotide
  Target: ATXN2; (+) strand; PAM type: NRG; PAM sequence: AGG
ttttactatgcatttttaaa

SEQ ID NO: 37164 - DNA, 20 bp, Artificial Sequence
  Description of Artificial Sequence: Synthetic oligonucleotide
  Target: ATXN2; (+) strand; PAM type: NRG; PAM sequence: AAG
aaaaggcatctctgcaattt

SEQ ID NO: 37165 - DNA, 20 bp, Artificial Sequence
  Description of Artificial Sequence: Synthetic oligonucleotide
  Target: ATXN2; (+) strand; PAM type: NRG; PAM sequence: CAG
tctctgcaatttaagtttac

SEQ ID NO: 37166 - DNA, 20 bp, Artificial Sequence
  Description of Artificial Sequence: Synthetic oligonucleotide
  Target: ATXN2; (+) strand; PAM type: NRG; PAM sequence: AAG
tttaagtttaccagtattta

SEQ ID NO: 37167 - DNA, 20 bp, Artificial Sequence
  Description of Artificial Sequence: Synthetic oligonucleotide
  Target: ATXN2; (+) strand; PAM type: NRG; PAM sequence: CGG
agtatttaaagactataata

SEQ ID NO: 37168 - DNA, 20 bp, Artificial Sequence
  Description of Artificial Sequence: Synthetic oligonucleotide
  Target: ATXN2; (+) strand; PAM type: NRG; PAM sequence: TAG
taatacggttttctaatcta

SEQ ID NO: 37169 - DNA, 20 bp, Artificial Sequence
  Description of Artificial Sequence: Synthetic oligonucleotide
  Target: ATXN2; (+) strand; PAM type: NRG; PAM sequence: TAG
ctatagctaatttgcatgca

SEQ ID NO: 37170 - DNA, 20 bp, Artificial Sequence
  Description of Artificial Sequence: Synthetic oligonucleotide
  Target: ATXN2; (+) strand; PAM type: NRG; PAM sequence: AAG
catgcatagcacaaataccc

SEQ ID NO: 37171 - DNA, 20 bp, Artificial Sequence
  Description of Artificial Sequence: Synthetic oligonucleotide
  Target: ATXN2; (+) strand; PAM type: NRG; PAM sequence: GAG
atagcacaaatacccaagct

SEQ ID NO: 37172 - DNA, 20 bp, Artificial Sequence
  Description of Artificial Sequence: Synthetic oligonucleotide
  Target: ATXN2; (+) strand; PAM type: NRG; PAM sequence: TAG
ccaagctgagtgaatgtaca

SEQ ID NO: 37173 - DNA, 20 bp, Artificial Sequence
  Description of Artificial Sequence: Synthetic oligonucleotide
  Target: ATXN2; (+) strand; PAM type: NRG; PAM sequence: AGG
caagctgagtgaatgtacat

SEQ ID NO: 37174 - DNA, 20 bp, Artificial Sequence
  Description of Artificial Sequence: Synthetic oligonucleotide
  Target: ATXN2; (+) strand; PAM type: NRG; PAM sequence: CGG
tcctttccctacctaaatac

SEQ ID NO: 37175 - DNA, 20 bp, Artificial Sequence
  Description of Artificial Sequence: Synthetic oligonucleotide
  Target: ATXN2; (+) strand; PAM type: NRG; PAM sequence: AAG
ctaaataccggtaaacttgc

SEQ ID NO: 37176 - DNA, 20 bp, Artificial Sequence
  Description of Artificial Sequence: Synthetic oligonucleotide
  Target: ATXN2; (+) strand; PAM type: NRG; PAM sequence: AGG
taaataccggtaaacttgca

SEQ ID NO: 37177 - DNA, 20 bp, Artificial Sequence
  Description of Artificial Sequence: Synthetic oligonucleotide
  Target: ATXN2; (+) strand; PAM type: NRG; PAM sequence: AAG
gcaaggcattgattaaaaac

SEQ ID NO: 37178 - DNA, 20 bp, Artificial Sequence
  Description of Artificial Sequence: Synthetic oligonucleotide
  Target: ATXN2; (+) strand; PAM type: NRG; PAM sequence: AAG
caagacgaacaaaaaccaca

SEQ ID NO: 37179 - DNA, 20 bp, Artificial Sequence
  Description of Artificial Sequence: Synthetic oligonucleotide
  Target: ATXN2; (+) strand; PAM type: NRG; PAM sequence: AGG
aagacgaacaaaaaccacaa

SEQ ID NO: 37180 - DNA, 20 bp, Artificial Sequence
  Description of Artificial Sequence: Synthetic oligonucleotide
  Target: ATXN2; (+) strand; PAM type: NRG; PAM sequence: AAG
cgttgtaaacaaaatttaaa

SEQ ID NO: 37181 - DNA, 20 bp, Artificial Sequence
  Description of Artificial Sequence: Synthetic oligonucleotide
  Target: ATXN2; (+) strand; PAM type: NRG; PAM sequence: GAG
ttgtaaacaaaatttaaaaa

SEQ ID NO: 37182 - DNA, 20 bp, Artificial Sequence
  Description of Artificial Sequence: Synthetic oligonucleotide
  Target: ATXN2; (+) strand; PAM type: NRG; PAM sequence: TAG
aaaatttaaaaagagttaat

SEQ ID NO: 37183 - DNA, 20 bp, Artificial Sequence
  Description of Artificial Sequence: Synthetic oligonucleotide
  Target: ATXN2; (+) strand; PAM type: NRG; PAM sequence: TAG
ttccctttgtttttttgttc

SEQ ID NO: 37184 - DNA, 20 bp, Artificial Sequence
  Description of Artificial Sequence: Synthetic oligonucleotide
  Target: ATXN2; (+) strand; PAM type: NRG; PAM sequence: AAG
gtttttttgttctagctcaa

SEQ ID NO: 37185 - DNA, 20 bp, Artificial Sequence
  Description of Artificial Sequence: Synthetic oligonucleotide
  Target: ATXN2; (+) strand; PAM type: NRG; PAM sequence: AAG
ttctagctcaaaagatctga

SEQ ID NO: 37186 - DNA, 20 bp, Artificial Sequence
  Description of Artificial Sequence: Synthetic oligonucleotide
  Target: ATXN2; (+) strand; PAM type: NRG; PAM sequence: AAG
tagctcaaaagatctgaaag

SEQ ID NO: 37187 - DNA, 20 bp, Artificial Sequence
  Description of Artificial Sequence: Synthetic oligonucleotide
  Target: ATXN2; (+) strand; PAM type: NRG; PAM sequence: CAG
tctgaaagaagtaccttaat

SEQ ID NO: 37188 - DNA, 20 bp, Artificial Sequence
  Description of Artificial Sequence: Synthetic oligonucleotide
  Target: ATXN2; (+) strand; PAM type: NRG; PAM sequence: AGG
ctgaaagaagtaccttaatc

SEQ ID NO: 37189 - DNA, 20 bp, Artificial Sequence
  Description of Artificial Sequence: Synthetic oligonucleotide
  Target: ATXN2; (+) strand; PAM type: NRG; PAM sequence: TGG
ttcctccttgaatttgaaat

SEQ ID NO: 37190 - DNA, 20 bp, Artificial Sequence
  Description of Artificial Sequence: Synthetic oligonucleotide
  Target: ATXN2; (+) strand; PAM type: NRG; PAM sequence: GGG
tcctccttgaatttgaaatt

SEQ ID NO: 37191 - DNA, 20 bp, Artificial Sequence
  Description of Artificial Sequence: Synthetic oligonucleotide
  Target: ATXN2; (+) strand; PAM type: NRG; PAM sequence: GAG
ctccttgaatttgaaattgg

SEQ ID NO: 37192 - DNA, 20 bp, Artificial Sequence
  Description of Artificial Sequence: Synthetic oligonucleotide
  Target: ATXN2; (+) strand; PAM type: NRG; PAM sequence: TGG
gaatttgaaattgggagaaa

SEQ ID NO: 37193 - DNA, 20 bp, Artificial Sequence
  Description of Artificial Sequence: Synthetic oligonucleotide
  Target: ATXN2; (+) strand; PAM type: NRG; PAM sequence: GAG
atttgaaattgggagaaatg

SEQ ID NO: 37194 - DNA, 20 bp, Artificial Sequence
  Description of Artificial Sequence: Synthetic oligonucleotide
  Target: ATXN2; (+) strand; PAM type: NRG; PAM sequence: CGG
gaaattgggagaaatggagc

SEQ ID NO: 37195 - DNA, 20 bp, Artificial Sequence
  Description of Artificial Sequence: Synthetic oligonucleotide
  Target: ATXN2; (+) strand; PAM type: NRG; PAM sequence: GGG
aaattgggagaaatggagcc

SEQ ID NO: 37196 - DNA, 20 bp, Artificial Sequence
  Description of Artificial Sequence: Synthetic oligonucleotide
  Target: ATXN2; (+) strand; PAM type: NRG; PAM sequence: CGG
gggagaaatggagccgggca

SEQ ID NO: 37197 - DNA, 20 bp, Artificial Sequence
  Description of Artificial Sequence: Synthetic oligonucleotide
  Target: ATXN2; (+) strand; PAM type: NRG; PAM sequence: TGG
agaaatggagccgggcacgg

SEQ ID NO: 37198 - DNA, 20 bp, Artificial Sequence
  Description of Artificial Sequence: Synthetic oligonucleotide
  Target: ATXN2; (+) strand; PAM type: NRG; PAM sequence: CAG
gtggctcacgcttgtaatcc

SEQ ID NO: 37199 - DNA, 20 bp, Artificial Sequence
  Description of Artificial Sequence: Synthetic oligonucleotide
  Target: ATXN2; (+) strand; PAM type: NRG; PAM sequence: TGG
cgcttgtaatcccagcattt

SEQ ID NO: 37200 - DNA, 20 bp, Artificial Sequence
  Description of Artificial Sequence: Synthetic oligonucleotide
  Target: ATXN2; (+) strand; PAM type: NRG; PAM sequence: GGG
gcttgtaatcccagcatttt

SEQ ID NO: 37201 - DNA, 20 bp, Artificial Sequence
  Description of Artificial Sequence: Synthetic oligonucleotide
  Target: ATXN2; (+) strand; PAM type: NRG; PAM sequence: GAG
ttgtaatcccagcattttgg

SEQ ID NO: 37202 - DNA, 20 bp, Artificial Sequence
  Description of Artificial Sequence: Synthetic oligonucleotide
  Target: ATXN2; (+) strand; PAM type: NRG; PAM sequence: AGG
tgtaatcccagcattttggg

SEQ ID NO: 37203 - DNA, 20 bp, Artificial Sequence
  Description of Artificial Sequence: Synthetic oligonucleotide
  Target: ATXN2; (+) strand; PAM type: NRG; PAM sequence: GAG
tcccagcattttgggaggcc

SEQ ID NO: 37204 - DNA, 20 bp, Artificial Sequence
  Description of Artificial Sequence: Synthetic oligonucleotide
  Target: ATXN2; (+) strand; PAM type: NRG; PAM sequence: AGG
cccagcattttgggaggccg

SEQ ID NO: 37205 - DNA, 20 bp, Artificial Sequence
  Description of Artificial Sequence: Synthetic oligonucleotide
  Target: ATXN2; (+) strand; PAM type: NRG; PAM sequence: CGG
agcattttgggaggccgagg

SEQ ID NO: 37206 - DNA, 20 bp, Artificial Sequence
  Description of Artificial Sequence: Synthetic oligonucleotide
  Target: ATXN2; (+) strand; PAM type: NRG; PAM sequence: GGG
gcattttgggaggccgaggc

SEQ ID NO: 37207 - DNA, 20 bp, Artificial Sequence
  Description of Artificial Sequence: Synthetic oligonucleotide
  Target: ATXN2; (+) strand; PAM type: NRG; PAM sequence: CGG
ttttgggaggccgaggcggg

SEQ ID NO: 37208 - DNA, 20 bp, Artificial Sequence
  Description of Artificial Sequence: Synthetic oligonucleotide
  Target: ATXN2; (+) strand; PAM type: NRG; PAM sequence: GAG
ccgaggcgggcggatcacct

SEQ ID NO: 37209 - DNA, 20 bp, Artificial Sequence
  Description of Artificial Sequence: Synthetic oligonucleotide
  Target: ATXN2; (+) strand; PAM type: NRG; PAM sequence: AGG
cgaggcgggcggatcacctg

SEQ ID NO: 37210 - DNA, 20 bp, Artificial Sequence
  Description of Artificial Sequence: Synthetic oligonucleotide
  Target: ATXN2; (+) strand; PAM type: NRG; PAM sequence: TAG
gcgggcggatcacctgaggt

SEQ ID NO: 37211 - DNA, 20 bp, Artificial Sequence
  Description of Artificial Sequence: Synthetic oligonucleotide
  Target: ATXN2; (+) strand; PAM type: NRG; PAM sequence: AGG
cgggcggatcacctgaggtt

SEQ ID NO: 37212 - DNA, 20 bp, Artificial Sequence
  Description of Artificial Sequence: Synthetic oligonucleotide
  Target: ATXN2; (+) strand; PAM type: NRG; PAM sequence: GAG
ggcggatcacctgaggttag

SEQ ID NO: 37213 - DNA, 20 bp, Artificial Sequence
  Description of Artificial Sequence: Synthetic oligonucleotide
  Target: ATXN2; (+) strand; PAM type: NRG; PAM sequence: GAG
tcacctgaggttaggagttc

SEQ ID NO: 37214 - DNA, 20 bp, Artificial Sequence
  Description of Artificial Sequence: Synthetic oligonucleotide
  Target: ATXN2; (+) strand; PAM type: NRG; PAM sequence: CAG
tgaggttaggagttcgagac

SEQ ID NO: 37215 - DNA, 20 bp, Artificial Sequence
  Description of Artificial Sequence: Synthetic oligonucleotide
  Target: ATXN2; (+) strand; PAM type: NRG; PAM sequence: TGG
ttaggagttcgagaccagct

SEQ ID NO: 37216 - DNA, 20 bp, Artificial Sequence
  Description of Artificial Sequence: Synthetic oligonucleotide
  Target: ATXN2; (+) strand; PAM type: NRG; PAM sequence: CGG
cgagaccagcttggccaaca

SEQ ID NO: 37217 - DNA, 20 bp, Artificial Sequence
  Description of Artificial Sequence: Synthetic oligonucleotide
  Target: ATXN2; (+) strand; PAM type: NRG; PAM sequence: TAG
tctactaaaaatacaaaaat

SEQ ID NO: 37218 - DNA, 20 bp, Artificial Sequence
  Description of Artificial Sequence: Synthetic oligonucleotide
  Target: ATXN2; (+) strand; PAM type: NRG; PAM sequence: TGG
ctaaaaatacaaaaattagc

SEQ ID NO: 37219 - DNA, 20 bp, Artificial Sequence
  Description of Artificial Sequence: Synthetic oligonucleotide
  Target: ATXN2; (+) strand; PAM type: NRG; PAM sequence: GGG
taaaaatacaaaaattagct

SEQ ID NO: 37220 - DNA, 20 bp, Artificial Sequence
  Description of Artificial Sequence: Synthetic oligonucleotide
  Target: ATXN2; (+) strand; PAM type: NRG; PAM sequence: TGG
atacaaaaattagctgggcg

SEQ ID NO: 37221 - DNA, 20 bp, Artificial Sequence
  Description of Artificial Sequence: Synthetic oligonucleotide
  Target: ATXN2; (+) strand; PAM type: NRG; PAM sequence: TGG
caaaaattagctgggcgtgg

SEQ ID NO: 37222 - DNA, 20 bp, Artificial Sequence
  Description of Artificial Sequence: Synthetic oligonucleotide
  Target: ATXN2; (+) strand; PAM type: NRG; PAM sequence: CAG
aaattagctgggcgtggtgg

SEQ ID NO: 37223 - DNA, 20 bp, Artificial Sequence
  Description of Artificial Sequence: Synthetic oligonucleotide
  Target: ATXN2; (+) strand; PAM type: NRG; PAM sequence: AGG
aattagctgggcgtggtggc

SEQ ID NO: 37224 - DNA, 20 bp, Artificial Sequence
  Description of Artificial Sequence: Synthetic oligonucleotide
  Target: ATXN2; (+) strand; PAM type: NRG; PAM sequence: CAG
gtggcaggcacctgtaatca

SEQ ID NO: 37225 - DNA, 20 bp, Artificial Sequence
  Description of Artificial Sequence: Synthetic oligonucleotide
  Target: ATXN2; (+) strand; PAM type: NRG; PAM sequence: TAG
gcacctgtaatcacagctac

SEQ ID NO: 37226 - DNA, 20 bp, Artificial Sequence
  Description of Artificial Sequence: Synthetic oligonucleotide
  Target: ATXN2; (+) strand; PAM type: NRG; PAM sequence: AGG
cacctgtaatcacagctact

SEQ ID NO: 37227 - DNA, 20 bp, Artificial Sequence
  Description of Artificial Sequence: Synthetic oligonucleotide
  Target: ATXN2; (+) strand; PAM type: NRG; PAM sequence: GGG
acctgtaatcacagctacta

SEQ ID NO: 37228 - DNA, 20 bp, Artificial Sequence
  Description of Artificial Sequence: Synthetic oligonucleotide
  Target: ATXN2; (+) strand; PAM type: NRG; PAM sequence: GAG
ctgtaatcacagctactagg

SEQ ID NO: 37229 - DNA, 20 bp, Artificial Sequence
  Description of Artificial Sequence: Synthetic oligonucleotide
  Target: ATXN2; (+) strand; PAM type: NRG; PAM sequence: GAG
gtaatcacagctactaggga

SEQ ID NO: 37230 - DNA, 20 bp, Artificial Sequence
  Description of Artificial Sequence: Synthetic oligonucleotide
  Target: ATXN2; (+) strand; PAM type: NRG; PAM sequence: TGG
atcacagctactagggagag

SEQ ID NO: 37231 - DNA, 20 bp, Artificial Sequence
  Description of Artificial Sequence: Synthetic oligonucleotide
  Target: ATXN2; (+) strand; PAM type: NRG; PAM sequence: GGG
tcacagctactagggagagt

SEQ ID NO: 37232 - DNA, 20 bp, Artificial Sequence
  Description of Artificial Sequence: Synthetic oligonucleotide
  Target: ATXN2; (+) strand; PAM type: NRG; PAM sequence: GGG
cacagctactagggagagtg

SEQ ID NO: 37233 - DNA, 20 bp, Artificial Sequence
  Description of Artificial Sequence: Synthetic oligonucleotide
  Target: ATXN2; (+) strand; PAM type: NRG; PAM sequence: AAG
agctactagggagagtgggg

SEQ ID NO: 37234 - DNA, 20 bp, Artificial Sequence
  Description of Artificial Sequence: Synthetic oligonucleotide
  Target: ATXN2; (+) strand; PAM type: NRG; PAM sequence: AGG
gctactagggagagtgggga

SEQ ID NO: 37235 - DNA, 20 bp, Artificial Sequence
  Description of Artificial Sequence: Synthetic oligonucleotide
  Target: ATXN2; (+) strand; PAM type: NRG; PAM sequence: GAG
tactagggagagtggggaag

SEQ ID NO: 37236 - DNA, 20 bp, Artificial Sequence
  Description of Artificial Sequence: Synthetic oligonucleotide
  Target: ATXN2; (+) strand; PAM type: NRG; PAM sequence: TAG
gggagagtggggaaggagaa

SEQ ID NO: 37237 - DNA, 20 bp, Artificial Sequence
  Description of Artificial Sequence: Synthetic oligonucleotide
  Target: ATXN2; (+) strand; PAM type: NRG; PAM sequence: CGG
gaaggagaatagcttgaacc

SEQ ID NO: 37238 - DNA, 20 bp, Artificial Sequence
  Description of Artificial Sequence: Synthetic oligonucleotide
  Target: ATXN2; (+) strand; PAM type: NRG; PAM sequence: GGG
aaggagaatagcttgaaccc

SEQ ID NO: 37239 - DNA, 20 bp, Artificial Sequence
  Description of Artificial Sequence: Synthetic oligonucleotide
  Target: ATXN2; (+) strand; PAM type: NRG; PAM sequence: GAG
ggagaatagcttgaacccgg

SEQ ID NO: 37240 - DNA, 20 bp, Artificial Sequence
  Description of Artificial Sequence: Synthetic oligonucleotide
  Target: ATXN2; (+) strand; PAM type: NRG; PAM sequence: AGG
gagaatagcttgaacccggg

SEQ ID NO: 37241 - DNA, 20 bp, Artificial Sequence
  Description of Artificial Sequence: Synthetic oligonucleotide
  Target: ATXN2; (+) strand; PAM type: NRG; PAM sequence: TGG
aatagcttgaacccgggagg

SEQ ID NO: 37242 - DNA, 20 bp, Artificial Sequence
  Description of Artificial Sequence: Synthetic oligonucleotide
  Target: ATXN2; (+) strand; PAM type: NRG; PAM sequence: GAG
tagcttgaacccgggaggtg

SEQ ID NO: 37243 - DNA, 20 bp, Artificial Sequence
  Description of Artificial Sequence: Synthetic oligonucleotide
  Target: ATXN2; (+) strand; PAM type: NRG; PAM sequence: AGG
agcttgaacccgggaggtgg

SEQ ID NO: 37244 - DNA, 20 bp, Artificial Sequence
  Description of Artificial Sequence: Synthetic oligonucleotide
  Target: ATXN2; (+) strand; PAM type: NRG; PAM sequence: CAG
aacccgggaggtggaggttg

SEQ ID NO: 37245 - DNA, 20 bp, Artificial Sequence
  Description of Artificial Sequence: Synthetic oligonucleotide
  Target: ATXN2; (+) strand; PAM type: NRG; PAM sequence: CAG
gacatcacaccattgcactc

SEQ ID NO: 37246 - DNA, 20 bp, Artificial Sequence
  Description of Artificial Sequence: Synthetic oligonucleotide
  Target: ATXN2; (+) strand; PAM type: NRG; PAM sequence: TGG
cacaccattgcactccagct

SEQ ID NO: 37247 - DNA, 20 bp, Artificial Sequence
  Description of Artificial Sequence: Synthetic oligonucleotide
  Target: ATXN2; (+) strand; PAM type: NRG; PAM sequence: GGG
acaccattgcactccagctt

SEQ ID NO: 37248 - DNA, 20 bp, Artificial Sequence
  Description of Artificial Sequence: Synthetic oligonucleotide
  Target: ATXN2; (+) strand; PAM type: NRG; PAM sequence: AAG
tgcactccagcttgggcaac

SEQ ID NO: 37249 - DNA, 20 bp, Artificial Sequence
  Description of Artificial Sequence: Synthetic oligonucleotide
  Target: ATXN2; (+) strand; PAM type: NRG; PAM sequence: GAG
cactccagcttgggcaacaa

SEQ ID NO: 37250 - DNA, 20 bp, Artificial Sequence
  Description of Artificial Sequence: Synthetic oligonucleotide
  Target: ATXN2; (+) strand; PAM type: NRG; PAM sequence: TGG
aataaataataataataaat

SEQ ID NO: 37251 - DNA, 20 bp, Artificial Sequence
  Description of Artificial Sequence: Synthetic oligonucleotide
  Target: ATXN2; (+) strand; PAM type: NRG; PAM sequence: GGG
ataaataataataataaatt

SEQ ID NO: 37252 - DNA, 20 bp, Artificial Sequence
  Description of Artificial Sequence: Synthetic oligonucleotide
  Target: ATXN2; (+) strand; PAM type: NRG; PAM sequence: GAG
aaataataataataaattgg

SEQ ID NO: 37253 - DNA, 20 bp, Artificial Sequence
  Description of Artificial Sequence: Synthetic oligonucleotide
  Target: ATXN2; (+) strand; PAM type: NRG; PAM sequence: TAG
cttatactttaaatcaatac

SEQ ID NO: 37254 - DNA, 20 bp, Artificial Sequence
  Description of Artificial Sequence: Synthetic oligonucleotide
  Target: ATXN2; (+) strand; PAM type: NRG; PAM sequence: CAG
caatactagtaacaaaaata

SEQ ID NO: 37255 - DNA, 20 bp, Artificial Sequence
  Description of Artificial Sequence: Synthetic oligonucleotide
  Target: ATXN2; (+) strand; PAM type: NRG; PAM sequence: CGG
ctagtaacaaaaatacagtt

SEQ ID NO: 37256 - DNA, 20 bp, Artificial Sequence
  Description of Artificial Sequence: Synthetic oligonucleotide
  Target: ATXN2; (+) strand; PAM type: NRG; PAM sequence: TAG
aatacagttcggttccttga

SEQ ID NO: 37257 - DNA, 20 bp, Artificial Sequence
  Description of Artificial Sequence: Synthetic oligonucleotide
  Target: ATXN2; (+) strand; PAM type: NRG; PAM sequence: AGG
atacagttcggttccttgat

SEQ ID NO: 37258 - DNA, 20 bp, Artificial Sequence
  Description of Artificial Sequence: Synthetic oligonucleotide
  Target: ATXN2; (+) strand; PAM type: NRG; PAM sequence: CAG
agttcggttccttgataggc

SEQ ID NO: 37259 - DNA, 20 bp, Artificial Sequence
  Description of Artificial Sequence: Synthetic oligonucleotide
  Target: ATXN2; (+) strand; PAM type: NRG; PAM sequence: AAG
ggttccttgataggccagtt

SEQ ID NO: 37260 - DNA, 20 bp, Artificial Sequence
  Description of Artificial Sequence: Synthetic oligonucleotide
  Target: ATXN2; (+) strand; PAM type: NRG; PAM sequence: CAG
ttgataggccagttaagtga

SEQ ID NO: 37261 - DNA, 20 bp, Artificial Sequence
  Description of Artificial Sequence: Synthetic oligonucleotide
  Target: ATXN2; (+) strand; PAM type: NRG; PAM sequence: AAG
agttaagtgacagtgacaca

SEQ ID NO: 37262 - DNA, 20 bp, Artificial Sequence
  Description of Artificial Sequence: Synthetic oligonucleotide
  Target: ATXN2; (+) strand; PAM type: NRG; PAM sequence: CAG
taagtgacagtgacacaaag

SEQ ID NO: 37263 - DNA, 20 bp, Artificial Sequence
  Description of Artificial Sequence: Synthetic oligonucleotide
  Target: ATXN2; (+) strand; PAM type: NRG; PAM sequence: AGG
aagtgacagtgacacaaagc

SEQ ID NO: 37264 - DNA, 20 bp, Artificial Sequence
  Description of Artificial Sequence: Synthetic oligonucleotide
  Target: ATXN2; (+) strand; PAM type: NRG; PAM sequence: GGG
agtgacagtgacacaaagca

SEQ ID NO: 37265 - DNA, 20 bp, Artificial Sequence
  Description of Artificial Sequence: Synthetic oligonucleotide
  Target: ATXN2; (+) strand; PAM type: NRG; PAM sequence: TAG
gacagtgacacaaagcaggg

SEQ ID NO: 37266 - DNA, 20 bp, Artificial Sequence
  Description of Artificial Sequence: Synthetic oligonucleotide
  Target: ATXN2; (+) strand; PAM type: NRG; PAM sequence: AGG
acagtgacacaaagcagggt

SEQ ID NO: 37267 - DNA, 20 bp, Artificial Sequence
  Description of Artificial Sequence: Synthetic oligonucleotide
  Target: ATXN2; (+) strand; PAM type: NRG; PAM sequence: AAG
gtgacacaaagcagggtagg

SEQ ID NO: 37268 - DNA, 20 bp, Artificial Sequence
  Description of Artificial Sequence: Synthetic oligonucleotide
  Target: ATXN2; (+) strand; PAM type: NRG; PAM sequence: AAG
agggtaggaagaaaatttaa

SEQ ID NO: 37269 - DNA, 20 bp, Artificial Sequence
  Description of Artificial Sequence: Synthetic oligonucleotide
  Target: ATXN2; (+) strand; PAM type: NRG; PAM sequence: AAG
aggaagaaaatttaaaagcc

SEQ ID NO: 37270 - DNA, 20 bp, Artificial Sequence
  Description of Artificial Sequence: Synthetic oligonucleotide
  Target: ATXN2; (+) strand; PAM type: NRG; PAM sequence: AGG
ggaagaaaatttaaaagcca

SEQ ID NO: 37271 - DNA, 20 bp, Artificial Sequence
  Description of Artificial Sequence: Synthetic oligonucleotide
  Target: ATXN2; (+) strand; PAM type: NRG; PAM sequence: TAG
ttaaaagccaaggaaaaaaa

SEQ ID NO: 37272 - DNA, 20 bp, Artificial Sequence
  Description of Artificial Sequence: Synthetic oligonucleotide
  Target: ATXN2; (+) strand; PAM type: NRG; PAM sequence: TGG
agccaaggaaaaaaatagct

SEQ ID NO: 37273 - DNA, 20 bp, Artificial Sequence
  Description of Artificial Sequence: Synthetic oligonucleotide
  Target: ATXN2; (+) strand; PAM type: NRG; PAM sequence: AAG
caaggaaaaaaatagcttgg

SEQ ID NO: 37274 - DNA, 20 bp, Artificial Sequence
  Description of Artificial Sequence: Synthetic oligonucleotide
  Target: ATXN2; (+) strand; PAM type: NRG; PAM sequence: AAG
aaaaaaatagcttggaagac

SEQ ID NO: 37275 - DNA, 20 bp, Artificial Sequence
  Description of Artificial Sequence: Synthetic oligonucleotide
  Target: ATXN2; (+) strand; PAM type: NRG; PAM sequence: GAG
aaaaatagcttggaagacaa

SEQ ID NO: 37276 - DNA, 20 bp, Artificial Sequence
  Description of Artificial Sequence: Synthetic oligonucleotide
  Target: ATXN2; (+) strand; PAM type: NRG; PAM sequence: GAG
aaatagcttggaagacaaga

SEQ ID NO: 37277 - DNA, 20 bp, Artificial Sequence
  Description of Artificial Sequence: Synthetic oligonucleotide
  Target: ATXN2; (+) strand; PAM type: NRG; PAM sequence: AAG
ggaagacaagagagacaaaa

SEQ ID NO: 37278 - DNA, 20 bp, Artificial Sequence
  Description of Artificial Sequence: Synthetic oligonucleotide
  Target: ATXN2; (+) strand; PAM type: NRG; PAM sequence: AGG
gaagacaagagagacaaaaa

SEQ ID NO: 37279 - DNA, 20 bp, Artificial Sequence
  Description of Artificial Sequence: Synthetic oligonucleotide
  Target: ATXN2; (+) strand; PAM type: NRG; PAM sequence: CAG
aagagagacaaaaaaggaac

SEQ ID NO: 37280 - DNA, 20 bp, Artificial Sequence
  Description of Artificial Sequence: Synthetic oligonucleotide
  Target: ATXN2; (+) strand; PAM type: NRG; PAM sequence: AGG
agagagacaaaaaaggaacc

SEQ ID NO: 37281 - DNA, 20 bp, Artificial Sequence
  Description of Artificial Sequence: Synthetic oligonucleotide
  Target: ATXN2; (+) strand; PAM type: NRG; PAM sequence: GGG
gagagacaaaaaaggaacca

SEQ ID NO: 37282 - DNA, 20 bp, Artificial Sequence
  Description of Artificial Sequence: Synthetic oligonucleotide
  Target: ATXN2; (+) strand; PAM type: NRG; PAM sequence: GGG
agagacaaaaaaggaaccag

SEQ ID NO: 37283 - DNA, 20 bp, Artificial Sequence
  Description of Artificial Sequence: Synthetic oligonucleotide
  Target: ATXN2; (+) strand; PAM type: NRG; PAM sequence: GAG
caaaaaaggaaccaggggcc

SEQ ID NO: 37284 - DNA, 20 bp, Artificial Sequence
  Description of Artificial Sequence: Synthetic oligonucleotide
  Target: ATXN2; (+) strand; PAM type: NRG; PAM sequence: AGG
aaaaaaggaaccaggggccg

SEQ ID NO: 37285 - DNA, 20 bp, Artificial Sequence
  Description of Artificial Sequence: Synthetic oligonucleotide
  Target: ATXN2; (+) strand; PAM type: NRG; PAM sequence: TAG
aaaggaaccaggggccgagg

SEQ ID NO: 37286 - DNA, 20 bp, Artificial Sequence
  Description of Artificial Sequence: Synthetic oligonucleotide
  Target: ATXN2; (+) strand; PAM type: NRG; PAM sequence: AGG
aaggaaccaggggccgaggt

SEQ ID NO: 37287 - DNA, 20 bp, Artificial Sequence
  Description of Artificial Sequence: Synthetic oligonucleotide
  Target: ATXN2; (+) strand; PAM type: NRG; PAM sequence: GAG
gggccgaggtaggtgatcac

SEQ ID NO: 37288 - DNA, 20 bp, Artificial Sequence
  Description of Artificial Sequence: Synthetic oligonucleotide
  Target: ATXN2; (+) strand; PAM type: NRG; PAM sequence: AGG
ggccgaggtaggtgatcacg

SEQ ID NO: 37289 - DNA, 20 bp, Artificial Sequence
  Description of Artificial Sequence: Synthetic oligonucleotide
  Target: ATXN2; (+) strand; PAM type: NRG; PAM sequence: CAG
gaggtaggtgatcacgaggt

SEQ ID NO: 37290 - DNA, 20 bp, Artificial Sequence
  Description of Artificial Sequence: Synthetic oligonucleotide
  Target: ATXN2; (+) strand; PAM type: NRG; PAM sequence: AGG
aggtaggtgatcacgaggtc

SEQ ID NO: 37291 - DNA, 20 bp, Artificial Sequence
  Description of Artificial Sequence: Synthetic oligonucleotide
  Target: ATXN2; (+) strand; PAM type: NRG; PAM sequence: GAG
gtaggtgatcacgaggtcag

SEQ ID NO: 37292 - DNA, 20 bp, Artificial Sequence
  Description of Artificial Sequence: Synthetic oligonucleotide
  Target: ATXN2; (+) strand; PAM type: NRG; PAM sequence: AAG
gatcacgaggtcaggagttc

SEQ ID NO: 37293 - DNA, 20 bp, Artificial Sequence
  Description of Artificial Sequence: Synthetic oligonucleotide
  Target: ATXN2; (+) strand; PAM type: NRG; PAM sequence: CAG
cgaggtcaggagttcaagac

SEQ ID NO: 37294 - DNA, 20 bp, Artificial Sequence
  Description of Artificial Sequence: Synthetic oligonucleotide
  Target: ATXN2; (+) strand; PAM type: NRG; PAM sequence: TGG
tcaggagttcaagaccagcc

SEQ ID NO: 37295 - DNA, 20 bp, Artificial Sequence
  Description of Artificial Sequence: Synthetic oligonucleotide
  Target: ATXN2; (+) strand; PAM type: NRG; PAM sequence: AAG
agttcaagaccagcctggcc

SEQ ID NO: 37296 - DNA, 20 bp, Artificial Sequence
  Description of Artificial Sequence: Synthetic oligonucleotide
  Target: ATXN2; (+) strand; PAM type: NRG; PAM sequence: TGG
caagaccagcctggccaaga

SEQ ID NO: 37297 - DNA, 20 bp, Artificial Sequence
  Description of Artificial Sequence: Synthetic oligonucleotide
  Target: ATXN2; (+) strand; PAM type: NRG; PAM sequence: TAG
actaaaaatacaaaaaaaat

SEQ ID NO: 37298 - DNA, 20 bp, Artificial Sequence
  Description of Artificial Sequence: Synthetic oligonucleotide
  Target: ATXN2; (+) strand; PAM type: NRG; PAM sequence: TGG
aaaatacaaaaaaaattagc

SEQ ID NO: 37299 - DNA, 20 bp, Artificial Sequence
  Description of Artificial Sequence: Synthetic oligonucleotide
  Target: ATXN2; (+) strand; PAM type: NRG; PAM sequence: GGG
aaatacaaaaaaaattagct

SEQ ID NO: 37300 - DNA, 20 bp, Artificial Sequence
  Description of Artificial Sequence: Synthetic oligonucleotide
  Target: ATXN2; (+) strand; PAM type: NRG; PAM sequence: TGG
caaaaaaaattagctgggtg

SEQ ID NO: 37301 - DNA, 20 bp, Artificial Sequence
  Description of Artificial Sequence: Synthetic oligonucleotide
  Target: ATXN2; (+) strand; PAM type: NRG; PAM sequence: CAG
aaaaaattagctgggtgtgg

SEQ ID NO: 37302 - DNA, 20 bp, Artificial Sequence
  Description of Artificial Sequence: Synthetic oligonucleotide
  Target: ATXN2; (+) strand; PAM type: NRG; PAM sequence: CAG
aaattagctgggtgtggcag

SEQ ID NO: 37303 - DNA, 20 bp, Artificial Sequence
  Description of Artificial Sequence: Synthetic oligonucleotide
  Target: ATXN2; (+) strand; PAM type: NRG; PAM sequence: AGG
aattagctgggtgtggcagc

SEQ ID NO: 37304 - DNA, 20 bp, Artificial Sequence
  Description of Artificial Sequence: Synthetic oligonucleotide
  Target: ATXN2; (+) strand; PAM type: NRG; PAM sequence: CAG
gcagcaggcgcctgtaatcc

SEQ ID NO: 37305 - DNA, 20 bp, Artificial Sequence
  Description of Artificial Sequence: Synthetic oligonucleotide
  Target: ATXN2; (+) strand; PAM type: NRG; PAM sequence: TGG
gcctgtaatcccagctactc

SEQ ID NO: 37306 - DNA, 20 bp, Artificial Sequence
  Description of Artificial Sequence: Synthetic oligonucleotide
  Target: ATXN2; (+) strand; PAM type: NRG; PAM sequence: AAG
tgtaatcccagctactctgg

SEQ ID NO: 37307 - DNA, 20 bp, Artificial Sequence
  Description of Artificial Sequence: Synthetic oligonucleotide
  Target: ATXN2; (+) strand; PAM type: NRG; PAM sequence: GAG
tcccagctactctggaagct

SEQ ID NO: 37308 - DNA, 20 bp, Artificial Sequence
  Description of Artificial Sequence: Synthetic oligonucleotide
  Target: ATXN2; (+) strand; PAM type: NRG; PAM sequence: AGG
cccagctactctggaagctg

SEQ ID NO: 37309 - DNA, 20 bp, Artificial Sequence
  Description of Artificial Sequence: Synthetic oligonucleotide
  Target: ATXN2; (+) strand; PAM type: NRG; PAM sequence: CAG
agctactctggaagctgagg

SEQ ID NO: 37310 - DNA, 20 bp, Artificial Sequence
  Description of Artificial Sequence: Synthetic oligonucleotide
  Target: ATXN2; (+) strand; PAM type: NRG; PAM sequence: GAG
ctactctggaagctgaggca

SEQ ID NO: 37311 - DNA, 20 bp, Artificial Sequence
  Description of Artificial Sequence: Synthetic oligonucleotide
  Target: ATXN2; (+) strand; PAM type: NRG; PAM sequence: TAG
ggcagagaattgcttgaacc

SEQ ID NO: 37312 - DNA, 20 bp, Artificial Sequence
  Description of Artificial Sequence: Synthetic oligonucleotide
  Target: ATXN2; (+) strand; PAM type: NRG; PAM sequence: AGG
gcagagaattgcttgaacct

SEQ ID NO: 37313 - DNA, 20 bp, Artificial Sequence
  Description of Artificial Sequence: Synthetic oligonucleotide
  Target: ATXN2; (+) strand; PAM type: NRG; PAM sequence: GAG
agagaattgcttgaacctag

SEQ ID NO: 37314 - DNA, 20 bp, Artificial Sequence
  Description of Artificial Sequence: Synthetic oligonucleotide
  Target: ATXN2; (+) strand; PAM type: NRG; PAM sequence: AGG
gagaattgcttgaacctagg

SEQ ID NO: 37315 - DNA, 20 bp, Artificial Sequence
  Description of Artificial Sequence: Synthetic oligonucleotide
  Target: ATXN2; (+) strand; PAM type: NRG; PAM sequence: CGG
aattgcttgaacctaggagg

SEQ ID NO: 37316 - DNA, 20 bp, Artificial Sequence
  Description of Artificial Sequence: Synthetic oligonucleotide
  Target: ATXN2; (+) strand; PAM type: NRG; PAM sequence: GAG
ttgcttgaacctaggaggcg

SEQ ID NO: 37317 - DNA, 20 bp, Artificial Sequence
  Description of Artificial Sequence: Synthetic oligonucleotide
  Target: ATXN2; (+) strand; PAM type: NRG; PAM sequence: AGG
tgcttgaacctaggaggcgg

SEQ ID NO: 37318 - DNA, 20 bp, Artificial Sequence
  Description of Artificial Sequence: Synthetic oligonucleotide
  Target: ATXN2; (+) strand; PAM type: NRG; PAM sequence: CAG
aacctaggaggcggaggttg

SEQ ID NO: 37319 - DNA, 20 bp, Artificial Sequence
  Description of Artificial Sequence: Synthetic oligonucleotide
  Target: ATXN2; (+) strand; PAM type: NRG; PAM sequence: GAG
taggaggcggaggttgcagt

SEQ ID NO: 37320 - DNA, 20 bp, Artificial Sequence
  Description of Artificial Sequence: Synthetic oligonucleotide
  Target: ATXN2; (+) strand; PAM type: NRG; PAM sequence: GAG
ggcggaggttgcagtgagcc

SEQ ID NO: 37321 - DNA, 20 bp, Artificial Sequence
  Description of Artificial Sequence: Synthetic oligonucleotide
  Target: ATXN2; (+) strand; PAM type: NRG; PAM sequence: CAG
gagatcgcaccactgcactc

SEQ ID NO: 37322 - DNA, 20 bp, Artificial Sequence
  Description of Artificial Sequence: Synthetic oligonucleotide
  Target: ATXN2; (+) strand; PAM type: NRG; PAM sequence: TGG
cgcaccactgcactccagcc

SEQ ID NO: 37323 - DNA, 20 bp, Artificial Sequence
  Description of Artificial Sequence: Synthetic oligonucleotide
  Target: ATXN2; (+) strand; PAM type: NRG; PAM sequence: CAG
ctgcactccagcctggacga

SEQ ID NO: 37324 - DNA, 20 bp, Artificial Sequence
  Description of Artificial Sequence: Synthetic oligonucleotide
  Target: ATXN2; (+) strand; PAM type: NRG; PAM sequence: GAG
gcactccagcctggacgaca

SEQ ID NO: 37325 - DNA, 20 bp, Artificial Sequence
  Description of Artificial Sequence: Synthetic oligonucleotide
  Target: ATXN2; (+) strand; PAM type: NRG; PAM sequence: GAG
tccagcctggacgacagagt

SEQ ID NO: 37326 - DNA, 20 bp, Artificial Sequence
  Description of Artificial Sequence: Synthetic oligonucleotide
  Target: ATXN2; (+) strand; PAM type: NRG; PAM sequence: AAG
agagtgagactccatctcaa

SEQ ID NO: 37327 - DNA, 20 bp, Artificial Sequence
  Description of Artificial Sequence: Synthetic oligonucleotide
  Target: ATXN2; (+) strand; PAM type: NRG; PAM sequence: AAG
tcaaaagaaaaaaaaaaaaa

SEQ ID NO: 37328 - DNA, 20 bp, Artificial Sequence
  Description of Artificial Sequence: Synthetic oligonucleotide
  Target: ATXN2; (+) strand; PAM type: NRG; PAM sequence: AGG
caaaagaaaaaaaaaaaaaa

SEQ ID NO: 37329 - DNA, 20 bp, Artificial Sequence
  Description of Artificial Sequence: Synthetic oligonucleotide
  Target: ATXN2; (+) strand; PAM type: NRG; PAM sequence: AAG
aaaaaaaaaaaaaaggaacc

SEQ ID NO: 37330 - DNA, 20 bp, Artificial Sequence
  Description of Artificial Sequence: Synthetic oligonucleotide
  Target: ATXN2; (+) strand; PAM type: NRG; PAM sequence: AAG
aaaaaaaaaggaaccaagat

SEQ ID NO: 37331 - DNA, 20 bp, Artificial Sequence
  Description of Artificial Sequence: Synthetic oligonucleotide
  Target: ATXN2; (+) strand; PAM type: NRG; PAM sequence: AGG
aaaaaaaaggaaccaagata

SEQ ID NO: 37332 - DNA, 20 bp, Artificial Sequence
  Description of Artificial Sequence: Synthetic oligonucleotide
  Target: ATXN2; (+) strand; PAM type: NRG; PAM sequence: AAG
aaaggaaccaagataaggta

SEQ ID NO: 37333 - DNA, 20 bp, Artificial Sequence
  Description of Artificial Sequence: Synthetic oligonucleotide
  Target: ATXN2; (+) strand; PAM type: NRG; PAM sequence: AAG
ggaaccaagataaggtaaag

SEQ ID NO: 37334 - DNA, 20 bp, Artificial Sequence
  Description of Artificial Sequence: Synthetic oligonucleotide
  Target: ATXN2; (+) strand; PAM type: NRG; PAM sequence: AGG
gaaccaagataaggtaaaga

SEQ ID NO: 37335 - DNA, 20 bp, Artificial Sequence
  Description of Artificial Sequence: Synthetic oligonucleotide
  Target: ATXN2; (+) strand; PAM type: NRG; PAM sequence: CAG
aggtaaagaaggaaaaaaca

SEQ ID NO: 37336 - DNA, 20 bp, Artificial Sequence
  Description of Artificial Sequence: Synthetic oligonucleotide
  Target: ATXN2; (+) strand; PAM type: NRG; PAM sequence: AGG
ggtaaagaaggaaaaaacac

SEQ ID NO: 37337 - DNA, 20 bp, Artificial Sequence
  Description of Artificial Sequence: Synthetic oligonucleotide
  Target: ATXN2; (+) strand; PAM type: NRG; PAM sequence: GAG
taaagaaggaaaaaacacag

SEQ ID NO: 37338 - DNA, 20 bp, Artificial Sequence
  Description of Artificial Sequence: Synthetic oligonucleotide
  Target: ATXN2; (+) strand; PAM type: NRG; PAM sequence: CAG
aggaaaaaacacaggagaat

SEQ ID NO: 37339 - DNA, 20 bp, Artificial Sequence
  Description of Artificial Sequence: Synthetic oligonucleotide
  Target: ATXN2; (+) strand; PAM type: NRG; PAM sequence: AGG
ggaaaaaacacaggagaatc

SEQ ID NO: 37340 - DNA, 20 bp, Artificial Sequence
  Description of Artificial Sequence: Synthetic oligonucleotide
  Target: ATXN2; (+) strand; PAM type: NRG; PAM sequence: GGG
gaaaaaacacaggagaatca

SEQ ID NO: 37341 - DNA, 20 bp, Artificial Sequence
  Description of Artificial Sequence: Synthetic oligonucleotide
  Target: ATXN2; (+) strand; PAM type: NRG; PAM sequence: AAG
aacacaggagaatcagggaa

SEQ ID NO: 37342 - DNA, 20 bp, Artificial Sequence
  Description of Artificial Sequence: Synthetic oligonucleotide
  Target: ATXN2; (+) strand; PAM type: NRG; PAM sequence: AGG
acacaggagaatcagggaaa

SEQ ID NO: 37343 - DNA, 20 bp, Artificial Sequence
  Description of Artificial Sequence: Synthetic oligonucleotide
  Target: ATXN2; (+) strand; PAM type: NRG; PAM sequence: GAG
acaggagaatcagggaaaag

SEQ ID NO: 37344 - DNA, 20 bp, Artificial Sequence
  Description of Artificial Sequence: Synthetic oligonucleotide
  Target: ATXN2; (+) strand; PAM type: NRG; PAM sequence: GAG
aggagaatcagggaaaagga

SEQ ID NO: 37345 - DNA, 20 bp, Artificial Sequence
  Description of Artificial Sequence: Synthetic oligonucleotide
  Target: ATXN2; (+) strand; PAM type: NRG; PAM sequence: TGG
agaatcagggaaaaggagag

SEQ ID NO: 37346 - DNA, 20 bp, Artificial Sequence
  Description of Artificial Sequence: Synthetic oligonucleotide
  Target: ATXN2; (+) strand; PAM type: NRG; PAM sequence: GAG
aatcagggaaaaggagagtg

SEQ ID NO: 37347 - DNA, 20 bp, Artificial Sequence
  Description of Artificial Sequence: Synthetic oligonucleotide
  Target: ATXN2; (+) strand; PAM type: NRG; PAM sequence: TGG
cagggaaaaggagagtggag

SEQ ID NO: 37348 - DNA, 20 bp, Artificial Sequence
  Description of Artificial Sequence: Synthetic oligonucleotide
  Target: ATXN2; (+) strand; PAM type: NRG; PAM sequence: GGG
agggaaaaggagagtggagt

SEQ ID NO: 37349 - DNA, 20 bp, Artificial Sequence
  Description of Artificial Sequence: Synthetic oligonucleotide
  Target: ATXN2; (+) strand; PAM type: NRG; PAM sequence: AAG
gaaaaggagagtggagtggg

SEQ ID NO: 37350 - DNA, 20 bp, Artificial Sequence
  Description of Artificial Sequence: Synthetic oligonucleotide
  Target: ATXN2; (+) strand; PAM type: NRG; PAM sequence: AGG
aaaaggagagtggagtggga

SEQ ID NO: 37351 - DNA, 20 bp, Artificial Sequence
  Description of Artificial Sequence: Synthetic oligonucleotide
  Target: ATXN2; (+) strand; PAM type: NRG; PAM sequence: GGG
aaaggagagtggagtgggaa

SEQ ID NO: 37352 - DNA, 20 bp, Artificial Sequence
  Description of Artificial Sequence: Synthetic oligonucleotide
  Target: ATXN2; (+) strand; PAM type: NRG; PAM sequence: CAG
ggagagtggagtgggaaggg

SEQ ID NO: 37353 - DNA, 20 bp, Artificial Sequence
  Description of Artificial Sequence: Synthetic oligonucleotide
  Target: ATXN2; (+) strand; PAM type: NRG; PAM sequence: TGG
gagtggagtgggaagggcag

SEQ ID NO: 37354 - DNA, 20 bp, Artificial Sequence
  Description of Artificial Sequence: Synthetic oligonucleotide
  Target: ATXN2; (+) strand; PAM type: NRG; PAM sequence: GGG
agtggagtgggaagggcagt

SEQ ID NO: 37355 - DNA, 20 bp, Artificial Sequence
  Description of Artificial Sequence: Synthetic oligonucleotide
  Target: ATXN2; (+) strand; PAM type: NRG; PAM sequence: TGG
tttgttatatatgctcattc

SEQ ID NO: 37356 - DNA, 20 bp, Artificial Sequence
  Description of Artificial Sequence: Synthetic oligonucleotide
  Target: ATXN2; (+) strand; PAM type: NRG; PAM sequence: AAG
atatatgctcattctggcta

SEQ ID NO: 37357 - DNA, 20 bp, Artificial Sequence
  Description of Artificial Sequence: Synthetic oligonucleotide
  Target: ATXN2; (+) strand; PAM type: NRG; PAM sequence: CAG
ctcattctggctaaagatcc

SEQ ID NO: 37358 - DNA, 20 bp, Artificial Sequence
  Description of Artificial Sequence: Synthetic oligonucleotide
  Target: ATXN2; (+) strand; PAM type: NRG; PAM sequence: GAG
cattctggctaaagatccca

SEQ ID NO: 37359 - DNA, 20 bp, Artificial Sequence
  Description of Artificial Sequence: Synthetic oligonucleotide
  Target: ATXN2; (+) strand; PAM type: NRG; PAM sequence: GAG
ttctggctaaagatcccaga

SEQ ID NO: 37360 - DNA, 20 bp, Artificial Sequence
  Description of Artificial Sequence: Synthetic oligonucleotide
  Target: ATXN2; (+) strand; PAM type: NRG; PAM sequence: AGG
tctggctaaagatcccagag

SEQ ID NO: 37361 - DNA, 20 bp, Artificial Sequence
  Description of Artificial Sequence: Synthetic oligonucleotide
  Target: ATXN2; (+) strand; PAM type: NRG; PAM sequence: AAG
tcccagagaggttaaaaata

SEQ ID NO: 37362 - DNA, 20 bp, Artificial Sequence
  Description of Artificial Sequence: Synthetic oligonucleotide
  Target: ATXN2; (+) strand; PAM type: NRG; PAM sequence: CAG
tgtaatactgatttattcat

SEQ ID NO: 37363 - DNA, 20 bp, Artificial Sequence
  Description of Artificial Sequence: Synthetic oligonucleotide
  Target: ATXN2; (+) strand; PAM type: NRG; PAM sequence: TAG
aacttctatttataaaactt

SEQ ID NO: 37364 - DNA, 20 bp, Artificial Sequence
  Description of Artificial Sequence: Synthetic oligonucleotide
  Target: ATXN2; (+) strand; PAM type: NRG; PAM sequence: TAG
ttagtcttcataaaatcttt

SEQ ID NO: 37365 - DNA, 20 bp, Artificial Sequence
  Description of Artificial Sequence: Synthetic oligonucleotide
  Target: ATXN2; (+) strand; PAM type: NRG; PAM sequence: AAG
tcataaaatcttttagatta

SEQ ID NO: 37366 - DNA, 20 bp, Artificial Sequence
  Description of Artificial Sequence: Synthetic oligonucleotide
  Target: ATXN2; (+) strand; PAM type: NRG; PAM sequence: AAG
ttttagattaaagataatca

SEQ ID NO: 37367 - DNA, 20 bp, Artificial Sequence
  Description of Artificial Sequence: Synthetic oligonucleotide
  Target: ATXN2; (+) strand; PAM type: NRG; PAM sequence: TGG
atcaaagacatatgcttctt

SEQ ID NO: 37368 - DNA, 20 bp, Artificial Sequence
  Description of Artificial Sequence: Synthetic oligonucleotide
  Target: ATXN2; (+) strand; PAM type: NRG; PAM sequence: CAG
agacatatgcttctttggtc

SEQ ID NO: 37369 - DNA, 20 bp, Artificial Sequence
  Description of Artificial Sequence: Synthetic oligonucleotide
  Target: ATXN2; (+) strand; PAM type: NRG; PAM sequence: TAG
atgcttctttggtccagacc

SEQ ID NO: 37370 - DNA, 20 bp, Artificial Sequence
  Description of Artificial Sequence: Synthetic oligonucleotide
  Target: ATXN2; (+) strand; PAM type: NRG; PAM sequence: CAG
tctttggtccagacctagtc

SEQ ID NO: 37371 - DNA, 20 bp, Artificial Sequence
  Description of Artificial Sequence: Synthetic oligonucleotide
  Target: ATXN2; (+) strand; PAM type: NRG; PAM sequence: AAG
ttggtccagacctagtccag

SEQ ID NO: 37372 - DNA, 20 bp, Artificial Sequence
  Description of Artificial Sequence: Synthetic oligonucleotide
  Target: ATXN2; (+) strand; PAM type: NRG; PAM sequence: CAG
tagtccagaagtttcccact

SEQ ID NO: 37373 - DNA, 20 bp, Artificial Sequence
  Description of Artificial Sequence: Synthetic oligonucleotide
  Target: ATXN2; (+) strand; PAM type: NRG; PAM sequence: AAG
gttccttgacataaatattt

SEQ ID NO: 37374 - DNA, 20 bp, Artificial Sequence
  Description of Artificial Sequence: Synthetic oligonucleotide
  Target: ATXN2; (+) strand; PAM type: NRG; PAM sequence: CAG
taagattctaaacatatgat

SEQ ID NO: 37375 - DNA, 20 bp, Artificial Sequence
  Description of Artificial Sequence: Synthetic oligonucleotide
  Target: ATXN2; (+) strand; PAM type: NRG; PAM sequence: CAG
taataacactaaccacattc

SEQ ID NO: 37376 - DNA, 20 bp, Artificial Sequence
  Description of Artificial Sequence: Synthetic oligonucleotide
  Target: ATXN2; (+) strand; PAM type: NRG; PAM sequence: TAG
cactaaccacattccagaac

SEQ ID NO: 37377 - DNA, 20 bp, Artificial Sequence
  Description of Artificial Sequence: Synthetic oligonucleotide
  Target: ATXN2; (+) strand; PAM type: NRG; PAM sequence: CAG
cattccagaactagtttcct

SEQ ID NO: 37378 - DNA, 20 bp, Artificial Sequence
  Description of Artificial Sequence: Synthetic oligonucleotide
  Target: ATXN2; (+) strand; PAM type: NRG; PAM sequence: AAG
cctcagctgtgatctcactg

SEQ ID NO: 37379 - DNA, 20 bp, Artificial Sequence
  Description of Artificial Sequence: Synthetic oligonucleotide
  Target: ATXN2; (+) strand; PAM type: NRG; PAM sequence: AAG
tgatctcactgaagcaaatt

SEQ ID NO: 37380 - DNA, 20 bp, Artificial Sequence
  Description of Artificial Sequence: Synthetic oligonucleotide
  Target: ATXN2; (+) strand; PAM type: NRG; PAM sequence: CAG
tcactgaagcaaattaagta

SEQ ID NO: 37381 - DNA, 20 bp, Artificial Sequence
  Description of Artificial Sequence: Synthetic oligonucleotide
  Target: ATXN2; (+) strand; PAM type: NRG; PAM sequence: AAG
tgaagcaaattaagtacaga

SEQ ID NO: 37382 - DNA, 20 bp, Artificial Sequence
  Description of Artificial Sequence: Synthetic oligonucleotide
  Target: ATXN2; (+) strand; PAM type: NRG; PAM sequence: TAG
ctgtgtgtttaatttgtaac

SEQ ID NO: 37383 - DNA, 20 bp, Artificial Sequence
  Description of Artificial Sequence: Synthetic oligonucleotide
  Target: ATXN2; (+) strand; PAM type: NRG; PAM sequence: AGG
tgtgtgtttaatttgtaact

SEQ ID NO: 37384 - DNA, 20 bp, Artificial Sequence
  Description of Artificial Sequence: Synthetic oligonucleotide
  Target: ATXN2; (+) strand; PAM type: NRG; PAM sequence: TGG
aggttttgtcattttgactt

SEQ ID NO: 37385 - DNA, 20 bp, Artificial Sequence
  Description of Artificial Sequence: Synthetic oligonucleotide
  Target: ATXN2; (+) strand; PAM type: NRG; PAM sequence: AAG
cattttgactttggatgcac

SEQ ID NO: 37386 - DNA, 20 bp, Artificial Sequence
  Description of Artificial Sequence: Synthetic oligonucleotide
  Target: ATXN2; (+) strand; PAM type: NRG; PAM sequence: AAG
actttggatgcacaagtcat

SEQ ID NO: 37387 - DNA, 20 bp, Artificial Sequence
  Description of Artificial Sequence: Synthetic oligonucleotide
  Target: ATXN2; (+) strand; PAM type: NRG; PAM sequence: GAG
tttggatgcacaagtcataa

SEQ ID NO: 37388 - DNA, 20 bp, Artificial Sequence
  Description of Artificial Sequence: Synthetic oligonucleotide
  Target: ATXN2; (+) strand; PAM type: NRG; PAM sequence: CAG
cacaagtcataagagatcac

SEQ ID NO: 37389 - DNA, 20 bp, Artificial Sequence
  Description of Artificial Sequence: Synthetic oligonucleotide
  Target: ATXN2; (+) strand; PAM type: NRG; PAM sequence: CAG
tgtaaatctgatgttaaatt

SEQ ID NO: 37390 - DNA, 20 bp, Artificial Sequence
  Description of Artificial Sequence: Synthetic oligonucleotide
  Target: ATXN2; (+) strand; PAM type: NRG; PAM sequence: AAG
tctgatgttaaattcagaaa

SEQ ID NO: 37391 - DNA, 20 bp, Artificial Sequence
  Description of Artificial Sequence: Synthetic oligonucleotide
  Target: ATXN2; (+) strand; PAM type: NRG; PAM sequence: AGG
ctgatgttaaattcagaaaa

SEQ ID NO: 37392 - DNA, 20 bp, Artificial Sequence
  Description of Artificial Sequence: Synthetic oligonucleotide
  Target: ATXN2; (+) strand; PAM type: NRG; PAM sequence: GGG
tgatgttaaattcagaaaaa

SEQ ID NO: 37393 - DNA, 20 bp, Artificial Sequence
  Description of Artificial Sequence: Synthetic oligonucleotide
  Target: ATXN2; (+) strand; PAM type: NRG; PAM sequence: AAG
tgttaaattcagaaaaaggg

SEQ ID NO: 37394 - DNA, 20 bp, Artificial Sequence
  Description of Artificial Sequence: Synthetic oligonucleotide
  Target: ATXN2; (+) strand; PAM type: NRG; PAM sequence: AAG
aattcagaaaaagggaagtg

SEQ ID NO: 37395 - DNA, 20 bp, Artificial Sequence
  Description of Artificial Sequence: Synthetic oligonucleotide
  Target: ATXN2; (+) strand; PAM type: NRG; PAM sequence: AGG
attcagaaaaagggaagtga

SEQ ID NO: 37396 - DNA, 20 bp, Artificial Sequence
  Description of Artificial Sequence: Synthetic oligonucleotide
  Target: ATXN2; (+) strand; PAM type: NRG; PAM sequence: AAG
agaaaaagggaagtgaagga

SEQ ID NO: 37397 - DNA, 20 bp, Artificial Sequence
  Description of Artificial Sequence: Synthetic oligonucleotide
  Target: ATXN2; (+) strand; PAM type: NRG; PAM sequence: AAG
aggaaagttgaaaactctaa

SEQ ID NO: 37398 - DNA, 20 bp, Artificial Sequence
  Description of Artificial Sequence: Synthetic oligonucleotide
  Target: ATXN2; (+) strand; PAM type: NRG; PAM sequence: AGG
ggaaagttgaaaactctaaa

SEQ ID NO: 37399 - DNA, 20 bp, Artificial Sequence
  Description of Artificial Sequence: Synthetic oligonucleotide
  Target: ATXN2; (+) strand; PAM type: NRG; PAM sequence: GGG
gaaagttgaaaactctaaaa

SEQ ID NO: 37400 - DNA, 20 bp, Artificial Sequence
  Description of Artificial Sequence: Synthetic oligonucleotide
  Target: ATXN2; (+) strand; PAM type: NRG; PAM sequence: GGG
aaagttgaaaactctaaaag

SEQ ID NO: 37401 - DNA, 20 bp, Artificial Sequence
  Description of Artificial Sequence: Synthetic oligonucleotide
  Target: ATXN2; (+) strand; PAM type: NRG; PAM sequence: AAG
aaactctaaaaggggaataa

SEQ ID NO: 37402 - DNA, 20 bp, Artificial Sequence
  Description of Artificial Sequence: Synthetic oligonucleotide
  Target: ATXN2; (+) strand; PAM type: NRG; PAM sequence: AGG
aactctaaaaggggaataaa

SEQ ID NO: 37403 - DNA, 20 bp, Artificial Sequence
  Description of Artificial Sequence: Synthetic oligonucleotide
  Target: ATXN2; (+) strand; PAM type: NRG; PAM sequence: TGG
ttgaccaaaccatcataaaa

SEQ ID NO: 37404 - DNA, 20 bp, Artificial Sequence
  Description of Artificial Sequence: Synthetic oligonucleotide
  Target: ATXN2; (+) strand; PAM type: NRG; PAM sequence: TAG
caaaccatcataaaatggct

SEQ ID NO: 37405 - DNA, 20 bp, Artificial Sequence
  Description of Artificial Sequence: Synthetic oligonucleotide
  Target: ATXN2; (+) strand; PAM type: NRG; PAM sequence: CAG
catcataaaatggcttagaa

SEQ ID NO: 37406 - DNA, 20 bp, Artificial Sequence
  Description of Artificial Sequence: Synthetic oligonucleotide
  Target: ATXN2; (+) strand; PAM type: NRG; PAM sequence: AGG
atcataaaatggcttagaac

SEQ ID NO: 37407 - DNA, 20 bp, Artificial Sequence
  Description of Artificial Sequence: Synthetic oligonucleotide
  Target: ATXN2; (+) strand; PAM type: NRG; PAM sequence: GGG
tcataaaatggcttagaaca

SEQ ID NO: 37408 - DNA, 20 bp, Artificial Sequence
  Description of Artificial Sequence: Synthetic oligonucleotide
  Target: ATXN2; (+) strand; PAM type: NRG; PAM sequence: GGG
cataaaatggcttagaacag

SEQ ID NO: 37409 - DNA, 20 bp, Artificial Sequence
  Description of Artificial Sequence: Synthetic oligonucleotide
  Target: ATXN2; (+) strand; PAM type: NRG; PAM sequence: GGG
ataaaatggcttagaacagg

SEQ ID NO: 37410 - DNA, 20 bp, Artificial Sequence
  Description of Artificial Sequence: Synthetic oligonucleotide
  Target: ATXN2; (+) strand; PAM type: NRG; PAM sequence: AAG
gcttagaacagggggaaatg

SEQ ID NO: 37411 - DNA, 20 bp, Artificial Sequence
  Description of Artificial Sequence: Synthetic oligonucleotide
  Target: ATXN2; (+) strand; PAM type: NRG; PAM sequence: CAG
tagaacagggggaaatgaag

SEQ ID NO: 37412 - DNA, 20 bp, Artificial Sequence
  Description of Artificial Sequence: Synthetic oligonucleotide
  Target: ATXN2; (+) strand; PAM type: NRG; PAM sequence: CAG
aacagggggaaatgaagcag

SEQ ID NO: 37413 - DNA, 20 bp, Artificial Sequence
  Description of Artificial Sequence: Synthetic oligonucleotide
  Target: ATXN2; (+) strand; PAM type: NRG; PAM sequence: TAG
aatgaagcagcagattaaat

SEQ ID NO: 37414 - DNA, 20 bp, Artificial Sequence
  Description of Artificial Sequence: Synthetic oligonucleotide
  Target: ATXN2; (+) strand; PAM type: NRG; PAM sequence: CAG
gaagcagcagattaaattag

SEQ ID NO: 37415 - DNA, 20 bp, Artificial Sequence
  Description of Artificial Sequence: Synthetic oligonucleotide
  Target: ATXN2; (+) strand; PAM type: NRG; PAM sequence: TAG
taaattagcagcccaactgt

SEQ ID NO: 37416 - DNA, 20 bp, Artificial Sequence
  Description of Artificial Sequence: Synthetic oligonucleotide
  Target: ATXN2; (+) strand; PAM type: NRG; PAM sequence: AAG
aactgttagtttcttttaaa

SEQ ID NO: 37417 - DNA, 20 bp, Artificial Sequence
  Description of Artificial Sequence: Synthetic oligonucleotide
  Target: ATXN2; (+) strand; PAM type: NRG; PAM sequence: TAG
aaagtactgatactcccttt

SEQ ID NO: 37418 - DNA, 20 bp, Artificial Sequence
  Description of Artificial Sequence: Synthetic oligonucleotide
  Target: ATXN2; (+) strand; PAM type: NRG; PAM sequence: AGG
aagtactgatactccctttt

SEQ ID NO: 37419 - DNA, 20 bp, Artificial Sequence
  Description of Artificial Sequence: Synthetic oligonucleotide
  Target: ATXN2; (+) strand; PAM type: NRG; PAM sequence: GGG
agtactgatactccctttta

SEQ ID NO: 37420 - DNA, 20 bp, Artificial Sequence
  Description of Artificial Sequence: Synthetic oligonucleotide
  Target: ATXN2; (+) strand; PAM type: NRG; PAM sequence: GGG
gtactgatactcccttttag

SEQ ID NO: 37421 - DNA, 20 bp, Artificial Sequence
  Description of Artificial Sequence: Synthetic oligonucleotide
  Target: ATXN2; (+) strand; PAM type: NRG; PAM sequence: AAG
ctgatactcccttttagggg

SEQ ID NO: 37422 - DNA, 20 bp, Artificial Sequence
  Description of Artificial Sequence: Synthetic oligonucleotide
  Target: ATXN2; (+) strand; PAM type: NRG; PAM sequence: AAG
cttttaggggaagttgtgct

SEQ ID NO: 37423 - DNA, 20 bp, Artificial Sequence
  Description of Artificial Sequence: Synthetic oligonucleotide
  Target: ATXN2; (+) strand; PAM type: NRG; PAM sequence: AGG
ttttaggggaagttgtgcta

SEQ ID NO: 37424 - DNA, 20 bp, Artificial Sequence
  Description of Artificial Sequence: Synthetic oligonucleotide
  Target: ATXN2; (+) strand; PAM type: NRG; PAM sequence: AAG
gaagttgtgctaaggcaatt

SEQ ID NO: 37425 - DNA, 20 bp, Artificial Sequence
  Description of Artificial Sequence: Synthetic oligonucleotide
  Target: ATXN2; (+) strand; PAM type: NRG; PAM sequence: AGG
aagttgtgctaaggcaatta

SEQ ID NO: 37426 - DNA, 20 bp, Artificial Sequence
  Description of Artificial Sequence: Synthetic oligonucleotide
  Target: ATXN2; (+) strand; PAM type: NRG; PAM sequence: TAG
gtgctaaggcaattaaggct

SEQ ID NO: 37427 - DNA, 20 bp, Artificial Sequence
  Description of Artificial Sequence: Synthetic oligonucleotide
  Target: ATXN2; (+) strand; PAM type: NRG; PAM sequence: AGG
tgctaaggcaattaaggctt

SEQ ID NO: 37428 - DNA, 20 bp, Artificial Sequence
  Description of Artificial Sequence: Synthetic oligonucleotide
  Target: ATXN2; (+) strand; PAM type: NRG; PAM sequence: AAG
aggcttaggtgttaatgatt

SEQ ID NO: 37429 - DNA, 20 bp, Artificial Sequence
  Description of Artificial Sequence: Synthetic oligonucleotide
  Target: ATXN2; (+) strand; PAM type: NRG; PAM sequence: AGG
ggcttaggtgttaatgatta

SEQ ID NO: 37430 - DNA, 20 bp, Artificial Sequence
  Description of Artificial Sequence: Synthetic oligonucleotide
  Target: ATXN2; (+) strand; PAM type: NRG; PAM sequence: TAG
gtgttaatgattaaggacct

SEQ ID NO: 37431 - DNA, 20 bp, Artificial Sequence
  Description of Artificial Sequence: Synthetic oligonucleotide
  Target: ATXN2; (+) strand; PAM type: NRG; PAM sequence: CAG
taaggaccttagctacttac

SEQ ID NO: 37432 - DNA, 20 bp, Artificial Sequence
  Description of Artificial Sequence: Synthetic oligonucleotide
  Target: ATXN2; (+) strand; PAM type: NRG; PAM sequence: AGG
aaggaccttagctacttacc

SEQ ID NO: 37433 - DNA, 20 bp, Artificial Sequence
  Description of Artificial Sequence: Synthetic oligonucleotide
  Target: ATXN2; (+) strand; PAM type: NRG; PAM sequence: CAG
aaacaacaccaaactactaa

SEQ ID NO: 37434 - DNA, 20 bp, Artificial Sequence
  Description of Artificial Sequence: Synthetic oligonucleotide
  Target: ATXN2; (+) strand; PAM type: NRG; PAM sequence: GAG
acaacaccaaactactaaca

SEQ ID NO: 37435 - DNA, 20 bp, Artificial Sequence
  Description of Artificial Sequence: Synthetic oligonucleotide
  Target: ATXN2; (+) strand; PAM type: NRG; PAM sequence: CAG
caccaaactactaacagaga

SEQ ID NO: 37436 - DNA, 20 bp, Artificial Sequence
  Description of Artificial Sequence: Synthetic oligonucleotide
  Target: ATXN2; (+) strand; PAM type: NRG; PAM sequence: AAG
aaactactaacagagacagt

SEQ ID NO: 37437 - DNA, 20 bp, Artificial Sequence
  Description of Artificial Sequence: Synthetic oligonucleotide
  Target: ATXN2; (+) strand; PAM type: NRG; PAM sequence: TGG
tactaacagagacagtaaga

SEQ ID NO: 37438 - DNA, 20 bp, Artificial Sequence
  Description of Artificial Sequence: Synthetic oligonucleotide
  Target: ATXN2; (+) strand; PAM type: NRG; PAM sequence: GAG
aacagagacagtaagatggt

SEQ ID NO: 37439 - DNA, 20 bp, Artificial Sequence
  Description of Artificial Sequence: Synthetic oligonucleotide
  Target: ATXN2; (+) strand; PAM type: NRG; PAM sequence: AGG
acagagacagtaagatggtg

SEQ ID NO: 37440 - DNA, 20 bp, Artificial Sequence
  Description of Artificial Sequence: Synthetic oligonucleotide
  Target: ATXN2; (+) strand; PAM type: NRG; PAM sequence: GAG
tggtgaggataactacattt

SEQ ID NO: 37441 - DNA, 20 bp, Artificial Sequence
  Description of Artificial Sequence: Synthetic oligonucleotide
  Target: ATXN2; (+) strand; PAM type: NRG; PAM sequence: GAG
tacatttgagacctcaaatt

SEQ ID NO: 37442 - DNA, 20 bp, Artificial Sequence
  Description of Artificial Sequence: Synthetic oligonucleotide
  Target: ATXN2; (+) strand; PAM type: NRG; PAM sequence: CAG
tcttttacacactacaatca

SEQ ID NO: 37443 - DNA, 20 bp, Artificial Sequence
  Description of Artificial Sequence: Synthetic oligonucleotide
  Target: ATXN2; (+) strand; PAM type: NRG; PAM sequence: TAG
acacactacaatcacagaca

SEQ ID NO: 37444 - DNA, 20 bp, Artificial Sequence
  Description of Artificial Sequence: Synthetic oligonucleotide
  Target: ATXN2; (+) strand; PAM type: NRG; PAM sequence: TAG
agacatagtttcccctttaa

SEQ ID NO: 37445 - DNA, 20 bp, Artificial Sequence
  Description of Artificial Sequence: Synthetic oligonucleotide
  Target: ATXN2; (+) strand; PAM type: NRG; PAM sequence: CAG
cctttaatagtatatacata

SEQ ID NO: 37446 - DNA, 20 bp, Artificial Sequence
  Description of Artificial Sequence: Synthetic oligonucleotide
  Target: ATXN2; (+) strand; PAM type: NRG; PAM sequence: AAG
taatagtatatacatacagc

SEQ ID NO: 37447 - DNA, 20 bp, Artificial Sequence
  Description of Artificial Sequence: Synthetic oligonucleotide
  Target: ATXN2; (+) strand; PAM type: NRG; PAM sequence: AAG
tacagcaagactccttttta

SEQ ID NO: 37448 - DNA, 20 bp, Artificial Sequence
  Description of Artificial Sequence: Synthetic oligonucleotide
  Target: ATXN2; (+) strand; PAM type: NRG; PAM sequence: GAG
cagcaagactcctttttaaa

SEQ ID NO: 37449 - DNA, 20 bp, Artificial Sequence
  Description of Artificial Sequence: Synthetic oligonucleotide
  Target: ATXN2; (+) strand; PAM type: NRG; PAM sequence: AAG
tttttaaagagcatctatta

SEQ ID NO: 37450 - DNA, 20 bp, Artificial Sequence
  Description of Artificial Sequence: Synthetic oligonucleotide
  Target: ATXN2; (+) strand; PAM type: NRG; PAM sequence: AGG
ttttaaagagcatctattaa

SEQ ID NO: 37451 - DNA, 20 bp, Artificial Sequence
  Description of Artificial Sequence: Synthetic oligonucleotide
  Target: ATXN2; (+) strand; PAM type: NRG; PAM sequence: TAG
ggattaaatttaacatttcc

SEQ ID NO: 37452 - DNA, 20 bp, Artificial Sequence
  Description of Artificial Sequence: Synthetic oligonucleotide
  Target: ATXN2; (+) strand; PAM type: NRG; PAM sequence: CAG
atatgtatgtatgtatgtat

SEQ ID NO: 37453 - DNA, 20 bp, Artificial Sequence
  Description of Artificial Sequence: Synthetic oligonucleotide
  Target: ATXN2; (+) strand; PAM type: NRG; PAM sequence: TGG
tgtatgtatcagcttatttt

SEQ ID NO: 37454 - DNA, 20 bp, Artificial Sequence
  Description of Artificial Sequence: Synthetic oligonucleotide
  Target: ATXN2; (+) strand; PAM type: NRG; PAM sequence: AAG
tcagcttatttttggatacc

SEQ ID NO: 37455 - DNA, 20 bp, Artificial Sequence
  Description of Artificial Sequence: Synthetic oligonucleotide
  Target: ATXN2; (+) strand; PAM type: NRG; PAM sequence: TGG
tatttttggataccaagtca

SEQ ID NO: 37456 - DNA, 20 bp, Artificial Sequence
  Description of Artificial Sequence: Synthetic oligonucleotide
  Target: ATXN2; (+) strand; PAM type: NRG; PAM sequence: AAG
aagtcatggcataattaaca

SEQ ID NO: 37457 - DNA, 20 bp, Artificial Sequence
  Description of Artificial Sequence: Synthetic oligonucleotide
  Target: ATXN2; (+) strand; PAM type: NRG; PAM sequence: AAG
ggcataattaacaaagattt

SEQ ID NO: 37458 - DNA, 20 bp, Artificial Sequence
  Description of Artificial Sequence: Synthetic oligonucleotide
  Target: ATXN2; (+) strand; PAM type: NRG; PAM sequence: AGG
gcataattaacaaagattta

SEQ ID NO: 37459 - DNA, 20 bp, Artificial Sequence
  Description of Artificial Sequence: Synthetic oligonucleotide
  Target: ATXN2; (+) strand; PAM type: NRG; PAM sequence: TGG
atgcattttaaatgctaata

SEQ ID NO: 37460 - DNA, 20 bp, Artificial Sequence
  Description of Artificial Sequence: Synthetic oligonucleotide
  Target: ATXN2; (+) strand; PAM type: NRG; PAM sequence: TAG
ttaaatgctaatatggcatt

SEQ ID NO: 37461 - DNA, 20 bp, Artificial Sequence
  Description of Artificial Sequence: Synthetic oligonucleotide
  Target: ATXN2; (+) strand; PAM type: NRG; PAM sequence: TAG
aatgctaatatggcatttag

SEQ ID NO: 37462 - DNA, 20 bp, Artificial Sequence
  Description of Artificial Sequence: Synthetic oligonucleotide
  Target: ATXN2; (+) strand; PAM type: NRG; PAM sequence: GAG
tgctaatatggcatttagta

SEQ ID NO: 37463 - DNA, 20 bp, Artificial Sequence
  Description of Artificial Sequence: Synthetic oligonucleotide
  Target: ATXN2; (+) strand; PAM type: NRG; PAM sequence: CAG
aatatggcatttagtagagt

SEQ ID NO: 37464 - DNA, 20 bp, Artificial Sequence
  Description of Artificial Sequence: Synthetic oligonucleotide
  Target: ATXN2; (+) strand; PAM type: NRG; PAM sequence: GAG
atttagtagagtcagacatt

SEQ ID NO: 37465 - DNA, 20 bp, Artificial Sequence
  Description of Artificial Sequence: Synthetic oligonucleotide
  Target: ATXN2; (+) strand; PAM type: NRG; PAM sequence: TAG
tttgaatccttaatatcctc

SEQ ID NO: 37466 - DNA, 20 bp, Artificial Sequence
  Description of Artificial Sequence: Synthetic oligonucleotide
  Target: ATXN2; (+) strand; PAM type: NRG; PAM sequence: AAG
tagaacacaacatttcatac

SEQ ID NO: 37467 - DNA, 20 bp, Artificial Sequence
  Description of Artificial Sequence: Synthetic oligonucleotide
  Target: ATXN2; (+) strand; PAM type: NRG; PAM sequence: AGG
agaacacaacatttcataca

SEQ ID NO: 37468 - DNA, 20 bp, Artificial Sequence
  Description of Artificial Sequence: Synthetic oligonucleotide
  Target: ATXN2; (+) strand; PAM type: NRG; PAM sequence: TGG
atacaaggtgacaatattaa

SEQ ID NO: 37469 - DNA, 20 bp, Artificial Sequence
  Description of Artificial Sequence: Synthetic oligonucleotide
  Target: ATXN2; (+) strand; PAM type: NRG; PAM sequence: AAG
attaatggcacaaatttcta

SEQ ID NO: 37470 - DNA, 20 bp, Artificial Sequence
  Description of Artificial Sequence: Synthetic oligonucleotide
  Target: ATXN2; (+) strand; PAM type: NRG; PAM sequence: AGG
ttaatggcacaaatttctaa

SEQ ID NO: 37471 - DNA, 20 bp, Artificial Sequence
  Description of Artificial Sequence: Synthetic oligonucleotide
  Target: ATXN2; (+) strand; PAM type: NRG; PAM sequence: TAG
taaaggatttctacaaatat

SEQ ID NO: 37472 - DNA, 20 bp, Artificial Sequence
  Description of Artificial Sequence: Synthetic oligonucleotide
  Target: ATXN2; (+) strand; PAM type: NRG; PAM sequence: AAG
tccttcctatttaaatacca

SEQ ID NO: 37473 - DNA, 20 bp, Artificial Sequence
  Description of Artificial Sequence: Synthetic oligonucleotide
  Target: ATXN2; (+) strand; PAM type: NRG; PAM sequence: AAG
ctatttaaataccaaagtcc

SEQ ID NO: 37474 - DNA, 20 bp, Artificial Sequence
  Description of Artificial Sequence: Synthetic oligonucleotide
  Target: ATXN2; (+) strand; PAM type: NRG; PAM sequence: TAG
taaataccaaagtccaagac

SEQ ID NO: 37475 - DNA, 20 bp, Artificial Sequence
  Description of Artificial Sequence: Synthetic oligonucleotide
  Target: ATXN2; (+) strand; PAM type: NRG; PAM sequence: GAG
ttatttttattttttatttt

SEQ ID NO: 37476 - DNA, 20 bp, Artificial Sequence
  Description of Artificial Sequence: Synthetic oligonucleotide
  Target: ATXN2; (+) strand; PAM type: NRG; PAM sequence: CAG
ttttattttttattttgaga

SEQ ID NO: 37477 - DNA, 20 bp, Artificial Sequence
  Description of Artificial Sequence: Synthetic oligonucleotide
  Target: ATXN2; (+) strand; PAM type: NRG; PAM sequence: GAG
ttattttttattttgagaca

SEQ ID NO: 37478 - DNA, 20 bp, Artificial Sequence
  Description of Artificial Sequence: Synthetic oligonucleotide
  Target: ATXN2; (+) strand; PAM type: NRG; PAM sequence: CAG
cagagtctctctctgttgcc

SEQ ID NO: 37479 - DNA, 20 bp, Artificial Sequence
  Description of Artificial Sequence: Synthetic oligonucleotide
  Target: ATXN2; (+) strand; PAM type: NRG; PAM sequence: AGG
agagtctctctctgttgccc

SEQ ID NO: 37480 - DNA, 20 bp, Artificial Sequence
  Description of Artificial Sequence: Synthetic oligonucleotide
  Target: ATXN2; (+) strand; PAM type: NRG; PAM sequence: GAG
tctctctgttgcccaggcct

SEQ ID NO: 37481 - DNA, 20 bp, Artificial Sequence
  Description of Artificial Sequence: Synthetic oligonucleotide
  Target: ATXN2; (+) strand; PAM type: NRG; PAM sequence: CAG
ctgttgcccaggcctgagtg

SEQ ID NO: 37482 - DNA, 20 bp, Artificial Sequence
  Description of Artificial Sequence: Synthetic oligonucleotide
  Target: ATXN2; (+) strand; PAM type: NRG; PAM sequence: TGG
ttgcccaggcctgagtgcag

SEQ ID NO: 37483 - DNA, 20 bp, Artificial Sequence
  Description of Artificial Sequence: Synthetic oligonucleotide
  Target: ATXN2; (+) strand; PAM type: NRG; PAM sequence: CAG
tgagtgcagtggtacaatct

SEQ ID NO: 37484 - DNA, 20 bp, Artificial Sequence
  Description of Artificial Sequence: Synthetic oligonucleotide
  Target: ATXN2; (+) strand; PAM type: NRG; PAM sequence: CAG
ctcactgcaacctccacctc

SEQ ID NO: 37485 - DNA, 20 bp, Artificial Sequence
  Description of Artificial Sequence: Synthetic oligonucleotide
  Target: ATXN2; (+) strand; PAM type: NRG; PAM sequence: AGG
tcactgcaacctccacctcc

SEQ ID NO: 37486 - DNA, 20 bp, Artificial Sequence
  Description of Artificial Sequence: Synthetic oligonucleotide
  Target: ATXN2; (+) strand; PAM type: NRG; PAM sequence: GGG
cactgcaacctccacctcca

SEQ ID NO: 37487 - DNA, 20 bp, Artificial Sequence
  Description of Artificial Sequence: Synthetic oligonucleotide
  Target: ATXN2; (+) strand; PAM type: NRG; PAM sequence: TGG
acctccacctccagggttca

SEQ ID NO: 37488 - DNA, 20 bp, Artificial Sequence
  Description of Artificial Sequence: Synthetic oligonucleotide
  Target: ATXN2; (+) strand; PAM type: NRG; PAM sequence: AAG
ctcttgtgcctccgcctccc

SEQ ID NO: 37489 - DNA, 20 bp, Artificial Sequence
  Description of Artificial Sequence: Synthetic oligonucleotide
  Target: ATXN2; (+) strand; PAM type: NRG; PAM sequence: TAG
ttgtgcctccgcctcccaag

SEQ ID NO: 37490 - DNA, 20 bp, Artificial Sequence
  Description of Artificial Sequence: Synthetic oligonucleotide
  Target: ATXN2; (+) strand; PAM type: NRG; PAM sequence: TGG
gcctccgcctcccaagtagc

SEQ ID NO: 37491 - DNA, 20 bp, Artificial Sequence
  Description of Artificial Sequence: Synthetic oligonucleotide
  Target: ATXN2; (+) strand; PAM type: NRG; PAM sequence: GGG
cctccgcctcccaagtagct

SEQ ID NO: 37492 - DNA, 20 bp, Artificial Sequence
  Description of Artificial Sequence: Synthetic oligonucleotide
  Target: ATXN2; (+) strand; PAM type: NRG; PAM sequence: CAG
ctcccaagtagctgggacta

SEQ ID NO: 37493 - DNA, 20 bp, Artificial Sequence
  Description of Artificial Sequence: Synthetic oligonucleotide
  Target: ATXN2; (+) strand; PAM type: NRG; PAM sequence: AGG
tcccaagtagctgggactac

SEQ ID NO: 37494 - DNA, 20 bp, Artificial Sequence
  Description of Artificial Sequence: Synthetic oligonucleotide
  Target: ATXN2; (+) strand; PAM type: NRG; PAM sequence: TGG
aggtgcgtgccaccatgctt

SEQ ID NO: 37495 - DNA, 20 bp, Artificial Sequence
  Description of Artificial Sequence: Synthetic oligonucleotide
  Target: ATXN2; (+) strand; PAM type: NRG; PAM sequence: TAG
tgcgtgccaccatgctttgg

SEQ ID NO: 37496 - DNA, 20 bp, Artificial Sequence
  Description of Artificial Sequence: Synthetic oligonucleotide
  Target: ATXN2; (+) strand; PAM type: NRG; PAM sequence: GAG
cgtgccaccatgctttggta

SEQ ID NO: 37497 - DNA, 20 bp, Artificial Sequence
  Description of Artificial Sequence: Synthetic oligonucleotide
  Target: ATXN2; (+) strand; PAM type: NRG; PAM sequence: TAG
ccaccatgctttggtagaga

SEQ ID NO: 37498 - DNA, 20 bp, Artificial Sequence
  Description of Artificial Sequence: Synthetic oligonucleotide
  Target: ATXN2; (+) strand; PAM type: NRG; PAM sequence: AGG
caccatgctttggtagagat

SEQ ID NO: 37499 - DNA, 20 bp, Artificial Sequence
  Description of Artificial Sequence: Synthetic oligonucleotide
  Target: ATXN2; (+) strand; PAM type: NRG; PAM sequence: GGG
accatgctttggtagagata

SEQ ID NO: 37500 - DNA, 20 bp, Artificial Sequence
  Description of Artificial Sequence: Synthetic oligonucleotide
  Target: ATXN2; (+) strand; PAM type: NRG; PAM sequence: TGG
gagatagggtttcaccatgt

SEQ ID NO: 37501 - DNA, 20 bp, Artificial Sequence
  Description of Artificial Sequence: Synthetic oligonucleotide
  Target: ATXN2; (+) strand; PAM type: NRG; PAM sequence: CAG
tagggtttcaccatgttggc

SEQ ID NO: 37502 - DNA, 20 bp, Artificial Sequence
  Description of Artificial Sequence: Synthetic oligonucleotide
  Target: ATXN2; (+) strand; PAM type: NRG; PAM sequence: AGG
agggtttcaccatgttggcc

SEQ ID NO: 37503 - DNA, 20 bp, Artificial Sequence
  Description of Artificial Sequence: Synthetic oligonucleotide
  Target: ATXN2; (+) strand; PAM type: NRG; PAM sequence: TGG
ccaggctgttctcgaactcc

SEQ ID NO: 37504 - DNA, 20 bp, Artificial Sequence
  Description of Artificial Sequence: Synthetic oligonucleotide
  Target: ATXN2; (+) strand; PAM type: NRG; PAM sequence: AAG
gttctcgaactcctggcctc

SEQ ID NO: 37505 - DNA, 20 bp, Artificial Sequence
  Description of Artificial Sequence: Synthetic oligonucleotide
  Target: ATXN2; (+) strand; PAM type: NRG; PAM sequence: CGG
ctcaagcaatccacccacct

SEQ ID NO: 37506 - DNA, 20 bp, Artificial Sequence
  Description of Artificial Sequence: Synthetic oligonucleotide
  Target: ATXN2; (+) strand; PAM type: NRG; PAM sequence: AAG
ccacccacctcggcctccca

SEQ ID NO: 37507 - DNA, 20 bp, Artificial Sequence
  Description of Artificial Sequence: Synthetic oligonucleotide
  Target: ATXN2; (+) strand; PAM type: NRG; PAM sequence: TGG
acctcggcctcccaaagtac

SEQ ID NO: 37508 - DNA, 20 bp, Artificial Sequence
  Description of Artificial Sequence: Synthetic oligonucleotide
  Target: ATXN2; (+) strand; PAM type: NRG; PAM sequence: GGG
cctcggcctcccaaagtact

SEQ ID NO: 37509 - DNA, 20 bp, Artificial Sequence
  Description of Artificial Sequence: Synthetic oligonucleotide
  Target: ATXN2; (+) strand; PAM type: NRG; PAM sequence: CAG
ctcccaaagtactgggatta

SEQ ID NO: 37510 - DNA, 20 bp, Artificial Sequence
  Description of Artificial Sequence: Synthetic oligonucleotide
  Target: ATXN2; (+) strand; PAM type: NRG; PAM sequence: AGG
tcccaaagtactgggattac

SEQ ID NO: 37511 - DNA, 20 bp, Artificial Sequence
  Description of Artificial Sequence: Synthetic oligonucleotide
  Target: ATXN2; (+) strand; PAM type: NRG; PAM sequence: GAG
agtactgggattacaggcgt

SEQ ID NO: 37512 - DNA, 20 bp, Artificial Sequence
  Description of Artificial Sequence: Synthetic oligonucleotide
  Target: ATXN2; (+) strand; PAM type: NRG; PAM sequence: CGG
caggcgtgagccaccacgtc

SEQ ID NO: 37513 - DNA, 20 bp, Artificial Sequence
  Description of Artificial Sequence: Synthetic oligonucleotide
  Target: ATXN2; (+) strand; PAM type: NRG; PAM sequence: TAG
tttacaaattgccctacaaa

SEQ ID NO: 37514 - DNA, 20 bp, Artificial Sequence
  Description of Artificial Sequence: Synthetic oligonucleotide
  Target: ATXN2; (+) strand; PAM type: NRG; PAM sequence: AGG
ttacaaattgccctacaaat

SEQ ID NO: 37515 - DNA, 20 bp, Artificial Sequence
  Description of Artificial Sequence: Synthetic oligonucleotide
  Target: ATXN2; (+) strand; PAM type: NRG; PAM sequence: AAG
ataggaaaaatgtaccttaa

SEQ ID NO: 37516 - DNA, 20 bp, Artificial Sequence
  Description of Artificial Sequence: Synthetic oligonucleotide
  Target: ATXN2; (+) strand; PAM type: NRG; PAM sequence: CAG
gtaccttaaaagttcatttc

SEQ ID NO: 37517 - DNA, 20 bp, Artificial Sequence
  Description of Artificial Sequence: Synthetic oligonucleotide
  Target: ATXN2; (+) strand; PAM type: NRG; PAM sequence: AAG
ccttaaaagttcatttccag

SEQ ID NO: 37518 - DNA, 20 bp, Artificial Sequence
  Description of Artificial Sequence: Synthetic oligonucleotide
  Target: ATXN2; (+) strand; PAM type: NRG; PAM sequence: AAG
aaaagttcatttccagaaga

SEQ ID NO: 37519 - DNA, 20 bp, Artificial Sequence
  Description of Artificial Sequence: Synthetic oligonucleotide
  Target: ATXN2; (+) strand; PAM type: NRG; PAM sequence: CAG
ttccagaagaaagctctgcc

SEQ ID NO: 37520 - DNA, 20 bp, Artificial Sequence
  Description of Artificial Sequence: Synthetic oligonucleotide
  Target: ATXN2; (+) strand; PAM type: NRG; PAM sequence: AAG
ctgcccagactttctccatg

SEQ ID NO: 37521 - DNA, 20 bp, Artificial Sequence
  Description of Artificial Sequence: Synthetic oligonucleotide
  Target: ATXN2; (+) strand; PAM type: NRG; PAM sequence: AGG
tgcccagactttctccatga

SEQ ID NO: 37522 - DNA, 20 bp, Artificial Sequence
  Description of Artificial Sequence: Synthetic oligonucleotide
  Target: ATXN2; (+) strand; PAM type: NRG; PAM sequence: GAG
cccagactttctccatgaag

SEQ ID NO: 37523 - DNA, 20 bp, Artificial Sequence
  Description of Artificial Sequence: Synthetic oligonucleotide
  Target: ATXN2; (+) strand; PAM type: NRG; PAM sequence: CAG
actatttctgtactttttgc

SEQ ID NO: 37524 - DNA, 20 bp, Artificial Sequence
  Description of Artificial Sequence: Synthetic oligonucleotide
  Target: ATXN2; (+) strand; PAM type: NRG; PAM sequence: AGG
ctatttctgtactttttgcc

SEQ ID NO: 37525 - DNA, 20 bp, Artificial Sequence
  Description of Artificial Sequence: Synthetic oligonucleotide
  Target: ATXN2; (+) strand; PAM type: NRG; PAM sequence: TGG
tttctgtactttttgccagg

SEQ ID NO: 37526 - DNA, 20 bp, Artificial Sequence
  Description of Artificial Sequence: Synthetic oligonucleotide
  Target: ATXN2; (+) strand; PAM type: NRG; PAM sequence: GGG
ttctgtactttttgccaggt

SEQ ID NO: 37527 - DNA, 20 bp, Artificial Sequence
  Description of Artificial Sequence: Synthetic oligonucleotide
  Target: ATXN2; (+) strand; PAM type: NRG; PAM sequence: GGG
tctgtactttttgccaggtg

SEQ ID NO: 37528 - DNA, 20 bp, Artificial Sequence
  Description of Artificial Sequence: Synthetic oligonucleotide
  Target: ATXN2; (+) strand; PAM type: NRG; PAM sequence: GAG
tgtactttttgccaggtggg

SEQ ID NO: 37529 - DNA, 20 bp, Artificial Sequence
  Description of Artificial Sequence: Synthetic oligonucleotide
  Target: ATXN2; (+) strand; PAM type: NRG; PAM sequence: GAG
tactttttgccaggtgggga

SEQ ID NO: 37530 - DNA, 20 bp, Artificial Sequence
  Description of Artificial Sequence: Synthetic oligonucleotide
  Target: ATXN2; (+) strand; PAM type: NRG; PAM sequence: AGG
actttttgccaggtggggag

SEQ ID NO: 37531 - DNA, 20 bp, Artificial Sequence
  Description of Artificial Sequence: Synthetic oligonucleotide
  Target: ATXN2; (+) strand; PAM type: NRG; PAM sequence: GGG
ctttttgccaggtggggaga

SEQ ID NO: 37532 - DNA, 20 bp, Artificial Sequence
  Description of Artificial Sequence: Synthetic oligonucleotide
  Target: ATXN2; (+) strand; PAM type: NRG; PAM sequence: GGG
tttttgccaggtggggagag

SEQ ID NO: 37533 - DNA, 20 bp, Artificial Sequence
  Description of Artificial Sequence: Synthetic oligonucleotide
  Target: ATXN2; (+) strand; PAM type: NRG; PAM sequence: AAG
agaggggacctgtgctgtcc

SEQ ID NO: 37534 - DNA, 20 bp, Artificial Sequence
  Description of Artificial Sequence: Synthetic oligonucleotide
  Target: ATXN2; (+) strand; PAM type: NRG; PAM sequence: GAG
gctgtccaagataatgacct

SEQ ID NO: 37535 - DNA, 20 bp, Artificial Sequence
  Description of Artificial Sequence: Synthetic oligonucleotide
  Target: ATXN2; (+) strand; PAM type: NRG; PAM sequence: GAG
tgtccaagataatgacctga

SEQ ID NO: 37536 - DNA, 20 bp, Artificial Sequence
  Description of Artificial Sequence: Synthetic oligonucleotide
  Target: ATXN2; (+) strand; PAM type: NRG; PAM sequence: AGG
gtccaagataatgacctgag

SEQ ID NO: 37537 - DNA, 20 bp, Artificial Sequence
  Description of Artificial Sequence: Synthetic oligonucleotide
  Target: ATXN2; (+) strand; PAM type: NRG; PAM sequence: AAG
gaggtcatgatctcttgctt

SEQ ID NO: 37538 - DNA, 20 bp, Artificial Sequence
  Description of Artificial Sequence: Synthetic oligonucleotide
  Target: ATXN2; (+) strand; PAM type: NRG; PAM sequence: AAG
atgatctcttgcttaagctc

SEQ ID NO: 37539 - DNA, 20 bp, Artificial Sequence
  Description of Artificial Sequence: Synthetic oligonucleotide
  Target: ATXN2; (+) strand; PAM type: NRG; PAM sequence: GAG
gcttaagctcaagatatcct

SEQ ID NO: 37540 - DNA, 20 bp, Artificial Sequence
  Description of Artificial Sequence: Synthetic oligonucleotide
  Target: ATXN2; (+) strand; PAM type: NRG; PAM sequence: AGG
cttaagctcaagatatcctg

SEQ ID NO: 37541 - DNA, 20 bp, Artificial Sequence
  Description of Artificial Sequence: Synthetic oligonucleotide
  Target: ATXN2; (+) strand; PAM type: NRG; PAM sequence: GGG
ttaagctcaagatatcctga

SEQ ID NO: 37542 - DNA, 20 bp, Artificial Sequence
  Description of Artificial Sequence: Synthetic oligonucleotide
  Target: ATXN2; (+) strand; PAM type: NRG; PAM sequence: GGG
taagctcaagatatcctgag

SEQ ID NO: 37543 - DNA, 20 bp, Artificial Sequence
  Description of Artificial Sequence: Synthetic oligonucleotide
  Target: ATXN2; (+) strand; PAM type: NRG; PAM sequence: GAG
tcctgaatattttatttttt

SEQ ID NO: 37544 - DNA, 20 bp, Artificial Sequence
  Description of Artificial Sequence: Synthetic oligonucleotide
  Target: ATXN2; (+) strand; PAM type: NRG; PAM sequence: CAG
gaatattttattttttgaga

SEQ ID NO: 37545 - DNA, 20 bp, Artificial Sequence
  Description of Artificial Sequence: Synthetic oligonucleotide
  Target: ATXN2; (+) strand; PAM type: NRG; PAM sequence: CAG
cagaatttcgctctgccacc

SEQ ID NO: 37546 - DNA, 20 bp, Artificial Sequence
  Description of Artificial Sequence: Synthetic oligonucleotide
  Target: ATXN2; (+) strand; PAM type: NRG; PAM sequence: AGG
agaatttcgctctgccaccc

SEQ ID NO: 37547 - DNA, 20 bp, Artificial Sequence
  Description of Artificial Sequence: Synthetic oligonucleotide
  Target: ATXN2; (+) strand; PAM type: NRG; PAM sequence: TGG
tttcgctctgccacccaggc

SEQ ID NO: 37548 - DNA, 20 bp, Artificial Sequence
  Description of Artificial Sequence: Synthetic oligonucleotide
  Target: ATXN2; (+) strand; PAM type: NRG; PAM sequence: GAG
tcgctctgccacccaggctg

SEQ ID NO: 37549 - DNA, 20 bp, Artificial Sequence
  Description of Artificial Sequence: Synthetic oligonucleotide
  Target: ATXN2; (+) strand; PAM type: NRG; PAM sequence: TGG
ctctgccacccaggctggag

SEQ ID NO: 37550 - DNA, 20 bp, Artificial Sequence
  Description of Artificial Sequence: Synthetic oligonucleotide
  Target: ATXN2; (+) strand; PAM type: NRG; PAM sequence: GAG
ctgccacccaggctggagtg

SEQ ID NO: 37551 - DNA, 20 bp, Artificial Sequence
  Description of Artificial Sequence: Synthetic oligonucleotide
  Target: ATXN2; (+) strand; PAM type: NRG; PAM sequence: TGG
ccacccaggctggagtggag

SEQ ID NO: 37552 - DNA, 20 bp, Artificial Sequence
  Description of Artificial Sequence: Synthetic oligonucleotide
  Target: ATXN2; (+) strand; PAM type: NRG; PAM sequence: CGG
ggagtggagtggcacgactt

SEQ ID NO: 37553 - DNA, 20 bp, Artificial Sequence
  Description of Artificial Sequence: Synthetic oligonucleotide
  Target: ATXN2; (+) strand; PAM type: NRG; PAM sequence: AAG
cactgcaacctctgcctccc

SEQ ID NO: 37554 - DNA, 20 bp, Artificial Sequence
  Description of Artificial Sequence: Synthetic oligonucleotide
  Target: ATXN2; (+) strand; PAM type: NRG; PAM sequence: AAG
aacctctgcctcccaagttc

SEQ ID NO: 37555 - DNA, 20 bp, Artificial Sequence
  Description of Artificial Sequence: Synthetic oligonucleotide
  Target: ATXN2; (+) strand; PAM type: NRG; PAM sequence: CAG
ttcaagcaattctcctgtct

SEQ ID NO: 37556 - DNA, 20 bp, Artificial Sequence
  Description of Artificial Sequence: Synthetic oligonucleotide
  Target: ATXN2; (+) strand; PAM type: NRG; PAM sequence: TAG
ttctcctgtctcagcctccc

SEQ ID NO: 37557 - DNA, 20 bp, Artificial Sequence
  Description of Artificial Sequence: Synthetic oligonucleotide
  Target: ATXN2; (+) strand; PAM type: NRG; PAM sequence: TAG
tcctgtctcagcctccctag

SEQ ID NO: 37558 - DNA, 20 bp, Artificial Sequence
  Description of Artificial Sequence: Synthetic oligonucleotide
  Target: ATXN2; (+) strand; PAM type: NRG; PAM sequence: GAG
tctcagcctccctagtagct

SEQ ID NO: 37559 - DNA, 20 bp, Artificial Sequence
  Description of Artificial Sequence: Synthetic oligonucleotide
  Target: ATXN2; (+) strand; PAM type: NRG; PAM sequence: TAG
ctccctagtagctgagatta

SEQ ID NO: 37560 - DNA, 20 bp, Artificial Sequence
  Description of Artificial Sequence: Synthetic oligonucleotide
  Target: ATXN2; (+) strand; PAM type: NRG; PAM sequence: AGG
tccctagtagctgagattat

SEQ ID NO: 37561 - DNA, 20 bp, Artificial Sequence
  Description of Artificial Sequence: Synthetic oligonucleotide
  Target: ATXN2; (+) strand; PAM type: NRG; PAM sequence: CAG
ctgagattataggcgcatgc

SEQ ID NO: 37562 - DNA, 20 bp, Artificial Sequence
  Description of Artificial Sequence: Synthetic oligonucleotide
  Target: ATXN2; (+) strand; PAM type: NRG; PAM sequence: TGG
taggcgcatgccagcatgca

SEQ ID NO: 37563 - DNA, 20 bp, Artificial Sequence
  Description of Artificial Sequence: Synthetic oligonucleotide
  Target: ATXN2; (+) strand; PAM type: NRG; PAM sequence: TAG
tggctgatttttgtattttt

SEQ ID NO: 37564 - DNA, 20 bp, Artificial Sequence
  Description of Artificial Sequence: Synthetic oligonucleotide
  Target: ATXN2; (+) strand; PAM type: NRG; PAM sequence: TAG
ctgatttttgtattttttag

SEQ ID NO: 37565 - DNA, 20 bp, Artificial Sequence
  Description of Artificial Sequence: Synthetic oligonucleotide
  Target: ATXN2; (+) strand; PAM type: NRG; PAM sequence: GAG
gatttttgtattttttagta

SEQ ID NO: 37566 - DNA, 20 bp, Artificial Sequence
  Description of Artificial Sequence: Synthetic oligonucleotide
  Target: ATXN2; (+) strand; PAM type: NRG; PAM sequence: TGG
tttgtattttttagtagaga

SEQ ID NO: 37567 - DNA, 20 bp, Artificial Sequence
  Description of Artificial Sequence: Synthetic oligonucleotide
  Target: ATXN2; (+) strand; PAM type: NRG; PAM sequence: GAG
tgtattttttagtagagatg

SEQ ID NO: 37568 - DNA, 20 bp, Artificial Sequence
  Description of Artificial Sequence: Synthetic oligonucleotide
  Target: ATXN2; (+) strand; PAM type: NRG; PAM sequence: TGG
gagatggagttttaccatgt

SEQ ID NO: 37569 - DNA, 20 bp, Artificial Sequence
  Description of Artificial Sequence: Synthetic oligonucleotide
  Target: ATXN2; (+) strand; PAM type: NRG; PAM sequence: TAG
tggagttttaccatgttggc

SEQ ID NO: 37570 - DNA, 20 bp, Artificial Sequence
  Description of Artificial Sequence: Synthetic oligonucleotide
  Target: ATXN2; (+) strand; PAM type: NRG; PAM sequence: AGG
ggagttttaccatgttggct

SEQ ID NO: 37571 - DNA, 20 bp, Artificial Sequence
  Description of Artificial Sequence: Synthetic oligonucleotide
  Target: ATXN2; (+) strand; PAM type: NRG; PAM sequence: TGG
ttttaccatgttggctaggc

SEQ ID NO: 37572 - DNA, 20 bp, Artificial Sequence
  Description of Artificial Sequence: Synthetic oligonucleotide
  Target: ATXN2; (+) strand; PAM type: NRG; PAM sequence: CAG
tggtcttgaactgctgacct

SEQ ID NO: 37573 - DNA, 20 bp, Artificial Sequence
  Description of Artificial Sequence: Synthetic oligonucleotide
  Target: ATXN2; (+) strand; PAM type: NRG; PAM sequence: CAG
ctcagatgatccacccgcct

SEQ ID NO: 37574 - DNA, 20 bp, Artificial Sequence
  Description of Artificial Sequence: Synthetic oligonucleotide
  Target: ATXN2; (+) strand; PAM type: NRG; PAM sequence: AAG
ccacccgcctcagcctccca

SEQ ID NO: 37575 - DNA, 20 bp, Artificial Sequence
  Description of Artificial Sequence: Synthetic oligonucleotide
  Target: ATXN2; (+) strand; PAM type: NRG; PAM sequence: TGG
gcctcagcctcccaaagcac

SEQ ID NO: 37576 - DNA, 20 bp, Artificial Sequence
  Description of Artificial Sequence: Synthetic oligonucleotide
  Target: ATXN2; (+) strand; PAM type: NRG; PAM sequence: GGG
cctcagcctcccaaagcact

SEQ ID NO: 37577 - DNA, 20 bp, Artificial Sequence
  Description of Artificial Sequence: Synthetic oligonucleotide
  Target: ATXN2; (+) strand; PAM type: NRG; PAM sequence: CAG
ctcccaaagcactgggatta

SEQ ID NO: 37578 - DNA, 20 bp, Artificial Sequence
  Description of Artificial Sequence: Synthetic oligonucleotide
  Target: ATXN2; (+) strand; PAM type: NRG; PAM sequence: AGG
tcccaaagcactgggattac

SEQ ID NO: 37579 - DNA, 20 bp, Artificial Sequence
  Description of Artificial Sequence: Synthetic oligonucleotide
  Target: ATXN2; (+) strand; PAM type: NRG; PAM sequence: GAG
agcactgggattacaggtgt

SEQ ID NO: 37580 - DNA, 20 bp, Artificial Sequence
  Description of Artificial Sequence: Synthetic oligonucleotide
  Target: ATXN2; (+) strand; PAM type: NRG; PAM sequence: TGG
caggtgtgagccaccgtgcc

SEQ ID NO: 37581 - DNA, 20 bp, Artificial Sequence
  Description of Artificial Sequence: Synthetic oligonucleotide
  Target: ATXN2; (+) strand; PAM type: NRG; PAM sequence: GAG
caccgtgcctggcccttcct

SEQ ID NO: 37582 - DNA, 20 bp, Artificial Sequence
  Description of Artificial Sequence: Synthetic oligonucleotide
  Target: ATXN2; (+) strand; PAM type: NRG; PAM sequence: TAG
tcctgagtattttaaacctt

SEQ ID NO: 37583 - DNA, 20 bp, Artificial Sequence
  Description of Artificial Sequence: Synthetic oligonucleotide
  Target: ATXN2; (+) strand; PAM type: NRG; PAM sequence: CAG
tttaaacctttagccatgca

SEQ ID NO: 37584 - DNA, 20 bp, Artificial Sequence
  Description of Artificial Sequence: Synthetic oligonucleotide
  Target: ATXN2; (+) strand; PAM type: NRG; PAM sequence: AGG
ttaaacctttagccatgcac

SEQ ID NO: 37585 - DNA, 20 bp, Artificial Sequence
  Description of Artificial Sequence: Synthetic oligonucleotide
  Target: ATXN2; (+) strand; PAM type: NRG; PAM sequence: AAG
tagccatgcacaggactgaa

SEQ ID NO: 37586 - DNA, 20 bp, Artificial Sequence
  Description of Artificial Sequence: Synthetic oligonucleotide
  Target: ATXN2; (+) strand; PAM type: NRG; PAM sequence: TAG
ggactgaaaagtttttccct

SEQ ID NO: 37587 - DNA, 20 bp, Artificial Sequence
  Description of Artificial Sequence: Synthetic oligonucleotide
  Target: ATXN2; (+) strand; PAM type: NRG; PAM sequence: TGG
tcctattcaattaaaaatcc

SEQ ID NO: 37588 - DNA, 20 bp, Artificial Sequence
  Description of Artificial Sequence: Synthetic oligonucleotide
  Target: ATXN2; (+) strand; PAM type: NRG; PAM sequence: TAG
tattcaattaaaaatcctgg

SEQ ID NO: 37589 - DNA, 20 bp, Artificial Sequence
  Description of Artificial Sequence: Synthetic oligonucleotide
  Target: ATXN2; (+) strand; PAM type: NRG; PAM sequence: AGG
attcaattaaaaatcctggt

SEQ ID NO: 37590 - DNA, 20 bp, Artificial Sequence
  Description of Artificial Sequence: Synthetic oligonucleotide
  Target: ATXN2; (+) strand; PAM type: NRG; PAM sequence: CAG
aggcataaatttcatcttat

SEQ ID NO: 37591 - DNA, 20 bp, Artificial Sequence
  Description of Artificial Sequence: Synthetic oligonucleotide
  Target: ATXN2; (+) strand; PAM type: NRG; PAM sequence: AAG
agaatataaataaacatttt

SEQ ID NO: 37592 - DNA, 20 bp, Artificial Sequence
  Description of Artificial Sequence: Synthetic oligonucleotide
  Target: ATXN2; (+) strand; PAM type: NRG; PAM sequence: AAG
aaacattttaagtttatacc

SEQ ID NO: 37593 - DNA, 20 bp, Artificial Sequence
  Description of Artificial Sequence: Synthetic oligonucleotide
  Target: ATXN2; (+) strand; PAM type: NRG; PAM sequence: TGG
ttaagtttataccaagcttg

SEQ ID NO: 37594 - DNA, 20 bp, Artificial Sequence
  Description of Artificial Sequence: Synthetic oligonucleotide
  Target: ATXN2; (+) strand; PAM type: NRG; PAM sequence: TGG
tttataccaagcttgtggct

SEQ ID NO: 37595 - DNA, 20 bp, Artificial Sequence
  Description of Artificial Sequence: Synthetic oligonucleotide
  Target: ATXN2; (+) strand; PAM type: NRG; PAM sequence: GGG
ttataccaagcttgtggctt

SEQ ID NO: 37596 - DNA, 20 bp, Artificial Sequence
  Description of Artificial Sequence: Synthetic oligonucleotide
  Target: ATXN2; (+) strand; PAM type: NRG; PAM sequence: GGG
tataccaagcttgtggcttg

SEQ ID NO: 37597 - DNA, 20 bp, Artificial Sequence
  Description of Artificial Sequence: Synthetic oligonucleotide
  Target: ATXN2; (+) strand; PAM type: NRG; PAM sequence: AAG
aaacattttaaatttatacc

SEQ ID NO: 37598 - DNA, 20 bp, Artificial Sequence
  Description of Artificial Sequence: Synthetic oligonucleotide
  Target: ATXN2; (+) strand; PAM type: NRG; PAM sequence: TGG
ttaaatttataccaagcttg

SEQ ID NO: 37599 - DNA, 20 bp, Artificial Sequence
  Description of Artificial Sequence: Synthetic oligonucleotide
  Target: ATXN2; (+) strand; PAM type: NRG; PAM sequence: TGG
tttataccaagcttgtggct

SEQ ID NO: 37600 - DNA, 20 bp, Artificial Sequence
  Description of Artificial Sequence: Synthetic oligonucleotide
  Target: ATXN2; (+) strand; PAM type: NRG; PAM sequence: GGG
ttataccaagcttgtggctt

SEQ ID NO: 37601 - DNA, 20 bp, Artificial Sequence
  Description of Artificial Sequence: Synthetic oligonucleotide
  Target: ATXN2; (+) strand; PAM type: NRG; PAM sequence: AAG
tgtgtgtgtgtgtgtgtata

SEQ ID NO: 37602 - DNA, 20 bp, Artificial Sequence
  Description of Artificial Sequence: Synthetic oligonucleotide
  Target: ATXN2; (+) strand; PAM type: NRG; PAM sequence: TAG
tgtgtgtgtataaagctgtt

SEQ ID NO: 37603 - DNA, 20 bp, Artificial Sequence
  Description of Artificial Sequence: Synthetic oligonucleotide
  Target: ATXN2; (+) strand; PAM type: NRG; PAM sequence: AGG
gtgtgtgtataaagctgttt

SEQ ID NO: 37604 - DNA, 20 bp, Artificial Sequence
  Description of Artificial Sequence: Synthetic oligonucleotide
  Target: ATXN2; (+) strand; PAM type: NRG; PAM sequence: AAG
tgtgtataaagctgtttagg

SEQ ID NO: 37605 - DNA, 20 bp, Artificial Sequence
  Description of Artificial Sequence: Synthetic oligonucleotide
  Target: ATXN2; (+) strand; PAM type: NRG; PAM sequence: AAG
gtttaggaagtttctctaac

SEQ ID NO: 37606 - DNA, 20 bp, Artificial Sequence
  Description of Artificial Sequence: Synthetic oligonucleotide
  Target: ATXN2; (+) strand; PAM type: NRG; PAM sequence: AGG
tttaggaagtttctctaaca

SEQ ID NO: 37607 - DNA, 20 bp, Artificial Sequence
  Description of Artificial Sequence: Synthetic oligonucleotide
  Target: ATXN2; (+) strand; PAM type: NRG; PAM sequence: TAG
ttctctaacaaggaaaatat

SEQ ID NO: 37608 - DNA, 20 bp, Artificial Sequence
  Description of Artificial Sequence: Synthetic oligonucleotide
  Target: ATXN2; (+) strand; PAM type: NRG; PAM sequence: AGG
tctctaacaaggaaaatatt

SEQ ID NO: 37609 - DNA, 20 bp, Artificial Sequence
  Description of Artificial Sequence: Synthetic oligonucleotide
  Target: ATXN2; (+) strand; PAM type: NRG; PAM sequence: CAG
ggaaaatattaggcatttcc

SEQ ID NO: 37610 - DNA, 20 bp, Artificial Sequence
  Description of Artificial Sequence: Synthetic oligonucleotide
  Target: ATXN2; (+) strand; PAM type: NRG; PAM sequence: TGG
atttcccagtcacatttgct

SEQ ID NO: 37611 - DNA, 20 bp, Artificial Sequence
  Description of Artificial Sequence: Synthetic oligonucleotide
  Target: ATXN2; (+) strand; PAM type: NRG; PAM sequence: CAG
actccatttttcattaactc

SEQ ID NO: 37612 - DNA, 20 bp, Artificial Sequence
  Description of Artificial Sequence: Synthetic oligonucleotide
  Target: ATXN2; (+) strand; PAM type: NRG; PAM sequence: TGG
taactccagccttcttaaat

SEQ ID NO: 37613 - DNA, 20 bp, Artificial Sequence
  Description of Artificial Sequence: Synthetic oligonucleotide
  Target: ATXN2; (+) strand; PAM type: NRG; PAM sequence: GGG
aactccagccttcttaaatt

SEQ ID NO: 37614 - DNA, 20 bp, Artificial Sequence
  Description of Artificial Sequence: Synthetic oligonucleotide
  Target: ATXN2; (+) strand; PAM type: NRG; PAM sequence: AAG
actgaattatttatatatat

SEQ ID NO: 37615 - DNA, 20 bp, Artificial Sequence
  Description of Artificial Sequence: Synthetic oligonucleotide
  Target: ATXN2; (+) strand; PAM type: NRG; PAM sequence: TGG
agtactttcaataatttgac

SEQ ID NO: 37616 - DNA, 20 bp, Artificial Sequence
  Description of Artificial Sequence: Synthetic oligonucleotide
  Target: ATXN2; (+) strand; PAM type: NRG; PAM sequence: AAG
ttcaataatttgactggcac

SEQ ID NO: 37617 - DNA, 20 bp, Artificial Sequence
  Description of Artificial Sequence: Synthetic oligonucleotide
  Target: ATXN2; (+) strand; PAM type: NRG; PAM sequence: AGG
tcaataatttgactggcaca

SEQ ID NO: 37618 - DNA, 20 bp, Artificial Sequence
  Description of Artificial Sequence: Synthetic oligonucleotide
  Target: ATXN2; (+) strand; PAM type: NRG; PAM sequence: AAG
caaggaaaatattgttcaac

SEQ ID NO: 37619 - DNA, 20 bp, Artificial Sequence
  Description of Artificial Sequence: Synthetic oligonucleotide
  Target: ATXN2; (+) strand; PAM type: NRG; PAM sequence: AAG
cttaacatgtatcctttaaa

SEQ ID NO: 37620 - DNA, 20 bp, Artificial Sequence
  Description of Artificial Sequence: Synthetic oligonucleotide
  Target: ATXN2; (+) strand; PAM type: NRG; PAM sequence: TAG
tttactgtacaattaaaaat

SEQ ID NO: 37621 - DNA, 20 bp, Artificial Sequence
  Description of Artificial Sequence: Synthetic oligonucleotide
  Target: ATXN2; (+) strand; PAM type: NRG; PAM sequence: TGG
gtataaaaaacccaactcac

SEQ ID NO: 37622 - DNA, 20 bp, Artificial Sequence
  Description of Artificial Sequence: Synthetic oligonucleotide
  Target: ATXN2; (+) strand; PAM type: NRG; PAM sequence: AAG
aaaaacccaactcactggca

SEQ ID NO: 37623 - DNA, 20 bp, Artificial Sequence
  Description of Artificial Sequence: Synthetic oligonucleotide
  Target: ATXN2; (+) strand; PAM type: NRG; PAM sequence: TAG
aacccaactcactggcaaag

SEQ ID NO: 37624 - DNA, 20 bp, Artificial Sequence
  Description of Artificial Sequence: Synthetic oligonucleotide
  Target: ATXN2; (+) strand; PAM type: NRG; PAM sequence: AAG
caactcactggcaaagtaga

SEQ ID NO: 37625 - DNA, 20 bp, Artificial Sequence
  Description of Artificial Sequence: Synthetic oligonucleotide
  Target: ATXN2; (+) strand; PAM type: NRG; PAM sequence: AAG
ctcactggcaaagtagaaag

SEQ ID NO: 37626 - DNA, 20 bp, Artificial Sequence
  Description of Artificial Sequence: Synthetic oligonucleotide
  Target: ATXN2; (+) strand; PAM type: NRG; PAM sequence: AGG
tcactggcaaagtagaaaga

SEQ ID NO: 37627 - DNA, 20 bp, Artificial Sequence
  Description of Artificial Sequence: Synthetic oligonucleotide
  Target: ATXN2; (+) strand; PAM type: NRG; PAM sequence: GGG
cactggcaaagtagaaagaa

SEQ ID NO: 37628 - DNA, 20 bp, Artificial Sequence
  Description of Artificial Sequence: Synthetic oligonucleotide
  Target: ATXN2; (+) strand; PAM type: NRG; PAM sequence: TGG
gggcttgtctccttgttgta

SEQ ID NO: 37629 - DNA, 20 bp, Artificial Sequence
  Description of Artificial Sequence: Synthetic oligonucleotide
  Target: ATXN2; (+) strand; PAM type: NRG; PAM sequence: TGG
ctccttgttgtatggtaatt

SEQ ID NO: 37630 - DNA, 20 bp, Artificial Sequence
  Description of Artificial Sequence: Synthetic oligonucleotide
  Target: ATXN2; (+) strand; PAM type: NRG; PAM sequence: GGG
tccttgttgtatggtaattt

SEQ ID NO: 37631 - DNA, 20 bp, Artificial Sequence
  Description of Artificial Sequence: Synthetic oligonucleotide
  Target: ATXN2; (+) strand; PAM type: NRG; PAM sequence: TGG
aatttgggacatgctgaatt

SEQ ID NO: 37632 - DNA, 20 bp, Artificial Sequence
  Description of Artificial Sequence: Synthetic oligonucleotide
  Target: ATXN2; (+) strand; PAM type: NRG; PAM sequence: GGG
atttgggacatgctgaattt

SEQ ID NO: 37633 - DNA, 20 bp, Artificial Sequence
  Description of Artificial Sequence: Synthetic oligonucleotide
  Target: ATXN2; (+) strand; PAM type: NRG; PAM sequence: TAG
gacatgctgaatttgggaaa

SEQ ID NO: 37634 - DNA, 20 bp, Artificial Sequence
  Description of Artificial Sequence: Synthetic oligonucleotide
  Target: ATXN2; (+) strand; PAM type: NRG; PAM sequence: AAG
tgctgaatttgggaaataga

SEQ ID NO: 37635 - DNA, 20 bp, Artificial Sequence
  Description of Artificial Sequence: Synthetic oligonucleotide
  Target: ATXN2; (+) strand; PAM type: NRG; PAM sequence: AGG
gctgaatttgggaaatagaa

SEQ ID NO: 37636 - DNA, 20 bp, Artificial Sequence
  Description of Artificial Sequence: Synthetic oligonucleotide
  Target: ATXN2; (+) strand; PAM type: NRG; PAM sequence: TAG
tgggaaatagaaaggtaaat

SEQ ID NO: 37637 - DNA, 20 bp, Artificial Sequence
  Description of Artificial Sequence: Synthetic oligonucleotide
  Target: ATXN2; (+) strand; PAM type: NRG; PAM sequence: GAG
gaaaggtaaattagcctttt

SEQ ID NO: 37638 - DNA, 20 bp, Artificial Sequence
  Description of Artificial Sequence: Synthetic oligonucleotide
  Target: ATXN2; (+) strand; PAM type: NRG; PAM sequence: AGG
aaaggtaaattagccttttg

SEQ ID NO: 37639 - DNA, 20 bp, Artificial Sequence
  Description of Artificial Sequence: Synthetic oligonucleotide
  Target: ATXN2; (+) strand; PAM type: NRG; PAM sequence: TGG
tgtgcattttccaaattttc

SEQ ID NO: 37640 - DNA, 20 bp, Artificial Sequence
  Description of Artificial Sequence: Synthetic oligonucleotide
  Target: ATXN2; (+) strand; PAM type: NRG; PAM sequence: AAG
cattttccaaattttctgga

SEQ ID NO: 37641 - DNA, 20 bp, Artificial Sequence
  Description of Artificial Sequence: Synthetic oligonucleotide
  Target: ATXN2; (+) strand; PAM type: NRG; PAM sequence: AGG
attttccaaattttctggaa

SEQ ID NO: 37642 - DNA, 20 bp, Artificial Sequence
  Description of Artificial Sequence: Synthetic oligonucleotide
  Target: ATXN2; (+) strand; PAM type: NRG; PAM sequence: TAG
ttctggaaaggttgacatat

SEQ ID NO: 37643 - DNA, 20 bp, Artificial Sequence
  Description of Artificial Sequence: Synthetic oligonucleotide
  Target: ATXN2; (+) strand; PAM type: NRG; PAM sequence: AAG
catgcataattcattttcat

SEQ ID NO: 37644 - DNA, 20 bp, Artificial Sequence
  Description of Artificial Sequence: Synthetic oligonucleotide
  Target: ATXN2; (+) strand; PAM type: NRG; PAM sequence: GAG
tgcataattcattttcataa

SEQ ID NO: 37645 - DNA, 20 bp, Artificial Sequence
  Description of Artificial Sequence: Synthetic oligonucleotide
  Target: ATXN2; (+) strand; PAM type: NRG; PAM sequence: AAG
tcattttcataagagatgac

SEQ ID NO: 37646 - DNA, 20 bp, Artificial Sequence
  Description of Artificial Sequence: Synthetic oligonucleotide
  Target: ATXN2; (+) strand; PAM type: NRG; PAM sequence: CAG
aagcactttaaacactgcta

SEQ ID NO: 37647 - DNA, 20 bp, Artificial Sequence
  Description of Artificial Sequence: Synthetic oligonucleotide
  Target: ATXN2; (+) strand; PAM type: NRG; PAM sequence: AAG
acactgctacagaattttaa

SEQ ID NO: 37648 - DNA, 20 bp, Artificial Sequence
  Description of Artificial Sequence: Synthetic oligonucleotide
  Target: ATXN2; (+) strand; PAM type: NRG; PAM sequence: AAG
tgctacagaattttaaaaga

SEQ ID NO: 37649 - DNA, 20 bp, Artificial Sequence
  Description of Artificial Sequence: Synthetic oligonucleotide
  Target: ATXN2; (+) strand; PAM type: NRG; PAM sequence: AGG
gctacagaattttaaaagaa

SEQ ID NO: 37650 - DNA, 20 bp, Artificial Sequence
  Description of Artificial Sequence: Synthetic oligonucleotide
  Target: ATXN2; (+) strand; PAM type: NRG; PAM sequence: CGG
tttaaaagaaaggactaaac

SEQ ID NO: 37651 - DNA, 20 bp, Artificial Sequence
  Description of Artificial Sequence: Synthetic oligonucleotide
  Target: ATXN2; (+) strand; PAM type: NRG; PAM sequence: AAG
aaaagaaaggactaaaccgg

SEQ ID NO: 37652 - DNA, 20 bp, Artificial Sequence
  Description of Artificial Sequence: Synthetic oligonucleotide
  Target: ATXN2; (+) strand; PAM type: NRG; PAM sequence: TAG
agacactgttcttctgtact

SEQ ID NO: 37653 - DNA, 20 bp, Artificial Sequence
  Description of Artificial Sequence: Synthetic oligonucleotide
  Target: ATXN2; (+) strand; PAM type: NRG; PAM sequence: AGG
gacactgttcttctgtactt

SEQ ID NO: 37654 - DNA, 20 bp, Artificial Sequence
  Description of Artificial Sequence: Synthetic oligonucleotide
  Target: ATXN2; (+) strand; PAM type: NRG; PAM sequence: AAG
ttcttctgtacttaggtgtc

SEQ ID NO: 37655 - DNA, 20 bp, Artificial Sequence
  Description of Artificial Sequence: Synthetic oligonucleotide
  Target: ATXN2; (+) strand; PAM type: NRG; PAM sequence: AAG
tgtcatgctgacttgcttaa

SEQ ID NO: 37656 - DNA, 20 bp, Artificial Sequence
  Description of Artificial Sequence: Synthetic oligonucleotide
  Target: ATXN2; (+) strand; PAM type: NRG; PAM sequence: AAG
gctgacttgcttaaaagtaa

SEQ ID NO: 37657 - DNA, 20 bp, Artificial Sequence
  Description of Artificial Sequence: Synthetic oligonucleotide
  Target: ATXN2; (+) strand; PAM type: NRG; PAM sequence: AGG
ctgacttgcttaaaagtaaa

SEQ ID NO: 37658 - DNA, 20 bp, Artificial Sequence
  Description of Artificial Sequence: Synthetic oligonucleotide
  Target: ATXN2; (+) strand; PAM type: NRG; PAM sequence: TGG
atctaataaaaacaccaaca

SEQ ID NO: 37659 - DNA, 20 bp, Artificial Sequence
  Description of Artificial Sequence: Synthetic oligonucleotide
  Target: ATXN2; (+) strand; PAM type: NRG; PAM sequence: AAG
ccaaaataaaactattttac

SEQ ID NO: 37660 - DNA, 20 bp, Artificial Sequence
  Description of Artificial Sequence: Synthetic oligonucleotide
  Target: ATXN2; (+) strand; PAM type: NRG; PAM sequence: TAG
attttacaagtttaattcaa

SEQ ID NO: 37661 - DNA, 20 bp, Artificial Sequence
  Description of Artificial Sequence: Synthetic oligonucleotide
  Target: ATXN2; (+) strand; PAM type: NRG; PAM sequence: TGG
ttttgcaaaaacattactaa

SEQ ID NO: 37662 - DNA, 20 bp, Artificial Sequence
  Description of Artificial Sequence: Synthetic oligonucleotide
  Target: ATXN2; (+) strand; PAM type: NRG; PAM sequence: AAG
tggaaatgtcattatcctga

SEQ ID NO: 37663 - DNA, 20 bp, Artificial Sequence
  Description of Artificial Sequence: Synthetic oligonucleotide
  Target: ATXN2; (+) strand; PAM type: NRG; PAM sequence: TAG
cattatcctgaaagattatc

SEQ ID NO: 37664 - DNA, 20 bp, Artificial Sequence
  Description of Artificial Sequence: Synthetic oligonucleotide
  Target: ATXN2; (+) strand; PAM type: NRG; PAM sequence: TGG
cctgaaagattatctagtaa

SEQ ID NO: 37665 - DNA, 20 bp, Artificial Sequence
  Description of Artificial Sequence: Synthetic oligonucleotide
  Target: ATXN2; (+) strand; PAM type: NRG; PAM sequence: TAG
tagtaatggatccaaaaatt

SEQ ID NO: 37666 - DNA, 20 bp, Artificial Sequence
  Description of Artificial Sequence: Synthetic oligonucleotide
  Target: ATXN2; (+) strand; PAM type: NRG; PAM sequence: AGG
agtaatggatccaaaaattt

SEQ ID NO: 37667 - DNA, 20 bp, Artificial Sequence
  Description of Artificial Sequence: Synthetic oligonucleotide
  Target: ATXN2; (+) strand; PAM type: NRG; PAM sequence: TAG
gatccaaaaatttaggatca

SEQ ID NO: 37668 - DNA, 20 bp, Artificial Sequence
  Description of Artificial Sequence: Synthetic oligonucleotide
  Target: ATXN2; (+) strand; PAM type: NRG; PAM sequence: AAG
caaaaatttaggatcatagc

SEQ ID NO: 37669 - DNA, 20 bp, Artificial Sequence
  Description of Artificial Sequence: Synthetic oligonucleotide
  Target: ATXN2; (+) strand; PAM type: NRG; PAM sequence: AAG
tattaaaacatgtctacata

SEQ ID NO: 37670 - DNA, 20 bp, Artificial Sequence
  Description of Artificial Sequence: Synthetic oligonucleotide
  Target: ATXN2; (+) strand; PAM type: NRG; PAM sequence: AGG
attaaaacatgtctacataa

SEQ ID NO: 37671 - DNA, 20 bp, Artificial Sequence
  Description of Artificial Sequence: Synthetic oligonucleotide
  Target: ATXN2; (+) strand; PAM type: NRG; PAM sequence: GGG
ttaaaacatgtctacataaa

SEQ ID NO: 37672 - DNA, 20 bp, Artificial Sequence
  Description of Artificial Sequence: Synthetic oligonucleotide
  Target: ATXN2; (+) strand; PAM type: NRG; PAM sequence: GGG
taaaacatgtctacataaag

SEQ ID NO: 37673 - DNA, 20 bp, Artificial Sequence
  Description of Artificial Sequence: Synthetic oligonucleotide
  Target: ATXN2; (+) strand; PAM type: NRG; PAM sequence: TAG
aacatgtctacataaagggg

SEQ ID NO: 37674 - DNA, 20 bp, Artificial Sequence
  Description of Artificial Sequence: Synthetic oligonucleotide
  Target: ATXN2; (+) strand; PAM type: NRG; PAM sequence: AGG
acatgtctacataaaggggt

SEQ ID NO: 37675 - DNA, 20 bp, Artificial Sequence
  Description of Artificial Sequence: Synthetic oligonucleotide
  Target: ATXN2; (+) strand; PAM type: NRG; PAM sequence: GGG
catgtctacataaaggggta

SEQ ID NO: 37676 - DNA, 20 bp, Artificial Sequence
  Description of Artificial Sequence: Synthetic oligonucleotide
  Target: ATXN2; (+) strand; PAM type: NRG; PAM sequence: GAG
cataaaggggtagggtattt

SEQ ID NO: 37677 - DNA, 20 bp, Artificial Sequence
  Description of Artificial Sequence: Synthetic oligonucleotide
  Target: ATXN2; (+) strand; PAM type: NRG; PAM sequence: TGG
tgagtgtatttaaatacacc

SEQ ID NO: 37678 - DNA, 20 bp, Artificial Sequence
  Description of Artificial Sequence: Synthetic oligonucleotide
  Target: ATXN2; (+) strand; PAM type: NRG; PAM sequence: AAG
gtgtatttaaatacacctgg

SEQ ID NO: 37679 - DNA, 20 bp, Artificial Sequence
  Description of Artificial Sequence: Synthetic oligonucleotide
  Target: ATXN2; (+) strand; PAM type: NRG; PAM sequence: AGG
tgtatttaaatacacctgga

SEQ ID NO: 37680 - DNA, 20 bp, Artificial Sequence
  Description of Artificial Sequence: Synthetic oligonucleotide
  Target: ATXN2; (+) strand; PAM type: NRG; PAM sequence: AAG
gatacacatcaaaatgttaa

SEQ ID NO: 37681 - DNA, 20 bp, Artificial Sequence
  Description of Artificial Sequence: Synthetic oligonucleotide
  Target: ATXN2; (+) strand; PAM type: NRG; PAM sequence: AGG
atacacatcaaaatgttaaa

SEQ ID NO: 37682 - DNA, 20 bp, Artificial Sequence
  Description of Artificial Sequence: Synthetic oligonucleotide
  Target: ATXN2; (+) strand; PAM type: NRG; PAM sequence: CAG
cacatcaaaatgttaaaagg

SEQ ID NO: 37683 - DNA, 20 bp, Artificial Sequence
  Description of Artificial Sequence: Synthetic oligonucleotide
  Target: ATXN2; (+) strand; PAM type: NRG; PAM sequence: CAG
aaatgttaaaaggcagttgt

SEQ ID NO: 37684 - DNA, 20 bp, Artificial Sequence
  Description of Artificial Sequence: Synthetic oligonucleotide
  Target: ATXN2; (+) strand; PAM type: NRG; PAM sequence: AGG
aatgttaaaaggcagttgtc

SEQ ID NO: 37685 - DNA, 20 bp, Artificial Sequence
  Description of Artificial Sequence: Synthetic oligonucleotide
  Target: ATXN2; (+) strand; PAM type: NRG; PAM sequence: TGG
gttaaaaggcagttgtcagg

SEQ ID NO: 37686 - DNA, 20 bp, Artificial Sequence
  Description of Artificial Sequence: Synthetic oligonucleotide
  Target: ATXN2; (+) strand; PAM type: NRG; PAM sequence: GAG
taaaaggcagttgtcaggtg

SEQ ID NO: 37687 - DNA, 20 bp, Artificial Sequence
  Description of Artificial Sequence: Synthetic oligonucleotide
  Target: ATXN2; (+) strand; PAM type: NRG; PAM sequence: AGG
aaaaggcagttgtcaggtgg

SEQ ID NO: 37688 - DNA, 20 bp, Artificial Sequence
  Description of Artificial Sequence: Synthetic oligonucleotide
  Target: ATXN2; (+) strand; PAM type: NRG; PAM sequence: GGG
aaaggcagttgtcaggtgga

SEQ ID NO: 37689 - DNA, 20 bp, Artificial Sequence
  Description of Artificial Sequence: Synthetic oligonucleotide
  Target: ATXN2; (+) strand; PAM type: NRG; PAM sequence: TGG
gttgtcaggtggagggatta

SEQ ID NO: 37690 - DNA, 20 bp, Artificial Sequence
  Description of Artificial Sequence: Synthetic oligonucleotide
  Target: ATXN2; (+) strand; PAM type: NRG; PAM sequence: AAG
ctaccaaaaacaaatcaaaa

SEQ ID NO: 37691 - DNA, 20 bp, Artificial Sequence
  Description of Artificial Sequence: Synthetic oligonucleotide
  Target: ATXN2; (+) strand; PAM type: NRG; PAM sequence: AGG
taccaaaaacaaatcaaaaa

SEQ ID NO: 37692 - DNA, 20 bp, Artificial Sequence
  Description of Artificial Sequence: Synthetic oligonucleotide
  Target: ATXN2; (+) strand; PAM type: NRG; PAM sequence: TGG
aacaaatcaaaaaaggattc

SEQ ID NO: 37693 - DNA, 20 bp, Artificial Sequence
  Description of Artificial Sequence: Synthetic oligonucleotide
  Target: ATXN2; (+) strand; PAM type: NRG; PAM sequence: TGG
ctggatctaattcttcctaa

SEQ ID NO: 37694 - DNA, 20 bp, Artificial Sequence
  Description of Artificial Sequence: Synthetic oligonucleotide
  Target: ATXN2; (+) strand; PAM type: NRG; PAM sequence: TAG
ctaattcttcctaatggctc

SEQ ID NO: 37695 - DNA, 20 bp, Artificial Sequence
  Description of Artificial Sequence: Synthetic oligonucleotide
  Target: ATXN2; (+) strand; PAM type: NRG; PAM sequence: TAG
ttcttcctaatggctctagt

SEQ ID NO: 37696 - DNA, 20 bp, Artificial Sequence
  Description of Artificial Sequence: Synthetic oligonucleotide
  Target: ATXN2; (+) strand; PAM type: NRG; PAM sequence: CGG
tcctaatggctctagttagt

SEQ ID NO: 37697 - DNA, 20 bp, Artificial Sequence
  Description of Artificial Sequence: Synthetic oligonucleotide
  Target: ATXN2; (+) strand; PAM type: NRG; PAM sequence: AAG
atggctctagttagtcggaa

SEQ ID NO: 37698 - DNA, 20 bp, Artificial Sequence
  Description of Artificial Sequence: Synthetic oligonucleotide
  Target: ATXN2; (+) strand; PAM type: NRG; PAM sequence: AAG
tgtattattactgtttctga

SEQ ID NO: 37699 - DNA, 20 bp, Artificial Sequence
  Description of Artificial Sequence: Synthetic oligonucleotide
  Target: ATXN2; (+) strand; PAM type: NRG; PAM sequence: AGG
gtattattactgtttctgaa

SEQ ID NO: 37700 - DNA, 20 bp, Artificial Sequence
  Description of Artificial Sequence: Synthetic oligonucleotide
  Target: ATXN2; (+) strand; PAM type: NRG; PAM sequence: AAG
ttactgtttctgaaaggtaa

SEQ ID NO: 37701 - DNA, 20 bp, Artificial Sequence
  Description of Artificial Sequence: Synthetic oligonucleotide
  Target: ATXN2; (+) strand; PAM type: NRG; PAM sequence: TAG
gcatcaccataaaacaaaat

SEQ ID NO: 37702 - DNA, 20 bp, Artificial Sequence
  Description of Artificial Sequence: Synthetic oligonucleotide
  Target: ATXN2; (+) strand; PAM type: NRG; PAM sequence: TGG
caccataaaacaaaattaga

SEQ ID NO: 37703 - DNA, 20 bp, Artificial Sequence
  Description of Artificial Sequence: Synthetic oligonucleotide
  Target: ATXN2; (+) strand; PAM type: NRG; PAM sequence: TAG
taaaacaaaattagatggat

SEQ ID NO: 37704 - DNA, 20 bp, Artificial Sequence
  Description of Artificial Sequence: Synthetic oligonucleotide
  Target: ATXN2; (+) strand; PAM type: NRG; PAM sequence: AAG
aacaaaattagatggattag

SEQ ID NO: 37705 - DNA, 20 bp, Artificial Sequence
  Description of Artificial Sequence: Synthetic oligonucleotide
  Target: ATXN2; (+) strand; PAM type: NRG; PAM sequence: GAG
caaaattagatggattagaa

SEQ ID NO: 37706 - DNA, 20 bp, Artificial Sequence
  Description of Artificial Sequence: Synthetic oligonucleotide
  Target: ATXN2; (+) strand; PAM type: NRG; PAM sequence: TAG
aattagatggattagaagag

SEQ ID NO: 37707 - DNA, 20 bp, Artificial Sequence
  Description of Artificial Sequence: Synthetic oligonucleotide
  Target: ATXN2; (+) strand; PAM type: NRG; PAM sequence: GAG
tggattagaagagtagatgt

SEQ ID NO: 37708 - DNA, 20 bp, Artificial Sequence
  Description of Artificial Sequence: Synthetic oligonucleotide
  Target: ATXN2; (+) strand; PAM type: NRG; PAM sequence: AGG
ggattagaagagtagatgtg

SEQ ID NO: 37709 - DNA, 20 bp, Artificial Sequence
  Description of Artificial Sequence: Synthetic oligonucleotide
  Target: ATXN2; (+) strand; PAM type: NRG; PAM sequence: TGG
tagaagagtagatgtgaggc

SEQ ID NO: 37710 - DNA, 20 bp, Artificial Sequence
  Description of Artificial Sequence: Synthetic oligonucleotide
  Target: ATXN2; (+) strand; PAM type: NRG; PAM sequence: GGG
agaagagtagatgtgaggct

SEQ ID NO: 37711 - DNA, 20 bp, Artificial Sequence
  Description of Artificial Sequence: Synthetic oligonucleotide
  Target: ATXN2; (+) strand; PAM type: NRG; PAM sequence: TGG
agtagatgtgaggctgggcg

SEQ ID NO: 37712 - DNA, 20 bp, Artificial Sequence
  Description of Artificial Sequence: Synthetic oligonucleotide
  Target: ATXN2; (+) strand; PAM type: NRG; PAM sequence: TGG
agatgtgaggctgggcgtgg

SEQ ID NO: 37713 - DNA, 20 bp, Artificial Sequence
  Description of Artificial Sequence: Synthetic oligonucleotide
  Target: ATXN2; (+) strand; PAM type: NRG; PAM sequence: CAG
gtggctcacatctgtaatcc

SEQ ID NO: 37714 - DNA, 20 bp, Artificial Sequence
  Description of Artificial Sequence: Synthetic oligonucleotide
  Target: ATXN2; (+) strand; PAM type: NRG; PAM sequence: TGG
catctgtaatcccagcactt

SEQ ID NO: 37715 - DNA, 20 bp, Artificial Sequence
  Description of Artificial Sequence: Synthetic oligonucleotide
  Target: ATXN2; (+) strand; PAM type: NRG; PAM sequence: GGG
atctgtaatcccagcacttt

SEQ ID NO: 37716 - DNA, 20 bp, Artificial Sequence
  Description of Artificial Sequence: Synthetic oligonucleotide
  Target: ATXN2; (+) strand; PAM type: NRG; PAM sequence: GAG
ctgtaatcccagcactttgg

SEQ ID NO: 37717 - DNA, 20 bp, Artificial Sequence
  Description of Artificial Sequence: Synthetic oligonucleotide
  Target: ATXN2; (+) strand; PAM type: NRG; PAM sequence: AGG
tgtaatcccagcactttggg

SEQ ID NO: 37718 - DNA, 20 bp, Artificial Sequence
  Description of Artificial Sequence: Synthetic oligonucleotide
  Target: ATXN2; (+) strand; PAM type: NRG; PAM sequence: TAG
tcccagcactttgggaggcc

SEQ ID NO: 37719 - DNA, 20 bp, Artificial Sequence
  Description of Artificial Sequence: Synthetic oligonucleotide
  Target: ATXN2; (+) strand; PAM type: NRG; PAM sequence: AGG
cccagcactttgggaggcct

SEQ ID NO: 37720 - DNA, 20 bp, Artificial Sequence
  Description of Artificial Sequence: Synthetic oligonucleotide
  Target: ATXN2; (+) strand; PAM type: NRG; PAM sequence: CAG
agcactttgggaggcctagg

SEQ ID NO: 37721 - DNA, 20 bp, Artificial Sequence
  Description of Artificial Sequence: Synthetic oligonucleotide
  Target: ATXN2; (+) strand; PAM type: NRG; PAM sequence: AAG
ggcctaggcagacaaatcac

SEQ ID NO: 37722 - DNA, 20 bp, Artificial Sequence
  Description of Artificial Sequence: Synthetic oligonucleotide
  Target: ATXN2; (+) strand; PAM type: NRG; PAM sequence: AGG
gcctaggcagacaaatcaca

SEQ ID NO: 37723 - DNA, 20 bp, Artificial Sequence
  Description of Artificial Sequence: Synthetic oligonucleotide
  Target: ATXN2; (+) strand; PAM type: NRG; PAM sequence: CAG
aggcagacaaatcacaaggt

SEQ ID NO: 37724 - DNA, 20 bp, Artificial Sequence
  Description of Artificial Sequence: Synthetic oligonucleotide
  Target: ATXN2; (+) strand; PAM type: NRG; PAM sequence: AAG
cagacaaatcacaaggtcag

SEQ ID NO: 37725 - DNA, 20 bp, Artificial Sequence
  Description of Artificial Sequence: Synthetic oligonucleotide
  Target: ATXN2; (+) strand; PAM type: NRG; PAM sequence: GAG
aatcacaaggtcagaagttc

SEQ ID NO: 37726 - DNA, 20 bp, Artificial Sequence
  Description of Artificial Sequence: Synthetic oligonucleotide
  Target: ATXN2; (+) strand; PAM type: NRG; PAM sequence: CAG
caaggtcagaagttcgagat

SEQ ID NO: 37727 - DNA, 20 bp, Artificial Sequence
  Description of Artificial Sequence: Synthetic oligonucleotide
  Target: ATXN2; (+) strand; PAM type: NRG; PAM sequence: TGG
tcagaagttcgagatcagcc

SEQ ID NO: 37728 - DNA, 20 bp, Artificial Sequence
  Description of Artificial Sequence: Synthetic oligonucleotide
  Target: ATXN2; (+) strand; PAM type: NRG; PAM sequence: AAG
agttcgagatcagcctggcc

SEQ ID NO: 37729 - DNA, 20 bp, Artificial Sequence
  Description of Artificial Sequence: Synthetic oligonucleotide
  Target: ATXN2; (+) strand; PAM type: NRG; PAM sequence: CGG
cgagatcagcctggccaaga

SEQ ID NO: 37730 - DNA, 20 bp, Artificial Sequence
  Description of Artificial Sequence: Synthetic oligonucleotide
  Target: ATXN2; (+) strand; PAM type: NRG; PAM sequence: TGG
tctactaaaaatacaaaaat

SEQ ID NO: 37731 - DNA, 20 bp, Artificial Sequence
  Description of Artificial Sequence: Synthetic oligonucleotide
  Target: ATXN2; (+) strand; PAM type: NRG; PAM sequence: CGG
ctaaaaatacaaaaattggc

SEQ ID NO: 37732 - DNA, 20 bp, Artificial Sequence
  Description of Artificial Sequence: Synthetic oligonucleotide
  Target: ATXN2; (+) strand; PAM type: NRG; PAM sequence: TGG
atacaaaaattggccggtcg

SEQ ID NO: 37733 - DNA, 20 bp, Artificial Sequence
  Description of Artificial Sequence: Synthetic oligonucleotide
  Target: ATXN2; (+) strand; PAM type: NRG; PAM sequence: TGG
caaaaattggccggtcgtgg

SEQ ID NO: 37734 - DNA, 20 bp, Artificial Sequence
  Description of Artificial Sequence: Synthetic oligonucleotide
  Target: ATXN2; (+) strand; PAM type: NRG; PAM sequence: TAG
gtcgtggtggcgcacacctg

SEQ ID NO: 37735 - DNA, 20 bp, Artificial Sequence
  Description of Artificial Sequence: Synthetic oligonucleotide
  Target: ATXN2; (+) strand; PAM type: NRG; PAM sequence: CGG
cacctgtagtcccacctact

SEQ ID NO: 37736 - DNA, 20 bp, Artificial Sequence
  Description of Artificial Sequence: Synthetic oligonucleotide
  Target: ATXN2; (+) strand; PAM type: NRG; PAM sequence: GGG
acctgtagtcccacctactc

SEQ ID NO: 37737 - DNA, 20 bp, Artificial Sequence
  Description of Artificial Sequence: Synthetic oligonucleotide
  Target: ATXN2; (+) strand; PAM type: NRG; PAM sequence: GAG
ctgtagtcccacctactcgg

SEQ ID NO: 37738 - DNA, 20 bp, Artificial Sequence
  Description of Artificial Sequence: Synthetic oligonucleotide
  Target: ATXN2; (+) strand; PAM type: NRG; PAM sequence: AGG
tgtagtcccacctactcggg

SEQ ID NO: 37739 - DNA, 20 bp, Artificial Sequence
  Description of Artificial Sequence: Synthetic oligonucleotide
  Target: ATXN2; (+) strand; PAM type: NRG; PAM sequence: GAG
tcccacctactcgggaggct

SEQ ID NO: 37740 - DNA, 20 bp, Artificial Sequence
  Description of Artificial Sequence: Synthetic oligonucleotide
  Target: ATXN2; (+) strand; PAM type: NRG; PAM sequence: AGG
cccacctactcgggaggctg

SEQ ID NO: 37741 - DNA, 20 bp, Artificial Sequence
  Description of Artificial Sequence: Synthetic oligonucleotide
  Target: ATXN2; (+) strand; PAM type: NRG; PAM sequence: CAG
acctactcgggaggctgagg

SEQ ID NO: 37742 - DNA, 20 bp, Artificial Sequence
  Description of Artificial Sequence: Synthetic oligonucleotide
  Target: ATXN2; (+) strand; PAM type: NRG; PAM sequence: TGG
gcagaaaaaccgcttgaacc

SEQ ID NO: 37743 - DNA, 20 bp, Artificial Sequence
  Description of Artificial Sequence: Synthetic oligonucleotide
  Target: ATXN2; (+) strand; PAM type: NRG; PAM sequence: GGG
cagaaaaaccgcttgaacct

SEQ ID NO: 37744 - DNA, 20 bp, Artificial Sequence
  Description of Artificial Sequence: Synthetic oligonucleotide
  Target: ATXN2; (+) strand; PAM type: NRG; PAM sequence: GAG
gaaaaaccgcttgaacctgg

SEQ ID NO: 37745 - DNA, 20 bp, Artificial Sequence
  Description of Artificial Sequence: Synthetic oligonucleotide
  Target: ATXN2; (+) strand; PAM type: NRG; PAM sequence: AGG
aaaaaccgcttgaacctggg

SEQ ID NO: 37746 - DNA, 20 bp, Artificial Sequence
  Description of Artificial Sequence: Synthetic oligonucleotide
  Target: ATXN2; (+) strand; PAM type: NRG; PAM sequence: CAG
aaccgcttgaacctgggagg

SEQ ID NO: 37747 - DNA, 20 bp, Artificial Sequence
  Description of Artificial Sequence: Synthetic oligonucleotide
  Target: ATXN2; (+) strand; PAM type: NRG; PAM sequence: CAG
aacctgggaggcagatgttg

SEQ ID NO: 37748 - DNA, 20 bp, Artificial Sequence
  Description of Artificial Sequence: Synthetic oligonucleotide
  Target: ATXN2; (+) strand; PAM type: NRG; PAM sequence: GAG
tgggaggcagatgttgcagt

SEQ ID NO: 37749 - DNA, 20 bp, Artificial Sequence
  Description of Artificial Sequence: Synthetic oligonucleotide
  Target: ATXN2; (+) strand; PAM type: NRG; PAM sequence: GAG
ggcagatgttgcagtgagct

SEQ ID NO: 37750 - DNA, 20 bp, Artificial Sequence
  Description of Artificial Sequence: Synthetic oligonucleotide
  Target: ATXN2; (+) strand; PAM type: NRG; PAM sequence: CAG
gagatcgcaccgctgcactt

SEQ ID NO: 37751 - DNA, 20 bp, Artificial Sequence
  Description of Artificial Sequence: Synthetic oligonucleotide
  Target: ATXN2; (+) strand; PAM type: NRG; PAM sequence: TGG
cgcaccgctgcacttcagaa

SEQ ID NO: 37752 - DNA, 20 bp, Artificial Sequence
  Description of Artificial Sequence: Synthetic oligonucleotide
  Target: ATXN2; (+) strand; PAM type: NRG; PAM sequence: GGG
gcaccgctgcacttcagaat

SEQ ID NO: 37753 - DNA, 20 bp, Artificial Sequence
  Description of Artificial Sequence: Synthetic oligonucleotide
  Target: ATXN2; (+) strand; PAM type: NRG; PAM sequence: CAG
ctgcacttcagaatgggtga

SEQ ID NO: 37754 - DNA, 20 bp, Artificial Sequence
  Description of Artificial Sequence: Synthetic oligonucleotide
  Target: ATXN2; (+) strand; PAM type: NRG; PAM sequence: GAG
gcacttcagaatgggtgaca

SEQ ID NO: 37755 - DNA, 20 bp, Artificial Sequence
  Description of Artificial Sequence: Synthetic oligonucleotide
  Target: ATXN2; (+) strand; PAM type: NRG; PAM sequence: GAG
ttcagaatgggtgacagagt

SEQ ID NO: 37756 - DNA, 20 bp, Artificial Sequence
  Description of Artificial Sequence: Synthetic oligonucleotide
  Target: ATXN2; (+) strand; PAM type: NRG; PAM sequence: AAG
aaaaaaaaaaaaaaaaaaaa

SEQ ID NO: 37757 - DNA, 20 bp, Artificial Sequence
  Description of Artificial Sequence: Synthetic oligonucleotide
  Target: ATXN2; (+) strand; PAM type: NRG; PAM sequence: GAG
aaaaaaaaaaaaaaaaaaaa

SEQ ID NO: 37758 - DNA, 20 bp, Artificial Sequence
  Description of Artificial Sequence: Synthetic oligonucleotide
  Target: ATXN2; (+) strand; PAM type: NRG; PAM sequence: TAG
aaaaaaaaaaaaaaaaagag

SEQ ID NO: 37759 - DNA, 20 bp, Artificial Sequence
  Description of Artificial Sequence: Synthetic oligonucleotide
  Target: ATXN2; (+) strand; PAM type: NRG; PAM sequence: GAG
aaaaaaaaaagagtagatgt

SEQ ID NO: 37760 - DNA, 20 bp, Artificial Sequence
  Description of Artificial Sequence: Synthetic oligonucleotide
  Target: ATXN2; (+) strand; PAM type: NRG; PAM sequence: GAG
aaaaaaaagagtagatgtga

SEQ ID NO: 37761 - DNA, 20 bp, Artificial Sequence
  Description of Artificial Sequence: Synthetic oligonucleotide
  Target: ATXN2; (+) strand; PAM type: NRG; PAM sequence: AGG
aaaaaaagagtagatgtgag

SEQ ID NO: 37762 - DNA, 20 bp, Artificial Sequence
  Description of Artificial Sequence: Synthetic oligonucleotide
  Target: ATXN2; (+) strand; PAM type: NRG; PAM sequence: AAG
tgtgagaggaaaaaaaatta

SEQ ID NO: 37763 - DNA, 20 bp, Artificial Sequence
  Description of Artificial Sequence: Synthetic oligonucleotide
  Target: ATXN2; (+) strand; PAM type: NRG; PAM sequence: TAG
aaaaaattaaagtaacttct

SEQ ID NO: 37764 - DNA, 20 bp, Artificial Sequence
  Description of Artificial Sequence: Synthetic oligonucleotide
  Target: ATXN2; (+) strand; PAM type: NRG; PAM sequence: AAG
aaattaaagtaacttcttag

SEQ ID NO: 37765 - DNA, 20 bp, Artificial Sequence
  Description of Artificial Sequence: Synthetic oligonucleotide
  Target: ATXN2; (+) strand; PAM type: NRG; PAM sequence: AGG
aattaaagtaacttcttaga

SEQ ID NO: 37766 - DNA, 20 bp, Artificial Sequence
  Description of Artificial Sequence: Synthetic oligonucleotide
  Target: ATXN2; (+) strand; PAM type: NRG; PAM sequence: GGG
attaaagtaacttcttagaa

SEQ ID NO: 37767 - DNA, 20 bp, Artificial Sequence
  Description of Artificial Sequence: Synthetic oligonucleotide
  Target: ATXN2; (+) strand; PAM type: NRG; PAM sequence: TGG
aagtaacttcttagaaggga

SEQ ID NO: 37768 - DNA, 20 bp, Artificial Sequence
  Description of Artificial Sequence: Synthetic oligonucleotide
  Target: ATXN2; (+) strand; PAM type: NRG; PAM sequence: GGG
agtaacttcttagaagggat

SEQ ID NO: 37769 - DNA, 20 bp, Artificial Sequence
  Description of Artificial Sequence: Synthetic oligonucleotide
  Target: ATXN2; (+) strand; PAM type: NRG; PAM sequence: GGG
gtaacttcttagaagggatg

SEQ ID NO: 37770 - DNA, 20 bp, Artificial Sequence
  Description of Artificial Sequence: Synthetic oligonucleotide
  Target: ATXN2; (+) strand; PAM type: NRG; PAM sequence: TAG
acttcttagaagggatgggg

SEQ ID NO: 37771 - DNA, 20 bp, Artificial Sequence
  Description of Artificial Sequence: Synthetic oligonucleotide
  Target: ATXN2; (+) strand; PAM type: NRG; PAM sequence: GAG
ttcttagaagggatggggta

SEQ ID NO: 37772 - DNA, 20 bp, Artificial Sequence
  Description of Artificial Sequence: Synthetic oligonucleotide
  Target: ATXN2; (+) strand; PAM type: NRG; PAM sequence: AGG
tcttagaagggatggggtag

SEQ ID NO: 37773 - DNA, 20 bp, Artificial Sequence
  Description of Artificial Sequence: Synthetic oligonucleotide
  Target: ATXN2; (+) strand; PAM type: NRG; PAM sequence: TGG
ggatggggtagaggcaatga

SEQ ID NO: 37774 - DNA, 20 bp, Artificial Sequence
  Description of Artificial Sequence: Synthetic oligonucleotide
  Target: ATXN2; (+) strand; PAM type: NRG; PAM sequence: AAG
tggggtagaggcaatgatgg

SEQ ID NO: 37775 - DNA, 20 bp, Artificial Sequence
  Description of Artificial Sequence: Synthetic oligonucleotide
  Target: ATXN2; (+) strand; PAM type: NRG; PAM sequence: TAG
gtagaggcaatgatggaagt

SEQ ID NO: 37776 - DNA, 20 bp, Artificial Sequence
  Description of Artificial Sequence: Synthetic oligonucleotide
  Target: ATXN2; (+) strand; PAM type: NRG; PAM sequence: AAG
gcaatgatggaagttagatt

SEQ ID NO: 37777 - DNA, 20 bp, Artificial Sequence
  Description of Artificial Sequence: Synthetic oligonucleotide
  Target: ATXN2; (+) strand; PAM type: NRG; PAM sequence: GAG
aatgatggaagttagattaa

SEQ ID NO: 37778 - DNA, 20 bp, Artificial Sequence
  Description of Artificial Sequence: Synthetic oligonucleotide
  Target: ATXN2; (+) strand; PAM type: NRG; PAM sequence: AAG
agttagattaagagacatca

SEQ ID NO: 37779 - DNA, 20 bp, Artificial Sequence
  Description of Artificial Sequence: Synthetic oligonucleotide
  Target: ATXN2; (+) strand; PAM type: NRG; PAM sequence: GAG
ttagattaagagacatcaaa

SEQ ID NO: 37780 - DNA, 20 bp, Artificial Sequence
  Description of Artificial Sequence: Synthetic oligonucleotide
  Target: ATXN2; (+) strand; PAM type: NRG; PAM sequence: AGG
tagattaagagacatcaaag

SEQ ID NO: 37781 - DNA, 20 bp, Artificial Sequence
  Description of Artificial Sequence: Synthetic oligonucleotide
  Target: ATXN2; (+) strand; PAM type: NRG; PAM sequence: CGG
ttaagagacatcaaagaggc

SEQ ID NO: 37782 - DNA, 20 bp, Artificial Sequence
  Description of Artificial Sequence: Synthetic oligonucleotide
  Target: ATXN2; (+) strand; PAM type: NRG; PAM sequence: GGG
taagagacatcaaagaggcc

SEQ ID NO: 37783 - DNA, 20 bp, Artificial Sequence
  Description of Artificial Sequence: Synthetic oligonucleotide
  Target: ATXN2; (+) strand; PAM type: NRG; PAM sequence: GGG
aagagacatcaaagaggccg

SEQ ID NO: 37784 - DNA, 20 bp, Artificial Sequence
  Description of Artificial Sequence: Synthetic oligonucleotide
  Target: ATXN2; (+) strand; PAM type: NRG; PAM sequence: CAG
agacatcaaagaggccgggg

SEQ ID NO: 37785 - DNA, 20 bp, Artificial Sequence
  Description of Artificial Sequence: Synthetic oligonucleotide
  Target: ATXN2; (+) strand; PAM type: NRG; PAM sequence: TGG
catcaaagaggccggggcag

SEQ ID NO: 37786 - DNA, 20 bp, Artificial Sequence
  Description of Artificial Sequence: Synthetic oligonucleotide
  Target: ATXN2; (+) strand; PAM type: NRG; PAM sequence: CAG
gtggctcacgcctgtaatcc

SEQ ID NO: 37787 - DNA, 20 bp, Artificial Sequence
  Description of Artificial Sequence: Synthetic oligonucleotide
  Target: ATXN2; (+) strand; PAM type: NRG; PAM sequence: TGG
cgcctgtaatcccagcactt

SEQ ID NO: 37788 - DNA, 20 bp, Artificial Sequence
  Description of Artificial Sequence: Synthetic oligonucleotide
  Target: ATXN2; (+) strand; PAM type: NRG; PAM sequence: GGG
gcctgtaatcccagcacttt

SEQ ID NO: 37789 - DNA, 20 bp, Artificial Sequence
  Description of Artificial Sequence: Synthetic oligonucleotide
  Target: ATXN2; (+) strand; PAM type: NRG; PAM sequence: GAG
ctgtaatcccagcactttgg

SEQ ID NO: 37790 - DNA, 20 bp, Artificial Sequence
  Description of Artificial Sequence: Synthetic oligonucleotide
  Target: ATXN2; (+) strand; PAM type: NRG; PAM sequence: AGG
tgtaatcccagcactttggg

SEQ ID NO: 37791 - DNA, 20 bp, Artificial Sequence
  Description of Artificial Sequence: Synthetic oligonucleotide
  Target: ATXN2; (+) strand; PAM type: NRG; PAM sequence: GAG
tcccagcactttgggaggct

SEQ ID NO: 37792 - DNA, 20 bp, Artificial Sequence
  Description of Artificial Sequence: Synthetic oligonucleotide
  Target: ATXN2; (+) strand; PAM type: NRG; PAM sequence: AGG
cccagcactttgggaggctg

SEQ ID NO: 37793 - DNA, 20 bp, Artificial Sequence
  Description of Artificial Sequence: Synthetic oligonucleotide
  Target: ATXN2; (+) strand; PAM type: NRG; PAM sequence: TGG
agcactttgggaggctgagg

SEQ ID NO: 37794 - DNA, 20 bp, Artificial Sequence
  Description of Artificial Sequence: Synthetic oligonucleotide
  Target: ATXN2; (+) strand; PAM type: NRG; PAM sequence: GGG
gcactttgggaggctgaggt

SEQ ID NO: 37795 - DNA, 20 bp, Artificial Sequence
  Description of Artificial Sequence: Synthetic oligonucleotide
  Target: ATXN2; (+) strand; PAM type: NRG; PAM sequence: TGG
ctttgggaggctgaggtggg

SEQ ID NO: 37796 - DNA, 20 bp, Artificial Sequence
  Description of Artificial Sequence: Synthetic oligonucleotide
  Target: ATXN2; (+) strand; PAM type: NRG; PAM sequence: GAG
ctgaggtgggtggatcacct

SEQ ID NO: 37797 - DNA, 20 bp, Artificial Sequence
  Description of Artificial Sequence: Synthetic oligonucleotide
  Target: ATXN2; (+) strand; PAM type: NRG; PAM sequence: AGG
tgaggtgggtggatcacctg

SEQ ID NO: 37798 - DNA, 20 bp, Artificial Sequence
  Description of Artificial Sequence: Synthetic oligonucleotide
  Target: ATXN2; (+) strand; PAM type: NRG; PAM sequence: CGG
gtgggtggatcacctgaggt

SEQ ID NO: 37799 - DNA, 20 bp, Artificial Sequence
  Description of Artificial Sequence: Synthetic oligonucleotide
  Target: ATXN2; (+) strand; PAM type: NRG; PAM sequence: GGG
tgggtggatcacctgaggtc

SEQ ID NO: 37800 - DNA, 20 bp, Artificial Sequence
  Description of Artificial Sequence: Synthetic oligonucleotide
  Target: ATXN2; (+) strand; PAM type: NRG; PAM sequence: AAG
tcacctgaggtcgggaattc

SEQ ID NO: 37801 - DNA, 20 bp, Artificial Sequence
  Description of Artificial Sequence: Synthetic oligonucleotide
  Target: ATXN2; (+) strand; PAM type: NRG; PAM sequence: CAG
tgaggtcgggaattcaagac

SEQ ID NO: 37802 - DNA, 20 bp, Artificial Sequence
  Description of Artificial Sequence: Synthetic oligonucleotide
  Target: ATXN2; (+) strand; PAM type: NRG; PAM sequence: TGG
caagaccagcctgaccaaca

SEQ ID NO: 37803 - DNA, 20 bp, Artificial Sequence
  Description of Artificial Sequence: Synthetic oligonucleotide
  Target: ATXN2; (+) strand; PAM type: NRG; PAM sequence: TAG
tctactaaaaacacaaaaat

SEQ ID NO: 37804 - DNA, 20 bp, Artificial Sequence
  Description of Artificial Sequence: Synthetic oligonucleotide
  Target: ATXN2; (+) strand; PAM type: NRG; PAM sequence: CAG
ctaaaaacacaaaaattagc

SEQ ID NO: 37805 - DNA, 20 bp, Artificial Sequence
  Description of Artificial Sequence: Synthetic oligonucleotide
  Target: ATXN2; (+) strand; PAM type: NRG; PAM sequence: AGG
taaaaacacaaaaattagcc

SEQ ID NO: 37806 - DNA, 20 bp, Artificial Sequence
  Description of Artificial Sequence: Synthetic oligonucleotide
  Target: ATXN2; (+) strand; PAM type: NRG; PAM sequence: TGG
acacaaaaattagccaggtg

SEQ ID NO: 37807 - DNA, 20 bp, Artificial Sequence
  Description of Artificial Sequence: Synthetic oligonucleotide
  Target: ATXN2; (+) strand; PAM type: NRG; PAM sequence: TGG
caaaaattagccaggtgtgg

SEQ ID NO: 37808 - DNA, 20 bp, Artificial Sequence
  Description of Artificial Sequence: Synthetic oligonucleotide
  Target: ATXN2; (+) strand; PAM type: NRG; PAM sequence: CGG
aaattagccaggtgtggtgg

SEQ ID NO: 37809 - DNA, 20 bp, Artificial Sequence
  Description of Artificial Sequence: Synthetic oligonucleotide
  Target: ATXN2; (+) strand; PAM type: NRG; PAM sequence: GGG
aattagccaggtgtggtggc

SEQ ID NO: 37810 - DNA, 20 bp, Artificial Sequence
  Description of Artificial Sequence: Synthetic oligonucleotide
  Target: ATXN2; (+) strand; PAM type: NRG; PAM sequence: TAG
ggtgtggtggcgggcacctg

SEQ ID NO: 37811 - DNA, 20 bp, Artificial Sequence
  Description of Artificial Sequence: Synthetic oligonucleotide
  Target: ATXN2; (+) strand; PAM type: NRG; PAM sequence: CAG
gtggcgggcacctgtagtcc

SEQ ID NO: 37812 - DNA, 20 bp, Artificial Sequence
  Description of Artificial Sequence: Synthetic oligonucleotide
  Target: ATXN2; (+) strand; PAM type: NRG; PAM sequence: CAG
cacctgtagtcccagctact

SEQ ID NO: 37813 - DNA, 20 bp, Artificial Sequence
  Description of Artificial Sequence: Synthetic oligonucleotide
  Target: ATXN2; (+) strand; PAM type: NRG; PAM sequence: AGG
acctgtagtcccagctactc

SEQ ID NO: 37814 - DNA, 20 bp, Artificial Sequence
  Description of Artificial Sequence: Synthetic oligonucleotide
  Target: ATXN2; (+) strand; PAM type: NRG; PAM sequence: GAG
ctgtagtcccagctactcag

SEQ ID NO: 37815 - DNA, 20 bp, Artificial Sequence
  Description of Artificial Sequence: Synthetic oligonucleotide
  Target: ATXN2; (+) strand; PAM type: NRG; PAM sequence: AGG
tgtagtcccagctactcagg

SEQ ID NO: 37816 - DNA, 20 bp, Artificial Sequence
  Description of Artificial Sequence: Synthetic oligonucleotide
  Target: ATXN2; (+) strand; PAM type: NRG; PAM sequence: GAG
tcccagctactcaggaggct

SEQ ID NO: 37817 - DNA, 20 bp, Artificial Sequence
  Description of Artificial Sequence: Synthetic oligonucleotide
  Target: ATXN2; (+) strand; PAM type: NRG; PAM sequence: AGG
cccagctactcaggaggctg

SEQ ID NO: 37818 - DNA, 20 bp, Artificial Sequence
  Description of Artificial Sequence: Synthetic oligonucleotide
  Target: ATXN2; (+) strand; PAM type: NRG; PAM sequence: CAG
agctactcaggaggctgagg

SEQ ID NO: 37819 - DNA, 20 bp, Artificial Sequence
  Description of Artificial Sequence: Synthetic oligonucleotide
  Target: ATXN2; (+) strand; PAM type: NRG; PAM sequence: AGG
gctactcaggaggctgaggc

SEQ ID NO: 37820 - DNA, 20 bp, Artificial Sequence
  Description of Artificial Sequence: Synthetic oligonucleotide
  Target: ATXN2; (+) strand; PAM type: NRG; PAM sequence: GAG
tactcaggaggctgaggcag

SEQ ID NO: 37821 - DNA, 20 bp, Artificial Sequence
  Description of Artificial Sequence: Synthetic oligonucleotide
  Target: ATXN2; (+) strand; PAM type: NRG; PAM sequence: CAG
gcaggagaactgcttgaacc

SEQ ID NO: 37822 - DNA, 20 bp, Artificial Sequence
  Description of Artificial Sequence: Synthetic oligonucleotide
  Target: ATXN2; (+) strand; PAM type: NRG; PAM sequence: AGG
caggagaactgcttgaaccc

SEQ ID NO: 37823 - DNA, 20 bp, Artificial Sequence
  Description of Artificial Sequence: Synthetic oligonucleotide
  Target: ATXN2; (+) strand; PAM type: NRG; PAM sequence: GAG
ggagaactgcttgaacccag

SEQ ID NO: 37824 - DNA, 20 bp, Artificial Sequence
  Description of Artificial Sequence: Synthetic oligonucleotide
  Target: ATXN2; (+) strand; PAM type: NRG; PAM sequence: AGG
gagaactgcttgaacccagg

SEQ ID NO: 37825 - DNA, 20 bp, Artificial Sequence
  Description of Artificial Sequence: Synthetic oligonucleotide
  Target: ATXN2; (+) strand; PAM type: NRG; PAM sequence: CGG
aactgcttgaacccaggagg

SEQ ID NO: 37826 - DNA, 20 bp, Artificial Sequence
  Description of Artificial Sequence: Synthetic oligonucleotide
  Target: ATXN2; (+) strand; PAM type: NRG; PAM sequence: GAG
ctgcttgaacccaggaggcg

SEQ ID NO: 37827 - DNA, 20 bp, Artificial Sequence
  Description of Artificial Sequence: Synthetic oligonucleotide
  Target: ATXN2; (+) strand; PAM type: NRG; PAM sequence: CAG
aacccaggaggcggagtttg

SEQ ID NO: 37828 - DNA, 20 bp, Artificial Sequence
  Description of Artificial Sequence: Synthetic oligonucleotide
  Target: ATXN2; (+) strand; PAM type: NRG; PAM sequence: AGG
acccaggaggcggagtttgc

SEQ ID NO: 37829 - DNA, 20 bp, Artificial Sequence
  Description of Artificial Sequence: Synthetic oligonucleotide
  Target: ATXN2; (+) strand; PAM type: NRG; PAM sequence: GGG
cccaggaggcggagtttgca

SEQ ID NO: 37830 - DNA, 20 bp, Artificial Sequence
  Description of Artificial Sequence: Synthetic oligonucleotide
  Target: ATXN2; (+) strand; PAM type: NRG; PAM sequence: GAG
caggaggcggagtttgcagg

SEQ ID NO: 37831 - DNA, 20 bp, Artificial Sequence
  Description of Artificial Sequence: Synthetic oligonucleotide
  Target: ATXN2; (+) strand; PAM type: NRG; PAM sequence: GAG
ggcggagtttgcagggagct

SEQ ID NO: 37832 - DNA, 20 bp, Artificial Sequence
  Description of Artificial Sequence: Synthetic oligonucleotide
  Target: ATXN2; (+) strand; PAM type: NRG; PAM sequence: CAG
gagatcgcgccactgcactc

SEQ ID NO: 37833 - DNA, 20 bp, Artificial Sequence
  Description of Artificial Sequence: Synthetic oligonucleotide
  Target: ATXN2; (+) strand; PAM type: NRG; PAM sequence: TGG
cgcgccactgcactccagcc

SEQ ID NO: 37834 - DNA, 20 bp, Artificial Sequence
  Description of Artificial Sequence: Synthetic oligonucleotide
  Target: ATXN2; (+) strand; PAM type: NRG; PAM sequence: GGG
gcgccactgcactccagcct

SEQ ID NO: 37835 - DNA, 20 bp, Artificial Sequence
  Description of Artificial Sequence: Synthetic oligonucleotide
  Target: ATXN2; (+) strand; PAM type: NRG; PAM sequence: TGG
ccactgcactccagcctggg

SEQ ID NO: 37836 - DNA, 20 bp, Artificial Sequence
  Description of Artificial Sequence: Synthetic oligonucleotide
  Target: ATXN2; (+) strand; PAM type: NRG; PAM sequence: CAG
ctgcactccagcctgggtgg

SEQ ID NO: 37837 - DNA, 20 bp, Artificial Sequence
  Description of Artificial Sequence: Synthetic oligonucleotide
  Target: ATXN2; (+) strand; PAM type: NRG; PAM sequence: GAG
gcactccagcctgggtggca

SEQ ID NO: 37838 - DNA, 20 bp, Artificial Sequence
  Description of Artificial Sequence: Synthetic oligonucleotide
  Target: ATXN2; (+) strand; PAM type: NRG; PAM sequence: AGG
cactccagcctgggtggcag

SEQ ID NO: 37839 - DNA, 20 bp, Artificial Sequence
  Description of Artificial Sequence: Synthetic oligonucleotide
  Target: ATXN2; (+) strand; PAM type: NRG; PAM sequence: GGG
actccagcctgggtggcaga

SEQ ID NO: 37840 - DNA, 20 bp, Artificial Sequence
  Description of Artificial Sequence: Synthetic oligonucleotide
  Target: ATXN2; (+) strand; PAM type: NRG; PAM sequence: GAG
tccagcctgggtggcagagg

SEQ ID NO: 37841 - DNA, 20 bp, Artificial Sequence
  Description of Artificial Sequence: Synthetic oligonucleotide
  Target: ATXN2; (+) strand; PAM type: NRG; PAM sequence: AAG
ataaaaaataaaaaaaaaaa

SEQ ID NO: 37842 - DNA, 20 bp, Artificial Sequence
  Description of Artificial Sequence: Synthetic oligonucleotide
  Target: ATXN2; (+) strand; PAM type: NRG; PAM sequence: GAG
aaaaaataaaaaaaaaaaaa

SEQ ID NO: 37843 - DNA, 20 bp, Artificial Sequence
  Description of Artificial Sequence: Synthetic oligonucleotide
  Target: ATXN2; (+) strand; PAM type: NRG; PAM sequence: AGG
aaaaataaaaaaaaaaaaag

SEQ ID NO: 37844 - DNA, 20 bp, Artificial Sequence
  Description of Artificial Sequence: Synthetic oligonucleotide
  Target: ATXN2; (+) strand; PAM type: NRG; PAM sequence: TGG
ataaaaaaaaaaaaagaggc

SEQ ID NO: 37845 - DNA, 20 bp, Artificial Sequence
  Description of Artificial Sequence: Synthetic oligonucleotide
  Target: ATXN2; (+) strand; PAM type: NRG; PAM sequence: GGG
taaaaaaaaaaaaagaggct

SEQ ID NO: 37846 - DNA, 20 bp, Artificial Sequence
  Description of Artificial Sequence: Synthetic oligonucleotide
  Target: ATXN2; (+) strand; PAM type: NRG; PAM sequence: CAG
aaaaaaaaagaggctgggca

SEQ ID NO: 37847 - DNA, 20 bp, Artificial Sequence
  Description of Artificial Sequence: Synthetic oligonucleotide
  Target: ATXN2; (+) strand; PAM type: NRG; PAM sequence: TGG
aaaaaagaggctgggcacag

SEQ ID NO: 37848 - DNA, 20 bp, Artificial Sequence
  Description of Artificial Sequence: Synthetic oligonucleotide
  Target: ATXN2; (+) strand; PAM type: NRG; PAM sequence: CAG
gtggctcacgcctgtaatcc

SEQ ID NO: 37849 - DNA, 20 bp, Artificial Sequence
  Description of Artificial Sequence: Synthetic oligonucleotide
  Target: ATXN2; (+) strand; PAM type: NRG; PAM sequence: TGG
cgcctgtaatcccagcactt

SEQ ID NO: 37850 - DNA, 20 bp, Artificial Sequence
  Description of Artificial Sequence: Synthetic oligonucleotide
  Target: ATXN2; (+) strand; PAM type: NRG; PAM sequence: GGG
gcctgtaatcccagcacttt

SEQ ID NO: 37851 - DNA, 20 bp, Artificial Sequence
  Description of Artificial Sequence: Synthetic oligonucleotide
  Target: ATXN2; (+) strand; PAM type: NRG; PAM sequence: GAG
ctgtaatcccagcactttgg

SEQ ID NO: 37852 - DNA, 20 bp, Artificial Sequence
  Description of Artificial Sequence: Synthetic oligonucleotide
  Target: ATXN2; (+) strand; PAM type: NRG; PAM sequence: AGG
tgtaatcccagcactttggg

SEQ ID NO: 37853 - DNA, 20 bp, Artificial Sequence
  Description of Artificial Sequence: Synthetic oligonucleotide
  Target: ATXN2; (+) strand; PAM type: NRG; PAM sequence: GAG
tcccagcactttgggaggct

SEQ ID NO: 37854 - DNA, 20 bp, Artificial Sequence
  Description of Artificial Sequence: Synthetic oligonucleotide
  Target: ATXN2; (+) strand; PAM type: NRG; PAM sequence: AGG
cccagcactttgggaggctg

SEQ ID NO: 37855 - DNA, 20 bp, Artificial Sequence
  Description of Artificial Sequence: Synthetic oligonucleotide
  Target: ATXN2; (+) strand; PAM type: NRG; PAM sequence: CAG
agcactttgggaggctgagg

SEQ ID NO: 37856 - DNA, 20 bp, Artificial Sequence
  Description of Artificial Sequence: Synthetic oligonucleotide
  Target: ATXN2; (+) strand; PAM type: NRG; PAM sequence: AGG
gcactttgggaggctgaggc

SEQ ID NO: 37857 - DNA, 20 bp, Artificial Sequence
  Description of Artificial Sequence: Synthetic oligonucleotide
  Target: ATXN2; (+) strand; PAM type: NRG; PAM sequence: CGG
ctttgggaggctgaggcagg

SEQ ID NO: 37858 - DNA, 20 bp, Artificial Sequence
  Description of Artificial Sequence: Synthetic oligonucleotide
  Target: ATXN2; (+) strand; PAM type: NRG; PAM sequence: GAG
ggctgaggcaggcggatcac

SEQ ID NO: 37859 - DNA, 20 bp, Artificial Sequence
  Description of Artificial Sequence: Synthetic oligonucleotide
  Target: ATXN2; (+) strand; PAM type: NRG; PAM sequence: AGG
gctgaggcaggcggatcacg

SEQ ID NO: 37860 - DNA, 20 bp, Artificial Sequence
  Description of Artificial Sequence: Synthetic oligonucleotide
  Target: ATXN2; (+) strand; PAM type: NRG; PAM sequence: CAG
aggcaggcggatcacgaggt

SEQ ID NO: 37861 - DNA, 20 bp, Artificial Sequence
  Description of Artificial Sequence: Synthetic oligonucleotide
  Target: ATXN2; (+) strand; PAM type: NRG; PAM sequence: AGG
ggcaggcggatcacgaggtc

SEQ ID NO: 37862 - DNA, 20 bp, Artificial Sequence
  Description of Artificial Sequence: Synthetic oligonucleotide
  Target: ATXN2; (+) strand; PAM type: NRG; PAM sequence: GAG
caggcggatcacgaggtcag

SEQ ID NO: 37863 - DNA, 20 bp, Artificial Sequence
  Description of Artificial Sequence: Synthetic oligonucleotide
  Target: ATXN2; (+) strand; PAM type: NRG; PAM sequence: AAG
gatcacgaggtcaggagatc

SEQ ID NO: 37864 - DNA, 20 bp, Artificial Sequence
  Description of Artificial Sequence: Synthetic oligonucleotide
  Target: ATXN2; (+) strand; PAM type: NRG; PAM sequence: TGG
tcaggagatcaagaccatcc

SEQ ID NO: 37865 - DNA, 20 bp, Artificial Sequence
  Description of Artificial Sequence: Synthetic oligonucleotide
  Target: ATXN2; (+) strand; PAM type: NRG; PAM sequence: CAG
caagaccatcctggctaaca

SEQ ID NO: 37866 - DNA, 20 bp, Artificial Sequence
  Description of Artificial Sequence: Synthetic oligonucleotide
  Target: ATXN2; (+) strand; PAM type: NRG; PAM sequence: TAG
ctaaacaaaatacaaaaaat

SEQ ID NO: 37867 - DNA, 20 bp, Artificial Sequence
  Description of Artificial Sequence: Synthetic oligonucleotide
  Target: ATXN2; (+) strand; PAM type: NRG; PAM sequence: CGG
acaaaatacaaaaaattagc

SEQ ID NO: 37868 - DNA, 20 bp, Artificial Sequence
  Description of Artificial Sequence: Synthetic oligonucleotide
  Target: ATXN2; (+) strand; PAM type: NRG; PAM sequence: GGG
caaaatacaaaaaattagcc

SEQ ID NO: 37869 - DNA, 20 bp, Artificial Sequence
  Description of Artificial Sequence: Synthetic oligonucleotide
  Target: ATXN2; (+) strand; PAM type: NRG; PAM sequence: TGG
tacaaaaaattagccgggca

SEQ ID NO: 37870 - DNA, 20 bp, Artificial Sequence
  Description of Artificial Sequence: Synthetic oligonucleotide
  Target: ATXN2; (+) strand; PAM type: NRG; PAM sequence: TGG
aaaaaattagccgggcatgg

SEQ ID NO: 37871 - DNA, 20 bp, Artificial Sequence
  Description of Artificial Sequence: Synthetic oligonucleotide
  Target: ATXN2; (+) strand; PAM type: NRG; PAM sequence: CGG
aaattagccgggcatggtgg

SEQ ID NO: 37872 - DNA, 20 bp, Artificial Sequence
  Description of Artificial Sequence: Synthetic oligonucleotide
  Target: ATXN2; (+) strand; PAM type: NRG; PAM sequence: GGG
aattagccgggcatggtggc

SEQ ID NO: 37873 - DNA, 20 bp, Artificial Sequence
  Description of Artificial Sequence: Synthetic oligonucleotide
  Target: ATXN2; (+) strand; PAM type: NRG; PAM sequence: TAG
ggcatggtggcgggcgcctg

SEQ ID NO: 37874 - DNA, 20 bp, Artificial Sequence
  Description of Artificial Sequence: Synthetic oligonucleotide
  Target: ATXN2; (+) strand; PAM type: NRG; PAM sequence: TAG
gtggcgggcgcctgtagtcc

SEQ ID NO: 37875 - DNA, 20 bp, Artificial Sequence
  Description of Artificial Sequence: Synthetic oligonucleotide
  Target: ATXN2; (+) strand; PAM type: NRG; PAM sequence: CGG
cgcctgtagtcctagctact

SEQ ID NO: 37876 - DNA, 20 bp, Artificial Sequence
  Description of Artificial Sequence: Synthetic oligonucleotide
  Target: ATXN2; (+) strand; PAM type: NRG; PAM sequence: GGG
gcctgtagtcctagctactc

SEQ ID NO: 37877 - DNA, 20 bp, Artificial Sequence
  Description of Artificial Sequence: Synthetic oligonucleotide
  Target: ATXN2; (+) strand; PAM type: NRG; PAM sequence: GAG
ctgtagtcctagctactcgg

SEQ ID NO: 37878 - DNA, 20 bp, Artificial Sequence
  Description of Artificial Sequence: Synthetic oligonucleotide
  Target: ATXN2; (+) strand; PAM type: NRG; PAM sequence: AGG
tgtagtcctagctactcggg

SEQ ID NO: 37879 - DNA, 20 bp, Artificial Sequence
  Description of Artificial Sequence: Synthetic oligonucleotide
  Target: ATXN2; (+) strand; PAM type: NRG; PAM sequence: GAG
tcctagctactcgggaggct

SEQ ID NO: 37880 - DNA, 20 bp, Artificial Sequence
  Description of Artificial Sequence: Synthetic oligonucleotide
  Target: ATXN2; (+) strand; PAM type: NRG; PAM sequence: AGG
cctagctactcgggaggctg

SEQ ID NO: 37881 - DNA, 20 bp, Artificial Sequence
  Description of Artificial Sequence: Synthetic oligonucleotide
  Target: ATXN2; (+) strand; PAM type: NRG; PAM sequence: TAG
agctactcgggaggctgagg

SEQ ID NO: 37882 - DNA, 20 bp, Artificial Sequence
  Description of Artificial Sequence: Synthetic oligonucleotide
  Target: ATXN2; (+) strand; PAM type: NRG; PAM sequence: AGG
gctactcgggaggctgaggt

SEQ ID NO: 37883 - DNA, 20 bp, Artificial Sequence
  Description of Artificial Sequence: Synthetic oligonucleotide
  Target: ATXN2; (+) strand; PAM type: NRG; PAM sequence: GAG
tactcgggaggctgaggtag

SEQ ID NO: 37884 - DNA, 20 bp, Artificial Sequence
  Description of Artificial Sequence: Synthetic oligonucleotide
  Target: ATXN2; (+) strand; PAM type: NRG; PAM sequence: TGG
gggaggctgaggtaggagaa

SEQ ID NO: 37885 - DNA, 20 bp, Artificial Sequence
  Description of Artificial Sequence: Synthetic oligonucleotide
  Target: ATXN2; (+) strand; PAM type: NRG; PAM sequence: CAG
gtaggagaatggcgtgaacg

SEQ ID NO: 37886 - DNA, 20 bp, Artificial Sequence
  Description of Artificial Sequence: Synthetic oligonucleotide
  Target: ATXN2; (+) strand; PAM type: NRG; PAM sequence: AGG
taggagaatggcgtgaacgc

SEQ ID NO: 37887 - DNA, 20 bp, Artificial Sequence
  Description of Artificial Sequence: Synthetic oligonucleotide
  Target: ATXN2; (+) strand; PAM type: NRG; PAM sequence: GAG
ggagaatggcgtgaacgcag

SEQ ID NO: 37888 - DNA, 20 bp, Artificial Sequence
  Description of Artificial Sequence: Synthetic oligonucleotide
  Target: ATXN2; (+) strand; PAM type: NRG; PAM sequence: AGG
gagaatggcgtgaacgcagg

SEQ ID NO: 37889 - DNA, 20 bp, Artificial Sequence
  Description of Artificial Sequence: Synthetic oligonucleotide
  Target: ATXN2; (+) strand; PAM type: NRG; PAM sequence: CGG
aatggcgtgaacgcaggagg

SEQ ID NO: 37890 - DNA, 20 bp, Artificial Sequence
  Description of Artificial Sequence: Synthetic oligonucleotide
  Target: ATXN2; (+) strand; PAM type: NRG; PAM sequence: GAG
tggcgtgaacgcaggaggcg

SEQ ID NO: 37891 - DNA, 20 bp, Artificial Sequence
  Description of Artificial Sequence: Synthetic oligonucleotide
  Target: ATXN2; (+) strand; PAM type: NRG; PAM sequence: CAG
aacgcaggaggcggagcgtg

SEQ ID NO: 37892 - DNA, 20 bp, Artificial Sequence
  Description of Artificial Sequence: Synthetic oligonucleotide
  Target: ATXN2; (+) strand; PAM type: NRG; PAM sequence: GAG
caggaggcggagcgtgcagt

SEQ ID NO: 37893 - DNA, 20 bp, Artificial Sequence
  Description of Artificial Sequence: Synthetic oligonucleotide
  Target: ATXN2; (+) strand; PAM type: NRG; PAM sequence: GAG
ggcggagcgtgcagtgagct

SEQ ID NO: 37894 - DNA, 20 bp, Artificial Sequence
  Description of Artificial Sequence: Synthetic oligonucleotide
  Target: ATXN2; (+) strand; PAM type: NRG; PAM sequence: CAG
gagatcacgccactgcactc

SEQ ID NO: 37895 - DNA, 20 bp, Artificial Sequence
  Description of Artificial Sequence: Synthetic oligonucleotide
  Target: ATXN2; (+) strand; PAM type: NRG; PAM sequence: TGG
cacgccactgcactccagcc

SEQ ID NO: 37896 - DNA, 20 bp, Artificial Sequence
  Description of Artificial Sequence: Synthetic oligonucleotide
  Target: ATXN2; (+) strand; PAM type: NRG; PAM sequence: GGG
acgccactgcactccagcct

SEQ ID NO: 37897 - DNA, 20 bp, Artificial Sequence
  Description of Artificial Sequence: Synthetic oligonucleotide
  Target: ATXN2; (+) strand; PAM type: NRG; PAM sequence: CAG
ctgcactccagcctgggcga

SEQ ID NO: 37898 - DNA, 20 bp, Artificial Sequence
  Description of Artificial Sequence: Synthetic oligonucleotide
  Target: ATXN2; (+) strand; PAM type: NRG; PAM sequence: AGG
tgcactccagcctgggcgac

SEQ ID NO: 37899 - DNA, 20 bp, Artificial Sequence
  Description of Artificial Sequence: Synthetic oligonucleotide
  Target: ATXN2; (+) strand; PAM type: NRG; PAM sequence: GGG
gcactccagcctgggcgaca

SEQ ID NO: 37900 - DNA, 20 bp, Artificial Sequence
  Description of Artificial Sequence: Synthetic oligonucleotide
  Target: ATXN2; (+) strand; PAM type: NRG; PAM sequence: GAG
actccagcctgggcgacagg

SEQ ID NO: 37901 - DNA, 20 bp, Artificial Sequence
  Description of Artificial Sequence: Synthetic oligonucleotide
  Target: ATXN2; (+) strand; PAM type: NRG; PAM sequence: GAG
tccagcctgggcgacaggga

SEQ ID NO: 37902 - DNA, 20 bp, Artificial Sequence
  Description of Artificial Sequence: Synthetic oligonucleotide
  Target: ATXN2; (+) strand; PAM type: NRG; PAM sequence: AAG
gagagactccatctcaaaaa

SEQ ID NO: 37903 - DNA, 20 bp, Artificial Sequence
  Description of Artificial Sequence: Synthetic oligonucleotide
  Target: ATXN2; (+) strand; PAM type: NRG; PAM sequence: GAG
gagactccatctcaaaaaaa

SEQ ID NO: 37904 - DNA, 20 bp, Artificial Sequence
  Description of Artificial Sequence: Synthetic oligonucleotide
  Target: ATXN2; (+) strand; PAM type: NRG; PAM sequence: AAG
tctcaaaaaaagagacatca

SEQ ID NO: 37905 - DNA, 20 bp, Artificial Sequence
  Description of Artificial Sequence: Synthetic oligonucleotide
  Target: ATXN2; (+) strand; PAM type: NRG; PAM sequence: GAG
tcaaaaaaagagacatcaaa

SEQ ID NO: 37906 - DNA, 20 bp, Artificial Sequence
  Description of Artificial Sequence: Synthetic oligonucleotide
  Target: ATXN2; (+) strand; PAM type: NRG; PAM sequence: AAG
aaaagagacatcaaagagat

SEQ ID NO: 37907 - DNA, 20 bp, Artificial Sequence
  Description of Artificial Sequence: Synthetic oligonucleotide
  Target: ATXN2; (+) strand; PAM type: NRG; PAM sequence: AGG
aaagagacatcaaagagata

SEQ ID NO: 37908 - DNA, 20 bp, Artificial Sequence
  Description of Artificial Sequence: Synthetic oligonucleotide
  Target: ATXN2; (+) strand; PAM type: NRG; PAM sequence: AAG
agagataaggtttttgacaa

SEQ ID NO: 37909 - DNA, 20 bp, Artificial Sequence
  Description of Artificial Sequence: Synthetic oligonucleotide
  Target: ATXN2; (+) strand; PAM type: NRG; PAM sequence: AAG
ttttgacaaaagccctttct

SEQ ID NO: 37910 - DNA, 20 bp, Artificial Sequence
  Description of Artificial Sequence: Synthetic oligonucleotide
  Target: ATXN2; (+) strand; PAM type: NRG; PAM sequence: TAG
gacaaaagccctttctaaga

SEQ ID NO: 37911 - DNA, 20 bp, Artificial Sequence
  Description of Artificial Sequence: Synthetic oligonucleotide
  Target: ATXN2; (+) strand; PAM type: NRG; PAM sequence: TAG
aaagccctttctaagatagc

SEQ ID NO: 37912 - DNA, 20 bp, Artificial Sequence
  Description of Artificial Sequence: Synthetic oligonucleotide
  Target: ATXN2; (+) strand; PAM type: NRG; PAM sequence: AAG
ccctttctaagatagctaga

SEQ ID NO: 37913 - DNA, 20 bp, Artificial Sequence
  Description of Artificial Sequence: Synthetic oligonucleotide
  Target: ATXN2; (+) strand; PAM type: NRG; PAM sequence: GAG
ctttctaagatagctagaaa

SEQ ID NO: 37914 - DNA, 20 bp, Artificial Sequence
  Description of Artificial Sequence: Synthetic oligonucleotide
  Target: ATXN2; (+) strand; PAM type: NRG; PAM sequence: AGG
tttctaagatagctagaaag

SEQ ID NO: 37915 - DNA, 20 bp, Artificial Sequence
  Description of Artificial Sequence: Synthetic oligonucleotide
  Target: ATXN2; (+) strand; PAM type: NRG; PAM sequence: AAG
aagatagctagaaagaggtc

SEQ ID NO: 37916 - DNA, 20 bp, Artificial Sequence
  Description of Artificial Sequence: Synthetic oligonucleotide
  Target: ATXN2; (+) strand; PAM type: NRG; PAM sequence: AGG
agatagctagaaagaggtca

SEQ ID NO: 37917 - DNA, 20 bp, Artificial Sequence
  Description of Artificial Sequence: Synthetic oligonucleotide
  Target: ATXN2; (+) strand; PAM type: NRG; PAM sequence: TAG
ggtcaaggtcaatacttttt

SEQ ID NO: 37918 - DNA, 20 bp, Artificial Sequence
  Description of Artificial Sequence: Synthetic oligonucleotide
  Target: ATXN2; (+) strand; PAM type: NRG; PAM sequence: CAG
tattttatcatttaactgtt

SEQ ID NO: 37919 - DNA, 20 bp, Artificial Sequence
  Description of Artificial Sequence: Synthetic oligonucleotide
  Target: ATXN2; (+) strand; PAM type: NRG; PAM sequence: TAG
atttaactgttcagtaatgt

SEQ ID NO: 37920 - DNA, 20 bp, Artificial Sequence
  Description of Artificial Sequence: Synthetic oligonucleotide
  Target: ATXN2; (+) strand; PAM type: NRG; PAM sequence: CAG
aaaaatttaaaaacaataat

SEQ ID NO: 37921 - DNA, 20 bp, Artificial Sequence
  Description of Artificial Sequence: Synthetic oligonucleotide
  Target: ATXN2; (+) strand; PAM type: NRG; PAM sequence: AGG
aaaatttaaaaacaataatc

SEQ ID NO: 37922 - DNA, 20 bp, Artificial Sequence
  Description of Artificial Sequence: Synthetic oligonucleotide
  Target: ATXN2; (+) strand; PAM type: NRG; PAM sequence: CAG
ataatcaggatttcattttg

SEQ ID NO: 37923 - DNA, 20 bp, Artificial Sequence
  Description of Artificial Sequence: Synthetic oligonucleotide
  Target: ATXN2; (+) strand; PAM type: NRG; PAM sequence: TAG
ggatttcattttgcagtcat

SEQ ID NO: 37924 - DNA, 20 bp, Artificial Sequence
  Description of Artificial Sequence: Synthetic oligonucleotide
  Target: ATXN2; (+) strand; PAM type: NRG; PAM sequence: TGG
tttcattttgcagtcattag

SEQ ID NO: 37925 - DNA, 20 bp, Artificial Sequence
  Description of Artificial Sequence: Synthetic oligonucleotide
  Target: ATXN2; (+) strand; PAM type: NRG; PAM sequence: TGG
tcctatgttttcaatgcctt

SEQ ID NO: 37926 - DNA, 20 bp, Artificial Sequence
  Description of Artificial Sequence: Synthetic oligonucleotide
  Target: ATXN2; (+) strand; PAM type: NRG; PAM sequence: TGG
gttttcaatgcctttggcta

SEQ ID NO: 37927 - DNA, 20 bp, Artificial Sequence
  Description of Artificial Sequence: Synthetic oligonucleotide
  Target: ATXN2; (+) strand; PAM type: NRG; PAM sequence: GAG
ggctataacaattaatgaat

SEQ ID NO: 37928 - DNA, 20 bp, Artificial Sequence
  Description of Artificial Sequence: Synthetic oligonucleotide
  Target: ATXN2; (+) strand; PAM type: NRG; PAM sequence: AAG
taacaattaatgaatgagaa

SEQ ID NO: 37929 - DNA, 20 bp, Artificial Sequence
  Description of Artificial Sequence: Synthetic oligonucleotide
  Target: ATXN2; (+) strand; PAM type: NRG; PAM sequence: AGG
aacaattaatgaatgagaaa

SEQ ID NO: 37930 - DNA, 20 bp, Artificial Sequence
  Description of Artificial Sequence: Synthetic oligonucleotide
  Target: ATXN2; (+) strand; PAM type: NRG; PAM sequence: TGG
ataaaattgtcaccaacatc

SEQ ID NO: 37931 - DNA, 20 bp, Artificial Sequence
  Description of Artificial Sequence: Synthetic oligonucleotide
  Target: ATXN2; (+) strand; PAM type: NRG; PAM sequence: GGG
taaaattgtcaccaacatct

SEQ ID NO: 37932 - DNA, 20 bp, Artificial Sequence
  Description of Artificial Sequence: Synthetic oligonucleotide
  Target: ATXN2; (+) strand; PAM type: NRG; PAM sequence: TAG
cattaaatgttttaaaaacc

SEQ ID NO: 37933 - DNA, 20 bp, Artificial Sequence
  Description of Artificial Sequence: Synthetic oligonucleotide
  Target: ATXN2; (+) strand; PAM type: NRG; PAM sequence: TAG
ttaaaaacctagatatgatg

SEQ ID NO: 37934 - DNA, 20 bp, Artificial Sequence
  Description of Artificial Sequence: Synthetic oligonucleotide
  Target: ATXN2; (+) strand; PAM type: NRG; PAM sequence: AAG
tagatatgatgtagcttaaa

SEQ ID NO: 37935 - DNA, 20 bp, Artificial Sequence
  Description of Artificial Sequence: Synthetic oligonucleotide
  Target: ATXN2; (+) strand; PAM type: NRG; PAM sequence: AAG
atgatgtagcttaaaaagaa

SEQ ID NO: 37936 - DNA, 20 bp, Artificial Sequence
  Description of Artificial Sequence: Synthetic oligonucleotide
  Target: ATXN2; (+) strand; PAM type: NRG; PAM sequence: AAG
aaaagcacaattcatactca

SEQ ID NO: 37937 - DNA, 20 bp, Artificial Sequence
  Description of Artificial Sequence: Synthetic oligonucleotide
  Target: ATXN2; (+) strand; PAM type: NRG; PAM sequence: TGG
caattcatactcaaagtatt

SEQ ID NO: 37938 - DNA, 20 bp, Artificial Sequence
  Description of Artificial Sequence: Synthetic oligonucleotide
  Target: ATXN2; (+) strand; PAM type: NRG; PAM sequence: GAG
tcaaagtatttggttccttt

SEQ ID NO: 37939 - DNA, 20 bp, Artificial Sequence
  Description of Artificial Sequence: Synthetic oligonucleotide
  Target: ATXN2; (+) strand; PAM type: NRG; PAM sequence: CAG
tttataaaatataaattgtt

SEQ ID NO: 37940 - DNA, 20 bp, Artificial Sequence
  Description of Artificial Sequence: Synthetic oligonucleotide
  Target: ATXN2; (+) strand; PAM type: NRG; PAM sequence: AGG
ttataaaatataaattgttc

SEQ ID NO: 37941 - DNA, 20 bp, Artificial Sequence
  Description of Artificial Sequence: Synthetic oligonucleotide
  Target: ATXN2; (+) strand; PAM type: NRG; PAM sequence: GGG
tataaaatataaattgttca

SEQ ID NO: 37942 - DNA, 20 bp, Artificial Sequence
  Description of Artificial Sequence: Synthetic oligonucleotide
  Target: ATXN2; (+) strand; PAM type: NRG; PAM sequence: AAG
aaaatataaattgttcaggg

SEQ ID NO: 37943 - DNA, 20 bp, Artificial Sequence
  Description of Artificial Sequence: Synthetic oligonucleotide
  Target: ATXN2; (+) strand; PAM type: NRG; PAM sequence: GAG
ataaattgttcagggaagat

SEQ ID NO: 37944 - DNA, 20 bp, Artificial Sequence
  Description of Artificial Sequence: Synthetic oligonucleotide
  Target: ATXN2; (+) strand; PAM type: NRG; PAM sequence: AAG
taaaattaacacttctatgt

SEQ ID NO: 37945 - DNA, 20 bp, Artificial Sequence
  Description of Artificial Sequence: Synthetic oligonucleotide
  Target: ATXN2; (+) strand; PAM type: NRG; PAM sequence: TAG
acttctatgtaagtttgttg

SEQ ID NO: 37946 - DNA, 20 bp, Artificial Sequence
  Description of Artificial Sequence: Synthetic oligonucleotide
  Target: ATXN2; (+) strand; PAM type: NRG; PAM sequence: AAG
gtaagtttgttgtagtttat

SEQ ID NO: 37947 - DNA, 20 bp, Artificial Sequence
  Description of Artificial Sequence: Synthetic oligonucleotide
  Target: ATXN2; (+) strand; PAM type: NRG; PAM sequence: AAG
ttgtttatatttgatataat

SEQ ID NO: 37948 - DNA, 20 bp, Artificial Sequence
  Description of Artificial Sequence: Synthetic oligonucleotide
  Target: ATXN2; (+) strand; PAM type: NRG; PAM sequence: AGG
tgtttatatttgatataata

SEQ ID NO: 37949 - DNA, 20 bp, Artificial Sequence
  Description of Artificial Sequence: Synthetic oligonucleotide
  Target: ATXN2; (+) strand; PAM type: NRG; PAM sequence: AAG
ttgatataataaggctttga

SEQ ID NO: 37950 - DNA, 20 bp, Artificial Sequence
  Description of Artificial Sequence: Synthetic oligonucleotide
  Target: ATXN2; (+) strand; PAM type: NRG; PAM sequence: CAG
ataattcaaataaatcactg

SEQ ID NO: 37951 - DNA, 20 bp, Artificial Sequence
  Description of Artificial Sequence: Synthetic oligonucleotide
  Target: ATXN2; (+) strand; PAM type: NRG; PAM sequence: AAG
aaatcactgcagatttaatg

SEQ ID NO: 37952 - DNA, 20 bp, Artificial Sequence
  Description of Artificial Sequence: Synthetic oligonucleotide
  Target: ATXN2; (+) strand; PAM type: NRG; PAM sequence: AAG
atttaatgaagaacatgctt

SEQ ID NO: 37953 - DNA, 20 bp, Artificial Sequence
  Description of Artificial Sequence: Synthetic oligonucleotide
  Target: ATXN2; (+) strand; PAM type: NRG; PAM sequence: CAG
taatgaagaacatgcttaag

SEQ ID NO: 37954 - DNA, 20 bp, Artificial Sequence
  Description of Artificial Sequence: Synthetic oligonucleotide
  Target: ATXN2; (+) strand; PAM type: NRG; PAM sequence: TGG
tgcttaagcagattaaatta

SEQ ID NO: 37955 - DNA, 20 bp, Artificial Sequence
  Description of Artificial Sequence: Synthetic oligonucleotide
  Target: ATXN2; (+) strand; PAM type: NRG; PAM sequence: TGG
gattaaattatggcttatga

SEQ ID NO: 37956 - DNA, 20 bp, Artificial Sequence
  Description of Artificial Sequence: Synthetic oligonucleotide
  Target: ATXN2; (+) strand; PAM type: NRG; PAM sequence: TAG
aattatggcttatgatggca

SEQ ID NO: 37957 - DNA, 20 bp, Artificial Sequence
  Description of Artificial Sequence: Synthetic oligonucleotide
  Target: ATXN2; (+) strand; PAM type: NRG; PAM sequence: TAG
tatgttttcttttttttaaa

SEQ ID NO: 37958 - DNA, 20 bp, Artificial Sequence
  Description of Artificial Sequence: Synthetic oligonucleotide
  Target: ATXN2; (+) strand; PAM type: NRG; PAM sequence: GAG
tgttttcttttttttaaata

SEQ ID NO: 37959 - DNA, 20 bp, Artificial Sequence
  Description of Artificial Sequence: Synthetic oligonucleotide
  Target: ATXN2; (+) strand; PAM type: NRG; PAM sequence: CAG
ttcttttttttaaatagaga

SEQ ID NO: 37960 - DNA, 20 bp, Artificial Sequence
  Description of Artificial Sequence: Synthetic oligonucleotide
  Target: ATXN2; (+) strand; PAM type: NRG; PAM sequence: AGG
tcttttttttaaatagagac

SEQ ID NO: 37961 - DNA, 20 bp, Artificial Sequence
  Description of Artificial Sequence: Synthetic oligonucleotide
  Target: ATXN2; (+) strand; PAM type: NRG; PAM sequence: GGG
cttttttttaaatagagaca

SEQ ID NO: 37962 - DNA, 20 bp, Artificial Sequence
  Description of Artificial Sequence: Synthetic oligonucleotide
  Target: ATXN2; (+) strand; PAM type: NRG; PAM sequence: CAG
cagggtcttgctctgtcacc

SEQ ID NO: 37963 - DNA, 20 bp, Artificial Sequence
  Description of Artificial Sequence: Synthetic oligonucleotide
  Target: ATXN2; (+) strand; PAM type: NRG; PAM sequence: AGG
agggtcttgctctgtcaccc

SEQ ID NO: 37964 - DNA, 20 bp, Artificial Sequence
  Description of Artificial Sequence: Synthetic oligonucleotide
  Target: ATXN2; (+) strand; PAM type: NRG; PAM sequence: TGG
tcttgctctgtcacccaggc

SEQ ID NO: 37965 - DNA, 20 bp, Artificial Sequence
  Description of Artificial Sequence: Synthetic oligonucleotide
  Target: ATXN2; (+) strand; PAM type: NRG; PAM sequence: CAG
ctgtcacccaggctggatta

SEQ ID NO: 37966 - DNA, 20 bp, Artificial Sequence
  Description of Artificial Sequence: Synthetic oligonucleotide
  Target: ATXN2; (+) strand; PAM type: NRG; PAM sequence: TGG
tcacccaggctggattacag

SEQ ID NO: 37967 - DNA, 20 bp, Artificial Sequence
  Description of Artificial Sequence: Synthetic oligonucleotide
  Target: ATXN2; (+) strand; PAM type: NRG; PAM sequence: TAG
ggattacagtggtgccatga

SEQ ID NO: 37968 - DNA, 20 bp, Artificial Sequence
  Description of Artificial Sequence: Synthetic oligonucleotide
  Target: ATXN2; (+) strand; PAM type: NRG; PAM sequence: TAG
ggtgccatgatagctcactg

SEQ ID NO: 37969 - DNA, 20 bp, Artificial Sequence
  Description of Artificial Sequence: Synthetic oligonucleotide
  Target: ATXN2; (+) strand; PAM type: NRG; PAM sequence: AAG
gatagctcactgtagcctca

SEQ ID NO: 37970 - DNA, 20 bp, Artificial Sequence
  Description of Artificial Sequence: Synthetic oligonucleotide
  Target: ATXN2; (+) strand; PAM type: NRG; PAM sequence: TGG
tcactgtagcctcaaagtcc

SEQ ID NO: 37971 - DNA, 20 bp, Artificial Sequence
  Description of Artificial Sequence: Synthetic oligonucleotide
  Target: ATXN2; (+) strand; PAM type: NRG; PAM sequence: AAG
agcctcaaagtcctggactc

SEQ ID NO: 37972 - DNA, 20 bp, Artificial Sequence
  Description of Artificial Sequence: Synthetic oligonucleotide
  Target: ATXN2; (+) strand; PAM type: NRG; PAM sequence: CAG
ctcaagtgatcctcccatct

SEQ ID NO: 37973 - DNA, 20 bp, Artificial Sequence
  Description of Artificial Sequence: Synthetic oligonucleotide
  Target: ATXN2; (+) strand; PAM type: NRG; PAM sequence: TAG
tcccatctcagcttcctgtg

SEQ ID NO: 37974 - DNA, 20 bp, Artificial Sequence
  Description of Artificial Sequence: Synthetic oligonucleotide
  Target: ATXN2; (+) strand; PAM type: NRG; PAM sequence: AGG
cccatctcagcttcctgtgt

SEQ ID NO: 37975 - DNA, 20 bp, Artificial Sequence
  Description of Artificial Sequence: Synthetic oligonucleotide
  Target: ATXN2; (+) strand; PAM type: NRG; PAM sequence: TGG
atctcagcttcctgtgtagg

SEQ ID NO: 37976 - DNA, 20 bp, Artificial Sequence
  Description of Artificial Sequence: Synthetic oligonucleotide
  Target: ATXN2; (+) strand; PAM type: NRG; PAM sequence: GGG
tctcagcttcctgtgtaggt

SEQ ID NO: 37977 - DNA, 20 bp, Artificial Sequence
  Description of Artificial Sequence: Synthetic oligonucleotide
  Target: ATXN2; (+) strand; PAM type: NRG; PAM sequence: CAG
ttcctgtgtaggtgggacta

SEQ ID NO: 37978 - DNA, 20 bp, Artificial Sequence
  Description of Artificial Sequence: Synthetic oligonucleotide
  Target: ATXN2; (+) strand; PAM type: NRG; PAM sequence: AGG
tcctgtgtaggtgggactac

SEQ ID NO: 37979 - DNA, 20 bp, Artificial Sequence
  Description of Artificial Sequence: Synthetic oligonucleotide
  Target: ATXN2; (+) strand; PAM type: NRG; PAM sequence: TGG
caggcatgtgccaccatgac

SEQ ID NO: 37980 - DNA, 20 bp, Artificial Sequence
  Description of Artificial Sequence: Synthetic oligonucleotide
  Target: ATXN2; (+) strand; PAM type: NRG; PAM sequence: GGG
aggcatgtgccaccatgact

SEQ ID NO: 37981 - DNA, 20 bp, Artificial Sequence
  Description of Artificial Sequence: Synthetic oligonucleotide
  Target: ATXN2; (+) strand; PAM type: NRG; PAM sequence: TGG
tttttttttttttttttttt

SEQ ID NO: 37982 - DNA, 20 bp, Artificial Sequence
  Description of Artificial Sequence: Synthetic oligonucleotide
  Target: ATXN2; (+) strand; PAM type: NRG; PAM sequence: TAG
ttttttttttttttttttgg

SEQ ID NO: 37983 - DNA, 20 bp, Artificial Sequence
  Description of Artificial Sequence: Synthetic oligonucleotide
  Target: ATXN2; (+) strand; PAM type: NRG; PAM sequence: GAG
ttttttttttttttttggta

SEQ ID NO: 37984 - DNA, 20 bp, Artificial Sequence
  Description of Artificial Sequence: Synthetic oligonucleotide
  Target: ATXN2; (+) strand; PAM type: NRG; PAM sequence: TGG
ttttttttttttggtagaga

SEQ ID NO: 37985 - DNA, 20 bp, Artificial Sequence
  Description of Artificial Sequence: Synthetic oligonucleotide
  Target: ATXN2; (+) strand; PAM type: NRG; PAM sequence: GGG
tttttttttttggtagagat

SEQ ID NO: 37986 - DNA, 20 bp, Artificial Sequence
  Description of Artificial Sequence: Synthetic oligonucleotide
  Target: ATXN2; (+) strand; PAM type: NRG; PAM sequence: TAG
tgggatctcgccatcttgcc

SEQ ID NO: 37987 - DNA, 20 bp, Artificial Sequence
  Description of Artificial Sequence: Synthetic oligonucleotide
  Target: ATXN2; (+) strand; PAM type: NRG; PAM sequence: TGG
tctcgccatcttgcctagac

SEQ ID NO: 37988 - DNA, 20 bp, Artificial Sequence
  Description of Artificial Sequence: Synthetic oligonucleotide
  Target: ATXN2; (+) strand; PAM type: NRG; PAM sequence: TGG
ctagactggtcttgaacacc

SEQ ID NO: 37989 - DNA, 20 bp, Artificial Sequence
  Description of Artificial Sequence: Synthetic oligonucleotide
  Target: ATXN2; (+) strand; PAM type: NRG; PAM sequence: GGG
tagactggtcttgaacacct

SEQ ID NO: 37990 - DNA, 20 bp, Artificial Sequence
  Description of Artificial Sequence: Synthetic oligonucleotide
  Target: ATXN2; (+) strand; PAM type: NRG; PAM sequence: AAG
tggtcttgaacacctgggct

SEQ ID NO: 37991 - DNA, 20 bp, Artificial Sequence
  Description of Artificial Sequence: Synthetic oligonucleotide
  Target: ATXN2; (+) strand; PAM type: NRG; PAM sequence: CAG
ggctaagcgatcctccactt

SEQ ID NO: 37992 - DNA, 20 bp, Artificial Sequence
  Description of Artificial Sequence: Synthetic oligonucleotide
  Target: ATXN2; (+) strand; PAM type: NRG; PAM sequence: AAG
tcctccacttcagcctcccc

SEQ ID NO: 37993 - DNA, 20 bp, Artificial Sequence
  Description of Artificial Sequence: Synthetic oligonucleotide
  Target: ATXN2; (+) strand; PAM type: NRG; PAM sequence: TGG
cttcagcctccccaagttct

SEQ ID NO: 37994 - DNA, 20 bp, Artificial Sequence
  Description of Artificial Sequence: Synthetic oligonucleotide
  Target: ATXN2; (+) strand; PAM type: NRG; PAM sequence: CAG
ctccccaagttcttggatta

SEQ ID NO: 37995 - DNA, 20 bp, Artificial Sequence
  Description of Artificial Sequence: Synthetic oligonucleotide
  Target: ATXN2; (+) strand; PAM type: NRG; PAM sequence: AGG
tccccaagttcttggattac

SEQ ID NO: 37996 - DNA, 20 bp, Artificial Sequence
  Description of Artificial Sequence: Synthetic oligonucleotide
  Target: ATXN2; (+) strand; PAM type: NRG; PAM sequence: CAG
agttcttggattacaggtgt

SEQ ID NO: 37997 - DNA, 20 bp, Artificial Sequence
  Description of Artificial Sequence: Synthetic oligonucleotide
  Target: ATXN2; (+) strand; PAM type: NRG; PAM sequence: CAG
caggtgtcagccaccatgcc

SEQ ID NO: 37998 - DNA, 20 bp, Artificial Sequence
  Description of Artificial Sequence: Synthetic oligonucleotide
  Target: ATXN2; (+) strand; PAM type: NRG; PAM sequence: TAG
cagccaccatgcccagctcc

SEQ ID NO: 37999 - DNA, 20 bp, Artificial Sequence
  Description of Artificial Sequence: Synthetic oligonucleotide
  Target: ATXN2; (+) strand; PAM type: NRG; PAM sequence: TAG
ccagctcctagtgtcctttt

SEQ ID NO: 38000 - DNA, 20 bp, Artificial Sequence
  Description of Artificial Sequence: Synthetic oligonucleotide
  Target: ATXN2; (+) strand; PAM type: NRG; PAM sequence: AGG
cagctcctagtgtccttttt

SEQ ID NO: 38001 - DNA, 20 bp, Artificial Sequence
  Description of Artificial Sequence: Synthetic oligonucleotide
  Target: ATXN2; (+) strand; PAM type: NRG; PAM sequence: GGG
agctcctagtgtccttttta

SEQ ID NO: 38002 - DNA, 20 bp, Artificial Sequence
  Description of Artificial Sequence: Synthetic oligonucleotide
  Target: ATXN2; (+) strand; PAM type: NRG; PAM sequence: AAG
agtgtcctttttagggtctt

SEQ ID NO: 38003 - DNA, 20 bp, Artificial Sequence
  Description of Artificial Sequence: Synthetic oligonucleotide
  Target: ATXN2; (+) strand; PAM type: NRG; PAM sequence: AAG
ttagggtcttaagcaccaca

SEQ ID NO: 38004 - DNA, 20 bp, Artificial Sequence
  Description of Artificial Sequence: Synthetic oligonucleotide
  Target: ATXN2; (+) strand; PAM type: NRG; PAM sequence: AGG
tagggtcttaagcaccacaa

SEQ ID NO: 38005 - DNA, 20 bp, Artificial Sequence
  Description of Artificial Sequence: Synthetic oligonucleotide
  Target: ATXN2; (+) strand; PAM type: NRG; PAM sequence: GGG
agggtcttaagcaccacaaa

SEQ ID NO: 38006 - DNA, 20 bp, Artificial Sequence
  Description of Artificial Sequence: Synthetic oligonucleotide
  Target: ATXN2; (+) strand; PAM type: NRG; PAM sequence: TAG
caaagggaatcttgattaac

SEQ ID NO: 38007 - DNA, 20 bp, Artificial Sequence
  Description of Artificial Sequence: Synthetic oligonucleotide
  Target: ATXN2; (+) strand; PAM type: NRG; PAM sequence: AAG
taactagtgacaatcacaac

SEQ ID NO: 38008 - DNA, 20 bp, Artificial Sequence
  Description of Artificial Sequence: Synthetic oligonucleotide
  Target: ATXN2; (+) strand; PAM type: NRG; PAM sequence: CAG
tgacaatcacaacaagtcca

SEQ ID NO: 38009 - DNA, 20 bp, Artificial Sequence
  Description of Artificial Sequence: Synthetic oligonucleotide
  Target: ATXN2; (+) strand; PAM type: NRG; PAM sequence: TAG
caagtccacagccttgctcc

SEQ ID NO: 38010 - DNA, 20 bp, Artificial Sequence
  Description of Artificial Sequence: Synthetic oligonucleotide
  Target: ATXN2; (+) strand; PAM type: NRG; PAM sequence: CAG
gctcctagcctgcctccata

SEQ ID NO: 38011 - DNA, 20 bp, Artificial Sequence
  Description of Artificial Sequence: Synthetic oligonucleotide
  Target: ATXN2; (+) strand; PAM type: NRG; PAM sequence: CAG
ctagcctgcctccatacaga

SEQ ID NO: 38012 - DNA, 20 bp, Artificial Sequence
  Description of Artificial Sequence: Synthetic oligonucleotide
  Target: ATXN2; (+) strand; PAM type: NRG; PAM sequence: CAG
aataccacctgtgtaaactg

SEQ ID NO: 38013 - DNA, 20 bp, Artificial Sequence
  Description of Artificial Sequence: Synthetic oligonucleotide
  Target: ATXN2; (+) strand; PAM type: NRG; PAM sequence: AGG
ataccacctgtgtaaactgc

SEQ ID NO: 38014 - DNA, 20 bp, Artificial Sequence
  Description of Artificial Sequence: Synthetic oligonucleotide
  Target: ATXN2; (+) strand; PAM type: NRG; PAM sequence: GAG
accacctgtgtaaactgcag

SEQ ID NO: 38015 - DNA, 20 bp, Artificial Sequence
  Description of Artificial Sequence: Synthetic oligonucleotide
  Target: ATXN2; (+) strand; PAM type: NRG; PAM sequence: GAG
cacctgtgtaaactgcagga

SEQ ID NO: 38016 - DNA, 20 bp, Artificial Sequence
  Description of Artificial Sequence: Synthetic oligonucleotide
  Target: ATXN2; (+) strand; PAM type: NRG; PAM sequence: TAG
ctgtgtaaactgcaggagag

SEQ ID NO: 38017 - DNA, 20 bp, Artificial Sequence
  Description of Artificial Sequence: Synthetic oligonucleotide
  Target: ATXN2; (+) strand; PAM type: NRG; PAM sequence: CAG
taaactgcaggagagtagtt

SEQ ID NO: 38018 - DNA, 20 bp, Artificial Sequence
  Description of Artificial Sequence: Synthetic oligonucleotide
  Target: ATXN2; (+) strand; PAM type: NRG; PAM sequence: TGG
gcaggagagtagttcagatt

SEQ ID NO: 38019 - DNA, 20 bp, Artificial Sequence
  Description of Artificial Sequence: Synthetic oligonucleotide
  Target: ATXN2; (+) strand; PAM type: NRG; PAM sequence: GAG
agagtagttcagatttggct

SEQ ID NO: 38020 - DNA, 20 bp, Artificial Sequence
  Description of Artificial Sequence: Synthetic oligonucleotide
  Target: ATXN2; (+) strand; PAM type: NRG; PAM sequence: TGG
ttggctgagtaactttttcc

SEQ ID NO: 38021 - DNA, 20 bp, Artificial Sequence
  Description of Artificial Sequence: Synthetic oligonucleotide
  Target: ATXN2; (+) strand; PAM type: NRG; PAM sequence: AAG
gtaactttttcctggcatga

SEQ ID NO: 38022 - DNA, 20 bp, Artificial Sequence
  Description of Artificial Sequence: Synthetic oligonucleotide
  Target: ATXN2; (+) strand; PAM type: NRG; PAM sequence: CGG
ttttcctggcatgaaagaac

SEQ ID NO: 38023 - DNA, 20 bp, Artificial Sequence
  Description of Artificial Sequence: Synthetic oligonucleotide
  Target: ATXN2; (+) strand; PAM type: NRG; PAM sequence: TAG
aaagaaccggctctaatgac

SEQ ID NO: 38024 - DNA, 20 bp, Artificial Sequence
  Description of Artificial Sequence: Synthetic oligonucleotide
  Target: ATXN2; (+) strand; PAM type: NRG; PAM sequence: CAG
ctctaatgactagttcattc

SEQ ID NO: 38025 - DNA, 20 bp, Artificial Sequence
  Description of Artificial Sequence: Synthetic oligonucleotide
  Target: ATXN2; (+) strand; PAM type: NRG; PAM sequence: TGG
tagttcattccagatttcac

SEQ ID NO: 38026 - DNA, 20 bp, Artificial Sequence
  Description of Artificial Sequence: Synthetic oligonucleotide
  Target: ATXN2; (+) strand; PAM type: NRG; PAM sequence: TAG
ttccagatttcactggacat

SEQ ID NO: 38027 - DNA, 20 bp, Artificial Sequence
  Description of Artificial Sequence: Synthetic oligonucleotide
  Target: ATXN2; (+) strand; PAM type: NRG; PAM sequence: TAG
atttcactggacattagatc

SEQ ID NO: 38028 - DNA, 20 bp, Artificial Sequence
  Description of Artificial Sequence: Synthetic oligonucleotide
  Target: ATXN2; (+) strand; PAM type: NRG; PAM sequence: TGG
cctatttgcccacacataaa

SEQ ID NO: 38029 - DNA, 20 bp, Artificial Sequence
  Description of Artificial Sequence: Synthetic oligonucleotide
  Target: ATXN2; (+) strand; PAM type: NRG; PAM sequence: TGG
gcccacacataaatggactt

SEQ ID NO: 38030 - DNA, 20 bp, Artificial Sequence
  Description of Artificial Sequence: Synthetic oligonucleotide
  Target: ATXN2; (+) strand; PAM type: NRG; PAM sequence: GGG
cccacacataaatggacttt

SEQ ID NO: 38031 - DNA, 20 bp, Artificial Sequence
  Description of Artificial Sequence: Synthetic oligonucleotide
  Target: ATXN2; (+) strand; PAM type: NRG; PAM sequence: GGG
ccacacataaatggactttg

SEQ ID NO: 38032 - DNA, 20 bp, Artificial Sequence
  Description of Artificial Sequence: Synthetic oligonucleotide
  Target: ATXN2; (+) strand; PAM type: NRG; PAM sequence: AAG
ataaatggactttggggtct

SEQ ID NO: 38033 - DNA, 20 bp, Artificial Sequence
  Description of Artificial Sequence: Synthetic oligonucleotide
  Target: ATXN2; (+) strand; PAM type: NRG; PAM sequence: AGG
taaatggactttggggtcta

SEQ ID NO: 38034 - DNA, 20 bp, Artificial Sequence
  Description of Artificial Sequence: Synthetic oligonucleotide
  Target: ATXN2; (+) strand; PAM type: NRG; PAM sequence: TGG
aggccccactgctcttcaaa

SEQ ID NO: 38035 - DNA, 20 bp, Artificial Sequence
  Description of Artificial Sequence: Synthetic oligonucleotide
  Target: ATXN2; (+) strand; PAM type: NRG; PAM sequence: TAG
ctcttcaaatggacatgttc

SEQ ID NO: 38036 - DNA, 20 bp, Artificial Sequence
  Description of Artificial Sequence: Synthetic oligonucleotide
  Target: ATXN2; (+) strand; PAM type: NRG; PAM sequence: AGG
tcttcaaatggacatgttct

SEQ ID NO: 38037 - DNA, 20 bp, Artificial Sequence
  Description of Artificial Sequence: Synthetic oligonucleotide
  Target: ATXN2; (+) strand; PAM type: NRG; PAM sequence: AAG
tcaaatggacatgttctagg

SEQ ID NO: 38038 - DNA, 20 bp, Artificial Sequence
  Description of Artificial Sequence: Synthetic oligonucleotide
  Target: ATXN2; (+) strand; PAM type: NRG; PAM sequence: TAG
aatggacatgttctaggaag

SEQ ID NO: 38039 - DNA, 20 bp, Artificial Sequence
  Description of Artificial Sequence: Synthetic oligonucleotide
  Target: ATXN2; (+) strand; PAM type: NRG; PAM sequence: CAG
aatcatctgtacctcaaaca

SEQ ID NO: 38040 - DNA, 20 bp, Artificial Sequence
  Description of Artificial Sequence: Synthetic oligonucleotide
  Target: ATXN2; (+) strand; PAM type: NRG; PAM sequence: TAG
caaacacagtatttacccta

SEQ ID NO: 38041 - DNA, 20 bp, Artificial Sequence
  Description of Artificial Sequence: Synthetic oligonucleotide
  Target: ATXN2; (+) strand; PAM type: NRG; PAM sequence: AGG
aaacacagtatttaccctat

SEQ ID NO: 38042 - DNA, 20 bp, Artificial Sequence
  Description of Artificial Sequence: Synthetic oligonucleotide
  Target: ATXN2; (+) strand; PAM type: NRG; PAM sequence: AAG
accaatgaacattcatccaa

SEQ ID NO: 38043 - DNA, 20 bp, Artificial Sequence
  Description of Artificial Sequence: Synthetic oligonucleotide
  Target: ATXN2; (+) strand; PAM type: NRG; PAM sequence: AAG
gaacattcatccaaaagatg

SEQ ID NO: 38044 - DNA, 20 bp, Artificial Sequence
  Description of Artificial Sequence: Synthetic oligonucleotide
  Target: ATXN2; (+) strand; PAM type: NRG; PAM sequence: CAG
attcatccaaaagatgaagc

SEQ ID NO: 38045 - DNA, 20 bp, Artificial Sequence
  Description of Artificial Sequence: Synthetic oligonucleotide
  Target: ATXN2; (+) strand; PAM type: NRG; PAM sequence: TGG
caaaagatgaagccagatgt

SEQ ID NO: 38046 - DNA, 20 bp, Artificial Sequence
  Description of Artificial Sequence: Synthetic oligonucleotide
  Target: ATXN2; (+) strand; PAM type: NRG; PAM sequence: CAG
aagatgaagccagatgttgg

SEQ ID NO: 38047 - DNA, 20 bp, Artificial Sequence
  Description of Artificial Sequence: Synthetic oligonucleotide
  Target: ATXN2; (+) strand; PAM type: NRG; PAM sequence: GAG
tggcagtgaatgaacacaat

SEQ ID NO: 38048 - DNA, 20 bp, Artificial Sequence
  Description of Artificial Sequence: Synthetic oligonucleotide
  Target: ATXN2; (+) strand; PAM type: NRG; PAM sequence: AGG
ggcagtgaatgaacacaatg

SEQ ID NO: 38049 - DNA, 20 bp, Artificial Sequence
  Description of Artificial Sequence: Synthetic oligonucleotide
  Target: ATXN2; (+) strand; PAM type: NRG; PAM sequence: GAG
cagtgaatgaacacaatgag

SEQ ID NO: 38050 - DNA, 20 bp, Artificial Sequence
  Description of Artificial Sequence: Synthetic oligonucleotide
  Target: ATXN2; (+) strand; PAM type: NRG; PAM sequence: AAG
gaatgaacacaatgaggaga

SEQ ID NO: 38051 - DNA, 20 bp, Artificial Sequence
  Description of Artificial Sequence: Synthetic oligonucleotide
  Target: ATXN2; (+) strand; PAM type: NRG; PAM sequence: CGG
acacaatgaggagaaagatt

SEQ ID NO: 38052 - DNA, 20 bp, Artificial Sequence
  Description of Artificial Sequence: Synthetic oligonucleotide
  Target: ATXN2; (+) strand; PAM type: NRG; PAM sequence: CAG
aaagattcggctcaacatta

SEQ ID NO: 38053 - DNA, 20 bp, Artificial Sequence
  Description of Artificial Sequence: Synthetic oligonucleotide
  Target: ATXN2; (+) strand; PAM type: NRG; PAM sequence: AAG
ttattgctacaatgtctcaa

SEQ ID NO: 38054 - DNA, 20 bp, Artificial Sequence
  Description of Artificial Sequence: Synthetic oligonucleotide
  Target: ATXN2; (+) strand; PAM type: NRG; PAM sequence: TGG
taactactctccaaatgcaa

SEQ ID NO: 38055 - DNA, 20 bp, Artificial Sequence
  Description of Artificial Sequence: Synthetic oligonucleotide
  Target: ATXN2; (+) strand; PAM type: NRG; PAM sequence: TAG
tccaaatgcaatggaaattt

SEQ ID NO: 38056 - DNA, 20 bp, Artificial Sequence
  Description of Artificial Sequence: Synthetic oligonucleotide
  Target: ATXN2; (+) strand; PAM type: NRG; PAM sequence: AAG
caatggaaattttagcttaa

SEQ ID NO: 38057 - DNA, 20 bp, Artificial Sequence
  Description of Artificial Sequence: Synthetic oligonucleotide
  Target: ATXN2; (+) strand; PAM type: NRG; PAM sequence: CAG
aaattttagcttaaaagttt

SEQ ID NO: 38058 - DNA, 20 bp, Artificial Sequence
  Description of Artificial Sequence: Synthetic oligonucleotide
  Target: ATXN2; (+) strand; PAM type: NRG; PAM sequence: AAG
aaagtttcagatctgattcc

SEQ ID NO: 38059 - DNA, 20 bp, Artificial Sequence
  Description of Artificial Sequence: Synthetic oligonucleotide
  Target: ATXN2; (+) strand; PAM type: NRG; PAM sequence: AGG
aagtttcagatctgattcca

SEQ ID NO: 38060 - DNA, 20 bp, Artificial Sequence
  Description of Artificial Sequence: Synthetic oligonucleotide
  Target: ATXN2; (+) strand; PAM type: NRG; PAM sequence: GGG
agtttcagatctgattccaa

SEQ ID NO: 38061 - DNA, 20 bp, Artificial Sequence
  Description of Artificial Sequence: Synthetic oligonucleotide
  Target: ATXN2; (+) strand; PAM type: NRG; PAM sequence: GGG
gtttcagatctgattccaag

SEQ ID NO: 38062 - DNA, 20 bp, Artificial Sequence
  Description of Artificial Sequence: Synthetic oligonucleotide
  Target: ATXN2; (+) strand; PAM type: NRG; PAM sequence: GAG
ttcagatctgattccaaggg

SEQ ID NO: 38063 - DNA, 20 bp, Artificial Sequence
  Description of Artificial Sequence: Synthetic oligonucleotide
  Target: ATXN2; (+) strand; PAM type: NRG; PAM sequence: CAG
tgattccaaggggagtatgc

SEQ ID NO: 38064 - DNA, 20 bp, Artificial Sequence
  Description of Artificial Sequence: Synthetic oligonucleotide
  Target: ATXN2; (+) strand; PAM type: NRG; PAM sequence: TGG
aaggggagtatgccagaaaa

SEQ ID NO: 38065 - DNA, 20 bp, Artificial Sequence
  Description of Artificial Sequence: Synthetic oligonucleotide
  Target: ATXN2; (+) strand; PAM type: NRG; PAM sequence: AAG
gggagtatgccagaaaatgg

SEQ ID NO: 38066 - DNA, 20 bp, Artificial Sequence
  Description of Artificial Sequence: Synthetic oligonucleotide
  Target: ATXN2; (+) strand; PAM type: NRG; PAM sequence: AGG
ggagtatgccagaaaatgga

SEQ ID NO: 38067 - DNA, 20 bp, Artificial Sequence
  Description of Artificial Sequence: Synthetic oligonucleotide
  Target: ATXN2; (+) strand; PAM type: NRG; PAM sequence: AAG
tatgccagaaaatggaagga

SEQ ID NO: 38068 - DNA, 20 bp, Artificial Sequence
  Description of Artificial Sequence: Synthetic oligonucleotide
  Target: ATXN2; (+) strand; PAM type: NRG; PAM sequence: GAG
tgccagaaaatggaaggaaa

SEQ ID NO: 38069 - DNA, 20 bp, Artificial Sequence
  Description of Artificial Sequence: Synthetic oligonucleotide
  Target: ATXN2; (+) strand; PAM type: NRG; PAM sequence: CAG
ttaaatcatgatgtattcac

SEQ ID NO: 38070 - DNA, 20 bp, Artificial Sequence
  Description of Artificial Sequence: Synthetic oligonucleotide
  Target: ATXN2; (+) strand; PAM type: NRG; PAM sequence: AAG
tcataatgaacttttaacct

SEQ ID NO: 38071 - DNA, 20 bp, Artificial Sequence
  Description of Artificial Sequence: Synthetic oligonucleotide
  Target: ATXN2; (+) strand; PAM type: NRG; PAM sequence: TAG
gaacttttaacctaagcctt

SEQ ID NO: 38072 - DNA, 20 bp, Artificial Sequence
  Description of Artificial Sequence: Synthetic oligonucleotide
  Target: ATXN2; (+) strand; PAM type: NRG; PAM sequence: CAG
taacctaagcctttagcaaa

SEQ ID NO: 38073 - DNA, 20 bp, Artificial Sequence
  Description of Artificial Sequence: Synthetic oligonucleotide
  Target: ATXN2; (+) strand; PAM type: NRG; PAM sequence: AGG
aacctaagcctttagcaaac

SEQ ID NO: 38074 - DNA, 20 bp, Artificial Sequence
  Description of Artificial Sequence: Synthetic oligonucleotide
  Target: ATXN2; (+) strand; PAM type: NRG; PAM sequence: AAG
aaaattgttaaaatatatac

SEQ ID NO: 38075 - DNA, 20 bp, Artificial Sequence
  Description of Artificial Sequence: Synthetic oligonucleotide
  Target: ATXN2; (+) strand; PAM type: NRG; PAM sequence: AAG
aatatatacaagttgcataa

SEQ ID NO: 38076 - DNA, 20 bp, Artificial Sequence
  Description of Artificial Sequence: Synthetic oligonucleotide
  Target: ATXN2; (+) strand; PAM type: NRG; PAM sequence: CAG
tatacaagttgcataaaagc

SEQ ID NO: 38077 - DNA, 20 bp, Artificial Sequence
  Description of Artificial Sequence: Synthetic oligonucleotide
  Target: ATXN2; (+) strand; PAM type: NRG; PAM sequence: CAG
cgtgcctttgcacgcatatt

SEQ ID NO: 38078 - DNA, 20 bp, Artificial Sequence
  Description of Artificial Sequence: Synthetic oligonucleotide
  Target: ATXN2; (+) strand; PAM type: NRG; PAM sequence: AAG
acgcatattcagtccccgtt

SEQ ID NO: 38079 - DNA, 20 bp, Artificial Sequence
  Description of Artificial Sequence: Synthetic oligonucleotide
  Target: ATXN2; (+) strand; PAM type: NRG; PAM sequence: AAG
agtccccgttaagacaacta

SEQ ID NO: 38080 - DNA, 20 bp, Artificial Sequence
  Description of Artificial Sequence: Synthetic oligonucleotide
  Target: ATXN2; (+) strand; PAM type: NRG; PAM sequence: AAG
ccgttaagacaactaaagac

SEQ ID NO: 38081 - DNA, 20 bp, Artificial Sequence
  Description of Artificial Sequence: Synthetic oligonucleotide
  Target: ATXN2; (+) strand; PAM type: NRG; PAM sequence: CGG
actaaagacaagtcaaatga

SEQ ID NO: 38082 - DNA, 20 bp, Artificial Sequence
  Description of Artificial Sequence: Synthetic oligonucleotide
  Target: ATXN2; (+) strand; PAM type: NRG; PAM sequence: GGG
ctaaagacaagtcaaatgac

SEQ ID NO: 38083 - DNA, 20 bp, Artificial Sequence
  Description of Artificial Sequence: Synthetic oligonucleotide
  Target: ATXN2; (+) strand; PAM type: NRG; PAM sequence: GGG
taaagacaagtcaaatgacg

SEQ ID NO: 38084 - DNA, 20 bp, Artificial Sequence
  Description of Artificial Sequence: Synthetic oligonucleotide
  Target: ATXN2; (+) strand; PAM type: NRG; PAM sequence: AAG
cataaccaaaataataaacc

SEQ ID NO: 38085 - DNA, 20 bp, Artificial Sequence
  Description of Artificial Sequence: Synthetic oligonucleotide
  Target: ATXN2; (+) strand; PAM type: NRG; PAM sequence: TAG
accaaaataataaaccaagt

SEQ ID NO: 38086 - DNA, 20 bp, Artificial Sequence
  Description of Artificial Sequence: Synthetic oligonucleotide
  Target: ATXN2; (+) strand; PAM type: NRG; PAM sequence: CAG
aataaaccaagttagtttgt

SEQ ID NO: 38087 - DNA, 20 bp, Artificial Sequence
  Description of Artificial Sequence: Synthetic oligonucleotide
  Target: ATXN2; (+) strand; PAM type: NRG; PAM sequence: CGG
tatcttttacaattaaatta

SEQ ID NO: 38088 - DNA, 20 bp, Artificial Sequence
  Description of Artificial Sequence: Synthetic oligonucleotide
  Target: ATXN2; (+) strand; PAM type: NRG; PAM sequence: TGG
ttttacaattaaattacgga

SEQ ID NO: 38089 - DNA, 20 bp, Artificial Sequence
  Description of Artificial Sequence: Synthetic oligonucleotide
  Target: ATXN2; (+) strand; PAM type: NRG; PAM sequence: GGG
tttacaattaaattacggat

SEQ ID NO: 38090 - DNA, 20 bp, Artificial Sequence
  Description of Artificial Sequence: Synthetic oligonucleotide
  Target: ATXN2; (+) strand; PAM type: NRG; PAM sequence: TAG
aaaaaatgttttccaaaatg

SEQ ID NO: 38091 - DNA, 20 bp, Artificial Sequence
  Description of Artificial Sequence: Synthetic oligonucleotide
  Target: ATXN2; (+) strand; PAM type: NRG; PAM sequence: AAG
aatccacaatacaaaattga

SEQ ID NO: 38092 - DNA, 20 bp, Artificial Sequence
  Description of Artificial Sequence: Synthetic oligonucleotide
  Target: ATXN2; (+) strand; PAM type: NRG; PAM sequence: TGG
caaaattgaaagtgataatg

SEQ ID NO: 38093 - DNA, 20 bp, Artificial Sequence
  Description of Artificial Sequence: Synthetic oligonucleotide
  Target: ATXN2; (+) strand; PAM type: NRG; PAM sequence: AAG
aagtgataatgtggaaaatt

SEQ ID NO: 38094 - DNA, 20 bp, Artificial Sequence
  Description of Artificial Sequence: Synthetic oligonucleotide
  Target: ATXN2; (+) strand; PAM type: NRG; PAM sequence: TGG
ataatgtggaaaattaagac

SEQ ID NO: 38095 - DNA, 20 bp, Artificial Sequence
  Description of Artificial Sequence: Synthetic oligonucleotide
  Target: ATXN2; (+) strand; PAM type: NRG; PAM sequence: CAG
gatcatatacaaattcctat

SEQ ID NO: 38096 - DNA, 20 bp, Artificial Sequence
  Description of Artificial Sequence: Synthetic oligonucleotide
  Target: ATXN2; (+) strand; PAM type: NRG; PAM sequence: CAG
catatacaaattcctatcag

SEQ ID NO: 38097 - DNA, 20 bp, Artificial Sequence
  Description of Artificial Sequence: Synthetic oligonucleotide
  Target: ATXN2; (+) strand; PAM type: NRG; PAM sequence: GAG
tacaaattcctatcagcagt

SEQ ID NO: 38098 - DNA, 20 bp, Artificial Sequence
  Description of Artificial Sequence: Synthetic oligonucleotide
  Target: ATXN2; (+) strand; PAM type: NRG; PAM sequence: TGG
ctatcagcagtgagcctttg

SEQ ID NO: 38099 - DNA, 20 bp, Artificial Sequence
  Description of Artificial Sequence: Synthetic oligonucleotide
  Target: ATXN2; (+) strand; PAM type: NRG; PAM sequence: CAG
tcagcagtgagcctttgtgg

SEQ ID NO: 38100 - DNA, 20 bp, Artificial Sequence
  Description of Artificial Sequence: Synthetic oligonucleotide
  Target: ATXN2; (+) strand; PAM type: NRG; PAM sequence: AAG
agtgagcctttgtggcagac

SEQ ID NO: 38101 - DNA, 20 bp, Artificial Sequence
  Description of Artificial Sequence: Synthetic oligonucleotide
  Target: ATXN2; (+) strand; PAM type: NRG; PAM sequence: CAG
ttgtggcagacaagaacctc

SEQ ID NO: 38102 - DNA, 20 bp, Artificial Sequence
  Description of Artificial Sequence: Synthetic oligonucleotide
  Target: ATXN2; (+) strand; PAM type: NRG; PAM sequence: AGG
tgtggcagacaagaacctcc

SEQ ID NO: 38103 - DNA, 20 bp, Artificial Sequence
  Description of Artificial Sequence: Synthetic oligonucleotide
  Target: ATXN2; (+) strand; PAM type: NRG; PAM sequence: AAG
ggcagacaagaacctccagg

SEQ ID NO: 38104 - DNA, 20 bp, Artificial Sequence
  Description of Artificial Sequence: Synthetic oligonucleotide
  Target: ATXN2; (+) strand; PAM type: NRG; PAM sequence: AAG
gacaagaacctccaggaaga

SEQ ID NO: 38105 - DNA, 20 bp, Artificial Sequence
  Description of Artificial Sequence: Synthetic oligonucleotide
  Target: ATXN2; (+) strand; PAM type: NRG; PAM sequence: AAG
aacctccaggaagaaagcat

SEQ ID NO: 38106 - DNA, 20 bp, Artificial Sequence
  Description of Artificial Sequence: Synthetic oligonucleotide
  Target: ATXN2; (+) strand; PAM type: NRG; PAM sequence: TGG
caggaagaaagcataagctg

SEQ ID NO: 38107 - DNA, 20 bp, Artificial Sequence
  Description of Artificial Sequence: Synthetic oligonucleotide
  Target: ATXN2; (+) strand; PAM type: NRG; PAM sequence: GGG
aggaagaaagcataagctgt

SEQ ID NO: 38108 - DNA, 20 bp, Artificial Sequence
  Description of Artificial Sequence: Synthetic oligonucleotide
  Target: ATXN2; (+) strand; PAM type: NRG; PAM sequence: CAG
aaagcataagctgtgggtta

SEQ ID NO: 38109 - DNA, 20 bp, Artificial Sequence
  Description of Artificial Sequence: Synthetic oligonucleotide
  Target: ATXN2; (+) strand; PAM type: NRG; PAM sequence: AGG
aagcataagctgtgggttac

SEQ ID NO: 38110 - DNA, 20 bp, Artificial Sequence
  Description of Artificial Sequence: Synthetic oligonucleotide
  Target: ATXN2; (+) strand; PAM type: NRG; PAM sequence: CAG
aagctgtgggttacaggtga

SEQ ID NO: 38111 - DNA, 20 bp, Artificial Sequence
  Description of Artificial Sequence: Synthetic oligonucleotide
  Target: ATXN2; (+) strand; PAM type: NRG; PAM sequence: AGG
agctgtgggttacaggtgac

SEQ ID NO: 38112 - DNA, 20 bp, Artificial Sequence
  Description of Artificial Sequence: Synthetic oligonucleotide
  Target: ATXN2; (+) strand; PAM type: NRG; PAM sequence: AAG
tgtgggttacaggtgacagg

SEQ ID NO: 38113 - DNA, 20 bp, Artificial Sequence
  Description of Artificial Sequence: Synthetic oligonucleotide
  Target: ATXN2; (+) strand; PAM type: NRG; PAM sequence: AGG
gtgggttacaggtgacagga

SEQ ID NO: 38114 - DNA, 20 bp, Artificial Sequence
  Description of Artificial Sequence: Synthetic oligonucleotide
  Target: ATXN2; (+) strand; PAM type: NRG; PAM sequence: AAG
aaggatgattgctgctgccc

SEQ ID NO: 38115 - DNA, 20 bp, Artificial Sequence
  Description of Artificial Sequence: Synthetic oligonucleotide
  Target: ATXN2; (+) strand; PAM type: NRG; PAM sequence: CGG
gtcctattctcattaaccta

SEQ ID NO: 38116 - DNA, 20 bp, Artificial Sequence
  Description of Artificial Sequence: Synthetic oligonucleotide
  Target: ATXN2; (+) strand; PAM type: NRG; PAM sequence: AAG
taaaacttttattcttcaaa

SEQ ID NO: 38117 - DNA, 20 bp, Artificial Sequence
  Description of Artificial Sequence: Synthetic oligonucleotide
  Target: ATXN2; (+) strand; PAM type: NRG; PAM sequence: AGG
aaaacttttattcttcaaaa

SEQ ID NO: 38118 - DNA, 20 bp, Artificial Sequence
  Description of Artificial Sequence: Synthetic oligonucleotide
  Target: ATXN2; (+) strand; PAM type: NRG; PAM sequence: CAG
cttttattcttcaaaaagga

SEQ ID NO: 38119 - DNA, 20 bp, Artificial Sequence
  Description of Artificial Sequence: Synthetic oligonucleotide
  Target: ATXN2; (+) strand; PAM type: NRG; PAM sequence: GAG
tttattcttcaaaaaggaca

SEQ ID NO: 38120 - DNA, 20 bp, Artificial Sequence
  Description of Artificial Sequence: Synthetic oligonucleotide
  Target: ATXN2; (+) strand; PAM type: NRG; PAM sequence: AGG
ttattcttcaaaaaggacag

SEQ ID NO: 38121 - DNA, 20 bp, Artificial Sequence
  Description of Artificial Sequence: Synthetic oligonucleotide
  Target: ATXN2; (+) strand; PAM type: NRG; PAM sequence: TGG
ttcttcaaaaaggacagagg

SEQ ID NO: 38122 - DNA, 20 bp, Artificial Sequence
  Description of Artificial Sequence: Synthetic oligonucleotide
  Target: ATXN2; (+) strand; PAM type: NRG; PAM sequence: AAG
aaggacagaggtggtatgaa

SEQ ID NO: 38123 - DNA, 20 bp, Artificial Sequence
  Description of Artificial Sequence: Synthetic oligonucleotide
  Target: ATXN2; (+) strand; PAM type: NRG; PAM sequence: TAG
gacagaggtggtatgaaaag

SEQ ID NO: 38124 - DNA, 20 bp, Artificial Sequence
  Description of Artificial Sequence: Synthetic oligonucleotide
  Target: ATXN2; (+) strand; PAM type: NRG; PAM sequence: AAG
atgaaaagtagtaatgtctc

SEQ ID NO: 38125 - DNA, 20 bp, Artificial Sequence
  Description of Artificial Sequence: Synthetic oligonucleotide
  Target: ATXN2; (+) strand; PAM type: NRG; PAM sequence: AAG
aaaagtagtaatgtctcaag

SEQ ID NO: 38126 - DNA, 20 bp, Artificial Sequence
  Description of Artificial Sequence: Synthetic oligonucleotide
  Target: ATXN2; (+) strand; PAM type: NRG; PAM sequence: AAG
agtagtaatgtctcaagaag

SEQ ID NO: 38127 - DNA, 20 bp, Artificial Sequence
  Description of Artificial Sequence: Synthetic oligonucleotide
  Target: ATXN2; (+) strand; PAM type: NRG; PAM sequence: AGG
gtagtaatgtctcaagaaga

SEQ ID NO: 38128 - DNA, 20 bp, Artificial Sequence
  Description of Artificial Sequence: Synthetic oligonucleotide
  Target: ATXN2; (+) strand; PAM type: NRG; PAM sequence: CAG
gtctcaagaagaaggtttgc

SEQ ID NO: 38129 - DNA, 20 bp, Artificial Sequence
  Description of Artificial Sequence: Synthetic oligonucleotide
  Target: ATXN2; (+) strand; PAM type: NRG; PAM sequence: TGG
tttttttttttttttttttt

SEQ ID NO: 38130 - DNA, 20 bp, Artificial Sequence
  Description of Artificial Sequence: Synthetic oligonucleotide
  Target: ATXN2; (+) strand; PAM type: NRG; PAM sequence: GAG
tttttttttttttttttttg

SEQ ID NO: 38131 - DNA, 20 bp, Artificial Sequence
  Description of Artificial Sequence: Synthetic oligonucleotide
  Target: ATXN2; (+) strand; PAM type: NRG; PAM sequence: TGG
tttttttttttttttggaga

SEQ ID NO: 38132 - DNA, 20 bp, Artificial Sequence
  Description of Artificial Sequence: Synthetic oligonucleotide
  Target: ATXN2; (+) strand; PAM type: NRG; PAM sequence: GAG
tttttttttttttggagatg

SEQ ID NO: 38133 - DNA, 20 bp, Artificial Sequence
  Description of Artificial Sequence: Synthetic oligonucleotide
  Target: ATXN2; (+) strand; PAM type: NRG; PAM sequence: CAG
tggagtctcactctgtcgct

SEQ ID NO: 38134 - DNA, 20 bp, Artificial Sequence
  Description of Artificial Sequence: Synthetic oligonucleotide
  Target: ATXN2; (+) strand; PAM type: NRG; PAM sequence: AGG
ggagtctcactctgtcgctc

SEQ ID NO: 38135 - DNA, 20 bp, Artificial Sequence
  Description of Artificial Sequence: Synthetic oligonucleotide
  Target: ATXN2; (+) strand; PAM type: NRG; PAM sequence: TAG
tctcactctgtcgctcaggc

SEQ ID NO: 38136 - DNA, 20 bp, Artificial Sequence
  Description of Artificial Sequence: Synthetic oligonucleotide
  Target: ATXN2; (+) strand; PAM type: NRG; PAM sequence: GAG
tcactctgtcgctcaggcta

SEQ ID NO: 38137 - DNA, 20 bp, Artificial Sequence
  Description of Artificial Sequence: Synthetic oligonucleotide
  Target: ATXN2; (+) strand; PAM type: NRG; PAM sequence: TAG
ctgtcgctcaggctagagtg

SEQ ID NO: 38138 - DNA, 20 bp, Artificial Sequence
  Description of Artificial Sequence: Synthetic oligonucleotide
  Target: ATXN2; (+) strand; PAM type: NRG; PAM sequence: TGG
tcgctcaggctagagtgtag

SEQ ID NO: 38139 - DNA, 20 bp, Artificial Sequence
  Description of Artificial Sequence: Synthetic oligonucleotide
  Target: ATXN2; (+) strand; PAM type: NRG; PAM sequence: CGG
agagtgtagtggcgcgatct

SEQ ID NO: 38140 - DNA, 20 bp, Artificial Sequence
  Description of Artificial Sequence: Synthetic oligonucleotide
  Target: ATXN2; (+) strand; PAM type: NRG; PAM sequence: CGG
tcactgcaacctctgcctcc

SEQ ID NO: 38141 - DNA, 20 bp, Artificial Sequence
  Description of Artificial Sequence: Synthetic oligonucleotide
  Target: ATXN2; (+) strand; PAM type: NRG; PAM sequence: GGG
cactgcaacctctgcctccc

SEQ ID NO: 38142 - DNA, 20 bp, Artificial Sequence
  Description of Artificial Sequence: Synthetic oligonucleotide
  Target: ATXN2; (+) strand; PAM type: NRG; PAM sequence: AAG
aacctctgcctcccgggttc

SEQ ID NO: 38143 - DNA, 20 bp, Artificial Sequence
  Description of Artificial Sequence: Synthetic oligonucleotide
  Target: ATXN2; (+) strand; PAM type: NRG; PAM sequence: CAG
ttcaagcaattctgttgcct

SEQ ID NO: 38144 - DNA, 20 bp, Artificial Sequence
  Description of Artificial Sequence: Synthetic oligonucleotide
  Target: ATXN2; (+) strand; PAM type: NRG; PAM sequence: AAG
ttctgttgcctcagcctccg

SEQ ID NO: 38145 - DNA, 20 bp, Artificial Sequence
  Description of Artificial Sequence: Synthetic oligonucleotide
  Target: ATXN2; (+) strand; PAM type: NRG; PAM sequence: TAG
tgttgcctcagcctccgaag

SEQ ID NO: 38146 - DNA, 20 bp, Artificial Sequence
  Description of Artificial Sequence: Synthetic oligonucleotide
  Target: ATXN2; (+) strand; PAM type: NRG; PAM sequence: CGG
gcctcagcctccgaagtagc

SEQ ID NO: 38147 - DNA, 20 bp, Artificial Sequence
  Description of Artificial Sequence: Synthetic oligonucleotide
  Target: ATXN2; (+) strand; PAM type: NRG; PAM sequence: GGG
cctcagcctccgaagtagcc

SEQ ID NO: 38148 - DNA, 20 bp, Artificial Sequence
  Description of Artificial Sequence: Synthetic oligonucleotide
  Target: ATXN2; (+) strand; PAM type: NRG; PAM sequence: CAG
ctccgaagtagccgggacta

SEQ ID NO: 38149 - DNA, 20 bp, Artificial Sequence
  Description of Artificial Sequence: Synthetic oligonucleotide
  Target: ATXN2; (+) strand; PAM type: NRG; PAM sequence: AGG
tccgaagtagccgggactac

SEQ ID NO: 38150 - DNA, 20 bp, Artificial Sequence
  Description of Artificial Sequence: Synthetic oligonucleotide
  Target: ATXN2; (+) strand; PAM type: NRG; PAM sequence: CGG
caggcacatgccaccacacc

SEQ ID NO: 38151 - DNA, 20 bp, Artificial Sequence
  Description of Artificial Sequence: Synthetic oligonucleotide
  Target: ATXN2; (+) strand; PAM type: NRG; PAM sequence: TGG
accacacccggccaattttt

SEQ ID NO: 38152 - DNA, 20 bp, Artificial Sequence
  Description of Artificial Sequence: Synthetic oligonucleotide
  Target: ATXN2; (+) strand; PAM type: NRG; PAM sequence: TAG
cggccaattttttggatttt

SEQ ID NO: 38153 - DNA, 20 bp, Artificial Sequence
  Description of Artificial Sequence: Synthetic oligonucleotide
  Target: ATXN2; (+) strand; PAM type: NRG; PAM sequence: TAG
ccaattttttggatttttag

SEQ ID NO: 38154 - DNA, 20 bp, Artificial Sequence
  Description of Artificial Sequence: Synthetic oligonucleotide
  Target: ATXN2; (+) strand; PAM type: NRG; PAM sequence: GAG
aattttttggatttttagta

SEQ ID NO: 38155 - DNA, 20 bp, Artificial Sequence
  Description of Artificial Sequence: Synthetic oligonucleotide
  Target: ATXN2; (+) strand; PAM type: NRG; PAM sequence: TGG
ttttggatttttagtagaga

SEQ ID NO: 38156 - DNA, 20 bp, Artificial Sequence
  Description of Artificial Sequence: Synthetic oligonucleotide
  Target: ATXN2; (+) strand; PAM type: NRG; PAM sequence: GGG
tttggatttttagtagagat

SEQ ID NO: 38157 - DNA, 20 bp, Artificial Sequence
  Description of Artificial Sequence: Synthetic oligonucleotide
  Target: ATXN2; (+) strand; PAM type: NRG; PAM sequence: GGG
ttggatttttagtagagatg

SEQ ID NO: 38158 - DNA, 20 bp, Artificial Sequence
  Description of Artificial Sequence: Synthetic oligonucleotide
  Target: ATXN2; (+) strand; PAM type: NRG; PAM sequence: TGG
gagatggggtttcaccatgt

SEQ ID NO: 38159 - DNA, 20 bp, Artificial Sequence
  Description of Artificial Sequence: Synthetic oligonucleotide
  Target: ATXN2; (+) strand; PAM type: NRG; PAM sequence: CAG
tggggtttcaccatgttggc

SEQ ID NO: 38160 - DNA, 20 bp, Artificial Sequence
  Description of Artificial Sequence: Synthetic oligonucleotide
  Target: ATXN2; (+) strand; PAM type: NRG; PAM sequence: AGG
ggggtttcaccatgttggcc

SEQ ID NO: 38161 - DNA, 20 bp, Artificial Sequence
  Description of Artificial Sequence: Synthetic oligonucleotide
  Target: ATXN2; (+) strand; PAM type: NRG; PAM sequence: TGG
tttcaccatgttggccaggc

SEQ ID NO: 38162 - DNA, 20 bp, Artificial Sequence
  Description of Artificial Sequence: Synthetic oligonucleotide
  Target: ATXN2; (+) strand; PAM type: NRG; PAM sequence: CAG
ctcctgacctcatgatccgc

SEQ ID NO: 38163 - DNA, 20 bp, Artificial Sequence
  Description of Artificial Sequence: Synthetic oligonucleotide
  Target: ATXN2; (+) strand; PAM type: NRG; PAM sequence: TGG
acctcatgatccgccagcct

SEQ ID NO: 38164 - DNA, 20 bp, Artificial Sequence
  Description of Artificial Sequence: Synthetic oligonucleotide
  Target: ATXN2; (+) strand; PAM type: NRG; PAM sequence: AAG
ccgccagccttggcctccca

SEQ ID NO: 38165 - DNA, 20 bp, Artificial Sequence
  Description of Artificial Sequence: Synthetic oligonucleotide
  Target: ATXN2; (+) strand; PAM type: NRG; PAM sequence: TGG
gccttggcctcccaaagtgc

SEQ ID NO: 38166 - DNA, 20 bp, Artificial Sequence
  Description of Artificial Sequence: Synthetic oligonucleotide
  Target: ATXN2; (+) strand; PAM type: NRG; PAM sequence: GGG
ccttggcctcccaaagtgct

SEQ ID NO: 38167 - DNA, 20 bp, Artificial Sequence
  Description of Artificial Sequence: Synthetic oligonucleotide
  Target: ATXN2; (+) strand; PAM type: NRG; PAM sequence: CAG
ctcccaaagtgctgggatta

SEQ ID NO: 38168 - DNA, 20 bp, Artificial Sequence
  Description of Artificial Sequence: Synthetic oligonucleotide
  Target: ATXN2; (+) strand; PAM type: NRG; PAM sequence: AGG
tcccaaagtgctgggattac

SEQ ID NO: 38169 - DNA, 20 bp, Artificial Sequence
  Description of Artificial Sequence: Synthetic oligonucleotide
  Target: ATXN2; (+) strand; PAM type: NRG; PAM sequence: GAG
agtgctgggattacaggcgt

SEQ ID NO: 38170 - DNA, 20 bp, Artificial Sequence
  Description of Artificial Sequence: Synthetic oligonucleotide
  Target: ATXN2; (+) strand; PAM type: NRG; PAM sequence: CAG
caggcgtgagccactgcgcc

SEQ ID NO: 38171 - DNA, 20 bp, Artificial Sequence
  Description of Artificial Sequence: Synthetic oligonucleotide
  Target: ATXN2; (+) strand; PAM type: NRG; PAM sequence: CAG
tttgcctaaacatactcgtt

SEQ ID NO: 38172 - DNA, 20 bp, Artificial Sequence
  Description of Artificial Sequence: Synthetic oligonucleotide
  Target: ATXN2; (+) strand; PAM type: NRG; PAM sequence: AGG
ttgcctaaacatactcgttc

SEQ ID NO: 38173 - DNA, 20 bp, Artificial Sequence
  Description of Artificial Sequence: Synthetic oligonucleotide
  Target: ATXN2; (+) strand; PAM type: NRG; PAM sequence: TAG
aaataaaaattttatattct

SEQ ID NO: 38174 - DNA, 20 bp, Artificial Sequence
  Description of Artificial Sequence: Synthetic oligonucleotide
  Target: ATXN2; (+) strand; PAM type: NRG; PAM sequence: AAG
tatattcttagtatttcaaa

SEQ ID NO: 38175 - DNA, 20 bp, Artificial Sequence
  Description of Artificial Sequence: Synthetic oligonucleotide
  Target: ATXN2; (+) strand; PAM type: NRG; PAM sequence: AAG
ttagtatttcaaaaagttca

SEQ ID NO: 38176 - DNA, 20 bp, Artificial Sequence
  Description of Artificial Sequence: Synthetic oligonucleotide
  Target: ATXN2; (+) strand; PAM type: NRG; PAM sequence: GAG
agtatttcaaaaagttcaaa

SEQ ID NO: 38177 - DNA, 20 bp, Artificial Sequence
  Description of Artificial Sequence: Synthetic oligonucleotide
  Target: ATXN2; (+) strand; PAM type: NRG; PAM sequence: AGG
gtatttcaaaaagttcaaag

SEQ ID NO: 38178 - DNA, 20 bp, Artificial Sequence
  Description of Artificial Sequence: Synthetic oligonucleotide
  Target: ATXN2; (+) strand; PAM type: NRG; PAM sequence: TAG
ttaaaaatgaaatgcccatg

SEQ ID NO: 38179 - DNA, 20 bp, Artificial Sequence
  Description of Artificial Sequence: Synthetic oligonucleotide
  Target: ATXN2; (+) strand; PAM type: NRG; PAM sequence: TAG
taaccataatctcattctca

SEQ ID NO: 38180 - DNA, 20 bp, Artificial Sequence
  Description of Artificial Sequence: Synthetic oligonucleotide
  Target: ATXN2; (+) strand; PAM type: NRG; PAM sequence: CAG
ccataatctcattctcatag

SEQ ID NO: 38181 - DNA, 20 bp, Artificial Sequence
  Description of Artificial Sequence: Synthetic oligonucleotide
  Target: ATXN2; (+) strand; PAM type: NRG; PAM sequence: TAG
caaacaaccaaaaacgcaaa

SEQ ID NO: 38182 - DNA, 20 bp, Artificial Sequence
  Description of Artificial Sequence: Synthetic oligonucleotide
  Target: ATXN2; (+) strand; PAM type: NRG; PAM sequence: AGG
aaacaaccaaaaacgcaaat

SEQ ID NO: 38183 - DNA, 20 bp, Artificial Sequence
  Description of Artificial Sequence: Synthetic oligonucleotide
  Target: ATXN2; (+) strand; PAM type: NRG; PAM sequence: CGG
aggaaaactaaacgacacta

SEQ ID NO: 38184 - DNA, 20 bp, Artificial Sequence
  Description of Artificial Sequence: Synthetic oligonucleotide
  Target: ATXN2; (+) strand; PAM type: NRG; PAM sequence: TAG
aaaactaaacgacactacgg

SEQ ID NO: 38185 - DNA, 20 bp, Artificial Sequence
  Description of Artificial Sequence: Synthetic oligonucleotide
  Target: ATXN2; (+) strand; PAM type: NRG; PAM sequence: CAG
aacgacactacggtagttct

SEQ ID NO: 38186 - DNA, 20 bp, Artificial Sequence
  Description of Artificial Sequence: Synthetic oligonucleotide
  Target: ATXN2; (+) strand; PAM type: NRG; PAM sequence: CAG
cggtagttctcagaaatatt

SEQ ID NO: 38187 - DNA, 20 bp, Artificial Sequence
  Description of Artificial Sequence: Synthetic oligonucleotide
  Target: ATXN2; (+) strand; PAM type: NRG; PAM sequence: CAG
acaaaacatcttaatgaaat

SEQ ID NO: 38188 - DNA, 20 bp, Artificial Sequence
  Description of Artificial Sequence: Synthetic oligonucleotide
  Target: ATXN2; (+) strand; PAM type: NRG; PAM sequence: AAG
catattctgaaaaacatttg

SEQ ID NO: 38189 - DNA, 20 bp, Artificial Sequence
  Description of Artificial Sequence: Synthetic oligonucleotide
  Target: ATXN2; (+) strand; PAM type: NRG; PAM sequence: AAG
atccattaattctgtatcat

SEQ ID NO: 38190 - DNA, 20 bp, Artificial Sequence
  Description of Artificial Sequence: Synthetic oligonucleotide
  Target: ATXN2; (+) strand; PAM type: NRG; PAM sequence: TGG
tgtatcataagatatacaaa

SEQ ID NO: 38191 - DNA, 20 bp, Artificial Sequence
  Description of Artificial Sequence: Synthetic oligonucleotide
  Target: ATXN2; (+) strand; PAM type: NRG; PAM sequence: CAG
attttattttaaattatcaa

SEQ ID NO: 38192 - DNA, 20 bp, Artificial Sequence
  Description of Artificial Sequence: Synthetic oligonucleotide
  Target: ATXN2; (+) strand; PAM type: NRG; PAM sequence: TGG
cagtgaaaaatctattattt

SEQ ID NO: 38193 - DNA, 20 bp, Artificial Sequence
  Description of Artificial Sequence: Synthetic oligonucleotide
  Target: ATXN2; (+) strand; PAM type: NRG; PAM sequence: TAG
aatctattattttggtactt

SEQ ID NO: 38194 - DNA, 20 bp, Artificial Sequence
  Description of Artificial Sequence: Synthetic oligonucleotide
  Target: ATXN2; (+) strand; PAM type: NRG; PAM sequence: CAG
tattattttggtactttaga

SEQ ID NO: 38195 - DNA, 20 bp, Artificial Sequence
  Description of Artificial Sequence: Synthetic oligonucleotide
  Target: ATXN2; (+) strand; PAM type: NRG; PAM sequence: AAG
tggtactttagacagctgct

SEQ ID NO: 38196 - DNA, 20 bp, Artificial Sequence
  Description of Artificial Sequence: Synthetic oligonucleotide
  Target: ATXN2; (+) strand; PAM type: NRG; PAM sequence: TAG
tctacacaaatttctctgtt

SEQ ID NO: 38197 - DNA, 20 bp, Artificial Sequence
  Description of Artificial Sequence: Synthetic oligonucleotide
  Target: ATXN2; (+) strand; PAM type: NRG; PAM sequence: AAG
ctctgtttagtcacaaaacg

SEQ ID NO: 38198 - DNA, 20 bp, Artificial Sequence
  Description of Artificial Sequence: Synthetic oligonucleotide
  Target: ATXN2; (+) strand; PAM type: NRG; PAM sequence: TGG
gtttagtcacaaaacgaaga

SEQ ID NO: 38199 - DNA, 20 bp, Artificial Sequence
  Description of Artificial Sequence: Synthetic oligonucleotide
  Target: ATXN2; (+) strand; PAM type: NRG; PAM sequence: GGG
tttagtcacaaaacgaagat

SEQ ID NO: 38200 - DNA, 20 bp, Artificial Sequence
  Description of Artificial Sequence: Synthetic oligonucleotide
  Target: ATXN2; (+) strand; PAM type: NRG; PAM sequence: TAG
tctcacatataaatactgct

SEQ ID NO: 38201 - DNA, 20 bp, Artificial Sequence
  Description of Artificial Sequence: Synthetic oligonucleotide
  Target: ATXN2; (+) strand; PAM type: NRG; PAM sequence: CAG
aatacttctcattttcattt

SEQ ID NO: 38202 - DNA, 20 bp, Artificial Sequence
  Description of Artificial Sequence: Synthetic oligonucleotide
  Target: ATXN2; (+) strand; PAM type: NRG; PAM sequence: TGG
tttcagcattctgttcacat

SEQ ID NO: 38203 - DNA, 20 bp, Artificial Sequence
  Description of Artificial Sequence: Synthetic oligonucleotide
  Target: ATXN2; (+) strand; PAM type: NRG; PAM sequence: AAG
gttcacattggttatattta

SEQ ID NO: 38204 - DNA, 20 bp, Artificial Sequence
  Description of Artificial Sequence: Synthetic oligonucleotide
  Target: ATXN2; (+) strand; PAM type: NRG; PAM sequence: CAG
aatattcaaccattaaaata

SEQ ID NO: 38205 - DNA, 20 bp, Artificial Sequence
  Description of Artificial Sequence: Synthetic oligonucleotide
  Target: ATXN2; (+) strand; PAM type: NRG; PAM sequence: TAG
cattaaaatacagcatgatg

SEQ ID NO: 38206 - DNA, 20 bp, Artificial Sequence
  Description of Artificial Sequence: Synthetic oligonucleotide
  Target: ATXN2; (+) strand; PAM type: NRG; PAM sequence: TAG
tacagcatgatgtagaaaca

SEQ ID NO: 38207 - DNA, 20 bp, Artificial Sequence
  Description of Artificial Sequence: Synthetic oligonucleotide
  Target: ATXN2; (+) strand; PAM type: NRG; PAM sequence: CAG
agtattatcattataacaaa

SEQ ID NO: 38208 - DNA, 20 bp, Artificial Sequence
  Description of Artificial Sequence: Synthetic oligonucleotide
  Target: ATXN2; (+) strand; PAM type: NRG; PAM sequence: CAG
gcaaaaaaaatatgtaatgc

SEQ ID NO: 38209 - DNA, 20 bp, Artificial Sequence
  Description of Artificial Sequence: Synthetic oligonucleotide
  Target: ATXN2; (+) strand; PAM type: NRG; PAM sequence: CAG
tatgtaatgccagtgaccct

SEQ ID NO: 38210 - DNA, 20 bp, Artificial Sequence
  Description of Artificial Sequence: Synthetic oligonucleotide
  Target: ATXN2; (+) strand; PAM type: NRG; PAM sequence: AAG
atgccagtgaccctcagatc

SEQ ID NO: 38211 - DNA, 20 bp, Artificial Sequence
  Description of Artificial Sequence: Synthetic oligonucleotide
  Target: ATXN2; (+) strand; PAM type: NRG; PAM sequence: TAG
ccagtgaccctcagatcaag

SEQ ID NO: 38212 - DNA, 20 bp, Artificial Sequence
  Description of Artificial Sequence: Synthetic oligonucleotide
  Target: ATXN2; (+) strand; PAM type: NRG; PAM sequence: AAG
gaccctcagatcaagtagtg

SEQ ID NO: 38213 - DNA, 20 bp, Artificial Sequence
  Description of Artificial Sequence: Synthetic oligonucleotide
  Target: ATXN2; (+) strand; PAM type: NRG; PAM sequence: TGG
gaagcaaaatgttttcatgc

SEQ ID NO: 38214 - DNA, 20 bp, Artificial Sequence
  Description of Artificial Sequence: Synthetic oligonucleotide
  Target: ATXN2; (+) strand; PAM type: NRG; PAM sequence: GAG
agcaaaatgttttcatgctg

SEQ ID NO: 38215 - DNA, 20 bp, Artificial Sequence
  Description of Artificial Sequence: Synthetic oligonucleotide
  Target: ATXN2; (+) strand; PAM type: NRG; PAM sequence: TAG
taaaattctcttgcatgtcg

SEQ ID NO: 38216 - DNA, 20 bp, Artificial Sequence
  Description of Artificial Sequence: Synthetic oligonucleotide
  Target: ATXN2; (+) strand; PAM type: NRG; PAM sequence: AGG
aaaattctcttgcatgtcgt

SEQ ID NO: 38217 - DNA, 20 bp, Artificial Sequence
  Description of Artificial Sequence: Synthetic oligonucleotide
  Target: ATXN2; (+) strand; PAM type: NRG; PAM sequence: CAG
attctcttgcatgtcgtagg

SEQ ID NO: 38218 - DNA, 20 bp, Artificial Sequence
  Description of Artificial Sequence: Synthetic oligonucleotide
  Target: ATXN2; (+) strand; PAM type: NRG; PAM sequence: AGG
ttctcttgcatgtcgtaggc

SEQ ID NO: 38219 - DNA, 20 bp, Artificial Sequence
  Description of Artificial Sequence: Synthetic oligonucleotide
  Target: ATXN2; (+) strand; PAM type: NRG; PAM sequence: AAG
gtcgtaggcaggatatacca

SEQ ID NO: 38220 - DNA, 20 bp, Artificial Sequence
  Description of Artificial Sequence: Synthetic oligonucleotide
  Target: ATXN2; (+) strand; PAM type: NRG; PAM sequence: GAG
taccaaagcataatattgat

SEQ ID NO: 38221 - DNA, 20 bp, Artificial Sequence
  Description of Artificial Sequence: Synthetic oligonucleotide
  Target: ATXN2; (+) strand; PAM type: NRG; PAM sequence: AGG
accaaagcataatattgatg

SEQ ID NO: 38222 - DNA, 20 bp, Artificial Sequence
  Description of Artificial Sequence: Synthetic oligonucleotide
  Target: ATXN2; (+) strand; PAM type: NRG; PAM sequence: AAG
aaagcataatattgatgagg

SEQ ID NO: 38223 - DNA, 20 bp, Artificial Sequence
  Description of Artificial Sequence: Synthetic oligonucleotide
  Target: ATXN2; (+) strand; PAM type: NRG; PAM sequence: GAG
agcataatattgatgaggaa

SEQ ID NO: 38224 - DNA, 20 bp, Artificial Sequence
  Description of Artificial Sequence: Synthetic oligonucleotide
  Target: ATXN2; (+) strand; PAM type: NRG; PAM sequence: AGG
gcataatattgatgaggaag

SEQ ID NO: 38225 - DNA, 20 bp, Artificial Sequence
  Description of Artificial Sequence: Synthetic oligonucleotide
  Target: ATXN2; (+) strand; PAM type: NRG; PAM sequence: GAG
ataatattgatgaggaagag

SEQ ID NO: 38226 - DNA, 20 bp, Artificial Sequence
  Description of Artificial Sequence: Synthetic oligonucleotide
  Target: ATXN2; (+) strand; PAM type: NRG; PAM sequence: AAG
tattgatgaggaagaggaga

SEQ ID NO: 38227 - DNA, 20 bp, Artificial Sequence
  Description of Artificial Sequence: Synthetic oligonucleotide
  Target: ATXN2; (+) strand; PAM type: NRG; PAM sequence: AGG
attgatgaggaagaggagaa

SEQ ID NO: 38228 - DNA, 20 bp, Artificial Sequence
  Description of Artificial Sequence: Synthetic oligonucleotide
  Target: ATXN2; (+) strand; PAM type: NRG; PAM sequence: AAG
gaaaggtacctttctccaca

SEQ ID NO: 38229 - DNA, 20 bp, Artificial Sequence
  Description of Artificial Sequence: Synthetic oligonucleotide
  Target: ATXN2; (+) strand; PAM type: NRG; PAM sequence: TAG
ttatatacatcattacattt

SEQ ID NO: 38230 - DNA, 20 bp, Artificial Sequence
  Description of Artificial Sequence: Synthetic oligonucleotide
  Target: ATXN2; (+) strand; PAM type: NRG; PAM sequence: AAG
acatcattacattttagtta

SEQ ID NO: 38231 - DNA, 20 bp, Artificial Sequence
  Description of Artificial Sequence: Synthetic oligonucleotide
  Target: ATXN2; (+) strand; PAM type: NRG; PAM sequence: CAG
tcattacattttagttaaag

SEQ ID NO: 38232 - DNA, 20 bp, Artificial Sequence
  Description of Artificial Sequence: Synthetic oligonucleotide
  Target: ATXN2; (+) strand; PAM type: NRG; PAM sequence: AGG
cattacattttagttaaagc

SEQ ID NO: 38233 - DNA, 20 bp, Artificial Sequence
  Description of Artificial Sequence: Synthetic oligonucleotide
  Target: ATXN2; (+) strand; PAM type: NRG; PAM sequence: AAG
acattttagttaaagcagga

SEQ ID NO: 38234 - DNA, 20 bp, Artificial Sequence
  Description of Artificial Sequence: Synthetic oligonucleotide
  Target: ATXN2; (+) strand; PAM type: NRG; PAM sequence: GAG
attttagttaaagcaggaaa

SEQ ID NO: 38235 - DNA, 20 bp, Artificial Sequence
  Description of Artificial Sequence: Synthetic oligonucleotide
  Target: ATXN2; (+) strand; PAM type: NRG; PAM sequence: AAG
taaagcaggaaagagatctg

SEQ ID NO: 38236 - DNA, 20 bp, Artificial Sequence
  Description of Artificial Sequence: Synthetic oligonucleotide
  Target: ATXN2; (+) strand; PAM type: NRG; PAM sequence: CAG
caggaaagagatctgaagac

SEQ ID NO: 38237 - DNA, 20 bp, Artificial Sequence
  Description of Artificial Sequence: Synthetic oligonucleotide
  Target: ATXN2; (+) strand; PAM type: NRG; PAM sequence: AGG
aggaaagagatctgaagacc

SEQ ID NO: 38238 - DNA, 20 bp, Artificial Sequence
  Description of Artificial Sequence: Synthetic oligonucleotide
  Target: ATXN2; (+) strand; PAM type: NRG; PAM sequence: CAG
agagatctgaagaccaggta

SEQ ID NO: 38239 - DNA, 20 bp, Artificial Sequence
  Description of Artificial Sequence: Synthetic oligonucleotide
  Target: ATXN2; (+) strand; PAM type: NRG; PAM sequence: AAG
gatctgaagaccaggtacag

SEQ ID NO: 38240 - DNA, 20 bp, Artificial Sequence
  Description of Artificial Sequence: Synthetic oligonucleotide
  Target: ATXN2; (+) strand; PAM type: NRG; PAM sequence: TAG
ctgaagaccaggtacagaag

SEQ ID NO: 38241 - DNA, 20 bp, Artificial Sequence
  Description of Artificial Sequence: Synthetic oligonucleotide
  Target: ATXN2; (+) strand; PAM type: NRG; PAM sequence: AAG
aagtagaaactatttgccaa

SEQ ID NO: 38242 - DNA, 20 bp, Artificial Sequence
  Description of Artificial Sequence: Synthetic oligonucleotide
  Target: ATXN2; (+) strand; PAM type: NRG; PAM sequence: AAG
actatttgccaaaagttata

SEQ ID NO: 38243 - DNA, 20 bp, Artificial Sequence
  Description of Artificial Sequence: Synthetic oligonucleotide
  Target: ATXN2; (+) strand; PAM type: NRG; PAM sequence: AAG
tttgccaaaagttataaagc

SEQ ID NO: 38244 - DNA, 20 bp, Artificial Sequence
  Description of Artificial Sequence: Synthetic oligonucleotide
  Target: ATXN2; (+) strand; PAM type: NRG; PAM sequence: CAG
ccaaaagttataaagcaagt

SEQ ID NO: 38245 - DNA, 20 bp, Artificial Sequence
  Description of Artificial Sequence: Synthetic oligonucleotide
  Target: ATXN2; (+) strand; PAM type: NRG; PAM sequence: AGG
caaaagttataaagcaagtc

SEQ ID NO: 38246 - DNA, 20 bp, Artificial Sequence
  Description of Artificial Sequence: Synthetic oligonucleotide
  Target: ATXN2; (+) strand; PAM type: NRG; PAM sequence: AAG
gttataaagcaagtcaggca

SEQ ID NO: 38247 - DNA, 20 bp, Artificial Sequence
  Description of Artificial Sequence: Synthetic oligonucleotide
  Target: ATXN2; (+) strand; PAM type: NRG; PAM sequence: TGG
aagcaagtcaggcaaagaaa

SEQ ID NO: 38248 - DNA, 20 bp, Artificial Sequence
  Description of Artificial Sequence: Synthetic oligonucleotide
  Target: ATXN2; (+) strand; PAM type: NRG; PAM sequence: GGG
agcaagtcaggcaaagaaat

SEQ ID NO: 38249 - DNA, 20 bp, Artificial Sequence
  Description of Artificial Sequence: Synthetic oligonucleotide
  Target: ATXN2; (+) strand; PAM type: NRG; PAM sequence: CAG
aatgggttcatcttttcctt

SEQ ID NO: 38250 - DNA, 20 bp, Artificial Sequence
  Description of Artificial Sequence: Synthetic oligonucleotide
  Target: ATXN2; (+) strand; PAM type: NRG; PAM sequence: AAG
cttgaccctcaatgtcataa

SEQ ID NO: 38251 - DNA, 20 bp, Artificial Sequence
  Description of Artificial Sequence: Synthetic oligonucleotide
  Target: ATXN2; (+) strand; PAM type: NRG; PAM sequence: AGG
ttgaccctcaatgtcataaa

SEQ ID NO: 38252 - DNA, 20 bp, Artificial Sequence
  Description of Artificial Sequence: Synthetic oligonucleotide
  Target: ATXN2; (+) strand; PAM type: NRG; PAM sequence: CAG
ccctcaatgtcataaaaggt

SEQ ID NO: 38253 - DNA, 20 bp, Artificial Sequence
  Description of Artificial Sequence: Synthetic oligonucleotide
  Target: ATXN2; (+) strand; PAM type: NRG; PAM sequence: AGG
cctcaatgtcataaaaggtc

SEQ ID NO: 38254 - DNA, 20 bp, Artificial Sequence
  Description of Artificial Sequence: Synthetic oligonucleotide
  Target: ATXN2; (+) strand; PAM type: NRG; PAM sequence: TAG
ataaaaggtcaggttattct

SEQ ID NO: 38255 - DNA, 20 bp, Artificial Sequence
  Description of Artificial Sequence: Synthetic oligonucleotide
  Target: ATXN2; (+) strand; PAM type: NRG; PAM sequence: TAG
aaggtcaggttattcttaga

SEQ ID NO: 38256 - DNA, 20 bp, Artificial Sequence
  Description of Artificial Sequence: Synthetic oligonucleotide
  Target: ATXN2; (+) strand; PAM type: NRG; PAM sequence: GAG
ggtcaggttattcttagata

SEQ ID NO: 38257 - DNA, 20 bp, Artificial Sequence
  Description of Artificial Sequence: Synthetic oligonucleotide
  Target: ATXN2; (+) strand; PAM type: NRG; PAM sequence: CAG
tcttagatagagtatgtttt

SEQ ID NO: 38258 - DNA, 20 bp, Artificial Sequence
  Description of Artificial Sequence: Synthetic oligonucleotide
  Target: ATXN2; (+) strand; PAM type: NRG; PAM sequence: AAG
tgttttcagaaacttaaatt

SEQ ID NO: 38259 - DNA, 20 bp, Artificial Sequence
  Description of Artificial Sequence: Synthetic oligonucleotide
  Target: ATXN2; (+) strand; PAM type: NRG; PAM sequence: AAG
tttcagaaacttaaattaag

SEQ ID NO: 38260 - DNA, 20 bp, Artificial Sequence
  Description of Artificial Sequence: Synthetic oligonucleotide
  Target: ATXN2; (+) strand; PAM type: NRG; PAM sequence: GAG
tcagaaacttaaattaagaa

SEQ ID NO: 38261 - DNA, 20 bp, Artificial Sequence
  Description of Artificial Sequence: Synthetic oligonucleotide
  Target: ATXN2; (+) strand; PAM type: NRG; PAM sequence: TGG
ttaagaagagtcacacacac

SEQ ID NO: 38262 - DNA, 20 bp, Artificial Sequence
  Description of Artificial Sequence: Synthetic oligonucleotide
  Target: ATXN2; (+) strand; PAM type: NRG; PAM sequence: AAG
agaagagtcacacacactgg

SEQ ID NO: 38263 - DNA, 20 bp, Artificial Sequence
  Description of Artificial Sequence: Synthetic oligonucleotide
  Target: ATXN2; (+) strand; PAM type: NRG; PAM sequence: GAG
aagagtcacacacactggaa

SEQ ID NO: 38264 - DNA, 20 bp, Artificial Sequence
  Description of Artificial Sequence: Synthetic oligonucleotide
  Target: ATXN2; (+) strand; PAM type: NRG; PAM sequence: AAG
cacactggaagagacaaaca

SEQ ID NO: 38265 - DNA, 20 bp, Artificial Sequence
  Description of Artificial Sequence: Synthetic oligonucleotide
  Target: ATXN2; (+) strand; PAM type: NRG; PAM sequence: GAG
catcgcatgcgtctgctcat

SEQ ID NO: 38266 - DNA, 20 bp, Artificial Sequence
  Description of Artificial Sequence: Synthetic oligonucleotide
  Target: ATXN2; (+) strand; PAM type: NRG; PAM sequence: GAG
ctgctcatgagccccgtact

SEQ ID NO: 38267 - DNA, 20 bp, Artificial Sequence
  Description of Artificial Sequence: Synthetic oligonucleotide
  Target: ATXN2; (+) strand; PAM type: NRG; PAM sequence: AAG
agccccgtactgagttgctg

SEQ ID NO: 38268 - DNA, 20 bp, Artificial Sequence
  Description of Artificial Sequence: Synthetic oligonucleotide
  Target: ATXN2; (+) strand; PAM type: NRG; PAM sequence: AAG
cccgtactgagttgctgaag

SEQ ID NO: 38269 - DNA, 20 bp, Artificial Sequence
  Description of Artificial Sequence: Synthetic oligonucleotide
  Target: ATXN2; (+) strand; PAM type: NRG; PAM sequence: CAG
tgctgaagaagatactaaac

SEQ ID NO: 38270 - DNA, 20 bp, Artificial Sequence
  Description of Artificial Sequence: Synthetic oligonucleotide
  Target: ATXN2; (+) strand; PAM type: NRG; PAM sequence: AGG
gctgaagaagatactaaacc

SEQ ID NO: 38271 - DNA, 20 bp, Artificial Sequence
  Description of Artificial Sequence: Synthetic oligonucleotide
  Target: ATXN2; (+) strand; PAM type: NRG; PAM sequence: TGG
aagaagatactaaaccaggc

SEQ ID NO: 38272 - DNA, 20 bp, Artificial Sequence
  Description of Artificial Sequence: Synthetic oligonucleotide
  Target: ATXN2; (+) strand; PAM type: NRG; PAM sequence: GGG
agaagatactaaaccaggct

SEQ ID NO: 38273 - DNA, 20 bp, Artificial Sequence
  Description of Artificial Sequence: Synthetic oligonucleotide
  Target: ATXN2; (+) strand; PAM type: NRG; PAM sequence: TGG
aaaccaggctgggcgtgtgt

SEQ ID NO: 38274 - DNA, 20 bp, Artificial Sequence
  Description of Artificial Sequence: Synthetic oligonucleotide
  Target: ATXN2; (+) strand; PAM type: NRG; PAM sequence: TGG
ccaggctgggcgtgtgttgg

SEQ ID NO: 38275 - DNA, 20 bp, Artificial Sequence
  Description of Artificial Sequence: Synthetic oligonucleotide
  Target: ATXN2; (+) strand; PAM type: NRG; PAM sequence: TAG
tgttggtggtgccatcattc

SEQ ID NO: 38276 - DNA, 20 bp, Artificial Sequence
  Description of Artificial Sequence: Synthetic oligonucleotide
  Target: ATXN2; (+) strand; PAM type: NRG; PAM sequence: CAG
tctagcattaccctgtatta

SEQ ID NO: 38277 - DNA, 20 bp, Artificial Sequence
  Description of Artificial Sequence: Synthetic oligonucleotide
  Target: ATXN2; (+) strand; PAM type: NRG; PAM sequence: AGG
ctagcattaccctgtattac

SEQ ID NO: 38278 - DNA, 20 bp, Artificial Sequence
  Description of Artificial Sequence: Synthetic oligonucleotide
  Target: ATXN2; (+) strand; PAM type: NRG; PAM sequence: TAG
taccctgtattacaggacta

SEQ ID NO: 38279 - DNA, 20 bp, Artificial Sequence
  Description of Artificial Sequence: Synthetic oligonucleotide
  Target: ATXN2; (+) strand; PAM type: NRG; PAM sequence: GAG
tattacaggactatagacat

SEQ ID NO: 38280 - DNA, 20 bp, Artificial Sequence
  Description of Artificial Sequence: Synthetic oligonucleotide
  Target: ATXN2; (+) strand; PAM type: NRG; PAM sequence: AGG
attacaggactatagacatg

SEQ ID NO: 38281 - DNA, 20 bp, Artificial Sequence
  Description of Artificial Sequence: Synthetic oligonucleotide
  Target: ATXN2; (+) strand; PAM type: NRG; PAM sequence: AAG
ctgtgttcaaacaaaaaata

SEQ ID NO: 38282 - DNA, 20 bp, Artificial Sequence
  Description of Artificial Sequence: Synthetic oligonucleotide
  Target: ATXN2; (+) strand; PAM type: NRG; PAM sequence: AAG
gttcaaacaaaaaataaaga

SEQ ID NO: 38283 - DNA, 20 bp, Artificial Sequence
  Description of Artificial Sequence: Synthetic oligonucleotide
  Target: ATXN2; (+) strand; PAM type: NRG; PAM sequence: TAG
aagcacattaacactgcaaa

SEQ ID NO: 38284 - DNA, 20 bp, Artificial Sequence
  Description of Artificial Sequence: Synthetic oligonucleotide
  Target: ATXN2; (+) strand; PAM type: NRG; PAM sequence: GAG
gcacattaacactgcaaata

SEQ ID NO: 38285 - DNA, 20 bp, Artificial Sequence
  Description of Artificial Sequence: Synthetic oligonucleotide
  Target: ATXN2; (+) strand; PAM type: NRG; PAM sequence: AAG
ttaacactgcaaatagagcc

SEQ ID NO: 38286 - DNA, 20 bp, Artificial Sequence
  Description of Artificial Sequence: Synthetic oligonucleotide
  Target: ATXN2; (+) strand; PAM type: NRG; PAM sequence: CAG
acactgcaaatagagccaag

SEQ ID NO: 38287 - DNA, 20 bp, Artificial Sequence
  Description of Artificial Sequence: Synthetic oligonucleotide
  Target: ATXN2; (+) strand; PAM type: NRG; PAM sequence: TAG
aaatagagccaagcagactt

SEQ ID NO: 38288 - DNA, 20 bp, Artificial Sequence
  Description of Artificial Sequence: Synthetic oligonucleotide
  Target: ATXN2; (+) strand; PAM type: NRG; PAM sequence: AAG
gagccaagcagactttagtt

SEQ ID NO: 38289 - DNA, 20 bp, Artificial Sequence
  Description of Artificial Sequence: Synthetic oligonucleotide
  Target: ATXN2; (+) strand; PAM type: NRG; PAM sequence: TGG
agttaagatttttaactcca

SEQ ID NO: 38290 - DNA, 20 bp, Artificial Sequence
  Description of Artificial Sequence: Synthetic oligonucleotide
  Target: ATXN2; (+) strand; PAM type: NRG; PAM sequence: CAG
atttttaactccatggtttc

SEQ ID NO: 38291 - DNA, 20 bp, Artificial Sequence
  Description of Artificial Sequence: Synthetic oligonucleotide
  Target: ATXN2; (+) strand; PAM type: NRG; PAM sequence: CAG
ctccatggtttccagatttc

SEQ ID NO: 38292 - DNA, 20 bp, Artificial Sequence
  Description of Artificial Sequence: Synthetic oligonucleotide
  Target: ATXN2; (+) strand; PAM type: NRG; PAM sequence: CAG
ggtttccagatttccagaaa

SEQ ID NO: 38293 - DNA, 20 bp, Artificial Sequence
  Description of Artificial Sequence: Synthetic oligonucleotide
  Target: ATXN2; (+) strand; PAM type: NRG; PAM sequence: TGG
gtaaactctcaaatctttct

SEQ ID NO: 38294 - DNA, 20 bp, Artificial Sequence
  Description of Artificial Sequence: Synthetic oligonucleotide
  Target: ATXN2; (+) strand; PAM type: NRG; PAM sequence: CAG
tctgaacctcttacaatcat

SEQ ID NO: 38295 - DNA, 20 bp, Artificial Sequence
  Description of Artificial Sequence: Synthetic oligonucleotide
  Target: ATXN2; (+) strand; PAM type: NRG; PAM sequence: AAG
accttcgaatatatattgaa

SEQ ID NO: 38296 - DNA, 20 bp, Artificial Sequence
  Description of Artificial Sequence: Synthetic oligonucleotide
  Target: ATXN2; (+) strand; PAM type: NRG; PAM sequence: AGG
ccttcgaatatatattgaaa

SEQ ID NO: 38297 - DNA, 20 bp, Artificial Sequence
  Description of Artificial Sequence: Synthetic oligonucleotide
  Target: ATXN2; (+) strand; PAM type: NRG; PAM sequence: GGG
cttcgaatatatattgaaaa

SEQ ID NO: 38298 - DNA, 20 bp, Artificial Sequence
  Description of Artificial Sequence: Synthetic oligonucleotide
  Target: ATXN2; (+) strand; PAM type: NRG; PAM sequence: AAG
atatattgaaaagggtcccc

SEQ ID NO: 38299 - DNA, 20 bp, Artificial Sequence
  Description of Artificial Sequence: Synthetic oligonucleotide
  Target: ATXN2; (+) strand; PAM type: NRG; PAM sequence: TAG
gaaaagggtccccaagtcct

SEQ ID NO: 38300 - DNA, 20 bp, Artificial Sequence
  Description of Artificial Sequence: Synthetic oligonucleotide
  Target: ATXN2; (+) strand; PAM type: NRG; PAM sequence: AAG
tctaccctaccatcacacaa

SEQ ID NO: 38301 - DNA, 20 bp, Artificial Sequence
  Description of Artificial Sequence: Synthetic oligonucleotide
  Target: ATXN2; (+) strand; PAM type: NRG; PAM sequence: AAG
acacaaaagcaaaaattata

SEQ ID NO: 38302 - DNA, 20 bp, Artificial Sequence
  Description of Artificial Sequence: Synthetic oligonucleotide
  Target: ATXN2; (+) strand; PAM type: NRG; PAM sequence: AGG
cacaaaagcaaaaattataa

SEQ ID NO: 38303 - DNA, 20 bp, Artificial Sequence
  Description of Artificial Sequence: Synthetic oligonucleotide
  Target: ATXN2; (+) strand; PAM type: NRG; PAM sequence: AAG
aaatccctttaccatattaa

SEQ ID NO: 38304 - DNA, 20 bp, Artificial Sequence
  Description of Artificial Sequence: Synthetic oligonucleotide
  Target: ATXN2; (+) strand; PAM type: NRG; PAM sequence: TGG
atattaaaagtttttttata

SEQ ID NO: 38305 - DNA, 20 bp, Artificial Sequence
  Description of Artificial Sequence: Synthetic oligonucleotide
  Target: ATXN2; (+) strand; PAM type: NRG; PAM sequence: AAG
ttttatatggtacaaaaatt

SEQ ID NO: 38306 - DNA, 20 bp, Artificial Sequence
  Description of Artificial Sequence: Synthetic oligonucleotide
  Target: ATXN2; (+) strand; PAM type: NRG; PAM sequence: GAG
ttatatggtacaaaaattaa

SEQ ID NO: 38307 - DNA, 20 bp, Artificial Sequence
  Description of Artificial Sequence: Synthetic oligonucleotide
  Target: ATXN2; (+) strand; PAM type: NRG; PAM sequence: TAG
atggtacaaaaattaagagt

SEQ ID NO: 38308 - DNA, 20 bp, Artificial Sequence
  Description of Artificial Sequence: Synthetic oligonucleotide
  Target: ATXN2; (+) strand; PAM type: NRG; PAM sequence: AGG
tggtacaaaaattaagagtt

SEQ ID NO: 38309 - DNA, 20 bp, Artificial Sequence
  Description of Artificial Sequence: Synthetic oligonucleotide
  Target: ATXN2; (+) strand; PAM type: NRG; PAM sequence: CAG
aattaagagttaggccttac

SEQ ID NO: 38310 - DNA, 20 bp, Artificial Sequence
  Description of Artificial Sequence: Synthetic oligonucleotide
  Target: ATXN2; (+) strand; PAM type: NRG; PAM sequence: GAG
aggccttaccagccttacct

SEQ ID NO: 38311 - DNA, 20 bp, Artificial Sequence
  Description of Artificial Sequence: Synthetic oligonucleotide
  Target: ATXN2; (+) strand; PAM type: NRG; PAM sequence: TGG
cttacctgagactgataatg

SEQ ID NO: 38312 - DNA, 20 bp, Artificial Sequence
  Description of Artificial Sequence: Synthetic oligonucleotide
  Target: ATXN2; (+) strand; PAM type: NRG; PAM sequence: AAG
taatgtggcacatgctgaac

SEQ ID NO: 38313 - DNA, 20 bp, Artificial Sequence
  Description of Artificial Sequence: Synthetic oligonucleotide
  Target: ATXN2; (+) strand; PAM type: NRG; PAM sequence: AGG
aatgtggcacatgctgaaca

SEQ ID NO: 38314 - DNA, 20 bp, Artificial Sequence
  Description of Artificial Sequence: Synthetic oligonucleotide
  Target: ATXN2; (+) strand; PAM type: NRG; PAM sequence: GGG
atgtggcacatgctgaacaa

SEQ ID NO: 38315 - DNA, 20 bp, Artificial Sequence
  Description of Artificial Sequence: Synthetic oligonucleotide
  Target: ATXN2; (+) strand; PAM type: NRG; PAM sequence: GGG
tgtggcacatgctgaacaag

SEQ ID NO: 38316 - DNA, 20 bp, Artificial Sequence
  Description of Artificial Sequence: Synthetic oligonucleotide
  Target: ATXN2; (+) strand; PAM type: NRG; PAM sequence: TGG
tgctgaacaaggggctgatt

SEQ ID NO: 38317 - DNA, 20 bp, Artificial Sequence
  Description of Artificial Sequence: Synthetic oligonucleotide
  Target: ATXN2; (+) strand; PAM type: NRG; PAM sequence: GGG
gctgaacaaggggctgattt

SEQ ID NO: 38318 - DNA, 20 bp, Artificial Sequence
  Description of Artificial Sequence: Synthetic oligonucleotide
  Target: ATXN2; (+) strand; PAM type: NRG; PAM sequence: GAG
gggctgatttgggaactgct

SEQ ID NO: 38319 - DNA, 20 bp, Artificial Sequence
  Description of Artificial Sequence: Synthetic oligonucleotide
  Target: ATXN2; (+) strand; PAM type: NRG; PAM sequence: AGG
ggctgatttgggaactgctg

SEQ ID NO: 38320 - DNA, 20 bp, Artificial Sequence
  Description of Artificial Sequence: Synthetic oligonucleotide
  Target: ATXN2; (+) strand; PAM type: NRG; PAM sequence: TAG
ttgggaactgctgaggactg

SEQ ID NO: 38321 - DNA, 20 bp, Artificial Sequence
  Description of Artificial Sequence: Synthetic oligonucleotide
  Target: ATXN2; (+) strand; PAM type: NRG; PAM sequence: AGG
tgggaactgctgaggactgt

SEQ ID NO: 38322 - DNA, 20 bp, Artificial Sequence
  Description of Artificial Sequence: Synthetic oligonucleotide
  Target: ATXN2; (+) strand; PAM type: NRG; PAM sequence: TGG
actgtaggcaacatattgcg

SEQ ID NO: 38323 - DNA, 20 bp, Artificial Sequence
  Description of Artificial Sequence: Synthetic oligonucleotide
  Target: ATXN2; (+) strand; PAM type: NRG; PAM sequence: GAG
tgtaggcaacatattgcgtg

SEQ ID NO: 38324 - DNA, 20 bp, Artificial Sequence
  Description of Artificial Sequence: Synthetic oligonucleotide
  Target: ATXN2; (+) strand; PAM type: NRG; PAM sequence: AAG
ggcaacatattgcgtggagt

SEQ ID NO: 38325 - DNA, 20 bp, Artificial Sequence
  Description of Artificial Sequence: Synthetic oligonucleotide
  Target: ATXN2; (+) strand; PAM type: NRG; PAM sequence: TGG
acatattgcgtggagtaagc

SEQ ID NO: 38326 - DNA, 20 bp, Artificial Sequence
  Description of Artificial Sequence: Synthetic oligonucleotide
  Target: ATXN2; (+) strand; PAM type: NRG; PAM sequence: TGG
tattgcgtggagtaagctgg

SEQ ID NO: 38327 - DNA, 20 bp, Artificial Sequence
  Description of Artificial Sequence: Synthetic oligonucleotide
  Target: ATXN2; (+) strand; PAM type: NRG; PAM sequence: GGG
attgcgtggagtaagctggt

SEQ ID NO: 38328 - DNA, 20 bp, Artificial Sequence
  Description of Artificial Sequence: Synthetic oligonucleotide
  Target: ATXN2; (+) strand; PAM type: NRG; PAM sequence: GGG
ttgcgtggagtaagctggtg

SEQ ID NO: 38329 - DNA, 20 bp, Artificial Sequence
  Description of Artificial Sequence: Synthetic oligonucleotide
  Target: ATXN2; (+) strand; PAM type: NRG; PAM sequence: TGG
cgtggagtaagctggtgggg

SEQ ID NO: 38330 - DNA, 20 bp, Artificial Sequence
  Description of Artificial Sequence: Synthetic oligonucleotide
  Target: ATXN2; (+) strand; PAM type: NRG; PAM sequence: CGG
gctggtggggtggctgcaat

SEQ ID NO: 38331 - DNA, 20 bp, Artificial Sequence
  Description of Artificial Sequence: Synthetic oligonucleotide
  Target: ATXN2; (+) strand; PAM type: NRG; PAM sequence: TGG
ggtggggtggctgcaatcgg

SEQ ID NO: 38332 - DNA, 20 bp, Artificial Sequence
  Description of Artificial Sequence: Synthetic oligonucleotide
  Target: ATXN2; (+) strand; PAM type: NRG; PAM sequence: GGG
gtggggtggctgcaatcggt

SEQ ID NO: 38333 - DNA, 20 bp, Artificial Sequence
  Description of Artificial Sequence: Synthetic oligonucleotide
  Target: ATXN2; (+) strand; PAM type: NRG; PAM sequence: TGG
ggtgggcccgctgctgacgc

SEQ ID NO: 38334 - DNA, 20 bp, Artificial Sequence
  Description of Artificial Sequence: Synthetic oligonucleotide
  Target: ATXN2; (+) strand; PAM type: NRG; PAM sequence: GGG
gtgggcccgctgctgacgct

SEQ ID NO: 38335 - DNA, 20 bp, Artificial Sequence
  Description of Artificial Sequence: Synthetic oligonucleotide
  Target: ATXN2; (+) strand; PAM type: NRG; PAM sequence: TGG
tgctgacgctgggtgcatca

SEQ ID NO: 38336 - DNA, 20 bp, Artificial Sequence
  Description of Artificial Sequence: Synthetic oligonucleotide
  Target: ATXN2; (+) strand; PAM type: NRG; PAM sequence: TGG
tcatggcactctgatgatgc

SEQ ID NO: 38337 - DNA, 20 bp, Artificial Sequence
  Description of Artificial Sequence: Synthetic oligonucleotide
  Target: ATXN2; (+) strand; PAM type: NRG; PAM sequence: TGG
gatgctggtcttgccgctgt

SEQ ID NO: 38338 - DNA, 20 bp, Artificial Sequence
  Description of Artificial Sequence: Synthetic oligonucleotide
  Target: ATXN2; (+) strand; PAM type: NRG; PAM sequence: GGG
atgctggtcttgccgctgtt

SEQ ID NO: 38339 - DNA, 20 bp, Artificial Sequence
  Description of Artificial Sequence: Synthetic oligonucleotide
  Target: ATXN2; (+) strand; PAM type: NRG; PAM sequence: GGG
tgctggtcttgccgctgttg

SEQ ID NO: 38340 - DNA, 20 bp, Artificial Sequence
  Description of Artificial Sequence: Synthetic oligonucleotide
  Target: ATXN2; (+) strand; PAM type: NRG; PAM sequence: TGG
tgccgctgttggggcatatt

SEQ ID NO: 38341 - DNA, 20 bp, Artificial Sequence
  Description of Artificial Sequence: Synthetic oligonucleotide
  Target: ATXN2; (+) strand; PAM type: NRG; PAM sequence: CAG
ttggggcatatttggtactg

SEQ ID NO: 38342 - DNA, 20 bp, Artificial Sequence
  Description of Artificial Sequence: Synthetic oligonucleotide
  Target: ATXN2; (+) strand; PAM type: NRG; PAM sequence: AAG
atttggtactgcagaaaaaa

SEQ ID NO: 38343 - DNA, 20 bp, Artificial Sequence
  Description of Artificial Sequence: Synthetic oligonucleotide
  Target: ATXN2; (+) strand; PAM type: NRG; PAM sequence: CAG
tggtactgcagaaaaaaaag

SEQ ID NO: 38344 - DNA, 20 bp, Artificial Sequence
  Description of Artificial Sequence: Synthetic oligonucleotide
  Target: ATXN2; (+) strand; PAM type: NRG; PAM sequence: CAG
aaagcagactgcctattaaa

SEQ ID NO: 38345 - DNA, 20 bp, Artificial Sequence
  Description of Artificial Sequence: Synthetic oligonucleotide
  Target: ATXN2; (+) strand; PAM type: NRG; PAM sequence: CAG
cctattaaacagtatctcca

SEQ ID NO: 38346 - DNA, 20 bp, Artificial Sequence
  Description of Artificial Sequence: Synthetic oligonucleotide
  Target: ATXN2; (+) strand; PAM type: NRG; PAM sequence: TGG
gcataatacatgtgttcaca

SEQ ID NO: 38347 - DNA, 20 bp, Artificial Sequence
  Description of Artificial Sequence: Synthetic oligonucleotide
  Target: ATXN2; (+) strand; PAM type: NRG; PAM sequence: TAG
atacatgtgttcacatggtc

SEQ ID NO: 38348 - DNA, 20 bp, Artificial Sequence
  Description of Artificial Sequence: Synthetic oligonucleotide
  Target: ATXN2; (+) strand; PAM type: NRG; PAM sequence: AGG
tacatgtgttcacatggtct

SEQ ID NO: 38349 - DNA, 20 bp, Artificial Sequence
  Description of Artificial Sequence: Synthetic oligonucleotide
  Target: ATXN2; (+) strand; PAM type: NRG; PAM sequence: GAG
catgtgttcacatggtctag

SEQ ID NO: 38350 - DNA, 20 bp, Artificial Sequence
  Description of Artificial Sequence: Synthetic oligonucleotide
  Target: ATXN2; (+) strand; PAM type: NRG; PAM sequence: AGG
atgtgttcacatggtctagg

SEQ ID NO: 38351 - DNA, 20 bp, Artificial Sequence
  Description of Artificial Sequence: Synthetic oligonucleotide
  Target: ATXN2; (+) strand; PAM type: NRG; PAM sequence: TGG
cactcccacttctgccactc

SEQ ID NO: 38352 - DNA, 20 bp, Artificial Sequence
  Description of Artificial Sequence: Synthetic oligonucleotide
  Target: ATXN2; (+) strand; PAM type: NRG; PAM sequence: GGG
actcccacttctgccactct

SEQ ID NO: 38353 - DNA, 20 bp, Artificial Sequence
  Description of Artificial Sequence: Synthetic oligonucleotide
  Target: ATXN2; (+) strand; PAM type: NRG; PAM sequence: TAG
tattttcctatcatgcatgc

SEQ ID NO: 38354 - DNA, 20 bp, Artificial Sequence
  Description of Artificial Sequence: Synthetic oligonucleotide
  Target: ATXN2; (+) strand; PAM type: NRG; PAM sequence: CAG
ctatcatgcatgctagtcct

SEQ ID NO: 38355 - DNA, 20 bp, Artificial Sequence
  Description of Artificial Sequence: Synthetic oligonucleotide
  Target: ATXN2; (+) strand; PAM type: NRG; PAM sequence: CAG
tagtcctcagcctcaaacac

SEQ ID NO: 38356 - DNA, 20 bp, Artificial Sequence
  Description of Artificial Sequence: Synthetic oligonucleotide
  Target: ATXN2; (+) strand; PAM type: NRG; PAM sequence: CAG
aaacaccagttcccaaatcc

SEQ ID NO: 38357 - DNA, 20 bp, Artificial Sequence
  Description of Artificial Sequence: Synthetic oligonucleotide
  Target: ATXN2; (+) strand; PAM type: NRG; PAM sequence: TGG
accagttcccaaatcccagc

SEQ ID NO: 38358 - DNA, 20 bp, Artificial Sequence
  Description of Artificial Sequence: Synthetic oligonucleotide
  Target: ATXN2; (+) strand; PAM type: NRG; PAM sequence: GGG
ccagttcccaaatcccagct

SEQ ID NO: 38359 - DNA, 20 bp, Artificial Sequence
  Description of Artificial Sequence: Synthetic oligonucleotide
  Target: ATXN2; (+) strand; PAM type: NRG; PAM sequence: CAG
gataattctgcttcatcctt

SEQ ID NO: 38360 - DNA, 20 bp, Artificial Sequence
  Description of Artificial Sequence: Synthetic oligonucleotide
  Target: ATXN2; (+) strand; PAM type: NRG; PAM sequence: AGG
ataattctgcttcatccttc

SEQ ID NO: 38361 - DNA, 20 bp, Artificial Sequence
  Description of Artificial Sequence: Synthetic oligonucleotide
  Target: ATXN2; (+) strand; PAM type: NRG; PAM sequence: CAG
ctgcttcatccttcaggtgt

SEQ ID NO: 38362 - DNA, 20 bp, Artificial Sequence
  Description of Artificial Sequence: Synthetic oligonucleotide
  Target: ATXN2; (+) strand; PAM type: NRG; PAM sequence: AAG
tccttcaggtgtcagcttga

SEQ ID NO: 38363 - DNA, 20 bp, Artificial Sequence
  Description of Artificial Sequence: Synthetic oligonucleotide
  Target: ATXN2; (+) strand; PAM type: NRG; PAM sequence: CAG
cagcttgaaagcaacttcct

SEQ ID NO: 38364 - DNA, 20 bp, Artificial Sequence
  Description of Artificial Sequence: Synthetic oligonucleotide
  Target: ATXN2; (+) strand; PAM type: NRG; PAM sequence: GAG
gcttgaaagcaacttcctca

SEQ ID NO: 38365 - DNA, 20 bp, Artificial Sequence
  Description of Artificial Sequence: Synthetic oligonucleotide
  Target: ATXN2; (+) strand; PAM type: NRG; PAM sequence: AGG
cttgaaagcaacttcctcag

SEQ ID NO: 38366 - DNA, 20 bp, Artificial Sequence
  Description of Artificial Sequence: Synthetic oligonucleotide
  Target: ATXN2; (+) strand; PAM type: NRG; PAM sequence: GGG
ttgaaagcaacttcctcaga

SEQ ID NO: 38367 - DNA, 20 bp, Artificial Sequence
  Description of Artificial Sequence: Synthetic oligonucleotide
  Target: ATXN2; (+) strand; PAM type: NRG; PAM sequence: TGG
ctcagagggactttctctca

SEQ ID NO: 38368 - DNA, 20 bp, Artificial Sequence
  Description of Artificial Sequence: Synthetic oligonucleotide
  Target: ATXN2; (+) strand; PAM type: NRG; PAM sequence: CAG
ggactttctctcatggccct

SEQ ID NO: 38369 - DNA, 20 bp, Artificial Sequence
  Description of Artificial Sequence: Synthetic oligonucleotide
  Target: ATXN2; (+) strand; PAM type: NRG; PAM sequence: AAG
catggccctcagacttgatc

SEQ ID NO: 38370 - DNA, 20 bp, Artificial Sequence
  Description of Artificial Sequence: Synthetic oligonucleotide
  Target: ATXN2; (+) strand; PAM type: NRG; PAM sequence: CAG
acttgatcaagtccctgtaa

SEQ ID NO: 38371 - DNA, 20 bp, Artificial Sequence
  Description of Artificial Sequence: Synthetic oligonucleotide
  Target: ATXN2; (+) strand; PAM type: NRG; PAM sequence: CAG
gtccctgtaacagactctca

SEQ ID NO: 38372 - DNA, 20 bp, Artificial Sequence
  Description of Artificial Sequence: Synthetic oligonucleotide
  Target: ATXN2; (+) strand; PAM type: NRG; PAM sequence: TGG
ttatgaaatcgcttctcata

SEQ ID NO: 38373 - DNA, 20 bp, Artificial Sequence
  Description of Artificial Sequence: Synthetic oligonucleotide
  Target: ATXN2; (+) strand; PAM type: NRG; PAM sequence: TGG
gcttctcatatggtattttc

SEQ ID NO: 38374 - DNA, 20 bp, Artificial Sequence
  Description of Artificial Sequence: Synthetic oligonucleotide
  Target: ATXN2; (+) strand; PAM type: NRG; PAM sequence: GGG
cttctcatatggtattttct

SEQ ID NO: 38375 - DNA, 20 bp, Artificial Sequence
  Description of Artificial Sequence: Synthetic oligonucleotide
  Target: ATXN2; (+) strand; PAM type: NRG; PAM sequence: CGG
tcatatggtattttctggga

SEQ ID NO: 38376 - DNA, 20 bp, Artificial Sequence
  Description of Artificial Sequence: Synthetic oligonucleotide
  Target: ATXN2; (+) strand; PAM type: NRG; PAM sequence: GGG
catatggtattttctgggac

SEQ ID NO: 38377 - DNA, 20 bp, Artificial Sequence
  Description of Artificial Sequence: Synthetic oligonucleotide
  Target: ATXN2; (+) strand; PAM type: NRG; PAM sequence: GAG
acgggcactgcattcatttt

SEQ ID NO: 38378 - DNA, 20 bp, Artificial Sequence
  Description of Artificial Sequence: Synthetic oligonucleotide
  Target: ATXN2; (+) strand; PAM type: NRG; PAM sequence: AAG
cattcattttgagaaaaaca

SEQ ID NO: 38379 - DNA, 20 bp, Artificial Sequence
  Description of Artificial Sequence: Synthetic oligonucleotide
  Target: ATXN2; (+) strand; PAM type: NRG; PAM sequence: AGG
attcattttgagaaaaacaa

SEQ ID NO: 38380 - DNA, 20 bp, Artificial Sequence
  Description of Artificial Sequence: Synthetic oligonucleotide
  Target: ATXN2; (+) strand; PAM type: NRG; PAM sequence: AAG
gaaaaacaaaggcatgacca

SEQ ID NO: 38381 - DNA, 20 bp, Artificial Sequence
  Description of Artificial Sequence: Synthetic oligonucleotide
  Target: ATXN2; (+) strand; PAM type: NRG; PAM sequence: GAG
aaaacaaaggcatgaccaaa

SEQ ID NO: 38382 - DNA, 20 bp, Artificial Sequence
  Description of Artificial Sequence: Synthetic oligonucleotide
  Target: ATXN2; (+) strand; PAM type: NRG; PAM sequence: CAG
gcatgaccaaagagccaaaa

SEQ ID NO: 38383 - DNA, 20 bp, Artificial Sequence
  Description of Artificial Sequence: Synthetic oligonucleotide
  Target: ATXN2; (+) strand; PAM type: NRG; PAM sequence: CAG
ttcccattctttctcaaacc

SEQ ID NO: 38384 - DNA, 20 bp, Artificial Sequence
  Description of Artificial Sequence: Synthetic oligonucleotide
  Target: ATXN2; (+) strand; PAM type: NRG; PAM sequence: CAG
ttctcaaacccagtataaca

SEQ ID NO: 38385 - DNA, 20 bp, Artificial Sequence
  Description of Artificial Sequence: Synthetic oligonucleotide
  Target: ATXN2; (+) strand; PAM type: NRG; PAM sequence: TAG
cagtataacacagcaccatg

SEQ ID NO: 38386 - DNA, 20 bp, Artificial Sequence
  Description of Artificial Sequence: Synthetic oligonucleotide
  Target: ATXN2; (+) strand; PAM type: NRG; PAM sequence: CAG
cagcaccatgtagcatatac

SEQ ID NO: 38387 - DNA, 20 bp, Artificial Sequence
  Description of Artificial Sequence: Synthetic oligonucleotide
  Target: ATXN2; (+) strand; PAM type: NRG; PAM sequence: AGG
agcaccatgtagcatatacc

SEQ ID NO: 38388 - DNA, 20 bp, Artificial Sequence
  Description of Artificial Sequence: Synthetic oligonucleotide
  Target: ATXN2; (+) strand; PAM type: NRG; PAM sequence: TAG
tataccaggtttctaaataa

SEQ ID NO: 38389 - DNA, 20 bp, Artificial Sequence
  Description of Artificial Sequence: Synthetic oligonucleotide
  Target: ATXN2; (+) strand; PAM type: NRG; PAM sequence: AAG
ctaaataatagttcttttaa

SEQ ID NO: 38390 - DNA, 20 bp, Artificial Sequence
  Description of Artificial Sequence: Synthetic oligonucleotide
  Target: ATXN2; (+) strand; PAM type: NRG; PAM sequence: CAG
atgtcttatcttaatccaca

SEQ ID NO: 38391 - DNA, 20 bp, Artificial Sequence
  Description of Artificial Sequence: Synthetic oligonucleotide
  Target: ATXN2; (+) strand; PAM type: NRG; PAM sequence: AGG
tgtcttatcttaatccacac

SEQ ID NO: 38392 - DNA, 20 bp, Artificial Sequence
  Description of Artificial Sequence: Synthetic oligonucleotide
  Target: ATXN2; (+) strand; PAM type: NRG; PAM sequence: TGG
cttatcttaatccacacagg

SEQ ID NO: 38393 - DNA, 20 bp, Artificial Sequence
  Description of Artificial Sequence: Synthetic oligonucleotide
  Target: ATXN2; (+) strand; PAM type: NRG; PAM sequence: AAG
cacacaggtggtctgcatgt

SEQ ID NO: 38394 - DNA, 20 bp, Artificial Sequence
  Description of Artificial Sequence: Synthetic oligonucleotide
  Target: ATXN2; (+) strand; PAM type: NRG; PAM sequence: AGG
acacaggtggtctgcatgta

SEQ ID NO: 38395 - DNA, 20 bp, Artificial Sequence
  Description of Artificial Sequence: Synthetic oligonucleotide
  Target: ATXN2; (+) strand; PAM type: NRG; PAM sequence: GGG
cacaggtggtctgcatgtaa

SEQ ID NO: 38396 - DNA, 20 bp, Artificial Sequence
  Description of Artificial Sequence: Synthetic oligonucleotide
  Target: ATXN2; (+) strand; PAM type: NRG; PAM sequence: TAG
gcctcgccctgttacaactc

SEQ ID NO: 38397 - DNA, 20 bp, Artificial Sequence
  Description of Artificial Sequence: Synthetic oligonucleotide
  Target: ATXN2; (+) strand; PAM type: NRG; PAM sequence: AAG
gccctgttacaactctagtt

SEQ ID NO: 38398 - DNA, 20 bp, Artificial Sequence
  Description of Artificial Sequence: Synthetic oligonucleotide
  Target: ATXN2; (+) strand; PAM type: NRG; PAM sequence: CAG
tacaactctagttaagaatt

SEQ ID NO: 38399 - DNA, 20 bp, Artificial Sequence
  Description of Artificial Sequence: Synthetic oligonucleotide
  Target: ATXN2; (+) strand; PAM type: NRG; PAM sequence: GAG
tcaactgtcatctcccatgt

SEQ ID NO: 38400 - DNA, 20 bp, Artificial Sequence
  Description of Artificial Sequence: Synthetic oligonucleotide
  Target: ATXN2; (+) strand; PAM type: NRG; PAM sequence: AGG
caactgtcatctcccatgtg

SEQ ID NO: 38401 - DNA, 20 bp, Artificial Sequence
  Description of Artificial Sequence: Synthetic oligonucleotide
  Target: ATXN2; (+) strand; PAM type: NRG; PAM sequence: CAG
tcccatgtgaggtttttttc

SEQ ID NO: 38402 - DNA, 20 bp, Artificial Sequence
  Description of Artificial Sequence: Synthetic oligonucleotide
  Target: ATXN2; (+) strand; PAM type: NRG; PAM sequence: CAG
aggtttttttccagttcctc

SEQ ID NO: 38403 - DNA, 20 bp, Artificial Sequence
  Description of Artificial Sequence: Synthetic oligonucleotide
  Target: ATXN2; (+) strand; PAM type: NRG; PAM sequence: GAG
ttttccagttcctccagcac

SEQ ID NO: 38404 - DNA, 20 bp, Artificial Sequence
  Description of Artificial Sequence: Synthetic oligonucleotide
  Target: ATXN2; (+) strand; PAM type: NRG; PAM sequence: TAG
ccagttcctccagcacgagc

SEQ ID NO: 38405 - DNA, 20 bp, Artificial Sequence
  Description of Artificial Sequence: Synthetic oligonucleotide
  Target: ATXN2; (+) strand; PAM type: NRG; PAM sequence: CAG
ctttcctcacacatttctta

SEQ ID NO: 38406 - DNA, 20 bp, Artificial Sequence
  Description of Artificial Sequence: Synthetic oligonucleotide
  Target: ATXN2; (+) strand; PAM type: NRG; PAM sequence: TGG
tattgtctgtgacctgtttc

SEQ ID NO: 38407 - DNA, 20 bp, Artificial Sequence
  Description of Artificial Sequence: Synthetic oligonucleotide
  Target: ATXN2; (+) strand; PAM type: NRG; PAM sequence: TGG
tctgtgacctgtttctggtg

SEQ ID NO: 38408 - DNA, 20 bp, Artificial Sequence
  Description of Artificial Sequence: Synthetic oligonucleotide
  Target: ATXN2; (+) strand; PAM type: NRG; PAM sequence: AAG
tttctggtgtggcattaacc

SEQ ID NO: 38409 - DNA, 20 bp, Artificial Sequence
  Description of Artificial Sequence: Synthetic oligonucleotide
  Target: ATXN2; (+) strand; PAM type: NRG; PAM sequence: CAG
tggcattaaccaagccactt

SEQ ID NO: 38410 - DNA, 20 bp, Artificial Sequence
  Description of Artificial Sequence: Synthetic oligonucleotide
  Target: ATXN2; (+) strand; PAM type: NRG; PAM sequence: AGG
ggcattaaccaagccacttc

SEQ ID NO: 38411 - DNA, 20 bp, Artificial Sequence
  Description of Artificial Sequence: Synthetic oligonucleotide
  Target: ATXN2; (+) strand; PAM type: NRG; PAM sequence: TGG
ccacttcaggaaaataattg

SEQ ID NO: 38412 - DNA, 20 bp, Artificial Sequence
  Description of Artificial Sequence: Synthetic oligonucleotide
  Target: ATXN2; (+) strand; PAM type: NRG; PAM sequence: TAG
gtggaatgactgcttacaac

SEQ ID NO: 38413 - DNA, 20 bp, Artificial Sequence
  Description of Artificial Sequence: Synthetic oligonucleotide
  Target: ATXN2; (+) strand; PAM type: NRG; PAM sequence: AGG
tggaatgactgcttacaact

SEQ ID NO: 38414 - DNA, 20 bp, Artificial Sequence
  Description of Artificial Sequence: Synthetic oligonucleotide
  Target: ATXN2; (+) strand; PAM type: NRG; PAM sequence: AAG
gactgcttacaactaggtat

SEQ ID NO: 38415 - DNA, 20 bp, Artificial Sequence
  Description of Artificial Sequence: Synthetic oligonucleotide
  Target: ATXN2; (+) strand; PAM type: NRG; PAM sequence: AGG
actgcttacaactaggtata

SEQ ID NO: 38416 - DNA, 20 bp, Artificial Sequence
  Description of Artificial Sequence: Synthetic oligonucleotide
  Target: ATXN2; (+) strand; PAM type: NRG; PAM sequence: AAG
acaactaggtataaggcaca

SEQ ID NO: 38417 - DNA, 20 bp, Artificial Sequence
  Description of Artificial Sequence: Synthetic oligonucleotide
  Target: ATXN2; (+) strand; PAM type: NRG; PAM sequence: TAG
ggtataaggcacaaagaata

SEQ ID NO: 38418 - DNA, 20 bp, Artificial Sequence
  Description of Artificial Sequence: Synthetic oligonucleotide
  Target: ATXN2; (+) strand; PAM type: NRG; PAM sequence: AAG
gaacttgttcataaaatcct

SEQ ID NO: 38419 - DNA, 20 bp, Artificial Sequence
  Description of Artificial Sequence: Synthetic oligonucleotide
  Target: ATXN2; (+) strand; PAM type: NRG; PAM sequence: TGG
tataattaactgcaaatttg

SEQ ID NO: 38420 - DNA, 20 bp, Artificial Sequence
  Description of Artificial Sequence: Synthetic oligonucleotide
  Target: ATXN2; (+) strand; PAM type: NRG; PAM sequence: TGG
cactaactgttgctgaaatt

SEQ ID NO: 38421 - DNA, 20 bp, Artificial Sequence
  Description of Artificial Sequence: Synthetic oligonucleotide
  Target: ATXN2; (+) strand; PAM type: NRG; PAM sequence: GGG
actaactgttgctgaaattt

SEQ ID NO: 38422 - DNA, 20 bp, Artificial Sequence
  Description of Artificial Sequence: Synthetic oligonucleotide
  Target: ATXN2; (+) strand; PAM type: NRG; PAM sequence: GAG
taactgttgctgaaatttgg

SEQ ID NO: 38423 - DNA, 20 bp, Artificial Sequence
  Description of Artificial Sequence: Synthetic oligonucleotide
  Target: ATXN2; (+) strand; PAM type: NRG; PAM sequence: GAG
actgttgctgaaatttggga

SEQ ID NO: 38424 - DNA, 20 bp, Artificial Sequence
  Description of Artificial Sequence: Synthetic oligonucleotide
  Target: ATXN2; (+) strand; PAM type: NRG; PAM sequence: TAG
ttgctgaaatttgggagagc

SEQ ID NO: 38425 - DNA, 20 bp, Artificial Sequence
  Description of Artificial Sequence: Synthetic oligonucleotide
  Target: ATXN2; (+) strand; PAM type: NRG; PAM sequence: TAG
tacatattattttatctatg

SEQ ID NO: 38426 - DNA, 20 bp, Artificial Sequence
  Description of Artificial Sequence: Synthetic oligonucleotide
  Target: ATXN2; (+) strand; PAM type: NRG; PAM sequence: AGG
acatattattttatctatgt

SEQ ID NO: 38427 - DNA, 20 bp, Artificial Sequence
  Description of Artificial Sequence: Synthetic oligonucleotide
  Target: ATXN2; (+) strand; PAM type: NRG; PAM sequence: AAG
attattttatctatgtagga

SEQ ID NO: 38428 - DNA, 20 bp, Artificial Sequence
  Description of Artificial Sequence: Synthetic oligonucleotide
  Target: ATXN2; (+) strand; PAM type: NRG; PAM sequence: TGG
catttttttatattttatct

SEQ ID NO: 38429 - DNA, 20 bp, Artificial Sequence
  Description of Artificial Sequence: Synthetic oligonucleotide
  Target: ATXN2; (+) strand; PAM type: NRG; PAM sequence: TGG
atttaaaaaccacctccttc

SEQ ID NO: 38430 - DNA, 20 bp, Artificial Sequence
  Description of Artificial Sequence: Synthetic oligonucleotide
  Target: ATXN2; (+) strand; PAM type: NRG; PAM sequence: AAG
cctccttctggtaaacaaaa

SEQ ID NO: 38431 - DNA, 20 bp, Artificial Sequence
  Description of Artificial Sequence: Synthetic oligonucleotide
  Target: ATXN2; (+) strand; PAM type: NRG; PAM sequence: AAG
ttatcacttttatcaaatga

SEQ ID NO: 38432 - DNA, 20 bp, Artificial Sequence
  Description of Artificial Sequence: Synthetic oligonucleotide
  Target: ATXN2; (+) strand; PAM type: NRG; PAM sequence: GAG
tttgcccgattatgctaact

SEQ ID NO: 38433 - DNA, 20 bp, Artificial Sequence
  Description of Artificial Sequence: Synthetic oligonucleotide
  Target: ATXN2; (+) strand; PAM type: NRG; PAM sequence: AAG
atatttaaaaaataattaaa

SEQ ID NO: 38434 - DNA, 20 bp, Artificial Sequence
  Description of Artificial Sequence: Synthetic oligonucleotide
  Target: ATXN2; (+) strand; PAM type: NRG; PAM sequence: TAG
ttaaaaaataattaaaaagc

SEQ ID NO: 38435 - DNA, 20 bp, Artificial Sequence
  Description of Artificial Sequence: Synthetic oligonucleotide
  Target: ATXN2; (+) strand; PAM type: NRG; PAM sequence: AAG
aaataattaaaaagctagtc

SEQ ID NO: 38436 - DNA, 20 bp, Artificial Sequence
  Description of Artificial Sequence: Synthetic oligonucleotide
  Target: ATXN2; (+) strand; PAM type: NRG; PAM sequence: TGG
aaagctagtcaagtatacta

SEQ ID NO: 38437 - DNA, 20 bp, Artificial Sequence
  Description of Artificial Sequence: Synthetic oligonucleotide
  Target: ATXN2; (+) strand; PAM type: NRG; PAM sequence: TAG
tatactatggtgctattatt

SEQ ID NO: 38438 - DNA, 20 bp, Artificial Sequence
  Description of Artificial Sequence: Synthetic oligonucleotide
  Target: ATXN2; (+) strand; PAM type: NRG; PAM sequence: CAG
tcatgttaaaacatgatccc

SEQ ID NO: 38439 - DNA, 20 bp, Artificial Sequence
  Description of Artificial Sequence: Synthetic oligonucleotide
  Target: ATXN2; (+) strand; PAM type: NRG; PAM sequence: AGG
catgttaaaacatgatcccc

SEQ ID NO: 38440 - DNA, 20 bp, Artificial Sequence
  Description of Artificial Sequence: Synthetic oligonucleotide
  Target: ATXN2; (+) strand; PAM type: NRG; PAM sequence: CAG
ttaaaacatgatccccaggc

SEQ ID NO: 38441 - DNA, 20 bp, Artificial Sequence
  Description of Artificial Sequence: Synthetic oligonucleotide
  Target: ATXN2; (+) strand; PAM type: NRG; PAM sequence: AGG
taaaacatgatccccaggcc

SEQ ID NO: 38442 - DNA, 20 bp, Artificial Sequence
  Description of Artificial Sequence: Synthetic oligonucleotide
  Target: ATXN2; (+) strand; PAM type: NRG; PAM sequence: CAG
catgatccccaggccaggcg

SEQ ID NO: 38443 - DNA, 20 bp, Artificial Sequence
  Description of Artificial Sequence: Synthetic oligonucleotide
  Target: ATXN2; (+) strand; PAM type: NRG; PAM sequence: TGG
gatccccaggccaggcgcag

SEQ ID NO: 38444 - DNA, 20 bp, Artificial Sequence
  Description of Artificial Sequence: Synthetic oligonucleotide
  Target: ATXN2; (+) strand; PAM type: NRG; PAM sequence: TAG
cgcttataatccctacactt

SEQ ID NO: 38445 - DNA, 20 bp, Artificial Sequence
  Description of Artificial Sequence: Synthetic oligonucleotide
  Target: ATXN2; (+) strand; PAM type: NRG; PAM sequence: AGG
gcttataatccctacacttt

SEQ ID NO: 38446 - DNA, 20 bp, Artificial Sequence
  Description of Artificial Sequence: Synthetic oligonucleotide
  Target: ATXN2; (+) strand; PAM type: NRG; PAM sequence: GAG
ttataatccctacactttag

SEQ ID NO: 38447 - DNA, 20 bp, Artificial Sequence
  Description of Artificial Sequence: Synthetic oligonucleotide
  Target: ATXN2; (+) strand; PAM type: NRG; PAM sequence: AGG
tataatccctacactttagg

SEQ ID NO: 38448 - DNA, 20 bp, Artificial Sequence
  Description of Artificial Sequence: Synthetic oligonucleotide
  Target: ATXN2; (+) strand; PAM type: NRG; PAM sequence: CAG
atccctacactttaggaggc

SEQ ID NO: 38449 - DNA, 20 bp, Artificial Sequence
  Description of Artificial Sequence: Synthetic oligonucleotide
  Target: ATXN2; (+) strand; PAM type: NRG; PAM sequence: AGG
tccctacactttaggaggcc

SEQ ID NO: 38450 - DNA, 20 bp, Artificial Sequence
  Description of Artificial Sequence: Synthetic oligonucleotide
  Target: ATXN2; (+) strand; PAM type: NRG; PAM sequence: GGG
ccctacactttaggaggcca

SEQ ID NO: 38451 - DNA, 20 bp, Artificial Sequence
  Description of Artificial Sequence: Synthetic oligonucleotide
  Target: ATXN2; (+) strand; PAM type: NRG; PAM sequence: GAG
acactttaggaggccagggc

SEQ ID NO: 38452 - DNA, 20 bp, Artificial Sequence
  Description of Artificial Sequence: Synthetic oligonucleotide
  Target: ATXN2; (+) strand; PAM type: NRG; PAM sequence: CGG
ctttaggaggccagggcgag

SEQ ID NO: 38453 - DNA, 20 bp, Artificial Sequence
  Description of Artificial Sequence: Synthetic oligonucleotide
  Target: ATXN2; (+) strand; PAM type: NRG; PAM sequence: GAG
ccagggcgagcggactgctt

SEQ ID NO: 38454 - DNA, 20 bp, Artificial Sequence
  Description of Artificial Sequence: Synthetic oligonucleotide
  Target: ATXN2; (+) strand; PAM type: NRG; PAM sequence: GAG
agcggactgcttgagctcat

SEQ ID NO: 38455 - DNA, 20 bp, Artificial Sequence
  Description of Artificial Sequence: Synthetic oligonucleotide
  Target: ATXN2; (+) strand; PAM type: NRG; PAM sequence: TGG
actgcttgagctcatgagtt

SEQ ID NO: 38456 - DNA, 20 bp, Artificial Sequence
  Description of Artificial Sequence: Synthetic oligonucleotide
  Target: ATXN2; (+) strand; PAM type: NRG; PAM sequence: GGG
ctgcttgagctcatgagttt

SEQ ID NO: 38457 - DNA, 20 bp, Artificial Sequence
  Description of Artificial Sequence: Synthetic oligonucleotide
  Target: ATXN2; (+) strand; PAM type: NRG; PAM sequence: TGG
tcatgagtttgggaccaccc

SEQ ID NO: 38458 - DNA, 20 bp, Artificial Sequence
  Description of Artificial Sequence: Synthetic oligonucleotide
  Target: ATXN2; (+) strand; PAM type: NRG; PAM sequence: GGG
catgagtttgggaccaccct

SEQ ID NO: 38459 - DNA, 20 bp, Artificial Sequence
  Description of Artificial Sequence: Synthetic oligonucleotide
  Target: ATXN2; (+) strand; PAM type: NRG; PAM sequence: TGG
tgggaccaccctgggcaaca

SEQ ID NO: 38460 - DNA, 20 bp, Artificial Sequence
  Description of Artificial Sequence: Synthetic oligonucleotide
  Target: ATXN2; (+) strand; PAM type: NRG; PAM sequence: GGG
gggaccaccctgggcaacat

SEQ ID NO: 38461 - DNA, 20 bp, Artificial Sequence
  Description of Artificial Sequence: Synthetic oligonucleotide
  Target: ATXN2; (+) strand; PAM type: NRG; PAM sequence: GGG
ggaccaccctgggcaacatg

SEQ ID NO: 38462 - DNA, 20 bp, Artificial Sequence
  Description of Artificial Sequence: Synthetic oligonucleotide
  Target: ATXN2; (+) strand; PAM type: NRG; PAM sequence: GAG
accaccctgggcaacatggg

SEQ ID NO: 38463 - DNA, 20 bp, Artificial Sequence
  Description of Artificial Sequence: Synthetic oligonucleotide
  Target: ATXN2; (+) strand; PAM type: NRG; PAM sequence: TAG
cacaaaaaatacaaaaatat

SEQ ID NO: 38464 - DNA, 20 bp, Artificial Sequence
  Description of Artificial Sequence: Synthetic oligonucleotide
  Target: ATXN2; (+) strand; PAM type: NRG; PAM sequence: CAG
aaaaatacaaaaatattagc

SEQ ID NO: 38465 - DNA, 20 bp, Artificial Sequence
  Description of Artificial Sequence: Synthetic oligonucleotide
  Target: ATXN2; (+) strand; PAM type: NRG; PAM sequence: CGG
acaaaaatattagccagctg

SEQ ID NO: 38466 - DNA, 20 bp, Artificial Sequence
  Description of Artificial Sequence: Synthetic oligonucleotide
  Target: ATXN2; (+) strand; PAM type: NRG; PAM sequence: TGG
gctgcggtgctgtgcatcta

SEQ ID NO: 38467 - DNA, 20 bp, Artificial Sequence
  Description of Artificial Sequence: Synthetic oligonucleotide
  Target: ATXN2; (+) strand; PAM type: NRG; PAM sequence: CAG
gtgctgtgcatctatggtcc

SEQ ID NO: 38468 - DNA, 20 bp, Artificial Sequence
  Description of Artificial Sequence: Synthetic oligonucleotide
  Target: ATXN2; (+) strand; PAM type: NRG; PAM sequence: CAG
catctatggtcccagctact

SEQ ID NO: 38469 - DNA, 20 bp, Artificial Sequence
  Description of Artificial Sequence: Synthetic oligonucleotide
  Target: ATXN2; (+) strand; PAM type: NRG; PAM sequence: AGG
atctatggtcccagctactc

SEQ ID NO: 38470 - DNA, 20 bp, Artificial Sequence
  Description of Artificial Sequence: Synthetic oligonucleotide
  Target: ATXN2; (+) strand; PAM type: NRG; PAM sequence: GAG
ctatggtcccagctactcag

SEQ ID NO: 38471 - DNA, 20 bp, Artificial Sequence
  Description of Artificial Sequence: Synthetic oligonucleotide
  Target: ATXN2; (+) strand; PAM type: NRG; PAM sequence: AGG
tatggtcccagctactcagg

SEQ ID NO: 38472 - DNA, 20 bp, Artificial Sequence
  Description of Artificial Sequence: Synthetic oligonucleotide
  Target: ATXN2; (+) strand; PAM type: NRG; PAM sequence: GAG
tcccagctactcaggaggct

SEQ ID NO: 38473 - DNA, 20 bp, Artificial Sequence
  Description of Artificial Sequence: Synthetic oligonucleotide
  Target: ATXN2; (+) strand; PAM type: NRG; PAM sequence: AGG
cccagctactcaggaggctg

SEQ ID NO: 38474 - DNA, 20 bp, Artificial Sequence
  Description of Artificial Sequence: Synthetic oligonucleotide
  Target: ATXN2; (+) strand; PAM type: NRG; PAM sequence: TGG
agctactcaggaggctgagg

SEQ ID NO: 38475 - DNA, 20 bp, Artificial Sequence
  Description of Artificial Sequence: Synthetic oligonucleotide
  Target: ATXN2; (+) strand; PAM type: NRG; PAM sequence: GGG
gctactcaggaggctgaggt

SEQ ID NO: 38476 - DNA, 20 bp, Artificial Sequence
  Description of Artificial Sequence: Synthetic oligonucleotide
  Target: ATXN2; (+) strand; PAM type: NRG; PAM sequence: GAG
tactcaggaggctgaggtgg

SEQ ID NO: 38477 - DNA, 20 bp, Artificial Sequence
  Description of Artificial Sequence: Synthetic oligonucleotide
  Target: ATXN2; (+) strand; PAM type: NRG; PAM sequence: AGG
actcaggaggctgaggtggg

SEQ ID NO: 38478 - DNA, 20 bp, Artificial Sequence
  Description of Artificial Sequence: Synthetic oligonucleotide
  Target: ATXN2; (+) strand; PAM type: NRG; PAM sequence: CAG
ctgaggtgggaggaactttt

SEQ ID NO: 38479 - DNA, 20 bp, Artificial Sequence
  Description of Artificial Sequence: Synthetic oligonucleotide
  Target: ATXN2; (+) strand; PAM type: NRG; PAM sequence: CAG
ggtgggaggaacttttcagc

SEQ ID NO: 38480 - DNA, 20 bp, Artificial Sequence
  Description of Artificial Sequence: Synthetic oligonucleotide
  Target: ATXN2; (+) strand; PAM type: NRG; PAM sequence: AGG
gtgggaggaacttttcagcc

SEQ ID NO: 38481 - DNA, 20 bp, Artificial Sequence
  Description of Artificial Sequence: Synthetic oligonucleotide
  Target: ATXN2; (+) strand; PAM type: NRG; PAM sequence: GGG
tgggaggaacttttcagcca

SEQ ID NO: 38482 - DNA, 20 bp, Artificial Sequence
  Description of Artificial Sequence: Synthetic oligonucleotide
  Target: ATXN2; (+) strand; PAM type: NRG; PAM sequence: GAG
ggaggaacttttcagccagg

SEQ ID NO: 38483 - DNA, 20 bp, Artificial Sequence
  Description of Artificial Sequence: Synthetic oligonucleotide
  Target: ATXN2; (+) strand; PAM type: NRG; PAM sequence: AGG
gaggaacttttcagccaggg

SEQ ID NO: 38484 - DNA, 20 bp, Artificial Sequence
  Description of Artificial Sequence: Synthetic oligonucleotide
  Target: ATXN2; (+) strand; PAM type: NRG; PAM sequence: CAG
gaacttttcagccagggagg

SEQ ID NO: 38485 - DNA, 20 bp, Artificial Sequence
  Description of Artificial Sequence: Synthetic oligonucleotide
  Target: ATXN2; (+) strand; PAM type: NRG; PAM sequence: CGG
agccagggaggcagatgccg

SEQ ID NO: 38486 - DNA, 20 bp, Artificial Sequence
  Description of Artificial Sequence: Synthetic oligonucleotide
  Target: ATXN2; (+) strand; PAM type: NRG; PAM sequence: AAG
agggaggcagatgccgcggt

SEQ ID NO: 38487 - DNA, 20 bp, Artificial Sequence
  Description of Artificial Sequence: Synthetic oligonucleotide
  Target: ATXN2; (+) strand; PAM type: NRG; PAM sequence: CAG
gtaactgcaccactgcactc

SEQ ID NO: 38488 - DNA, 20 bp, Artificial Sequence
  Description of Artificial Sequence: Synthetic oligonucleotide
  Target: ATXN2; (+) strand; PAM type: NRG; PAM sequence: CGG
gcaccactgcactccagcct

SEQ ID NO: 38489 - DNA, 20 bp, Artificial Sequence
  Description of Artificial Sequence: Synthetic oligonucleotide
  Target: ATXN2; (+) strand; PAM type: NRG; PAM sequence: AAG
actgcactccagcctcggcg

SEQ ID NO: 38490 - DNA, 20 bp, Artificial Sequence
  Description of Artificial Sequence: Synthetic oligonucleotide
  Target: ATXN2; (+) strand; PAM type: NRG; PAM sequence: AAG
gcactccagcctcggcgaag

SEQ ID NO: 38491 - DNA, 20 bp, Artificial Sequence
  Description of Artificial Sequence: Synthetic oligonucleotide
  Target: ATXN2; (+) strand; PAM type: NRG; PAM sequence: GAG
tccagcctcggcgaagaagt

SEQ ID NO: 38492 - DNA, 20 bp, Artificial Sequence
  Description of Artificial Sequence: Synthetic oligonucleotide
  Target: ATXN2; (+) strand; PAM type: NRG; PAM sequence: AAG
agtgagaccctgtctcaaaa

SEQ ID NO: 38493 - DNA, 20 bp, Artificial Sequence
  Description of Artificial Sequence: Synthetic oligonucleotide
  Target: ATXN2; (+) strand; PAM type: NRG; PAM sequence: AGG
gtgagaccctgtctcaaaaa

SEQ ID NO: 38494 - DNA, 20 bp, Artificial Sequence
  Description of Artificial Sequence: Synthetic oligonucleotide
  Target: ATXN2; (+) strand; PAM type: NRG; PAM sequence: GGG
tgagaccctgtctcaaaaaa

SEQ ID NO: 38495 - DNA, 20 bp, Artificial Sequence
  Description of Artificial Sequence: Synthetic oligonucleotide
  Target: ATXN2; (+) strand; PAM type: NRG; PAM sequence: GGG
gagaccctgtctcaaaaaag

SEQ ID NO: 38496 - DNA, 20 bp, Artificial Sequence
  Description of Artificial Sequence: Synthetic oligonucleotide
  Target: ATXN2; (+) strand; PAM type: NRG; PAM sequence: GAG
gaccctgtctcaaaaaaggg

SEQ ID NO: 38497 - DNA, 20 bp, Artificial Sequence
  Description of Artificial Sequence: Synthetic oligonucleotide
  Target: ATXN2; (+) strand; PAM type: NRG; PAM sequence: AGG
accctgtctcaaaaaagggg

SEQ ID NO: 38498 - DNA, 20 bp, Artificial Sequence
  Description of Artificial Sequence: Synthetic oligonucleotide
  Target: ATXN2; (+) strand; PAM type: NRG; PAM sequence: GGG
ccctgtctcaaaaaagggga

SEQ ID NO: 38499 - DNA, 20 bp, Artificial Sequence
  Description of Artificial Sequence: Synthetic oligonucleotide
  Target: ATXN2; (+) strand; PAM type: NRG; PAM sequence: TAG
tgtctcaaaaaaggggaggg

SEQ ID NO: 38500 - DNA, 20 bp, Artificial Sequence
  Description of Artificial Sequence: Synthetic oligonucleotide
  Target: ATXN2; (+) strand; PAM type: NRG; PAM sequence: AGG
gtctcaaaaaaggggagggt

SEQ ID NO: 38501 - DNA, 20 bp, Artificial Sequence
  Description of Artificial Sequence: Synthetic oligonucleotide
  Target: ATXN2; (+) strand; PAM type: NRG; PAM sequence: GGG
tctcaaaaaaggggagggta

SEQ ID NO: 38502 - DNA, 20 bp, Artificial Sequence
  Description of Artificial Sequence: Synthetic oligonucleotide
  Target: ATXN2; (+) strand; PAM type: NRG; PAM sequence: GGG
ctcaaaaaaggggagggtag

SEQ ID NO: 38503 - DNA, 20 bp, Artificial Sequence
  Description of Artificial Sequence: Synthetic oligonucleotide
  Target: ATXN2; (+) strand; PAM type: NRG; PAM sequence: CAG
aaaaaggggagggtagggga

SEQ ID NO: 38504 - DNA, 20 bp, Artificial Sequence
  Description of Artificial Sequence: Synthetic oligonucleotide
  Target: ATXN2; (+) strand; PAM type: NRG; PAM sequence: AGG
aaaaggggagggtaggggac

SEQ ID NO: 38505 - DNA, 20 bp, Artificial Sequence
  Description of Artificial Sequence: Synthetic oligonucleotide
  Target: ATXN2; (+) strand; PAM type: NRG; PAM sequence: GAG
aaggggagggtaggggacag

SEQ ID NO: 38506 - DNA, 20 bp, Artificial Sequence
  Description of Artificial Sequence: Synthetic oligonucleotide
  Target: ATXN2; (+) strand; PAM type: NRG; PAM sequence: AGG
aggggagggtaggggacagg

SEQ ID NO: 38507 - DNA, 20 bp, Artificial Sequence
  Description of Artificial Sequence: Synthetic oligonucleotide
  Target: ATXN2; (+) strand; PAM type: NRG; PAM sequence: GGG
ggggagggtaggggacagga

SEQ ID NO: 38508 - DNA, 20 bp, Artificial Sequence
  Description of Artificial Sequence: Synthetic oligonucleotide
  Target: ATXN2; (+) strand; PAM type: NRG; PAM sequence: GGG
gggagggtaggggacaggag

SEQ ID NO: 38509 - DNA, 20 bp, Artificial Sequence
  Description of Artificial Sequence: Synthetic oligonucleotide
  Target: ATXN2; (+) strand; PAM type: NRG; PAM sequence: AAG
agggtaggggacaggagggg

SEQ ID NO: 38510 - DNA, 20 bp, Artificial Sequence
  Description of Artificial Sequence: Synthetic oligonucleotide
  Target: ATXN2; (+) strand; PAM type: NRG; PAM sequence: AAG
aggggacaggaggggaagaa

SEQ ID NO: 38511 - DNA, 20 bp, Artificial Sequence
  Description of Artificial Sequence: Synthetic oligonucleotide
  Target: ATXN2; (+) strand; PAM type: NRG; PAM sequence: AAG
ggaggggaagaaaagaaacc

SEQ ID NO: 38512 - DNA, 20 bp, Artificial Sequence
  Description of Artificial Sequence: Synthetic oligonucleotide
  Target: ATXN2; (+) strand; PAM type: NRG; PAM sequence: AAG
tatttttatccaatacctca

SEQ ID NO: 38513 - DNA, 20 bp, Artificial Sequence
  Description of Artificial Sequence: Synthetic oligonucleotide
  Target: ATXN2; (+) strand; PAM type: NRG; PAM sequence: AGG
atttttatccaatacctcaa

SEQ ID NO: 38514 - DNA, 20 bp, Artificial Sequence
  Description of Artificial Sequence: Synthetic oligonucleotide
  Target: ATXN2; (+) strand; PAM type: NRG; PAM sequence: TGG
tatccaatacctcaaaggat

SEQ ID NO: 38515 - DNA, 20 bp, Artificial Sequence
  Description of Artificial Sequence: Synthetic oligonucleotide
  Target: ATXN2; (+) strand; PAM type: NRG; PAM sequence: TAG
tacctcaaaggattggaatt

SEQ ID NO: 38516 - DNA, 20 bp, Artificial Sequence
  Description of Artificial Sequence: Synthetic oligonucleotide
  Target: ATXN2; (+) strand; PAM type: NRG; PAM sequence: AAG
caaaggattggaatttagta

SEQ ID NO: 38517 - DNA, 20 bp, Artificial Sequence
  Description of Artificial Sequence: Synthetic oligonucleotide
  Target: ATXN2; (+) strand; PAM type: NRG; PAM sequence: AGG
aaaggattggaatttagtaa

SEQ ID NO: 38518 - DNA, 20 bp, Artificial Sequence
  Description of Artificial Sequence: Synthetic oligonucleotide
  Target: ATXN2; (+) strand; PAM type: NRG; PAM sequence: GAG
aggattggaatttagtaaag

SEQ ID NO: 38519 - DNA, 20 bp, Artificial Sequence
  Description of Artificial Sequence: Synthetic oligonucleotide
  Target: ATXN2; (+) strand; PAM type: NRG; PAM sequence: CAG
attggaatttagtaaaggag

SEQ ID NO: 38520 - DNA, 20 bp, Artificial Sequence
  Description of Artificial Sequence: Synthetic oligonucleotide
  Target: ATXN2; (+) strand; PAM type: NRG; PAM sequence: AGG
ttggaatttagtaaaggagc

SEQ ID NO: 38521 - DNA, 20 bp, Artificial Sequence
  Description of Artificial Sequence: Synthetic oligonucleotide
  Target: ATXN2; (+) strand; PAM type: NRG; PAM sequence: GGG
tggaatttagtaaaggagca

SEQ ID NO: 38522 - DNA, 20 bp, Artificial Sequence
  Description of Artificial Sequence: Synthetic oligonucleotide
  Target: ATXN2; (+) strand; PAM type: NRG; PAM sequence: CAG
ggtaaaaactaacatataaa

SEQ ID NO: 38523 - DNA, 20 bp, Artificial Sequence
  Description of Artificial Sequence: Synthetic oligonucleotide
  Target: ATXN2; (+) strand; PAM type: NRG; PAM sequence: TAG
aactaacatataaacagcaa

SEQ ID NO: 38524 - DNA, 20 bp, Artificial Sequence
  Description of Artificial Sequence: Synthetic oligonucleotide
  Target: ATXN2; (+) strand; PAM type: NRG; PAM sequence: TGG
acagcaatagccttcatata

SEQ ID NO: 38525 - DNA, 20 bp, Artificial Sequence
  Description of Artificial Sequence: Synthetic oligonucleotide
  Target: ATXN2; (+) strand; PAM type: NRG; PAM sequence: AAG
cttcatatatggtacttcat

SEQ ID NO: 38526 - DNA, 20 bp, Artificial Sequence
  Description of Artificial Sequence: Synthetic oligonucleotide
  Target: ATXN2; (+) strand; PAM type: NRG; PAM sequence: TAG
gtacttcataagtaattact

SEQ ID NO: 38527 - DNA, 20 bp, Artificial Sequence
  Description of Artificial Sequence: Synthetic oligonucleotide
  Target: ATXN2; (+) strand; PAM type: NRG; PAM sequence: AAG
cttcataagtaattacttag

SEQ ID NO: 38528 - DNA, 20 bp, Artificial Sequence
  Description of Artificial Sequence: Synthetic oligonucleotide
  Target: ATXN2; (+) strand; PAM type: NRG; PAM sequence: TGG
taattacttagaagatgcaa

SEQ ID NO: 38529 - DNA, 20 bp, Artificial Sequence
  Description of Artificial Sequence: Synthetic oligonucleotide
  Target: ATXN2; (+) strand; PAM type: NRG; PAM sequence: AAG
ttacttagaagatgcaatgg

SEQ ID NO: 38530 - DNA, 20 bp, Artificial Sequence
  Description of Artificial Sequence: Synthetic oligonucleotide
  Target: ATXN2; (+) strand; PAM type: NRG; PAM sequence: GAG
acttagaagatgcaatggaa

SEQ ID NO: 38531 - DNA, 20 bp, Artificial Sequence
  Description of Artificial Sequence: Synthetic oligonucleotide
  Target: ATXN2; (+) strand; PAM type: NRG; PAM sequence: AAG
tagaagatgcaatggaagag

SEQ ID NO: 38532 - DNA, 20 bp, Artificial Sequence
  Description of Artificial Sequence: Synthetic oligonucleotide
  Target: ATXN2; (+) strand; PAM type: NRG; PAM sequence: TGG
tgcaatggaagagaagtccc

SEQ ID NO: 38533 - DNA, 20 bp, Artificial Sequence
  Description of Artificial Sequence: Synthetic oligonucleotide
  Target: ATXN2; (+) strand; PAM type: NRG; PAM sequence: GGG
gcaatggaagagaagtccct

SEQ ID NO: 38534 - DNA, 20 bp, Artificial Sequence
  Description of Artificial Sequence: Synthetic oligonucleotide
  Target: ATXN2; (+) strand; PAM type: NRG; PAM sequence: AAG
gggttacactaacattaaaa

SEQ ID NO: 38535 - DNA, 20 bp, Artificial Sequence
  Description of Artificial Sequence: Synthetic oligonucleotide
  Target: ATXN2; (+) strand; PAM type: NRG; PAM sequence: AAG
cattaaaaaagaacctacct

SEQ ID NO: 38536 - DNA, 20 bp, Artificial Sequence
  Description of Artificial Sequence: Synthetic oligonucleotide
  Target: ATXN2; (+) strand; PAM type: NRG; PAM sequence: AGG
attaaaaaagaacctaccta

SEQ ID NO: 38537 - DNA, 20 bp, Artificial Sequence
  Description of Artificial Sequence: Synthetic oligonucleotide
  Target: ATXN2; (+) strand; PAM type: NRG; PAM sequence: AAG
aaaaaatgtacaaaacctta

SEQ ID NO: 38538 - DNA, 20 bp, Artificial Sequence
  Description of Artificial Sequence: Synthetic oligonucleotide
  Target: ATXN2; (+) strand; PAM type: NRG; PAM sequence: GAG
tttatttatttattttcttt

SEQ ID NO: 38539 - DNA, 20 bp, Artificial Sequence
  Description of Artificial Sequence: Synthetic oligonucleotide
  Target: ATXN2; (+) strand; PAM type: NRG; PAM sequence: CAG
tttatttattttctttgaga

SEQ ID NO: 38540 - DNA, 20 bp, Artificial Sequence
  Description of Artificial Sequence: Synthetic oligonucleotide
  Target: ATXN2; (+) strand; PAM type: NRG; PAM sequence: GAG
tatttattttctttgagaca

SEQ ID NO: 38541 - DNA, 20 bp, Artificial Sequence
  Description of Artificial Sequence: Synthetic oligonucleotide
  Target: ATXN2; (+) strand; PAM type: NRG; PAM sequence: CGG
ctttgagacagagtgtcgct

SEQ ID NO: 38542 - DNA, 20 bp, Artificial Sequence
  Description of Artificial Sequence: Synthetic oligonucleotide
  Target: ATXN2; (+) strand; PAM type: NRG; PAM sequence: AAG
agagtgtcgctcggttgccc

SEQ ID NO: 38543 - DNA, 20 bp, Artificial Sequence
  Description of Artificial Sequence: Synthetic oligonucleotide
  Target: ATXN2; (+) strand; PAM type: NRG; PAM sequence: TGG
tgtcgctcggttgcccaagc

SEQ ID NO: 38544 - DNA, 20 bp, Artificial Sequence
  Description of Artificial Sequence: Synthetic oligonucleotide
  Target: ATXN2; (+) strand; PAM type: NRG; PAM sequence: GAG
tcgctcggttgcccaagctg

SEQ ID NO: 38545 - DNA, 20 bp, Artificial Sequence
  Description of Artificial Sequence: Synthetic oligonucleotide
  Target: ATXN2; (+) strand; PAM type: NRG; PAM sequence: CAG
cggttgcccaagctggagtg

SEQ ID NO: 38546 - DNA, 20 bp, Artificial Sequence
  Description of Artificial Sequence: Synthetic oligonucleotide
  Target: ATXN2; (+) strand; PAM type: NRG; PAM sequence: TGG
ttgcccaagctggagtgcag

SEQ ID NO: 38547 - DNA, 20 bp, Artificial Sequence
  Description of Artificial Sequence: Synthetic oligonucleotide
  Target: ATXN2; (+) strand; PAM type: NRG; PAM sequence: TGG
tcactgcactctctgcctcc

SEQ ID NO: 38548 - DNA, 20 bp, Artificial Sequence
  Description of Artificial Sequence: Synthetic oligonucleotide
  Target: ATXN2; (+) strand; PAM type: NRG; PAM sequence: GGG
cactgcactctctgcctcct

SEQ ID NO: 38549 - DNA, 20 bp, Artificial Sequence
  Description of Artificial Sequence: Synthetic oligonucleotide
  Target: ATXN2; (+) strand; PAM type: NRG; PAM sequence: AAG
actctctgcctcctgggttc

SEQ ID NO: 38550 - DNA, 20 bp, Artificial Sequence
  Description of Artificial Sequence: Synthetic oligonucleotide
  Target: ATXN2; (+) strand; PAM type: NRG; PAM sequence: CAG
ttcaagcgattctcctacct

SEQ ID NO: 38551 - DNA, 20 bp, Artificial Sequence
  Description of Artificial Sequence: Synthetic oligonucleotide
  Target: ATXN2; (+) strand; PAM type: NRG; PAM sequence: CAG
gattctcctacctcagcctc

SEQ ID NO: 38552 - DNA, 20 bp, Artificial Sequence
  Description of Artificial Sequence: Synthetic oligonucleotide
  Target: ATXN2; (+) strand; PAM type: NRG; PAM sequence: GAG
ttctcctacctcagcctcca

SEQ ID NO: 38553 - DNA, 20 bp, Artificial Sequence
  Description of Artificial Sequence: Synthetic oligonucleotide
  Target: ATXN2; (+) strand; PAM type: NRG; PAM sequence: TAG
tcctacctcagcctccagag

SEQ ID NO: 38554 - DNA, 20 bp, Artificial Sequence
  Description of Artificial Sequence: Synthetic oligonucleotide
  Target: ATXN2; (+) strand; PAM type: NRG; PAM sequence: TGG
acctcagcctccagagtagc

SEQ ID NO: 38555 - DNA, 20 bp, Artificial Sequence
  Description of Artificial Sequence: Synthetic oligonucleotide
  Target: ATXN2; (+) strand; PAM type: NRG; PAM sequence: GGG
cctcagcctccagagtagct

SEQ ID NO: 38556 - DNA, 20 bp, Artificial Sequence
  Description of Artificial Sequence: Synthetic oligonucleotide
  Target: ATXN2; (+) strand; PAM type: NRG; PAM sequence: CAG
ctccagagtagctgggacta

SEQ ID NO: 38557 - DNA, 20 bp, Artificial Sequence
  Description of Artificial Sequence: Synthetic oligonucleotide
  Target: ATXN2; (+) strand; PAM type: NRG; PAM sequence: AGG
tccagagtagctgggactac

SEQ ID NO: 38558 - DNA, 20 bp, Artificial Sequence
  Description of Artificial Sequence: Synthetic oligonucleotide
  Target: ATXN2; (+) strand; PAM type: NRG; PAM sequence: CAG
ctacaggtgcacaccacacc

SEQ ID NO: 38559 - DNA, 20 bp, Artificial Sequence
  Description of Artificial Sequence: Synthetic oligonucleotide
  Target: ATXN2; (+) strand; PAM type: NRG; PAM sequence: TAG
tactttttttaaaatatttt

SEQ ID NO: 38560 - DNA, 20 bp, Artificial Sequence
  Description of Artificial Sequence: Synthetic oligonucleotide
  Target: ATXN2; (+) strand; PAM type: NRG; PAM sequence: TAG
tttttttaaaatatttttag

SEQ ID NO: 38561 - DNA, 20 bp, Artificial Sequence
  Description of Artificial Sequence: Synthetic oligonucleotide
  Target: ATXN2; (+) strand; PAM type: NRG; PAM sequence: GAG
tttttaaaatatttttagta

SEQ ID NO: 38562 - DNA, 20 bp, Artificial Sequence
  Description of Artificial Sequence: Synthetic oligonucleotide
  Target: ATXN2; (+) strand; PAM type: NRG; PAM sequence: CGG
taaaatatttttagtagaga

SEQ ID NO: 38563 - DNA, 20 bp, Artificial Sequence
  Description of Artificial Sequence: Synthetic oligonucleotide
  Target: ATXN2; (+) strand; PAM type: NRG; PAM sequence: GGG
aaaatatttttagtagagac

SEQ ID NO: 38564 - DNA, 20 bp, Artificial Sequence
  Description of Artificial Sequence: Synthetic oligonucleotide
  Target: ATXN2; (+) strand; PAM type: NRG; PAM sequence: GGG
aaatatttttagtagagacg

SEQ ID NO: 38565 - DNA, 20 bp, Artificial Sequence
  Description of Artificial Sequence: Synthetic oligonucleotide
  Target: ATXN2; (+) strand; PAM type: NRG; PAM sequence: TGG
gagacggggtttcaccatgt

SEQ ID NO: 38566 - DNA, 20 bp, Artificial Sequence
  Description of Artificial Sequence: Synthetic oligonucleotide
  Target: ATXN2; (+) strand; PAM type: NRG; PAM sequence: CAG
cggggtttcaccatgttggc

SEQ ID NO: 38567 - DNA, 20 bp, Artificial Sequence
  Description of Artificial Sequence: Synthetic oligonucleotide
  Target: ATXN2; (+) strand; PAM type: NRG; PAM sequence: AGG
ggggtttcaccatgttggcc

SEQ ID NO: 38568 - DNA, 20 bp, Artificial Sequence
  Description of Artificial Sequence: Synthetic oligonucleotide
  Target: ATXN2; (+) strand; PAM type: NRG; PAM sequence: TGG
tttcaccatgttggccaggc

SEQ ID NO: 38569 - DNA, 20 bp, Artificial Sequence
  Description of Artificial Sequence: Synthetic oligonucleotide
  Target: ATXN2; (+) strand; PAM type: NRG; PAM sequence: CAG
gccaggctggtctcgaactc

SEQ ID NO: 38570 - DNA, 20 bp, Artificial Sequence
  Description of Artificial Sequence: Synthetic oligonucleotide
  Target: ATXN2; (+) strand; PAM type: NRG; PAM sequence: CAG
tggtctcgaactccagacct

SEQ ID NO: 38571 - DNA, 20 bp, Artificial Sequence
  Description of Artificial Sequence: Synthetic oligonucleotide
  Target: ATXN2; (+) strand; PAM type: NRG; PAM sequence: AGG
ggtctcgaactccagacctc

SEQ ID NO: 38572 - DNA, 20 bp, Artificial Sequence
  Description of Artificial Sequence: Synthetic oligonucleotide
  Target: ATXN2; (+) strand; PAM type: NRG; PAM sequence: AAG
ctgcccacctctgcctccca

SEQ ID NO: 38573 - DNA, 20 bp, Artificial Sequence
  Description of Artificial Sequence: Synthetic oligonucleotide
  Target: ATXN2; (+) strand; PAM type: NRG; PAM sequence: GAG
gcccacctctgcctcccaaa

SEQ ID NO: 38574 - DNA, 20 bp, Artificial Sequence
  Description of Artificial Sequence: Synthetic oligonucleotide
  Target: ATXN2; (+) strand; PAM type: NRG; PAM sequence: AGG
cccacctctgcctcccaaag

SEQ ID NO: 38575 - DNA, 20 bp, Artificial Sequence
  Description of Artificial Sequence: Synthetic oligonucleotide
  Target: ATXN2; (+) strand; PAM type: NRG; PAM sequence: TGG
acctctgcctcccaaagagg

SEQ ID NO: 38576 - DNA, 20 bp, Artificial Sequence
  Description of Artificial Sequence: Synthetic oligonucleotide
  Target: ATXN2; (+) strand; PAM type: NRG; PAM sequence: GGG
cctctgcctcccaaagaggt

SEQ ID NO: 38577 - DNA, 20 bp, Artificial Sequence
  Description of Artificial Sequence: Synthetic oligonucleotide
  Target: ATXN2; (+) strand; PAM type: NRG; PAM sequence: CAG
ctcccaaagaggtgggatta

SEQ ID NO: 38578 - DNA, 20 bp, Artificial Sequence
  Description of Artificial Sequence: Synthetic oligonucleotide
  Target: ATXN2; (+) strand; PAM type: NRG; PAM sequence: AGG
tcccaaagaggtgggattac

SEQ ID NO: 38579 - DNA, 20 bp, Artificial Sequence
  Description of Artificial Sequence: Synthetic oligonucleotide
  Target: ATXN2; (+) strand; PAM type: NRG; PAM sequence: CAG
agaggtgggattacaggcgt

SEQ ID NO: 38580 - DNA, 20 bp, Artificial Sequence
  Description of Artificial Sequence: Synthetic oligonucleotide
  Target: ATXN2; (+) strand; PAM type: NRG; PAM sequence: CAG
caggcgtcagccactgcatc

SEQ ID NO: 38581 - DNA, 20 bp, Artificial Sequence
  Description of Artificial Sequence: Synthetic oligonucleotide
  Target: ATXN2; (+) strand; PAM type: NRG; PAM sequence: AAG
gtcagccactgcatccagcc

SEQ ID NO: 38582 - DNA, 20 bp, Artificial Sequence
  Description of Artificial Sequence: Synthetic oligonucleotide
  Target: ATXN2; (+) strand; PAM type: NRG; PAM sequence: AGG
tcagccactgcatccagcca

SEQ ID NO: 38583 - DNA, 20 bp, Artificial Sequence
  Description of Artificial Sequence: Synthetic oligonucleotide
  Target: ATXN2; (+) strand; PAM type: NRG; PAM sequence: AAG
taaactttaatatgctattg

SEQ ID NO: 38584 - DNA, 20 bp, Artificial Sequence
  Description of Artificial Sequence: Synthetic oligonucleotide
  Target: ATXN2; (+) strand; PAM type: NRG; PAM sequence: AGG
aaactttaatatgctattga

SEQ ID NO: 38585 - DNA, 20 bp, Artificial Sequence
  Description of Artificial Sequence: Synthetic oligonucleotide
  Target: ATXN2; (+) strand; PAM type: NRG; PAM sequence: CAG
aggtatactttgttcttgaa

SEQ ID NO: 38586 - DNA, 20 bp, Artificial Sequence
  Description of Artificial Sequence: Synthetic oligonucleotide
  Target: ATXN2; (+) strand; PAM type: NRG; PAM sequence: AGG
ggtatactttgttcttgaac

SEQ ID NO: 38587 - DNA, 20 bp, Artificial Sequence
  Description of Artificial Sequence: Synthetic oligonucleotide
  Target: ATXN2; (+) strand; PAM type: NRG; PAM sequence: AAG
atactttgttcttgaacagg

SEQ ID NO: 38588 - DNA, 20 bp, Artificial Sequence
  Description of Artificial Sequence: Synthetic oligonucleotide
  Target: ATXN2; (+) strand; PAM type: NRG; PAM sequence: AAG
caggaagactcaacatcatg

SEQ ID NO: 38589 - DNA, 20 bp, Artificial Sequence
  Description of Artificial Sequence: Synthetic oligonucleotide
  Target: ATXN2; (+) strand; PAM type: NRG; PAM sequence: AAG
gacatcaatcatttcttctc

SEQ ID NO: 38590 - DNA, 20 bp, Artificial Sequence
  Description of Artificial Sequence: Synthetic oligonucleotide
  Target: ATXN2; (+) strand; PAM type: NRG; PAM sequence: AAG
ttcttctcaagttaatttat

SEQ ID NO: 38591 - DNA, 20 bp, Artificial Sequence
  Description of Artificial Sequence: Synthetic oligonucleotide
  Target: ATXN2; (+) strand; PAM type: NRG; PAM sequence: TGG
ttataagtttattgtgattc

SEQ ID NO: 38592 - DNA, 20 bp, Artificial Sequence
  Description of Artificial Sequence: Synthetic oligonucleotide
  Target: ATXN2; (+) strand; PAM type: NRG; PAM sequence: TGG
attgtgattctggcctgcca

SEQ ID NO: 38593 - DNA, 20 bp, Artificial Sequence
  Description of Artificial Sequence: Synthetic oligonucleotide
  Target: ATXN2; (+) strand; PAM type: NRG; PAM sequence: TGG
gtgattctggcctgccatgg

SEQ ID NO: 38594 - DNA, 20 bp, Artificial Sequence
  Description of Artificial Sequence: Synthetic oligonucleotide
  Target: ATXN2; (+) strand; PAM type: NRG; PAM sequence: TAG
gccatggtggctcatgcctg

SEQ ID NO: 38595 - DNA, 20 bp, Artificial Sequence
  Description of Artificial Sequence: Synthetic oligonucleotide
  Target: ATXN2; (+) strand; PAM type: NRG; PAM sequence: GAG
ctgtagtcccaccactttgt

SEQ ID NO: 38596 - DNA, 20 bp, Artificial Sequence
  Description of Artificial Sequence: Synthetic oligonucleotide
  Target: ATXN2; (+) strand; PAM type: NRG; PAM sequence: AGG
tgtagtcccaccactttgtg

SEQ ID NO: 38597 - DNA, 20 bp, Artificial Sequence
  Description of Artificial Sequence: Synthetic oligonucleotide
  Target: ATXN2; (+) strand; PAM type: NRG; PAM sequence: CAG
accactttgtgaggctgaca

SEQ ID NO: 38598 - DNA, 20 bp, Artificial Sequence
  Description of Artificial Sequence: Synthetic oligonucleotide
  Target: ATXN2; (+) strand; PAM type: NRG; PAM sequence: AGG
ccactttgtgaggctgacac

SEQ ID NO: 38599 - DNA, 20 bp, Artificial Sequence
  Description of Artificial Sequence: Synthetic oligonucleotide
  Target: ATXN2; (+) strand; PAM type: NRG; PAM sequence: CAG
ctttgtgaggctgacacagg

SEQ ID NO: 38600 - DNA, 20 bp, Artificial Sequence
  Description of Artificial Sequence: Synthetic oligonucleotide
  Target: ATXN2; (+) strand; PAM type: NRG; PAM sequence: GAG
ctgacacaggcagactgctt

SEQ ID NO: 38601 - DNA, 20 bp, Artificial Sequence
  Description of Artificial Sequence: Synthetic oligonucleotide
  Target: ATXN2; (+) strand; PAM type: NRG; PAM sequence: CAG
acaggcagactgcttgagct

SEQ ID NO: 38602 - DNA, 20 bp, Artificial Sequence
  Description of Artificial Sequence: Synthetic oligonucleotide
  Target: ATXN2; (+) strand; PAM type: NRG; PAM sequence: AGG
caggcagactgcttgagctc

SEQ ID NO: 38603 - DNA, 20 bp, Artificial Sequence
  Description of Artificial Sequence: Synthetic oligonucleotide
  Target: ATXN2; (+) strand; PAM type: NRG; PAM sequence: GAG
ggcagactgcttgagctcag

SEQ ID NO: 38604 - DNA, 20 bp, Artificial Sequence
  Description of Artificial Sequence: Synthetic oligonucleotide
  Target: ATXN2; (+) strand; PAM type: NRG; PAM sequence: CAG
tgagctcaggagttcgacac

SEQ ID NO: 38605 - DNA, 20 bp, Artificial Sequence
  Description of Artificial Sequence: Synthetic oligonucleotide
  Target: ATXN2; (+) strand; PAM type: NRG; PAM sequence: TGG
tcaggagttcgacaccagcc

SEQ ID NO: 38606 - DNA, 20 bp, Artificial Sequence
  Description of Artificial Sequence: Synthetic oligonucleotide
  Target: ATXN2; (+) strand; PAM type: NRG; PAM sequence: GGG
caggagttcgacaccagcct

SEQ ID NO: 38607 - DNA, 20 bp, Artificial Sequence
  Description of Artificial Sequence: Synthetic oligonucleotide
  Target: ATXN2; (+) strand; PAM type: NRG; PAM sequence: TGG
cgacaccagcctgggcaaca

SEQ ID NO: 38608 - DNA, 20 bp, Artificial Sequence
  Description of Artificial Sequence: Synthetic oligonucleotide
  Target: ATXN2; (+) strand; PAM type: NRG; PAM sequence: AAG
ctgcaaaatatacaaaaatt

SEQ ID NO: 38609 - DNA, 20 bp, Artificial Sequence
  Description of Artificial Sequence: Synthetic oligonucleotide
  Target: ATXN2; (+) strand; PAM type: NRG; PAM sequence: CAG
aaaatatacaaaaattaagc

SEQ ID NO: 38610 - DNA, 20 bp, Artificial Sequence
  Description of Artificial Sequence: Synthetic oligonucleotide
  Target: ATXN2; (+) strand; PAM type: NRG; PAM sequence: AGG
aaatatacaaaaattaagcc

SEQ ID NO: 38611 - DNA, 20 bp, Artificial Sequence
  Description of Artificial Sequence: Synthetic oligonucleotide
  Target: ATXN2; (+) strand; PAM type: NRG; PAM sequence: CGG
tacaaaaattaagccaggca

SEQ ID NO: 38612 - DNA, 20 bp, Artificial Sequence
  Description of Artificial Sequence: Synthetic oligonucleotide
  Target: ATXN2; (+) strand; PAM type: NRG; PAM sequence: TGG
aaaaattaagccaggcacgg

SEQ ID NO: 38613 - DNA, 20 bp, Artificial Sequence
  Description of Artificial Sequence: Synthetic oligonucleotide
  Target: ATXN2; (+) strand; PAM type: NRG; PAM sequence: TAG
ggcacggtggtgcttgcctg

SEQ ID NO: 38614 - DNA, 20 bp, Artificial Sequence
  Description of Artificial Sequence: Synthetic oligonucleotide
  Target: ATXN2; (+) strand; PAM type: NRG; PAM sequence: CAG
gtggtgcttgcctgtagtcc

SEQ ID NO: 38615 - DNA, 20 bp, Artificial Sequence
  Description of Artificial Sequence: Synthetic oligonucleotide
  Target: ATXN2; (+) strand; PAM type: NRG; PAM sequence: TGG
tgcctgtagtcccagctact

SEQ ID NO: 38616 - DNA, 20 bp, Artificial Sequence
  Description of Artificial Sequence: Synthetic oligonucleotide
  Target: ATXN2; (+) strand; PAM type: NRG; PAM sequence: GGG
gcctgtagtcccagctactt

SEQ ID NO: 38617 - DNA, 20 bp, Artificial Sequence
  Description of Artificial Sequence: Synthetic oligonucleotide
  Target: ATXN2; (+) strand; PAM type: NRG; PAM sequence: GAG
ctgtagtcccagctacttgg

SEQ ID NO: 38618 - DNA, 20 bp, Artificial Sequence
  Description of Artificial Sequence: Synthetic oligonucleotide
  Target: ATXN2; (+) strand; PAM type: NRG; PAM sequence: AGG
tgtagtcccagctacttggg

SEQ ID NO: 38619 - DNA, 20 bp, Artificial Sequence
  Description of Artificial Sequence: Synthetic oligonucleotide
  Target: ATXN2; (+) strand; PAM type: NRG; PAM sequence: GAG
tcccagctacttgggaggct

SEQ ID NO: 38620 - DNA, 20 bp, Artificial Sequence
  Description of Artificial Sequence: Synthetic oligonucleotide
  Target: ATXN2; (+) strand; PAM type: NRG; PAM sequence: AGG
cccagctacttgggaggctg

SEQ ID NO: 38621 - DNA, 20 bp, Artificial Sequence
  Description of Artificial Sequence: Synthetic oligonucleotide
  Target: ATXN2; (+) strand; PAM type: NRG; PAM sequence: TGG
agctacttgggaggctgagg

SEQ ID NO: 38622 - DNA, 20 bp, Artificial Sequence
  Description of Artificial Sequence: Synthetic oligonucleotide
  Target: ATXN2; (+) strand; PAM type: NRG; PAM sequence: GGG
gctacttgggaggctgaggt

SEQ ID NO: 38623 - DNA, 20 bp, Artificial Sequence
  Description of Artificial Sequence: Synthetic oligonucleotide
  Target: ATXN2; (+) strand; PAM type: NRG; PAM sequence: GGG
ctacttgggaggctgaggtg

SEQ ID NO: 38624 - DNA, 20 bp, Artificial Sequence
  Description of Artificial Sequence: Synthetic oligonucleotide
  Target: ATXN2; (+) strand; PAM type: NRG; PAM sequence: GGG
tacttgggaggctgaggtgg

SEQ ID NO: 38625 - DNA, 20 bp, Artificial Sequence
  Description of Artificial Sequence: Synthetic oligonucleotide
  Target: ATXN2; (+) strand; PAM type: NRG; PAM sequence: GGG
acttgggaggctgaggtggg

SEQ ID NO: 38626 - DNA, 20 bp, Artificial Sequence
  Description of Artificial Sequence: Synthetic oligonucleotide
  Target: ATXN2; (+) strand; PAM type: NRG; PAM sequence: TAG
ctgaggtggggggattgcct

SEQ ID NO: 38627 - DNA, 20 bp, Artificial Sequence
  Description of Artificial Sequence: Synthetic oligonucleotide
  Target: ATXN2; (+) strand; PAM type: NRG; PAM sequence: CGG
gtggggggattgccttagct

SEQ ID NO: 38628 - DNA, 20 bp, Artificial Sequence
  Description of Artificial Sequence: Synthetic oligonucleotide
  Target: ATXN2; (+) strand; PAM type: NRG; PAM sequence: GGG
tggggggattgccttagctc

SEQ ID NO: 38629 - DNA, 20 bp, Artificial Sequence
  Description of Artificial Sequence: Synthetic oligonucleotide
  Target: ATXN2; (+) strand; PAM type: NRG; PAM sequence: AAG
ggggattgccttagctcggg

SEQ ID NO: 38630 - DNA, 20 bp, Artificial Sequence
  Description of Artificial Sequence: Synthetic oligonucleotide
  Target: ATXN2; (+) strand; PAM type: NRG; PAM sequence: GAG
ttgccttagctcgggaagtt

SEQ ID NO: 38631 - DNA, 20 bp, Artificial Sequence
  Description of Artificial Sequence: Synthetic oligonucleotide
  Target: ATXN2; (+) strand; PAM type: NRG; PAM sequence: AGG
tgccttagctcgggaagttg

SEQ ID NO: 38632 - DNA, 20 bp, Artificial Sequence
  Description of Artificial Sequence: Synthetic oligonucleotide
  Target: ATXN2; (+) strand; PAM type: NRG; PAM sequence: CAG
agctcgggaagttgaggctg

SEQ ID NO: 38633 - DNA, 20 bp, Artificial Sequence
  Description of Artificial Sequence: Synthetic oligonucleotide
  Target: ATXN2; (+) strand; PAM type: NRG; PAM sequence: CAG
agttgaggctgcagtatgcc

SEQ ID NO: 38634 - DNA, 20 bp, Artificial Sequence
  Description of Artificial Sequence: Synthetic oligonucleotide
  Target: ATXN2; (+) strand; PAM type: NRG; PAM sequence: CAG
cagatcatcccactgcactc

SEQ ID NO: 38635 - DNA, 20 bp, Artificial Sequence
  Description of Artificial Sequence: Synthetic oligonucleotide
  Target: ATXN2; (+) strand; PAM type: NRG; PAM sequence: TAG
catcccactgcactccagcc

SEQ ID NO: 38636 - DNA, 20 bp, Artificial Sequence
  Description of Artificial Sequence: Synthetic oligonucleotide
  Target: ATXN2; (+) strand; PAM type: NRG; PAM sequence: AGG
atcccactgcactccagcct

SEQ ID NO: 38637 - DNA, 20 bp, Artificial Sequence
  Description of Artificial Sequence: Synthetic oligonucleotide
  Target: ATXN2; (+) strand; PAM type: NRG; PAM sequence: CAG
ctgcactccagcctaggtaa

SEQ ID NO: 38638 - DNA, 20 bp, Artificial Sequence
  Description of Artificial Sequence: Synthetic oligonucleotide
  Target: ATXN2; (+) strand; PAM type: NRG; PAM sequence: GAG
gcactccagcctaggtaaca

SEQ ID NO: 38639 - DNA, 20 bp, Artificial Sequence
  Description of Artificial Sequence: Synthetic oligonucleotide
  Target: ATXN2; (+) strand; PAM type: NRG; PAM sequence: CAG
tccagcctaggtaacagagc

SEQ ID NO: 38640 - DNA, 20 bp, Artificial Sequence
  Description of Artificial Sequence: Synthetic oligonucleotide
  Target: ATXN2; (+) strand; PAM type: NRG; PAM sequence: CAG
taaaaaaaaaaaaaaaattc

SEQ ID NO: 38641 - DNA, 20 bp, Artificial Sequence
  Description of Artificial Sequence: Synthetic oligonucleotide
  Target: ATXN2; (+) strand; PAM type: NRG; PAM sequence: AAG
aaaaaaaaaaaaaattccag

SEQ ID NO: 38642 - DNA, 20 bp, Artificial Sequence
  Description of Artificial Sequence: Synthetic oligonucleotide
  Target: ATXN2; (+) strand; PAM type: NRG; PAM sequence: TAG
attccagaagtttatactga

SEQ ID NO: 38643 - DNA, 20 bp, Artificial Sequence
  Description of Artificial Sequence: Synthetic oligonucleotide
  Target: ATXN2; (+) strand; PAM type: NRG; PAM sequence: AAG
cagaagtttatactgatagt

SEQ ID NO: 38644 - DNA, 20 bp, Artificial Sequence
  Description of Artificial Sequence: Synthetic oligonucleotide
  Target: ATXN2; (+) strand; PAM type: NRG; PAM sequence: TGG
cgacaaaaaaaccacctcac

SEQ ID NO: 38645 - DNA, 20 bp, Artificial Sequence
  Description of Artificial Sequence: Synthetic oligonucleotide
  Target: ATXN2; (+) strand; PAM type: NRG; PAM sequence: TGG
accacctcactggttacctt

SEQ ID NO: 38646 - DNA, 20 bp, Artificial Sequence
  Description of Artificial Sequence: Synthetic oligonucleotide
  Target: ATXN2; (+) strand; PAM type: NRG; PAM sequence: GAG
cacctcactggttacctttg

SEQ ID NO: 38647 - DNA, 20 bp, Artificial Sequence
  Description of Artificial Sequence: Synthetic oligonucleotide
  Target: ATXN2; (+) strand; PAM type: NRG; PAM sequence: AGG
acctcactggttacctttgg

SEQ ID NO: 38648 - DNA, 20 bp, Artificial Sequence
  Description of Artificial Sequence: Synthetic oligonucleotide
  Target: ATXN2; (+) strand; PAM type: NRG; PAM sequence: CAG
tggttacctttggaggataa

SEQ ID NO: 38649 - DNA, 20 bp, Artificial Sequence
  Description of Artificial Sequence: Synthetic oligonucleotide
  Target: ATXN2; (+) strand; PAM type: NRG; PAM sequence: AAG
aaaaccaactcattattttg

SEQ ID NO: 38650 - DNA, 20 bp, Artificial Sequence
  Description of Artificial Sequence: Synthetic oligonucleotide
  Target: ATXN2; (+) strand; PAM type: NRG; PAM sequence: AAG
attttgaagactgccttaaa

SEQ ID NO: 38651 - DNA, 20 bp, Artificial Sequence
  Description of Artificial Sequence: Synthetic oligonucleotide
  Target: ATXN2; (+) strand; PAM type: NRG; PAM sequence: AGG
ttttgaagactgccttaaaa

SEQ ID NO: 38652 - DNA, 20 bp, Artificial Sequence
  Description of Artificial Sequence: Synthetic oligonucleotide
  Target: ATXN2; (+) strand; PAM type: NRG; PAM sequence: GGG
tttgaagactgccttaaaaa

SEQ ID NO: 38653 - DNA, 20 bp, Artificial Sequence
  Description of Artificial Sequence: Synthetic oligonucleotide
  Target: ATXN2; (+) strand; PAM type: NRG; PAM sequence: AAG
cattttaaattacttttcct

SEQ ID NO: 38654 - DNA, 20 bp, Artificial Sequence
  Description of Artificial Sequence: Synthetic oligonucleotide
  Target: ATXN2; (+) strand; PAM type: NRG; PAM sequence: AAG
ttaaattacttttcctaaga

SEQ ID NO: 38655 - DNA, 20 bp, Artificial Sequence
  Description of Artificial Sequence: Synthetic oligonucleotide
  Target: ATXN2; (+) strand; PAM type: NRG; PAM sequence: CAG
ttcctaagaaagctatacct

SEQ ID NO: 38656 - DNA, 20 bp, Artificial Sequence
  Description of Artificial Sequence: Synthetic oligonucleotide
  Target: ATXN2; (+) strand; PAM type: NRG; PAM sequence: AGG
tcctaagaaagctatacctc

SEQ ID NO: 38657 - DNA, 20 bp, Artificial Sequence
  Description of Artificial Sequence: Synthetic oligonucleotide
  Target: ATXN2; (+) strand; PAM type: NRG; PAM sequence: GGG
cctaagaaagctatacctca

SEQ ID NO: 38658 - DNA, 20 bp, Artificial Sequence
  Description of Artificial Sequence: Synthetic oligonucleotide
  Target: ATXN2; (+) strand; PAM type: NRG; PAM sequence: CAG
tatacctcagggtaaccaaa

SEQ ID NO: 38659 - DNA, 20 bp, Artificial Sequence
  Description of Artificial Sequence: Synthetic oligonucleotide
  Target: ATXN2; (+) strand; PAM type: NRG; PAM sequence: TGG
cctcagggtaaccaaacagc

SEQ ID NO: 38660 - DNA, 20 bp, Artificial Sequence
  Description of Artificial Sequence: Synthetic oligonucleotide
  Target: ATXN2; (+) strand; PAM type: NRG; PAM sequence: TGG
ggtaaccaaacagctggata

SEQ ID NO: 38661 - DNA, 20 bp, Artificial Sequence
  Description of Artificial Sequence: Synthetic oligonucleotide
  Target: ATXN2; (+) strand; PAM type: NRG; PAM sequence: GGG
gtaaccaaacagctggatat

SEQ ID NO: 38662 - DNA, 20 bp, Artificial Sequence
  Description of Artificial Sequence: Synthetic oligonucleotide
  Target: ATXN2; (+) strand; PAM type: NRG; PAM sequence: AAG
ccaaacagctggatatggga

SEQ ID NO: 38663 - DNA, 20 bp, Artificial Sequence
  Description of Artificial Sequence: Synthetic oligonucleotide
  Target: ATXN2; (+) strand; PAM type: NRG; PAM sequence: TAG
tatgggaaagtttttcttta

SEQ ID NO: 38664 - DNA, 20 bp, Artificial Sequence
  Description of Artificial Sequence: Synthetic oligonucleotide
  Target: ATXN2; (+) strand; PAM type: NRG; PAM sequence: CAG
ttttctttatagaaatattc

SEQ ID NO: 38665 - DNA, 20 bp, Artificial Sequence
  Description of Artificial Sequence: Synthetic oligonucleotide
  Target: ATXN2; (+) strand; PAM type: NRG; PAM sequence: AGG
tttctttatagaaatattcc

SEQ ID NO: 38666 - DNA, 20 bp, Artificial Sequence
  Description of Artificial Sequence: Synthetic oligonucleotide
  Target: ATXN2; (+) strand; PAM type: NRG; PAM sequence: AAG
aatattccaggcaataattg

SEQ ID NO: 38667 - DNA, 20 bp, Artificial Sequence
  Description of Artificial Sequence: Synthetic oligonucleotide
  Target: ATXN2; (+) strand; PAM type: NRG; PAM sequence: AAG
attccaggcaataattgaag

SEQ ID NO: 38668 - DNA, 20 bp, Artificial Sequence
  Description of Artificial Sequence: Synthetic oligonucleotide
  Target: ATXN2; (+) strand; PAM type: NRG; PAM sequence: AGG
ttccaggcaataattgaaga

SEQ ID NO: 38669 - DNA, 20 bp, Artificial Sequence
  Description of Artificial Sequence: Synthetic oligonucleotide
  Target: ATXN2; (+) strand; PAM type: NRG; PAM sequence: GGG
tccaggcaataattgaagaa

SEQ ID NO: 38670 - DNA, 20 bp, Artificial Sequence
  Description of Artificial Sequence: Synthetic oligonucleotide
  Target: ATXN2; (+) strand; PAM type: NRG; PAM sequence: AAG
aataattgaagaagggatga

SEQ ID NO: 38671 - DNA, 20 bp, Artificial Sequence
  Description of Artificial Sequence: Synthetic oligonucleotide
  Target: ATXN2; (+) strand; PAM type: NRG; PAM sequence: AGG
ataattgaagaagggatgaa

SEQ ID NO: 38672 - DNA, 20 bp, Artificial Sequence
  Description of Artificial Sequence: Synthetic oligonucleotide
  Target: ATXN2; (+) strand; PAM type: NRG; PAM sequence: AAG
tgaagaagggatgaaaggaa

SEQ ID NO: 38673 - DNA, 20 bp, Artificial Sequence
  Description of Artificial Sequence: Synthetic oligonucleotide
  Target: ATXN2; (+) strand; PAM type: NRG; PAM sequence: AAG
gtcaccattttacaacccct

SEQ ID NO: 38674 - DNA, 20 bp, Artificial Sequence
  Description of Artificial Sequence: Synthetic oligonucleotide
  Target: ATXN2; (+) strand; PAM type: NRG; PAM sequence: AGG
tcaccattttacaaccccta

SEQ ID NO: 38675 - DNA, 20 bp, Artificial Sequence
  Description of Artificial Sequence: Synthetic oligonucleotide
  Target: ATXN2; (+) strand; PAM type: NRG; PAM sequence: TGG
cctaaggaaataactgatct

SEQ ID NO: 38676 - DNA, 20 bp, Artificial Sequence
  Description of Artificial Sequence: Synthetic oligonucleotide
  Target: ATXN2; (+) strand; PAM type: NRG; PAM sequence: GGG
ctaaggaaataactgatctt

SEQ ID NO: 38677 - DNA, 20 bp, Artificial Sequence
  Description of Artificial Sequence: Synthetic oligonucleotide
  Target: ATXN2; (+) strand; PAM type: NRG; PAM sequence: TAG
ggaaataactgatcttgggc

SEQ ID NO: 38678 - DNA, 20 bp, Artificial Sequence
  Description of Artificial Sequence: Synthetic oligonucleotide
  Target: ATXN2; (+) strand; PAM type: NRG; PAM sequence: TGG
ggctagacaattatcatcaa

SEQ ID NO: 38679 - DNA, 20 bp, Artificial Sequence
  Description of Artificial Sequence: Synthetic oligonucleotide
  Target: ATXN2; (+) strand; PAM type: NRG; PAM sequence: AAG
aaaaacacaccaaaaaaatt

SEQ ID NO: 38680 - DNA, 20 bp, Artificial Sequence
  Description of Artificial Sequence: Synthetic oligonucleotide
  Target: ATXN2; (+) strand; PAM type: NRG; PAM sequence: AGG
aaaacacaccaaaaaaatta

SEQ ID NO: 38681 - DNA, 20 bp, Artificial Sequence
  Description of Artificial Sequence: Synthetic oligonucleotide
  Target: ATXN2; (+) strand; PAM type: NRG; PAM sequence: AAG
ccaaaaaaattaaggcgcta

SEQ ID NO: 38682 - DNA, 20 bp, Artificial Sequence
  Description of Artificial Sequence: Synthetic oligonucleotide
  Target: ATXN2; (+) strand; PAM type: NRG; PAM sequence: AGG
caaaaaaattaaggcgctaa

SEQ ID NO: 38683 - DNA, 20 bp, Artificial Sequence
  Description of Artificial Sequence: Synthetic oligonucleotide
  Target: ATXN2; (+) strand; PAM type: NRG; PAM sequence: GGG
aaaaaaattaaggcgctaaa

SEQ ID NO: 38684 - DNA, 20 bp, Artificial Sequence
  Description of Artificial Sequence: Synthetic oligonucleotide
  Target: ATXN2; (+) strand; PAM type: NRG; PAM sequence: TGG
taaagggacatattatctcc

SEQ ID NO: 38685 - DNA, 20 bp, Artificial Sequence
  Description of Artificial Sequence: Synthetic oligonucleotide
  Target: ATXN2; (+) strand; PAM type: NRG; PAM sequence: TAG
gggacatattatctcctgga

SEQ ID NO: 38686 - DNA, 20 bp, Artificial Sequence
  Description of Artificial Sequence: Synthetic oligonucleotide
  Target: ATXN2; (+) strand; PAM type: NRG; PAM sequence: TAG
tcctggatagataaaacatc

SEQ ID NO: 38687 - DNA, 20 bp, Artificial Sequence
  Description of Artificial Sequence: Synthetic oligonucleotide
  Target: ATXN2; (+) strand; PAM type: NRG; PAM sequence: AGG
cctggatagataaaacatct

SEQ ID NO: 38688 - DNA, 20 bp, Artificial Sequence
  Description of Artificial Sequence: Synthetic oligonucleotide
  Target: ATXN2; (+) strand; PAM type: NRG; PAM sequence: CAG
aactcactgactactcctat

SEQ ID NO: 38689 - DNA, 20 bp, Artificial Sequence
  Description of Artificial Sequence: Synthetic oligonucleotide
  Target: ATXN2; (+) strand; PAM type: NRG; PAM sequence: AGG
actcactgactactcctatc

SEQ ID NO: 38690 - DNA, 20 bp, Artificial Sequence
  Description of Artificial Sequence: Synthetic oligonucleotide
  Target: ATXN2; (+) strand; PAM type: NRG; PAM sequence: AAG
tgactactcctatcaggaaa

SEQ ID NO: 38691 - DNA, 20 bp, Artificial Sequence
  Description of Artificial Sequence: Synthetic oligonucleotide
  Target: ATXN2; (+) strand; PAM type: NRG; PAM sequence: AAG
attacatgactcctcactga

SEQ ID NO: 38692 - DNA, 20 bp, Artificial Sequence
  Description of Artificial Sequence: Synthetic oligonucleotide
  Target: ATXN2; (+) strand; PAM type: NRG; PAM sequence: TGG
tacacacatctgtgaaacat

SEQ ID NO: 38693 - DNA, 20 bp, Artificial Sequence
  Description of Artificial Sequence: Synthetic oligonucleotide
  Target: ATXN2; (+) strand; PAM type: NRG; PAM sequence: GGG
acacacatctgtgaaacatt

SEQ ID NO: 38694 - DNA, 20 bp, Artificial Sequence
  Description of Artificial Sequence: Synthetic oligonucleotide
  Target: ATXN2; (+) strand; PAM type: NRG; PAM sequence: GGG
cacacatctgtgaaacattg

SEQ ID NO: 38695 - DNA, 20 bp, Artificial Sequence
  Description of Artificial Sequence: Synthetic oligonucleotide
  Target: ATXN2; (+) strand; PAM type: NRG; PAM sequence: AAG
aaaaaaaacccaatctgatc

SEQ ID NO: 38696 - DNA, 20 bp, Artificial Sequence
  Description of Artificial Sequence: Synthetic oligonucleotide
  Target: ATXN2; (+) strand; PAM type: NRG; PAM sequence: CAG
aagccttcattatttactat

SEQ ID NO: 38697 - DNA, 20 bp, Artificial Sequence
  Description of Artificial Sequence: Synthetic oligonucleotide
  Target: ATXN2; (+) strand; PAM type: NRG; PAM sequence: AAG
ttatttactatcagtttaca

SEQ ID NO: 38698 - DNA, 20 bp, Artificial Sequence
  Description of Artificial Sequence: Synthetic oligonucleotide
  Target: ATXN2; (+) strand; PAM type: NRG; PAM sequence: CAG
ctatcagtttacaaagatta

SEQ ID NO: 38699 - DNA, 20 bp, Artificial Sequence
  Description of Artificial Sequence: Synthetic oligonucleotide
  Target: ATXN2; (+) strand; PAM type: NRG; PAM sequence: AGG
tatcagtttacaaagattac

SEQ ID NO: 38700 - DNA, 20 bp, Artificial Sequence
  Description of Artificial Sequence: Synthetic oligonucleotide
  Target: ATXN2; (+) strand; PAM type: NRG; PAM sequence: GGG
atcagtttacaaagattaca

SEQ ID NO: 38701 - DNA, 20 bp, Artificial Sequence
  Description of Artificial Sequence: Synthetic oligonucleotide
  Target: ATXN2; (+) strand; PAM type: NRG; PAM sequence: GGG
tcagtttacaaagattacag

SEQ ID NO: 38702 - DNA, 20 bp, Artificial Sequence
  Description of Artificial Sequence: Synthetic oligonucleotide
  Target: ATXN2; (+) strand; PAM type: NRG; PAM sequence: CAG
tttacaaagattacagggga

SEQ ID NO: 38703 - DNA, 20 bp, Artificial Sequence
  Description of Artificial Sequence: Synthetic oligonucleotide
  Target: ATXN2; (+) strand; PAM type: NRG; PAM sequence: AAG
acaaagattacaggggacag

SEQ ID NO: 38704 - DNA, 20 bp, Artificial Sequence
  Description of Artificial Sequence: Synthetic oligonucleotide
  Target: ATXN2; (+) strand; PAM type: NRG; PAM sequence: CAG
gtctactttaaatatcaaca

SEQ ID NO: 38705 - DNA, 20 bp, Artificial Sequence
  Description of Artificial Sequence: Synthetic oligonucleotide
  Target: ATXN2; (+) strand; PAM type: NRG; PAM sequence: AGG
tctactttaaatatcaacac

SEQ ID NO: 38706 - DNA, 20 bp, Artificial Sequence
  Description of Artificial Sequence: Synthetic oligonucleotide
  Target: ATXN2; (+) strand; PAM type: NRG; PAM sequence: GGG
ctactttaaatatcaacaca

SEQ ID NO: 38707 - DNA, 20 bp, Artificial Sequence
  Description of Artificial Sequence: Synthetic oligonucleotide
  Target: ATXN2; (+) strand; PAM type: NRG; PAM sequence: CAG
taaatatcaacacagggata

SEQ ID NO: 38708 - DNA, 20 bp, Artificial Sequence
  Description of Artificial Sequence: Synthetic oligonucleotide
  Target: ATXN2; (+) strand; PAM type: NRG; PAM sequence: CAG
tatcaacacagggatacagt

SEQ ID NO: 38709 - DNA, 20 bp, Artificial Sequence
  Description of Artificial Sequence: Synthetic oligonucleotide
  Target: ATXN2; (+) strand; PAM type: NRG; PAM sequence: CAG
gggatacagtcagcaaaatt

SEQ ID NO: 38710 - DNA, 20 bp, Artificial Sequence
  Description of Artificial Sequence: Synthetic oligonucleotide
  Target: ATXN2; (+) strand; PAM type: NRG; PAM sequence: TGG
agtcagcaaaattcagatcg

SEQ ID NO: 38711 - DNA, 20 bp, Artificial Sequence
  Description of Artificial Sequence: Synthetic oligonucleotide
  Target: ATXN2; (+) strand; PAM type: NRG; PAM sequence: GGG
gtcagcaaaattcagatcgt

SEQ ID NO: 38712 - DNA, 20 bp, Artificial Sequence
  Description of Artificial Sequence: Synthetic oligonucleotide
  Target: ATXN2; (+) strand; PAM type: NRG; PAM sequence: AAG
agatcgtgggaaaaaaatac

SEQ ID NO: 38713 - DNA, 20 bp, Artificial Sequence
  Description of Artificial Sequence: Synthetic oligonucleotide
  Target: ATXN2; (+) strand; PAM type: NRG; PAM sequence: AAG
gtgggaaaaaaatacaagac

SEQ ID NO: 38714 - DNA, 20 bp, Artificial Sequence
  Description of Artificial Sequence: Synthetic oligonucleotide
  Target: ATXN2; (+) strand; PAM type: NRG; PAM sequence: TGG
gaaaaaaatacaagacaagc

SEQ ID NO: 38715 - DNA, 20 bp, Artificial Sequence
  Description of Artificial Sequence: Synthetic oligonucleotide
  Target: ATXN2; (+) strand; PAM type: NRG; PAM sequence: AAG
aagacaagctggatatgaac

SEQ ID NO: 38716 - DNA, 20 bp, Artificial Sequence
  Description of Artificial Sequence: Synthetic oligonucleotide
  Target: ATXN2; (+) strand; PAM type: NRG; PAM sequence: AAG
atatgaacaagacaaaaact

SEQ ID NO: 38717 - DNA, 20 bp, Artificial Sequence
  Description of Artificial Sequence: Synthetic oligonucleotide
  Target: ATXN2; (+) strand; PAM type: NRG; PAM sequence: AGG
tatgaacaagacaaaaacta

SEQ ID NO: 38718 - DNA, 20 bp, Artificial Sequence
  Description of Artificial Sequence: Synthetic oligonucleotide
  Target: ATXN2; (+) strand; PAM type: NRG; PAM sequence: GGG
atgaacaagacaaaaactaa

SEQ ID NO: 38719 - DNA, 20 bp, Artificial Sequence
  Description of Artificial Sequence: Synthetic oligonucleotide
  Target: ATXN2; (+) strand; PAM type: NRG; PAM sequence: GAG
aaaactgtaattaaaactgt

SEQ ID NO: 38720 - DNA, 20 bp, Artificial Sequence
  Description of Artificial Sequence: Synthetic oligonucleotide
  Target: ATXN2; (+) strand; PAM type: NRG; PAM sequence: AGG
aaactgtaattaaaactgtg

SEQ ID NO: 38721 - DNA, 20 bp, Artificial Sequence
  Description of Artificial Sequence: Synthetic oligonucleotide
  Target: ATXN2; (+) strand; PAM type: NRG; PAM sequence: GGG
aactgtaattaaaactgtga

SEQ ID NO: 38722 - DNA, 20 bp, Artificial Sequence
  Description of Artificial Sequence: Synthetic oligonucleotide
  Target: ATXN2; (+) strand; PAM type: NRG; PAM sequence: GAG
taattaaaactgtgagggct

SEQ ID NO: 38723 - DNA, 20 bp, Artificial Sequence
  Description of Artificial Sequence: Synthetic oligonucleotide
  Target: ATXN2; (+) strand; PAM type: NRG; PAM sequence: CAG
aaaactgtgagggctgagtg

SEQ ID NO: 38724 - DNA, 20 bp, Artificial Sequence
  Description of Artificial Sequence: Synthetic oligonucleotide
  Target: ATXN2; (+) strand; PAM type: NRG; PAM sequence: TGG
actgtgagggctgagtgcag

SEQ ID NO: 38725 - DNA, 20 bp, Artificial Sequence
  Description of Artificial Sequence: Synthetic oligonucleotide
  Target: ATXN2; (+) strand; PAM type: NRG; PAM sequence: TGG
gtggctcatgcctgtaatcc

SEQ ID NO: 38726 - DNA, 20 bp, Artificial Sequence
  Description of Artificial Sequence: Synthetic oligonucleotide
  Target: ATXN2; (+) strand; PAM type: NRG; PAM sequence: TGG
tgcctgtaatcctggcacct

SEQ ID NO: 38727 - DNA, 20 bp, Artificial Sequence
  Description of Artificial Sequence: Synthetic oligonucleotide
  Target: ATXN2; (+) strand; PAM type: NRG; PAM sequence: GGG
gcctgtaatcctggcacctt

SEQ ID NO: 38728 - DNA, 20 bp, Artificial Sequence
  Description of Artificial Sequence: Synthetic oligonucleotide
  Target: ATXN2; (+) strand; PAM type: NRG; PAM sequence: GAG
ctgtaatcctggcaccttgg

SEQ ID NO: 38729 - DNA, 20 bp, Artificial Sequence
  Description of Artificial Sequence: Synthetic oligonucleotide
  Target: ATXN2; (+) strand; PAM type: NRG; PAM sequence: AAG
atcctggcaccttgggagtc

SEQ ID NO: 38730 - DNA, 20 bp, Artificial Sequence
  Description of Artificial Sequence: Synthetic oligonucleotide
  Target: ATXN2; (+) strand; PAM type: NRG; PAM sequence: AGG
tcctggcaccttgggagtca

SEQ ID NO: 38731 - DNA, 20 bp, Artificial Sequence
  Description of Artificial Sequence: Synthetic oligonucleotide
  Target: ATXN2; (+) strand; PAM type: NRG; PAM sequence: CAG
tggcaccttgggagtcaagg

SEQ ID NO: 38732 - DNA, 20 bp, Artificial Sequence
  Description of Artificial Sequence: Synthetic oligonucleotide
  Target: ATXN2; (+) strand; PAM type: NRG; PAM sequence: AGG
ggcaccttgggagtcaaggc

SEQ ID NO: 38733 - DNA, 20 bp, Artificial Sequence
  Description of Artificial Sequence: Synthetic oligonucleotide
  Target: ATXN2; (+) strand; PAM type: NRG; PAM sequence: CAG
accttgggagtcaaggcagg

SEQ ID NO: 38734 - DNA, 20 bp, Artificial Sequence
  Description of Artificial Sequence: Synthetic oligonucleotide
  Target: ATXN2; (+) strand; PAM type: NRG; PAM sequence: GAG
tcaaggcaggcagactgctt

SEQ ID NO: 38735 - DNA, 20 bp, Artificial Sequence
  Description of Artificial Sequence: Synthetic oligonucleotide
  Target: ATXN2; (+) strand; PAM type: NRG; PAM sequence: CAG
gcaggcagactgcttgagct

SEQ ID NO: 38736 - DNA, 20 bp, Artificial Sequence
  Description of Artificial Sequence: Synthetic oligonucleotide
  Target: ATXN2; (+) strand; PAM type: NRG; PAM sequence: AGG
caggcagactgcttgagctc

SEQ ID NO: 38737 - DNA, 20 bp, Artificial Sequence
  Description of Artificial Sequence: Synthetic oligonucleotide
  Target: ATXN2; (+) strand; PAM type: NRG; PAM sequence: TAG
tctacaaaaaatacaaaaat

SEQ ID NO: 38738 - DNA, 20 bp, Artificial Sequence
  Description of Artificial Sequence: Synthetic oligonucleotide
  Target: ATXN2; (+) strand; PAM type: NRG; PAM sequence: CAG
caaaaaatacaaaaattagc

SEQ ID NO: 38739 - DNA, 20 bp, Artificial Sequence
  Description of Artificial Sequence: Synthetic oligonucleotide
  Target: ATXN2; (+) strand; PAM type: NRG; PAM sequence: AGG
aaaaaatacaaaaattagcc

SEQ ID NO: 38740 - DNA, 20 bp, Artificial Sequence
  Description of Artificial Sequence: Synthetic oligonucleotide
  Target: ATXN2; (+) strand; PAM type: NRG; PAM sequence: TGG
atacaaaaattagccaggta

SEQ ID NO: 38741 - DNA, 20 bp, Artificial Sequence
  Description of Artificial Sequence: Synthetic oligonucleotide
  Target: ATXN2; (+) strand; PAM type: NRG; PAM sequence: TGG
caaaaattagccaggtatgg

SEQ ID NO: 38742 - DNA, 20 bp, Artificial Sequence
  Description of Artificial Sequence: Synthetic oligonucleotide
  Target: ATXN2; (+) strand; PAM type: NRG; PAM sequence: TAG
ggtatggtggcgcgcacctt

SEQ ID NO: 38743 - DNA, 20 bp, Artificial Sequence
  Description of Artificial Sequence: Synthetic oligonucleotide
  Target: ATXN2; (+) strand; PAM type: NRG; PAM sequence: CAG
gtggcgcgcacctttagtcc

SEQ ID NO: 38744 - DNA, 20 bp, Artificial Sequence
  Description of Artificial Sequence: Synthetic oligonucleotide
  Target: ATXN2; (+) strand; PAM type: NRG; PAM sequence: TGG
cacctttagtcccagctact

SEQ ID NO: 38745 - DNA, 20 bp, Artificial Sequence
  Description of Artificial Sequence: Synthetic oligonucleotide
  Target: ATXN2; (+) strand; PAM type: NRG; PAM sequence: GGG
acctttagtcccagctactt

SEQ ID NO: 38746 - DNA, 20 bp, Artificial Sequence
  Description of Artificial Sequence: Synthetic oligonucleotide
  Target: ATXN2; (+) strand; PAM type: NRG; PAM sequence: GAG
ctttagtcccagctacttgg

SEQ ID NO: 38747 - DNA, 20 bp, Artificial Sequence
  Description of Artificial Sequence: Synthetic oligonucleotide
  Target: ATXN2; (+) strand; PAM type: NRG; PAM sequence: AGG
tttagtcccagctacttggg

SEQ ID NO: 38748 - DNA, 20 bp, Artificial Sequence
  Description of Artificial Sequence: Synthetic oligonucleotide
  Target: ATXN2; (+) strand; PAM type: NRG; PAM sequence: GAG
tcccagctacttgggaggtt

SEQ ID NO: 38749 - DNA, 20 bp, Artificial Sequence
  Description of Artificial Sequence: Synthetic oligonucleotide
  Target: ATXN2; (+) strand; PAM type: NRG; PAM sequence: AGG
cccagctacttgggaggttg

SEQ ID NO: 38750 - DNA, 20 bp, Artificial Sequence
  Description of Artificial Sequence: Synthetic oligonucleotide
  Target: ATXN2; (+) strand; PAM type: NRG; PAM sequence: TGG
agctacttgggaggttgagg

SEQ ID NO: 38751 - DNA, 20 bp, Artificial Sequence
  Description of Artificial Sequence: Synthetic oligonucleotide
  Target: ATXN2; (+) strand; PAM type: NRG; PAM sequence: GGG
gctacttgggaggttgaggt

SEQ ID NO: 38752 - DNA, 20 bp, Artificial Sequence
  Description of Artificial Sequence: Synthetic oligonucleotide
  Target: ATXN2; (+) strand; PAM type: NRG; PAM sequence: GAG
tacttgggaggttgaggtgg

SEQ ID NO: 38753 - DNA, 20 bp, Artificial Sequence
  Description of Artificial Sequence: Synthetic oligonucleotide
  Target: ATXN2; (+) strand; PAM type: NRG; PAM sequence: AGG
acttgggaggttgaggtggg

SEQ ID NO: 38754 - DNA, 20 bp, Artificial Sequence
  Description of Artificial Sequence: Synthetic oligonucleotide
  Target: ATXN2; (+) strand; PAM type: NRG; PAM sequence: AAG
ttgaggtgggaggaccacct

SEQ ID NO: 38755 - DNA, 20 bp, Artificial Sequence
  Description of Artificial Sequence: Synthetic oligonucleotide
  Target: ATXN2; (+) strand; PAM type: NRG; PAM sequence: TGG
gaggaccacctaagcccaat

SEQ ID NO: 38756 - DNA, 20 bp, Artificial Sequence
  Description of Artificial Sequence: Synthetic oligonucleotide
  Target: ATXN2; (+) strand; PAM type: NRG; PAM sequence: TAG
gaccacctaagcccaattgg

SEQ ID NO: 38757 - DNA, 20 bp, Artificial Sequence
  Description of Artificial Sequence: Synthetic oligonucleotide
  Target: ATXN2; (+) strand; PAM type: NRG; PAM sequence: GAG
ccacctaagcccaattggta

SEQ ID NO: 38758 - DNA, 20 bp, Artificial Sequence
  Description of Artificial Sequence: Synthetic oligonucleotide
  Target: ATXN2; (+) strand; PAM type: NRG; PAM sequence: GAG
caattggtagagactgcact

SEQ ID NO: 38759 - DNA, 20 bp, Artificial Sequence
  Description of Artificial Sequence: Synthetic oligonucleotide
  Target: ATXN2; (+) strand; PAM type: NRG; PAM sequence: CAG
gaaatcatgccactgcactc

SEQ ID NO: 38760 - DNA, 20 bp, Artificial Sequence
  Description of Artificial Sequence: Synthetic oligonucleotide
  Target: ATXN2; (+) strand; PAM type: NRG; PAM sequence: TGG
catgccactgcactccagct

SEQ ID NO: 38761 - DNA, 20 bp, Artificial Sequence
  Description of Artificial Sequence: Synthetic oligonucleotide
  Target: ATXN2; (+) strand; PAM type: NRG; PAM sequence: GGG
atgccactgcactccagctt

SEQ ID NO: 38762 - DNA, 20 bp, Artificial Sequence
  Description of Artificial Sequence: Synthetic oligonucleotide
  Target: ATXN2; (+) strand; PAM type: NRG; PAM sequence: CAG
ctgcactccagcttgggtga

SEQ ID NO: 38763 - DNA, 20 bp, Artificial Sequence
  Description of Artificial Sequence: Synthetic oligonucleotide
  Target: ATXN2; (+) strand; PAM type: NRG; PAM sequence: GAG
gcactccagcttgggtgaca

SEQ ID NO: 38764 - DNA, 20 bp, Artificial Sequence
  Description of Artificial Sequence: Synthetic oligonucleotide
  Target: ATXN2; (+) strand; PAM type: NRG; PAM sequence: TAG
tccagcttgggtgacagagt

SEQ ID NO: 38765 - DNA, 20 bp, Artificial Sequence
  Description of Artificial Sequence: Synthetic oligonucleotide
  Target: ATXN2; (+) strand; PAM type: NRG; PAM sequence: TGG
aaacaaaaaaacctatgact

SEQ ID NO: 38766 - DNA, 20 bp, Artificial Sequence
  Description of Artificial Sequence: Synthetic oligonucleotide
  Target: ATXN2; (+) strand; PAM type: NRG; PAM sequence: TGG
aaaaaaacctatgacttggc

SEQ ID NO: 38767 - DNA, 20 bp, Artificial Sequence
  Description of Artificial Sequence: Synthetic oligonucleotide
  Target: ATXN2; (+) strand; PAM type: NRG; PAM sequence: GGG
aaaaaacctatgacttggct

SEQ ID NO: 38768 - DNA, 20 bp, Artificial Sequence
  Description of Artificial Sequence: Synthetic oligonucleotide
  Target: ATXN2; (+) strand; PAM type: NRG; PAM sequence: TGG
tatgacttggctgggtgtga

SEQ ID NO: 38769 - DNA, 20 bp, Artificial Sequence
  Description of Artificial Sequence: Synthetic oligonucleotide
  Target: ATXN2; (+) strand; PAM type: NRG; PAM sequence: CAG
gctgggtgtgatggctcatc

SEQ ID NO: 38770 - DNA, 20 bp, Artificial Sequence
  Description of Artificial Sequence: Synthetic oligonucleotide
  Target: ATXN2; (+) strand; PAM type: NRG; PAM sequence: AAG
ggctcatccagcacctccta

SEQ ID NO: 38771 - DNA, 20 bp, Artificial Sequence
  Description of Artificial Sequence: Synthetic oligonucleotide
  Target: ATXN2; (+) strand; PAM type: NRG; PAM sequence: TGG
tccagcacctcctaaagtgc

SEQ ID NO: 38772 - DNA, 20 bp, Artificial Sequence
  Description of Artificial Sequence: Synthetic oligonucleotide
  Target: ATXN2; (+) strand; PAM type: NRG; PAM sequence: TAG
aaagtgctggcctgtaatcc

SEQ ID NO: 38773 - DNA, 20 bp, Artificial Sequence
  Description of Artificial Sequence: Synthetic oligonucleotide
  Target: ATXN2; (+) strand; PAM type: NRG; PAM sequence: TAG
ggcctgtaatcctagcactt

SEQ ID NO: 38774 - DNA, 20 bp, Artificial Sequence
  Description of Artificial Sequence: Synthetic oligonucleotide
  Target: ATXN2; (+) strand; PAM type: NRG; PAM sequence: AGG
gcctgtaatcctagcacttt

SEQ ID NO: 38775 - DNA, 20 bp, Artificial Sequence
  Description of Artificial Sequence: Synthetic oligonucleotide
  Target: ATXN2; (+) strand; PAM type: NRG; PAM sequence: GAG
ctgtaatcctagcactttag

SEQ ID NO: 38776 - DNA, 20 bp, Artificial Sequence
  Description of Artificial Sequence: Synthetic oligonucleotide
  Target: ATXN2; (+) strand; PAM type: NRG; PAM sequence: AGG
tgtaatcctagcactttagg

SEQ ID NO: 38777 - DNA, 20 bp, Artificial Sequence
  Description of Artificial Sequence: Synthetic oligonucleotide
  Target: ATXN2; (+) strand; PAM type: NRG; PAM sequence: GAG
tcctagcactttaggaggct

SEQ ID NO: 38778 - DNA, 20 bp, Artificial Sequence
  Description of Artificial Sequence: Synthetic oligonucleotide
  Target: ATXN2; (+) strand; PAM type: NRG; PAM sequence: AGG
cctagcactttaggaggctg

SEQ ID NO: 38779 - DNA, 20 bp, Artificial Sequence
  Description of Artificial Sequence: Synthetic oligonucleotide
  Target: ATXN2; (+) strand; PAM type: NRG; PAM sequence: TAG
agcactttaggaggctgagg

SEQ ID NO: 38780 - DNA, 20 bp, Artificial Sequence
  Description of Artificial Sequence: Synthetic oligonucleotide
  Target: ATXN2; (+) strand; PAM type: NRG; PAM sequence: AAG
ctttaggaggctgaggtaga

SEQ ID NO: 38781 - DNA, 20 bp, Artificial Sequence
  Description of Artificial Sequence: Synthetic oligonucleotide
  Target: ATXN2; (+) strand; PAM type: NRG; PAM sequence: AAG
ctgaggtagaaagataactt

SEQ ID NO: 38782 - DNA, 20 bp, Artificial Sequence
  Description of Artificial Sequence: Synthetic oligonucleotide
  Target: ATXN2; (+) strand; PAM type: NRG; PAM sequence: TGG
tagaaagataacttaagccc

SEQ ID NO: 38783 - DNA, 20 bp, Artificial Sequence
  Description of Artificial Sequence: Synthetic oligonucleotide
  Target: ATXN2; (+) strand; PAM type: NRG; PAM sequence: TAG
ataacttaagccctggaatt

SEQ ID NO: 38784 - DNA, 20 bp, Artificial Sequence
  Description of Artificial Sequence: Synthetic oligonucleotide
  Target: ATXN2; (+) strand; PAM type: NRG; PAM sequence: AGG
taacttaagccctggaattt

SEQ ID NO: 38785 - DNA, 20 bp, Artificial Sequence
  Description of Artificial Sequence: Synthetic oligonucleotide
  Target: ATXN2; (+) strand; PAM type: NRG; PAM sequence: TAG
taagccctggaatttaggac

SEQ ID NO: 38786 - DNA, 20 bp, Artificial Sequence
  Description of Artificial Sequence: Synthetic oligonucleotide
  Target: ATXN2; (+) strand; PAM type: NRG; PAM sequence: TGG
cctggaatttaggactagcc

SEQ ID NO: 38787 - DNA, 20 bp, Artificial Sequence
  Description of Artificial Sequence: Synthetic oligonucleotide
  Target: ATXN2; (+) strand; PAM type: NRG; PAM sequence: GGG
ctggaatttaggactagcct

SEQ ID NO: 38788 - DNA, 20 bp, Artificial Sequence
  Description of Artificial Sequence: Synthetic oligonucleotide
  Target: ATXN2; (+) strand; PAM type: NRG; PAM sequence: AAG
aatttaggactagcctgggc

SEQ ID NO: 38789 - DNA, 20 bp, Artificial Sequence
  Description of Artificial Sequence: Synthetic oligonucleotide
  Target: ATXN2; (+) strand; PAM type: NRG; PAM sequence: TAG
taggactagcctgggcaaga

SEQ ID NO: 38790 - DNA, 20 bp, Artificial Sequence
  Description of Artificial Sequence: Synthetic oligonucleotide
  Target: ATXN2; (+) strand; PAM type: NRG; PAM sequence: AAG
actagcctgggcaagataga

SEQ ID NO: 38791 - DNA, 20 bp, Artificial Sequence
  Description of Artificial Sequence: Synthetic oligonucleotide
  Target: ATXN2; (+) strand; PAM type: NRG; PAM sequence: TGG
gcctgggcaagatagaaaga

SEQ ID NO: 38792 - DNA, 20 bp, Artificial Sequence
  Description of Artificial Sequence: Synthetic oligonucleotide
  Target: ATXN2; (+) strand; PAM type: NRG; PAM sequence: GAG
gggcaagatagaaagatggt

SEQ ID NO: 38793 - DNA, 20 bp, Artificial Sequence
  Description of Artificial Sequence: Synthetic oligonucleotide
  Target: ATXN2; (+) strand; PAM type: NRG; PAM sequence: AAG
aaaaaacaaacaaaaaaaca

SEQ ID NO: 38794 - DNA, 20 bp, Artificial Sequence
  Description of Artificial Sequence: Synthetic oligonucleotide
  Target: ATXN2; (+) strand; PAM type: NRG; PAM sequence: AAG
aaacaaacaaaaaaacaaag

SEQ ID NO: 38795 - DNA, 20 bp, Artificial Sequence
  Description of Artificial Sequence: Synthetic oligonucleotide
  Target: ATXN2; (+) strand; PAM type: NRG; PAM sequence: AAG
caaacaaaaaaacaaagaag

SEQ ID NO: 38796 - DNA, 20 bp, Artificial Sequence
  Description of Artificial Sequence: Synthetic oligonucleotide
  Target: ATXN2; (+) strand; PAM type: NRG; PAM sequence: AAG
caaaaaaacaaagaagaaga

SEQ ID NO: 38797 - DNA, 20 bp, Artificial Sequence
  Description of Artificial Sequence: Synthetic oligonucleotide
  Target: ATXN2; (+) strand; PAM type: NRG; PAM sequence: AAG
aaacaaagaagaagaaagac

SEQ ID NO: 38798 - DNA, 20 bp, Artificial Sequence
  Description of Artificial Sequence: Synthetic oligonucleotide
  Target: ATXN2; (+) strand; PAM type: NRG; PAM sequence: AAG
aagaagaagaaagacaagac

SEQ ID NO: 38799 - DNA, 20 bp, Artificial Sequence
  Description of Artificial Sequence: Synthetic oligonucleotide
  Target: ATXN2; (+) strand; PAM type: NRG; PAM sequence: AAG
gaagaaagacaagacaagaa

SEQ ID NO: 38800 - DNA, 20 bp, Artificial Sequence
  Description of Artificial Sequence: Synthetic oligonucleotide
  Target: ATXN2; (+) strand; PAM type: NRG; PAM sequence: AAG
aagacaagacaagaaaagaa

SEQ ID NO: 38801 - DNA, 20 bp, Artificial Sequence
  Description of Artificial Sequence: Synthetic oligonucleotide
  Target: ATXN2; (+) strand; PAM type: NRG; PAM sequence: TGG
caagacaagaaaagaaaagc

SEQ ID NO: 38802 - DNA, 20 bp, Artificial Sequence
  Description of Artificial Sequence: Synthetic oligonucleotide
  Target: ATXN2; (+) strand; PAM type: NRG; PAM sequence: AAG
acaagaaaagaaaagctggc

SEQ ID NO: 38803 - DNA, 20 bp, Artificial Sequence
  Description of Artificial Sequence: Synthetic oligonucleotide
  Target: ATXN2; (+) strand; PAM type: NRG; PAM sequence: AGG
caagaaaagaaaagctggca

SEQ ID NO: 38804 - DNA, 20 bp, Artificial Sequence
  Description of Artificial Sequence: Synthetic oligonucleotide
  Target: ATXN2; (+) strand; PAM type: NRG; PAM sequence: TGG
gaaaagaaaagctggcaagg

SEQ ID NO: 38805 - DNA, 20 bp, Artificial Sequence
  Description of Artificial Sequence: Synthetic oligonucleotide
  Target: ATXN2; (+) strand; PAM type: NRG; PAM sequence: TAG
ggcaaggtggcatgtgcctg

SEQ ID NO: 38806 - DNA, 20 bp, Artificial Sequence
  Description of Artificial Sequence: Synthetic oligonucleotide
  Target: ATXN2; (+) strand; PAM type: NRG; PAM sequence: CAG
gtggcatgtgcctgtagtca

SEQ ID NO: 38807 - DNA, 20 bp, Artificial Sequence
  Description of Artificial Sequence: Synthetic oligonucleotide
  Target: ATXN2; (+) strand; PAM type: NRG; PAM sequence: GAG
gcctgtagtcacagttactt

SEQ ID NO: 38808 - DNA, 20 bp, Artificial Sequence
  Description of Artificial Sequence: Synthetic oligonucleotide
  Target: ATXN2; (+) strand; PAM type: NRG; PAM sequence: GAG
ctgtagtcacagttacttga

SEQ ID NO: 38809 - DNA, 20 bp, Artificial Sequence
  Description of Artificial Sequence: Synthetic oligonucleotide
  Target: ATXN2; (+) strand; PAM type: NRG; PAM sequence: AGG
tgtagtcacagttacttgag

SEQ ID NO: 38810 - DNA, 20 bp, Artificial Sequence
  Description of Artificial Sequence: Synthetic oligonucleotide
  Target: ATXN2; (+) strand; PAM type: NRG; PAM sequence: GAG
tcacagttacttgagaggct

SEQ ID NO: 38811 - DNA, 20 bp, Artificial Sequence
  Description of Artificial Sequence: Synthetic oligonucleotide
  Target: ATXN2; (+) strand; PAM type: NRG; PAM sequence: AGG
cacagttacttgagaggctg

SEQ ID NO: 38812 - DNA, 20 bp, Artificial Sequence
  Description of Artificial Sequence: Synthetic oligonucleotide
  Target: ATXN2; (+) strand; PAM type: NRG; PAM sequence: GAG
cagttacttgagaggctgag

SEQ ID NO: 38813 - DNA, 20 bp, Artificial Sequence
  Description of Artificial Sequence: Synthetic oligonucleotide
  Target: ATXN2; (+) strand; PAM type: NRG; PAM sequence: AGG
agttacttgagaggctgagg

SEQ ID NO: 38814 - DNA, 20 bp, Artificial Sequence
  Description of Artificial Sequence: Synthetic oligonucleotide
  Target: ATXN2; (+) strand; PAM type: NRG; PAM sequence: GGG
gttacttgagaggctgagga

SEQ ID NO: 38815 - DNA, 20 bp, Artificial Sequence
  Description of Artificial Sequence: Synthetic oligonucleotide
  Target: ATXN2; (+) strand; PAM type: NRG; PAM sequence: GAG
tacttgagaggctgaggagg

SEQ ID NO: 38816 - DNA, 20 bp, Artificial Sequence
  Description of Artificial Sequence: Synthetic oligonucleotide
  Target: ATXN2; (+) strand; PAM type: NRG; PAM sequence: AGG
acttgagaggctgaggaggg

SEQ ID NO: 38817 - DNA, 20 bp, Artificial Sequence
  Description of Artificial Sequence: Synthetic oligonucleotide
  Target: ATXN2; (+) strand; PAM type: NRG; PAM sequence: GAG
ctgaggagggaggatccttt

SEQ ID NO: 38818 - DNA, 20 bp, Artificial Sequence
  Description of Artificial Sequence: Synthetic oligonucleotide
  Target: ATXN2; (+) strand; PAM type: NRG; PAM sequence: CAG
gagggaggatcctttgagac

SEQ ID NO: 38819 - DNA, 20 bp, Artificial Sequence
  Description of Artificial Sequence: Synthetic oligonucleotide
  Target: ATXN2; (+) strand; PAM type: NRG; PAM sequence: AGG
agggaggatcctttgagacc

SEQ ID NO: 38820 - DNA, 20 bp, Artificial Sequence
  Description of Artificial Sequence: Synthetic oligonucleotide
  Target: ATXN2; (+) strand; PAM type: NRG; PAM sequence: CAG
cctttgagaccaggaattcg

SEQ ID NO: 38821 - DNA, 20 bp, Artificial Sequence
  Description of Artificial Sequence: Synthetic oligonucleotide
  Target: ATXN2; (+) strand; PAM type: NRG; PAM sequence: CAG
ttgagaccaggaattcgcag

SEQ ID NO: 38822 - DNA, 20 bp, Artificial Sequence
  Description of Artificial Sequence: Synthetic oligonucleotide
  Target: ATXN2; (+) strand; PAM type: NRG; PAM sequence: CAG
agaccaggaattcgcagcag

SEQ ID NO: 38823 - DNA, 20 bp, Artificial Sequence
  Description of Artificial Sequence: Synthetic oligonucleotide
  Target: ATXN2; (+) strand; PAM type: NRG; PAM sequence: GAG
caggaattcgcagcagcagt

SEQ ID NO: 38824 - DNA, 20 bp, Artificial Sequence
  Description of Artificial Sequence: Synthetic oligonucleotide
  Target: ATXN2; (+) strand; PAM type: NRG; PAM sequence: AAG
tgattgcactactgcactcc

SEQ ID NO: 38825 - DNA, 20 bp, Artificial Sequence
  Description of Artificial Sequence: Synthetic oligonucleotide
  Target: ATXN2; (+) strand; PAM type: NRG; PAM sequence: TGG
gcactactgcactccaagcc

SEQ ID NO: 38826 - DNA, 20 bp, Artificial Sequence
  Description of Artificial Sequence: Synthetic oligonucleotide
  Target: ATXN2; (+) strand; PAM type: NRG; PAM sequence: GGG
cactactgcactccaagcct

SEQ ID NO: 38827 - DNA, 20 bp, Artificial Sequence
  Description of Artificial Sequence: Synthetic oligonucleotide
  Target: ATXN2; (+) strand; PAM type: NRG; PAM sequence: AAG
cactccaagcctgggcaaca

SEQ ID NO: 38828 - DNA, 20 bp, Artificial Sequence
  Description of Artificial Sequence: Synthetic oligonucleotide
  Target: ATXN2; (+) strand; PAM type: NRG; PAM sequence: CAG
ccaagcctgggcaacaaagc

SEQ ID NO: 38829 - DNA, 20 bp, Artificial Sequence
  Description of Artificial Sequence: Synthetic oligonucleotide
  Target: ATXN2; (+) strand; PAM type: NRG; PAM sequence: AAG
acaaaaccaaaaccaactta

SEQ ID NO: 38830 - DNA, 20 bp, Artificial Sequence
  Description of Artificial Sequence: Synthetic oligonucleotide
  Target: ATXN2; (+) strand; PAM type: NRG; PAM sequence: TGG
aaagatacacactaaaatgt

SEQ ID NO: 38831 - DNA, 20 bp, Artificial Sequence
  Description of Artificial Sequence: Synthetic oligonucleotide
  Target: ATXN2; (+) strand; PAM type: NRG; PAM sequence: TGG
gatacacactaaaatgttgg

SEQ ID NO: 38832 - DNA, 20 bp, Artificial Sequence
  Description of Artificial Sequence: Synthetic oligonucleotide
  Target: ATXN2; (+) strand; PAM type: NRG; PAM sequence: TAG
ggataaactgatgcaatgtc

SEQ ID NO: 38833 - DNA, 20 bp, Artificial Sequence
  Description of Artificial Sequence: Synthetic oligonucleotide
  Target: ATXN2; (+) strand; PAM type: NRG; PAM sequence: CAG
gcaatgtctagaatttgctt

SEQ ID NO: 38834 - DNA, 20 bp, Artificial Sequence
  Description of Artificial Sequence: Synthetic oligonucleotide
  Target: ATXN2; (+) strand; PAM type: NRG; PAM sequence: CAG
gaatttgcttcagaataatc

SEQ ID NO: 38835 - DNA, 20 bp, Artificial Sequence
  Description of Artificial Sequence: Synthetic oligonucleotide
  Target: ATXN2; (+) strand; PAM type: NRG; PAM sequence: TGG
tttgcttcagaataatccag

SEQ ID NO: 38836 - DNA, 20 bp, Artificial Sequence
  Description of Artificial Sequence: Synthetic oligonucleotide
  Target: ATXN2; (+) strand; PAM type: NRG; PAM sequence: AAG
agaataatccagtggactca

SEQ ID NO: 38837 - DNA, 20 bp, Artificial Sequence
  Description of Artificial Sequence: Synthetic oligonucleotide
  Target: ATXN2; (+) strand; PAM type: NRG; PAM sequence: AAG
ccagtggactcaaagctttt

SEQ ID NO: 38838 - DNA, 20 bp, Artificial Sequence
  Description of Artificial Sequence: Synthetic oligonucleotide
  Target: ATXN2; (+) strand; PAM type: NRG; PAM sequence: GAG
agtggactcaaagcttttaa

SEQ ID NO: 38839 - DNA, 20 bp, Artificial Sequence
  Description of Artificial Sequence: Synthetic oligonucleotide
  Target: ATXN2; (+) strand; PAM type: NRG; PAM sequence: TGG
tcaaagcttttaagagacaa

SEQ ID NO: 38840 - DNA, 20 bp, Artificial Sequence
  Description of Artificial Sequence: Synthetic oligonucleotide
  Target: ATXN2; (+) strand; PAM type: NRG; PAM sequence: GGG
caaagcttttaagagacaat

SEQ ID NO: 38841 - DNA, 20 bp, Artificial Sequence
  Description of Artificial Sequence: Synthetic oligonucleotide
  Target: ATXN2; (+) strand; PAM type: NRG; PAM sequence: TAG
agcttttaagagacaatggg

SEQ ID NO: 38842 - DNA, 20 bp, Artificial Sequence
  Description of Artificial Sequence: Synthetic oligonucleotide
  Target: ATXN2; (+) strand; PAM type: NRG; PAM sequence: AGG
gcttttaagagacaatgggt

SEQ ID NO: 38843 - DNA, 20 bp, Artificial Sequence
  Description of Artificial Sequence: Synthetic oligonucleotide
  Target: ATXN2; (+) strand; PAM type: NRG; PAM sequence: GGG
cttttaagagacaatgggta

SEQ ID NO: 38844 - DNA, 20 bp, Artificial Sequence
  Description of Artificial Sequence: Synthetic oligonucleotide
  Target: ATXN2; (+) strand; PAM type: NRG; PAM sequence: TGG
gggtagggatgaaacatgac

SEQ ID NO: 38845 - DNA, 20 bp, Artificial Sequence
  Description of Artificial Sequence: Synthetic oligonucleotide
  Target: ATXN2; (+) strand; PAM type: NRG; PAM sequence: TAG
gggatgaaacatgactggcc

SEQ ID NO: 38846 - DNA, 20 bp, Artificial Sequence
  Description of Artificial Sequence: Synthetic oligonucleotide
  Target: ATXN2; (+) strand; PAM type: NRG; PAM sequence: AGG
ggatgaaacatgactggcct

SEQ ID NO: 38847 - DNA, 20 bp, Artificial Sequence
  Description of Artificial Sequence: Synthetic oligonucleotide
  Target: ATXN2; (+) strand; PAM type: NRG; PAM sequence: AAG
ctcaatacattcgtaataaa

SEQ ID NO: 38848 - DNA, 20 bp, Artificial Sequence
  Description of Artificial Sequence: Synthetic oligonucleotide
  Target: ATXN2; (+) strand; PAM type: NRG; PAM sequence: AAG
tcgtaataaaaagttaccgc

SEQ ID NO: 38849 - DNA, 20 bp, Artificial Sequence
  Description of Artificial Sequence: Synthetic oligonucleotide
  Target: ATXN2; (+) strand; PAM type: NRG; PAM sequence: AGG
cgtaataaaaagttaccgca

SEQ ID NO: 38850 - DNA, 20 bp, Artificial Sequence
  Description of Artificial Sequence: Synthetic oligonucleotide
  Target: ATXN2; (+) strand; PAM type: NRG; PAM sequence: GAG
taaaaagttaccgcaaggct

SEQ ID NO: 38851 - DNA, 20 bp, Artificial Sequence
  Description of Artificial Sequence: Synthetic oligonucleotide
  Target: ATXN2; (+) strand; PAM type: NRG; PAM sequence: GAG
aaaagttaccgcaaggctga

SEQ ID NO: 38852 - DNA, 20 bp, Artificial Sequence
  Description of Artificial Sequence: Synthetic oligonucleotide
  Target: ATXN2; (+) strand; PAM type: NRG; PAM sequence: TGG
taccgcaaggctgagagcga

SEQ ID NO: 38853 - DNA, 20 bp, Artificial Sequence
  Description of Artificial Sequence: Synthetic oligonucleotide
  Target: ATXN2; (+) strand; PAM type: NRG; PAM sequence: CAG
atggctcacacctgtaatcc

SEQ ID NO: 38854 - DNA, 20 bp, Artificial Sequence
  Description of Artificial Sequence: Synthetic oligonucleotide
  Target: ATXN2; (+) strand; PAM type: NRG; PAM sequence: TGG
cacctgtaatcccagcactt

SEQ ID NO: 38855 - DNA, 20 bp, Artificial Sequence
  Description of Artificial Sequence: Synthetic oligonucleotide
  Target: ATXN2; (+) strand; PAM type: NRG; PAM sequence: GGG
acctgtaatcccagcacttt

SEQ ID NO: 38856 - DNA, 20 bp, Artificial Sequence
  Description of Artificial Sequence: Synthetic oligonucleotide
  Target: ATXN2; (+) strand; PAM type: NRG; PAM sequence: GAG
ctgtaatcccagcactttgg

SEQ ID NO: 38857 - DNA, 20 bp, Artificial Sequence
  Description of Artificial Sequence: Synthetic oligonucleotide
  Target: ATXN2; (+) strand; PAM type: NRG; PAM sequence: AGG
tgtaatcccagcactttggg

SEQ ID NO: 38858 - DNA, 20 bp, Artificial Sequence
  Description of Artificial Sequence: Synthetic oligonucleotide
  Target: ATXN2; (+) strand; PAM type: NRG; PAM sequence: GAG
tcccagcactttgggaggcc

SEQ ID NO: 38859 - DNA, 20 bp, Artificial Sequence
  Description of Artificial Sequence: Synthetic oligonucleotide
  Target: ATXN2; (+) strand; PAM type: NRG; PAM sequence: AGG
cccagcactttgggaggccg

SEQ ID NO: 38860 - DNA, 20 bp, Artificial Sequence
  Description of Artificial Sequence: Synthetic oligonucleotide
  Target: ATXN2; (+) strand; PAM type: NRG; PAM sequence: CGG
agcactttgggaggccgagg

SEQ ID NO: 38861 - DNA, 20 bp, Artificial Sequence
  Description of Artificial Sequence: Synthetic oligonucleotide
  Target: ATXN2; (+) strand; PAM type: NRG; PAM sequence: GGG
gcactttgggaggccgaggc

SEQ ID NO: 38862 - DNA, 20 bp, Artificial Sequence
  Description of Artificial Sequence: Synthetic oligonucleotide
  Target: ATXN2; (+) strand; PAM type: NRG; PAM sequence: TGG
ctttgggaggccgaggcggg

SEQ ID NO: 38863 - DNA, 20 bp, Artificial Sequence
  Description of Artificial Sequence: Synthetic oligonucleotide
  Target: ATXN2; (+) strand; PAM type: NRG; PAM sequence: GAG
ccgaggcgggtggatcattt

SEQ ID NO: 38864 - DNA, 20 bp, Artificial Sequence
  Description of Artificial Sequence: Synthetic oligonucleotide
  Target: ATXN2; (+) strand; PAM type: NRG; PAM sequence: AGG
cgaggcgggtggatcatttg

SEQ ID NO: 38865 - DNA, 20 bp, Artificial Sequence
  Description of Artificial Sequence: Synthetic oligonucleotide
  Target: ATXN2; (+) strand; PAM type: NRG; PAM sequence: CAG
gcgggtggatcatttgaggt

SEQ ID NO: 38866 - DNA, 20 bp, Artificial Sequence
  Description of Artificial Sequence: Synthetic oligonucleotide
  Target: ATXN2; (+) strand; PAM type: NRG; PAM sequence: AGG
cgggtggatcatttgaggtc

SEQ ID NO: 38867 - DNA, 20 bp, Artificial Sequence
  Description of Artificial Sequence: Synthetic oligonucleotide
  Target: ATXN2; (+) strand; PAM type: NRG; PAM sequence: GAG
ggtggatcatttgaggtcag

SEQ ID NO: 38868 - DNA, 20 bp, Artificial Sequence
  Description of Artificial Sequence: Synthetic oligonucleotide
  Target: ATXN2; (+) strand; PAM type: NRG; PAM sequence: AAG
tcatttgaggtcaggagttc

SEQ ID NO: 38869 - DNA, 20 bp, Artificial Sequence
  Description of Artificial Sequence: Synthetic oligonucleotide
  Target: ATXN2; (+) strand; PAM type: NRG; PAM sequence: CGG
tgaggtcaggagttcaagac

SEQ ID NO: 38870 - DNA, 20 bp, Artificial Sequence
  Description of Artificial Sequence: Synthetic oligonucleotide
  Target: ATXN2; (+) strand; PAM type: NRG; PAM sequence: GGG
gaggtcaggagttcaagacc

SEQ ID NO: 38871 - DNA, 20 bp, Artificial Sequence
  Description of Artificial Sequence: Synthetic oligonucleotide
  Target: ATXN2; (+) strand; PAM type: NRG; PAM sequence: TGG
tcaggagttcaagaccgggc

SEQ ID NO: 38872 - DNA, 20 bp, Artificial Sequence
  Description of Artificial Sequence: Synthetic oligonucleotide
  Target: ATXN2; (+) strand; PAM type: NRG; PAM sequence: TGG
caagaccgggctggccaaca

SEQ ID NO: 38873 - DNA, 20 bp, Artificial Sequence
  Description of Artificial Sequence: Synthetic oligonucleotide
  Target: ATXN2; (+) strand; PAM type: NRG; PAM sequence: AAG
cccatctctattaaaaatac

SEQ ID NO: 38874 - DNA, 20 bp, Artificial Sequence
  Description of Artificial Sequence: Synthetic oligonucleotide
  Target: ATXN2; (+) strand; PAM type: NRG; PAM sequence: AGG
ccatctctattaaaaataca

SEQ ID NO: 38875 - DNA, 20 bp, Artificial Sequence
  Description of Artificial Sequence: Synthetic oligonucleotide
  Target: ATXN2; (+) strand; PAM type: NRG; PAM sequence: CGG
ctctattaaaaatacaaggc

SEQ ID NO: 38876 - DNA, 20 bp, Artificial Sequence
  Description of Artificial Sequence: Synthetic oligonucleotide
  Target: ATXN2; (+) strand; PAM type: NRG; PAM sequence: GGG
tctattaaaaatacaaggcc

SEQ ID NO: 38877 - DNA, 20 bp, Artificial Sequence
  Description of Artificial Sequence: Synthetic oligonucleotide
  Target: ATXN2; (+) strand; PAM type: NRG; PAM sequence: CAG
taaaaatacaaggccgggcg

SEQ ID NO: 38878 - DNA, 20 bp, Artificial Sequence
  Description of Artificial Sequence: Synthetic oligonucleotide
  Target: ATXN2; (+) strand; PAM type: NRG; PAM sequence: TGG
aaatacaaggccgggcgcag

SEQ ID NO: 38879 - DNA, 20 bp, Artificial Sequence
  Description of Artificial Sequence: Synthetic oligonucleotide
  Target: ATXN2; (+) strand; PAM type: NRG; PAM sequence: CAG
gtggctcacacctgtaatcc

SEQ ID NO: 38880 - DNA, 20 bp, Artificial Sequence
  Description of Artificial Sequence: Synthetic oligonucleotide
  Target: ATXN2; (+) strand; PAM type: NRG; PAM sequence: TGG
cacctgtaatcccagcactt

SEQ ID NO: 38881 - DNA, 20 bp, Artificial Sequence
  Description of Artificial Sequence: Synthetic oligonucleotide
  Target: ATXN2; (+) strand; PAM type: NRG; PAM sequence: GGG
acctgtaatcccagcacttt

SEQ ID NO: 38882 - DNA, 20 bp, Artificial Sequence
  Description of Artificial Sequence: Synthetic oligonucleotide
  Target: ATXN2; (+) strand; PAM type: NRG; PAM sequence: GAG
ctgtaatcccagcactttgg

SEQ ID NO: 38883 - DNA, 20 bp, Artificial Sequence
  Description of Artificial Sequence: Synthetic oligonucleotide
  Target: ATXN2; (+) strand; PAM type: NRG; PAM sequence: AGG
tgtaatcccagcactttggg

SEQ ID NO: 38884 - DNA, 20 bp, Artificial Sequence
  Description of Artificial Sequence: Synthetic oligonucleotide
  Target: ATXN2; (+) strand; PAM type: NRG; PAM sequence: GAG
tcccagcactttgggaggcc

SEQ ID NO: 38885 - DNA, 20 bp, Artificial Sequence
  Description of Artificial Sequence: Synthetic oligonucleotide
  Target: ATXN2; (+) strand; PAM type: NRG; PAM sequence: AGG
cccagcactttgggaggccg

SEQ ID NO: 38886 - DNA, 20 bp, Artificial Sequence
  Description of Artificial Sequence: Synthetic oligonucleotide
  Target: ATXN2; (+) strand; PAM type: NRG; PAM sequence: CGG
agcactttgggaggccgagg

SEQ ID NO: 38887 - DNA, 20 bp, Artificial Sequence
  Description of Artificial Sequence: Synthetic oligonucleotide
  Target: ATXN2; (+) strand; PAM type: NRG; PAM sequence: GGG
gcactttgggaggccgaggc

SEQ ID NO: 38888 - DNA, 20 bp, Artificial Sequence
  Description of Artificial Sequence: Synthetic oligonucleotide
  Target: ATXN2; (+) strand; PAM type: NRG; PAM sequence: CGG
ctttgggaggccgaggcggg

SEQ ID NO: 38889 - DNA, 20 bp, Artificial Sequence
  Description of Artificial Sequence: Synthetic oligonucleotide
  Target: ATXN2; (+) strand; PAM type: NRG; PAM sequence: GAG
ggccgaggcgggcggatcac

SEQ ID NO: 38890 - DNA, 20 bp, Artificial Sequence
  Description of Artificial Sequence: Synthetic oligonucleotide
  Target: ATXN2; (+) strand; PAM type: NRG; PAM sequence: AGG
gccgaggcgggcggatcacg

SEQ ID NO: 38891 - DNA, 20 bp, Artificial Sequence
  Description of Artificial Sequence: Synthetic oligonucleotide
  Target: ATXN2; (+) strand; PAM type: NRG; PAM sequence: CAG
aggcgggcggatcacgaggt

SEQ ID NO: 38892 - DNA, 20 bp, Artificial Sequence
  Description of Artificial Sequence: Synthetic oligonucleotide
  Target: ATXN2; (+) strand; PAM type: NRG; PAM sequence: AGG
ggcgggcggatcacgaggtc

SEQ ID NO: 38893 - DNA, 20 bp, Artificial Sequence
  Description of Artificial Sequence: Synthetic oligonucleotide
  Target: ATXN2; (+) strand; PAM type: NRG; PAM sequence: GAG
cgggcggatcacgaggtcag

SEQ ID NO: 38894 - DNA, 20 bp, Artificial Sequence
  Description of Artificial Sequence: Synthetic oligonucleotide
  Target: ATXN2; (+) strand; PAM type: NRG; PAM sequence: TGG
tcaggagatcgataccatcc

SEQ ID NO: 38895 - DNA, 20 bp, Artificial Sequence
  Description of Artificial Sequence: Synthetic oligonucleotide
  Target: ATXN2; (+) strand; PAM type: NRG; PAM sequence: CGG
cgataccatcctggctaaca

SEQ ID NO: 38896 - DNA, 20 bp, Artificial Sequence
  Description of Artificial Sequence: Synthetic oligonucleotide
  Target: ATXN2; (+) strand; PAM type: NRG; PAM sequence: TAG
tactaaaaatacaaaaaaat

SEQ ID NO: 38897 - DNA, 20 bp, Artificial Sequence
  Description of Artificial Sequence: Synthetic oligonucleotide
  Target: ATXN2; (+) strand; PAM type: NRG; PAM sequence: CGG
aaaaatacaaaaaaattagc

SEQ ID NO: 38898 - DNA, 20 bp, Artificial Sequence
  Description of Artificial Sequence: Synthetic oligonucleotide
  Target: ATXN2; (+) strand; PAM type: NRG; PAM sequence: GGG
aaaatacaaaaaaattagcc

SEQ ID NO: 38899 - DNA, 20 bp, Artificial Sequence
  Description of Artificial Sequence: Synthetic oligonucleotide
  Target: ATXN2; (+) strand; PAM type: NRG; PAM sequence: TGG
acaaaaaaattagccgggtg

SEQ ID NO: 38900 - DNA, 20 bp, Artificial Sequence
  Description of Artificial Sequence: Synthetic oligonucleotide
  Target: ATXN2; (+) strand; PAM type: NRG; PAM sequence: TGG
aaaaaattagccgggtgtgg

SEQ ID NO: 38901 - DNA, 20 bp, Artificial Sequence
  Description of Artificial Sequence: Synthetic oligonucleotide
  Target: ATXN2; (+) strand; PAM type: NRG; PAM sequence: CGG
aaattagccgggtgtggtgg

SEQ ID NO: 38902 - DNA, 20 bp, Artificial Sequence
  Description of Artificial Sequence: Synthetic oligonucleotide
  Target: ATXN2; (+) strand; PAM type: NRG; PAM sequence: GGG
aattagccgggtgtggtggc

SEQ ID NO: 38903 - DNA, 20 bp, Artificial Sequence
  Description of Artificial Sequence: Synthetic oligonucleotide
  Target: ATXN2; (+) strand; PAM type: NRG; PAM sequence: TAG
ggtgtggtggcgggcgaatg

SEQ ID NO: 38904 - DNA, 20 bp, Artificial Sequence
  Description of Artificial Sequence: Synthetic oligonucleotide
  Target: ATXN2; (+) strand; PAM type: NRG; PAM sequence: CAG
gtggcgggcgaatgtagtcc

SEQ ID NO: 38905 - DNA, 20 bp, Artificial Sequence
  Description of Artificial Sequence: Synthetic oligonucleotide
  Target: ATXN2; (+) strand; PAM type: NRG; PAM sequence: CAG
cgaatgtagtcccagctact

SEQ ID NO: 38906 - DNA, 20 bp, Artificial Sequence
  Description of Artificial Sequence: Synthetic oligonucleotide
  Target: ATXN2; (+) strand; PAM type: NRG; PAM sequence: AGG
gaatgtagtcccagctactc

SEQ ID NO: 38907 - DNA, 20 bp, Artificial Sequence
  Description of Artificial Sequence: Synthetic oligonucleotide
  Target: ATXN2; (+) strand; PAM type: NRG; PAM sequence: GAG
atgtagtcccagctactcag

SEQ ID NO: 38908 - DNA, 20 bp, Artificial Sequence
  Description of Artificial Sequence: Synthetic oligonucleotide
  Target: ATXN2; (+) strand; PAM type: NRG; PAM sequence: AGG
tgtagtcccagctactcagg

SEQ ID NO: 38909 - DNA, 20 bp, Artificial Sequence
  Description of Artificial Sequence: Synthetic oligonucleotide
  Target: ATXN2; (+) strand; PAM type: NRG; PAM sequence: GAG
tcccagctactcaggaggct

SEQ ID NO: 38910 - DNA, 20 bp, Artificial Sequence
  Description of Artificial Sequence: Synthetic oligonucleotide
  Target: ATXN2; (+) strand; PAM type: NRG; PAM sequence: AGG
cccagctactcaggaggctg

SEQ ID NO: 38911 - DNA, 20 bp, Artificial Sequence
  Description of Artificial Sequence: Synthetic oligonucleotide
  Target: ATXN2; (+) strand; PAM type: NRG; PAM sequence: CAG
agctactcaggaggctgagg

SEQ ID NO: 38912 - DNA, 20 bp, Artificial Sequence
  Description of Artificial Sequence: Synthetic oligonucleotide
  Target: ATXN2; (+) strand; PAM type: NRG; PAM sequence: AGG
gctactcaggaggctgaggc

SEQ ID NO: 38913 - DNA, 20 bp, Artificial Sequence
  Description of Artificial Sequence: Synthetic oligonucleotide
  Target: ATXN2; (+) strand; PAM type: NRG; PAM sequence: GAG
tactcaggaggctgaggcag

SEQ ID NO: 38914 - DNA, 20 bp, Artificial Sequence
  Description of Artificial Sequence: Synthetic oligonucleotide
  Target: ATXN2; (+) strand; PAM type: NRG; PAM sequence: TGG
aggaggctgaggcaggagaa

SEQ ID NO: 38915 - DNA, 20 bp, Artificial Sequence
  Description of Artificial Sequence: Synthetic oligonucleotide
  Target: ATXN2; (+) strand; PAM type: NRG; PAM sequence: AAG
caggagaatggcatgaaccc

SEQ ID NO: 38916 - DNA, 20 bp, Artificial Sequence
  Description of Artificial Sequence: Synthetic oligonucleotide
  Target: ATXN2; (+) strand; PAM type: NRG; PAM sequence: GAG
ggagaatggcatgaacccaa

SEQ ID NO: 38917 - DNA, 20 bp, Artificial Sequence
  Description of Artificial Sequence: Synthetic oligonucleotide
  Target: ATXN2; (+) strand; PAM type: NRG; PAM sequence: AGG
gagaatggcatgaacccaag

SEQ ID NO: 38918 - DNA, 20 bp, Artificial Sequence
  Description of Artificial Sequence: Synthetic oligonucleotide
  Target: ATXN2; (+) strand; PAM type: NRG; PAM sequence: CGG
aatggcatgaacccaagagg

SEQ ID NO: 38919 - DNA, 20 bp, Artificial Sequence
  Description of Artificial Sequence: Synthetic oligonucleotide
  Target: ATXN2; (+) strand; PAM type: NRG; PAM sequence: GAG
tggcatgaacccaagaggcg

SEQ ID NO: 38920 - DNA, 20 bp, Artificial Sequence
  Description of Artificial Sequence: Synthetic oligonucleotide
  Target: ATXN2; (+) strand; PAM type: NRG; PAM sequence: CAG
aacccaagaggcggagcttg

SEQ ID NO: 38921 - DNA, 20 bp, Artificial Sequence
  Description of Artificial Sequence: Synthetic oligonucleotide
  Target: ATXN2; (+) strand; PAM type: NRG; PAM sequence: GAG
caagaggcggagcttgcagt

SEQ ID NO: 38922 - DNA, 20 bp, Artificial Sequence
  Description of Artificial Sequence: Synthetic oligonucleotide
  Target: ATXN2; (+) strand; PAM type: NRG; PAM sequence: GAG
ggcggagcttgcagtgagcc

SEQ ID NO: 38923 - DNA, 20 bp, Artificial Sequence
  Description of Artificial Sequence: Synthetic oligonucleotide
  Target: ATXN2; (+) strand; PAM type: NRG; PAM sequence: CAG
gagatcgcatcactgcactc

SEQ ID NO: 38924 - DNA, 20 bp, Artificial Sequence
  Description of Artificial Sequence: Synthetic oligonucleotide
  Target: ATXN2; (+) strand; PAM type: NRG; PAM sequence: TGG
cgcatcactgcactccagcc

SEQ ID NO: 38925 - DNA, 20 bp, Artificial Sequence
  Description of Artificial Sequence: Synthetic oligonucleotide
  Target: ATXN2; (+) strand; PAM type: NRG; PAM sequence: GGG
gcatcactgcactccagcct

SEQ ID NO: 38926 - DNA, 20 bp, Artificial Sequence
  Description of Artificial Sequence: Synthetic oligonucleotide
  Target: ATXN2; (+) strand; PAM type: NRG; PAM sequence: CAG
ctgcactccagcctgggcaa

SEQ ID NO: 38927 - DNA, 20 bp, Artificial Sequence
  Description of Artificial Sequence: Synthetic oligonucleotide
  Target: ATXN2; (+) strand; PAM type: NRG; PAM sequence: GAG
gcactccagcctgggcaaca

SEQ ID NO: 38928 - DNA, 20 bp, Artificial Sequence
  Description of Artificial Sequence: Synthetic oligonucleotide
  Target: ATXN2; (+) strand; PAM type: NRG; PAM sequence: GAG
tccagcctgggcaacagagc

SEQ ID NO: 38929 - DNA, 20 bp, Artificial Sequence
  Description of Artificial Sequence: Synthetic oligonucleotide
  Target: ATXN2; (+) strand; PAM type: NRG; PAM sequence: AAG
agactctgtctcaaaaaaaa

SEQ ID NO: 38930 - DNA, 20 bp, Artificial Sequence
  Description of Artificial Sequence: Synthetic oligonucleotide
  Target: ATXN2; (+) strand; PAM type: NRG; PAM sequence: AGG
gactctgtctcaaaaaaaaa

SEQ ID NO: 38931 - DNA, 20 bp, Artificial Sequence
  Description of Artificial Sequence: Synthetic oligonucleotide
  Target: ATXN2; (+) strand; PAM type: NRG; PAM sequence: TGG
ctgtctcaaaaaaaaaaggc

SEQ ID NO: 38932 - DNA, 20 bp, Artificial Sequence
  Description of Artificial Sequence: Synthetic oligonucleotide
  Target: ATXN2; (+) strand; PAM type: NRG; PAM sequence: GGG
tgtctcaaaaaaaaaaggct

SEQ ID NO: 38933 - DNA, 20 bp, Artificial Sequence
  Description of Artificial Sequence: Synthetic oligonucleotide
  Target: ATXN2; (+) strand; PAM type: NRG; PAM sequence: TGG
aaaaaaaaggctgggctact

SEQ ID NO: 38934 - DNA, 20 bp, Artificial Sequence
  Description of Artificial Sequence: Synthetic oligonucleotide
  Target: ATXN2; (+) strand; PAM type: NRG; PAM sequence: GGG
aaaaaaaggctgggctactt

SEQ ID NO: 38935 - DNA, 20 bp, Artificial Sequence
  Description of Artificial Sequence: Synthetic oligonucleotide
  Target: ATXN2; (+) strand; PAM type: NRG; PAM sequence: GAG
aaaaaggctgggctacttgg

SEQ ID NO: 38936 - DNA, 20 bp, Artificial Sequence
  Description of Artificial Sequence: Synthetic oligonucleotide
  Target: ATXN2; (+) strand; PAM type: NRG; PAM sequence: AGG
aaaaggctgggctacttggg

SEQ ID NO: 38937 - DNA, 20 bp, Artificial Sequence
  Description of Artificial Sequence: Synthetic oligonucleotide
  Target: ATXN2; (+) strand; PAM type: NRG; PAM sequence: GAG
gctgggctacttgggaggct

SEQ ID NO: 38938 - DNA, 20 bp, Artificial Sequence
  Description of Artificial Sequence: Synthetic oligonucleotide
  Target: ATXN2; (+) strand; PAM type: NRG; PAM sequence: AGG
ctgggctacttgggaggctg

SEQ ID NO: 38939 - DNA, 20 bp, Artificial Sequence
  Description of Artificial Sequence: Synthetic oligonucleotide
  Target: ATXN2; (+) strand; PAM type: NRG; PAM sequence: CAG
ggctacttgggaggctgagg

SEQ ID NO: 38940 - DNA, 20 bp, Artificial Sequence
  Description of Artificial Sequence: Synthetic oligonucleotide
  Target: ATXN2; (+) strand; PAM type: NRG; PAM sequence: AGG
gctacttgggaggctgaggc

SEQ ID NO: 38941 - DNA, 20 bp, Artificial Sequence
  Description of Artificial Sequence: Synthetic oligonucleotide
  Target: ATXN2; (+) strand; PAM type: NRG; PAM sequence: GAG
tacttgggaggctgaggcag

SEQ ID NO: 38942 - DNA, 20 bp, Artificial Sequence
  Description of Artificial Sequence: Synthetic oligonucleotide
  Target: ATXN2; (+) strand; PAM type: NRG; PAM sequence: CAG
caggagaattgcttgaaccc

SEQ ID NO: 38943 - DNA, 20 bp, Artificial Sequence
  Description of Artificial Sequence: Synthetic oligonucleotide
  Target: ATXN2; (+) strand; PAM type: NRG; PAM sequence: GAG
ggagaattgcttgaacccca

SEQ ID NO: 38944 - DNA, 20 bp, Artificial Sequence
  Description of Artificial Sequence: Synthetic oligonucleotide
  Target: ATXN2; (+) strand; PAM type: NRG; PAM sequence: AGG
gagaattgcttgaaccccag

SEQ ID NO: 38945 - DNA, 20 bp, Artificial Sequence
  Description of Artificial Sequence: Synthetic oligonucleotide
  Target: ATXN2; (+) strand; PAM type: NRG; PAM sequence: GGG
agaattgcttgaaccccaga

SEQ ID NO: 38946 - DNA, 20 bp, Artificial Sequence
  Description of Artificial Sequence: Synthetic oligonucleotide
  Target: ATXN2; (+) strand; PAM type: NRG; PAM sequence: GGG
gaattgcttgaaccccagag

SEQ ID NO: 38947 - DNA, 20 bp, Artificial Sequence
  Description of Artificial Sequence: Synthetic oligonucleotide
  Target: ATXN2; (+) strand; PAM type: NRG; PAM sequence: GGG
aattgcttgaaccccagagg

SEQ ID NO: 38948 - DNA, 20 bp, Artificial Sequence
  Description of Artificial Sequence: Synthetic oligonucleotide
  Target: ATXN2; (+) strand; PAM type: NRG; PAM sequence: GAG
ttgcttgaaccccagagggg

SEQ ID NO: 38949 - DNA, 20 bp, Artificial Sequence
  Description of Artificial Sequence: Synthetic oligonucleotide
  Target: ATXN2; (+) strand; PAM type: NRG; PAM sequence: AGG
tgcttgaaccccagaggggg

SEQ ID NO: 38950 - DNA, 20 bp, Artificial Sequence
  Description of Artificial Sequence: Synthetic oligonucleotide
  Target: ATXN2; (+) strand; PAM type: NRG; PAM sequence: CAG
aaccccagagggggaggttg

SEQ ID NO: 38951 - DNA, 20 bp, Artificial Sequence
  Description of Artificial Sequence: Synthetic oligonucleotide
  Target: ATXN2; (+) strand; PAM type: NRG; PAM sequence: GAG
ccagagggggaggttgcagt

SEQ ID NO: 38952 - DNA, 20 bp, Artificial Sequence
  Description of Artificial Sequence: Synthetic oligonucleotide
  Target: ATXN2; (+) strand; PAM type: NRG; PAM sequence: GAG
gggggaggttgcagtgagtt

SEQ ID NO: 38953 - DNA, 20 bp, Artificial Sequence
  Description of Artificial Sequence: Synthetic oligonucleotide
  Target: ATXN2; (+) strand; PAM type: NRG; PAM sequence: CAG
gagattgtgccactgtactc

SEQ ID NO: 38954 - DNA, 20 bp, Artificial Sequence
  Description of Artificial Sequence: Synthetic oligonucleotide
  Target: ATXN2; (+) strand; PAM type: NRG; PAM sequence: TAG
tgtgccactgtactccagcc

SEQ ID NO: 38955 - DNA, 20 bp, Artificial Sequence
  Description of Artificial Sequence: Synthetic oligonucleotide
  Target: ATXN2; (+) strand; PAM type: NRG; PAM sequence: AGG
gtgccactgtactccagcct

SEQ ID NO: 38956 - DNA, 20 bp, Artificial Sequence
  Description of Artificial Sequence: Synthetic oligonucleotide
  Target: ATXN2; (+) strand; PAM type: NRG; PAM sequence: CAG
ctgtactccagcctaggtga

SEQ ID NO: 38957 - DNA, 20 bp, Artificial Sequence
  Description of Artificial Sequence: Synthetic oligonucleotide
  Target: ATXN2; (+) strand; PAM type: NRG; PAM sequence: GAG
gtactccagcctaggtgaca

SEQ ID NO: 38958 - DNA, 20 bp, Artificial Sequence
  Description of Artificial Sequence: Synthetic oligonucleotide
  Target: ATXN2; (+) strand; PAM type: NRG; PAM sequence: AAG
ccagcctaggtgacagagcc

SEQ ID NO: 38959 - DNA, 20 bp, Artificial Sequence
  Description of Artificial Sequence: Synthetic oligonucleotide
  Target: ATXN2; (+) strand; PAM type: NRG; PAM sequence: AAG
atctcaaaaaaaaaaaaaaa

SEQ ID NO: 38960 - DNA, 20 bp, Artificial Sequence
  Description of Artificial Sequence: Synthetic oligonucleotide
  Target: ATXN2; (+) strand; PAM type: NRG; PAM sequence: AAG
gaaacaattaaaaaaaaaaa

SEQ ID NO: 38961 - DNA, 20 bp, Artificial Sequence
  Description of Artificial Sequence: Synthetic oligonucleotide
  Target: ATXN2; (+) strand; PAM type: NRG; PAM sequence: AAG
tataaacaaatccaaattgc

SEQ ID NO: 38962 - DNA, 20 bp, Artificial Sequence
  Description of Artificial Sequence: Synthetic oligonucleotide
  Target: ATXN2; (+) strand; PAM type: NRG; PAM sequence: TGG
tccaaattgcaagcctgact

SEQ ID NO: 38963 - DNA, 20 bp, Artificial Sequence
  Description of Artificial Sequence: Synthetic oligonucleotide
  Target: ATXN2; (+) strand; PAM type: NRG; PAM sequence: TGG
agcctgacttggaccctaat

SEQ ID NO: 38964 - DNA, 20 bp, Artificial Sequence
  Description of Artificial Sequence: Synthetic oligonucleotide
  Target: ATXN2; (+) strand; PAM type: NRG; PAM sequence: AAG
ttggaacaaattattgtaaa

SEQ ID NO: 38965 - DNA, 20 bp, Artificial Sequence
  Description of Artificial Sequence: Synthetic oligonucleotide
  Target: ATXN2; (+) strand; PAM type: NRG; PAM sequence: AAG
tttttttttttttttttttt

SEQ ID NO: 38966 - DNA, 20 bp, Artificial Sequence
  Description of Artificial Sequence: Synthetic oligonucleotide
  Target: ATXN2; (+) strand; PAM type: NRG; PAM sequence: GAG
ttttttttttttttttttaa

SEQ ID NO: 38967 - DNA, 20 bp, Artificial Sequence
  Description of Artificial Sequence: Synthetic oligonucleotide
  Target: ATXN2; (+) strand; PAM type: NRG; PAM sequence: AGG
tttttttttttttttttaag

SEQ ID NO: 38968 - DNA, 20 bp, Artificial Sequence
  Description of Artificial Sequence: Synthetic oligonucleotide
  Target: ATXN2; (+) strand; PAM type: NRG; PAM sequence: GGG
ttttttttttttttttaaga

SEQ ID NO: 38969 - DNA, 20 bp, Artificial Sequence
  Description of Artificial Sequence: Synthetic oligonucleotide
  Target: ATXN2; (+) strand; PAM type: NRG; PAM sequence: CAG
gggaatcttgctctgtcacc

SEQ ID NO: 38970 - DNA, 20 bp, Artificial Sequence
  Description of Artificial Sequence: Synthetic oligonucleotide
  Target: ATXN2; (+) strand; PAM type: NRG; PAM sequence: AGG
ggaatcttgctctgtcaccc

SEQ ID NO: 38971 - DNA, 20 bp, Artificial Sequence
  Description of Artificial Sequence: Synthetic oligonucleotide
  Target: ATXN2; (+) strand; PAM type: NRG; PAM sequence: TGG
tcttgctctgtcacccaggc

SEQ ID NO: 38972 - DNA, 20 bp, Artificial Sequence
  Description of Artificial Sequence: Synthetic oligonucleotide
  Target: ATXN2; (+) strand; PAM type: NRG; PAM sequence: GAG
ttgctctgtcacccaggctg

SEQ ID NO: 38973 - DNA, 20 bp, Artificial Sequence
  Description of Artificial Sequence: Synthetic oligonucleotide
  Target: ATXN2; (+) strand; PAM type: NRG; PAM sequence: CAG
ctgtcacccaggctggagta

SEQ ID NO: 38974 - DNA, 20 bp, Artificial Sequence
  Description of Artificial Sequence: Synthetic oligonucleotide
  Target: ATXN2; (+) strand; PAM type: NRG; PAM sequence: AGG
tgtcacccaggctggagtac

SEQ ID NO: 38975 - DNA, 20 bp, Artificial Sequence
  Description of Artificial Sequence: Synthetic oligonucleotide
  Target: ATXN2; (+) strand; PAM type: NRG; PAM sequence: TGG
caactacaacttccgcctcc

SEQ ID NO: 38976 - DNA, 20 bp, Artificial Sequence
  Description of Artificial Sequence: Synthetic oligonucleotide
  Target: ATXN2; (+) strand; PAM type: NRG; PAM sequence: GGG
aactacaacttccgcctcct

SEQ ID NO: 38977 - DNA, 20 bp, Artificial Sequence
  Description of Artificial Sequence: Synthetic oligonucleotide
  Target: ATXN2; (+) strand; PAM type: NRG; PAM sequence: AAG
aacttccgcctcctgggttc

SEQ ID NO: 38978 - DNA, 20 bp, Artificial Sequence
  Description of Artificial Sequence: Synthetic oligonucleotide
  Target: ATXN2; (+) strand; PAM type: NRG; PAM sequence: CAG
ttcaagcaattcttctgcct

SEQ ID NO: 38979 - DNA, 20 bp, Artificial Sequence
  Description of Artificial Sequence: Synthetic oligonucleotide
  Target: ATXN2; (+) strand; PAM type: NRG; PAM sequence: AAG
ttcttctgcctcagtctccc

SEQ ID NO: 38980 - DNA, 20 bp, Artificial Sequence
  Description of Artificial Sequence: Synthetic oligonucleotide
  Target: ATXN2; (+) strand; PAM type: NRG; PAM sequence: TAG
ttctgcctcagtctcccaag

SEQ ID NO: 38981 - DNA, 20 bp, Artificial Sequence
  Description of Artificial Sequence: Synthetic oligonucleotide
  Target: ATXN2; (+) strand; PAM type: NRG; PAM sequence: TAG
gcctcagtctcccaagtagc

SEQ ID NO: 38982 - DNA, 20 bp, Artificial Sequence
  Description of Artificial Sequence: Synthetic oligonucleotide
  Target: ATXN2; (+) strand; PAM type: NRG; PAM sequence: CAG
ctcccaagtagctagaatta

SEQ ID NO: 38983 - DNA, 20 bp, Artificial Sequence
  Description of Artificial Sequence: Synthetic oligonucleotide
  Target: ATXN2; (+) strand; PAM type: NRG; PAM sequence: AGG
tcccaagtagctagaattac

SEQ ID NO: 38984 - DNA, 20 bp, Artificial Sequence
  Description of Artificial Sequence: Synthetic oligonucleotide
  Target: ATXN2; (+) strand; PAM type: NRG; PAM sequence: CGG
gaattacaggtgcctgccac

SEQ ID NO: 38985 - DNA, 20 bp, Artificial Sequence
  Description of Artificial Sequence: Synthetic oligonucleotide
  Target: ATXN2; (+) strand; PAM type: NRG; PAM sequence: GGG
aattacaggtgcctgccacc

SEQ ID NO: 38986 - DNA, 20 bp, Artificial Sequence
  Description of Artificial Sequence: Synthetic oligonucleotide
  Target: ATXN2; (+) strand; PAM type: NRG; PAM sequence: CAG
caggtgcctgccaccgggcc

SEQ ID NO: 38987 - DNA, 20 bp, Artificial Sequence
  Description of Artificial Sequence: Synthetic oligonucleotide
  Target: ATXN2; (+) strand; PAM type: NRG; PAM sequence: AAG
gcctgccaccgggcccagcc

SEQ ID NO: 38988 - DNA, 20 bp, Artificial Sequence
  Description of Artificial Sequence: Synthetic oligonucleotide
  Target: ATXN2; (+) strand; PAM type: NRG; PAM sequence: AAG
cccagccaagatatatttta

SEQ ID NO: 38989 - DNA, 20 bp, Artificial Sequence
  Description of Artificial Sequence: Synthetic oligonucleotide
  Target: ATXN2; (+) strand; PAM type: NRG; PAM sequence: CAG
ccaagatatattttaaagat

SEQ ID NO: 38990 - DNA, 20 bp, Artificial Sequence
  Description of Artificial Sequence: Synthetic oligonucleotide
  Target: ATXN2; (+) strand; PAM type: NRG; PAM sequence: TGG
gatatattttaaagatcagt

SEQ ID NO: 38991 - DNA, 20 bp, Artificial Sequence
  Description of Artificial Sequence: Synthetic oligonucleotide
  Target: ATXN2; (+) strand; PAM type: NRG; PAM sequence: AAG
aaagatcagttggttttaaa

SEQ ID NO: 38992 - DNA, 20 bp, Artificial Sequence
  Description of Artificial Sequence: Synthetic oligonucleotide
  Target: ATXN2; (+) strand; PAM type: NRG; PAM sequence: AGG
aagatcagttggttttaaaa

SEQ ID NO: 38993 - DNA, 20 bp, Artificial Sequence
  Description of Artificial Sequence: Synthetic oligonucleotide
  Target: ATXN2; (+) strand; PAM type: NRG; PAM sequence: TAG
aaaaaggcaactgatttttt

SEQ ID NO: 38994 - DNA, 20 bp, Artificial Sequence
  Description of Artificial Sequence: Synthetic oligonucleotide
  Target: ATXN2; (+) strand; PAM type: NRG; PAM sequence: TAG
aaggcaactgatttttttag

SEQ ID NO: 38995 - DNA, 20 bp, Artificial Sequence
  Description of Artificial Sequence: Synthetic oligonucleotide
  Target: ATXN2; (+) strand; PAM type: NRG; PAM sequence: AAG
caactgatttttttagtagt

SEQ ID NO: 38996 - DNA, 20 bp, Artificial Sequence
  Description of Artificial Sequence: Synthetic oligonucleotide
  Target: ATXN2; (+) strand; PAM type: NRG; PAM sequence: TAG
ttttagtagtaagttaatta

SEQ ID NO: 38997 - DNA, 20 bp, Artificial Sequence
  Description of Artificial Sequence: Synthetic oligonucleotide
  Target: ATXN2; (+) strand; PAM type: NRG; PAM sequence: GAG
ttagtagtaagttaattata

SEQ ID NO: 38998 - DNA, 20 bp, Artificial Sequence
  Description of Artificial Sequence: Synthetic oligonucleotide
  Target: ATXN2; (+) strand; PAM type: NRG; PAM sequence: TGG
agttaattatagagttcata

SEQ ID NO: 38999 - DNA, 20 bp, Artificial Sequence
  Description of Artificial Sequence: Synthetic oligonucleotide
  Target: ATXN2; (+) strand; PAM type: NRG; PAM sequence: CAG
agttcatatggaaaaataaa

SEQ ID NO: 39000 - DNA, 20 bp, Artificial Sequence
  Description of Artificial Sequence: Synthetic oligonucleotide
  Target: ATXN2; (+) strand; PAM type: NRG; PAM sequence: AAG
gaaaaataaacagaaaattc

SEQ ID NO: 39001 - DNA, 20 bp, Artificial Sequence
  Description of Artificial Sequence: Synthetic oligonucleotide
  Target: ATXN2; (+) strand; PAM type: NRG; PAM sequence: AGG
aaaaataaacagaaaattca

SEQ ID NO: 39002 - DNA, 20 bp, Artificial Sequence
  Description of Artificial Sequence: Synthetic oligonucleotide
  Target: ATXN2; (+) strand; PAM type: NRG; PAM sequence: TGG
ctgaaaaaaaaaatcaatgt

SEQ ID NO: 39003 - DNA, 20 bp, Artificial Sequence
  Description of Artificial Sequence: Synthetic oligonucleotide
  Target: ATXN2; (+) strand; PAM type: NRG; PAM sequence: CAG
aaaaaaaaaatcaatgttgg

SEQ ID NO: 39004 - DNA, 20 bp, Artificial Sequence
  Description of Artificial Sequence: Synthetic oligonucleotide
  Target: ATXN2; (+) strand; PAM type: NRG; PAM sequence: GAG
aaaaaatcaatgttggcagt

SEQ ID NO: 39005 - DNA, 20 bp, Artificial Sequence
  Description of Artificial Sequence: Synthetic oligonucleotide
  Target: ATXN2; (+) strand; PAM type: NRG; PAM sequence: TGG
aaatcaatgttggcagtgag

SEQ ID NO: 39006 - DNA, 20 bp, Artificial Sequence
  Description of Artificial Sequence: Synthetic oligonucleotide
  Target: ATXN2; (+) strand; PAM type: NRG; PAM sequence: GAG
aatgttggcagtgagtggat

SEQ ID NO: 39007 - DNA, 20 bp, Artificial Sequence
  Description of Artificial Sequence: Synthetic oligonucleotide
  Target: ATXN2; (+) strand; PAM type: NRG; PAM sequence: AAG
gttggcagtgagtggatgag

SEQ ID NO: 39008 - DNA, 20 bp, Artificial Sequence
  Description of Artificial Sequence: Synthetic oligonucleotide
  Target: ATXN2; (+) strand; PAM type: NRG; PAM sequence: AGG
ttggcagtgagtggatgaga

SEQ ID NO: 39009 - DNA, 20 bp, Artificial Sequence
  Description of Artificial Sequence: Synthetic oligonucleotide
  Target: ATXN2; (+) strand; PAM type: NRG; PAM sequence: TAG
gcagtgagtggatgagaagg

SEQ ID NO: 39010 - DNA, 20 bp, Artificial Sequence
  Description of Artificial Sequence: Synthetic oligonucleotide
  Target: ATXN2; (+) strand; PAM type: NRG; PAM sequence: TAG
ggatgagaaggtagtcctat

SEQ ID NO: 39011 - DNA, 20 bp, Artificial Sequence
  Description of Artificial Sequence: Synthetic oligonucleotide
  Target: ATXN2; (+) strand; PAM type: NRG; PAM sequence: TAG
agaaggtagtcctattagat

SEQ ID NO: 39012 - DNA, 20 bp, Artificial Sequence
  Description of Artificial Sequence: Synthetic oligonucleotide
  Target: ATXN2; (+) strand; PAM type: NRG; PAM sequence: AAG
gtagtcctattagattagtg

SEQ ID NO: 39013 - DNA, 20 bp, Artificial Sequence
  Description of Artificial Sequence: Synthetic oligonucleotide
  Target: ATXN2; (+) strand; PAM type: NRG; PAM sequence: CAG
gtcctattagattagtgaag

SEQ ID NO: 39014 - DNA, 20 bp, Artificial Sequence
  Description of Artificial Sequence: Synthetic oligonucleotide
  Target: ATXN2; (+) strand; PAM type: NRG; PAM sequence: GAG
cctattagattagtgaagca

SEQ ID NO: 39015 - DNA, 20 bp, Artificial Sequence
  Description of Artificial Sequence: Synthetic oligonucleotide
  Target: ATXN2; (+) strand; PAM type: NRG; PAM sequence: CAG
gtgaagcagagtgaaaaatc

SEQ ID NO: 39016 - DNA, 20 bp, Artificial Sequence
  Description of Artificial Sequence: Synthetic oligonucleotide
  Target: ATXN2; (+) strand; PAM type: NRG; PAM sequence: AAG
gaaacaaattcaaccacaaa

SEQ ID NO: 39017 - DNA, 20 bp, Artificial Sequence
  Description of Artificial Sequence: Synthetic oligonucleotide
  Target: ATXN2; (+) strand; PAM type: NRG; PAM sequence: TGG
acacttgttatatgataaaa

SEQ ID NO: 39018 - DNA, 20 bp, Artificial Sequence
  Description of Artificial Sequence: Synthetic oligonucleotide
  Target: ATXN2; (+) strand; PAM type: NRG; PAM sequence: CAG
gataaaatggcatttcatat

SEQ ID NO: 39019 - DNA, 20 bp, Artificial Sequence
  Description of Artificial Sequence: Synthetic oligonucleotide
  Target: ATXN2; (+) strand; PAM type: NRG; PAM sequence: TGG
atcagtttgtatgaccataa

SEQ ID NO: 39020 - DNA, 20 bp, Artificial Sequence
  Description of Artificial Sequence: Synthetic oligonucleotide
  Target: ATXN2; (+) strand; PAM type: NRG; PAM sequence: CAG
atacacacacactttaaata

SEQ ID NO: 39021 - DNA, 20 bp, Artificial Sequence
  Description of Artificial Sequence: Synthetic oligonucleotide
  Target: ATXN2; (+) strand; PAM type: NRG; PAM sequence: AGG
tacacacacactttaaatac

SEQ ID NO: 39022 - DNA, 20 bp, Artificial Sequence
  Description of Artificial Sequence: Synthetic oligonucleotide
  Target: ATXN2; (+) strand; PAM type: NRG; PAM sequence: GGG
acacacacactttaaataca

SEQ ID NO: 39023 - DNA, 20 bp, Artificial Sequence
  Description of Artificial Sequence: Synthetic oligonucleotide
  Target: ATXN2; (+) strand; PAM type: NRG; PAM sequence: CAG
cagggtctccttctgtcacc

SEQ ID NO: 39024 - DNA, 20 bp, Artificial Sequence
  Description of Artificial Sequence: Synthetic oligonucleotide
  Target: ATXN2; (+) strand; PAM type: NRG; PAM sequence: AGG
agggtctccttctgtcaccc

SEQ ID NO: 39025 - DNA, 20 bp, Artificial Sequence
  Description of Artificial Sequence: Synthetic oligonucleotide
  Target: ATXN2; (+) strand; PAM type: NRG; PAM sequence: TGG
tctccttctgtcacccaggc

SEQ ID NO: 39026 - DNA, 20 bp, Artificial Sequence
  Description of Artificial Sequence: Synthetic oligonucleotide
  Target: ATXN2; (+) strand; PAM type: NRG; PAM sequence: GAG
tccttctgtcacccaggctg

SEQ ID NO: 39027 - DNA, 20 bp, Artificial Sequence
  Description of Artificial Sequence: Synthetic oligonucleotide
  Target: ATXN2; (+) strand; PAM type: NRG; PAM sequence: CAG
ctgtcacccaggctggagta

SEQ ID NO: 39028 - DNA, 20 bp, Artificial Sequence
  Description of Artificial Sequence: Synthetic oligonucleotide
  Target: ATXN2; (+) strand; PAM type: NRG; PAM sequence: TGG
tcacccaggctggagtacag

SEQ ID NO: 39029 - DNA, 20 bp, Artificial Sequence
  Description of Artificial Sequence: Synthetic oligonucleotide
  Target: ATXN2; (+) strand; PAM type: NRG; PAM sequence: CAG
ggagtacagtggtacaatca

SEQ ID NO: 39030 - DNA, 20 bp, Artificial Sequence
  Description of Artificial Sequence: Synthetic oligonucleotide
  Target: ATXN2; (+) strand; PAM type: NRG; PAM sequence: TGG
tcactgctgctttaaactac

SEQ ID NO: 39031 - DNA, 20 bp, Artificial Sequence
  Description of Artificial Sequence: Synthetic oligonucleotide
  Target: ATXN2; (+) strand; PAM type: NRG; PAM sequence: GGG
cactgctgctttaaactact

SEQ ID NO: 39032 - DNA, 20 bp, Artificial Sequence
  Description of Artificial Sequence: Synthetic oligonucleotide
  Target: ATXN2; (+) strand; PAM type: NRG; PAM sequence: AAG
tgctttaaactactgggctc

SEQ ID NO: 39033 - DNA, 20 bp, Artificial Sequence
  Description of Artificial Sequence: Synthetic oligonucleotide
  Target: ATXN2; (+) strand; PAM type: NRG; PAM sequence: CAG
ctcaagcaattctccttcct

SEQ ID NO: 39034 - DNA, 20 bp, Artificial Sequence
  Description of Artificial Sequence: Synthetic oligonucleotide
  Target: ATXN2; (+) strand; PAM type: NRG; PAM sequence: AAG
ttctccttcctcagcctctc

SEQ ID NO: 39035 - DNA, 20 bp, Artificial Sequence
  Description of Artificial Sequence: Synthetic oligonucleotide
  Target: ATXN2; (+) strand; PAM type: NRG; PAM sequence: TAG
tccttcctcagcctctcaag

SEQ ID NO: 39036 - DNA, 20 bp, Artificial Sequence
  Description of Artificial Sequence: Synthetic oligonucleotide
  Target: ATXN2; (+) strand; PAM type: NRG; PAM sequence: TAG
tcctcagcctctcaagtagt

SEQ ID NO: 39037 - DNA, 20 bp, Artificial Sequence
  Description of Artificial Sequence: Synthetic oligonucleotide
  Target: ATXN2; (+) strand; PAM type: NRG; PAM sequence: AGG
cctcagcctctcaagtagtt

SEQ ID NO: 39038 - DNA, 20 bp, Artificial Sequence
  Description of Artificial Sequence: Synthetic oligonucleotide
  Target: ATXN2; (+) strand; PAM type: NRG; PAM sequence: CAG
ctctcaagtagttaggacta

SEQ ID NO: 39039 - DNA, 20 bp, Artificial Sequence
  Description of Artificial Sequence: Synthetic oligonucleotide
  Target: ATXN2; (+) strand; PAM type: NRG; PAM sequence: AGG
tctcaagtagttaggactac

SEQ ID NO: 39040 - DNA, 20 bp, Artificial Sequence
  Description of Artificial Sequence: Synthetic oligonucleotide
  Target: ATXN2; (+) strand; PAM type: NRG; PAM sequence: CAG
caggtgtgtgccaccacacc

SEQ ID NO: 39041 - DNA, 20 bp, Artificial Sequence
  Description of Artificial Sequence: Synthetic oligonucleotide
  Target: ATXN2; (+) strand; PAM type: NRG; PAM sequence: TAG
caaatttttaaattgttttg

SEQ ID NO: 39042 - DNA, 20 bp, Artificial Sequence
  Description of Artificial Sequence: Synthetic oligonucleotide
  Target: ATXN2; (+) strand; PAM type: NRG; PAM sequence: TGG
tttaaattgttttgtagata

SEQ ID NO: 39043 - DNA, 20 bp, Artificial Sequence
  Description of Artificial Sequence: Synthetic oligonucleotide
  Target: ATXN2; (+) strand; PAM type: NRG; PAM sequence: GGG
ttaaattgttttgtagatat

SEQ ID NO: 39044 - DNA, 20 bp, Artificial Sequence
  Description of Artificial Sequence: Synthetic oligonucleotide
  Target: ATXN2; (+) strand; PAM type: NRG; PAM sequence: GGG
taaattgttttgtagatatg

SEQ ID NO: 39045 - DNA, 20 bp, Artificial Sequence
  Description of Artificial Sequence: Synthetic oligonucleotide
  Target: ATXN2; (+) strand; PAM type: NRG; PAM sequence: CAG
tggggttttcctacatcacc

SEQ ID NO: 39046 - DNA, 20 bp, Artificial Sequence
  Description of Artificial Sequence: Synthetic oligonucleotide
  Target: ATXN2; (+) strand; PAM type: NRG; PAM sequence: AGG
ggggttttcctacatcaccc

SEQ ID NO: 39047 - DNA, 20 bp, Artificial Sequence
  Description of Artificial Sequence: Synthetic oligonucleotide
  Target: ATXN2; (+) strand; PAM type: NRG; PAM sequence: TGG
ttttcctacatcacccaggt

SEQ ID NO: 39048 - DNA, 20 bp, Artificial Sequence
  Description of Artificial Sequence: Synthetic oligonucleotide
  Target: ATXN2; (+) strand; PAM type: NRG; PAM sequence: TGG
ccaggttggtcttgaactcc

SEQ ID NO: 39049 - DNA, 20 bp, Artificial Sequence
  Description of Artificial Sequence: Synthetic oligonucleotide
  Target: ATXN2; (+) strand; PAM type: NRG; PAM sequence: AAG
ggtcttgaactcctggcctc

SEQ ID NO: 39050 - DNA, 20 bp, Artificial Sequence
  Description of Artificial Sequence: Synthetic oligonucleotide
  Target: ATXN2; (+) strand; PAM type: NRG; PAM sequence: TGG
ctcaagcgatcctcctgcct

SEQ ID NO: 39051 - DNA, 20 bp, Artificial Sequence
  Description of Artificial Sequence: Synthetic oligonucleotide
  Target: ATXN2; (+) strand; PAM type: NRG; PAM sequence: AAG
cctcctgccttggcctccca

SEQ ID NO: 39052 - DNA, 20 bp, Artificial Sequence
  Description of Artificial Sequence: Synthetic oligonucleotide
  Target: ATXN2; (+) strand; PAM type: NRG; PAM sequence: GAG
ccttggcctcccaaagctct

SEQ ID NO: 39053 - DNA, 20 bp, Artificial Sequence
  Description of Artificial Sequence: Synthetic oligonucleotide
  Target: ATXN2; (+) strand; PAM type: NRG; PAM sequence: AGG
cttggcctcccaaagctctg

SEQ ID NO: 39054 - DNA, 20 bp, Artificial Sequence
  Description of Artificial Sequence: Synthetic oligonucleotide
  Target: ATXN2; (+) strand; PAM type: NRG; PAM sequence: CAG
ctcccaaagctctgaggtta

SEQ ID NO: 39055 - DNA, 20 bp, Artificial Sequence
  Description of Artificial Sequence: Synthetic oligonucleotide
  Target: ATXN2; (+) strand; PAM type: NRG; PAM sequence: AGG
tcccaaagctctgaggttac

SEQ ID NO: 39056 - DNA, 20 bp, Artificial Sequence
  Description of Artificial Sequence: Synthetic oligonucleotide
  Target: ATXN2; (+) strand; PAM type: NRG; PAM sequence: GAG
agctctgaggttacaggtat

SEQ ID NO: 39057 - DNA, 20 bp, Artificial Sequence
  Description of Artificial Sequence: Synthetic oligonucleotide
  Target: ATXN2; (+) strand; PAM type: NRG; PAM sequence: TGG
caggtatgagccactgttcc

SEQ ID NO: 39058 - DNA, 20 bp, Artificial Sequence
  Description of Artificial Sequence: Synthetic oligonucleotide
  Target: ATXN2; (+) strand; PAM type: NRG; PAM sequence: TAG
cctggtcaatatgatatact

SEQ ID NO: 39059 - DNA, 20 bp, Artificial Sequence
  Description of Artificial Sequence: Synthetic oligonucleotide
  Target: ATXN2; (+) strand; PAM type: NRG; PAM sequence: TAG
ggtcaatatgatatacttag

SEQ ID NO: 39060 - DNA, 20 bp, Artificial Sequence
  Description of Artificial Sequence: Synthetic oligonucleotide
  Target: ATXN2; (+) strand; PAM type: NRG; PAM sequence: AAG
tgatatacttagtagatgat

SEQ ID NO: 39061 - DNA, 20 bp, Artificial Sequence
  Description of Artificial Sequence: Synthetic oligonucleotide
  Target: ATXN2; (+) strand; PAM type: NRG; PAM sequence: AAG
aacaaccattcatgattaaa

SEQ ID NO: 39062 - DNA, 20 bp, Artificial Sequence
  Description of Artificial Sequence: Synthetic oligonucleotide
  Target: ATXN2; (+) strand; PAM type: NRG; PAM sequence: TAG
acaaacccacctctgcaaat

SEQ ID NO: 39063 - DNA, 20 bp, Artificial Sequence
  Description of Artificial Sequence: Synthetic oligonucleotide
  Target: ATXN2; (+) strand; PAM type: NRG; PAM sequence: AGG
caaacccacctctgcaaatt

SEQ ID NO: 39064 - DNA, 20 bp, Artificial Sequence
  Description of Artificial Sequence: Synthetic oligonucleotide
  Target: ATXN2; (+) strand; PAM type: NRG; PAM sequence: AAG
cctctgcaaattaggaactg

SEQ ID NO: 39065 - DNA, 20 bp, Artificial Sequence
  Description of Artificial Sequence: Synthetic oligonucleotide
  Target: ATXN2; (+) strand; PAM type: NRG; PAM sequence: TAG
acacctaactgtatgcttaa

SEQ ID NO: 39066 - DNA, 20 bp, Artificial Sequence
  Description of Artificial Sequence: Synthetic oligonucleotide
  Target: ATXN2; (+) strand; PAM type: NRG; PAM sequence: AAG
aactgtatgcttaatagtga

SEQ ID NO: 39067 - DNA, 20 bp, Artificial Sequence
  Description of Artificial Sequence: Synthetic oligonucleotide
  Target: ATXN2; (+) strand; PAM type: NRG; PAM sequence: TGG
caatgtctcacccctaaaaa

SEQ ID NO: 39068 - DNA, 20 bp, Artificial Sequence
  Description of Artificial Sequence: Synthetic oligonucleotide
  Target: ATXN2; (+) strand; PAM type: NRG; PAM sequence: GGG
aatgtctcacccctaaaaat

SEQ ID NO: 39069 - DNA, 20 bp, Artificial Sequence
  Description of Artificial Sequence: Synthetic oligonucleotide
  Target: ATXN2; (+) strand; PAM type: NRG; PAM sequence: GAG
tgtctcacccctaaaaatgg

SEQ ID NO: 39070 - DNA, 20 bp, Artificial Sequence
  Description of Artificial Sequence: Synthetic oligonucleotide
  Target: ATXN2; (+) strand; PAM type: NRG; PAM sequence: TGG
cacccctaaaaatgggagca

SEQ ID NO: 39071 - DNA, 20 bp, Artificial Sequence
  Description of Artificial Sequence: Synthetic oligonucleotide
  Target: ATXN2; (+) strand; PAM type: NRG; PAM sequence: CAG
gcaaaatctcatgccttttt

SEQ ID NO: 39072 - DNA, 20 bp, Artificial Sequence
  Description of Artificial Sequence: Synthetic oligonucleotide
  Target: ATXN2; (+) strand; PAM type: NRG; PAM sequence: CAG
tgcctttttcagtaatgcac

SEQ ID NO: 39073 - DNA, 20 bp, Artificial Sequence
  Description of Artificial Sequence: Synthetic oligonucleotide
  Target: ATXN2; (+) strand; PAM type: NRG; PAM sequence: AAG
cagtaatgcaccagtacaat

SEQ ID NO: 39074 - DNA, 20 bp, Artificial Sequence
  Description of Artificial Sequence: Synthetic oligonucleotide
  Target: ATXN2; (+) strand; PAM type: NRG; PAM sequence: TGG
aaaacccaaaaacaccaaca

SEQ ID NO: 39075 - DNA, 20 bp, Artificial Sequence
  Description of Artificial Sequence: Synthetic oligonucleotide
  Target: ATXN2; (+) strand; PAM type: NRG; PAM sequence: TAG
aaaaacaccaacatggtgat

SEQ ID NO: 39076 - DNA, 20 bp, Artificial Sequence
  Description of Artificial Sequence: Synthetic oligonucleotide
  Target: ATXN2; (+) strand; PAM type: NRG; PAM sequence: AAG
tagatcatgattgtatgttt

SEQ ID NO: 39077 - DNA, 20 bp, Artificial Sequence
  Description of Artificial Sequence: Synthetic oligonucleotide
  Target: ATXN2; (+) strand; PAM type: NRG; PAM sequence: AAG
gattgtatgtttaagtctta

SEQ ID NO: 39078 - DNA, 20 bp, Artificial Sequence
  Description of Artificial Sequence: Synthetic oligonucleotide
  Target: ATXN2; (+) strand; PAM type: NRG; PAM sequence: AGG
attgtatgtttaagtcttaa

SEQ ID NO: 39079 - DNA, 20 bp, Artificial Sequence
  Description of Artificial Sequence: Synthetic oligonucleotide
  Target: ATXN2; (+) strand; PAM type: NRG; PAM sequence: GGG
ttgtatgtttaagtcttaaa

SEQ ID NO: 39080 - DNA, 20 bp, Artificial Sequence
  Description of Artificial Sequence: Synthetic oligonucleotide
  Target: ATXN2; (+) strand; PAM type: NRG; PAM sequence: CAG
tttaagtcttaaagggctgc

SEQ ID NO: 39081 - DNA, 20 bp, Artificial Sequence
  Description of Artificial Sequence: Synthetic oligonucleotide
  Target: ATXN2; (+) strand; PAM type: NRG; PAM sequence: CAG
tcttaaagggctgccagaaa

SEQ ID NO: 39082 - DNA, 20 bp, Artificial Sequence
  Description of Artificial Sequence: Synthetic oligonucleotide
  Target: ATXN2; (+) strand; PAM type: NRG; PAM sequence: TGG
taaagggctgccagaaacag

SEQ ID NO: 39083 - DNA, 20 bp, Artificial Sequence
  Description of Artificial Sequence: Synthetic oligonucleotide
  Target: ATXN2; (+) strand; PAM type: NRG; PAM sequence: GGG
aaagggctgccagaaacagt

SEQ ID NO: 39084 - DNA, 20 bp, Artificial Sequence
  Description of Artificial Sequence: Synthetic oligonucleotide
  Target: ATXN2; (+) strand; PAM type: NRG; PAM sequence: AAG
agtgggtttaccaacacatc

SEQ ID NO: 39085 - DNA, 20 bp, Artificial Sequence
  Description of Artificial Sequence: Synthetic oligonucleotide
  Target: ATXN2; (+) strand; PAM type: NRG; PAM sequence: AAG
ttaccaacacatcaagacac

SEQ ID NO: 39086 - DNA, 20 bp, Artificial Sequence
  Description of Artificial Sequence: Synthetic oligonucleotide
  Target: ATXN2; (+) strand; PAM type: NRG; PAM sequence: AGG
taccaacacatcaagacaca

SEQ ID NO: 39087 - DNA, 20 bp, Artificial Sequence
  Description of Artificial Sequence: Synthetic oligonucleotide
  Target: ATXN2; (+) strand; PAM type: NRG; PAM sequence: AAG
aaggtcaatattcaaaaatc

SEQ ID NO: 39088 - DNA, 20 bp, Artificial Sequence
  Description of Artificial Sequence: Synthetic oligonucleotide
  Target: ATXN2; (+) strand; PAM type: NRG; PAM sequence: AAG
tacgaataaacaaacgttga

SEQ ID NO: 39089 - DNA, 20 bp, Artificial Sequence
  Description of Artificial Sequence: Synthetic oligonucleotide
  Target: ATXN2; (+) strand; PAM type: NRG; PAM sequence: CAG
ttttaaaatataactcacaa

SEQ ID NO: 39090 - DNA, 20 bp, Artificial Sequence
  Description of Artificial Sequence: Synthetic oligonucleotide
  Target: ATXN2; (+) strand; PAM type: NRG; PAM sequence: CAG
taactcacaacagcacaaaa

SEQ ID NO: 39091 - DNA, 20 bp, Artificial Sequence
  Description of Artificial Sequence: Synthetic oligonucleotide
  Target: ATXN2; (+) strand; PAM type: NRG; PAM sequence: AAG
cacaaaacagatgaaatatt

SEQ ID NO: 39092 - DNA, 20 bp, Artificial Sequence
  Description of Artificial Sequence: Synthetic oligonucleotide
  Target: ATXN2; (+) strand; PAM type: NRG; PAM sequence: AGG
acaaaacagatgaaatatta

SEQ ID NO: 39093 - DNA, 20 bp, Artificial Sequence
  Description of Artificial Sequence: Synthetic oligonucleotide
  Target: ATXN2; (+) strand; PAM type: NRG; PAM sequence: GGG
caaaacagatgaaatattaa

SEQ ID NO: 39094 - DNA, 20 bp, Artificial Sequence
  Description of Artificial Sequence: Synthetic oligonucleotide
  Target: ATXN2; (+) strand; PAM type: NRG; PAM sequence: AAG
aaatattaagggataaattt

SEQ ID NO: 39095 - DNA, 20 bp, Artificial Sequence
  Description of Artificial Sequence: Synthetic oligonucleotide
  Target: ATXN2; (+) strand; PAM type: NRG; PAM sequence: AAG
attaagggataaatttaaga

SEQ ID NO: 39096 - DNA, 20 bp, Artificial Sequence
  Description of Artificial Sequence: Synthetic oligonucleotide
  Target: ATXN2; (+) strand; PAM type: NRG; PAM sequence: CAG
aagggataaatttaagaaag

SEQ ID NO: 39097 - DNA, 20 bp, Artificial Sequence
  Description of Artificial Sequence: Synthetic oligonucleotide
  Target: ATXN2; (+) strand; PAM type: NRG; PAM sequence: AGG
agggataaatttaagaaagc

SEQ ID NO: 39098 - DNA, 20 bp, Artificial Sequence
  Description of Artificial Sequence: Synthetic oligonucleotide
  Target: ATXN2; (+) strand; PAM type: NRG; PAM sequence: AAG
gcaggcacaaaactgataca

SEQ ID NO: 39099 - DNA, 20 bp, Artificial Sequence
  Description of Artificial Sequence: Synthetic oligonucleotide
  Target: ATXN2; (+) strand; PAM type: NRG; PAM sequence: TAG
aaaactgatacaaagaaaac

SEQ ID NO: 39100 - DNA, 20 bp, Artificial Sequence
  Description of Artificial Sequence: Synthetic oligonucleotide
  Target: ATXN2; (+) strand; PAM type: NRG; PAM sequence: TGG
caaagaaaactagaaaacac

SEQ ID NO: 39101 - DNA, 20 bp, Artificial Sequence
  Description of Artificial Sequence: Synthetic oligonucleotide
  Target: ATXN2; (+) strand; PAM type: NRG; PAM sequence: AAG
agaaaacactggtgaaactt

SEQ ID NO: 39102 - DNA, 20 bp, Artificial Sequence
  Description of Artificial Sequence: Synthetic oligonucleotide
  Target: ATXN2; (+) strand; PAM type: NRG; PAM sequence: TGG
aaacttaagacttaaataaa

SEQ ID NO: 39103 - DNA, 20 bp, Artificial Sequence
  Description of Artificial Sequence: Synthetic oligonucleotide
  Target: ATXN2; (+) strand; PAM type: NRG; PAM sequence: GAG
acttaagacttaaataaatg

SEQ ID NO: 39104 - DNA, 20 bp, Artificial Sequence
  Description of Artificial Sequence: Synthetic oligonucleotide
  Target: ATXN2; (+) strand; PAM type: NRG; PAM sequence: CAG
taagacttaaataaatggag

SEQ ID NO: 39105 - DNA, 20 bp, Artificial Sequence
  Description of Artificial Sequence: Synthetic oligonucleotide
  Target: ATXN2; (+) strand; PAM type: NRG; PAM sequence: AAG
agtatatgatgacctcaatg

SEQ ID NO: 39106 - DNA, 20 bp, Artificial Sequence
  Description of Artificial Sequence: Synthetic oligonucleotide
  Target: ATXN2; (+) strand; PAM type: NRG; PAM sequence: AAG
aatgaagattccatattgtt

SEQ ID NO: 39107 - DNA, 20 bp, Artificial Sequence
  Description of Artificial Sequence: Synthetic oligonucleotide
  Target: ATXN2; (+) strand; PAM type: NRG; PAM sequence: CAG
tattgttaagatatttctcc

SEQ ID NO: 39108 - DNA, 20 bp, Artificial Sequence
  Description of Artificial Sequence: Synthetic oligonucleotide
  Target: ATXN2; (+) strand; PAM type: NRG; PAM sequence: AAG
tttctcccagaactgatata

SEQ ID NO: 39109 - DNA, 20 bp, Artificial Sequence
  Description of Artificial Sequence: Synthetic oligonucleotide
  Target: ATXN2; (+) strand; PAM type: NRG; PAM sequence: CAG
ccagaactgatataaagatt

SEQ ID NO: 39110 - DNA, 20 bp, Artificial Sequence
  Description of Artificial Sequence: Synthetic oligonucleotide
  Target: ATXN2; (+) strand; PAM type: NRG; PAM sequence: AAG
aagattcagtgcacaatccc

SEQ ID NO: 39111 - DNA, 20 bp, Artificial Sequence
  Description of Artificial Sequence: Synthetic oligonucleotide
  Target: ATXN2; (+) strand; PAM type: NRG; PAM sequence: AAG
aaaatttatttgcaaattca

SEQ ID NO: 39112 - DNA, 20 bp, Artificial Sequence
  Description of Artificial Sequence: Synthetic oligonucleotide
  Target: ATXN2; (+) strand; PAM type: NRG; PAM sequence: CAG
atttgcaaattcaaagaacg

SEQ ID NO: 39113 - DNA, 20 bp, Artificial Sequence
  Description of Artificial Sequence: Synthetic oligonucleotide
  Target: ATXN2; (+) strand; PAM type: NRG; PAM sequence: AAG
aaattcaaagaacgcagaat

SEQ ID NO: 39114 - DNA, 20 bp, Artificial Sequence
  Description of Artificial Sequence: Synthetic oligonucleotide
  Target: ATXN2; (+) strand; PAM type: NRG; PAM sequence: GAG
attcaaagaacgcagaataa

SEQ ID NO: 39115 - DNA, 20 bp, Artificial Sequence
  Description of Artificial Sequence: Synthetic oligonucleotide
  Target: ATXN2; (+) strand; PAM type: NRG; PAM sequence: GAG
agaataagagtaattttgac

SEQ ID NO: 39116 - DNA, 20 bp, Artificial Sequence
  Description of Artificial Sequence: Synthetic oligonucleotide
  Target: ATXN2; (+) strand; PAM type: NRG; PAM sequence: TGG
aattttgacgagaataaaac

SEQ ID NO: 39117 - DNA, 20 bp, Artificial Sequence
  Description of Artificial Sequence: Synthetic oligonucleotide
  Target: ATXN2; (+) strand; PAM type: NRG; PAM sequence: GGG
attttgacgagaataaaact

SEQ ID NO: 39118 - DNA, 20 bp, Artificial Sequence
  Description of Artificial Sequence: Synthetic oligonucleotide
  Target: ATXN2; (+) strand; PAM type: NRG; PAM sequence: GAG
tttgacgagaataaaactgg

SEQ ID NO: 39119 - DNA, 20 bp, Artificial Sequence
  Description of Artificial Sequence: Synthetic oligonucleotide
  Target: ATXN2; (+) strand; PAM type: NRG; PAM sequence: AAG
gggagactcatatgaactta

SEQ ID NO: 39120 - DNA, 20 bp, Artificial Sequence
  Description of Artificial Sequence: Synthetic oligonucleotide
  Target: ATXN2; (+) strand; PAM type: NRG; PAM sequence: AGG
ggagactcatatgaacttaa

SEQ ID NO: 39121 - DNA, 20 bp, Artificial Sequence
  Description of Artificial Sequence: Synthetic oligonucleotide
  Target: ATXN2; (+) strand; PAM type: NRG; PAM sequence: TGG
actcatatgaacttaaaggt

SEQ ID NO: 39122 - DNA, 20 bp, Artificial Sequence
  Description of Artificial Sequence: Synthetic oligonucleotide
  Target: ATXN2; (+) strand; PAM type: NRG; PAM sequence: AAG
gaacttaaaggttggttaca

SEQ ID NO: 39123 - DNA, 20 bp, Artificial Sequence
  Description of Artificial Sequence: Synthetic oligonucleotide
  Target: ATXN2; (+) strand; PAM type: NRG; PAM sequence: CAG
aaaggttggttacaaagtaa

SEQ ID NO: 39124 - DNA, 20 bp, Artificial Sequence
  Description of Artificial Sequence: Synthetic oligonucleotide
  Target: ATXN2; (+) strand; PAM type: NRG; PAM sequence: AAG
gttacaaagtaacagcaata

SEQ ID NO: 39125 - DNA, 20 bp, Artificial Sequence
  Description of Artificial Sequence: Synthetic oligonucleotide
  Target: ATXN2; (+) strand; PAM type: NRG; PAM sequence: GAG
tacaaagtaacagcaataaa

SEQ ID NO: 39126 - DNA, 20 bp, Artificial Sequence
  Description of Artificial Sequence: Synthetic oligonucleotide
  Target: ATXN2; (+) strand; PAM type: NRG; PAM sequence: GAG
caaagtaacagcaataaaga

SEQ ID NO: 39127 - DNA, 20 bp, Artificial Sequence
  Description of Artificial Sequence: Synthetic oligonucleotide
  Target: ATXN2; (+) strand; PAM type: NRG; PAM sequence: TGG
aacagcaataaagagagaat

SEQ ID NO: 39128 - DNA, 20 bp, Artificial Sequence
  Description of Artificial Sequence: Synthetic oligonucleotide
  Target: ATXN2; (+) strand; PAM type: NRG; PAM sequence: AAG
aataaagagagaattggcat

SEQ ID NO: 39129 - DNA, 20 bp, Artificial Sequence
  Description of Artificial Sequence: Synthetic oligonucleotide
  Target: ATXN2; (+) strand; PAM type: NRG; PAM sequence: AGG
ataaagagagaattggcata

SEQ ID NO: 39130 - DNA, 20 bp, Artificial Sequence
  Description of Artificial Sequence: Synthetic oligonucleotide
  Target: ATXN2; (+) strand; PAM type: NRG; PAM sequence: AAG
ttggcataaggatatataca

SEQ ID NO: 39131 - DNA, 20 bp, Artificial Sequence
  Description of Artificial Sequence: Synthetic oligonucleotide
  Target: ATXN2; (+) strand; PAM type: NRG; PAM sequence: CAG
caaagatcaatacaacaaaa

SEQ ID NO: 39132 - DNA, 20 bp, Artificial Sequence
  Description of Artificial Sequence: Synthetic oligonucleotide
  Target: ATXN2; (+) strand; PAM type: NRG; PAM sequence: TAG
acaacaaaacagttcacaaa

SEQ ID NO: 39133 - DNA, 20 bp, Artificial Sequence
  Description of Artificial Sequence: Synthetic oligonucleotide
  Target: ATXN2; (+) strand; PAM type: NRG; PAM sequence: CAG
aaatagacacacatacaata

SEQ ID NO: 39134 - DNA, 20 bp, Artificial Sequence
  Description of Artificial Sequence: Synthetic oligonucleotide
  Target: ATXN2; (+) strand; PAM type: NRG; PAM sequence: AAG
acagtcaactgaattcaata

SEQ ID NO: 39135 - DNA, 20 bp, Artificial Sequence
  Description of Artificial Sequence: Synthetic oligonucleotide
  Target: ATXN2; (+) strand; PAM type: NRG; PAM sequence: TGG
tgaattcaataaagctacta

SEQ ID NO: 39136 - DNA, 20 bp, Artificial Sequence
  Description of Artificial Sequence: Synthetic oligonucleotide
  Target: ATXN2; (+) strand; PAM type: NRG; PAM sequence: TGG
ttcaataaagctactatggc

SEQ ID NO: 39137 - DNA, 20 bp, Artificial Sequence
  Description of Artificial Sequence: Synthetic oligonucleotide
  Target: ATXN2; (+) strand; PAM type: NRG; PAM sequence: GGG
tcaataaagctactatggct

SEQ ID NO: 39138 - DNA, 20 bp, Artificial Sequence
  Description of Artificial Sequence: Synthetic oligonucleotide
  Target: ATXN2; (+) strand; PAM type: NRG; PAM sequence: CAG
aaagctactatggctgggcg

SEQ ID NO: 39139 - DNA, 20 bp, Artificial Sequence
  Description of Artificial Sequence: Synthetic oligonucleotide
  Target: ATXN2; (+) strand; PAM type: NRG; PAM sequence: TGG
gctactatggctgggcgcag

SEQ ID NO: 39140 - DNA, 20 bp, Artificial Sequence
  Description of Artificial Sequence: Synthetic oligonucleotide
  Target: ATXN2; (+) strand; PAM type: NRG; PAM sequence: CAG
gtggctcatgcctgtaatcc

SEQ ID NO: 39141 - DNA, 20 bp, Artificial Sequence
  Description of Artificial Sequence: Synthetic oligonucleotide
  Target: ATXN2; (+) strand; PAM type: NRG; PAM sequence: TGG
tgcctgtaatcccagaactt

SEQ ID NO: 39142 - DNA, 20 bp, Artificial Sequence
  Description of Artificial Sequence: Synthetic oligonucleotide
  Target: ATXN2; (+) strand; PAM type: NRG; PAM sequence: GGG
gcctgtaatcccagaacttt

SEQ ID NO: 39143 - DNA, 20 bp, Artificial Sequence
  Description of Artificial Sequence: Synthetic oligonucleotide
  Target: ATXN2; (+) strand; PAM type: NRG; PAM sequence: GAG
ctgtaatcccagaactttgg

SEQ ID NO: 39144 - DNA, 20 bp, Artificial Sequence
  Description of Artificial Sequence: Synthetic oligonucleotide
  Target: ATXN2; (+) strand; PAM type: NRG; PAM sequence: AGG
tgtaatcccagaactttggg

SEQ ID NO: 39145 - DNA, 20 bp, Artificial Sequence
  Description of Artificial Sequence: Synthetic oligonucleotide
  Target: ATXN2; (+) strand; PAM type: NRG; PAM sequence: GAG
tcccagaactttgggaggct

SEQ ID NO: 39146 - DNA, 20 bp, Artificial Sequence
  Description of Artificial Sequence: Synthetic oligonucleotide
  Target: ATXN2; (+) strand; PAM type: NRG; PAM sequence: GAG
gaactttgggaggctgagat

SEQ ID NO: 39147 - DNA, 20 bp, Artificial Sequence
  Description of Artificial Sequence: Synthetic oligonucleotide
  Target: ATXN2; (+) strand; PAM type: NRG; PAM sequence: CAG
ctttgggaggctgagatgag

SEQ ID NO: 39148 - DNA, 20 bp, Artificial Sequence
  Description of Artificial Sequence: Synthetic oligonucleotide
  Target: ATXN2; (+) strand; PAM type: NRG; PAM sequence: GAG
ctgagatgagcagatcacct

SEQ ID NO: 39149 - DNA, 20 bp, Artificial Sequence
  Description of Artificial Sequence: Synthetic oligonucleotide
  Target: ATXN2; (+) strand; PAM type: NRG; PAM sequence: AGG
tgagatgagcagatcacctg

SEQ ID NO: 39150 - DNA, 20 bp, Artificial Sequence
  Description of Artificial Sequence: Synthetic oligonucleotide
  Target: ATXN2; (+) strand; PAM type: NRG; PAM sequence: CAG
atgagcagatcacctgaggt

SEQ ID NO: 39151 - DNA, 20 bp, Artificial Sequence
  Description of Artificial Sequence: Synthetic oligonucleotide
  Target: ATXN2; (+) strand; PAM type: NRG; PAM sequence: AGG
tgagcagatcacctgaggtc

SEQ ID NO: 39152 - DNA, 20 bp, Artificial Sequence
  Description of Artificial Sequence: Synthetic oligonucleotide
  Target: ATXN2; (+) strand; PAM type: NRG; PAM sequence: GAG
agcagatcacctgaggtcag

SEQ ID NO: 39153 - DNA, 20 bp, Artificial Sequence
  Description of Artificial Sequence: Synthetic oligonucleotide
  Target: ATXN2; (+) strand; PAM type: NRG; PAM sequence: GAG
tcacctgaggtcaggagttc

SEQ ID NO: 39154 - DNA, 20 bp, Artificial Sequence
  Description of Artificial Sequence: Synthetic oligonucleotide
  Target: ATXN2; (+) strand; PAM type: NRG; PAM sequence: TAG
tgaggtcaggagttcgagac

SEQ ID NO: 39155 - DNA, 20 bp, Artificial Sequence
  Description of Artificial Sequence: Synthetic oligonucleotide
  Target: ATXN2; (+) strand; PAM type: NRG; PAM sequence: TGG
tcaggagttcgagactagcc

SEQ ID NO: 39156 - DNA, 20 bp, Artificial Sequence
  Description of Artificial Sequence: Synthetic oligonucleotide
  Target: ATXN2; (+) strand; PAM type: NRG; PAM sequence: TGG
cgagactagcctggccaaca

SEQ ID NO: 39157 - DNA, 20 bp, Artificial Sequence
  Description of Artificial Sequence: Synthetic oligonucleotide
  Target: ATXN2; (+) strand; PAM type: NRG; PAM sequence: GAG
actagcctggccaacatggt

SEQ ID NO: 39158 - DNA, 20 bp, Artificial Sequence
  Description of Artificial Sequence: Synthetic oligonucleotide
  Target: ATXN2; (+) strand; PAM type: NRG; PAM sequence: TAG
aaaaaaaaaaaaatacaaat

SEQ ID NO: 39159 - DNA, 20 bp, Artificial Sequence
  Description of Artificial Sequence: Synthetic oligonucleotide
  Target: ATXN2; (+) strand; PAM type: NRG; PAM sequence: TGG
aaaaaaaaatacaaattagc

SEQ ID NO: 39160 - DNA, 20 bp, Artificial Sequence
  Description of Artificial Sequence: Synthetic oligonucleotide
  Target: ATXN2; (+) strand; PAM type: NRG; PAM sequence: GGG
aaaaaaaatacaaattagct

SEQ ID NO: 39161 - DNA, 20 bp, Artificial Sequence
  Description of Artificial Sequence: Synthetic oligonucleotide
  Target: ATXN2; (+) strand; PAM type: NRG; PAM sequence: TAG
aaatacaaattagctgggtg

SEQ ID NO: 39162 - DNA, 20 bp, Artificial Sequence
  Description of Artificial Sequence: Synthetic oligonucleotide
  Target: ATXN2; (+) strand; PAM type: NRG; PAM sequence: TGG
tacaaattagctgggtgtag

SEQ ID NO: 39163 - DNA, 20 bp, Artificial Sequence
  Description of Artificial Sequence: Synthetic oligonucleotide
  Target: ATXN2; (+) strand; PAM type: NRG; PAM sequence: CGG
aaattagctgggtgtagtgg

SEQ ID NO: 39164 - DNA, 20 bp, Artificial Sequence
  Description of Artificial Sequence: Synthetic oligonucleotide
  Target: ATXN2; (+) strand; PAM type: NRG; PAM sequence: GGG
aattagctgggtgtagtggc

SEQ ID NO: 39165 - DNA, 20 bp, Artificial Sequence
  Description of Artificial Sequence: Synthetic oligonucleotide
  Target: ATXN2; (+) strand; PAM type: NRG; PAM sequence: TAG
gtggcgggcacctgtaatcc

SEQ ID NO: 39166 - DNA, 20 bp, Artificial Sequence
  Description of Artificial Sequence: Synthetic oligonucleotide
  Target: ATXN2; (+) strand; PAM type: NRG; PAM sequence: GAG
acctgtaatcctagctactc

SEQ ID NO: 39167 - DNA, 20 bp, Artificial Sequence
  Description of Artificial Sequence: Synthetic oligonucleotide
  Target: ATXN2; (+) strand; PAM type: NRG; PAM sequence: GAG
ctgtaatcctagctactcga

SEQ ID NO: 39168 - DNA, 20 bp, Artificial Sequence
  Description of Artificial Sequence: Synthetic oligonucleotide
  Target: ATXN2; (+) strand; PAM type: NRG; PAM sequence: AGG
tgtaatcctagctactcgag

SEQ ID NO: 39169 - DNA, 20 bp, Artificial Sequence
  Description of Artificial Sequence: Synthetic oligonucleotide
  Target: ATXN2; (+) strand; PAM type: NRG; PAM sequence: GAG
tcctagctactcgagaggct

SEQ ID NO: 39170 - DNA, 20 bp, Artificial Sequence
  Description of Artificial Sequence: Synthetic oligonucleotide
  Target: ATXN2; (+) strand; PAM type: NRG; PAM sequence: AGG
cctagctactcgagaggctg

SEQ ID NO: 39171 - DNA, 20 bp, Artificial Sequence
  Description of Artificial Sequence: Synthetic oligonucleotide
  Target: ATXN2; (+) strand; PAM type: NRG; PAM sequence: CAG
agctactcgagaggctgagg

SEQ ID NO: 39172 - DNA, 20 bp, Artificial Sequence
  Description of Artificial Sequence: Synthetic oligonucleotide
  Target: ATXN2; (+) strand; PAM type: NRG; PAM sequence: TGG
gaggcagaatcgcttgaccc

SEQ ID NO: 39173 - DNA, 20 bp, Artificial Sequence
  Description of Artificial Sequence: Synthetic oligonucleotide
  Target: ATXN2; (+) strand; PAM type: NRG; PAM sequence: GGG
aggcagaatcgcttgaccct

SEQ ID NO: 39174 - DNA, 20 bp, Artificial Sequence
  Description of Artificial Sequence: Synthetic oligonucleotide
  Target: ATXN2; (+) strand; PAM type: NRG; PAM sequence: AAG
cagaatcgcttgaccctggg

SEQ ID NO: 39175 - DNA, 20 bp, Artificial Sequence
  Description of Artificial Sequence: Synthetic oligonucleotide
  Target: ATXN2; (+) strand; PAM type: NRG; PAM sequence: TGG
aatcgcttgaccctgggaag

SEQ ID NO: 39176 - DNA, 20 bp, Artificial Sequence
  Description of Artificial Sequence: Synthetic oligonucleotide
  Target: ATXN2; (+) strand; PAM type: NRG; PAM sequence: GAG
tcgcttgaccctgggaagtg

SEQ ID NO: 39177 - DNA, 20 bp, Artificial Sequence
  Description of Artificial Sequence: Synthetic oligonucleotide
  Target: ATXN2; (+) strand; PAM type: NRG; PAM sequence: AGG
cgcttgaccctgggaagtgg

SEQ ID NO: 39178 - DNA, 20 bp, Artificial Sequence
  Description of Artificial Sequence: Synthetic oligonucleotide
  Target: ATXN2; (+) strand; PAM type: NRG; PAM sequence: CAG
accctgggaagtggaggttg

SEQ ID NO: 39179 - DNA, 20 bp, Artificial Sequence
  Description of Artificial Sequence: Synthetic oligonucleotide
  Target: ATXN2; (+) strand; PAM type: NRG; PAM sequence: GAG
tgggaagtggaggttgcagt

SEQ ID NO: 39180 - DNA, 20 bp, Artificial Sequence
  Description of Artificial Sequence: Synthetic oligonucleotide
  Target: ATXN2; (+) strand; PAM type: NRG; PAM sequence: AAG
agtggaggttgcagtgagcc

SEQ ID NO: 39181 - DNA, 20 bp, Artificial Sequence
  Description of Artificial Sequence: Synthetic oligonucleotide
  Target: ATXN2; (+) strand; PAM type: NRG; PAM sequence: AGG
gtggaggttgcagtgagcca

SEQ ID NO: 39182 - DNA, 20 bp, Artificial Sequence
  Description of Artificial Sequence: Synthetic oligonucleotide
  Target: ATXN2; (+) strand; PAM type: NRG; PAM sequence: CAG
aaggtcacactactgcactc

SEQ ID NO: 39183 - DNA, 20 bp, Artificial Sequence
  Description of Artificial Sequence: Synthetic oligonucleotide
  Target: ATXN2; (+) strand; PAM type: NRG; PAM sequence: TGG
cacactactgcactccagcc

SEQ ID NO: 39184 - DNA, 20 bp, Artificial Sequence
  Description of Artificial Sequence: Synthetic oligonucleotide
  Target: ATXN2; (+) strand; PAM type: NRG; PAM sequence: GGG
acactactgcactccagcct

SEQ ID NO: 39185 - DNA, 20 bp, Artificial Sequence
  Description of Artificial Sequence: Synthetic oligonucleotide
  Target: ATXN2; (+) strand; PAM type: NRG; PAM sequence: AAG
tgcactccagcctgggtaac

SEQ ID NO: 39186 - DNA, 20 bp, Artificial Sequence
  Description of Artificial Sequence: Synthetic oligonucleotide
  Target: ATXN2; (+) strand; PAM type: NRG; PAM sequence: GAG
ccagcctgggtaacaagatc

SEQ ID NO: 39187 - DNA, 20 bp, Artificial Sequence
  Description of Artificial Sequence: Synthetic oligonucleotide
  Target: ATXN2; (+) strand; PAM type: NRG; PAM sequence: AAG
aagatcgagactcttgtttc

SEQ ID NO: 39188 - DNA, 20 bp, Artificial Sequence
  Description of Artificial Sequence: Synthetic oligonucleotide
  Target: ATXN2; (+) strand; PAM type: NRG; PAM sequence: CAG
cgagactcttgtttcaagaa

SEQ ID NO: 39189 - DNA, 20 bp, Artificial Sequence
  Description of Artificial Sequence: Synthetic oligonucleotide
  Target: ATXN2; (+) strand; PAM type: NRG; PAM sequence: AAG
tcaagaacagaaaaaaaata

SEQ ID NO: 39190 - DNA, 20 bp, Artificial Sequence
  Description of Artificial Sequence: Synthetic oligonucleotide
  Target: ATXN2; (+) strand; PAM type: NRG; PAM sequence: TGG
aaaaaaaataaagccaccaa

SEQ ID NO: 39191 - DNA, 20 bp, Artificial Sequence
  Description of Artificial Sequence: Synthetic oligonucleotide
  Target: ATXN2; (+) strand; PAM type: NRG; PAM sequence: CAG
ataaagccaccaatggaaaa

SEQ ID NO: 39192 - DNA, 20 bp, Artificial Sequence
  Description of Artificial Sequence: Synthetic oligonucleotide
  Target: ATXN2; (+) strand; PAM type: NRG; PAM sequence: GAG
aaagccaccaatggaaaaca

SEQ ID NO: 39193 - DNA, 20 bp, Artificial Sequence
  Description of Artificial Sequence: Synthetic oligonucleotide
  Target: ATXN2; (+) strand; PAM type: NRG; PAM sequence: AGG
aagccaccaatggaaaacag

SEQ ID NO: 39194 - DNA, 20 bp, Artificial Sequence
  Description of Artificial Sequence: Synthetic oligonucleotide
  Target: ATXN2; (+) strand; PAM type: NRG; PAM sequence: TGG
caccaatggaaaacagaggc

SEQ ID NO: 39195 - DNA, 20 bp, Artificial Sequence
  Description of Artificial Sequence: Synthetic oligonucleotide
  Target: ATXN2; (+) strand; PAM type: NRG; PAM sequence: CAG
tggaaaacagaggctggtgc

SEQ ID NO: 39196 - DNA, 20 bp, Artificial Sequence
  Description of Artificial Sequence: Synthetic oligonucleotide
  Target: ATXN2; (+) strand; PAM type: NRG; PAM sequence: GAG
gaaaacagaggctggtgcca

SEQ ID NO: 39197 - DNA, 20 bp, Artificial Sequence
  Description of Artificial Sequence: Synthetic oligonucleotide
  Target: ATXN2; (+) strand; PAM type: NRG; PAM sequence: GAG
aggctggtgccagagaaacc

SEQ ID NO: 39198 - DNA, 20 bp, Artificial Sequence
  Description of Artificial Sequence: Synthetic oligonucleotide
  Target: ATXN2; (+) strand; PAM type: NRG; PAM sequence: TGG
agaaaccgagtaaatattta

SEQ ID NO: 39199 - DNA, 20 bp, Artificial Sequence
  Description of Artificial Sequence: Synthetic oligonucleotide
  Target: ATXN2; (+) strand; PAM type: NRG; PAM sequence: TGG
aaccgagtaaatatttatgg

SEQ ID NO: 39200 - DNA, 20 bp, Artificial Sequence
  Description of Artificial Sequence: Synthetic oligonucleotide
  Target: ATXN2; (+) strand; PAM type: NRG; PAM sequence: GAG
ccgagtaaatatttatggtg

SEQ ID NO: 39201 - DNA, 20 bp, Artificial Sequence
  Description of Artificial Sequence: Synthetic oligonucleotide
  Target: ATXN2; (+) strand; PAM type: NRG; PAM sequence: AAG
tatttatggtggagaaaatg

SEQ ID NO: 39202 - DNA, 20 bp, Artificial Sequence
  Description of Artificial Sequence: Synthetic oligonucleotide
  Target: ATXN2; (+) strand; PAM type: NRG; PAM sequence: TAG
tatggtggagaaaatgaagc

SEQ ID NO: 39203 - DNA, 20 bp, Artificial Sequence
  Description of Artificial Sequence: Synthetic oligonucleotide
  Target: ATXN2; (+) strand; PAM type: NRG; PAM sequence: TAG
ccataaaaacattcataacc

SEQ ID NO: 39204 - DNA, 20 bp, Artificial Sequence
  Description of Artificial Sequence: Synthetic oligonucleotide
  Target: ATXN2; (+) strand; PAM type: NRG; PAM sequence: AGG
cataaaaacattcataacct

SEQ ID NO: 39205 - DNA, 20 bp, Artificial Sequence
  Description of Artificial Sequence: Synthetic oligonucleotide
  Target: ATXN2; (+) strand; PAM type: NRG; PAM sequence: GGG
ataaaaacattcataaccta

SEQ ID NO: 39206 - DNA, 20 bp, Artificial Sequence
  Description of Artificial Sequence: Synthetic oligonucleotide
  Target: ATXN2; (+) strand; PAM type: NRG; PAM sequence: AAG
tcataacctagggtacgtaa

SEQ ID NO: 39207 - DNA, 20 bp, Artificial Sequence
  Description of Artificial Sequence: Synthetic oligonucleotide
  Target: ATXN2; (+) strand; PAM type: NRG; PAM sequence: AAG
tttcttattatgatacaaaa

SEQ ID NO: 39208 - DNA, 20 bp, Artificial Sequence
  Description of Artificial Sequence: Synthetic oligonucleotide
  Target: ATXN2; (+) strand; PAM type: NRG; PAM sequence: AAG
tacaaaaaagcatgaacctt

SEQ ID NO: 39209 - DNA, 20 bp, Artificial Sequence
  Description of Artificial Sequence: Synthetic oligonucleotide
  Target: ATXN2; (+) strand; PAM type: NRG; PAM sequence: GAG
caaaaaagcatgaaccttaa

SEQ ID NO: 39210 - DNA, 20 bp, Artificial Sequence
  Description of Artificial Sequence: Synthetic oligonucleotide
  Target: ATXN2; (+) strand; PAM type: NRG; PAM sequence: AAG
aagcatgaaccttaagagaa

SEQ ID NO: 39211 - DNA, 20 bp, Artificial Sequence
  Description of Artificial Sequence: Synthetic oligonucleotide
  Target: ATXN2; (+) strand; PAM type: NRG; PAM sequence: AAG
aagagaaaagcttgataaat

SEQ ID NO: 39212 - DNA, 20 bp, Artificial Sequence
  Description of Artificial Sequence: Synthetic oligonucleotide
  Target: ATXN2; (+) strand; PAM type: NRG; PAM sequence: AGG
agagaaaagcttgataaata

SEQ ID NO: 39213 - DNA, 20 bp, Artificial Sequence
  Description of Artificial Sequence: Synthetic oligonucleotide
  Target: ATXN2; (+) strand; PAM type: NRG; PAM sequence: TGG
ttcattaaaattaacaatac

SEQ ID NO: 39214 - DNA, 20 bp, Artificial Sequence
  Description of Artificial Sequence: Synthetic oligonucleotide
  Target: ATXN2; (+) strand; PAM type: NRG; PAM sequence: CAG
tggctcttcaaaaaaaaccg

SEQ ID NO: 39215 - DNA, 20 bp, Artificial Sequence
  Description of Artificial Sequence: Synthetic oligonucleotide
  Target: ATXN2; (+) strand; PAM type: NRG; PAM sequence: TGG
cttcaaaaaaaaccgcagac

SEQ ID NO: 39216 - DNA, 20 bp, Artificial Sequence
  Description of Artificial Sequence: Synthetic oligonucleotide
  Target: ATXN2; (+) strand; PAM type: NRG; PAM sequence: GGG
ttcaaaaaaaaccgcagact

SEQ ID NO: 39217 - DNA, 20 bp, Artificial Sequence
  Description of Artificial Sequence: Synthetic oligonucleotide
  Target: ATXN2; (+) strand; PAM type: NRG; PAM sequence: GAG
caaaaaaaaccgcagactgg

SEQ ID NO: 39218 - DNA, 20 bp, Artificial Sequence
  Description of Artificial Sequence: Synthetic oligonucleotide
  Target: ATXN2; (+) strand; PAM type: NRG; PAM sequence: GAG
gaaaatattcacaatattct

SEQ ID NO: 39219 - DNA, 20 bp, Artificial Sequence
  Description of Artificial Sequence: Synthetic oligonucleotide
  Target: ATXN2; (+) strand; PAM type: NRG; PAM sequence: AAG
atattcacaatattctgaga

SEQ ID NO: 39220 - DNA, 20 bp, Artificial Sequence
  Description of Artificial Sequence: Synthetic oligonucleotide
  Target: ATXN2; (+) strand; PAM type: NRG; PAM sequence: AGG
tattcacaatattctgagaa

SEQ ID NO: 39221 - DNA, 20 bp, Artificial Sequence
  Description of Artificial Sequence: Synthetic oligonucleotide
  Target: ATXN2; (+) strand; PAM type: NRG; PAM sequence: CAG
tctgagaaaggacttgtaac

SEQ ID NO: 39222 - DNA, 20 bp, Artificial Sequence
  Description of Artificial Sequence: Synthetic oligonucleotide
  Target: ATXN2; (+) strand; PAM type: NRG; PAM sequence: AAG
aacttaaaataatttactaa

SEQ ID NO: 39223 - DNA, 20 bp, Artificial Sequence
  Description of Artificial Sequence: Synthetic oligonucleotide
  Target: ATXN2; (+) strand; PAM type: NRG; PAM sequence: TAG
ttaaaataatttactaaaag

SEQ ID NO: 39224 - DNA, 20 bp, Artificial Sequence
  Description of Artificial Sequence: Synthetic oligonucleotide
  Target: ATXN2; (+) strand; PAM type: NRG; PAM sequence: CAG
aagtagtaactttattttca

SEQ ID NO: 39225 - DNA, 20 bp, Artificial Sequence
  Description of Artificial Sequence: Synthetic oligonucleotide
  Target: ATXN2; (+) strand; PAM type: NRG; PAM sequence: AAG
agtaactttattttcacagt

SEQ ID NO: 39226 - DNA, 20 bp, Artificial Sequence
  Description of Artificial Sequence: Synthetic oligonucleotide
  Target: ATXN2; (+) strand; PAM type: NRG; PAM sequence: AAG
ctttattttcacagtaagaa

SEQ ID NO: 39227 - DNA, 20 bp, Artificial Sequence
  Description of Artificial Sequence: Synthetic oligonucleotide
  Target: ATXN2; (+) strand; PAM type: NRG; PAM sequence: GAG
cttttttttcttttttttgt

SEQ ID NO: 39228 - DNA, 20 bp, Artificial Sequence
  Description of Artificial Sequence: Synthetic oligonucleotide
  Target: ATXN2; (+) strand; PAM type: NRG; PAM sequence: CAG
tttttcttttttttgtgaga

SEQ ID NO: 39229 - DNA, 20 bp, Artificial Sequence
  Description of Artificial Sequence: Synthetic oligonucleotide
  Target: ATXN2; (+) strand; PAM type: NRG; PAM sequence: AGG
ttttcttttttttgtgagac

SEQ ID NO: 39230 - DNA, 20 bp, Artificial Sequence
  Description of Artificial Sequence: Synthetic oligonucleotide
  Target: ATXN2; (+) strand; PAM type: NRG; PAM sequence: GGG
tttcttttttttgtgagaca

SEQ ID NO: 39231 - DNA, 20 bp, Artificial Sequence
  Description of Artificial Sequence: Synthetic oligonucleotide
  Target: ATXN2; (+) strand; PAM type: NRG; PAM sequence: TGG
tttttttgtgagacagggtc

SEQ ID NO: 39232 - DNA, 20 bp, Artificial Sequence
  Description of Artificial Sequence: Synthetic oligonucleotide
  Target: ATXN2; (+) strand; PAM type: NRG; PAM sequence: CAG
cagggtctggctctattgcc

SEQ ID NO: 39233 - DNA, 20 bp, Artificial Sequence
  Description of Artificial Sequence: Synthetic oligonucleotide
  Target: ATXN2; (+) strand; PAM type: NRG; PAM sequence: AGG
agggtctggctctattgccc

SEQ ID NO: 39234 - DNA, 20 bp, Artificial Sequence
  Description of Artificial Sequence: Synthetic oligonucleotide
  Target: ATXN2; (+) strand; PAM type: NRG; PAM sequence: TGG
tctggctctattgcccaggc

SEQ ID NO: 39235 - DNA, 20 bp, Artificial Sequence
  Description of Artificial Sequence: Synthetic oligonucleotide
  Target: ATXN2; (+) strand; PAM type: NRG; PAM sequence: GAG
tggctctattgcccaggctg

SEQ ID NO: 39236 - DNA, 20 bp, Artificial Sequence
  Description of Artificial Sequence: Synthetic oligonucleotide
  Target: ATXN2; (+) strand; PAM type: NRG; PAM sequence: CAG
ctattgcccaggctggagtg

SEQ ID NO: 39237 - DNA, 20 bp, Artificial Sequence
  Description of Artificial Sequence: Synthetic oligonucleotide
  Target: ATXN2; (+) strand; PAM type: NRG; PAM sequence: TAG
ttgcccaggctggagtgcag

SEQ ID NO: 39238 - DNA, 20 bp, Artificial Sequence
  Description of Artificial Sequence: Synthetic oligonucleotide
  Target: ATXN2; (+) strand; PAM type: NRG; PAM sequence: CAG
ggagtgcagtagtgcaatct

SEQ ID NO: 39239 - DNA, 20 bp, Artificial Sequence
  Description of Artificial Sequence: Synthetic oligonucleotide
  Target: ATXN2; (+) strand; PAM type: NRG; PAM sequence: AAG
aaacccccgcaacctcgctc

SEQ ID NO: 39240 - DNA, 20 bp, Artificial Sequence
  Description of Artificial Sequence: Synthetic oligonucleotide
  Target: ATXN2; (+) strand; PAM type: NRG; PAM sequence: CAG
ctcaagcgattgtcccacct

SEQ ID NO: 39241 - DNA, 20 bp, Artificial Sequence
  Description of Artificial Sequence: Synthetic oligonucleotide
  Target: ATXN2; (+) strand; PAM type: NRG; PAM sequence: AAG
ttgtcccacctcagcccccc

SEQ ID NO: 39242 - DNA, 20 bp, Artificial Sequence
  Description of Artificial Sequence: Synthetic oligonucleotide
  Target: ATXN2; (+) strand; PAM type: NRG; PAM sequence: TAG
tcccacctcagccccccaag

SEQ ID NO: 39243 - DNA, 20 bp, Artificial Sequence
  Description of Artificial Sequence: Synthetic oligonucleotide
  Target: ATXN2; (+) strand; PAM type: NRG; PAM sequence: TGG
acctcagccccccaagtagc

SEQ ID NO: 39244 - DNA, 20 bp, Artificial Sequence
  Description of Artificial Sequence: Synthetic oligonucleotide
  Target: ATXN2; (+) strand; PAM type: NRG; PAM sequence: GGG
cctcagccccccaagtagct

SEQ ID NO: 39245 - DNA, 20 bp, Artificial Sequence
  Description of Artificial Sequence: Synthetic oligonucleotide
  Target: ATXN2; (+) strand; PAM type: NRG; PAM sequence: TAG
cccccaagtagctgggacca

SEQ ID NO: 39246 - DNA, 20 bp, Artificial Sequence
  Description of Artificial Sequence: Synthetic oligonucleotide
  Target: ATXN2; (+) strand; PAM type: NRG; PAM sequence: AGG
ccccaagtagctgggaccat

SEQ ID NO: 39247 - DNA, 20 bp, Artificial Sequence
  Description of Artificial Sequence: Synthetic oligonucleotide
  Target: ATXN2; (+) strand; PAM type: NRG; PAM sequence: TGG
taggaatgcgcttctgtgcc

SEQ ID NO: 39248 - DNA, 20 bp, Artificial Sequence
  Description of Artificial Sequence: Synthetic oligonucleotide
  Target: ATXN2; (+) strand; PAM type: NRG; PAM sequence: AAG
ttttcttttttttttttgca

SEQ ID NO: 39249 - DNA, 20 bp, Artificial Sequence
  Description of Artificial Sequence: Synthetic oligonucleotide
  Target: ATXN2; (+) strand; PAM type: NRG; PAM sequence: CAG
cttttttttttttgcaaaga

SEQ ID NO: 39250 - DNA, 20 bp, Artificial Sequence
  Description of Artificial Sequence: Synthetic oligonucleotide
  Target: ATXN2; (+) strand; PAM type: NRG; PAM sequence: AGG
ttttttttttttgcaaagac

SEQ ID NO: 39251 - DNA, 20 bp, Artificial Sequence
  Description of Artificial Sequence: Synthetic oligonucleotide
  Target: ATXN2; (+) strand; PAM type: NRG; PAM sequence: GGG
tttttttttttgcaaagaca

SEQ ID NO: 39252 - DNA, 20 bp, Artificial Sequence
  Description of Artificial Sequence: Synthetic oligonucleotide
  Target: ATXN2; (+) strand; PAM type: NRG; PAM sequence: CAG
cagggttttgtcatgttcct

SEQ ID NO: 39253 - DNA, 20 bp, Artificial Sequence
  Description of Artificial Sequence: Synthetic oligonucleotide
  Target: ATXN2; (+) strand; PAM type: NRG; PAM sequence: AGG
agggttttgtcatgttcctc

SEQ ID NO: 39254 - DNA, 20 bp, Artificial Sequence
  Description of Artificial Sequence: Synthetic oligonucleotide
  Target: ATXN2; (+) strand; PAM type: NRG; PAM sequence: TGG
ttttgtcatgttcctcaggc

SEQ ID NO: 39255 - DNA, 20 bp, Artificial Sequence
  Description of Artificial Sequence: Synthetic oligonucleotide
  Target: ATXN2; (+) strand; PAM type: NRG; PAM sequence: TGG
tcaggctggtctcaaactgt

SEQ ID NO: 39256 - DNA, 20 bp, Artificial Sequence
  Description of Artificial Sequence: Synthetic oligonucleotide
  Target: ATXN2; (+) strand; PAM type: NRG; PAM sequence: CAG
gttggctcaaatgatccatc

SEQ ID NO: 39257 - DNA, 20 bp, Artificial Sequence
  Description of Artificial Sequence: Synthetic oligonucleotide
  Target: ATXN2; (+) strand; PAM type: NRG; PAM sequence: AGG
ttggctcaaatgatccatcc

SEQ ID NO: 39258 - DNA, 20 bp, Artificial Sequence
  Description of Artificial Sequence: Synthetic oligonucleotide
  Target: ATXN2; (+) strand; PAM type: NRG; PAM sequence: TGG
ctcaaatgatccatccaggt

SEQ ID NO: 39259 - DNA, 20 bp, Artificial Sequence
  Description of Artificial Sequence: Synthetic oligonucleotide
  Target: ATXN2; (+) strand; PAM type: NRG; PAM sequence: AAG
ccatccaggttggcctccca

SEQ ID NO: 39260 - DNA, 20 bp, Artificial Sequence
  Description of Artificial Sequence: Synthetic oligonucleotide
  Target: ATXN2; (+) strand; PAM type: NRG; PAM sequence: TGG
aggttggcctcccaaagtgc

SEQ ID NO: 39261 - DNA, 20 bp, Artificial Sequence
  Description of Artificial Sequence: Synthetic oligonucleotide
  Target: ATXN2; (+) strand; PAM type: NRG; PAM sequence: CAG
ctcccaaagtgctggaatta

SEQ ID NO: 39262 - DNA, 20 bp, Artificial Sequence
  Description of Artificial Sequence: Synthetic oligonucleotide
  Target: ATXN2; (+) strand; PAM type: NRG; PAM sequence: AGG
tcccaaagtgctggaattac

SEQ ID NO: 39263 - DNA, 20 bp, Artificial Sequence
  Description of Artificial Sequence: Synthetic oligonucleotide
  Target: ATXN2; (+) strand; PAM type: NRG; PAM sequence: GAG
agtgctggaattacaggcgt

SEQ ID NO: 39264 - DNA, 20 bp, Artificial Sequence
  Description of Artificial Sequence: Synthetic oligonucleotide
  Target: ATXN2; (+) strand; PAM type: NRG; PAM sequence: CAG
ctggaattacaggcgtgagc

SEQ ID NO: 39265 - DNA, 20 bp, Artificial Sequence
  Description of Artificial Sequence: Synthetic oligonucleotide
  Target: ATXN2; (+) strand; PAM type: NRG; PAM sequence: CAG
caggcgtgagccagtgcacc

SEQ ID NO: 39266 - DNA, 20 bp, Artificial Sequence
  Description of Artificial Sequence: Synthetic oligonucleotide
  Target: ATXN2; (+) strand; PAM type: NRG; PAM sequence: AGG
aggcgtgagccagtgcaccc

SEQ ID NO: 39267 - DNA, 20 bp, Artificial Sequence
  Description of Artificial Sequence: Synthetic oligonucleotide
  Target: ATXN2; (+) strand; PAM type: NRG; PAM sequence: CAG
cgtgagccagtgcacccagg

SEQ ID NO: 39268 - DNA, 20 bp, Artificial Sequence
  Description of Artificial Sequence: Synthetic oligonucleotide
  Target: ATXN2; (+) strand; PAM type: NRG; PAM sequence: GAG
tgcacccaggcagaaacatt

SEQ ID NO: 39269 - DNA, 20 bp, Artificial Sequence
  Description of Artificial Sequence: Synthetic oligonucleotide
  Target: ATXN2; (+) strand; PAM type: NRG; PAM sequence: AAG
ggcagaaacattgagacaaa

SEQ ID NO: 39270 - DNA, 20 bp, Artificial Sequence
  Description of Artificial Sequence: Synthetic oligonucleotide
  Target: ATXN2; (+) strand; PAM type: NRG; PAM sequence: TAG
ttgagacaaaaagaaattat

SEQ ID NO: 39271 - DNA, 20 bp, Artificial Sequence
  Description of Artificial Sequence: Synthetic oligonucleotide
  Target: ATXN2; (+) strand; PAM type: NRG; PAM sequence: AGG
tgagacaaaaagaaattatt

SEQ ID NO: 39272 - DNA, 20 bp, Artificial Sequence
  Description of Artificial Sequence: Synthetic oligonucleotide
  Target: ATXN2; (+) strand; PAM type: NRG; PAM sequence: CAG
acaaaaagaaattattagga

SEQ ID NO: 39273 - DNA, 20 bp, Artificial Sequence
  Description of Artificial Sequence: Synthetic oligonucleotide
  Target: ATXN2; (+) strand; PAM type: NRG; PAM sequence: AGG
caaaaagaaattattaggac

SEQ ID NO: 39274 - DNA, 20 bp, Artificial Sequence
  Description of Artificial Sequence: Synthetic oligonucleotide
  Target: ATXN2; (+) strand; PAM type: NRG; PAM sequence: CAG
agaaattattaggacaggcg

SEQ ID NO: 39275 - DNA, 20 bp, Artificial Sequence
  Description of Artificial Sequence: Synthetic oligonucleotide
  Target: ATXN2; (+) strand; PAM type: NRG; PAM sequence: TGG
aattattaggacaggcgcag

SEQ ID NO: 39276 - DNA, 20 bp, Artificial Sequence
  Description of Artificial Sequence: Synthetic oligonucleotide
  Target: ATXN2; (+) strand; PAM type: NRG; PAM sequence: CAG
gtggctcacacctgtaatct

SEQ ID NO: 39277 - DNA, 20 bp, Artificial Sequence
  Description of Artificial Sequence: Synthetic oligonucleotide
  Target: ATXN2; (+) strand; PAM type: NRG; PAM sequence: TGG
cacctgtaatctcagcactt

SEQ ID NO: 39278 - DNA, 20 bp, Artificial Sequence
  Description of Artificial Sequence: Synthetic oligonucleotide
  Target: ATXN2; (+) strand; PAM type: NRG; PAM sequence: GGG
acctgtaatctcagcacttt

SEQ ID NO: 39279 - DNA, 20 bp, Artificial Sequence
  Description of Artificial Sequence: Synthetic oligonucleotide
  Target: ATXN2; (+) strand; PAM type: NRG; PAM sequence: GAG
ctgtaatctcagcactttgg

SEQ ID NO: 39280 - DNA, 20 bp, Artificial Sequence
  Description of Artificial Sequence: Synthetic oligonucleotide
  Target: ATXN2; (+) strand; PAM type: NRG; PAM sequence: AGG
tgtaatctcagcactttggg

SEQ ID NO: 39281 - DNA, 20 bp, Artificial Sequence
  Description of Artificial Sequence: Synthetic oligonucleotide
  Target: ATXN2; (+) strand; PAM type: NRG; PAM sequence: GAG
tctcagcactttgggaggcc

SEQ ID NO: 39282 - DNA, 20 bp, Artificial Sequence
  Description of Artificial Sequence: Synthetic oligonucleotide
  Target: ATXN2; (+) strand; PAM type: NRG; PAM sequence: AGG
ctcagcactttgggaggccg

SEQ ID NO: 39283 - DNA, 20 bp, Artificial Sequence
  Description of Artificial Sequence: Synthetic oligonucleotide
  Target: ATXN2; (+) strand; PAM type: NRG; PAM sequence: CAG
agcactttgggaggccgagg

SEQ ID NO: 39284 - DNA, 20 bp, Artificial Sequence
  Description of Artificial Sequence: Synthetic oligonucleotide
  Target: ATXN2; (+) strand; PAM type: NRG; PAM sequence: AGG
gcactttgggaggccgaggc

SEQ ID NO: 39285 - DNA, 20 bp, Artificial Sequence
  Description of Artificial Sequence: Synthetic oligonucleotide
  Target: ATXN2; (+) strand; PAM type: NRG; PAM sequence: TAG
ctttgggaggccgaggcagg

SEQ ID NO: 39286 - DNA, 20 bp, Artificial Sequence
  Description of Artificial Sequence: Synthetic oligonucleotide
  Target: ATXN2; (+) strand; PAM type: NRG; PAM sequence: GAG
ccgaggcaggtagatcacct

SEQ ID NO: 39287 - DNA, 20 bp, Artificial Sequence
  Description of Artificial Sequence: Synthetic oligonucleotide
  Target: ATXN2; (+) strand; PAM type: NRG; PAM sequence: AGG
cgaggcaggtagatcacctg

SEQ ID NO: 39288 - DNA, 20 bp, Artificial Sequence
  Description of Artificial Sequence: Synthetic oligonucleotide
  Target: ATXN2; (+) strand; PAM type: NRG; PAM sequence: CAG
gcaggtagatcacctgaggt

SEQ ID NO: 39289 - DNA, 20 bp, Artificial Sequence
  Description of Artificial Sequence: Synthetic oligonucleotide
  Target: ATXN2; (+) strand; PAM type: NRG; PAM sequence: AGG
caggtagatcacctgaggtc

SEQ ID NO: 39290 - DNA, 20 bp, Artificial Sequence
  Description of Artificial Sequence: Synthetic oligonucleotide
  Target: ATXN2; (+) strand; PAM type: NRG; PAM sequence: GAG
ggtagatcacctgaggtcag

SEQ ID NO: 39291 - DNA, 20 bp, Artificial Sequence
  Description of Artificial Sequence: Synthetic oligonucleotide
  Target: ATXN2; (+) strand; PAM type: NRG; PAM sequence: TAG
gatcacctgaggtcaggagt

SEQ ID NO: 39292 - DNA, 20 bp, Artificial Sequence
  Description of Artificial Sequence: Synthetic oligonucleotide
  Target: ATXN2; (+) strand; PAM type: NRG; PAM sequence: GAG
tcacctgaggtcaggagtta

SEQ ID NO: 39293 - DNA, 20 bp, Artificial Sequence
  Description of Artificial Sequence: Synthetic oligonucleotide
  Target: ATXN2; (+) strand; PAM type: NRG; PAM sequence: CAG
tgaggtcaggagttagagac

SEQ ID NO: 39294 - DNA, 20 bp, Artificial Sequence
  Description of Artificial Sequence: Synthetic oligonucleotide
  Target: ATXN2; (+) strand; PAM type: NRG; PAM sequence: TGG
agagaccagcatgaccaaca

SEQ ID NO: 39295 - DNA, 20 bp, Artificial Sequence
  Description of Artificial Sequence: Synthetic oligonucleotide
  Target: ATXN2; (+) strand; PAM type: NRG; PAM sequence: TAG
ctacactaaaaatacaaaat

SEQ ID NO: 39296 - DNA, 20 bp, Artificial Sequence
  Description of Artificial Sequence: Synthetic oligonucleotide
  Target: ATXN2; (+) strand; PAM type: NRG; PAM sequence: CAG
actaaaaatacaaaattagc

SEQ ID NO: 39297 - DNA, 20 bp, Artificial Sequence
  Description of Artificial Sequence: Synthetic oligonucleotide
  Target: ATXN2; (+) strand; PAM type: NRG; PAM sequence: AGG
ctaaaaatacaaaattagcc

SEQ ID NO: 39298 - DNA, 20 bp, Artificial Sequence
  Description of Artificial Sequence: Synthetic oligonucleotide
  Target: ATXN2; (+) strand; PAM type: NRG; PAM sequence: TGG
aatacaaaattagccaggca

SEQ ID NO: 39299 - DNA, 20 bp, Artificial Sequence
  Description of Artificial Sequence: Synthetic oligonucleotide
  Target: ATXN2; (+) strand; PAM type: NRG; PAM sequence: TGG
acaaaattagccaggcatgg

SEQ ID NO: 39300 - DNA, 20 bp, Artificial Sequence
  Description of Artificial Sequence: Synthetic oligonucleotide
  Target: ATXN2; (+) strand; PAM type: NRG; PAM sequence: CAG
gtggcgcatgcctgtaatcc

SEQ ID NO: 39301 - DNA, 20 bp, Artificial Sequence
  Description of Artificial Sequence: Synthetic oligonucleotide
  Target: ATXN2; (+) strand; PAM type: NRG; PAM sequence: TGG
tgcctgtaatcccagctact

SEQ ID NO: 39302 - DNA, 20 bp, Artificial Sequence
  Description of Artificial Sequence: Synthetic oligonucleotide
  Target: ATXN2; (+) strand; PAM type: NRG; PAM sequence: GGG
gcctgtaatcccagctactt

SEQ ID NO: 39303 - DNA, 20 bp, Artificial Sequence
  Description of Artificial Sequence: Synthetic oligonucleotide
  Target: ATXN2; (+) strand; PAM type: NRG; PAM sequence: GAG
ctgtaatcccagctacttgg

SEQ ID NO: 39304 - DNA, 20 bp, Artificial Sequence
  Description of Artificial Sequence: Synthetic oligonucleotide
  Target: ATXN2; (+) strand; PAM type: NRG; PAM sequence: AGG
tgtaatcccagctacttggg

SEQ ID NO: 39305 - DNA, 20 bp, Artificial Sequence
  Description of Artificial Sequence: Synthetic oligonucleotide
  Target: ATXN2; (+) strand; PAM type: NRG; PAM sequence: AAG
tcccagctacttgggaggct

SEQ ID NO: 39306 - DNA, 20 bp, Artificial Sequence
  Description of Artificial Sequence: Synthetic oligonucleotide
  Target: ATXN2; (+) strand; PAM type: NRG; PAM sequence: AGG
cccagctacttgggaggcta

SEQ ID NO: 39307 - DNA, 20 bp, Artificial Sequence
  Description of Artificial Sequence: Synthetic oligonucleotide
  Target: ATXN2; (+) strand; PAM type: NRG; PAM sequence: AAG
tacttgggaggctaaggcgt

SEQ ID NO: 39308 - DNA, 20 bp, Artificial Sequence
  Description of Artificial Sequence: Synthetic oligonucleotide
  Target: ATXN2; (+) strand; PAM type: NRG; PAM sequence: TGG
gcgtaagaattgcttgaacc

SEQ ID NO: 39309 - DNA, 20 bp, Artificial Sequence
  Description of Artificial Sequence: Synthetic oligonucleotide
  Target: ATXN2; (+) strand; PAM type: NRG; PAM sequence: GGG
cgtaagaattgcttgaacct

SEQ ID NO: 39310 - DNA, 20 bp, Artificial Sequence
  Description of Artificial Sequence: Synthetic oligonucleotide
  Target: ATXN2; (+) strand; PAM type: NRG; PAM sequence: GAG
taagaattgcttgaacctgg

SEQ ID NO: 39311 - DNA, 20 bp, Artificial Sequence
  Description of Artificial Sequence: Synthetic oligonucleotide
  Target: ATXN2; (+) strand; PAM type: NRG; PAM sequence: AGG
aagaattgcttgaacctggg

SEQ ID NO: 39312 - DNA, 20 bp, Artificial Sequence
  Description of Artificial Sequence: Synthetic oligonucleotide
  Target: ATXN2; (+) strand; PAM type: NRG; PAM sequence: CGG
aattgcttgaacctgggagg

SEQ ID NO: 39313 - DNA, 20 bp, Artificial Sequence
  Description of Artificial Sequence: Synthetic oligonucleotide
  Target: ATXN2; (+) strand; PAM type: NRG; PAM sequence: GAG
ttgcttgaacctgggaggcg

SEQ ID NO: 39314 - DNA, 20 bp, Artificial Sequence
  Description of Artificial Sequence: Synthetic oligonucleotide
  Target: ATXN2; (+) strand; PAM type: NRG; PAM sequence: AGG
tgcttgaacctgggaggcgg

SEQ ID NO: 39315 - DNA, 20 bp, Artificial Sequence
  Description of Artificial Sequence: Synthetic oligonucleotide
  Target: ATXN2; (+) strand; PAM type: NRG; PAM sequence: CAG
aacctgggaggcggaggttg

SEQ ID NO: 39316 - DNA, 20 bp, Artificial Sequence
  Description of Artificial Sequence: Synthetic oligonucleotide
  Target: ATXN2; (+) strand; PAM type: NRG; PAM sequence: GAG
tgggaggcggaggttgcagt

SEQ ID NO: 39317 - DNA, 20 bp, Artificial Sequence
  Description of Artificial Sequence: Synthetic oligonucleotide
  Target: ATXN2; (+) strand; PAM type: NRG; PAM sequence: AAG
ggcggaggttgcagtgagcc

SEQ ID NO: 39318 - DNA, 20 bp, Artificial Sequence
  Description of Artificial Sequence: Synthetic oligonucleotide
  Target: ATXN2; (+) strand; PAM type: NRG; PAM sequence: TGG
gaggttgcagtgagccaaga

SEQ ID NO: 39319 - DNA, 20 bp, Artificial Sequence
  Description of Artificial Sequence: Synthetic oligonucleotide
  Target: ATXN2; (+) strand; PAM type: NRG; PAM sequence: CAG
aagatggcaccactgcgttc

SEQ ID NO: 39320 - DNA, 20 bp, Artificial Sequence
  Description of Artificial Sequence: Synthetic oligonucleotide
  Target: ATXN2; (+) strand; PAM type: NRG; PAM sequence: TGG
ggcaccactgcgttccagcc

SEQ ID NO: 39321 - DNA, 20 bp, Artificial Sequence
  Description of Artificial Sequence: Synthetic oligonucleotide
  Target: ATXN2; (+) strand; PAM type: NRG; PAM sequence: GGG
gcaccactgcgttccagcct

SEQ ID NO: 39322 - DNA, 20 bp, Artificial Sequence
  Description of Artificial Sequence: Synthetic oligonucleotide
  Target: ATXN2; (+) strand; PAM type: NRG; PAM sequence: TAG
ctgcgttccagcctgggcaa

SEQ ID NO: 39323 - DNA, 20 bp, Artificial Sequence
  Description of Artificial Sequence: Synthetic oligonucleotide
  Target: ATXN2; (+) strand; PAM type: NRG; PAM sequence: GAG
gcgttccagcctgggcaata

SEQ ID NO: 39324 - DNA, 20 bp, Artificial Sequence
  Description of Artificial Sequence: Synthetic oligonucleotide
  Target: ATXN2; (+) strand; PAM type: NRG; PAM sequence: GAG
tccagcctgggcaatagagt

SEQ ID NO: 39325 - DNA, 20 bp, Artificial Sequence
  Description of Artificial Sequence: Synthetic oligonucleotide
  Target: ATXN2; (+) strand; PAM type: NRG; PAM sequence: TGG
aaataaataaataaataaaa

SEQ ID NO: 39326 - DNA, 20 bp, Artificial Sequence
  Description of Artificial Sequence: Synthetic oligonucleotide
  Target: ATXN2; (+) strand; PAM type: NRG; PAM sequence: AAG
taaataaataaaatggaaaa

SEQ ID NO: 39327 - DNA, 20 bp, Artificial Sequence
  Description of Artificial Sequence: Synthetic oligonucleotide
  Target: ATXN2; (+) strand; PAM type: NRG; PAM sequence: AAG
tttgaaccatttactaaaaa

SEQ ID NO: 39328 - DNA, 20 bp, Artificial Sequence
  Description of Artificial Sequence: Synthetic oligonucleotide
  Target: ATXN2; (+) strand; PAM type: NRG; PAM sequence: AGG
ttgaaccatttactaaaaaa

SEQ ID NO: 39329 - DNA, 20 bp, Artificial Sequence
  Description of Artificial Sequence: Synthetic oligonucleotide
  Target: ATXN2; (+) strand; PAM type: NRG; PAM sequence: CAG
atttactaaaaaaaggttga

SEQ ID NO: 39330 - DNA, 20 bp, Artificial Sequence
  Description of Artificial Sequence: Synthetic oligonucleotide
  Target: ATXN2; (+) strand; PAM type: NRG; PAM sequence: GAG
aaaacaaacacacacatgat

SEQ ID NO: 39331 - DNA, 20 bp, Artificial Sequence
  Description of Artificial Sequence: Synthetic oligonucleotide
  Target: ATXN2; (+) strand; PAM type: NRG; PAM sequence: AGG
aaacaaacacacacatgatg

SEQ ID NO: 39332 - DNA, 20 bp, Artificial Sequence
  Description of Artificial Sequence: Synthetic oligonucleotide
  Target: ATXN2; (+) strand; PAM type: NRG; PAM sequence: TGG
cacacatgatgaggtgctcc

SEQ ID NO: 39333 - DNA, 20 bp, Artificial Sequence
  Description of Artificial Sequence: Synthetic oligonucleotide
  Target: ATXN2; (+) strand; PAM type: NRG; PAM sequence: CAG
atgatgaggtgctcctggat

SEQ ID NO: 39334 - DNA, 20 bp, Artificial Sequence
  Description of Artificial Sequence: Synthetic oligonucleotide
  Target: ATXN2; (+) strand; PAM type: NRG; PAM sequence: CAG
gctcctggatcagtcatcat

SEQ ID NO: 39335 - DNA, 20 bp, Artificial Sequence
  Description of Artificial Sequence: Synthetic oligonucleotide
  Target: ATXN2; (+) strand; PAM type: NRG; PAM sequence: GAG
tcctggatcagtcatcatca

SEQ ID NO: 39336 - DNA, 20 bp, Artificial Sequence
  Description of Artificial Sequence: Synthetic oligonucleotide
  Target: ATXN2; (+) strand; PAM type: NRG; PAM sequence: AAG
catcagagaaatgtacattt

SEQ ID NO: 39337 - DNA, 20 bp, Artificial Sequence
  Description of Artificial Sequence: Synthetic oligonucleotide
  Target: ATXN2; (+) strand; PAM type: NRG; PAM sequence: GAG
tgtacatttaagatcacaat

SEQ ID NO: 39338 - DNA, 20 bp, Artificial Sequence
  Description of Artificial Sequence: Synthetic oligonucleotide
  Target: ATXN2; (+) strand; PAM type: NRG; PAM sequence: AAG
agatcacaatgagataccat

SEQ ID NO: 39339 - DNA, 20 bp, Artificial Sequence
  Description of Artificial Sequence: Synthetic oligonucleotide
  Target: ATXN2; (+) strand; PAM type: NRG; PAM sequence: TAG
agataccataagacacccat

SEQ ID NO: 39340 - DNA, 20 bp, Artificial Sequence
  Description of Artificial Sequence: Synthetic oligonucleotide
  Target: ATXN2; (+) strand; PAM type: NRG; PAM sequence: AAG
ttagacctgttgaaattaaa

SEQ ID NO: 39341 - DNA, 20 bp, Artificial Sequence
  Description of Artificial Sequence: Synthetic oligonucleotide
  Target: ATXN2; (+) strand; PAM type: NRG; PAM sequence: AAG
taaaaagataacacaatacc

SEQ ID NO: 39342 - DNA, 20 bp, Artificial Sequence
  Description of Artificial Sequence: Synthetic oligonucleotide
  Target: ATXN2; (+) strand; PAM type: NRG; PAM sequence: TGG
gataacacaataccaagtgt

SEQ ID NO: 39343 - DNA, 20 bp, Artificial Sequence
  Description of Artificial Sequence: Synthetic oligonucleotide
  Target: ATXN2; (+) strand; PAM type: NRG; PAM sequence: AAG
acacaataccaagtgttggc

SEQ ID NO: 39344 - DNA, 20 bp, Artificial Sequence
  Description of Artificial Sequence: Synthetic oligonucleotide
  Target: ATXN2; (+) strand; PAM type: NRG; PAM sequence: AGG
cacaataccaagtgttggca

SEQ ID NO: 39345 - DNA, 20 bp, Artificial Sequence
  Description of Artificial Sequence: Synthetic oligonucleotide
  Target: ATXN2; (+) strand; PAM type: NRG; PAM sequence: CAG
accaagtgttggcaaggatg

SEQ ID NO: 39346 - DNA, 20 bp, Artificial Sequence
  Description of Artificial Sequence: Synthetic oligonucleotide
  Target: ATXN2; (+) strand; PAM type: NRG; PAM sequence: TGG
tggcaaggatgcagaacaca

SEQ ID NO: 39347 - DNA, 20 bp, Artificial Sequence
  Description of Artificial Sequence: Synthetic oligonucleotide
  Target: ATXN2; (+) strand; PAM type: NRG; PAM sequence: CAG
aacctacacatgtacctgat

SEQ ID NO: 39348 - DNA, 20 bp, Artificial Sequence
  Description of Artificial Sequence: Synthetic oligonucleotide
  Target: ATXN2; (+) strand; PAM type: NRG; PAM sequence: TGG
tacacatgtacctgatcagt

SEQ ID NO: 39349 - DNA, 20 bp, Artificial Sequence
  Description of Artificial Sequence: Synthetic oligonucleotide
  Target: ATXN2; (+) strand; PAM type: NRG; PAM sequence: TAG
gtaaaatgacacaatcactt

SEQ ID NO: 39350 - DNA, 20 bp, Artificial Sequence
  Description of Artificial Sequence: Synthetic oligonucleotide
  Target: ATXN2; (+) strand; PAM type: NRG; PAM sequence: AAG
aaatgacacaatcactttag

SEQ ID NO: 39351 - DNA, 20 bp, Artificial Sequence
  Description of Artificial Sequence: Synthetic oligonucleotide
  Target: ATXN2; (+) strand; PAM type: NRG; PAM sequence: TAG
caatcactttagaagattgc

SEQ ID NO: 39352 - DNA, 20 bp, Artificial Sequence
  Description of Artificial Sequence: Synthetic oligonucleotide
  Target: ATXN2; (+) strand; PAM type: NRG; PAM sequence: CAG
taattgaaatatgtatttac

SEQ ID NO: 39353 - DNA, 20 bp, Artificial Sequence
  Description of Artificial Sequence: Synthetic oligonucleotide
  Target: ATXN2; (+) strand; PAM type: NRG; PAM sequence: AGG
aattgaaatatgtatttacc

SEQ ID NO: 39354 - DNA, 20 bp, Artificial Sequence
  Description of Artificial Sequence: Synthetic oligonucleotide
  Target: ATXN2; (+) strand; PAM type: NRG; PAM sequence: CAG
tgaaatatgtatttaccagg

SEQ ID NO: 39355 - DNA, 20 bp, Artificial Sequence
  Description of Artificial Sequence: Synthetic oligonucleotide
  Target: ATXN2; (+) strand; PAM type: NRG; PAM sequence: TGG
tgtatttaccaggcagtgtg

SEQ ID NO: 39356 - DNA, 20 bp, Artificial Sequence
  Description of Artificial Sequence: Synthetic oligonucleotide
  Target: ATXN2; (+) strand; PAM type: NRG; PAM sequence: TGG
atttaccaggcagtgtgtgg

SEQ ID NO: 39357 - DNA, 20 bp, Artificial Sequence
  Description of Artificial Sequence: Synthetic oligonucleotide
  Target: ATXN2; (+) strand; PAM type: NRG; PAM sequence: TGG
catctgtaatcccaacactt

SEQ ID NO: 39358 - DNA, 20 bp, Artificial Sequence
  Description of Artificial Sequence: Synthetic oligonucleotide
  Target: ATXN2; (+) strand; PAM type: NRG; PAM sequence: GGG
atctgtaatcccaacacttt

SEQ ID NO: 39359 - DNA, 20 bp, Artificial Sequence
  Description of Artificial Sequence: Synthetic oligonucleotide
  Target: ATXN2; (+) strand; PAM type: NRG; PAM sequence: GAG
ctgtaatcccaacactttgg

SEQ ID NO: 39360 - DNA, 20 bp, Artificial Sequence
  Description of Artificial Sequence: Synthetic oligonucleotide
  Target: ATXN2; (+) strand; PAM type: NRG; PAM sequence: AGG
tgtaatcccaacactttggg

SEQ ID NO: 39361 - DNA, 20 bp, Artificial Sequence
  Description of Artificial Sequence: Synthetic oligonucleotide
  Target: ATXN2; (+) strand; PAM type: NRG; PAM sequence: TGG
atcccaacactttgggaggc

SEQ ID NO: 39362 - DNA, 20 bp, Artificial Sequence
  Description of Artificial Sequence: Synthetic oligonucleotide
  Target: ATXN2; (+) strand; PAM type: NRG; PAM sequence: GGG
tcccaacactttgggaggct

SEQ ID NO: 39363 - DNA, 20 bp, Artificial Sequence
  Description of Artificial Sequence: Synthetic oligonucleotide
  Target: ATXN2; (+) strand; PAM type: NRG; PAM sequence: GGG
cccaacactttgggaggctg

SEQ ID NO: 39364 - DNA, 20 bp, Artificial Sequence
  Description of Artificial Sequence: Synthetic oligonucleotide
  Target: ATXN2; (+) strand; PAM type: NRG; PAM sequence: CGG
aacactttgggaggctgggg

SEQ ID NO: 39365 - DNA, 20 bp, Artificial Sequence
  Description of Artificial Sequence: Synthetic oligonucleotide
  Target: ATXN2; (+) strand; PAM type: NRG; PAM sequence: GGG
acactttgggaggctggggc

SEQ ID NO: 39366 - DNA, 20 bp, Artificial Sequence
  Description of Artificial Sequence: Synthetic oligonucleotide
  Target: ATXN2; (+) strand; PAM type: NRG; PAM sequence: TGG
ctttgggaggctggggcggg

SEQ ID NO: 39367 - DNA, 20 bp, Artificial Sequence
  Description of Artificial Sequence: Synthetic oligonucleotide
  Target: ATXN2; (+) strand; PAM type: NRG; PAM sequence: TGG
tggggcgggtggatcacttg

SEQ ID NO: 39368 - DNA, 20 bp, Artificial Sequence
  Description of Artificial Sequence: Synthetic oligonucleotide
  Target: ATXN2; (+) strand; PAM type: NRG; PAM sequence: CAG
gcgggtggatcacttgtggt

SEQ ID NO: 39369 - DNA, 20 bp, Artificial Sequence
  Description of Artificial Sequence: Synthetic oligonucleotide
  Target: ATXN2; (+) strand; PAM type: NRG; PAM sequence: AGG
cgggtggatcacttgtggtc

SEQ ID NO: 39370 - DNA, 20 bp, Artificial Sequence
  Description of Artificial Sequence: Synthetic oligonucleotide
  Target: ATXN2; (+) strand; PAM type: NRG; PAM sequence: GAG
ggtggatcacttgtggtcag

SEQ ID NO: 39371 - DNA, 20 bp, Artificial Sequence
  Description of Artificial Sequence: Synthetic oligonucleotide
  Target: ATXN2; (+) strand; PAM type: NRG; PAM sequence: GAG
tcacttgtggtcaggagttc

SEQ ID NO: 39372 - DNA, 20 bp, Artificial Sequence
  Description of Artificial Sequence: Synthetic oligonucleotide
  Target: ATXN2; (+) strand; PAM type: NRG; PAM sequence: CAG
tgtggtcaggagttcgagac

SEQ ID NO: 39373 - DNA, 20 bp, Artificial Sequence
  Description of Artificial Sequence: Synthetic oligonucleotide
  Target: ATXN2; (+) strand; PAM type: NRG; PAM sequence: TGG
tcaggagttcgagaccagcc

SEQ ID NO: 39374 - DNA, 20 bp, Artificial Sequence
  Description of Artificial Sequence: Synthetic oligonucleotide
  Target: ATXN2; (+) strand; PAM type: NRG; PAM sequence: TGG
cgagaccagcctggccaacg

SEQ ID NO: 39375 - DNA, 20 bp, Artificial Sequence
  Description of Artificial Sequence: Synthetic oligonucleotide
  Target: ATXN2; (+) strand; PAM type: NRG; PAM sequence: TAG
tactaaaaatacaaaaaaat

SEQ ID NO: 39376 - DNA, 20 bp, Artificial Sequence
  Description of Artificial Sequence: Synthetic oligonucleotide
  Target: ATXN2; (+) strand; PAM type: NRG; PAM sequence: CAG
aaaaatacaaaaaaattagc

SEQ ID NO: 39377 - DNA, 20 bp, Artificial Sequence
  Description of Artificial Sequence: Synthetic oligonucleotide
  Target: ATXN2; (+) strand; PAM type: NRG; PAM sequence: AGG
aaaatacaaaaaaattagcc

SEQ ID NO: 39378 - DNA, 20 bp, Artificial Sequence
  Description of Artificial Sequence: Synthetic oligonucleotide
  Target: ATXN2; (+) strand; PAM type: NRG; PAM sequence: TGG
acaaaaaaattagccaggca

SEQ ID NO: 39379 - DNA, 20 bp, Artificial Sequence
  Description of Artificial Sequence: Synthetic oligonucleotide
  Target: ATXN2; (+) strand; PAM type: NRG; PAM sequence: TGG
aaaaaattagccaggcatgg

SEQ ID NO: 39380 - DNA, 20 bp, Artificial Sequence
  Description of Artificial Sequence: Synthetic oligonucleotide
  Target: ATXN2; (+) strand; PAM type: NRG; PAM sequence: CAG
gtggtgcgcgcctgtaatcc

SEQ ID NO: 39381 - DNA, 20 bp, Artificial Sequence
  Description of Artificial Sequence: Synthetic oligonucleotide
  Target: ATXN2; (+) strand; PAM type: NRG; PAM sequence: TGG
cgcctgtaatcccagctact

SEQ ID NO: 39382 - DNA, 20 bp, Artificial Sequence
  Description of Artificial Sequence: Synthetic oligonucleotide
  Target: ATXN2; (+) strand; PAM type: NRG; PAM sequence: GGG
gcctgtaatcccagctactt

SEQ ID NO: 39383 - DNA, 20 bp, Artificial Sequence
  Description of Artificial Sequence: Synthetic oligonucleotide
  Target: ATXN2; (+) strand; PAM type: NRG; PAM sequence: GAG
ctgtaatcccagctacttgg

SEQ ID NO: 39384 - DNA, 20 bp, Artificial Sequence
  Description of Artificial Sequence: Synthetic oligonucleotide
  Target: ATXN2; (+) strand; PAM type: NRG; PAM sequence: AGG
tgtaatcccagctacttggg

SEQ ID NO: 39385 - DNA, 20 bp, Artificial Sequence
  Description of Artificial Sequence: Synthetic oligonucleotide
  Target: ATXN2; (+) strand; PAM type: NRG; PAM sequence: GAG
tcccagctacttgggaggct

SEQ ID NO: 39386 - DNA, 20 bp, Artificial Sequence
  Description of Artificial Sequence: Synthetic oligonucleotide
  Target: ATXN2; (+) strand; PAM type: NRG; PAM sequence: AGG
cccagctacttgggaggctg

SEQ ID NO: 39387 - DNA, 20 bp, Artificial Sequence
  Description of Artificial Sequence: Synthetic oligonucleotide
  Target: ATXN2; (+) strand; PAM type: NRG; PAM sequence: CGG
agctacttgggaggctgagg

SEQ ID NO: 39388 - DNA, 20 bp, Artificial Sequence
  Description of Artificial Sequence: Synthetic oligonucleotide
  Target: ATXN2; (+) strand; PAM type: NRG; PAM sequence: GGG
gctacttgggaggctgaggc

SEQ ID NO: 39389 - DNA, 20 bp, Artificial Sequence
  Description of Artificial Sequence: Synthetic oligonucleotide
  Target: ATXN2; (+) strand; PAM type: NRG; PAM sequence: GAG
tacttgggaggctgaggcgg

SEQ ID NO: 39390 - DNA, 20 bp, Artificial Sequence
  Description of Artificial Sequence: Synthetic oligonucleotide
  Target: ATXN2; (+) strand; PAM type: NRG; PAM sequence: CGG
gcgggagaattgcttgaacc

SEQ ID NO: 39391 - DNA, 20 bp, Artificial Sequence
  Description of Artificial Sequence: Synthetic oligonucleotide
  Target: ATXN2; (+) strand; PAM type: NRG; PAM sequence: GGG
cgggagaattgcttgaaccc

SEQ ID NO: 39392 - DNA, 20 bp, Artificial Sequence
  Description of Artificial Sequence: Synthetic oligonucleotide
  Target: ATXN2; (+) strand; PAM type: NRG; PAM sequence: CAG
agaattgcttgaacccggga

SEQ ID NO: 39393 - DNA, 20 bp, Artificial Sequence
  Description of Artificial Sequence: Synthetic oligonucleotide
  Target: ATXN2; (+) strand; PAM type: NRG; PAM sequence: AGG
gaattgcttgaacccgggac

SEQ ID NO: 39394 - DNA, 20 bp, Artificial Sequence
  Description of Artificial Sequence: Synthetic oligonucleotide
  Target: ATXN2; (+) strand; PAM type: NRG; PAM sequence: GGG
aattgcttgaacccgggaca

SEQ ID NO: 39395 - DNA, 20 bp, Artificial Sequence
  Description of Artificial Sequence: Synthetic oligonucleotide
  Target: ATXN2; (+) strand; PAM type: NRG; PAM sequence: GAG
ttgcttgaacccgggacagg

SEQ ID NO: 39396 - DNA, 20 bp, Artificial Sequence
  Description of Artificial Sequence: Synthetic oligonucleotide
  Target: ATXN2; (+) strand; PAM type: NRG; PAM sequence: AGG
tgcttgaacccgggacaggg

SEQ ID NO: 39397 - DNA, 20 bp, Artificial Sequence
  Description of Artificial Sequence: Synthetic oligonucleotide
  Target: ATXN2; (+) strand; PAM type: NRG; PAM sequence: GAG
cgggacagggaggttgccat

SEQ ID NO: 39398 - DNA, 20 bp, Artificial Sequence
  Description of Artificial Sequence: Synthetic oligonucleotide
  Target: ATXN2; (+) strand; PAM type: NRG; PAM sequence: CAG
gaaatcacgccactgaactc

SEQ ID NO: 39399 - DNA, 20 bp, Artificial Sequence
  Description of Artificial Sequence: Synthetic oligonucleotide
  Target: ATXN2; (+) strand; PAM type: NRG; PAM sequence: TGG
cacgccactgaactccagcc

SEQ ID NO: 39400 - DNA, 20 bp, Artificial Sequence
  Description of Artificial Sequence: Synthetic oligonucleotide
  Target: ATXN2; (+) strand; PAM type: NRG; PAM sequence: GGG
acgccactgaactccagcct

SEQ ID NO: 39401 - DNA, 20 bp, Artificial Sequence
  Description of Artificial Sequence: Synthetic oligonucleotide
  Target: ATXN2; (+) strand; PAM type: NRG; PAM sequence: CAG
ctgaactccagcctgggcaa

SEQ ID NO: 39402 - DNA, 20 bp, Artificial Sequence
  Description of Artificial Sequence: Synthetic oligonucleotide
  Target: ATXN2; (+) strand; PAM type: NRG; PAM sequence: GAG
gaactccagcctgggcaaca

SEQ ID NO: 39403 - DNA, 20 bp, Artificial Sequence
  Description of Artificial Sequence: Synthetic oligonucleotide
  Target: ATXN2; (+) strand; PAM type: NRG; PAM sequence: GAG
tccagcctgggcaacagagt

SEQ ID NO: 39404 - DNA, 20 bp, Artificial Sequence
  Description of Artificial Sequence: Synthetic oligonucleotide
  Target: ATXN2; (+) strand; PAM type: NRG; PAM sequence: CAG
aatatgcacttaccatacct

SEQ ID NO: 39405 - DNA, 20 bp, Artificial Sequence
  Description of Artificial Sequence: Synthetic oligonucleotide
  Target: ATXN2; (+) strand; PAM type: NRG; PAM sequence: TAG
tacctcagcaattccaattc

SEQ ID NO: 39406 - DNA, 20 bp, Artificial Sequence
  Description of Artificial Sequence: Synthetic oligonucleotide
  Target: ATXN2; (+) strand; PAM type: NRG; PAM sequence: AGG
acctcagcaattccaattct

SEQ ID NO: 39407 - DNA, 20 bp, Artificial Sequence
  Description of Artificial Sequence: Synthetic oligonucleotide
  Target: ATXN2; (+) strand; PAM type: NRG; PAM sequence: AAG
aattctaggtatttaactaa

SEQ ID NO: 39408 - DNA, 20 bp, Artificial Sequence
  Description of Artificial Sequence: Synthetic oligonucleotide
  Target: ATXN2; (+) strand; PAM type: NRG; PAM sequence: CAG
cacttgtacacaaatgctca

SEQ ID NO: 39409 - DNA, 20 bp, Artificial Sequence
  Description of Artificial Sequence: Synthetic oligonucleotide
  Target: ATXN2; (+) strand; PAM type: NRG; PAM sequence: CAG
ttgtacacaaatgctcacag

SEQ ID NO: 39410 - DNA, 20 bp, Artificial Sequence
  Description of Artificial Sequence: Synthetic oligonucleotide
  Target: ATXN2; (+) strand; PAM type: NRG; PAM sequence: TAG
cacagcagcttcattcataa

SEQ ID NO: 39411 - DNA, 20 bp, Artificial Sequence
  Description of Artificial Sequence: Synthetic oligonucleotide
  Target: ATXN2; (+) strand; PAM type: NRG; PAM sequence: AAG
gcttcattcataatagccaa

SEQ ID NO: 39412 - DNA, 20 bp, Artificial Sequence
  Description of Artificial Sequence: Synthetic oligonucleotide
  Target: ATXN2; (+) strand; PAM type: NRG; PAM sequence: TGG
cattcataatagccaaaagc

SEQ ID NO: 39413 - DNA, 20 bp, Artificial Sequence
  Description of Artificial Sequence: Synthetic oligonucleotide
  Target: ATXN2; (+) strand; PAM type: NRG; PAM sequence: TAG
taactcaaatgcccatcgac

SEQ ID NO: 39414 - DNA, 20 bp, Artificial Sequence
  Description of Artificial Sequence: Synthetic oligonucleotide
  Target: ATXN2; (+) strand; PAM type: NRG; PAM sequence: TGG
aaatgcccatcgactagtaa

SEQ ID NO: 39415 - DNA, 20 bp, Artificial Sequence
  Description of Artificial Sequence: Synthetic oligonucleotide
  Target: ATXN2; (+) strand; PAM type: NRG; PAM sequence: GGG
aatgcccatcgactagtaat

SEQ ID NO: 39416 - DNA, 20 bp, Artificial Sequence
  Description of Artificial Sequence: Synthetic oligonucleotide
  Target: ATXN2; (+) strand; PAM type: NRG; PAM sequence: TGG
agtaatgggtaaattaactg

SEQ ID NO: 39417 - DNA, 20 bp, Artificial Sequence
  Description of Artificial Sequence: Synthetic oligonucleotide
  Target: ATXN2; (+) strand; PAM type: NRG; PAM sequence: CAG
tcataaaatgaaatgctacc

SEQ ID NO: 39418 - DNA, 20 bp, Artificial Sequence
  Description of Artificial Sequence: Synthetic oligonucleotide
  Target: ATXN2; (+) strand; PAM type: NRG; PAM sequence: AAG
aaatgctacccagcaataaa

SEQ ID NO: 39419 - DNA, 20 bp, Artificial Sequence
  Description of Artificial Sequence: Synthetic oligonucleotide
  Target: ATXN2; (+) strand; PAM type: NRG; PAM sequence: AGG
aatgctacccagcaataaaa

SEQ ID NO: 39420 - DNA, 20 bp, Artificial Sequence
  Description of Artificial Sequence: Synthetic oligonucleotide
  Target: ATXN2; (+) strand; PAM type: NRG; PAM sequence: AAG
acccagcaataaaaaggaat

SEQ ID NO: 39421 - DNA, 20 bp, Artificial Sequence
  Description of Artificial Sequence: Synthetic oligonucleotide
  Target: ATXN2; (+) strand; PAM type: NRG; PAM sequence: TGG
agcaataaaaaggaataagc

SEQ ID NO: 39422 - DNA, 20 bp, Artificial Sequence
  Description of Artificial Sequence: Synthetic oligonucleotide
  Target: ATXN2; (+) strand; PAM type: NRG; PAM sequence: TGG
ataaaaaggaataagctggc

SEQ ID NO: 39423 - DNA, 20 bp, Artificial Sequence
  Description of Artificial Sequence: Synthetic oligonucleotide
  Target: ATXN2; (+) strand; PAM type: NRG; PAM sequence: GGG
taaaaaggaataagctggct

SEQ ID NO: 39424 - DNA, 20 bp, Artificial Sequence
  Description of Artificial Sequence: Synthetic oligonucleotide
  Target: ATXN2; (+) strand; PAM type: NRG; PAM sequence: CGG
aggaataagctggctgggca

SEQ ID NO: 39425 - DNA, 20 bp, Artificial Sequence
  Description of Artificial Sequence: Synthetic oligonucleotide
  Target: ATXN2; (+) strand; PAM type: NRG; PAM sequence: CAG
gtgactcacacctgtaatcc

SEQ ID NO: 39426 - DNA, 20 bp, Artificial Sequence
  Description of Artificial Sequence: Synthetic oligonucleotide
  Target: ATXN2; (+) strand; PAM type: NRG; PAM sequence: TGG
cacctgtaatcccagcactt

SEQ ID NO: 39427 - DNA, 20 bp, Artificial Sequence
  Description of Artificial Sequence: Synthetic oligonucleotide
  Target: ATXN2; (+) strand; PAM type: NRG; PAM sequence: GGG
acctgtaatcccagcacttt

SEQ ID NO: 39428 - DNA, 20 bp, Artificial Sequence
  Description of Artificial Sequence: Synthetic oligonucleotide
  Target: ATXN2; (+) strand; PAM type: NRG; PAM sequence: GAG
ctgtaatcccagcactttgg

SEQ ID NO: 39429 - DNA, 20 bp, Artificial Sequence
  Description of Artificial Sequence: Synthetic oligonucleotide
  Target: ATXN2; (+) strand; PAM type: NRG; PAM sequence: AGG
tgtaatcccagcactttggg

SEQ ID NO: 39430 - DNA, 20 bp, Artificial Sequence
  Description of Artificial Sequence: Synthetic oligonucleotide
  Target: ATXN2; (+) strand; PAM type: NRG; PAM sequence: AAG
tcccagcactttgggaggcc

SEQ ID NO: 39431 - DNA, 20 bp, Artificial Sequence
  Description of Artificial Sequence: Synthetic oligonucleotide
  Target: ATXN2; (+) strand; PAM type: NRG; PAM sequence: AGG
cccagcactttgggaggcca

SEQ ID NO: 39432 - DNA, 20 bp, Artificial Sequence
  Description of Artificial Sequence: Synthetic oligonucleotide
  Target: ATXN2; (+) strand; PAM type: NRG; PAM sequence: CAG
agcactttgggaggccaagg

SEQ ID NO: 39433 - DNA, 20 bp, Artificial Sequence
  Description of Artificial Sequence: Synthetic oligonucleotide
  Target: ATXN2; (+) strand; PAM type: NRG; PAM sequence: AGG
gcactttgggaggccaaggc

SEQ ID NO: 39434 - DNA, 20 bp, Artificial Sequence
  Description of Artificial Sequence: Synthetic oligonucleotide
  Target: ATXN2; (+) strand; PAM type: NRG; PAM sequence: TGG
ctttgggaggccaaggcagg

SEQ ID NO: 39435 - DNA, 20 bp, Artificial Sequence
  Description of Artificial Sequence: Synthetic oligonucleotide
  Target: ATXN2; (+) strand; PAM type: NRG; PAM sequence: TGG
gccaaggcaggtggatcatt

SEQ ID NO: 39436 - DNA, 20 bp, Artificial Sequence
  Description of Artificial Sequence: Synthetic oligonucleotide
  Target: ATXN2; (+) strand; PAM type: NRG; PAM sequence: GGG
ccaaggcaggtggatcattt

SEQ ID NO: 39437 - DNA, 20 bp, Artificial Sequence
  Description of Artificial Sequence: Synthetic oligonucleotide
  Target: ATXN2; (+) strand; PAM type: NRG; PAM sequence: GGG
caaggcaggtggatcatttg

SEQ ID NO: 39438 - DNA, 20 bp, Artificial Sequence
  Description of Artificial Sequence: Synthetic oligonucleotide
  Target: ATXN2; (+) strand; PAM type: NRG; PAM sequence: CAG
gcaggtggatcatttggggt

SEQ ID NO: 39439 - DNA, 20 bp, Artificial Sequence
  Description of Artificial Sequence: Synthetic oligonucleotide
  Target: ATXN2; (+) strand; PAM type: NRG; PAM sequence: AGG
caggtggatcatttggggtc

SEQ ID NO: 39440 - DNA, 20 bp, Artificial Sequence
  Description of Artificial Sequence: Synthetic oligonucleotide
  Target: ATXN2; (+) strand; PAM type: NRG; PAM sequence: GAG
ggtggatcatttggggtcag

SEQ ID NO: 39441 - DNA, 20 bp, Artificial Sequence
  Description of Artificial Sequence: Synthetic oligonucleotide
  Target: ATXN2; (+) strand; PAM type: NRG; PAM sequence: GAG
tcatttggggtcaggagttt

SEQ ID NO: 39442 - DNA, 20 bp, Artificial Sequence
  Description of Artificial Sequence: Synthetic oligonucleotide
  Target: ATXN2; (+) strand; PAM type: NRG; PAM sequence: CAG
tggggtcaggagtttgagac

SEQ ID NO: 39443 - DNA, 20 bp, Artificial Sequence
  Description of Artificial Sequence: Synthetic oligonucleotide
  Target: ATXN2; (+) strand; PAM type: NRG; PAM sequence: TGG
tcaggagtttgagaccagcc

SEQ ID NO: 39444 - DNA, 20 bp, Artificial Sequence
  Description of Artificial Sequence: Synthetic oligonucleotide
  Target: ATXN2; (+) strand; PAM type: NRG; PAM sequence: TGG
tgagaccagcctggccaaca

SEQ ID NO: 39445 - DNA, 20 bp, Artificial Sequence
  Description of Artificial Sequence: Synthetic oligonucleotide
  Target: ATXN2; (+) strand; PAM type: NRG; PAM sequence: AAG
aaaaaaaaaaaaaaaaaaaa

SEQ ID NO: 39446 - DNA, 20 bp, Artificial Sequence
  Description of Artificial Sequence: Synthetic oligonucleotide
  Target: ATXN2; (+) strand; PAM type: NRG; PAM sequence: GAG
aaaaaaaaaaaaaaaaaaaa

SEQ ID NO: 39447 - DNA, 20 bp, Artificial Sequence
  Description of Artificial Sequence: Synthetic oligonucleotide
  Target: ATXN2; (+) strand; PAM type: NRG; PAM sequence: GAG
aaaaaaaaaaaaaaaaaaga

SEQ ID NO: 39448 - DNA, 20 bp, Artificial Sequence
  Description of Artificial Sequence: Synthetic oligonucleotide
  Target: ATXN2; (+) strand; PAM type: NRG; PAM sequence: GAG
aaaaaaaaaaaaaaaagaga

SEQ ID NO: 39449 - DNA, 20 bp, Artificial Sequence
  Description of Artificial Sequence: Synthetic oligonucleotide
  Target: ATXN2; (+) strand; PAM type: NRG; PAM sequence: GAG
aaaaaaaaaaaaaagagaga

SEQ ID NO: 39450 - DNA, 20 bp, Artificial Sequence
  Description of Artificial Sequence: Synthetic oligonucleotide
  Target: ATXN2; (+) strand; PAM type: NRG; PAM sequence: TAG
aaagagagagagacaaaaat

SEQ ID NO: 39451 - DNA, 20 bp, Artificial Sequence
  Description of Artificial Sequence: Synthetic oligonucleotide
  Target: ATXN2; (+) strand; PAM type: NRG; PAM sequence: CAG
agagagagacaaaaattagc

SEQ ID NO: 39452 - DNA, 20 bp, Artificial Sequence
  Description of Artificial Sequence: Synthetic oligonucleotide
  Target: ATXN2; (+) strand; PAM type: NRG; PAM sequence: AGG
gagagagacaaaaattagcc

SEQ ID NO: 39453 - DNA, 20 bp, Artificial Sequence
  Description of Artificial Sequence: Synthetic oligonucleotide
  Target: ATXN2; (+) strand; PAM type: NRG; PAM sequence: TGG
agacaaaaattagccaggtg

SEQ ID NO: 39454 - DNA, 20 bp, Artificial Sequence
  Description of Artificial Sequence: Synthetic oligonucleotide
  Target: ATXN2; (+) strand; PAM type: NRG; PAM sequence: TGG
caaaaattagccaggtgtgg

SEQ ID NO: 39455 - DNA, 20 bp, Artificial Sequence
  Description of Artificial Sequence: Synthetic oligonucleotide
  Target: ATXN2; (+) strand; PAM type: NRG; PAM sequence: CAG
gtggcacgtgcctgtaatcc

SEQ ID NO: 39456 - DNA, 20 bp, Artificial Sequence
  Description of Artificial Sequence: Synthetic oligonucleotide
  Target: ATXN2; (+) strand; PAM type: NRG; PAM sequence: TGG
tgcctgtaatcccagctact

SEQ ID NO: 39457 - DNA, 20 bp, Artificial Sequence
  Description of Artificial Sequence: Synthetic oligonucleotide
  Target: ATXN2; (+) strand; PAM type: NRG; PAM sequence: GGG
gcctgtaatcccagctactt

SEQ ID NO: 39458 - DNA, 20 bp, Artificial Sequence
  Description of Artificial Sequence: Synthetic oligonucleotide
  Target: ATXN2; (+) strand; PAM type: NRG; PAM sequence: GAG
ctgtaatcccagctacttgg

SEQ ID NO: 39459 - DNA, 20 bp, Artificial Sequence
  Description of Artificial Sequence: Synthetic oligonucleotide
  Target: ATXN2; (+) strand; PAM type: NRG; PAM sequence: AGG
tgtaatcccagctacttggg

SEQ ID NO: 39460 - DNA, 20 bp, Artificial Sequence
  Description of Artificial Sequence: Synthetic oligonucleotide
  Target: ATXN2; (+) strand; PAM type: NRG; PAM sequence: GAG
tcccagctacttgggaggct

SEQ ID NO: 39461 - DNA, 20 bp, Artificial Sequence
  Description of Artificial Sequence: Synthetic oligonucleotide
  Target: ATXN2; (+) strand; PAM type: NRG; PAM sequence: AGG
cccagctacttgggaggctg

SEQ ID NO: 39462 - DNA, 20 bp, Artificial Sequence
  Description of Artificial Sequence: Synthetic oligonucleotide
  Target: ATXN2; (+) strand; PAM type: NRG; PAM sequence: CAG
agctacttgggaggctgagg

SEQ ID NO: 39463 - DNA, 20 bp, Artificial Sequence
  Description of Artificial Sequence: Synthetic oligonucleotide
  Target: ATXN2; (+) strand; PAM type: NRG; PAM sequence: TGG
tacttgggaggctgaggcag

SEQ ID NO: 39464 - DNA, 20 bp, Artificial Sequence
  Description of Artificial Sequence: Synthetic oligonucleotide
  Target: ATXN2; (+) strand; PAM type: NRG; PAM sequence: CAG
aggctgaggcagtggaattg

SEQ ID NO: 39465 - DNA, 20 bp, Artificial Sequence
  Description of Artificial Sequence: Synthetic oligonucleotide
  Target: ATXN2; (+) strand; PAM type: NRG; PAM sequence: TGG
gtggaattgcagaccaattc

SEQ ID NO: 39466 - DNA, 20 bp, Artificial Sequence
  Description of Artificial Sequence: Synthetic oligonucleotide
  Target: ATXN2; (+) strand; PAM type: NRG; PAM sequence: GGG
tggaattgcagaccaattct

SEQ ID NO: 39467 - DNA, 20 bp, Artificial Sequence
  Description of Artificial Sequence: Synthetic oligonucleotide
  Target: ATXN2; (+) strand; PAM type: NRG; PAM sequence: CAG
tgcagaccaattctgggaca

SEQ ID NO: 39468 - DNA, 20 bp, Artificial Sequence
  Description of Artificial Sequence: Synthetic oligonucleotide
  Target: ATXN2; (+) strand; PAM type: NRG; PAM sequence: AAG
ccaattctgggacacagaac

SEQ ID NO: 39469 - DNA, 20 bp, Artificial Sequence
  Description of Artificial Sequence: Synthetic oligonucleotide
  Target: ATXN2; (+) strand; PAM type: NRG; PAM sequence: AAG
aaaacaaacaaacaaacaaa

SEQ ID NO: 39470 - DNA, 20 bp, Artificial Sequence
  Description of Artificial Sequence: Synthetic oligonucleotide
  Target: ATXN2; (+) strand; PAM type: NRG; PAM sequence: AGG
aaacaaacaaacaaacaaaa

SEQ ID NO: 39471 - DNA, 20 bp, Artificial Sequence
  Description of Artificial Sequence: Synthetic oligonucleotide
  Target: ATXN2; (+) strand; PAM type: NRG; PAM sequence: AAG
acaaacaaacaaaaaggaat

SEQ ID NO: 39472 - DNA, 20 bp, Artificial Sequence
  Description of Artificial Sequence: Synthetic oligonucleotide
  Target: ATXN2; (+) strand; PAM type: NRG; PAM sequence: TAG
attcaaattactacactgtt

SEQ ID NO: 39473 - DNA, 20 bp, Artificial Sequence
  Description of Artificial Sequence: Synthetic oligonucleotide
  Target: ATXN2; (+) strand; PAM type: NRG; PAM sequence: AGG
ttcaaattactacactgttt

SEQ ID NO: 39474 - DNA, 20 bp, Artificial Sequence
  Description of Artificial Sequence: Synthetic oligonucleotide
  Target: ATXN2; (+) strand; PAM type: NRG; PAM sequence: AAG
cacatatgaaattatatacc

SEQ ID NO: 39475 - DNA, 20 bp, Artificial Sequence
  Description of Artificial Sequence: Synthetic oligonucleotide
  Target: ATXN2; (+) strand; PAM type: NRG; PAM sequence: TGG
agcttgtccaacttgcgtcc

SEQ ID NO: 39476 - DNA, 20 bp, Artificial Sequence
  Description of Artificial Sequence: Synthetic oligonucleotide
  Target: ATXN2; (+) strand; PAM type: NRG; PAM sequence: GGG
gcttgtccaacttgcgtcct

SEQ ID NO: 39477 - DNA, 20 bp, Artificial Sequence
  Description of Artificial Sequence: Synthetic oligonucleotide
  Target: ATXN2; (+) strand; PAM type: NRG; PAM sequence: CGG
gtccaacttgcgtcctggga

SEQ ID NO: 39478 - DNA, 20 bp, Artificial Sequence
  Description of Artificial Sequence: Synthetic oligonucleotide
  Target: ATXN2; (+) strand; PAM type: NRG; PAM sequence: TGG
tcctgggacggctttgaatg

SEQ ID NO: 39479 - DNA, 20 bp, Artificial Sequence
  Description of Artificial Sequence: Synthetic oligonucleotide
  Target: ATXN2; (+) strand; PAM type: NRG; PAM sequence: AAG
aaactttcttaaaacattat

SEQ ID NO: 39480 - DNA, 20 bp, Artificial Sequence
  Description of Artificial Sequence: Synthetic oligonucleotide
  Target: ATXN2; (+) strand; PAM type: NRG; PAM sequence: CAG
tttttttttgttttgttcat

SEQ ID NO: 39481 - DNA, 20 bp, Artificial Sequence
  Description of Artificial Sequence: Synthetic oligonucleotide
  Target: ATXN2; (+) strand; PAM type: NRG; PAM sequence: TAG
ttttgttcatcagctatcat

SEQ ID NO: 39482 - DNA, 20 bp, Artificial Sequence
  Description of Artificial Sequence: Synthetic oligonucleotide
  Target: ATXN2; (+) strand; PAM type: NRG; PAM sequence: TGG
gtgttactgtattttatgtg

SEQ ID NO: 39483 - DNA, 20 bp, Artificial Sequence
  Description of Artificial Sequence: Synthetic oligonucleotide
  Target: ATXN2; (+) strand; PAM type: NRG; PAM sequence: CAG
attcttcttccaatatgacc

SEQ ID NO: 39484 - DNA, 20 bp, Artificial Sequence
  Description of Artificial Sequence: Synthetic oligonucleotide
  Target: ATXN2; (+) strand; PAM type: NRG; PAM sequence: AGG
ttcttcttccaatatgaccc

SEQ ID NO: 39485 - DNA, 20 bp, Artificial Sequence
  Description of Artificial Sequence: Synthetic oligonucleotide
  Target: ATXN2; (+) strand; PAM type: NRG; PAM sequence: GGG
tcttcttccaatatgaccca

SEQ ID NO: 39486 - DNA, 20 bp, Artificial Sequence
  Description of Artificial Sequence: Synthetic oligonucleotide
  Target: ATXN2; (+) strand; PAM type: NRG; PAM sequence: AAG
tcttccaatatgacccaggg

SEQ ID NO: 39487 - DNA, 20 bp, Artificial Sequence
  Description of Artificial Sequence: Synthetic oligonucleotide
  Target: ATXN2; (+) strand; PAM type: NRG; PAM sequence: AAG
atatgacccagggaagccaa

SEQ ID NO: 39488 - DNA, 20 bp, Artificial Sequence
  Description of Artificial Sequence: Synthetic oligonucleotide
  Target: ATXN2; (+) strand; PAM type: NRG; PAM sequence: TAG
ttaaaaaaaaaaaaaaaatc

SEQ ID NO: 39489 - DNA, 20 bp, Artificial Sequence
  Description of Artificial Sequence: Synthetic oligonucleotide
  Target: ATXN2; (+) strand; PAM type: NRG; PAM sequence: AGG
taaaaaaaaaaaaaaaatct

SEQ ID NO: 39490 - DNA, 20 bp, Artificial Sequence
  Description of Artificial Sequence: Synthetic oligonucleotide
  Target: ATXN2; (+) strand; PAM type: NRG; PAM sequence: GGG
aaaaaaaaaaaaaaaatcta

SEQ ID NO: 39491 - DNA, 20 bp, Artificial Sequence
  Description of Artificial Sequence: Synthetic oligonucleotide
  Target: ATXN2; (+) strand; PAM type: NRG; PAM sequence: GGG
aaaaaaaaaaaaaaatctag

SEQ ID NO: 39492 - DNA, 20 bp, Artificial Sequence
  Description of Artificial Sequence: Synthetic oligonucleotide
  Target: ATXN2; (+) strand; PAM type: NRG; PAM sequence: TGG
aaaaaaaaaaatctaggggc

SEQ ID NO: 39493 - DNA, 20 bp, Artificial Sequence
  Description of Artificial Sequence: Synthetic oligonucleotide
  Target: ATXN2; (+) strand; PAM type: NRG; PAM sequence: GAG
aaaaaatctaggggctggct

SEQ ID NO: 39494 - DNA, 20 bp, Artificial Sequence
  Description of Artificial Sequence: Synthetic oligonucleotide
  Target: ATXN2; (+) strand; PAM type: NRG; PAM sequence: AGG
aaaaatctaggggctggctg

SEQ ID NO: 39495 - DNA, 20 bp, Artificial Sequence
  Description of Artificial Sequence: Synthetic oligonucleotide
  Target: ATXN2; (+) strand; PAM type: NRG; PAM sequence: TGG
aatctaggggctggctgagg

SEQ ID NO: 39496 - DNA, 20 bp, Artificial Sequence
  Description of Artificial Sequence: Synthetic oligonucleotide
  Target: ATXN2; (+) strand; PAM type: NRG; PAM sequence: TAG
gtggctcacatctgtaatcc

SEQ ID NO: 39497 - DNA, 20 bp, Artificial Sequence
  Description of Artificial Sequence: Synthetic oligonucleotide
  Target: ATXN2; (+) strand; PAM type: NRG; PAM sequence: TGG
catctgtaatcctagcactc

SEQ ID NO: 39498 - DNA, 20 bp, Artificial Sequence
  Description of Artificial Sequence: Synthetic oligonucleotide
  Target: ATXN2; (+) strand; PAM type: NRG; PAM sequence: GGG
atctgtaatcctagcactct

SEQ ID NO: 39499 - DNA, 20 bp, Artificial Sequence
  Description of Artificial Sequence: Synthetic oligonucleotide
  Target: ATXN2; (+) strand; PAM type: NRG; PAM sequence: GAG
ctgtaatcctagcactctgg

SEQ ID NO: 39500 - DNA, 20 bp, Artificial Sequence
  Description of Artificial Sequence: Synthetic oligonucleotide
  Target: ATXN2; (+) strand; PAM type: NRG; PAM sequence: AGG
tgtaatcctagcactctggg

SEQ ID NO: 39501 - DNA, 20 bp, Artificial Sequence
  Description of Artificial Sequence: Synthetic oligonucleotide
  Target: ATXN2; (+) strand; PAM type: NRG; PAM sequence: GAG
tcctagcactctgggaggct

SEQ ID NO: 39502 - DNA, 20 bp, Artificial Sequence
  Description of Artificial Sequence: Synthetic oligonucleotide
  Target: ATXN2; (+) strand; PAM type: NRG; PAM sequence: AGG
cctagcactctgggaggctg

SEQ ID NO: 39503 - DNA, 20 bp, Artificial Sequence
  Description of Artificial Sequence: Synthetic oligonucleotide
  Target: ATXN2; (+) strand; PAM type: NRG; PAM sequence: GAG
gcactctgggaggctgaggt

SEQ ID NO: 39504 - DNA, 20 bp, Artificial Sequence
  Description of Artificial Sequence: Synthetic oligonucleotide
  Target: ATXN2; (+) strand; PAM type: NRG; PAM sequence: AAG
tgggaggctgaggtgagctc

SEQ ID NO: 39505 - DNA, 20 bp, Artificial Sequence
  Description of Artificial Sequence: Synthetic oligonucleotide
  Target: ATXN2; (+) strand; PAM type: NRG; PAM sequence: GAG
ggaggctgaggtgagctcaa

SEQ ID NO: 39506 - DNA, 20 bp, Artificial Sequence
  Description of Artificial Sequence: Synthetic oligonucleotide
  Target: ATXN2; (+) strand; PAM type: NRG; PAM sequence: GAG
tgaggtgagctcaagagttc

SEQ ID NO: 39507 - DNA, 20 bp, Artificial Sequence
  Description of Artificial Sequence: Synthetic oligonucleotide
  Target: ATXN2; (+) strand; PAM type: NRG; PAM sequence: TGG
tcaagagttcgagaccaacc

SEQ ID NO: 39508 - DNA, 20 bp, Artificial Sequence
  Description of Artificial Sequence: Synthetic oligonucleotide
  Target: ATXN2; (+) strand; PAM type: NRG; PAM sequence: GGG
caagagttcgagaccaacct

SEQ ID NO: 39509 - DNA, 20 bp, Artificial Sequence
  Description of Artificial Sequence: Synthetic oligonucleotide
  Target: ATXN2; (+) strand; PAM type: NRG; PAM sequence: GAG
accaacctgggcaatataat

SEQ ID NO: 39510 - DNA, 20 bp, Artificial Sequence
  Description of Artificial Sequence: Synthetic oligonucleotide
  Target: ATXN2; (+) strand; PAM type: NRG; PAM sequence: AAG
taatgagacgtctccaaaaa

SEQ ID NO: 39511 - DNA, 20 bp, Artificial Sequence
  Description of Artificial Sequence: Synthetic oligonucleotide
  Target: ATXN2; (+) strand; PAM type: NRG; PAM sequence: AAG
aagatttttttacgtaaaaa

SEQ ID NO: 39512 - DNA, 20 bp, Artificial Sequence
  Description of Artificial Sequence: Synthetic oligonucleotide
  Target: ATXN2; (+) strand; PAM type: NRG; PAM sequence: AAG
aacctaatcaaaaaaaaaaa

SEQ ID NO: 39513 - DNA, 20 bp, Artificial Sequence
  Description of Artificial Sequence: Synthetic oligonucleotide
  Target: ATXN2; (+) strand; PAM type: NRG; PAM sequence: AAG
atcaaaaaaaaaaaaagaaa

SEQ ID NO: 39514 - DNA, 20 bp, Artificial Sequence
  Description of Artificial Sequence: Synthetic oligonucleotide
  Target: ATXN2; (+) strand; PAM type: NRG; PAM sequence: AAG
aaaaaagaaaaagaaatcta

SEQ ID NO: 39515 - DNA, 20 bp, Artificial Sequence
  Description of Artificial Sequence: Synthetic oligonucleotide
  Target: ATXN2; (+) strand; PAM type: NRG; PAM sequence: GAG
aaaagaaaaagaaatctaaa

SEQ ID NO: 39516 - DNA, 20 bp, Artificial Sequence
  Description of Artificial Sequence: Synthetic oligonucleotide
  Target: ATXN2; (+) strand; PAM type: NRG; PAM sequence: AGG
aaagaaaaagaaatctaaag

SEQ ID NO: 39517 - DNA, 20 bp, Artificial Sequence
  Description of Artificial Sequence: Synthetic oligonucleotide
  Target: ATXN2; (+) strand; PAM type: NRG; PAM sequence: TAG
aagaggataaatctaatcta

SEQ ID NO: 39518 - DNA, 20 bp, Artificial Sequence
  Description of Artificial Sequence: Synthetic oligonucleotide
  Target: ATXN2; (+) strand; PAM type: NRG; PAM sequence: AAG
ataaatctaatctatagtaa

SEQ ID NO: 39519 - DNA, 20 bp, Artificial Sequence
  Description of Artificial Sequence: Synthetic oligonucleotide
  Target: ATXN2; (+) strand; PAM type: NRG; PAM sequence: AAG
aatctaatctatagtaaaag

SEQ ID NO: 39520 - DNA, 20 bp, Artificial Sequence
  Description of Artificial Sequence: Synthetic oligonucleotide
  Target: ATXN2; (+) strand; PAM type: NRG; PAM sequence: AGG
atctaatctatagtaaaaga

SEQ ID NO: 39521 - DNA, 20 bp, Artificial Sequence
  Description of Artificial Sequence: Synthetic oligonucleotide
  Target: ATXN2; (+) strand; PAM type: NRG; PAM sequence: CAG
taatctatagtaaaagaagg

SEQ ID NO: 39522 - DNA, 20 bp, Artificial Sequence
  Description of Artificial Sequence: Synthetic oligonucleotide
  Target: ATXN2; (+) strand; PAM type: NRG; PAM sequence: TGG
agtaaaagaaggcagattac

SEQ ID NO: 39523 - DNA, 20 bp, Artificial Sequence
  Description of Artificial Sequence: Synthetic oligonucleotide
  Target: ATXN2; (+) strand; PAM type: NRG; PAM sequence: TGG
aaggcagattactggttaac

SEQ ID NO: 39524 - DNA, 20 bp, Artificial Sequence
  Description of Artificial Sequence: Synthetic oligonucleotide
  Target: ATXN2; (+) strand; PAM type: NRG; PAM sequence: GAG
ggcagattactggttaactg

SEQ ID NO: 39525 - DNA, 20 bp, Artificial Sequence
  Description of Artificial Sequence: Synthetic oligonucleotide
  Target: ATXN2; (+) strand; PAM type: NRG; PAM sequence: TAG
gattactggttaactggagc

SEQ ID NO: 39526 - DNA, 20 bp, Artificial Sequence
  Description of Artificial Sequence: Synthetic oligonucleotide
  Target: ATXN2; (+) strand; PAM type: NRG; PAM sequence: TGG
tactggttaactggagctag

SEQ ID NO: 39527 - DNA, 20 bp, Artificial Sequence
  Description of Artificial Sequence: Synthetic oligonucleotide
  Target: ATXN2; (+) strand; PAM type: NRG; PAM sequence: AAG
aactggagctagtggtaata

SEQ ID NO: 39528 - DNA, 20 bp, Artificial Sequence
  Description of Artificial Sequence: Synthetic oligonucleotide
  Target: ATXN2; (+) strand; PAM type: NRG; PAM sequence: CAG
gagctagtggtaataaagta

SEQ ID NO: 39529 - DNA, 20 bp, Artificial Sequence
  Description of Artificial Sequence: Synthetic oligonucleotide
  Target: ATXN2; (+) strand; PAM type: NRG; PAM sequence: TGG
tagtggtaataaagtacagt

SEQ ID NO: 39530 - DNA, 20 bp, Artificial Sequence
  Description of Artificial Sequence: Synthetic oligonucleotide
  Target: ATXN2; (+) strand; PAM type: NRG; PAM sequence: CAG
ggtaataaagtacagttgga

SEQ ID NO: 39531 - DNA, 20 bp, Artificial Sequence
  Description of Artificial Sequence: Synthetic oligonucleotide
  Target: ATXN2; (+) strand; PAM type: NRG; PAM sequence: GAG
taataaagtacagttggaca

SEQ ID NO: 39532 - DNA, 20 bp, Artificial Sequence
  Description of Artificial Sequence: Synthetic oligonucleotide
  Target: ATXN2; (+) strand; PAM type: NRG; PAM sequence: AAG
taaagtacagttggacagag

SEQ ID NO: 39533 - DNA, 20 bp, Artificial Sequence
  Description of Artificial Sequence: Synthetic oligonucleotide
  Target: ATXN2; (+) strand; PAM type: NRG; PAM sequence: GAG
aagtacagttggacagagaa

SEQ ID NO: 39534 - DNA, 20 bp, Artificial Sequence
  Description of Artificial Sequence: Synthetic oligonucleotide
  Target: ATXN2; (+) strand; PAM type: NRG; PAM sequence: AGG
agtacagttggacagagaag

SEQ ID NO: 39535 - DNA, 20 bp, Artificial Sequence
  Description of Artificial Sequence: Synthetic oligonucleotide
  Target: ATXN2; (+) strand; PAM type: NRG; PAM sequence: CAG
agttggacagagaagaggaa

SEQ ID NO: 39536 - DNA, 20 bp, Artificial Sequence
  Description of Artificial Sequence: Synthetic oligonucleotide
  Target: ATXN2; (+) strand; PAM type: NRG; PAM sequence: AGG
gttggacagagaagaggaac

SEQ ID NO: 39537 - DNA, 20 bp, Artificial Sequence
  Description of Artificial Sequence: Synthetic oligonucleotide
  Target: ATXN2; (+) strand; PAM type: NRG; PAM sequence: AAG
gttttccatcttcactgatg

SEQ ID NO: 39538 - DNA, 20 bp, Artificial Sequence
  Description of Artificial Sequence: Synthetic oligonucleotide
  Target: ATXN2; (+) strand; PAM type: NRG; PAM sequence: AAG
tccatcttcactgatgaagc

SEQ ID NO: 39539 - DNA, 20 bp, Artificial Sequence
  Description of Artificial Sequence: Synthetic oligonucleotide
  Target: ATXN2; (+) strand; PAM type: NRG; PAM sequence: TAG
atcttcactgatgaagcaag

SEQ ID NO: 39540 - DNA, 20 bp, Artificial Sequence
  Description of Artificial Sequence: Synthetic oligonucleotide
  Target: ATXN2; (+) strand; PAM type: NRG; PAM sequence: GAG
gatgaagcaagtagttacat

SEQ ID NO: 39541 - DNA, 20 bp, Artificial Sequence
  Description of Artificial Sequence: Synthetic oligonucleotide
  Target: ATXN2; (+) strand; PAM type: NRG; PAM sequence: AAG
cattaaaatgtaaacataaa

SEQ ID NO: 39542 - DNA, 20 bp, Artificial Sequence
  Description of Artificial Sequence: Synthetic oligonucleotide
  Target: ATXN2; (+) strand; PAM type: NRG; PAM sequence: GAG
aaatgtaaacataaaaagat

SEQ ID NO: 39543 - DNA, 20 bp, Artificial Sequence
  Description of Artificial Sequence: Synthetic oligonucleotide
  Target: ATXN2; (+) strand; PAM type: NRG; PAM sequence: CAG
attttcttgtatgtaaatta

SEQ ID NO: 39544 - DNA, 20 bp, Artificial Sequence
  Description of Artificial Sequence: Synthetic oligonucleotide
  Target: ATXN2; (+) strand; PAM type: NRG; PAM sequence: TGG
aaattacagactaataaaac

SEQ ID NO: 39545 - DNA, 20 bp, Artificial Sequence
  Description of Artificial Sequence: Synthetic oligonucleotide
  Target: ATXN2; (+) strand; PAM type: NRG; PAM sequence: TGG
taaaactggttaaaacattt

SEQ ID NO: 39546 - DNA, 20 bp, Artificial Sequence
  Description of Artificial Sequence: Synthetic oligonucleotide
  Target: ATXN2; (+) strand; PAM type: NRG; PAM sequence: TAG
actggttaaaacattttgga

SEQ ID NO: 39547 - DNA, 20 bp, Artificial Sequence
  Description of Artificial Sequence: Synthetic oligonucleotide
  Target: ATXN2; (+) strand; PAM type: NRG; PAM sequence: TAG
aaacattttggatagtcatt

SEQ ID NO: 39548 - DNA, 20 bp, Artificial Sequence
  Description of Artificial Sequence: Synthetic oligonucleotide
  Target: ATXN2; (+) strand; PAM type: NRG; PAM sequence: AAG
tttggatagtcatttagaac

SEQ ID NO: 39549 - DNA, 20 bp, Artificial Sequence
  Description of Artificial Sequence: Synthetic oligonucleotide
  Target: ATXN2; (+) strand; PAM type: NRG; PAM sequence: TGG
tcatttagaacaagataaat

SEQ ID NO: 39550 - DNA, 20 bp, Artificial Sequence
  Description of Artificial Sequence: Synthetic oligonucleotide
  Target: ATXN2; (+) strand; PAM type: NRG; PAM sequence: AAG
ggattcacattttatacttt

SEQ ID NO: 39551 - DNA, 20 bp, Artificial Sequence
  Description of Artificial Sequence: Synthetic oligonucleotide
  Target: ATXN2; (+) strand; PAM type: NRG; PAM sequence: TAG
tttaagataaattctaaaat

SEQ ID NO: 39552 - DNA, 20 bp, Artificial Sequence
  Description of Artificial Sequence: Synthetic oligonucleotide
  Target: ATXN2; (+) strand; PAM type: NRG; PAM sequence: CAG
agataaattctaaaattagc

SEQ ID NO: 39553 - DNA, 20 bp, Artificial Sequence
  Description of Artificial Sequence: Synthetic oligonucleotide
  Target: ATXN2; (+) strand; PAM type: NRG; PAM sequence: AGG
gataaattctaaaattagcc

SEQ ID NO: 39554 - DNA, 20 bp, Artificial Sequence
  Description of Artificial Sequence: Synthetic oligonucleotide
  Target: ATXN2; (+) strand; PAM type: NRG; PAM sequence: TGG
ctaaaattagccaggcataa

SEQ ID NO: 39555 - DNA, 20 bp, Artificial Sequence
  Description of Artificial Sequence: Synthetic oligonucleotide
  Target: ATXN2; (+) strand; PAM type: NRG; PAM sequence: CAG
attagccaggcataatggta

SEQ ID NO: 39556 - DNA, 20 bp, Artificial Sequence
  Description of Artificial Sequence: Synthetic oligonucleotide
  Target: ATXN2; (+) strand; PAM type: NRG; PAM sequence: AGG
ttagccaggcataatggtac

SEQ ID NO: 39557 - DNA, 20 bp, Artificial Sequence
  Description of Artificial Sequence: Synthetic oligonucleotide
  Target: ATXN2; (+) strand; PAM type: NRG; PAM sequence: TGG
ccaggcataatggtacaggc

SEQ ID NO: 39558 - DNA, 20 bp, Artificial Sequence
  Description of Artificial Sequence: Synthetic oligonucleotide
  Target: ATXN2; (+) strand; PAM type: NRG; PAM sequence: GAG
caggctggtctcaaactcct

SEQ ID NO: 39559 - DNA, 20 bp, Artificial Sequence
  Description of Artificial Sequence: Synthetic oligonucleotide
  Target: ATXN2; (+) strand; PAM type: NRG; PAM sequence: AAG
ggtctcaaactcctgagctc

SEQ ID NO: 39560 - DNA, 20 bp, Artificial Sequence
  Description of Artificial Sequence: Synthetic oligonucleotide
  Target: ATXN2; (+) strand; PAM type: NRG; PAM sequence: CAG
ctcaagtgatcctcccacct

SEQ ID NO: 39561 - DNA, 20 bp, Artificial Sequence
  Description of Artificial Sequence: Synthetic oligonucleotide
  Target: ATXN2; (+) strand; PAM type: NRG; PAM sequence: CAG
atcctcccacctcagcctct

SEQ ID NO: 39562 - DNA, 20 bp, Artificial Sequence
  Description of Artificial Sequence: Synthetic oligonucleotide
  Target: ATXN2; (+) strand; PAM type: NRG; PAM sequence: CAG
acctcagcctctcagcctcc

SEQ ID NO: 39563 - DNA, 20 bp, Artificial Sequence
  Description of Artificial Sequence: Synthetic oligonucleotide
  Target: ATXN2; (+) strand; PAM type: NRG; PAM sequence: AGG
cctcagcctctcagcctccc

SEQ ID NO: 39564 - DNA, 20 bp, Artificial Sequence
  Description of Artificial Sequence: Synthetic oligonucleotide
  Target: ATXN2; (+) strand; PAM type: NRG; PAM sequence: GGG
ctcagcctctcagcctccca

SEQ ID NO: 39565 - DNA, 20 bp, Artificial Sequence
  Description of Artificial Sequence: Synthetic oligonucleotide
  Target: ATXN2; (+) strand; PAM type: NRG; PAM sequence: CAG
ctctcagcctcccagggtgc

SEQ ID NO: 39566 - DNA, 20 bp, Artificial Sequence
  Description of Artificial Sequence: Synthetic oligonucleotide
  Target: ATXN2; (+) strand; PAM type: NRG; PAM sequence: AGG
tctcagcctcccagggtgcc

SEQ ID NO: 39567 - DNA, 20 bp, Artificial Sequence
  Description of Artificial Sequence: Synthetic oligonucleotide
  Target: ATXN2; (+) strand; PAM type: NRG; PAM sequence: GAG
tcagcctcccagggtgccag

SEQ ID NO: 39568 - DNA, 20 bp, Artificial Sequence
  Description of Artificial Sequence: Synthetic oligonucleotide
  Target: ATXN2; (+) strand; PAM type: NRG; PAM sequence: CAG
cctcccagggtgccaggaga

SEQ ID NO: 39569 - DNA, 20 bp, Artificial Sequence
  Description of Artificial Sequence: Synthetic oligonucleotide
  Target: ATXN2; (+) strand; PAM type: NRG; PAM sequence: AGG
ctcccagggtgccaggagac

SEQ ID NO: 39570 - DNA, 20 bp, Artificial Sequence
  Description of Artificial Sequence: Synthetic oligonucleotide
  Target: ATXN2; (+) strand; PAM type: NRG; PAM sequence: CAG
ccagggtgccaggagacagg

SEQ ID NO: 39571 - DNA, 20 bp, Artificial Sequence
  Description of Artificial Sequence: Synthetic oligonucleotide
  Target: ATXN2; (+) strand; PAM type: NRG; PAM sequence: GAG
ccaggagacaggcagatcac

SEQ ID NO: 39572 - DNA, 20 bp, Artificial Sequence
  Description of Artificial Sequence: Synthetic oligonucleotide
  Target: ATXN2; (+) strand; PAM type: NRG; PAM sequence: CAG
agacaggcagatcacgagat

SEQ ID NO: 39573 - DNA, 20 bp, Artificial Sequence
  Description of Artificial Sequence: Synthetic oligonucleotide
  Target: ATXN2; (+) strand; PAM type: NRG; PAM sequence: AGG
gacaggcagatcacgagatc

SEQ ID NO: 39574 - DNA, 20 bp, Artificial Sequence
  Description of Artificial Sequence: Synthetic oligonucleotide
  Target: ATXN2; (+) strand; PAM type: NRG; PAM sequence: GAG
caggcagatcacgagatcag

SEQ ID NO: 39575 - DNA, 20 bp, Artificial Sequence
  Description of Artificial Sequence: Synthetic oligonucleotide
  Target: ATXN2; (+) strand; PAM type: NRG; PAM sequence: GAG
gatcacgagatcaggagttc

SEQ ID NO: 39576 - DNA, 20 bp, Artificial Sequence
  Description of Artificial Sequence: Synthetic oligonucleotide
  Target: ATXN2; (+) strand; PAM type: NRG; PAM sequence: CAG
cgagatcaggagttcgagac

SEQ ID NO: 39577 - DNA, 20 bp, Artificial Sequence
  Description of Artificial Sequence: Synthetic oligonucleotide
  Target: ATXN2; (+) strand; PAM type: NRG; PAM sequence: CGG
cgagaccagcctgaccaaca

SEQ ID NO: 39578 - DNA, 20 bp, Artificial Sequence
  Description of Artificial Sequence: Synthetic oligonucleotide
  Target: ATXN2; (+) strand; PAM type: NRG; PAM sequence: TAG
tctactaaaaatacaaaaat

SEQ ID NO: 39579 - DNA, 20 bp, Artificial Sequence
  Description of Artificial Sequence: Synthetic oligonucleotide
  Target: ATXN2; (+) strand; PAM type: NRG; PAM sequence: TGG
ctaaaaatacaaaaattagc

SEQ ID NO: 39580 - DNA, 20 bp, Artificial Sequence
  Description of Artificial Sequence: Synthetic oligonucleotide
  Target: ATXN2; (+) strand; PAM type: NRG; PAM sequence: GGG
taaaaatacaaaaattagct

SEQ ID NO: 39581 - DNA, 20 bp, Artificial Sequence
  Description of Artificial Sequence: Synthetic oligonucleotide
  Target: ATXN2; (+) strand; PAM type: NRG; PAM sequence: TGG
atacaaaaattagctgggtg

SEQ ID NO: 39582 - DNA, 20 bp, Artificial Sequence
  Description of Artificial Sequence: Synthetic oligonucleotide
  Target: ATXN2; (+) strand; PAM type: NRG; PAM sequence: TGG
caaaaattagctgggtgtgg

SEQ ID NO: 39583 - DNA, 20 bp, Artificial Sequence
  Description of Artificial Sequence: Synthetic oligonucleotide
  Target: ATXN2; (+) strand; PAM type: NRG; PAM sequence: CAG
gtggcgcacccctgtaattc

SEQ ID NO: 39584 - DNA, 20 bp, Artificial Sequence
  Description of Artificial Sequence: Synthetic oligonucleotide
  Target: ATXN2; (+) strand; PAM type: NRG; PAM sequence: CAG
cccctgtaattccagctact

SEQ ID NO: 39585 - DNA, 20 bp, Artificial Sequence
  Description of Artificial Sequence: Synthetic oligonucleotide
  Target: ATXN2; (+) strand; PAM type: NRG; PAM sequence: AGG
ccctgtaattccagctactc

SEQ ID NO: 39586 - DNA, 20 bp, Artificial Sequence
  Description of Artificial Sequence: Synthetic oligonucleotide
  Target: ATXN2; (+) strand; PAM type: NRG; PAM sequence: GAG
ctgtaattccagctactcag

SEQ ID NO: 39587 - DNA, 20 bp, Artificial Sequence
  Description of Artificial Sequence: Synthetic oligonucleotide
  Target: ATXN2; (+) strand; PAM type: NRG; PAM sequence: AGG
tgtaattccagctactcagg

SEQ ID NO: 39588 - DNA, 20 bp, Artificial Sequence
  Description of Artificial Sequence: Synthetic oligonucleotide
  Target: ATXN2; (+) strand; PAM type: NRG; PAM sequence: GAG
ttccagctactcaggaggct

SEQ ID NO: 39589 - DNA, 20 bp, Artificial Sequence
  Description of Artificial Sequence: Synthetic oligonucleotide
  Target: ATXN2; (+) strand; PAM type: NRG; PAM sequence: AGG
tccagctactcaggaggctg

SEQ ID NO: 39590 - DNA, 20 bp, Artificial Sequence
  Description of Artificial Sequence: Synthetic oligonucleotide
  Target: ATXN2; (+) strand; PAM type: NRG; PAM sequence: CAG
agctactcaggaggctgagg

SEQ ID NO: 39591 - DNA, 20 bp, Artificial Sequence
  Description of Artificial Sequence: Synthetic oligonucleotide
  Target: ATXN2; (+) strand; PAM type: NRG; PAM sequence: AGG
gctactcaggaggctgaggc

SEQ ID NO: 39592 - DNA, 20 bp, Artificial Sequence
  Description of Artificial Sequence: Synthetic oligonucleotide
  Target: ATXN2; (+) strand; PAM type: NRG; PAM sequence: GGG
ctactcaggaggctgaggca

SEQ ID NO: 39593 - DNA, 20 bp, Artificial Sequence
  Description of Artificial Sequence: Synthetic oligonucleotide
  Target: ATXN2; (+) strand; PAM type: NRG; PAM sequence: GGG
tactcaggaggctgaggcag

SEQ ID NO: 39594 - DNA, 20 bp, Artificial Sequence
  Description of Artificial Sequence: Synthetic oligonucleotide
  Target: ATXN2; (+) strand; PAM type: NRG; PAM sequence: GAG
caggggaatcgcttgaatct

SEQ ID NO: 39595 - DNA, 20 bp, Artificial Sequence
  Description of Artificial Sequence: Synthetic oligonucleotide
  Target: ATXN2; (+) strand; PAM type: NRG; PAM sequence: GAG
ggggaatcgcttgaatctga

SEQ ID NO: 39596 - DNA, 20 bp, Artificial Sequence
  Description of Artificial Sequence: Synthetic oligonucleotide
  Target: ATXN2; (+) strand; PAM type: NRG; PAM sequence: AGG
gggaatcgcttgaatctgag

SEQ ID NO: 39597 - DNA, 20 bp, Artificial Sequence
  Description of Artificial Sequence: Synthetic oligonucleotide
  Target: ATXN2; (+) strand; PAM type: NRG; PAM sequence: CGG
aatcgcttgaatctgagagg

SEQ ID NO: 39598 - DNA, 20 bp, Artificial Sequence
  Description of Artificial Sequence: Synthetic oligonucleotide
  Target: ATXN2; (+) strand; PAM type: NRG; PAM sequence: GAG
tcgcttgaatctgagaggcg

SEQ ID NO: 39599 - DNA, 20 bp, Artificial Sequence
  Description of Artificial Sequence: Synthetic oligonucleotide
  Target: ATXN2; (+) strand; PAM type: NRG; PAM sequence: AGG
cgcttgaatctgagaggcgg

SEQ ID NO: 39600 - DNA, 20 bp, Artificial Sequence
  Description of Artificial Sequence: Synthetic oligonucleotide
  Target: ATXN2; (+) strand; PAM type: NRG; PAM sequence: CAG
aatctgagaggcggaggttg

SEQ ID NO: 39601 - DNA, 20 bp, Artificial Sequence
  Description of Artificial Sequence: Synthetic oligonucleotide
  Target: ATXN2; (+) strand; PAM type: NRG; PAM sequence: AAG
gagaggcggaggttgcagtg

SEQ ID NO: 39602 - DNA, 20 bp, Artificial Sequence
  Description of Artificial Sequence: Synthetic oligonucleotide
  Target: ATXN2; (+) strand; PAM type: NRG; PAM sequence: AAG
gcggaggttgcagtgaagct

SEQ ID NO: 39603 - DNA, 20 bp, Artificial Sequence
  Description of Artificial Sequence: Synthetic oligonucleotide
  Target: ATXN2; (+) strand; PAM type: NRG; PAM sequence: TAG
aggttgcagtgaagctaagt

SEQ ID NO: 39604 - DNA, 20 bp, Artificial Sequence
  Description of Artificial Sequence: Synthetic oligonucleotide
  Target: ATXN2; (+) strand; PAM type: NRG; PAM sequence: CAG
ctaagttagcgccactccat

SEQ ID NO: 39605 - DNA, 20 bp, Artificial Sequence
  Description of Artificial Sequence: Synthetic oligonucleotide
  Target: ATXN2; (+) strand; PAM type: NRG; PAM sequence: GAG
aagttagcgccactccatca

SEQ ID NO: 39606 - DNA, 20 bp, Artificial Sequence
  Description of Artificial Sequence: Synthetic oligonucleotide
  Target: ATXN2; (+) strand; PAM type: NRG; PAM sequence: AAG
aataaacaaacaaacaattt

SEQ ID NO: 39607 - DNA, 20 bp, Artificial Sequence
  Description of Artificial Sequence: Synthetic oligonucleotide
  Target: ATXN2; (+) strand; PAM type: NRG; PAM sequence: GAG
taaacaaacaaacaatttaa

SEQ ID NO: 39608 - DNA, 20 bp, Artificial Sequence
  Description of Artificial Sequence: Synthetic oligonucleotide
  Target: ATXN2; (+) strand; PAM type: NRG; PAM sequence: AGG
aaacaaacaaacaatttaag

SEQ ID NO: 39609 - DNA, 20 bp, Artificial Sequence
  Description of Artificial Sequence: Synthetic oligonucleotide
  Target: ATXN2; (+) strand; PAM type: NRG; PAM sequence: AAG
aaacaaacaatttaagagga

SEQ ID NO: 39610 - DNA, 20 bp, Artificial Sequence
  Description of Artificial Sequence: Synthetic oligonucleotide
  Target: ATXN2; (+) strand; PAM type: NRG; PAM sequence: TAG
aacaatttaagaggaaagaa

SEQ ID NO: 39611 - DNA, 20 bp, Artificial Sequence
  Description of Artificial Sequence: Synthetic oligonucleotide
  Target: ATXN2; (+) strand; PAM type: NRG; PAM sequence: GAG
gaatagtcttttcaacaaat

SEQ ID NO: 39612 - DNA, 20 bp, Artificial Sequence
  Description of Artificial Sequence: Synthetic oligonucleotide
  Target: ATXN2; (+) strand; PAM type: NRG; PAM sequence: AGG
aatagtcttttcaacaaatg

SEQ ID NO: 39613 - DNA, 20 bp, Artificial Sequence
  Description of Artificial Sequence: Synthetic oligonucleotide
  Target: ATXN2; (+) strand; PAM type: NRG; PAM sequence: TGG
agtcttttcaacaaatgagg

SEQ ID NO: 39614 - DNA, 20 bp, Artificial Sequence
  Description of Artificial Sequence: Synthetic oligonucleotide
  Target: ATXN2; (+) strand; PAM type: NRG; PAM sequence: GGG
gtcttttcaacaaatgaggt

SEQ ID NO: 39615 - DNA, 20 bp, Artificial Sequence
  Description of Artificial Sequence: Synthetic oligonucleotide
  Target: ATXN2; (+) strand; PAM type: NRG; PAM sequence: GGG
tcttttcaacaaatgaggtg

SEQ ID NO: 39616 - DNA, 20 bp, Artificial Sequence
  Description of Artificial Sequence: Synthetic oligonucleotide
  Target: ATXN2; (+) strand; PAM type: NRG; PAM sequence: CGG
aacaaatgaggtggggacaa

SEQ ID NO: 39617 - DNA, 20 bp, Artificial Sequence
  Description of Artificial Sequence: Synthetic oligonucleotide
  Target: ATXN2; (+) strand; PAM type: NRG; PAM sequence: AAG
tggggacaacggatatccac

SEQ ID NO: 39618 - DNA, 20 bp, Artificial Sequence
  Description of Artificial Sequence: Synthetic oligonucleotide
  Target: ATXN2; (+) strand; PAM type: NRG; PAM sequence: AAG
caacggatatccacaagcaa

SEQ ID NO: 39619 - DNA, 20 bp, Artificial Sequence
  Description of Artificial Sequence: Synthetic oligonucleotide
  Target: ATXN2; (+) strand; PAM type: NRG; PAM sequence: AGG
aacggatatccacaagcaaa

SEQ ID NO: 39620 - DNA, 20 bp, Artificial Sequence
  Description of Artificial Sequence: Synthetic oligonucleotide
  Target: ATXN2; (+) strand; PAM type: NRG; PAM sequence: TGG
cacaagcaaaaggaaaaacc

SEQ ID NO: 39621 - DNA, 20 bp, Artificial Sequence
  Description of Artificial Sequence: Synthetic oligonucleotide
  Target: ATXN2; (+) strand; PAM type: NRG; PAM sequence: AAG
atacacaaaaattaactcaa

SEQ ID NO: 39622 - DNA, 20 bp, Artificial Sequence
  Description of Artificial Sequence: Synthetic oligonucleotide
  Target: ATXN2; (+) strand; PAM type: NRG; PAM sequence: GAG
acacaaaaattaactcaaaa

SEQ ID NO: 39623 - DNA, 20 bp, Artificial Sequence
  Description of Artificial Sequence: Synthetic oligonucleotide
  Target: ATXN2; (+) strand; PAM type: NRG; PAM sequence: TAG
aattaactcaaaagagattg

SEQ ID NO: 39624 - DNA, 20 bp, Artificial Sequence
  Description of Artificial Sequence: Synthetic oligonucleotide
  Target: ATXN2; (+) strand; PAM type: NRG; PAM sequence: AAG
agattgtagacttaaatgtt

SEQ ID NO: 39625 - DNA, 20 bp, Artificial Sequence
  Description of Artificial Sequence: Synthetic oligonucleotide
  Target: ATXN2; (+) strand; PAM type: NRG; PAM sequence: GAG
attgtagacttaaatgttaa

SEQ ID NO: 39626 - DNA, 20 bp, Artificial Sequence
  Description of Artificial Sequence: Synthetic oligonucleotide
  Target: ATXN2; (+) strand; PAM type: NRG; PAM sequence: TAG
gagctaaactataaaaatca

SEQ ID NO: 39627 - DNA, 20 bp, Artificial Sequence
  Description of Artificial Sequence: Synthetic oligonucleotide
  Target: ATXN2; (+) strand; PAM type: NRG; PAM sequence: AGG
agctaaactataaaaatcat

SEQ ID NO: 39628 - DNA, 20 bp, Artificial Sequence
  Description of Artificial Sequence: Synthetic oligonucleotide
  Target: ATXN2; (+) strand; PAM type: NRG; PAM sequence: GAG
ctaaactataaaaatcatag

SEQ ID NO: 39629 - DNA, 20 bp, Artificial Sequence
  Description of Artificial Sequence: Synthetic oligonucleotide
  Target: ATXN2; (+) strand; PAM type: NRG; PAM sequence: TAG
taaaaatcataggagtttta

SEQ ID NO: 39630 - DNA, 20 bp, Artificial Sequence
  Description of Artificial Sequence: Synthetic oligonucleotide
  Target: ATXN2; (+) strand; PAM type: NRG; PAM sequence: AGG
aaaaatcataggagttttat

SEQ ID NO: 39631 - DNA, 20 bp, Artificial Sequence
  Description of Artificial Sequence: Synthetic oligonucleotide
  Target: ATXN2; (+) strand; PAM type: NRG; PAM sequence: TAG
ggagttttataggcgtttca

SEQ ID NO: 39632 - DNA, 20 bp, Artificial Sequence
  Description of Artificial Sequence: Synthetic oligonucleotide
  Target: ATXN2; (+) strand; PAM type: NRG; PAM sequence: AGG
gagttttataggcgtttcat

SEQ ID NO: 39633 - DNA, 20 bp, Artificial Sequence
  Description of Artificial Sequence: Synthetic oligonucleotide
  Target: ATXN2; (+) strand; PAM type: NRG; PAM sequence: GAG
gttttataggcgtttcatag

SEQ ID NO: 39634 - DNA, 20 bp, Artificial Sequence
  Description of Artificial Sequence: Synthetic oligonucleotide
  Target: ATXN2; (+) strand; PAM type: NRG; PAM sequence: TGG
ttcataggagtaaatctctg

SEQ ID NO: 39635 - DNA, 20 bp, Artificial Sequence
  Description of Artificial Sequence: Synthetic oligonucleotide
  Target: ATXN2; (+) strand; PAM type: NRG; PAM sequence: GAG
gagtaaatctctgtggcctt

SEQ ID NO: 39636 - DNA, 20 bp, Artificial Sequence
  Description of Artificial Sequence: Synthetic oligonucleotide
  Target: ATXN2; (+) strand; PAM type: NRG; PAM sequence: TAG
aaatctctgtggccttgagt

SEQ ID NO: 39637 - DNA, 20 bp, Artificial Sequence
  Description of Artificial Sequence: Synthetic oligonucleotide
  Target: ATXN2; (+) strand; PAM type: NRG; PAM sequence: AGG
aatctctgtggccttgagtt

SEQ ID NO: 39638 - DNA, 20 bp, Artificial Sequence
  Description of Artificial Sequence: Synthetic oligonucleotide
  Target: ATXN2; (+) strand; PAM type: NRG; PAM sequence: CAG
tgctttgtctgatatgacat

SEQ ID NO: 39639 - DNA, 20 bp, Artificial Sequence
  Description of Artificial Sequence: Synthetic oligonucleotide
  Target: ATXN2; (+) strand; PAM type: NRG; PAM sequence: AGG
gctttgtctgatatgacatc

SEQ ID NO: 39640 - DNA, 20 bp, Artificial Sequence
  Description of Artificial Sequence: Synthetic oligonucleotide
  Target: ATXN2; (+) strand; PAM type: NRG; PAM sequence: GAG
tttgtctgatatgacatcag

SEQ ID NO: 39641 - DNA, 20 bp, Artificial Sequence
  Description of Artificial Sequence: Synthetic oligonucleotide
  Target: ATXN2; (+) strand; PAM type: NRG; PAM sequence: CAG
tgatatgacatcaggagcaa

SEQ ID NO: 39642 - DNA, 20 bp, Artificial Sequence
  Description of Artificial Sequence: Synthetic oligonucleotide
  Target: ATXN2; (+) strand; PAM type: NRG; PAM sequence: AAG
atcaggagcaacagcaacaa

SEQ ID NO: 39643 - DNA, 20 bp, Artificial Sequence
  Description of Artificial Sequence: Synthetic oligonucleotide
  Target: ATXN2; (+) strand; PAM type: NRG; PAM sequence: CAG
gcaacaaaagaaaaaacaaa

SEQ ID NO: 39644 - DNA, 20 bp, Artificial Sequence
  Description of Artificial Sequence: Synthetic oligonucleotide
  Target: ATXN2; (+) strand; PAM type: NRG; PAM sequence: AAG
aaattaaaaactgtgttaca

SEQ ID NO: 39645 - DNA, 20 bp, Artificial Sequence
  Description of Artificial Sequence: Synthetic oligonucleotide
  Target: ATXN2; (+) strand; PAM type: NRG; PAM sequence: AAG
gtgttacaaagaacaccatc

SEQ ID NO: 39646 - DNA, 20 bp, Artificial Sequence
  Description of Artificial Sequence: Synthetic oligonucleotide
  Target: ATXN2; (+) strand; PAM type: NRG; PAM sequence: AAG
tacaaagaacaccatcaagc

SEQ ID NO: 39647 - DNA, 20 bp, Artificial Sequence
  Description of Artificial Sequence: Synthetic oligonucleotide
  Target: ATXN2; (+) strand; PAM type: NRG; PAM sequence: AAG
aacaccatcaagcaagtaaa

SEQ ID NO: 39648 - DNA, 20 bp, Artificial Sequence
  Description of Artificial Sequence: Synthetic oligonucleotide
  Target: ATXN2; (+) strand; PAM type: NRG; PAM sequence: TAG
gcaagtaaaaagataaccta

SEQ ID NO: 39649 - DNA, 20 bp, Artificial Sequence
  Description of Artificial Sequence: Synthetic oligonucleotide
  Target: ATXN2; (+) strand; PAM type: NRG; PAM sequence: CAG
gtaaaaagataacctatagt

SEQ ID NO: 39650 - DNA, 20 bp, Artificial Sequence
  Description of Artificial Sequence: Synthetic oligonucleotide
  Target: ATXN2; (+) strand; PAM type: NRG; PAM sequence: AGG
taaaaagataacctatagtc

SEQ ID NO: 39651 - DNA, 20 bp, Artificial Sequence
  Description of Artificial Sequence: Synthetic oligonucleotide
  Target: ATXN2; (+) strand; PAM type: NRG; PAM sequence: GGG
aaaaagataacctatagtca

SEQ ID NO: 39652 - DNA, 20 bp, Artificial Sequence
  Description of Artificial Sequence: Synthetic oligonucleotide
  Target: ATXN2; (+) strand; PAM type: NRG; PAM sequence: TGG
gataacctatagtcagggca

SEQ ID NO: 39653 - DNA, 20 bp, Artificial Sequence
  Description of Artificial Sequence: Synthetic oligonucleotide
  Target: ATXN2; (+) strand; PAM type: NRG; PAM sequence: TGG
aacctatagtcagggcatgg

SEQ ID NO: 39654 - DNA, 20 bp, Artificial Sequence
  Description of Artificial Sequence: Synthetic oligonucleotide
  Target: ATXN2; (+) strand; PAM type: NRG; PAM sequence: CAG
gtggttcgcgtctaaaatct

SEQ ID NO: 39655 - DNA, 20 bp, Artificial Sequence
  Description of Artificial Sequence: Synthetic oligonucleotide
  Target: ATXN2; (+) strand; PAM type: NRG; PAM sequence: TGG
cgtctaaaatctcagcactt

SEQ ID NO: 39656 - DNA, 20 bp, Artificial Sequence
  Description of Artificial Sequence: Synthetic oligonucleotide
  Target: ATXN2; (+) strand; PAM type: NRG; PAM sequence: GGG
gtctaaaatctcagcacttt

SEQ ID NO: 39657 - DNA, 20 bp, Artificial Sequence
  Description of Artificial Sequence: Synthetic oligonucleotide
  Target: ATXN2; (+) strand; PAM type: NRG; PAM sequence: AAG
taaaatctcagcactttggg

SEQ ID NO: 39658 - DNA, 20 bp, Artificial Sequence
  Description of Artificial Sequence: Synthetic oligonucleotide
  Target: ATXN2; (+) strand; PAM type: NRG; PAM sequence: AGG
aaaatctcagcactttggga

SEQ ID NO: 39659 - DNA, 20 bp, Artificial Sequence
  Description of Artificial Sequence: Synthetic oligonucleotide
  Target: ATXN2; (+) strand; PAM type: NRG; PAM sequence: GAG
tctcagcactttgggaaggt

SEQ ID NO: 39660 - DNA, 20 bp, Artificial Sequence
  Description of Artificial Sequence: Synthetic oligonucleotide
  Target: ATXN2; (+) strand; PAM type: NRG; PAM sequence: AGG
ctcagcactttgggaaggtg

SEQ ID NO: 39661 - DNA, 20 bp, Artificial Sequence
  Description of Artificial Sequence: Synthetic oligonucleotide
  Target: ATXN2; (+) strand; PAM type: NRG; PAM sequence: CAG
agcactttgggaaggtgagg

SEQ ID NO: 39662 - DNA, 20 bp, Artificial Sequence
  Description of Artificial Sequence: Synthetic oligonucleotide
  Target: ATXN2; (+) strand; PAM type: NRG; PAM sequence: AGG
gcactttgggaaggtgaggc

SEQ ID NO: 39663 - DNA, 20 bp, Artificial Sequence
  Description of Artificial Sequence: Synthetic oligonucleotide
  Target: ATXN2; (+) strand; PAM type: NRG; PAM sequence: CGG
ctttgggaaggtgaggcagg

SEQ ID NO: 39664 - DNA, 20 bp, Artificial Sequence
  Description of Artificial Sequence: Synthetic oligonucleotide
  Target: ATXN2; (+) strand; PAM type: NRG; PAM sequence: GAG
gtgaggcaggcggatcattt

SEQ ID NO: 39665 - DNA, 20 bp, Artificial Sequence
  Description of Artificial Sequence: Synthetic oligonucleotide
  Target: ATXN2; (+) strand; PAM type: NRG; PAM sequence: AGG
tgaggcaggcggatcatttg

SEQ ID NO: 39666 - DNA, 20 bp, Artificial Sequence
  Description of Artificial Sequence: Synthetic oligonucleotide
  Target: ATXN2; (+) strand; PAM type: NRG; PAM sequence: CAG
gcaggcggatcatttgaggt

SEQ ID NO: 39667 - DNA, 20 bp, Artificial Sequence
  Description of Artificial Sequence: Synthetic oligonucleotide
  Target: ATXN2; (+) strand; PAM type: NRG; PAM sequence: AGG
caggcggatcatttgaggtc

SEQ ID NO: 39668 - DNA, 20 bp, Artificial Sequence
  Description of Artificial Sequence: Synthetic oligonucleotide
  Target: ATXN2; (+) strand; PAM type: NRG; PAM sequence: GAG
ggcggatcatttgaggtcag

SEQ ID NO: 39669 - DNA, 20 bp, Artificial Sequence
  Description of Artificial Sequence: Synthetic oligonucleotide
  Target: ATXN2; (+) strand; PAM type: NRG; PAM sequence: AAG
tcatttgaggtcaggagttc

SEQ ID NO: 39670 - DNA, 20 bp, Artificial Sequence
  Description of Artificial Sequence: Synthetic oligonucleotide
  Target: ATXN2; (+) strand; PAM type: NRG; PAM sequence: CAG
tgaggtcaggagttcaagac

SEQ ID NO: 39671 - DNA, 20 bp, Artificial Sequence
  Description of Artificial Sequence: Synthetic oligonucleotide
  Target: ATXN2; (+) strand; PAM type: NRG; PAM sequence: TGG
tcaggagttcaagaccagcc

SEQ ID NO: 39672 - DNA, 20 bp, Artificial Sequence
  Description of Artificial Sequence: Synthetic oligonucleotide
  Target: ATXN2; (+) strand; PAM type: NRG; PAM sequence: TGG
caagaccagcctggccaaca

SEQ ID NO: 39673 - DNA, 20 bp, Artificial Sequence
  Description of Artificial Sequence: Synthetic oligonucleotide
  Target: ATXN2; (+) strand; PAM type: NRG; PAM sequence: TGG
ctctactaaaaatacaaaaa

SEQ ID NO: 39674 - DNA, 20 bp, Artificial Sequence
  Description of Artificial Sequence: Synthetic oligonucleotide
  Target: ATXN2; (+) strand; PAM type: NRG; PAM sequence: GGG
tctactaaaaatacaaaaat

SEQ ID NO: 39675 - DNA, 20 bp, Artificial Sequence
  Description of Artificial Sequence: Synthetic oligonucleotide
  Target: ATXN2; (+) strand; PAM type: NRG; PAM sequence: GAG
taaaaatacaaaaatgggcc

SEQ ID NO: 39676 - DNA, 20 bp, Artificial Sequence
  Description of Artificial Sequence: Synthetic oligonucleotide
  Target: ATXN2; (+) strand; PAM type: NRG; PAM sequence: CGG
atacaaaaatgggccgagcg

SEQ ID NO: 39677 - DNA, 20 bp, Artificial Sequence
  Description of Artificial Sequence: Synthetic oligonucleotide
  Target: ATXN2; (+) strand; PAM type: NRG; PAM sequence: TGG
caaaaatgggccgagcgcgg

SEQ ID NO: 39678 - DNA, 20 bp, Artificial Sequence
  Description of Artificial Sequence: Synthetic oligonucleotide
  Target: ATXN2; (+) strand; PAM type: NRG; PAM sequence: CAG
gtggtgcacgcctataaccc

SEQ ID NO: 39679 - DNA, 20 bp, Artificial Sequence
  Description of Artificial Sequence: Synthetic oligonucleotide
  Target: ATXN2; (+) strand; PAM type: NRG; PAM sequence: TGG
gcctataaccccagctactc

SEQ ID NO: 39680 - DNA, 20 bp, Artificial Sequence
  Description of Artificial Sequence: Synthetic oligonucleotide
  Target: ATXN2; (+) strand; PAM type: NRG; PAM sequence: GAG
ctataaccccagctactctg

SEQ ID NO: 39681 - DNA, 20 bp, Artificial Sequence
  Description of Artificial Sequence: Synthetic oligonucleotide
  Target: ATXN2; (+) strand; PAM type: NRG; PAM sequence: AGG
tataaccccagctactctgg

SEQ ID NO: 39682 - DNA, 20 bp, Artificial Sequence
  Description of Artificial Sequence: Synthetic oligonucleotide
  Target: ATXN2; (+) strand; PAM type: NRG; PAM sequence: CAG
agctactctggaggctgacg

SEQ ID NO: 39683 - DNA, 20 bp, Artificial Sequence
  Description of Artificial Sequence: Synthetic oligonucleotide
  Target: ATXN2; (+) strand; PAM type: NRG; PAM sequence: AGG
gctactctggaggctgacgc

SEQ ID NO: 39684 - DNA, 20 bp, Artificial Sequence
  Description of Artificial Sequence: Synthetic oligonucleotide
  Target: ATXN2; (+) strand; PAM type: NRG; PAM sequence: GGG
ctactctggaggctgacgca

SEQ ID NO: 39685 - DNA, 20 bp, Artificial Sequence
  Description of Artificial Sequence: Synthetic oligonucleotide
  Target: ATXN2; (+) strand; PAM type: NRG; PAM sequence: GGG
tactctggaggctgacgcag

SEQ ID NO: 39686 - DNA, 20 bp, Artificial Sequence
  Description of Artificial Sequence: Synthetic oligonucleotide
  Target: ATXN2; (+) strand; PAM type: NRG; PAM sequence: GGG
actctggaggctgacgcagg

SEQ ID NO: 39687 - DNA, 20 bp, Artificial Sequence
  Description of Artificial Sequence: Synthetic oligonucleotide
  Target: ATXN2; (+) strand; PAM type: NRG; PAM sequence: GAG
ctgacgcagggggatcgctt

SEQ ID NO: 39688 - DNA, 20 bp, Artificial Sequence
  Description of Artificial Sequence: Synthetic oligonucleotide
  Target: ATXN2; (+) strand; PAM type: NRG; PAM sequence: CAG
gcagggggatcgcttgagct

SEQ ID NO: 39689 - DNA, 20 bp, Artificial Sequence
  Description of Artificial Sequence: Synthetic oligonucleotide
  Target: ATXN2; (+) strand; PAM type: NRG; PAM sequence: AGG
cagggggatcgcttgagctc

SEQ ID NO: 39690 - DNA, 20 bp, Artificial Sequence
  Description of Artificial Sequence: Synthetic oligonucleotide
  Target: ATXN2; (+) strand; PAM type: NRG; PAM sequence: GAG
tcgcttgagctcaggaattc

SEQ ID NO: 39691 - DNA, 20 bp, Artificial Sequence
  Description of Artificial Sequence: Synthetic oligonucleotide
  Target: ATXN2; (+) strand; PAM type: NRG; PAM sequence: CAG
tgagctcaggaattcgagac

SEQ ID NO: 39692 - DNA, 20 bp, Artificial Sequence
  Description of Artificial Sequence: Synthetic oligonucleotide
  Target: ATXN2; (+) strand; PAM type: NRG; PAM sequence: TGG
tcaggaattcgagaccagcc

SEQ ID NO: 39693 - DNA, 20 bp, Artificial Sequence
  Description of Artificial Sequence: Synthetic oligonucleotide
  Target: ATXN2; (+) strand; PAM type: NRG; PAM sequence: GGG
caggaattcgagaccagcct

SEQ ID NO: 39694 - DNA, 20 bp, Artificial Sequence
  Description of Artificial Sequence: Synthetic oligonucleotide
  Target: ATXN2; (+) strand; PAM type: NRG; PAM sequence: AAG
gaattcgagaccagcctggg

SEQ ID NO: 39695 - DNA, 20 bp, Artificial Sequence
  Description of Artificial Sequence: Synthetic oligonucleotide
  Target: ATXN2; (+) strand; PAM type: NRG; PAM sequence: CGG
cgagaccagcctgggaagca

SEQ ID NO: 39696 - DNA, 20 bp, Artificial Sequence
  Description of Artificial Sequence: Synthetic oligonucleotide
  Target: ATXN2; (+) strand; PAM type: NRG; PAM sequence: GAG
agaccagcctgggaagcacg

SEQ ID NO: 39697 - DNA, 20 bp, Artificial Sequence
  Description of Artificial Sequence: Synthetic oligonucleotide
  Target: ATXN2; (+) strand; PAM type: NRG; PAM sequence: AAG
ccagcctgggaagcacggag

SEQ ID NO: 39698 - DNA, 20 bp, Artificial Sequence
  Description of Artificial Sequence: Synthetic oligonucleotide
  Target: ATXN2; (+) strand; PAM type: NRG; PAM sequence: TAG
tctacaaaaaatataaaaat

SEQ ID NO: 39699 - DNA, 20 bp, Artificial Sequence
  Description of Artificial Sequence: Synthetic oligonucleotide
  Target: ATXN2; (+) strand; PAM type: NRG; PAM sequence: TGG
aaaaaatataaaaattagcc

SEQ ID NO: 39700 - DNA, 20 bp, Artificial Sequence
  Description of Artificial Sequence: Synthetic oligonucleotide
  Target: ATXN2; (+) strand; PAM type: NRG; PAM sequence: TGG
atataaaaattagcctggtg

SEQ ID NO: 39701 - DNA, 20 bp, Artificial Sequence
  Description of Artificial Sequence: Synthetic oligonucleotide
  Target: ATXN2; (+) strand; PAM type: NRG; PAM sequence: TGG
taaaaattagcctggtgtgg

SEQ ID NO: 39702 - DNA, 20 bp, Artificial Sequence
  Description of Artificial Sequence: Synthetic oligonucleotide
  Target: ATXN2; (+) strand; PAM type: NRG; PAM sequence: CAG
ggtgtggtggcgtatgcctg

SEQ ID NO: 39703 - DNA, 20 bp, Artificial Sequence
  Description of Artificial Sequence: Synthetic oligonucleotide
  Target: ATXN2; (+) strand; PAM type: NRG; PAM sequence: CAG
gtggcgtatgcctgcagccc

SEQ ID NO: 39704 - DNA, 20 bp, Artificial Sequence
  Description of Artificial Sequence: Synthetic oligonucleotide
  Target: ATXN2; (+) strand; PAM type: NRG; PAM sequence: TGG
tgcctgcagccccagctatc

SEQ ID NO: 39705 - DNA, 20 bp, Artificial Sequence
  Description of Artificial Sequence: Synthetic oligonucleotide
  Target: ATXN2; (+) strand; PAM type: NRG; PAM sequence: GGG
gcctgcagccccagctatct

SEQ ID NO: 39706 - DNA, 20 bp, Artificial Sequence
  Description of Artificial Sequence: Synthetic oligonucleotide
  Target: ATXN2; (+) strand; PAM type: NRG; PAM sequence: GAG
ctgcagccccagctatctgg

SEQ ID NO: 39707 - DNA, 20 bp, Artificial Sequence
  Description of Artificial Sequence: Synthetic oligonucleotide
  Target: ATXN2; (+) strand; PAM type: NRG; PAM sequence: AGG
tgcagccccagctatctggg

SEQ ID NO: 39708 - DNA, 20 bp, Artificial Sequence
  Description of Artificial Sequence: Synthetic oligonucleotide
  Target: ATXN2; (+) strand; PAM type: NRG; PAM sequence: GGG
gcagccccagctatctggga

SEQ ID NO: 39709 - DNA, 20 bp, Artificial Sequence
  Description of Artificial Sequence: Synthetic oligonucleotide
  Target: ATXN2; (+) strand; PAM type: NRG; PAM sequence: GAG
ccccagctatctgggagggt

SEQ ID NO: 39710 - DNA, 20 bp, Artificial Sequence
  Description of Artificial Sequence: Synthetic oligonucleotide
  Target: ATXN2; (+) strand; PAM type: NRG; PAM sequence: AGG
cccagctatctgggagggtg

SEQ ID NO: 39711 - DNA, 20 bp, Artificial Sequence
  Description of Artificial Sequence: Synthetic oligonucleotide
  Target: ATXN2; (+) strand; PAM type: NRG; PAM sequence: CAG
agctatctgggagggtgagg

SEQ ID NO: 39712 - DNA, 20 bp, Artificial Sequence
  Description of Artificial Sequence: Synthetic oligonucleotide
  Target: ATXN2; (+) strand; PAM type: NRG; PAM sequence: AGG
gctatctgggagggtgaggc

SEQ ID NO: 39713 - DNA, 20 bp, Artificial Sequence
  Description of Artificial Sequence: Synthetic oligonucleotide
  Target: ATXN2; (+) strand; PAM type: NRG; PAM sequence: GAG
tatctgggagggtgaggcag

SEQ ID NO: 39714 - DNA, 20 bp, Artificial Sequence
  Description of Artificial Sequence: Synthetic oligonucleotide
  Target: ATXN2; (+) strand; PAM type: NRG; PAM sequence: CAG
gcaggagaattgcttgaacc

SEQ ID NO: 39715 - DNA, 20 bp, Artificial Sequence
  Description of Artificial Sequence: Synthetic oligonucleotide
  Target: ATXN2; (+) strand; PAM type: NRG; PAM sequence: AGG
caggagaattgcttgaaccc

SEQ ID NO: 39716 - DNA, 20 bp, Artificial Sequence
  Description of Artificial Sequence: Synthetic oligonucleotide
  Target: ATXN2; (+) strand; PAM type: NRG; PAM sequence: AAG
gagaattgcttgaacccagg

SEQ ID NO: 39717 - DNA, 20 bp, Artificial Sequence
  Description of Artificial Sequence: Synthetic oligonucleotide
  Target: ATXN2; (+) strand; PAM type: NRG; PAM sequence: AAG
ttgcttgaacccaggaagcg

SEQ ID NO: 39718 - DNA, 20 bp, Artificial Sequence
  Description of Artificial Sequence: Synthetic oligonucleotide
  Target: ATXN2; (+) strand; PAM type: NRG; PAM sequence: AGG
tgcttgaacccaggaagcga

SEQ ID NO: 39719 - DNA, 20 bp, Artificial Sequence
  Description of Artificial Sequence: Synthetic oligonucleotide
  Target: ATXN2; (+) strand; PAM type: NRG; PAM sequence: CAG
aacccaggaagcgaaggctg

SEQ ID NO: 39720 - DNA, 20 bp, Artificial Sequence
  Description of Artificial Sequence: Synthetic oligonucleotide
  Target: ATXN2; (+) strand; PAM type: NRG; PAM sequence: GAG
caggaagcgaaggctgcagt

SEQ ID NO: 39721 - DNA, 20 bp, Artificial Sequence
  Description of Artificial Sequence: Synthetic oligonucleotide
  Target: ATXN2; (+) strand; PAM type: NRG; PAM sequence: GAG
agcgaaggctgcagtgagcc

SEQ ID NO: 39722 - DNA, 20 bp, Artificial Sequence
  Description of Artificial Sequence: Synthetic oligonucleotide
  Target: ATXN2; (+) strand; PAM type: NRG; PAM sequence: CAG
gagattgtgccactgtgctc

SEQ ID NO: 39723 - DNA, 20 bp, Artificial Sequence
  Description of Artificial Sequence: Synthetic oligonucleotide
  Target: ATXN2; (+) strand; PAM type: NRG; PAM sequence: TGG
tgtgccactgtgctccagcc

SEQ ID NO: 39724 - DNA, 20 bp, Artificial Sequence
  Description of Artificial Sequence: Synthetic oligonucleotide
  Target: ATXN2; (+) strand; PAM type: NRG; PAM sequence: GGG
gtgccactgtgctccagcct

SEQ ID NO: 39725 - DNA, 20 bp, Artificial Sequence
  Description of Artificial Sequence: Synthetic oligonucleotide
  Target: ATXN2; (+) strand; PAM type: NRG; PAM sequence: TAG
caatgacacttcataaccac

SEQ ID NO: 39726 - DNA, 20 bp, Artificial Sequence
  Description of Artificial Sequence: Synthetic oligonucleotide
  Target: ATXN2; (+) strand; PAM type: NRG; PAM sequence: TGG
acacttcataaccactagaa

SEQ ID NO: 39727 - DNA, 20 bp, Artificial Sequence
  Description of Artificial Sequence: Synthetic oligonucleotide
  Target: ATXN2; (+) strand; PAM type: NRG; PAM sequence: AAG
aatggacataacccaaacca

SEQ ID NO: 39728 - DNA, 20 bp, Artificial Sequence
  Description of Artificial Sequence: Synthetic oligonucleotide
  Target: ATXN2; (+) strand; PAM type: NRG; PAM sequence: CGG
aacccaaaccaaagacatat

SEQ ID NO: 39729 - DNA, 20 bp, Artificial Sequence
  Description of Artificial Sequence: Synthetic oligonucleotide
  Target: ATXN2; (+) strand; PAM type: NRG; PAM sequence: GAG
aagacatatcggttatttat

SEQ ID NO: 39730 - DNA, 20 bp, Artificial Sequence
  Description of Artificial Sequence: Synthetic oligonucleotide
  Target: ATXN2; (+) strand; PAM type: NRG; PAM sequence: AGG
agacatatcggttatttatg

SEQ ID NO: 39731 - DNA, 20 bp, Artificial Sequence
  Description of Artificial Sequence: Synthetic oligonucleotide
  Target: ATXN2; (+) strand; PAM type: NRG; PAM sequence: TGG
atcggttatttatgaggatg

SEQ ID NO: 39732 - DNA, 20 bp, Artificial Sequence
  Description of Artificial Sequence: Synthetic oligonucleotide
  Target: ATXN2; (+) strand; PAM type: NRG; PAM sequence: GAG
cggttatttatgaggatgtg

SEQ ID NO: 39733 - DNA, 20 bp, Artificial Sequence
  Description of Artificial Sequence: Synthetic oligonucleotide
  Target: ATXN2; (+) strand; PAM type: NRG; PAM sequence: TGG
ttatgaggatgtggagaaac

SEQ ID NO: 39734 - DNA, 20 bp, Artificial Sequence
  Description of Artificial Sequence: Synthetic oligonucleotide
  Target: ATXN2; (+) strand; PAM type: NRG; PAM sequence: TGG
ctggaacacttgtacattac

SEQ ID NO: 39735 - DNA, 20 bp, Artificial Sequence
  Description of Artificial Sequence: Synthetic oligonucleotide
  Target: ATXN2; (+) strand; PAM type: NRG; PAM sequence: TAG
gaacacttgtacattactgg

SEQ ID NO: 39736 - DNA, 20 bp, Artificial Sequence
  Description of Artificial Sequence: Synthetic oligonucleotide
  Target: ATXN2; (+) strand; PAM type: NRG; PAM sequence: CAG
ggtagaaatacaaaatgatg

SEQ ID NO: 39737 - DNA, 20 bp, Artificial Sequence
  Description of Artificial Sequence: Synthetic oligonucleotide
  Target: ATXN2; (+) strand; PAM type: NRG; PAM sequence: TGG
acaaaatgatgcagctgctt

SEQ ID NO: 39738 - DNA, 20 bp, Artificial Sequence
  Description of Artificial Sequence: Synthetic oligonucleotide
  Target: ATXN2; (+) strand; PAM type: NRG; PAM sequence: AAG
atgatgcagctgctttggaa

SEQ ID NO: 39739 - DNA, 20 bp, Artificial Sequence
  Description of Artificial Sequence: Synthetic oligonucleotide
  Target: ATXN2; (+) strand; PAM type: NRG; PAM sequence: TGG
gcagctgctttggaaaagtt

SEQ ID NO: 39740 - DNA, 20 bp, Artificial Sequence
  Description of Artificial Sequence: Synthetic oligonucleotide
  Target: ATXN2; (+) strand; PAM type: NRG; PAM sequence: CAG
gctgctttggaaaagtttgg

SEQ ID NO: 39741 - DNA, 20 bp, Artificial Sequence
  Description of Artificial Sequence: Synthetic oligonucleotide
  Target: ATXN2; (+) strand; PAM type: NRG; PAM sequence: CAG
aaagtttggcagttccatca

SEQ ID NO: 39742 - DNA, 20 bp, Artificial Sequence
  Description of Artificial Sequence: Synthetic oligonucleotide
  Target: ATXN2; (+) strand; PAM type: NRG; PAM sequence: TAG
ccatcacagcatttctactt

SEQ ID NO: 39743 - DNA, 20 bp, Artificial Sequence
  Description of Artificial Sequence: Synthetic oligonucleotide
  Target: ATXN2; (+) strand; PAM type: NRG; PAM sequence: AGG
catcacagcatttctacttt

SEQ ID NO: 39744 - DNA, 20 bp, Artificial Sequence
  Description of Artificial Sequence: Synthetic oligonucleotide
  Target: ATXN2; (+) strand; PAM type: NRG; PAM sequence: GAG
tcacagcatttctactttag

SEQ ID NO: 39745 - DNA, 20 bp, Artificial Sequence
  Description of Artificial Sequence: Synthetic oligonucleotide
  Target: ATXN2; (+) strand; PAM type: NRG; PAM sequence: AAG
tttaggagaaatgaaaatct

SEQ ID NO: 39746 - DNA, 20 bp, Artificial Sequence
  Description of Artificial Sequence: Synthetic oligonucleotide
  Target: ATXN2; (+) strand; PAM type: NRG; PAM sequence: AGG
ttaggagaaatgaaaatcta

SEQ ID NO: 39747 - DNA, 20 bp, Artificial Sequence
  Description of Artificial Sequence: Synthetic oligonucleotide
  Target: ATXN2; (+) strand; PAM type: NRG; PAM sequence: GAG
aattttattttttatttttt

SEQ ID NO: 39748 - DNA, 20 bp, Artificial Sequence
  Description of Artificial Sequence: Synthetic oligonucleotide
  Target: ATXN2; (+) strand; PAM type: NRG; PAM sequence: CAG
ttgagactcactctttcact

SEQ ID NO: 39749 - DNA, 20 bp, Artificial Sequence
  Description of Artificial Sequence: Synthetic oligonucleotide
  Target: ATXN2; (+) strand; PAM type: NRG; PAM sequence: AGG
tgagactcactctttcactc

SEQ ID NO: 39750 - DNA, 20 bp, Artificial Sequence
  Description of Artificial Sequence: Synthetic oligonucleotide
  Target: ATXN2; (+) strand; PAM type: NRG; PAM sequence: TGG
actcactctttcactcaggc

SEQ ID NO: 39751 - DNA, 20 bp, Artificial Sequence
  Description of Artificial Sequence: Synthetic oligonucleotide
  Target: ATXN2; (+) strand; PAM type: NRG; PAM sequence: GGG
ctcactctttcactcaggct

SEQ ID NO: 39752 - DNA, 20 bp, Artificial Sequence
  Description of Artificial Sequence: Synthetic oligonucleotide
  Target: ATXN2; (+) strand; PAM type: NRG; PAM sequence: GGG
tcactctttcactcaggctg

SEQ ID NO: 39753 - DNA, 20 bp, Artificial Sequence
  Description of Artificial Sequence: Synthetic oligonucleotide
  Target: ATXN2; (+) strand; PAM type: NRG; PAM sequence: CAG
ctttcactcaggctggggtg

SEQ ID NO: 39754 - DNA, 20 bp, Artificial Sequence
  Description of Artificial Sequence: Synthetic oligonucleotide
  Target: ATXN2; (+) strand; PAM type: NRG; PAM sequence: TGG
tcactcaggctggggtgcag

SEQ ID NO: 39755 - DNA, 20 bp, Artificial Sequence
  Description of Artificial Sequence: Synthetic oligonucleotide
  Target: ATXN2; (+) strand; PAM type: NRG; PAM sequence: CAG
ggggtgcagtggtgtgatct

SEQ ID NO: 39756 - DNA, 20 bp, Artificial Sequence
  Description of Artificial Sequence: Synthetic oligonucleotide
  Target: ATXN2; (+) strand; PAM type: NRG; PAM sequence: CAG
ggtgtgatctcagctcactg

SEQ ID NO: 39757 - DNA, 20 bp, Artificial Sequence
  Description of Artificial Sequence: Synthetic oligonucleotide
  Target: ATXN2; (+) strand; PAM type: NRG; PAM sequence: CAG
tcactgcagcctccgcctcc

SEQ ID NO: 39758 - DNA, 20 bp, Artificial Sequence
  Description of Artificial Sequence: Synthetic oligonucleotide
  Target: ATXN2; (+) strand; PAM type: NRG; PAM sequence: AGG
cactgcagcctccgcctccc

SEQ ID NO: 39759 - DNA, 20 bp, Artificial Sequence
  Description of Artificial Sequence: Synthetic oligonucleotide
  Target: ATXN2; (+) strand; PAM type: NRG; PAM sequence: AAG
agcctccgcctcccaggttc

SEQ ID NO: 39760 - DNA, 20 bp, Artificial Sequence
  Description of Artificial Sequence: Synthetic oligonucleotide
  Target: ATXN2; (+) strand; PAM type: NRG; PAM sequence: CAG
cgattctgatgctcctgcct

SEQ ID NO: 39761 - DNA, 20 bp, Artificial Sequence
  Description of Artificial Sequence: Synthetic oligonucleotide
  Target: ATXN2; (+) strand; PAM type: NRG; PAM sequence: TAG
tcctgcctcagcctcctgaa

SEQ ID NO: 39762 - DNA, 20 bp, Artificial Sequence
  Description of Artificial Sequence: Synthetic oligonucleotide
  Target: ATXN2; (+) strand; PAM type: NRG; PAM sequence: TGG
gcctcagcctcctgaatagc

SEQ ID NO: 39763 - DNA, 20 bp, Artificial Sequence
  Description of Artificial Sequence: Synthetic oligonucleotide
  Target: ATXN2; (+) strand; PAM type: NRG; PAM sequence: GGG
cctcagcctcctgaatagct

SEQ ID NO: 39764 - DNA, 20 bp, Artificial Sequence
  Description of Artificial Sequence: Synthetic oligonucleotide
  Target: ATXN2; (+) strand; PAM type: NRG; PAM sequence: TAG
ctcctgaatagctgggatta

SEQ ID NO: 39765 - DNA, 20 bp, Artificial Sequence
  Description of Artificial Sequence: Synthetic oligonucleotide
  Target: ATXN2; (+) strand; PAM type: NRG; PAM sequence: AGG
tcctgaatagctgggattat

SEQ ID NO: 39766 - DNA, 20 bp, Artificial Sequence
  Description of Artificial Sequence: Synthetic oligonucleotide
  Target: ATXN2; (+) strand; PAM type: NRG; PAM sequence: CAG
ataggtgcacgctaccatgc

SEQ ID NO: 39767 - DNA, 20 bp, Artificial Sequence
  Description of Artificial Sequence: Synthetic oligonucleotide
  Target: ATXN2; (+) strand; PAM type: NRG; PAM sequence: TAG
cagtgtaatttttgtatttt

SEQ ID NO: 39768 - DNA, 20 bp, Artificial Sequence
  Description of Artificial Sequence: Synthetic oligonucleotide
  Target: ATXN2; (+) strand; PAM type: NRG; PAM sequence: TAG
tgtaatttttgtatttttag

SEQ ID NO: 39769 - DNA, 20 bp, Artificial Sequence
  Description of Artificial Sequence: Synthetic oligonucleotide
  Target: ATXN2; (+) strand; PAM type: NRG; PAM sequence: GAG
taatttttgtatttttagta

SEQ ID NO: 39770 - DNA, 20 bp, Artificial Sequence
  Description of Artificial Sequence: Synthetic oligonucleotide
  Target: ATXN2; (+) strand; PAM type: NRG; PAM sequence: TGG
ttttgtatttttagtagaga

SEQ ID NO: 39771 - DNA, 20 bp, Artificial Sequence
  Description of Artificial Sequence: Synthetic oligonucleotide
  Target: ATXN2; (+) strand; PAM type: NRG; PAM sequence: GGG
tttgtatttttagtagagat

SEQ ID NO: 39772 - DNA, 20 bp, Artificial Sequence
  Description of Artificial Sequence: Synthetic oligonucleotide
  Target: ATXN2; (+) strand; PAM type: NRG; PAM sequence: TGG
gagatgggatttcaccatgt

SEQ ID NO: 39773 - DNA, 20 bp, Artificial Sequence
  Description of Artificial Sequence: Synthetic oligonucleotide
  Target: ATXN2; (+) strand; PAM type: NRG; PAM sequence: CAG
tgggatttcaccatgttggc

SEQ ID NO: 39774 - DNA, 20 bp, Artificial Sequence
  Description of Artificial Sequence: Synthetic oligonucleotide
  Target: ATXN2; (+) strand; PAM type: NRG; PAM sequence: AGG
gggatttcaccatgttggcc

SEQ ID NO: 39775 - DNA, 20 bp, Artificial Sequence
  Description of Artificial Sequence: Synthetic oligonucleotide
  Target: ATXN2; (+) strand; PAM type: NRG; PAM sequence: TGG
tttcaccatgttggccaggc

SEQ ID NO: 39776 - DNA, 20 bp, Artificial Sequence
  Description of Artificial Sequence: Synthetic oligonucleotide
  Target: ATXN2; (+) strand; PAM type: NRG; PAM sequence: AAG
ggtctcaaactcctgacctc

SEQ ID NO: 39777 - DNA, 20 bp, Artificial Sequence
  Description of Artificial Sequence: Synthetic oligonucleotide
  Target: ATXN2; (+) strand; PAM type: NRG; PAM sequence: CAG
ctcaagtcatctgcccacct

SEQ ID NO: 39778 - DNA, 20 bp, Artificial Sequence
  Description of Artificial Sequence: Synthetic oligonucleotide
  Target: ATXN2; (+) strand; PAM type: NRG; PAM sequence: CAG
atctgcccacctcagcctcc

SEQ ID NO: 39779 - DNA, 20 bp, Artificial Sequence
  Description of Artificial Sequence: Synthetic oligonucleotide
  Target: ATXN2; (+) strand; PAM type: NRG; PAM sequence: TGG
acctcagcctcccagactgc

SEQ ID NO: 39780 - DNA, 20 bp, Artificial Sequence
  Description of Artificial Sequence: Synthetic oligonucleotide
  Target: ATXN2; (+) strand; PAM type: NRG; PAM sequence: GGG
cctcagcctcccagactgct

SEQ ID NO: 39781 - DNA, 20 bp, Artificial Sequence
  Description of Artificial Sequence: Synthetic oligonucleotide
  Target: ATXN2; (+) strand; PAM type: NRG; PAM sequence: TAG
ctcccagactgctgggatta

SEQ ID NO: 39782 - DNA, 20 bp, Artificial Sequence
  Description of Artificial Sequence: Synthetic oligonucleotide
  Target: ATXN2; (+) strand; PAM type: NRG; PAM sequence: AGG
tcccagactgctgggattat

SEQ ID NO: 39783 - DNA, 20 bp, Artificial Sequence
  Description of Artificial Sequence: Synthetic oligonucleotide
  Target: ATXN2; (+) strand; PAM type: NRG; PAM sequence: GAG
actgctgggattataggcat

SEQ ID NO: 39784 - DNA, 20 bp, Artificial Sequence
  Description of Artificial Sequence: Synthetic oligonucleotide
  Target: ATXN2; (+) strand; PAM type: NRG; PAM sequence: CAG
taggcatgagccactgctcc

SEQ ID NO: 39785 - DNA, 20 bp, Artificial Sequence
  Description of Artificial Sequence: Synthetic oligonucleotide
  Target: ATXN2; (+) strand; PAM type: NRG; PAM sequence: AAG
ttgtacatgaaaatccacaa

SEQ ID NO: 39786 - DNA, 20 bp, Artificial Sequence
  Description of Artificial Sequence: Synthetic oligonucleotide
  Target: ATXN2; (+) strand; PAM type: NRG; PAM sequence: CAG
acaaaagcattactcattgc

SEQ ID NO: 39787 - DNA, 20 bp, Artificial Sequence
  Description of Artificial Sequence: Synthetic oligonucleotide
  Target: ATXN2; (+) strand; PAM type: NRG; PAM sequence: AAG
gcattactcattgccagaaa

SEQ ID NO: 39788 - DNA, 20 bp, Artificial Sequence
  Description of Artificial Sequence: Synthetic oligonucleotide
  Target: ATXN2; (+) strand; PAM type: NRG; PAM sequence: AGG
cattactcattgccagaaaa

SEQ ID NO: 39789 - DNA, 20 bp, Artificial Sequence
  Description of Artificial Sequence: Synthetic oligonucleotide
  Target: ATXN2; (+) strand; PAM type: NRG; PAM sequence: TAG
aaatgttcatcaactgatga

SEQ ID NO: 39790 - DNA, 20 bp, Artificial Sequence
  Description of Artificial Sequence: Synthetic oligonucleotide
  Target: ATXN2; (+) strand; PAM type: NRG; PAM sequence: AGG
aatgttcatcaactgatgat

SEQ ID NO: 39791 - DNA, 20 bp, Artificial Sequence
  Description of Artificial Sequence: Synthetic oligonucleotide
  Target: ATXN2; (+) strand; PAM type: NRG; PAM sequence: AAG
catcaactgatgataggtaa

SEQ ID NO: 39792 - DNA, 20 bp, Artificial Sequence
  Description of Artificial Sequence: Synthetic oligonucleotide
  Target: ATXN2; (+) strand; PAM type: NRG; PAM sequence: TGG
caactgatgataggtaaaag

SEQ ID NO: 39793 - DNA, 20 bp, Artificial Sequence
  Description of Artificial Sequence: Synthetic oligonucleotide
  Target: ATXN2; (+) strand; PAM type: NRG; PAM sequence: CAG
ataggtaaaagtggtatatt

SEQ ID NO: 39794 - DNA, 20 bp, Artificial Sequence
  Description of Artificial Sequence: Synthetic oligonucleotide
  Target: ATXN2; (+) strand; PAM type: NRG; PAM sequence: AGG
taggtaaaagtggtatattc

SEQ ID NO: 39795 - DNA, 20 bp, Artificial Sequence
  Description of Artificial Sequence: Synthetic oligonucleotide
  Target: ATXN2; (+) strand; PAM type: NRG; PAM sequence: CAG
taaaagtggtatattcaggc

SEQ ID NO: 39796 - DNA, 20 bp, Artificial Sequence
  Description of Artificial Sequence: Synthetic oligonucleotide
  Target: ATXN2; (+) strand; PAM type: NRG; PAM sequence: AGG
aaaagtggtatattcaggcc

SEQ ID NO: 39797 - DNA, 20 bp, Artificial Sequence
  Description of Artificial Sequence: Synthetic oligonucleotide
  Target: ATXN2; (+) strand; PAM type: NRG; PAM sequence: GAG
aagtggtatattcaggccag

SEQ ID NO: 39798 - DNA, 20 bp, Artificial Sequence
  Description of Artificial Sequence: Synthetic oligonucleotide
  Target: ATXN2; (+) strand; PAM type: NRG; PAM sequence: CAG
tggtatattcaggccaggag

SEQ ID NO: 39799 - DNA, 20 bp, Artificial Sequence
  Description of Artificial Sequence: Synthetic oligonucleotide
  Target: ATXN2; (+) strand; PAM type: NRG; PAM sequence: TGG
tatattcaggccaggagcag

SEQ ID NO: 39800 - DNA, 20 bp, Artificial Sequence
  Description of Artificial Sequence: Synthetic oligonucleotide
  Target: ATXN2; (+) strand; PAM type: NRG; PAM sequence: CAG
gtggctcacacctgtaatcc

SEQ ID NO: 39801 - DNA, 20 bp, Artificial Sequence
  Description of Artificial Sequence: Synthetic oligonucleotide
  Target: ATXN2; (+) strand; PAM type: NRG; PAM sequence: TGG
cacctgtaatcccagcactt

SEQ ID NO: 39802 - DNA, 20 bp, Artificial Sequence
  Description of Artificial Sequence: Synthetic oligonucleotide
  Target: ATXN2; (+) strand; PAM type: NRG; PAM sequence: GGG
acctgtaatcccagcacttt

SEQ ID NO: 39803 - DNA, 20 bp, Artificial Sequence
  Description of Artificial Sequence: Synthetic oligonucleotide
  Target: ATXN2; (+) strand; PAM type: NRG; PAM sequence: GAG
ctgtaatcccagcactttgg

SEQ ID NO: 39804 - DNA, 20 bp, Artificial Sequence
  Description of Artificial Sequence: Synthetic oligonucleotide
  Target: ATXN2; (+) strand; PAM type: NRG; PAM sequence: AGG
tgtaatcccagcactttggg

SEQ ID NO: 39805 - DNA, 20 bp, Artificial Sequence
  Description of Artificial Sequence: Synthetic oligonucleotide
  Target: ATXN2; (+) strand; PAM type: NRG; PAM sequence: GAG
tcccagcactttgggaggcc

SEQ ID NO: 39806 - DNA, 20 bp, Artificial Sequence
  Description of Artificial Sequence: Synthetic oligonucleotide
  Target: ATXN2; (+) strand; PAM type: NRG; PAM sequence: AGG
cccagcactttgggaggccg

SEQ ID NO: 39807 - DNA, 20 bp, Artificial Sequence
  Description of Artificial Sequence: Synthetic oligonucleotide
  Target: ATXN2; (+) strand; PAM type: NRG; PAM sequence: GGG
ccagcactttgggaggccga

SEQ ID NO: 39808 - DNA, 20 bp, Artificial Sequence
  Description of Artificial Sequence: Synthetic oligonucleotide
  Target: ATXN2; (+) strand; PAM type: NRG; PAM sequence: GAG
agcactttgggaggccgagg

SEQ ID NO: 39809 - DNA, 20 bp, Artificial Sequence
  Description of Artificial Sequence: Synthetic oligonucleotide
  Target: ATXN2; (+) strand; PAM type: NRG; PAM sequence: AGG
gcactttgggaggccgaggg

SEQ ID NO: 39810 - DNA, 20 bp, Artificial Sequence
  Description of Artificial Sequence: Synthetic oligonucleotide
  Target: ATXN2; (+) strand; PAM type: NRG; PAM sequence: TGG
ctttgggaggccgagggagg

SEQ ID NO: 39811 - DNA, 20 bp, Artificial Sequence
  Description of Artificial Sequence: Synthetic oligonucleotide
  Target: ATXN2; (+) strand; PAM type: NRG; PAM sequence: GAG
ccgagggaggtggatcactt

SEQ ID NO: 39812 - DNA, 20 bp, Artificial Sequence
  Description of Artificial Sequence: Synthetic oligonucleotide
  Target: ATXN2; (+) strand; PAM type: NRG; PAM sequence: AGG
cgagggaggtggatcacttg

SEQ ID NO: 39813 - DNA, 20 bp, Artificial Sequence
  Description of Artificial Sequence: Synthetic oligonucleotide
  Target: ATXN2; (+) strand; PAM type: NRG; PAM sequence: CAG
ggaggtggatcacttgaggc

SEQ ID NO: 39814 - DNA, 20 bp, Artificial Sequence
  Description of Artificial Sequence: Synthetic oligonucleotide
  Target: ATXN2; (+) strand; PAM type: NRG; PAM sequence: AGG
gaggtggatcacttgaggcc

SEQ ID NO: 39815 - DNA, 20 bp, Artificial Sequence
  Description of Artificial Sequence: Synthetic oligonucleotide
  Target: ATXN2; (+) strand; PAM type: NRG; PAM sequence: GAG
ggtggatcacttgaggccag

SEQ ID NO: 39816 - DNA, 20 bp, Artificial Sequence
  Description of Artificial Sequence: Synthetic oligonucleotide
  Target: ATXN2; (+) strand; PAM type: NRG; PAM sequence: AAG
tcacttgaggccaggagttc

SEQ ID NO: 39817 - DNA, 20 bp, Artificial Sequence
  Description of Artificial Sequence: Synthetic oligonucleotide
  Target: ATXN2; (+) strand; PAM type: NRG; PAM sequence: CAG
tgaggccaggagttcaagac

SEQ ID NO: 39818 - DNA, 20 bp, Artificial Sequence
  Description of Artificial Sequence: Synthetic oligonucleotide
  Target: ATXN2; (+) strand; PAM type: NRG; PAM sequence: CGG
ccaggagttcaagaccagcc

SEQ ID NO: 39819 - DNA, 20 bp, Artificial Sequence
  Description of Artificial Sequence: Synthetic oligonucleotide
  Target: ATXN2; (+) strand; PAM type: NRG; PAM sequence: TGG
caagaccagcccggccaaca

SEQ ID NO: 39820 - DNA, 20 bp, Artificial Sequence
  Description of Artificial Sequence: Synthetic oligonucleotide
  Target: ATXN2; (+) strand; PAM type: NRG; PAM sequence: AAG
ccagcccggccaacatggca

SEQ ID NO: 39821 - DNA, 20 bp, Artificial Sequence
  Description of Artificial Sequence: Synthetic oligonucleotide
  Target: ATXN2; (+) strand; PAM type: NRG; PAM sequence: GAG
tttttttttttttttttttt

SEQ ID NO: 39822 - DNA, 20 bp, Artificial Sequence
  Description of Artificial Sequence: Synthetic oligonucleotide
  Target: ATXN2; (+) strand; PAM type: NRG; PAM sequence: CGG
ttttttttttttttttgaga

SEQ ID NO: 39823 - DNA, 20 bp, Artificial Sequence
  Description of Artificial Sequence: Synthetic oligonucleotide
  Target: ATXN2; (+) strand; PAM type: NRG; PAM sequence: GAG
ttttttttttttttgagacg

SEQ ID NO: 39824 - DNA, 20 bp, Artificial Sequence
  Description of Artificial Sequence: Synthetic oligonucleotide
  Target: ATXN2; (+) strand; PAM type: NRG; PAM sequence: CAG
cggagtctcgctctgtcacc

SEQ ID NO: 39825 - DNA, 20 bp, Artificial Sequence
  Description of Artificial Sequence: Synthetic oligonucleotide
  Target: ATXN2; (+) strand; PAM type: NRG; PAM sequence: AGG
ggagtctcgctctgtcaccc

SEQ ID NO: 39826 - DNA, 20 bp, Artificial Sequence
  Description of Artificial Sequence: Synthetic oligonucleotide
  Target: ATXN2; (+) strand; PAM type: NRG; PAM sequence: TGG
tctcgctctgtcacccaggc

SEQ ID NO: 39827 - DNA, 20 bp, Artificial Sequence
  Description of Artificial Sequence: Synthetic oligonucleotide
  Target: ATXN2; (+) strand; PAM type: NRG; PAM sequence: GAG
tcgctctgtcacccaggctg

SEQ ID NO: 39828 - DNA, 20 bp, Artificial Sequence
  Description of Artificial Sequence: Synthetic oligonucleotide
  Target: ATXN2; (+) strand; PAM type: NRG; PAM sequence: CAG
ctgtcacccaggctggagtg

SEQ ID NO: 39829 - DNA, 20 bp, Artificial Sequence
  Description of Artificial Sequence: Synthetic oligonucleotide
  Target: ATXN2; (+) strand; PAM type: NRG; PAM sequence: TGG
tcacccaggctggagtgcag

SEQ ID NO: 39830 - DNA, 20 bp, Artificial Sequence
  Description of Artificial Sequence: Synthetic oligonucleotide
  Target: ATXN2; (+) strand; PAM type: NRG; PAM sequence: CAG
ggagtgcagtggcaccatct

SEQ ID NO: 39831 - DNA, 20 bp, Artificial Sequence
  Description of Artificial Sequence: Synthetic oligonucleotide
  Target: ATXN2; (+) strand; PAM type: NRG; PAM sequence: CAG
gcaccatctcagctcactgc

SEQ ID NO: 39832 - DNA, 20 bp, Artificial Sequence
  Description of Artificial Sequence: Synthetic oligonucleotide
  Target: ATXN2; (+) strand; PAM type: NRG; PAM sequence: CAG
tcactgccagctctgcctcc

SEQ ID NO: 39833 - DNA, 20 bp, Artificial Sequence
  Description of Artificial Sequence: Synthetic oligonucleotide
  Target: ATXN2; (+) strand; PAM type: NRG; PAM sequence: AGG
cactgccagctctgcctccc

SEQ ID NO: 39834 - DNA, 20 bp, Artificial Sequence
  Description of Artificial Sequence: Synthetic oligonucleotide
  Target: ATXN2; (+) strand; PAM type: NRG; PAM sequence: CAG
ttcatgccattctcctgcct

SEQ ID NO: 39835 - DNA, 20 bp, Artificial Sequence
  Description of Artificial Sequence: Synthetic oligonucleotide
  Target: ATXN2; (+) strand; PAM type: NRG; PAM sequence: GAG
ttctcctgcctcagcctccc

SEQ ID NO: 39836 - DNA, 20 bp, Artificial Sequence
  Description of Artificial Sequence: Synthetic oligonucleotide
  Target: ATXN2; (+) strand; PAM type: NRG; PAM sequence: TAG
tcctgcctcagcctcccgag

SEQ ID NO: 39837 - DNA, 20 bp, Artificial Sequence
  Description of Artificial Sequence: Synthetic oligonucleotide
  Target: ATXN2; (+) strand; PAM type: NRG; PAM sequence: TGG
gcctcagcctcccgagtagc

SEQ ID NO: 39838 - DNA, 20 bp, Artificial Sequence
  Description of Artificial Sequence: Synthetic oligonucleotide
  Target: ATXN2; (+) strand; PAM type: NRG; PAM sequence: GGG
cctcagcctcccgagtagct

SEQ ID NO: 39839 - DNA, 20 bp, Artificial Sequence
  Description of Artificial Sequence: Synthetic oligonucleotide
  Target: ATXN2; (+) strand; PAM type: NRG; PAM sequence: TAG
ctcccgagtagctgggacta

SEQ ID NO: 39840 - DNA, 20 bp, Artificial Sequence
  Description of Artificial Sequence: Synthetic oligonucleotide
  Target: ATXN2; (+) strand; PAM type: NRG; PAM sequence: AGG
tcccgagtagctgggactat

SEQ ID NO: 39841 - DNA, 20 bp, Artificial Sequence
  Description of Artificial Sequence: Synthetic oligonucleotide
  Target: ATXN2; (+) strand; PAM type: NRG; PAM sequence: CAG
taggcacctgccaccacgct

SEQ ID NO: 39842 - DNA, 20 bp, Artificial Sequence
  Description of Artificial Sequence: Synthetic oligonucleotide
  Target: ATXN2; (+) strand; PAM type: NRG; PAM sequence: TAG
cagctaattgtttgtatttt

SEQ ID NO: 39843 - DNA, 20 bp, Artificial Sequence
  Description of Artificial Sequence: Synthetic oligonucleotide
  Target: ATXN2; (+) strand; PAM type: NRG; PAM sequence: TAG
ctaattgtttgtatttttag

SEQ ID NO: 39844 - DNA, 20 bp, Artificial Sequence
  Description of Artificial Sequence: Synthetic oligonucleotide
  Target: ATXN2; (+) strand; PAM type: NRG; PAM sequence: GAG
aattgtttgtatttttagta

SEQ ID NO: 39845 - DNA, 20 bp, Artificial Sequence
  Description of Artificial Sequence: Synthetic oligonucleotide
  Target: ATXN2; (+) strand; PAM type: NRG; PAM sequence: CGG
ttgtatttttagtagagaca

SEQ ID NO: 39846 - DNA, 20 bp, Artificial Sequence
  Description of Artificial Sequence: Synthetic oligonucleotide
  Target: ATXN2; (+) strand; PAM type: NRG; PAM sequence: TAG
gagacacggtttcactgtat

SEQ ID NO: 39847 - DNA, 20 bp, Artificial Sequence
  Description of Artificial Sequence: Synthetic oligonucleotide
  Target: ATXN2; (+) strand; PAM type: NRG; PAM sequence: CAG
cacggtttcactgtattagc

SEQ ID NO: 39848 - DNA, 20 bp, Artificial Sequence
  Description of Artificial Sequence: Synthetic oligonucleotide
  Target: ATXN2; (+) strand; PAM type: NRG; PAM sequence: AGG
acggtttcactgtattagcc

SEQ ID NO: 39849 - DNA, 20 bp, Artificial Sequence
  Description of Artificial Sequence: Synthetic oligonucleotide
  Target: ATXN2; (+) strand; PAM type: NRG; PAM sequence: TGG
tttcactgtattagccagga

SEQ ID NO: 39850 - DNA, 20 bp, Artificial Sequence
  Description of Artificial Sequence: Synthetic oligonucleotide
  Target: ATXN2; (+) strand; PAM type: NRG; PAM sequence: CGG
acctcgtgatctgcccacct

SEQ ID NO: 39851 - DNA, 20 bp, Artificial Sequence
  Description of Artificial Sequence: Synthetic oligonucleotide
  Target: ATXN2; (+) strand; PAM type: NRG; PAM sequence: AAG
ctgcccacctcggcctccca

SEQ ID NO: 39852 - DNA, 20 bp, Artificial Sequence
  Description of Artificial Sequence: Synthetic oligonucleotide
  Target: ATXN2; (+) strand; PAM type: NRG; PAM sequence: TGG
acctcggcctcccaaagtgc

SEQ ID NO: 39853 - DNA, 20 bp, Artificial Sequence
  Description of Artificial Sequence: Synthetic oligonucleotide
  Target: ATXN2; (+) strand; PAM type: NRG; PAM sequence: CAG
cctcccaaagtgctggatta

SEQ ID NO: 39854 - DNA, 20 bp, Artificial Sequence
  Description of Artificial Sequence: Synthetic oligonucleotide
  Target: ATXN2; (+) strand; PAM type: NRG; PAM sequence: AGG
ctcccaaagtgctggattac

SEQ ID NO: 39855 - DNA, 20 bp, Artificial Sequence
  Description of Artificial Sequence: Synthetic oligonucleotide
  Target: ATXN2; (+) strand; PAM type: NRG; PAM sequence: GAG
aagtgctggattacaggcgt

SEQ ID NO: 39856 - DNA, 20 bp, Artificial Sequence
  Description of Artificial Sequence: Synthetic oligonucleotide
  Target: ATXN2; (+) strand; PAM type: NRG; PAM sequence: CAG
caggcgtgagccaccgtgcc

SEQ ID NO: 39857 - DNA, 20 bp, Artificial Sequence
  Description of Artificial Sequence: Synthetic oligonucleotide
  Target: ATXN2; (+) strand; PAM type: NRG; PAM sequence: GAG
agccaccgtgcccagactct

SEQ ID NO: 39858 - DNA, 20 bp, Artificial Sequence
  Description of Artificial Sequence: Synthetic oligonucleotide
  Target: ATXN2; (+) strand; PAM type: NRG; PAM sequence: AAG
agtatatcatttctattaaa

SEQ ID NO: 39859 - DNA, 20 bp, Artificial Sequence
  Description of Artificial Sequence: Synthetic oligonucleotide
  Target: ATXN2; (+) strand; PAM type: NRG; PAM sequence: CAG
tatcatttctattaaaaaga

SEQ ID NO: 39860 - DNA, 20 bp, Artificial Sequence
  Description of Artificial Sequence: Synthetic oligonucleotide
  Target: ATXN2; (+) strand; PAM type: NRG; PAM sequence: AAG
taaaaagacagtacctcctg

SEQ ID NO: 39861 - DNA, 20 bp, Artificial Sequence
  Description of Artificial Sequence: Synthetic oligonucleotide
  Target: ATXN2; (+) strand; PAM type: NRG; PAM sequence: TAG
aagacagtacctcctgaagt

SEQ ID NO: 39862 - DNA, 20 bp, Artificial Sequence
  Description of Artificial Sequence: Synthetic oligonucleotide
  Target: ATXN2; (+) strand; PAM type: NRG; PAM sequence: CAG
ttagaatgtgactctcccat

SEQ ID NO: 39863 - DNA, 20 bp, Artificial Sequence
  Description of Artificial Sequence: Synthetic oligonucleotide
  Target: ATXN2; (+) strand; PAM type: NRG; PAM sequence: TAG
aatgtgactctcccatcaga

SEQ ID NO: 39864 - DNA, 20 bp, Artificial Sequence
  Description of Artificial Sequence: Synthetic oligonucleotide
  Target: ATXN2; (+) strand; PAM type: NRG; PAM sequence: CAG
tgtcatgcttgctcttacta

SEQ ID NO: 39865 - DNA, 20 bp, Artificial Sequence
  Description of Artificial Sequence: Synthetic oligonucleotide
  Target: ATXN2; (+) strand; PAM type: NRG; PAM sequence: AAG
tatattttaatgacaacaaa

SEQ ID NO: 39866 - DNA, 20 bp, Artificial Sequence
  Description of Artificial Sequence: Synthetic oligonucleotide
  Target: ATXN2; (+) strand; PAM type: NRG; PAM sequence: AAG
agttcccattgcattgtttt

SEQ ID NO: 39867 - DNA, 20 bp, Artificial Sequence
  Description of Artificial Sequence: Synthetic oligonucleotide
  Target: ATXN2; (+) strand; PAM type: NRG; PAM sequence: CAG
ttttaagtaatcattgaaaa

SEQ ID NO: 39868 - DNA, 20 bp, Artificial Sequence
  Description of Artificial Sequence: Synthetic oligonucleotide
  Target: ATXN2; (+) strand; PAM type: NRG; PAM sequence: TGG
ttgaaaacagctacacctgc

SEQ ID NO: 39869 - DNA, 20 bp, Artificial Sequence
  Description of Artificial Sequence: Synthetic oligonucleotide
  Target: ATXN2; (+) strand; PAM type: NRG; PAM sequence: TGG
accttaacactacattaaaa

SEQ ID NO: 39870 - DNA, 20 bp, Artificial Sequence
  Description of Artificial Sequence: Synthetic oligonucleotide
  Target: ATXN2; (+) strand; PAM type: NRG; PAM sequence: CAG
ttaacactacattaaaatgg

SEQ ID NO: 39871 - DNA, 20 bp, Artificial Sequence
  Description of Artificial Sequence: Synthetic oligonucleotide
  Target: ATXN2; (+) strand; PAM type: NRG; PAM sequence: CAG
aaaaaaacccactttcttct

SEQ ID NO: 39872 - DNA, 20 bp, Artificial Sequence
  Description of Artificial Sequence: Synthetic oligonucleotide
  Target: ATXN2; (+) strand; PAM type: NRG; PAM sequence: AAG
ctttcttctcagaatttcta

SEQ ID NO: 39873 - DNA, 20 bp, Artificial Sequence
  Description of Artificial Sequence: Synthetic oligonucleotide
  Target: ATXN2; (+) strand; PAM type: NRG; PAM sequence: AGG
tttcttctcagaatttctaa

SEQ ID NO: 39874 - DNA, 20 bp, Artificial Sequence
  Description of Artificial Sequence: Synthetic oligonucleotide
  Target: ATXN2; (+) strand; PAM type: NRG; PAM sequence: AAG
tttctaaaggccctcaaaat

SEQ ID NO: 39875 - DNA, 20 bp, Artificial Sequence
  Description of Artificial Sequence: Synthetic oligonucleotide
  Target: ATXN2; (+) strand; PAM type: NRG; PAM sequence: CAG
ataatttgattacattattt

SEQ ID NO: 39876 - DNA, 20 bp, Artificial Sequence
  Description of Artificial Sequence: Synthetic oligonucleotide
  Target: ATXN2; (+) strand; PAM type: NRG; PAM sequence: AGG
taatttgattacattatttc

SEQ ID NO: 39877 - DNA, 20 bp, Artificial Sequence
  Description of Artificial Sequence: Synthetic oligonucleotide
  Target: ATXN2; (+) strand; PAM type: NRG; PAM sequence: CAG
tttgattacattatttcagg

SEQ ID NO: 39878 - DNA, 20 bp, Artificial Sequence
  Description of Artificial Sequence: Synthetic oligonucleotide
  Target: ATXN2; (+) strand; PAM type: NRG; PAM sequence: GAG
tgattacattatttcaggca

SEQ ID NO: 39879 - DNA, 20 bp, Artificial Sequence
  Description of Artificial Sequence: Synthetic oligonucleotide
  Target: ATXN2; (+) strand; PAM type: NRG; PAM sequence: CAG
ttcaggcagagttctttcaa

SEQ ID NO: 39880 - DNA, 20 bp, Artificial Sequence
  Description of Artificial Sequence: Synthetic oligonucleotide
  Target: ATXN2; (+) strand; PAM type: NRG; PAM sequence: AGG
tcaggcagagttctttcaac

SEQ ID NO: 39881 - DNA, 20 bp, Artificial Sequence
  Description of Artificial Sequence: Synthetic oligonucleotide
  Target: ATXN2; (+) strand; PAM type: NRG; PAM sequence: AAG
tcaacaggttcatatgttcc

SEQ ID NO: 39882 - DNA, 20 bp, Artificial Sequence
  Description of Artificial Sequence: Synthetic oligonucleotide
  Target: ATXN2; (+) strand; PAM type: NRG; PAM sequence: AGG
caacaggttcatatgttcca

SEQ ID NO: 39883 - DNA, 20 bp, Artificial Sequence
  Description of Artificial Sequence: Synthetic oligonucleotide
  Target: ATXN2; (+) strand; PAM type: NRG; PAM sequence: TAG
aaggctaaaaaaaaaaaaaa

SEQ ID NO: 39884 - DNA, 20 bp, Artificial Sequence
  Description of Artificial Sequence: Synthetic oligonucleotide
  Target: ATXN2; (+) strand; PAM type: NRG; PAM sequence: GAG
aaaaaaaaaaatagcatact

SEQ ID NO: 39885 - DNA, 20 bp, Artificial Sequence
  Description of Artificial Sequence: Synthetic oligonucleotide
  Target: ATXN2; (+) strand; PAM type: NRG; PAM sequence: AAG
atactgagaaaacgaaaatt

SEQ ID NO: 39886 - DNA, 20 bp, Artificial Sequence
  Description of Artificial Sequence: Synthetic oligonucleotide
  Target: ATXN2; (+) strand; PAM type: NRG; PAM sequence: GAG
actgagaaaacgaaaattaa

SEQ ID NO: 39887 - DNA, 20 bp, Artificial Sequence
  Description of Artificial Sequence: Synthetic oligonucleotide
  Target: ATXN2; (+) strand; PAM type: NRG; PAM sequence: TAG
aaaacgaaaattaagagttt

SEQ ID NO: 39888 - DNA, 20 bp, Artificial Sequence
  Description of Artificial Sequence: Synthetic oligonucleotide
  Target: ATXN2; (+) strand; PAM type: NRG; PAM sequence: TAG
aacatctatgaaatcacaat

SEQ ID NO: 39889 - DNA, 20 bp, Artificial Sequence
  Description of Artificial Sequence: Synthetic oligonucleotide
  Target: ATXN2; (+) strand; PAM type: NRG; PAM sequence: AGG
acatctatgaaatcacaatt

SEQ ID NO: 39890 - DNA, 20 bp, Artificial Sequence
  Description of Artificial Sequence: Synthetic oligonucleotide
  Target: ATXN2; (+) strand; PAM type: NRG; PAM sequence: TGG
aatcacaattaggtcaaaca

SEQ ID NO: 39891 - DNA, 20 bp, Artificial Sequence
  Description of Artificial Sequence: Synthetic oligonucleotide
  Target: ATXN2; (+) strand; PAM type: NRG; PAM sequence: GAG
tcacaattaggtcaaacatg

SEQ ID NO: 39892 - DNA, 20 bp, Artificial Sequence
  Description of Artificial Sequence: Synthetic oligonucleotide
  Target: ATXN2; (+) strand; PAM type: NRG; PAM sequence: TGG
aggtcaaacatggagaaaat

SEQ ID NO: 39893 - DNA, 20 bp, Artificial Sequence
  Description of Artificial Sequence: Synthetic oligonucleotide
  Target: ATXN2; (+) strand; PAM type: NRG; PAM sequence: TGG
caaacatggagaaaattggc

SEQ ID NO: 39894 - DNA, 20 bp, Artificial Sequence
  Description of Artificial Sequence: Synthetic oligonucleotide
  Target: ATXN2; (+) strand; PAM type: NRG; PAM sequence: GGG
aaacatggagaaaattggct

SEQ ID NO: 39895 - DNA, 20 bp, Artificial Sequence
  Description of Artificial Sequence: Synthetic oligonucleotide
  Target: ATXN2; (+) strand; PAM type: NRG; PAM sequence: CAG
tggagaaaattggctgggcg

SEQ ID NO: 39896 - DNA, 20 bp, Artificial Sequence
  Description of Artificial Sequence: Synthetic oligonucleotide
  Target: ATXN2; (+) strand; PAM type: NRG; PAM sequence: AGG
ggagaaaattggctgggcgc

SEQ ID NO: 39897 - DNA, 20 bp, Artificial Sequence
  Description of Artificial Sequence: Synthetic oligonucleotide
  Target: ATXN2; (+) strand; PAM type: NRG; PAM sequence: TGG
ttggctgggcgcaggcactt

SEQ ID NO: 39898 - DNA, 20 bp, Artificial Sequence
  Description of Artificial Sequence: Synthetic oligonucleotide
  Target: ATXN2; (+) strand; PAM type: NRG; PAM sequence: GGG
tggctgggcgcaggcacttt

SEQ ID NO: 39899 - DNA, 20 bp, Artificial Sequence
  Description of Artificial Sequence: Synthetic oligonucleotide
  Target: ATXN2; (+) strand; PAM type: NRG; PAM sequence: AAG
ctgggcgcaggcactttggg

SEQ ID NO: 39900 - DNA, 20 bp, Artificial Sequence
  Description of Artificial Sequence: Synthetic oligonucleotide
  Target: ATXN2; (+) strand; PAM type: NRG; PAM sequence: CAG
ggcgcaggcactttgggaag

SEQ ID NO: 39901 - DNA, 20 bp, Artificial Sequence
  Description of Artificial Sequence: Synthetic oligonucleotide
  Target: ATXN2; (+) strand; PAM type: NRG; PAM sequence: GAG
cgcaggcactttgggaagca

SEQ ID NO: 39902 - DNA, 20 bp, Artificial Sequence
  Description of Artificial Sequence: Synthetic oligonucleotide
  Target: ATXN2; (+) strand; PAM type: NRG; PAM sequence: CAG
ggcactttgggaagcagagc

SEQ ID NO: 39903 - DNA, 20 bp, Artificial Sequence
  Description of Artificial Sequence: Synthetic oligonucleotide
  Target: ATXN2; (+) strand; PAM type: NRG; PAM sequence: AGG
gcactttgggaagcagagcc

SEQ ID NO: 39904 - DNA, 20 bp, Artificial Sequence
  Description of Artificial Sequence: Synthetic oligonucleotide
  Target: ATXN2; (+) strand; PAM type: NRG; PAM sequence: CAG
ctttgggaagcagagccagg

SEQ ID NO: 39905 - DNA, 20 bp, Artificial Sequence
  Description of Artificial Sequence: Synthetic oligonucleotide
  Target: ATXN2; (+) strand; PAM type: NRG; PAM sequence: GAG
cagagccaggcagatcgctt

SEQ ID NO: 39906 - DNA, 20 bp, Artificial Sequence
  Description of Artificial Sequence: Synthetic oligonucleotide
  Target: ATXN2; (+) strand; PAM type: NRG; PAM sequence: CAG
ccaggcagatcgcttgagcc

SEQ ID NO: 39907 - DNA, 20 bp, Artificial Sequence
  Description of Artificial Sequence: Synthetic oligonucleotide
  Target: ATXN2; (+) strand; PAM type: NRG; PAM sequence: AGG
caggcagatcgcttgagccc

SEQ ID NO: 39908 - DNA, 20 bp, Artificial Sequence
  Description of Artificial Sequence: Synthetic oligonucleotide
  Target: ATXN2; (+) strand; PAM type: NRG; PAM sequence: GAG
ggcagatcgcttgagcccag

SEQ ID NO: 39909 - DNA, 20 bp, Artificial Sequence
  Description of Artificial Sequence: Synthetic oligonucleotide
  Target: ATXN2; (+) strand; PAM type: NRG; PAM sequence: GAG
tcgcttgagcccaggagttt

SEQ ID NO: 39910 - DNA, 20 bp, Artificial Sequence
  Description of Artificial Sequence: Synthetic oligonucleotide
  Target: ATXN2; (+) strand; PAM type: NRG; PAM sequence: CAG
tgagcccaggagtttgagac

SEQ ID NO: 39911 - DNA, 20 bp, Artificial Sequence
  Description of Artificial Sequence: Synthetic oligonucleotide
  Target: ATXN2; (+) strand; PAM type: NRG; PAM sequence: TAG
ccaggagtttgagaccagcc

SEQ ID NO: 39912 - DNA, 20 bp, Artificial Sequence
  Description of Artificial Sequence: Synthetic oligonucleotide
  Target: ATXN2; (+) strand; PAM type: NRG; PAM sequence: AGG
caggagtttgagaccagcct

SEQ ID NO: 39913 - DNA, 20 bp, Artificial Sequence
  Description of Artificial Sequence: Synthetic oligonucleotide
  Target: ATXN2; (+) strand; PAM type: NRG; PAM sequence: TGG
tgagaccagcctaggcaaca

SEQ ID NO: 39914 - DNA, 20 bp, Artificial Sequence
  Description of Artificial Sequence: Synthetic oligonucleotide
  Target: ATXN2; (+) strand; PAM type: NRG; PAM sequence: TAG
tctacaaaaaatacaaaaat

SEQ ID NO: 39915 - DNA, 20 bp, Artificial Sequence
  Description of Artificial Sequence: Synthetic oligonucleotide
  Target: ATXN2; (+) strand; PAM type: NRG; PAM sequence: TAG
caaaaaatacaaaaattagc

SEQ ID NO: 39916 - DNA, 20 bp, Artificial Sequence
  Description of Artificial Sequence: Synthetic oligonucleotide
  Target: ATXN2; (+) strand; PAM type: NRG; PAM sequence: AGG
aaaaaatacaaaaattagct

SEQ ID NO: 39917 - DNA, 20 bp, Artificial Sequence
  Description of Artificial Sequence: Synthetic oligonucleotide
  Target: ATXN2; (+) strand; PAM type: NRG; PAM sequence: TGG
atacaaaaattagctaggtg

SEQ ID NO: 39918 - DNA, 20 bp, Artificial Sequence
  Description of Artificial Sequence: Synthetic oligonucleotide
  Target: ATXN2; (+) strand; PAM type: NRG; PAM sequence: TGG
caaaaattagctaggtgtgg

SEQ ID NO: 39919 - DNA, 20 bp, Artificial Sequence
  Description of Artificial Sequence: Synthetic oligonucleotide
  Target: ATXN2; (+) strand; PAM type: NRG; PAM sequence: TAG
ggtgtggtggtgtgcacctg

SEQ ID NO: 39920 - DNA, 20 bp, Artificial Sequence
  Description of Artificial Sequence: Synthetic oligonucleotide
  Target: ATXN2; (+) strand; PAM type: NRG; PAM sequence: CAG
cacctgtagcccccgctatc

SEQ ID NO: 39921 - DNA, 20 bp, Artificial Sequence
  Description of Artificial Sequence: Synthetic oligonucleotide
  Target: ATXN2; (+) strand; PAM type: NRG; PAM sequence: AGG
acctgtagcccccgctatcc

SEQ ID NO: 39922 - DNA, 20 bp, Artificial Sequence
  Description of Artificial Sequence: Synthetic oligonucleotide
  Target: ATXN2; (+) strand; PAM type: NRG; PAM sequence: GGG
cctgtagcccccgctatcca

SEQ ID NO: 39923 - DNA, 20 bp, Artificial Sequence
  Description of Artificial Sequence: Synthetic oligonucleotide
  Target: ATXN2; (+) strand; PAM type: NRG; PAM sequence: GGG
ctgtagcccccgctatccag

SEQ ID NO: 39924 - DNA, 20 bp, Artificial Sequence
  Description of Artificial Sequence: Synthetic oligonucleotide
  Target: ATXN2; (+) strand; PAM type: NRG; PAM sequence: GAG
cccccgctatccaggggact

SEQ ID NO: 39925 - DNA, 20 bp, Artificial Sequence
  Description of Artificial Sequence: Synthetic oligonucleotide
  Target: ATXN2; (+) strand; PAM type: NRG; PAM sequence: AAG
ccgctatccaggggactgag

SEQ ID NO: 39926 - DNA, 20 bp, Artificial Sequence
  Description of Artificial Sequence: Synthetic oligonucleotide
  Target: ATXN2; (+) strand; PAM type: NRG; PAM sequence: AGG
cgctatccaggggactgaga

SEQ ID NO: 39927 - DNA, 20 bp, Artificial Sequence
  Description of Artificial Sequence: Synthetic oligonucleotide
  Target: ATXN2; (+) strand; PAM type: NRG; PAM sequence: GGG
gctatccaggggactgagaa

SEQ ID NO: 39928 - DNA, 20 bp, Artificial Sequence
  Description of Artificial Sequence: Synthetic oligonucleotide
  Target: ATXN2; (+) strand; PAM type: NRG; PAM sequence: GAG
tatccaggggactgagaagg

SEQ ID NO: 39929 - DNA, 20 bp, Artificial Sequence
  Description of Artificial Sequence: Synthetic oligonucleotide
  Target: ATXN2; (+) strand; PAM type: NRG; PAM sequence: AGG
atccaggggactgagaaggg

SEQ ID NO: 39930 - DNA, 20 bp, Artificial Sequence
  Description of Artificial Sequence: Synthetic oligonucleotide
  Target: ATXN2; (+) strand; PAM type: NRG; PAM sequence: GAG
ctgagaagggaggatcgctt

SEQ ID NO: 39931 - DNA, 20 bp, Artificial Sequence
  Description of Artificial Sequence: Synthetic oligonucleotide
  Target: ATXN2; (+) strand; PAM type: NRG; PAM sequence: CAG
aagggaggatcgcttgagcc

SEQ ID NO: 39932 - DNA, 20 bp, Artificial Sequence
  Description of Artificial Sequence: Synthetic oligonucleotide
  Target: ATXN2; (+) strand; PAM type: NRG; PAM sequence: AGG
agggaggatcgcttgagccc

SEQ ID NO: 39933 - DNA, 20 bp, Artificial Sequence
  Description of Artificial Sequence: Synthetic oligonucleotide
  Target: ATXN2; (+) strand; PAM type: NRG; PAM sequence: GAG
ggaggatcgcttgagcccag

SEQ ID NO: 39934 - DNA, 20 bp, Artificial Sequence
  Description of Artificial Sequence: Synthetic oligonucleotide
  Target: ATXN2; (+) strand; PAM type: NRG; PAM sequence: AGG
gaggatcgcttgagcccagg

SEQ ID NO: 39935 - DNA, 20 bp, Artificial Sequence
  Description of Artificial Sequence: Synthetic oligonucleotide
  Target: ATXN2; (+) strand; PAM type: NRG; PAM sequence: AAG
tcgcttgagcccaggaggtc

SEQ ID NO: 39936 - DNA, 20 bp, Artificial Sequence
  Description of Artificial Sequence: Synthetic oligonucleotide
  Target: ATXN2; (+) strand; PAM type: NRG; PAM sequence: AGG
cgcttgagcccaggaggtca

SEQ ID NO: 39937 - DNA, 20 bp, Artificial Sequence
  Description of Artificial Sequence: Synthetic oligonucleotide
  Target: ATXN2; (+) strand; PAM type: NRG; PAM sequence: GAG
caggaggtcaaggctgcatt

SEQ ID NO: 39938 - DNA, 20 bp, Artificial Sequence
  Description of Artificial Sequence: Synthetic oligonucleotide
  Target: ATXN2; (+) strand; PAM type: NRG; PAM sequence: TAG
aaggctgcattgagccatga

SEQ ID NO: 39939 - DNA, 20 bp, Artificial Sequence
  Description of Artificial Sequence: Synthetic oligonucleotide
  Target: ATXN2; (+) strand; PAM type: NRG; PAM sequence: CAG
atgatagcgccactgcgttc

SEQ ID NO: 39940 - DNA, 20 bp, Artificial Sequence
  Description of Artificial Sequence: Synthetic oligonucleotide
  Target: ATXN2; (+) strand; PAM type: NRG; PAM sequence: CAG
gcgccactgcgttccagcct

SEQ ID NO: 39941 - DNA, 20 bp, Artificial Sequence
  Description of Artificial Sequence: Synthetic oligonucleotide
  Target: ATXN2; (+) strand; PAM type: NRG; PAM sequence: CAG
ccactgcgttccagcctcag

SEQ ID NO: 39942 - DNA, 20 bp, Artificial Sequence
  Description of Artificial Sequence: Synthetic oligonucleotide
  Target: ATXN2; (+) strand; PAM type: NRG; PAM sequence: AAG
gcgttccagcctcagcagca

SEQ ID NO: 39943 - DNA, 20 bp, Artificial Sequence
  Description of Artificial Sequence: Synthetic oligonucleotide
  Target: ATXN2; (+) strand; PAM type: NRG; PAM sequence: AAG
tccagcctcagcagcaaagc

SEQ ID NO: 39944 - DNA, 20 bp, Artificial Sequence
  Description of Artificial Sequence: Synthetic oligonucleotide
  Target: ATXN2; (+) strand; PAM type: NRG; PAM sequence: GAG
aacacccaaaaaaacacatt

SEQ ID NO: 39945 - DNA, 20 bp, Artificial Sequence
  Description of Artificial Sequence: Synthetic oligonucleotide
  Target: ATXN2; (+) strand; PAM type: NRG; PAM sequence: AGG
acacccaaaaaaacacattg

SEQ ID NO: 39946 - DNA, 20 bp, Artificial Sequence
  Description of Artificial Sequence: Synthetic oligonucleotide
  Target: ATXN2; (+) strand; PAM type: NRG; PAM sequence: CAG
ttgaggaaatcttattaatt

SEQ ID NO: 39947 - DNA, 20 bp, Artificial Sequence
  Description of Artificial Sequence: Synthetic oligonucleotide
  Target: ATXN2; (+) strand; PAM type: NRG; PAM sequence: AGG
tgaggaaatcttattaattc

SEQ ID NO: 39948 - DNA, 20 bp, Artificial Sequence
  Description of Artificial Sequence: Synthetic oligonucleotide
  Target: ATXN2; (+) strand; PAM type: NRG; PAM sequence: CAG
gaaaaatgaaaactttatgt

SEQ ID NO: 39949 - DNA, 20 bp, Artificial Sequence
  Description of Artificial Sequence: Synthetic oligonucleotide
  Target: ATXN2; (+) strand; PAM type: NRG; PAM sequence: AAG
aatgaaaactttatgtcaga

SEQ ID NO: 39950 - DNA, 20 bp, Artificial Sequence
  Description of Artificial Sequence: Synthetic oligonucleotide
  Target: ATXN2; (+) strand; PAM type: NRG; PAM sequence: AGG
atgaaaactttatgtcagaa

SEQ ID NO: 39951 - DNA, 20 bp, Artificial Sequence
  Description of Artificial Sequence: Synthetic oligonucleotide
  Target: ATXN2; (+) strand; PAM type: NRG; PAM sequence: TGG
tatgtcagaaaggcaattat

SEQ ID NO: 39952 - DNA, 20 bp, Artificial Sequence
  Description of Artificial Sequence: Synthetic oligonucleotide
  Target: ATXN2; (+) strand; PAM type: NRG; PAM sequence: GGG
atgtcagaaaggcaattatt

SEQ ID NO: 39953 - DNA, 20 bp, Artificial Sequence
  Description of Artificial Sequence: Synthetic oligonucleotide
  Target: ATXN2; (+) strand; PAM type: NRG; PAM sequence: GAG
aaaggcaattattgggcact

SEQ ID NO: 39954 - DNA, 20 bp, Artificial Sequence
  Description of Artificial Sequence: Synthetic oligonucleotide
  Target: ATXN2; (+) strand; PAM type: NRG; PAM sequence: TAG
ataaattattctactttcta

SEQ ID NO: 39955 - DNA, 20 bp, Artificial Sequence
  Description of Artificial Sequence: Synthetic oligonucleotide
  Target: ATXN2; (+) strand; PAM type: NRG; PAM sequence: TAG
ttctatagtttctcaactga

SEQ ID NO: 39956 - DNA, 20 bp, Artificial Sequence
  Description of Artificial Sequence: Synthetic oligonucleotide
  Target: ATXN2; (+) strand; PAM type: NRG; PAM sequence: CAG
tatagtttctcaactgatag

SEQ ID NO: 39957 - DNA, 20 bp, Artificial Sequence
  Description of Artificial Sequence: Synthetic oligonucleotide
  Target: ATXN2; (+) strand; PAM type: NRG; PAM sequence: TGG
gttaatcactctaaattaac

SEQ ID NO: 39958 - DNA, 20 bp, Artificial Sequence
  Description of Artificial Sequence: Synthetic oligonucleotide
  Target: ATXN2; (+) strand; PAM type: NRG; PAM sequence: TGG
atcactctaaattaactggt

SEQ ID NO: 39959 - DNA, 20 bp, Artificial Sequence
  Description of Artificial Sequence: Synthetic oligonucleotide
  Target: ATXN2; (+) strand; PAM type: NRG; PAM sequence: TAG
ttggcaaaaaaaaaaccctt

SEQ ID NO: 39960 - DNA, 20 bp, Artificial Sequence
  Description of Artificial Sequence: Synthetic oligonucleotide
  Target: ATXN2; (+) strand; PAM type: NRG; PAM sequence: AAG
ttagcattttccaacattaa

SEQ ID NO: 39961 - DNA, 20 bp, Artificial Sequence
  Description of Artificial Sequence: Synthetic oligonucleotide
  Target: ATXN2; (+) strand; PAM type: NRG; PAM sequence: TGG
tttttttttttttttttttt

SEQ ID NO: 39962 - DNA, 20 bp, Artificial Sequence
  Description of Artificial Sequence: Synthetic oligonucleotide
  Target: ATXN2; (+) strand; PAM type: NRG; PAM sequence: CGG
tttttttttttttttttgga

SEQ ID NO: 39963 - DNA, 20 bp, Artificial Sequence
  Description of Artificial Sequence: Synthetic oligonucleotide
  Target: ATXN2; (+) strand; PAM type: NRG; PAM sequence: GAG
tttttttttttttttggacg

SEQ ID NO: 39964 - DNA, 20 bp, Artificial Sequence
  Description of Artificial Sequence: Synthetic oligonucleotide
  Target: ATXN2; (+) strand; PAM type: NRG; PAM sequence: CAG
cggagtctcgctctgtcacc

SEQ ID NO: 39965 - DNA, 20 bp, Artificial Sequence
  Description of Artificial Sequence: Synthetic oligonucleotide
  Target: ATXN2; (+) strand; PAM type: NRG; PAM sequence: AGG
ggagtctcgctctgtcaccc

SEQ ID NO: 39966 - DNA, 20 bp, Artificial Sequence
  Description of Artificial Sequence: Synthetic oligonucleotide
  Target: ATXN2; (+) strand; PAM type: NRG; PAM sequence: CAG
caggcacgcaccaccatgcc

SEQ ID NO: 39967 - DNA, 20 bp, Artificial Sequence
  Description of Artificial Sequence: Synthetic oligonucleotide
  Target: ATXN2; (+) strand; PAM type: NRG; PAM sequence: TAG
ccagctgatctttgtatttt

SEQ ID NO: 39968 - DNA, 20 bp, Artificial Sequence
  Description of Artificial Sequence: Synthetic oligonucleotide
  Target: ATXN2; (+) strand; PAM type: NRG; PAM sequence: TAG
gctgatctttgtatttttag

SEQ ID NO: 39969 - DNA, 20 bp, Artificial Sequence
  Description of Artificial Sequence: Synthetic oligonucleotide
  Target: ATXN2; (+) strand; PAM type: NRG; PAM sequence: GAG
tgatctttgtatttttagta

SEQ ID NO: 39970 - DNA, 20 bp, Artificial Sequence
  Description of Artificial Sequence: Synthetic oligonucleotide
  Target: ATXN2; (+) strand; PAM type: NRG; PAM sequence: CGG
ctttgtatttttagtagaga

SEQ ID NO: 39971 - DNA, 20 bp, Artificial Sequence
  Description of Artificial Sequence: Synthetic oligonucleotide
  Target: ATXN2; (+) strand; PAM type: NRG; PAM sequence: GGG
tttgtatttttagtagagac

SEQ ID NO: 39972 - DNA, 20 bp, Artificial Sequence
  Description of Artificial Sequence: Synthetic oligonucleotide
  Target: ATXN2; (+) strand; PAM type: NRG; PAM sequence: TGG
gagacgggttttcaccatgt

SEQ ID NO: 39973 - DNA, 20 bp, Artificial Sequence
  Description of Artificial Sequence: Synthetic oligonucleotide
  Target: ATXN2; (+) strand; PAM type: NRG; PAM sequence: CAG
cgggttttcaccatgttggc

SEQ ID NO: 39974 - DNA, 20 bp, Artificial Sequence
  Description of Artificial Sequence: Synthetic oligonucleotide
  Target: ATXN2; (+) strand; PAM type: NRG; PAM sequence: AGG
gggttttcaccatgttggcc

SEQ ID NO: 39975 - DNA, 20 bp, Artificial Sequence
  Description of Artificial Sequence: Synthetic oligonucleotide
  Target: ATXN2; (+) strand; PAM type: NRG; PAM sequence: TGG
tttcaccatgttggccagga

SEQ ID NO: 39976 - DNA, 20 bp, Artificial Sequence
  Description of Artificial Sequence: Synthetic oligonucleotide
  Target: ATXN2; (+) strand; PAM type: NRG; PAM sequence: AAG
ggttttgtactcctgacctc

SEQ ID NO: 39977 - DNA, 20 bp, Artificial Sequence
  Description of Artificial Sequence: Synthetic oligonucleotide
  Target: ATXN2; (+) strand; PAM type: NRG; PAM sequence: CGG
ctcaagtgatctgcccacct

SEQ ID NO: 39978 - DNA, 20 bp, Artificial Sequence
  Description of Artificial Sequence: Synthetic oligonucleotide
  Target: ATXN2; (+) strand; PAM type: NRG; PAM sequence: CAG
atctgcccacctcggcttcc

SEQ ID NO: 39979 - DNA, 20 bp, Artificial Sequence
  Description of Artificial Sequence: Synthetic oligonucleotide
  Target: ATXN2; (+) strand; PAM type: NRG; PAM sequence: GAG
ctgcccacctcggcttccca

SEQ ID NO: 39980 - DNA, 20 bp, Artificial Sequence
  Description of Artificial Sequence: Synthetic oligonucleotide
  Target: ATXN2; (+) strand; PAM type: NRG; PAM sequence: TGG
acctcggcttcccagagtgt

SEQ ID NO: 39981 - DNA, 20 bp, Artificial Sequence
  Description of Artificial Sequence: Synthetic oligonucleotide
  Target: ATXN2; (+) strand; PAM type: NRG; PAM sequence: GGG
cctcggcttcccagagtgtt

SEQ ID NO: 39982 - DNA, 20 bp, Artificial Sequence
  Description of Artificial Sequence: Synthetic oligonucleotide
  Target: ATXN2; (+) strand; PAM type: NRG; PAM sequence: CAG
ttcccagagtgttgggctta

SEQ ID NO: 39983 - DNA, 20 bp, Artificial Sequence
  Description of Artificial Sequence: Synthetic oligonucleotide
  Target: ATXN2; (+) strand; PAM type: NRG; PAM sequence: GAG
agtgttgggcttacagatgt

SEQ ID NO: 39984 - DNA, 20 bp, Artificial Sequence
  Description of Artificial Sequence: Synthetic oligonucleotide
  Target: ATXN2; (+) strand; PAM type: NRG; PAM sequence: TGG
cagatgtgagccaccacacc

SEQ ID NO: 39985 - DNA, 20 bp, Artificial Sequence
  Description of Artificial Sequence: Synthetic oligonucleotide
  Target: ATXN2; (+) strand; PAM type: NRG; PAM sequence: AAG
gagccaccacacctggccaa

SEQ ID NO: 39986 - DNA, 20 bp, Artificial Sequence
  Description of Artificial Sequence: Synthetic oligonucleotide
  Target: ATXN2; (+) strand; PAM type: NRG; PAM sequence: AAG
tggccaaaagatttcctttt

SEQ ID NO: 39987 - DNA, 20 bp, Artificial Sequence
  Description of Artificial Sequence: Synthetic oligonucleotide
  Target: ATXN2; (+) strand; PAM type: NRG; PAM sequence: TGG
atttccttttaagaaaaatg

SEQ ID NO: 39988 - DNA, 20 bp, Artificial Sequence
  Description of Artificial Sequence: Synthetic oligonucleotide
  Target: ATXN2; (+) strand; PAM type: NRG; PAM sequence: GGG
tttccttttaagaaaaatgt

SEQ ID NO: 39989 - DNA, 20 bp, Artificial Sequence
  Description of Artificial Sequence: Synthetic oligonucleotide
  Target: ATXN2; (+) strand; PAM type: NRG; PAM sequence: AAG
aatgtgggattttttctacg

SEQ ID NO: 39990 - DNA, 20 bp, Artificial Sequence
  Description of Artificial Sequence: Synthetic oligonucleotide
  Target: ATXN2; (+) strand; PAM type: NRG; PAM sequence: AGG
atgtgggattttttctacga

SEQ ID NO: 39991 - DNA, 20 bp, Artificial Sequence
  Description of Artificial Sequence: Synthetic oligonucleotide
  Target: ATXN2; (+) strand; PAM type: NRG; PAM sequence: AAG
cgaaggctctttaaccacac

SEQ ID NO: 39992 - DNA, 20 bp, Artificial Sequence
  Description of Artificial Sequence: Synthetic oligonucleotide
  Target: ATXN2; (+) strand; PAM type: NRG; PAM sequence: CAG
gctctttaaccacacaagca

SEQ ID NO: 39993 - DNA, 20 bp, Artificial Sequence
  Description of Artificial Sequence: Synthetic oligonucleotide
  Target: ATXN2; (+) strand; PAM type: NRG; PAM sequence: TAG
accacacaagcacagaatac

SEQ ID NO: 39994 - DNA, 20 bp, Artificial Sequence
  Description of Artificial Sequence: Synthetic oligonucleotide
  Target: ATXN2; (+) strand; PAM type: NRG; PAM sequence: CAG
acaactccctaattttaatg

SEQ ID NO: 39995 - DNA, 20 bp, Artificial Sequence
  Description of Artificial Sequence: Synthetic oligonucleotide
  Target: ATXN2; (+) strand; PAM type: NRG; PAM sequence: GAG
tccatcttatttttcttttt

SEQ ID NO: 39996 - DNA, 20 bp, Artificial Sequence
  Description of Artificial Sequence: Synthetic oligonucleotide
  Target: ATXN2; (+) strand; PAM type: NRG; PAM sequence: AGG
ccatcttatttttctttttg

SEQ ID NO: 39997 - DNA, 20 bp, Artificial Sequence
  Description of Artificial Sequence: Synthetic oligonucleotide
  Target: ATXN2; (+) strand; PAM type: NRG; PAM sequence: CAG
tcttatttttctttttgagg

SEQ ID NO: 39998 - DNA, 20 bp, Artificial Sequence
  Description of Artificial Sequence: Synthetic oligonucleotide
  Target: ATXN2; (+) strand; PAM type: NRG; PAM sequence: AGG
cttatttttctttttgaggc

SEQ ID NO: 39999 - DNA, 20 bp, Artificial Sequence
  Description of Artificial Sequence: Synthetic oligonucleotide
  Target: ATXN2; (+) strand; PAM type: NRG; PAM sequence: GGG
ttatttttctttttgaggca

SEQ ID NO: 40000 - DNA, 20 bp, Artificial Sequence
  Description of Artificial Sequence: Synthetic oligonucleotide
  Target: ATXN2; (+) strand; PAM type: NRG; PAM sequence: AAG
agggtttcgctctttcaccc

SEQ ID NO: 40001 - DNA, 20 bp, Artificial Sequence
  Description of Artificial Sequence: Synthetic oligonucleotide
  Target: ATXN2; (+) strand; PAM type: NRG; PAM sequence: TGG
tttcgctctttcacccaagc

SEQ ID NO: 40002 - DNA, 20 bp, Artificial Sequence
  Description of Artificial Sequence: Synthetic oligonucleotide
  Target: ATXN2; (+) strand; PAM type: NRG; PAM sequence: GAG
tcgctctttcacccaagctg

SEQ ID NO: 40003 - DNA, 20 bp, Artificial Sequence
  Description of Artificial Sequence: Synthetic oligonucleotide
  Target: ATXN2; (+) strand; PAM type: NRG; PAM sequence: CAG
ctttcacccaagctggagcc

SEQ ID NO: 40004 - DNA, 20 bp, Artificial Sequence
  Description of Artificial Sequence: Synthetic oligonucleotide
  Target: ATXN2; (+) strand; PAM type: NRG; PAM sequence: TGG
tcacccaagctggagcccag

SEQ ID NO: 40005 - DNA, 20 bp, Artificial Sequence
  Description of Artificial Sequence: Synthetic oligonucleotide
  Target: ATXN2; (+) strand; PAM type: NRG; PAM sequence: CAG
caagctggagcccagtggtg

SEQ ID NO: 40006 - DNA, 20 bp, Artificial Sequence
  Description of Artificial Sequence: Synthetic oligonucleotide
  Target: ATXN2; (+) strand; PAM type: NRG; PAM sequence: CAG
ggagcccagtggtgcagtca

SEQ ID NO: 40007 - DNA, 20 bp, Artificial Sequence
  Description of Artificial Sequence: Synthetic oligonucleotide
  Target: ATXN2; (+) strand; PAM type: NRG; PAM sequence: CAG
ggtgcagtcacagttccctg

SEQ ID NO: 40008 - DNA, 20 bp, Artificial Sequence
  Description of Artificial Sequence: Synthetic oligonucleotide
  Target: ATXN2; (+) strand; PAM type: NRG; PAM sequence: TGG
agtcacagttccctgcagcc

SEQ ID NO: 40009 - DNA, 20 bp, Artificial Sequence
  Description of Artificial Sequence: Synthetic oligonucleotide
  Target: ATXN2; (+) strand; PAM type: NRG; PAM sequence: TGG
tccctgcagcctggaccttc

SEQ ID NO: 40010 - DNA, 20 bp, Artificial Sequence
  Description of Artificial Sequence: Synthetic oligonucleotide
  Target: ATXN2; (+) strand; PAM type: NRG; PAM sequence: CAG
ttcaattgatcctcccacct

SEQ ID NO: 40011 - DNA, 20 bp, Artificial Sequence
  Description of Artificial Sequence: Synthetic oligonucleotide
  Target: ATXN2; (+) strand; PAM type: NRG; PAM sequence: AAG
tcctcccacctcagtctccc

SEQ ID NO: 40012 - DNA, 20 bp, Artificial Sequence
  Description of Artificial Sequence: Synthetic oligonucleotide
  Target: ATXN2; (+) strand; PAM type: NRG; PAM sequence: TAG
tcccacctcagtctcccaag

SEQ ID NO: 40013 - DNA, 20 bp, Artificial Sequence
  Description of Artificial Sequence: Synthetic oligonucleotide
  Target: ATXN2; (+) strand; PAM type: NRG; PAM sequence: TAG
acctcagtctcccaagtagc

SEQ ID NO: 40014 - DNA, 20 bp, Artificial Sequence
  Description of Artificial Sequence: Synthetic oligonucleotide
  Target: ATXN2; (+) strand; PAM type: NRG; PAM sequence: AGG
cctcagtctcccaagtagct

SEQ ID NO: 40015 - DNA, 20 bp, Artificial Sequence
  Description of Artificial Sequence: Synthetic oligonucleotide
  Target: ATXN2; (+) strand; PAM type: NRG; PAM sequence: CAG
ctcccaagtagctaggacta

SEQ ID NO: 40016 - DNA, 20 bp, Artificial Sequence
  Description of Artificial Sequence: Synthetic oligonucleotide
  Target: ATXN2; (+) strand; PAM type: NRG; PAM sequence: AGG
tcccaagtagctaggactac

SEQ ID NO: 40017 - DNA, 20 bp, Artificial Sequence
  Description of Artificial Sequence: Synthetic oligonucleotide
  Target: ATXN2; (+) strand; PAM type: NRG; PAM sequence: GAG
ccaagtagctaggactacag

SEQ ID NO: 40018 - DNA, 20 bp, Artificial Sequence
  Description of Artificial Sequence: Synthetic oligonucleotide
  Target: ATXN2; (+) strand; PAM type: NRG; PAM sequence: CGG
actacaggagcacaccatga

SEQ ID NO: 40019 - DNA, 20 bp, Artificial Sequence
  Description of Artificial Sequence: Synthetic oligonucleotide
  Target: ATXN2; (+) strand; PAM type: NRG; PAM sequence: TGG
caggagcacaccatgacggc

SEQ ID NO: 40020 - DNA, 20 bp, Artificial Sequence
  Description of Artificial Sequence: Synthetic oligonucleotide
  Target: ATXN2; (+) strand; PAM type: NRG; PAM sequence: AAG
gcacaccatgacggctggct

SEQ ID NO: 40021 - DNA, 20 bp, Artificial Sequence
  Description of Artificial Sequence: Synthetic oligonucleotide
  Target: ATXN2; (+) strand; PAM type: NRG; PAM sequence: CAG
agatttctattttttttttg

SEQ ID NO: 40022 - DNA, 20 bp, Artificial Sequence
  Description of Artificial Sequence: Synthetic oligonucleotide
  Target: ATXN2; (+) strand; PAM type: NRG; PAM sequence: GAG
atttctattttttttttgca

SEQ ID NO: 40023 - DNA, 20 bp, Artificial Sequence
  Description of Artificial Sequence: Synthetic oligonucleotide
  Target: ATXN2; (+) strand; PAM type: NRG; PAM sequence: TAG
ctattttttttttgcagaga

SEQ ID NO: 40024 - DNA, 20 bp, Artificial Sequence
  Description of Artificial Sequence: Synthetic oligonucleotide
  Target: ATXN2; (+) strand; PAM type: NRG; PAM sequence: AGG
tattttttttttgcagagat

SEQ ID NO: 40025 - DNA, 20 bp, Artificial Sequence
  Description of Artificial Sequence: Synthetic oligonucleotide
  Target: ATXN2; (+) strand; PAM type: NRG; PAM sequence: CAG
taggtttttgccatgttgcc

SEQ ID NO: 40026 - DNA, 20 bp, Artificial Sequence
  Description of Artificial Sequence: Synthetic oligonucleotide
  Target: ATXN2; (+) strand; PAM type: NRG; PAM sequence: AGG
aggtttttgccatgttgccc

SEQ ID NO: 40027 - DNA, 20 bp, Artificial Sequence
  Description of Artificial Sequence: Synthetic oligonucleotide
  Target: ATXN2; (+) strand; PAM type: NRG; PAM sequence: TGG
ttttgccatgttgcccaggc

SEQ ID NO: 40028 - DNA, 20 bp, Artificial Sequence
  Description of Artificial Sequence: Synthetic oligonucleotide
  Target: ATXN2; (+) strand; PAM type: NRG; PAM sequence: CGG
caggctggtcttaaaactcc

SEQ ID NO: 40029 - DNA, 20 bp, Artificial Sequence
  Description of Artificial Sequence: Synthetic oligonucleotide
  Target: ATXN2; (+) strand; PAM type: NRG; PAM sequence: CAG
gtcatgtgatctgcccacct

SEQ ID NO: 40030 - DNA, 20 bp, Artificial Sequence
  Description of Artificial Sequence: Synthetic oligonucleotide
  Target: ATXN2; (+) strand; PAM type: NRG; PAM sequence: AAG
ctgcccacctcagcctctca

SEQ ID NO: 40031 - DNA, 20 bp, Artificial Sequence
  Description of Artificial Sequence: Synthetic oligonucleotide
  Target: ATXN2; (+) strand; PAM type: NRG; PAM sequence: TGG
acctcagcctctcaaagtgc

SEQ ID NO: 40032 - DNA, 20 bp, Artificial Sequence
  Description of Artificial Sequence: Synthetic oligonucleotide
  Target: ATXN2; (+) strand; PAM type: NRG; PAM sequence: GAG
aaagtgctggaattacacgt

SEQ ID NO: 40033 - DNA, 20 bp, Artificial Sequence
  Description of Artificial Sequence: Synthetic oligonucleotide
  Target: ATXN2; (+) strand; PAM type: NRG; PAM sequence: AAG
ggaattacacgtgagccacc

SEQ ID NO: 40034 - DNA, 20 bp, Artificial Sequence
  Description of Artificial Sequence: Synthetic oligonucleotide
  Target: ATXN2; (+) strand; PAM type: NRG; PAM sequence: TAG
tacacgtgagccaccaagcc

SEQ ID NO: 40035 - DNA, 20 bp, Artificial Sequence
  Description of Artificial Sequence: Synthetic oligonucleotide
  Target: ATXN2; (+) strand; PAM type: NRG; PAM sequence: TAG
tagccgaaacatccttctaa

SEQ ID NO: 40036 - DNA, 20 bp, Artificial Sequence
  Description of Artificial Sequence: Synthetic oligonucleotide
  Target: ATXN2; (+) strand; PAM type: NRG; PAM sequence: AGG
agccgaaacatccttctaat

SEQ ID NO: 40037 - DNA, 20 bp, Artificial Sequence
  Description of Artificial Sequence: Synthetic oligonucleotide
  Target: ATXN2; (+) strand; PAM type: NRG; PAM sequence: TGG
ttctaataggatcttaacat

SEQ ID NO: 40038 - DNA, 20 bp, Artificial Sequence
  Description of Artificial Sequence: Synthetic oligonucleotide
  Target: ATXN2; (+) strand; PAM type: NRG; PAM sequence: AAG
taggatcttaacattggttg

SEQ ID NO: 40039 - DNA, 20 bp, Artificial Sequence
  Description of Artificial Sequence: Synthetic oligonucleotide
  Target: ATXN2; (+) strand; PAM type: NRG; PAM sequence: TAG
atcttaacattggttgaagt

SEQ ID NO: 40040 - DNA, 20 bp, Artificial Sequence
  Description of Artificial Sequence: Synthetic oligonucleotide
  Target: ATXN2; (+) strand; PAM type: NRG; PAM sequence: AAG
tagttgcccctctgcttcaa

SEQ ID NO: 40041 - DNA, 20 bp, Artificial Sequence
  Description of Artificial Sequence: Synthetic oligonucleotide
  Target: ATXN2; (+) strand; PAM type: NRG; PAM sequence: TGG
ctctgcttcaaaagaaattc

SEQ ID NO: 40042 - DNA, 20 bp, Artificial Sequence
  Description of Artificial Sequence: Synthetic oligonucleotide
  Target: ATXN2; (+) strand; PAM type: NRG; PAM sequence: TGG
ttcaaaagaaattctggctt

SEQ ID NO: 40043 - DNA, 20 bp, Artificial Sequence
  Description of Artificial Sequence: Synthetic oligonucleotide
  Target: ATXN2; (+) strand; PAM type: NRG; PAM sequence: GGG
tcaaaagaaattctggcttt

SEQ ID NO: 40044 - DNA, 20 bp, Artificial Sequence
  Description of Artificial Sequence: Synthetic oligonucleotide
  Target: ATXN2; (+) strand; PAM type: NRG; PAM sequence: GGG
caaaagaaattctggctttg

SEQ ID NO: 40045 - DNA, 20 bp, Artificial Sequence
  Description of Artificial Sequence: Synthetic oligonucleotide
  Target: ATXN2; (+) strand; PAM type: NRG; PAM sequence: TAG
tggctttggggaaataactg

SEQ ID NO: 40046 - DNA, 20 bp, Artificial Sequence
  Description of Artificial Sequence: Synthetic oligonucleotide
  Target: ATXN2; (+) strand; PAM type: NRG; PAM sequence: AGG
ggctttggggaaataactgt

SEQ ID NO: 40047 - DNA, 20 bp, Artificial Sequence
  Description of Artificial Sequence: Synthetic oligonucleotide
  Target: ATXN2; (+) strand; PAM type: NRG; PAM sequence: AAG
aataactgtaggtatatata

SEQ ID NO: 40048 - DNA, 20 bp, Artificial Sequence
  Description of Artificial Sequence: Synthetic oligonucleotide
  Target: ATXN2; (+) strand; PAM type: NRG; PAM sequence: AAG
actgtaggtatatataaagc

SEQ ID NO: 40049 - DNA, 20 bp, Artificial Sequence
  Description of Artificial Sequence: Synthetic oligonucleotide
  Target: ATXN2; (+) strand; PAM type: NRG; PAM sequence: AGG
ctgtaggtatatataaagca

SEQ ID NO: 40050 - DNA, 20 bp, Artificial Sequence
  Description of Artificial Sequence: Synthetic oligonucleotide
  Target: ATXN2; (+) strand; PAM type: NRG; PAM sequence: TAG
aggtatatataaagcaaggt

SEQ ID NO: 40051 - DNA, 20 bp, Artificial Sequence
  Description of Artificial Sequence: Synthetic oligonucleotide
  Target: ATXN2; (+) strand; PAM type: NRG; PAM sequence: TAG
ataaagcaaggttagcaatc

SEQ ID NO: 40052 - DNA, 20 bp, Artificial Sequence
  Description of Artificial Sequence: Synthetic oligonucleotide
  Target: ATXN2; (+) strand; PAM type: NRG; PAM sequence: TAG
agcaatctagtaaattaatc

SEQ ID NO: 40053 - DNA, 20 bp, Artificial Sequence
  Description of Artificial Sequence: Synthetic oligonucleotide
  Target: ATXN2; (+) strand; PAM type: NRG; PAM sequence: AAG
aaaccctcttcttcaaattt

SEQ ID NO: 40054 - DNA, 20 bp, Artificial Sequence
  Description of Artificial Sequence: Synthetic oligonucleotide
  Target: ATXN2; (+) strand; PAM type: NRG; PAM sequence: CAG
ctcttcttcaaatttaagtt

SEQ ID NO: 40055 - DNA, 20 bp, Artificial Sequence
  Description of Artificial Sequence: Synthetic oligonucleotide
  Target: ATXN2; (+) strand; PAM type: NRG; PAM sequence: CAG
atttaagttcagatttaaat

SEQ ID NO: 40056 - DNA, 20 bp, Artificial Sequence
  Description of Artificial Sequence: Synthetic oligonucleotide
  Target: ATXN2; (+) strand; PAM type: NRG; PAM sequence: CAG
ttcagatttaaatcagattt

SEQ ID NO: 40057 - DNA, 20 bp, Artificial Sequence
  Description of Artificial Sequence: Synthetic oligonucleotide
  Target: ATXN2; (+) strand; PAM type: NRG; PAM sequence: AAG
aaatcagatttcagatcaaa

SEQ ID NO: 40058 - DNA, 20 bp, Artificial Sequence
  Description of Artificial Sequence: Synthetic oligonucleotide
  Target: ATXN2; (+) strand; PAM type: NRG; PAM sequence: TGG
gatttcagatcaaaaagctt

SEQ ID NO: 40059 - DNA, 20 bp, Artificial Sequence
  Description of Artificial Sequence: Synthetic oligonucleotide
  Target: ATXN2; (+) strand; PAM type: NRG; PAM sequence: GAG
taactttttttttttttttt

SEQ ID NO: 40060 - DNA, 20 bp, Artificial Sequence
  Description of Artificial Sequence: Synthetic oligonucleotide
  Target: ATXN2; (+) strand; PAM type: NRG; PAM sequence: TAG
ttttttttttttttttgaga

SEQ ID NO: 40061 - DNA, 20 bp, Artificial Sequence
  Description of Artificial Sequence: Synthetic oligonucleotide
  Target: ATXN2; (+) strand; PAM type: NRG; PAM sequence: AGG
tttttttttttttttgagat

SEQ ID NO: 40062 - DNA, 20 bp, Artificial Sequence
  Description of Artificial Sequence: Synthetic oligonucleotide
  Target: ATXN2; (+) strand; PAM type: NRG; PAM sequence: GGG
ttttttttttttttgagata

SEQ ID NO: 40063 - DNA, 20 bp, Artificial Sequence
  Description of Artificial Sequence: Synthetic oligonucleotide
  Target: ATXN2; (+) strand; PAM type: NRG; PAM sequence: TGG
ccatgctgctctcgaactca

SEQ ID NO: 40064 - DNA, 20 bp, Artificial Sequence
  Description of Artificial Sequence: Synthetic oligonucleotide
  Target: ATXN2; (+) strand; PAM type: NRG; PAM sequence: GGG
catgctgctctcgaactcat

SEQ ID NO: 40065 - DNA, 20 bp, Artificial Sequence
  Description of Artificial Sequence: Synthetic oligonucleotide
  Target: ATXN2; (+) strand; PAM type: NRG; PAM sequence: AAG
gctctcgaactcatgggttc

SEQ ID NO: 40066 - DNA, 20 bp, Artificial Sequence
  Description of Artificial Sequence: Synthetic oligonucleotide
  Target: ATXN2; (+) strand; PAM type: NRG; PAM sequence: CAG
catgggttcaagtcatcctc

SEQ ID NO: 40067 - DNA, 20 bp, Artificial Sequence
  Description of Artificial Sequence: Synthetic oligonucleotide
  Target: ATXN2; (+) strand; PAM type: NRG; PAM sequence: TGG
ggttcaagtcatcctccagc

SEQ ID NO: 40068 - DNA, 20 bp, Artificial Sequence
  Description of Artificial Sequence: Synthetic oligonucleotide
  Target: ATXN2; (+) strand; PAM type: NRG; PAM sequence: GGG
gttcaagtcatcctccagct

SEQ ID NO: 40069 - DNA, 20 bp, Artificial Sequence
  Description of Artificial Sequence: Synthetic oligonucleotide
  Target: ATXN2; (+) strand; PAM type: NRG; PAM sequence: CAG
tcatcctccagctgggatat

SEQ ID NO: 40070 - DNA, 20 bp, Artificial Sequence
  Description of Artificial Sequence: Synthetic oligonucleotide
  Target: ATXN2; (+) strand; PAM type: NRG; PAM sequence: AGG
catcctccagctgggatatc

SEQ ID NO: 40071 - DNA, 20 bp, Artificial Sequence
  Description of Artificial Sequence: Synthetic oligonucleotide
  Target: ATXN2; (+) strand; PAM type: NRG; PAM sequence: TGG
tccagctgggatatcaggca

SEQ ID NO: 40072 - DNA, 20 bp, Artificial Sequence
  Description of Artificial Sequence: Synthetic oligonucleotide
  Target: ATXN2; (+) strand; PAM type: NRG; PAM sequence: GAG
cagctgggatatcaggcatg

SEQ ID NO: 40073 - DNA, 20 bp, Artificial Sequence
  Description of Artificial Sequence: Synthetic oligonucleotide
  Target: ATXN2; (+) strand; PAM type: NRG; PAM sequence: CAG
aggcatggagccactgtgtc

SEQ ID NO: 40074 - DNA, 20 bp, Artificial Sequence
  Description of Artificial Sequence: Synthetic oligonucleotide
  Target: ATXN2; (+) strand; PAM type: NRG; PAM sequence: TAG
agccactgtgtccagccaat

SEQ ID NO: 40075 - DNA, 20 bp, Artificial Sequence
  Description of Artificial Sequence: Synthetic oligonucleotide
  Target: ATXN2; (+) strand; PAM type: NRG; PAM sequence: TGG
ctgtgtccagccaattagtc

SEQ ID NO: 40076 - DNA, 20 bp, Artificial Sequence
  Description of Artificial Sequence: Synthetic oligonucleotide
  Target: ATXN2; (+) strand; PAM type: NRG; PAM sequence: GAG
tttgtttgtttgtttgtttt

SEQ ID NO: 40077 - DNA, 20 bp, Artificial Sequence
  Description of Artificial Sequence: Synthetic oligonucleotide
  Target: ATXN2; (+) strand; PAM type: NRG; PAM sequence: TGG
tttgtttgtttgttttgaga

SEQ ID NO: 40078 - DNA, 20 bp, Artificial Sequence
  Description of Artificial Sequence: Synthetic oligonucleotide
  Target: ATXN2; (+) strand; PAM type: NRG; PAM sequence: GAG
tgtttgtttgttttgagatg

SEQ ID NO: 40079 - DNA, 20 bp, Artificial Sequence
  Description of Artificial Sequence: Synthetic oligonucleotide
  Target: ATXN2; (+) strand; PAM type: NRG; PAM sequence: CAG
tggagtctcactctgttgcc

SEQ ID NO: 40080 - DNA, 20 bp, Artificial Sequence
  Description of Artificial Sequence: Synthetic oligonucleotide
  Target: ATXN2; (+) strand; PAM type: NRG; PAM sequence: AGG
ggagtctcactctgttgccc

SEQ ID NO: 40081 - DNA, 20 bp, Artificial Sequence
  Description of Artificial Sequence: Synthetic oligonucleotide
  Target: ATXN2; (+) strand; PAM type: NRG; PAM sequence: AAG
tcactctgttgcccaggctg

SEQ ID NO: 40082 - DNA, 20 bp, Artificial Sequence
  Description of Artificial Sequence: Synthetic oligonucleotide
  Target: ATXN2; (+) strand; PAM type: NRG; PAM sequence: CAG
ctgttgcccaggctgaagtg

SEQ ID NO: 40083 - DNA, 20 bp, Artificial Sequence
  Description of Artificial Sequence: Synthetic oligonucleotide
  Target: ATXN2; (+) strand; PAM type: NRG; PAM sequence: TGG
ttgcccaggctgaagtgcag

SEQ ID NO: 40084 - DNA, 20 bp, Artificial Sequence
  Description of Artificial Sequence: Synthetic oligonucleotide
  Target: ATXN2; (+) strand; PAM type: NRG; PAM sequence: TGG
gaagtgcagtggcacgatct

SEQ ID NO: 40085 - DNA, 20 bp, Artificial Sequence
  Description of Artificial Sequence: Synthetic oligonucleotide
  Target: ATXN2; (+) strand; PAM type: NRG; PAM sequence: CGG
tcactgcaacccctgcctcc

SEQ ID NO: 40086 - DNA, 20 bp, Artificial Sequence
  Description of Artificial Sequence: Synthetic oligonucleotide
  Target: ATXN2; (+) strand; PAM type: NRG; PAM sequence: GGG
cactgcaacccctgcctccc

SEQ ID NO: 40087 - DNA, 20 bp, Artificial Sequence
  Description of Artificial Sequence: Synthetic oligonucleotide
  Target: ATXN2; (+) strand; PAM type: NRG; PAM sequence: AAG
aacccctgcctcccgggttc

SEQ ID NO: 40088 - DNA, 20 bp, Artificial Sequence
  Description of Artificial Sequence: Synthetic oligonucleotide
  Target: ATXN2; (+) strand; PAM type: NRG; PAM sequence: CAG
ttcaagcaattctcctgcct

SEQ ID NO: 40089 - DNA, 20 bp, Artificial Sequence
  Description of Artificial Sequence: Synthetic oligonucleotide
  Target: ATXN2; (+) strand; PAM type: NRG; PAM sequence: TAG
tctcctgcctcagccccacc

SEQ ID NO: 40090 - DNA, 20 bp, Artificial Sequence
  Description of Artificial Sequence: Synthetic oligonucleotide
  Target: ATXN2; (+) strand; PAM type: NRG; PAM sequence: TAG
cctgcctcagccccacctag

SEQ ID NO: 40091 - DNA, 20 bp, Artificial Sequence
  Description of Artificial Sequence: Synthetic oligonucleotide
  Target: ATXN2; (+) strand; PAM type: NRG; PAM sequence: TGG
cctcagccccacctagtagc

SEQ ID NO: 40092 - DNA, 20 bp, Artificial Sequence
  Description of Artificial Sequence: Synthetic oligonucleotide
  Target: ATXN2; (+) strand; PAM type: NRG; PAM sequence: GGG
ctcagccccacctagtagct

SEQ ID NO: 40093 - DNA, 20 bp, Artificial Sequence
  Description of Artificial Sequence: Synthetic oligonucleotide
  Target: ATXN2; (+) strand; PAM type: NRG; PAM sequence: CAG
ccacctagtagctgggatta

SEQ ID NO: 40094 - DNA, 20 bp, Artificial Sequence
  Description of Artificial Sequence: Synthetic oligonucleotide
  Target: ATXN2; (+) strand; PAM type: NRG; PAM sequence: AGG
cacctagtagctgggattac

SEQ ID NO: 40095 - DNA, 20 bp, Artificial Sequence
  Description of Artificial Sequence: Synthetic oligonucleotide
  Target: ATXN2; (+) strand; PAM type: NRG; PAM sequence: CGG
ctagtagctgggattacagg

SEQ ID NO: 40096 - DNA, 20 bp, Artificial Sequence
  Description of Artificial Sequence: Synthetic oligonucleotide
  Target: ATXN2; (+) strand; PAM type: NRG; PAM sequence: CAG
gtagctgggattacaggcgg

SEQ ID NO: 40097 - DNA, 20 bp, Artificial Sequence
  Description of Artificial Sequence: Synthetic oligonucleotide
  Target: ATXN2; (+) strand; PAM type: NRG; PAM sequence: AGG
tagctgggattacaggcggc

SEQ ID NO: 40098 - DNA, 20 bp, Artificial Sequence
  Description of Artificial Sequence: Synthetic oligonucleotide
  Target: ATXN2; (+) strand; PAM type: NRG; PAM sequence: CGG
gcggcaggtgccaccatgtc

SEQ ID NO: 40099 - DNA, 20 bp, Artificial Sequence
  Description of Artificial Sequence: Synthetic oligonucleotide
  Target: ATXN2; (+) strand; PAM type: NRG; PAM sequence: TAG
tccggctaatttttgtattt

SEQ ID NO: 40100 - DNA, 20 bp, Artificial Sequence
  Description of Artificial Sequence: Synthetic oligonucleotide
  Target: ATXN2; (+) strand; PAM type: NRG; PAM sequence: TAG
ggctaatttttgtattttag

SEQ ID NO: 40101 - DNA, 20 bp, Artificial Sequence
  Description of Artificial Sequence: Synthetic oligonucleotide
  Target: ATXN2; (+) strand; PAM type: NRG; PAM sequence: GAG
ctaatttttgtattttagta

SEQ ID NO: 40102 - DNA, 20 bp, Artificial Sequence
  Description of Artificial Sequence: Synthetic oligonucleotide
  Target: ATXN2; (+) strand; PAM type: NRG; PAM sequence: TGG
tttttgtattttagtagaga

SEQ ID NO: 40103 - DNA, 20 bp, Artificial Sequence
  Description of Artificial Sequence: Synthetic oligonucleotide
  Target: ATXN2; (+) strand; PAM type: NRG; PAM sequence: GGG
ttttgtattttagtagagat

SEQ ID NO: 40104 - DNA, 20 bp, Artificial Sequence
  Description of Artificial Sequence: Synthetic oligonucleotide
  Target: ATXN2; (+) strand; PAM type: NRG; PAM sequence: GGG
tttgtattttagtagagatg

SEQ ID NO: 40105 - DNA, 20 bp, Artificial Sequence
  Description of Artificial Sequence: Synthetic oligonucleotide
  Target: ATXN2; (+) strand; PAM type: NRG; PAM sequence: TGG
gagatggggtttcgccatgt

SEQ ID NO: 40106 - DNA, 20 bp, Artificial Sequence
  Description of Artificial Sequence: Synthetic oligonucleotide
  Target: ATXN2; (+) strand; PAM type: NRG; PAM sequence: CAG
tggggtttcgccatgttggc

SEQ ID NO: 40107 - DNA, 20 bp, Artificial Sequence
  Description of Artificial Sequence: Synthetic oligonucleotide
  Target: ATXN2; (+) strand; PAM type: NRG; PAM sequence: AGG
ggggtttcgccatgttggcc

SEQ ID NO: 40108 - DNA, 20 bp, Artificial Sequence
  Description of Artificial Sequence: Synthetic oligonucleotide
  Target: ATXN2; (+) strand; PAM type: NRG; PAM sequence: TGG
tttcgccatgttggccaggc

SEQ ID NO: 40109 - DNA, 20 bp, Artificial Sequence
  Description of Artificial Sequence: Synthetic oligonucleotide
  Target: ATXN2; (+) strand; PAM type: NRG; PAM sequence: CAG
tggtctcaaactactgacct

SEQ ID NO: 40110 - DNA, 20 bp, Artificial Sequence
  Description of Artificial Sequence: Synthetic oligonucleotide
  Target: ATXN2; (+) strand; PAM type: NRG; PAM sequence: AGG
ggtctcaaactactgacctc

SEQ ID NO: 40111 - DNA, 20 bp, Artificial Sequence
  Description of Artificial Sequence: Synthetic oligonucleotide
  Target: ATXN2; (+) strand; PAM type: NRG; PAM sequence: CGG
ctcaggtgatacacccacct

SEQ ID NO: 40112 - DNA, 20 bp, Artificial Sequence
  Description of Artificial Sequence: Synthetic oligonucleotide
  Target: ATXN2; (+) strand; PAM type: NRG; PAM sequence: AAG
acacccacctcggcctccca

SEQ ID NO: 40113 - DNA, 20 bp, Artificial Sequence
  Description of Artificial Sequence: Synthetic oligonucleotide
  Target: ATXN2; (+) strand; PAM type: NRG; PAM sequence: TGG
acctcggcctcccaaagtgc

SEQ ID NO: 40114 - DNA, 20 bp, Artificial Sequence
  Description of Artificial Sequence: Synthetic oligonucleotide
  Target: ATXN2; (+) strand; PAM type: NRG; PAM sequence: GGG
cctcggcctcccaaagtgct

SEQ ID NO: 40115 - DNA, 20 bp, Artificial Sequence
  Description of Artificial Sequence: Synthetic oligonucleotide
  Target: ATXN2; (+) strand; PAM type: NRG; PAM sequence: CAG
ctcccaaagtgctgggatta

SEQ ID NO: 40116 - DNA, 20 bp, Artificial Sequence
  Description of Artificial Sequence: Synthetic oligonucleotide
  Target: ATXN2; (+) strand; PAM type: NRG; PAM sequence: AGG
tcccaaagtgctgggattac

SEQ ID NO: 40117 - DNA, 20 bp, Artificial Sequence
  Description of Artificial Sequence: Synthetic oligonucleotide
  Target: ATXN2; (+) strand; PAM type: NRG; PAM sequence: AAG
agtgctgggattacaggcat

SEQ ID NO: 40118 - DNA, 20 bp, Artificial Sequence
  Description of Artificial Sequence: Synthetic oligonucleotide
  Target: ATXN2; (+) strand; PAM type: NRG; PAM sequence: CAG
caggcataagccaccatgcc

SEQ ID NO: 40119 - DNA, 20 bp, Artificial Sequence
  Description of Artificial Sequence: Synthetic oligonucleotide
  Target: ATXN2; (+) strand; PAM type: NRG; PAM sequence: CAG
cataagccaccatgcccagc

SEQ ID NO: 40120 - DNA, 20 bp, Artificial Sequence
  Description of Artificial Sequence: Synthetic oligonucleotide
  Target: ATXN2; (+) strand; PAM type: NRG; PAM sequence: GAG
cccagccagtatttatgttt

SEQ ID NO: 40121 - DNA, 20 bp, Artificial Sequence
  Description of Artificial Sequence: Synthetic oligonucleotide
  Target: ATXN2; (+) strand; PAM type: NRG; PAM sequence: CGG
gccagtatttatgtttgaga

SEQ ID NO: 40122 - DNA, 20 bp, Artificial Sequence
  Description of Artificial Sequence: Synthetic oligonucleotide
  Target: ATXN2; (+) strand; PAM type: NRG; PAM sequence: GGG
ccagtatttatgtttgagac

SEQ ID NO: 40123 - DNA, 20 bp, Artificial Sequence
  Description of Artificial Sequence: Synthetic oligonucleotide
  Target: ATXN2; (+) strand; PAM type: NRG; PAM sequence: GGG
cagtatttatgtttgagacg

SEQ ID NO: 40124 - DNA, 20 bp, Artificial Sequence
  Description of Artificial Sequence: Synthetic oligonucleotide
  Target: ATXN2; (+) strand; PAM type: NRG; PAM sequence: CAG
cggggtctcactctgtcgcc

SEQ ID NO: 40125 - DNA, 20 bp, Artificial Sequence
  Description of Artificial Sequence: Synthetic oligonucleotide
  Target: ATXN2; (+) strand; PAM type: NRG; PAM sequence: AGG
ggggtctcactctgtcgccc

SEQ ID NO: 40126 - DNA, 20 bp, Artificial Sequence
  Description of Artificial Sequence: Synthetic oligonucleotide
  Target: ATXN2; (+) strand; PAM type: NRG; PAM sequence: TGG
tctcactctgtcgcccaggc

SEQ ID NO: 40127 - DNA, 20 bp, Artificial Sequence
  Description of Artificial Sequence: Synthetic oligonucleotide
  Target: ATXN2; (+) strand; PAM type: NRG; PAM sequence: GAG
tcactctgtcgcccaggctg

SEQ ID NO: 40128 - DNA, 20 bp, Artificial Sequence
  Description of Artificial Sequence: Synthetic oligonucleotide
  Target: ATXN2; (+) strand; PAM type: NRG; PAM sequence: AGG
cactctgtcgcccaggctgg

SEQ ID NO: 40129 - DNA, 20 bp, Artificial Sequence
  Description of Artificial Sequence: Synthetic oligonucleotide
  Target: ATXN2; (+) strand; PAM type: NRG; PAM sequence: GGG
actctgtcgcccaggctgga

SEQ ID NO: 40130 - DNA, 20 bp, Artificial Sequence
  Description of Artificial Sequence: Synthetic oligonucleotide
  Target: ATXN2; (+) strand; PAM type: NRG; PAM sequence: CAG
ctgtcgcccaggctggaggg

SEQ ID NO: 40131 - DNA, 20 bp, Artificial Sequence
  Description of Artificial Sequence: Synthetic oligonucleotide
  Target: ATXN2; (+) strand; PAM type: NRG; PAM sequence: TGG
tcgcccaggctggagggcag

SEQ ID NO: 40132 - DNA, 20 bp, Artificial Sequence
  Description of Artificial Sequence: Synthetic oligonucleotide
  Target: ATXN2; (+) strand; PAM type: NRG; PAM sequence: CAG
ggagggcagtggcataatca

SEQ ID NO: 40133 - DNA, 20 bp, Artificial Sequence
  Description of Artificial Sequence: Synthetic oligonucleotide
  Target: ATXN2; (+) strand; PAM type: NRG; PAM sequence: CAG
ggcataatcacagctcactg

SEQ ID NO: 40134 - DNA, 20 bp, Artificial Sequence
  Description of Artificial Sequence: Synthetic oligonucleotide
  Target: ATXN2; (+) strand; PAM type: NRG; PAM sequence: TGG
tcactgcagcctctacttcc

SEQ ID NO: 40135 - DNA, 20 bp, Artificial Sequence
  Description of Artificial Sequence: Synthetic oligonucleotide
  Target: ATXN2; (+) strand; PAM type: NRG; PAM sequence: GGG
cactgcagcctctacttcct

SEQ ID NO: 40136 - DNA, 20 bp, Artificial Sequence
  Description of Artificial Sequence: Synthetic oligonucleotide
  Target: ATXN2; (+) strand; PAM type: NRG; PAM sequence: AAG
agcctctacttcctgggctc

SEQ ID NO: 40137 - DNA, 20 bp, Artificial Sequence
  Description of Artificial Sequence: Synthetic oligonucleotide
  Target: ATXN2; (+) strand; PAM type: NRG; PAM sequence: CAG
ctcaagtgatcctctcgcct

SEQ ID NO: 40138 - DNA, 20 bp, Artificial Sequence
  Description of Artificial Sequence: Synthetic oligonucleotide
  Target: ATXN2; (+) strand; PAM type: NRG; PAM sequence: CAG
tctcgcctcagtcccccaaa

SEQ ID NO: 40139 - DNA, 20 bp, Artificial Sequence
  Description of Artificial Sequence: Synthetic oligonucleotide
  Target: ATXN2; (+) strand; PAM type: NRG; PAM sequence: TGG
gcctcagtcccccaaacagc

SEQ ID NO: 40140 - DNA, 20 bp, Artificial Sequence
  Description of Artificial Sequence: Synthetic oligonucleotide
  Target: ATXN2; (+) strand; PAM type: NRG; PAM sequence: GGG
cctcagtcccccaaacagct

SEQ ID NO: 40141 - DNA, 20 bp, Artificial Sequence
  Description of Artificial Sequence: Synthetic oligonucleotide
  Target: ATXN2; (+) strand; PAM type: NRG; PAM sequence: GGG
ctcagtcccccaaacagctg

SEQ ID NO: 40142 - DNA, 20 bp, Artificial Sequence
  Description of Artificial Sequence: Synthetic oligonucleotide
  Target: ATXN2; (+) strand; PAM type: NRG; PAM sequence: CAG
cccccaaacagctggggcta

SEQ ID NO: 40143 - DNA, 20 bp, Artificial Sequence
  Description of Artificial Sequence: Synthetic oligonucleotide
  Target: ATXN2; (+) strand; PAM type: NRG; PAM sequence: AGG
ccccaaacagctggggctac

SEQ ID NO: 40144 - DNA, 20 bp, Artificial Sequence
  Description of Artificial Sequence: Synthetic oligonucleotide
  Target: ATXN2; (+) strand; PAM type: NRG; PAM sequence: CAG
caggcatatgccaccatgcc

SEQ ID NO: 40145 - DNA, 20 bp, Artificial Sequence
  Description of Artificial Sequence: Synthetic oligonucleotide
  Target: ATXN2; (+) strand; PAM type: NRG; PAM sequence: TAG
cagctaatttttttgaattt

SEQ ID NO: 40146 - DNA, 20 bp, Artificial Sequence
  Description of Artificial Sequence: Synthetic oligonucleotide
  Target: ATXN2; (+) strand; PAM type: NRG; PAM sequence: TAG
ctaatttttttgaattttag

SEQ ID NO: 40147 - DNA, 20 bp, Artificial Sequence
  Description of Artificial Sequence: Synthetic oligonucleotide
  Target: ATXN2; (+) strand; PAM type: NRG; PAM sequence: GAG
aatttttttgaattttagta

SEQ ID NO: 40148 - DNA, 20 bp, Artificial Sequence
  Description of Artificial Sequence: Synthetic oligonucleotide
  Target: ATXN2; (+) strand; PAM type: NRG; PAM sequence: AAG
tttgaattttagtagagaca

SEQ ID NO: 40149 - DNA, 20 bp, Artificial Sequence
  Description of Artificial Sequence: Synthetic oligonucleotide
  Target: ATXN2; (+) strand; PAM type: NRG; PAM sequence: CAG
gagacaaagtctctgttgtc

SEQ ID NO: 40150 - DNA, 20 bp, Artificial Sequence
  Description of Artificial Sequence: Synthetic oligonucleotide
  Target: ATXN2; (+) strand; PAM type: NRG; PAM sequence: AGG
agacaaagtctctgttgtcc

SEQ ID NO: 40151 - DNA, 20 bp, Artificial Sequence
  Description of Artificial Sequence: Synthetic oligonucleotide
  Target: ATXN2; (+) strand; PAM type: NRG; PAM sequence: TGG
tctgttgtccaggctgatct

SEQ ID NO: 40152 - DNA, 20 bp, Artificial Sequence
  Description of Artificial Sequence: Synthetic oligonucleotide
  Target: ATXN2; (+) strand; PAM type: NRG; PAM sequence: GGG
ctgttgtccaggctgatctt

SEQ ID NO: 40153 - DNA, 20 bp, Artificial Sequence
  Description of Artificial Sequence: Synthetic oligonucleotide
  Target: ATXN2; (+) strand; PAM type: NRG; PAM sequence: GAG
caggctgatcttgggctcct

SEQ ID NO: 40154 - DNA, 20 bp, Artificial Sequence
  Description of Artificial Sequence: Synthetic oligonucleotide
  Target: ATXN2; (+) strand; PAM type: NRG; PAM sequence: AAG
gatcttgggctcctgagctc

SEQ ID NO: 40155 - DNA, 20 bp, Artificial Sequence
  Description of Artificial Sequence: Synthetic oligonucleotide
  Target: ATXN2; (+) strand; PAM type: NRG; PAM sequence: TGG
ctcaagcaatcctcctgcct

SEQ ID NO: 40156 - DNA, 20 bp, Artificial Sequence
  Description of Artificial Sequence: Synthetic oligonucleotide
  Target: ATXN2; (+) strand; PAM type: NRG; PAM sequence: AAG
cctcctgccttggcctccca

SEQ ID NO: 40157 - DNA, 20 bp, Artificial Sequence
  Description of Artificial Sequence: Synthetic oligonucleotide
  Target: ATXN2; (+) strand; PAM type: NRG; PAM sequence: CAG
ctcccaaagtgctaaaatta

SEQ ID NO: 40158 - DNA, 20 bp, Artificial Sequence
  Description of Artificial Sequence: Synthetic oligonucleotide
  Target: ATXN2; (+) strand; PAM type: NRG; PAM sequence: AGG
tcccaaagtgctaaaattac

SEQ ID NO: 40159 - DNA, 20 bp, Artificial Sequence
  Description of Artificial Sequence: Synthetic oligonucleotide
  Target: ATXN2; (+) strand; PAM type: NRG; PAM sequence: GAG
agtgctaaaattacaggtgt

SEQ ID NO: 40160 - DNA, 20 bp, Artificial Sequence
  Description of Artificial Sequence: Synthetic oligonucleotide
  Target: ATXN2; (+) strand; PAM type: NRG; PAM sequence: CAG
acaggtgtgagccatcacac

SEQ ID NO: 40161 - DNA, 20 bp, Artificial Sequence
  Description of Artificial Sequence: Synthetic oligonucleotide
  Target: ATXN2; (+) strand; PAM type: NRG; PAM sequence: AGG
caggtgtgagccatcacacc

SEQ ID NO: 40162 - DNA, 20 bp, Artificial Sequence
  Description of Artificial Sequence: Synthetic oligonucleotide
  Target: ATXN2; (+) strand; PAM type: NRG; PAM sequence: AAG
gcctccaattactctttttg

SEQ ID NO: 40163 - DNA, 20 bp, Artificial Sequence
  Description of Artificial Sequence: Synthetic oligonucleotide
  Target: ATXN2; (+) strand; PAM type: NRG; PAM sequence: GAG
ctccaattactctttttgaa

SEQ ID NO: 40164 - DNA, 20 bp, Artificial Sequence
  Description of Artificial Sequence: Synthetic oligonucleotide
  Target: ATXN2; (+) strand; PAM type: NRG; PAM sequence: AGG
tccaattactctttttgaag

SEQ ID NO: 40165 - DNA, 20 bp, Artificial Sequence
  Description of Artificial Sequence: Synthetic oligonucleotide
  Target: ATXN2; (+) strand; PAM type: NRG; PAM sequence: TGG
tactatataatcacaactga

SEQ ID NO: 40166 - DNA, 20 bp, Artificial Sequence
  Description of Artificial Sequence: Synthetic oligonucleotide
  Target: ATXN2; (+) strand; PAM type: NRG; PAM sequence: GGG
actatataatcacaactgat

SEQ ID NO: 40167 - DNA, 20 bp, Artificial Sequence
  Description of Artificial Sequence: Synthetic oligonucleotide
  Target: ATXN2; (+) strand; PAM type: NRG; PAM sequence: AAG
tatgtaatgttgttcatcaa

SEQ ID NO: 40168 - DNA, 20 bp, Artificial Sequence
  Description of Artificial Sequence: Synthetic oligonucleotide
  Target: ATXN2; (+) strand; PAM type: NRG; PAM sequence: TAG
gttcatcaaaagccaatgca

SEQ ID NO: 40169 - DNA, 20 bp, Artificial Sequence
  Description of Artificial Sequence: Synthetic oligonucleotide
  Target: ATXN2; (+) strand; PAM type: NRG; PAM sequence: AAG
caatgcatagcctcatcaaa

SEQ ID NO: 40170 - DNA, 20 bp, Artificial Sequence
  Description of Artificial Sequence: Synthetic oligonucleotide
  Target: ATXN2; (+) strand; PAM type: NRG; PAM sequence: CAG
gcatagcctcatcaaaaagt

SEQ ID NO: 40171 - DNA, 20 bp, Artificial Sequence
  Description of Artificial Sequence: Synthetic oligonucleotide
  Target: ATXN2; (+) strand; PAM type: NRG; PAM sequence: GAG
atagcctcatcaaaaagtca

SEQ ID NO: 40172 - DNA, 20 bp, Artificial Sequence
  Description of Artificial Sequence: Synthetic oligonucleotide
  Target: ATXN2; (+) strand; PAM type: NRG; PAM sequence: TAG
ctatttattcattataaact

SEQ ID NO: 40173 - DNA, 20 bp, Artificial Sequence
  Description of Artificial Sequence: Synthetic oligonucleotide
  Target: ATXN2; (+) strand; PAM type: NRG; PAM sequence: CAG
acttagttactcaattcatg

SEQ ID NO: 40174 - DNA, 20 bp, Artificial Sequence
  Description of Artificial Sequence: Synthetic oligonucleotide
  Target: ATXN2; (+) strand; PAM type: NRG; PAM sequence: AAG
tcatgcagcatgcaaactac

SEQ ID NO: 40175 - DNA, 20 bp, Artificial Sequence
  Description of Artificial Sequence: Synthetic oligonucleotide
  Target: ATXN2; (+) strand; PAM type: NRG; PAM sequence: CAG
atgcaaactacaagcaaaca

SEQ ID NO: 40176 - DNA, 20 bp, Artificial Sequence
  Description of Artificial Sequence: Synthetic oligonucleotide
  Target: ATXN2; (+) strand; PAM type: NRG; PAM sequence: AGG
tgcaaactacaagcaaacac

SEQ ID NO: 40177 - DNA, 20 bp, Artificial Sequence
  Description of Artificial Sequence: Synthetic oligonucleotide
  Target: ATXN2; (+) strand; PAM type: NRG; PAM sequence: CAG
aaactacaagcaaacacagg

SEQ ID NO: 40178 - DNA, 20 bp, Artificial Sequence
  Description of Artificial Sequence: Synthetic oligonucleotide
  Target: ATXN2; (+) strand; PAM type: NRG; PAM sequence: AGG
aactacaagcaaacacaggc

SEQ ID NO: 40179 - DNA, 20 bp, Artificial Sequence
  Description of Artificial Sequence: Synthetic oligonucleotide
  Target: ATXN2; (+) strand; PAM type: NRG; PAM sequence: TGG
tttacctgctctatatgtct

SEQ ID NO: 40180 - DNA, 20 bp, Artificial Sequence
  Description of Artificial Sequence: Synthetic oligonucleotide
  Target: ATXN2; (+) strand; PAM type: NRG; PAM sequence: TGG
tatgtcttggcttgattcac

SEQ ID NO: 40181 - DNA, 20 bp, Artificial Sequence
  Description of Artificial Sequence: Synthetic oligonucleotide
  Target: ATXN2; (+) strand; PAM type: NRG; PAM sequence: TGG
cttggcttgattcactggca

SEQ ID NO: 40182 - DNA, 20 bp, Artificial Sequence
  Description of Artificial Sequence: Synthetic oligonucleotide
  Target: ATXN2; (+) strand; PAM type: NRG; PAM sequence: GGG
ttggcttgattcactggcat

SEQ ID NO: 40183 - DNA, 20 bp, Artificial Sequence
  Description of Artificial Sequence: Synthetic oligonucleotide
  Target: ATXN2; (+) strand; PAM type: NRG; PAM sequence: TAG
attcactggcatgggcgtca

SEQ ID NO: 40184 - DNA, 20 bp, Artificial Sequence
  Description of Artificial Sequence: Synthetic oligonucleotide
  Target: ATXN2; (+) strand; PAM type: NRG; PAM sequence: AGG
ttcactggcatgggcgtcat

SEQ ID NO: 40185 - DNA, 20 bp, Artificial Sequence
  Description of Artificial Sequence: Synthetic oligonucleotide
  Target: ATXN2; (+) strand; PAM type: NRG; PAM sequence: TGG
ggcatgggcgtcataggtat

SEQ ID NO: 40186 - DNA, 20 bp, Artificial Sequence
  Description of Artificial Sequence: Synthetic oligonucleotide
  Target: ATXN2; (+) strand; PAM type: NRG; PAM sequence: GGG
gcatgggcgtcataggtatt

SEQ ID NO: 40187 - DNA, 20 bp, Artificial Sequence
  Description of Artificial Sequence: Synthetic oligonucleotide
  Target: ATXN2; (+) strand; PAM type: NRG; PAM sequence: AAG
cgtcataggtattgggtata

SEQ ID NO: 40188 - DNA, 20 bp, Artificial Sequence
  Description of Artificial Sequence: Synthetic oligonucleotide
  Target: ATXN2; (+) strand; PAM type: NRG; PAM sequence: AGG
gtcataggtattgggtataa

SEQ ID NO: 40189 - DNA, 20 bp, Artificial Sequence
  Description of Artificial Sequence: Synthetic oligonucleotide
  Target: ATXN2; (+) strand; PAM type: NRG; PAM sequence: GAG
ggtattgggtataaaggctt

SEQ ID NO: 40190 - DNA, 20 bp, Artificial Sequence
  Description of Artificial Sequence: Synthetic oligonucleotide
  Target: ATXN2; (+) strand; PAM type: NRG; PAM sequence: GAG
tattgggtataaaggcttga

SEQ ID NO: 40191 - DNA, 20 bp, Artificial Sequence
  Description of Artificial Sequence: Synthetic oligonucleotide
  Target: ATXN2; (+) strand; PAM type: NRG; PAM sequence: TAG
attaaaaaaaaaattaacat

SEQ ID NO: 40192 - DNA, 20 bp, Artificial Sequence
  Description of Artificial Sequence: Synthetic oligonucleotide
  Target: ATXN2; (+) strand; PAM type: NRG; PAM sequence: AGG
ttaaaaaaaaaattaacatt

SEQ ID NO: 40193 - DNA, 20 bp, Artificial Sequence
  Description of Artificial Sequence: Synthetic oligonucleotide
  Target: ATXN2; (+) strand; PAM type: NRG; PAM sequence: AAG
taggcacctatgataataac

SEQ ID NO: 40194 - DNA, 20 bp, Artificial Sequence
  Description of Artificial Sequence: Synthetic oligonucleotide
  Target: ATXN2; (+) strand; PAM type: NRG; PAM sequence: AGG
aggcacctatgataataaca

SEQ ID NO: 40195 - DNA, 20 bp, Artificial Sequence
  Description of Artificial Sequence: Synthetic oligonucleotide
  Target: ATXN2; (+) strand; PAM type: NRG; PAM sequence: TAG
acaaggtattctgtcactct

SEQ ID NO: 40196 - DNA, 20 bp, Artificial Sequence
  Description of Artificial Sequence: Synthetic oligonucleotide
  Target: ATXN2; (+) strand; PAM type: NRG; PAM sequence: TAG
cactcttagttttatattgc

SEQ ID NO: 40197 - DNA, 20 bp, Artificial Sequence
  Description of Artificial Sequence: Synthetic oligonucleotide
  Target: ATXN2; (+) strand; PAM type: NRG; PAM sequence: GAG
ctcttagttttatattgcta

SEQ ID NO: 40198 - DNA, 20 bp, Artificial Sequence
  Description of Artificial Sequence: Synthetic oligonucleotide
  Target: ATXN2; (+) strand; PAM type: NRG; PAM sequence: GAG
cttagttttatattgctaga

SEQ ID NO: 40199 - DNA, 20 bp, Artificial Sequence
  Description of Artificial Sequence: Synthetic oligonucleotide
  Target: ATXN2; (+) strand; PAM type: NRG; PAM sequence: TAG
gttttatattgctagagagc

SEQ ID NO: 40200 - DNA, 20 bp, Artificial Sequence
  Description of Artificial Sequence: Synthetic oligonucleotide
  Target: ATXN2; (+) strand; PAM type: NRG; PAM sequence: AGG
ttttatattgctagagagct

SEQ ID NO: 40201 - DNA, 20 bp, Artificial Sequence
  Description of Artificial Sequence: Synthetic oligonucleotide
  Target: ATXN2; (+) strand; PAM type: NRG; PAM sequence: GAG
attgctagagagctaggcat

SEQ ID NO: 40202 - DNA, 20 bp, Artificial Sequence
  Description of Artificial Sequence: Synthetic oligonucleotide
  Target: ATXN2; (+) strand; PAM type: NRG; PAM sequence: AAG
gctagagagctaggcatgag

SEQ ID NO: 40203 - DNA, 20 bp, Artificial Sequence
  Description of Artificial Sequence: Synthetic oligonucleotide
  Target: ATXN2; (+) strand; PAM type: NRG; PAM sequence: AGG
ctagagagctaggcatgaga

SEQ ID NO: 40204 - DNA, 20 bp, Artificial Sequence
  Description of Artificial Sequence: Synthetic oligonucleotide
  Target: ATXN2; (+) strand; PAM type: NRG; PAM sequence: TAG
aaggtttcctgattctccat

SEQ ID NO: 40205 - DNA, 20 bp, Artificial Sequence
  Description of Artificial Sequence: Synthetic oligonucleotide
  Target: ATXN2; (+) strand; PAM type: NRG; PAM sequence: TAG
tccattagtcattaaaaaat

SEQ ID NO: 40206 - DNA, 20 bp, Artificial Sequence
  Description of Artificial Sequence: Synthetic oligonucleotide
  Target: ATXN2; (+) strand; PAM type: NRG; PAM sequence: CAG
aaaaaattagatcataccca

SEQ ID NO: 40207 - DNA, 20 bp, Artificial Sequence
  Description of Artificial Sequence: Synthetic oligonucleotide
  Target: ATXN2; (+) strand; PAM type: NRG; PAM sequence: AAG
tagatcatacccacagctaa

SEQ ID NO: 40208 - DNA, 20 bp, Artificial Sequence
  Description of Artificial Sequence: Synthetic oligonucleotide
  Target: ATXN2; (+) strand; PAM type: NRG; PAM sequence: AGG
agatcatacccacagctaaa

SEQ ID NO: 40209 - DNA, 20 bp, Artificial Sequence
  Description of Artificial Sequence: Synthetic oligonucleotide
  Target: ATXN2; (+) strand; PAM type: NRG; PAM sequence: CAG
aaggaacaaaccccaaacta

SEQ ID NO: 40210 - DNA, 20 bp, Artificial Sequence
  Description of Artificial Sequence: Synthetic oligonucleotide
  Target: ATXN2; (+) strand; PAM type: NRG; PAM sequence: CAG
aatctaaaccatctttttca

SEQ ID NO: 40211 - DNA, 20 bp, Artificial Sequence
  Description of Artificial Sequence: Synthetic oligonucleotide
  Target: ATXN2; (+) strand; PAM type: NRG; PAM sequence: CAG
tttttcacagaaaacattct

SEQ ID NO: 40212 - DNA, 20 bp, Artificial Sequence
  Description of Artificial Sequence: Synthetic oligonucleotide
  Target: ATXN2; (+) strand; PAM type: NRG; PAM sequence: TAG
acagaaaacattctcagatt

SEQ ID NO: 40213 - DNA, 20 bp, Artificial Sequence
  Description of Artificial Sequence: Synthetic oligonucleotide
  Target: ATXN2; (+) strand; PAM type: NRG; PAM sequence: AGG
cagaaaacattctcagattt

SEQ ID NO: 40214 - DNA, 20 bp, Artificial Sequence
  Description of Artificial Sequence: Synthetic oligonucleotide
  Target: ATXN2; (+) strand; PAM type: NRG; PAM sequence: AAG
tgcataaccatcacaccctc

SEQ ID NO: 40215 - DNA, 20 bp, Artificial Sequence
  Description of Artificial Sequence: Synthetic oligonucleotide
  Target: ATXN2; (+) strand; PAM type: NRG; PAM sequence: AAG
ctcaagtcactgaaaaccta

SEQ ID NO: 40216 - DNA, 20 bp, Artificial Sequence
  Description of Artificial Sequence: Synthetic oligonucleotide
  Target: ATXN2; (+) strand; PAM type: NRG; PAM sequence: GAG
caagtcactgaaaacctaaa

SEQ ID NO: 40217 - DNA, 20 bp, Artificial Sequence
  Description of Artificial Sequence: Synthetic oligonucleotide
  Target: ATXN2; (+) strand; PAM type: NRG; PAM sequence: TGG
ctgaaaacctaaagagtgct

SEQ ID NO: 40218 - DNA, 20 bp, Artificial Sequence
  Description of Artificial Sequence: Synthetic oligonucleotide
  Target: ATXN2; (+) strand; PAM type: NRG; PAM sequence: CAG
acctaaagagtgcttggtgt

SEQ ID NO: 40219 - DNA, 20 bp, Artificial Sequence
  Description of Artificial Sequence: Synthetic oligonucleotide
  Target: ATXN2; (+) strand; PAM type: NRG; PAM sequence: TGG
tggtgtcagatacaaacaat

SEQ ID NO: 40220 - DNA, 20 bp, Artificial Sequence
  Description of Artificial Sequence: Synthetic oligonucleotide
  Target: ATXN2; (+) strand; PAM type: NRG; PAM sequence: GGG
ggtgtcagatacaaacaatt

SEQ ID NO: 40221 - DNA, 20 bp, Artificial Sequence
  Description of Artificial Sequence: Synthetic oligonucleotide
  Target: ATXN2; (+) strand; PAM type: NRG; PAM sequence: GGG
gtgtcagatacaaacaattg

SEQ ID NO: 40222 - DNA, 20 bp, Artificial Sequence
  Description of Artificial Sequence: Synthetic oligonucleotide
  Target: ATXN2; (+) strand; PAM type: NRG; PAM sequence: GAG
gtcagatacaaacaattggg

SEQ ID NO: 40223 - DNA, 20 bp, Artificial Sequence
  Description of Artificial Sequence: Synthetic oligonucleotide
  Target: ATXN2; (+) strand; PAM type: NRG; PAM sequence: AGG
tcagatacaaacaattgggg

SEQ ID NO: 40224 - DNA, 20 bp, Artificial Sequence
  Description of Artificial Sequence: Synthetic oligonucleotide
  Target: ATXN2; (+) strand; PAM type: NRG; PAM sequence: AAG
tacaaacaattggggaggct

SEQ ID NO: 40225 - DNA, 20 bp, Artificial Sequence
  Description of Artificial Sequence: Synthetic oligonucleotide
  Target: ATXN2; (+) strand; PAM type: NRG; PAM sequence: TGG
ctatgacttacttgcacgcc

SEQ ID NO: 40226 - DNA, 20 bp, Artificial Sequence
  Description of Artificial Sequence: Synthetic oligonucleotide
  Target: ATXN2; (+) strand; PAM type: NRG; PAM sequence: GGG
tatgacttacttgcacgcct

SEQ ID NO: 40227 - DNA, 20 bp, Artificial Sequence
  Description of Artificial Sequence: Synthetic oligonucleotide
  Target: ATXN2; (+) strand; PAM type: NRG; PAM sequence: TGG
acttgcacgcctgggctcac

SEQ ID NO: 40228 - DNA, 20 bp, Artificial Sequence
  Description of Artificial Sequence: Synthetic oligonucleotide
  Target: ATXN2; (+) strand; PAM type: NRG; PAM sequence: GGG
cttgcacgcctgggctcact

SEQ ID NO: 40229 - DNA, 20 bp, Artificial Sequence
  Description of Artificial Sequence: Synthetic oligonucleotide
  Target: ATXN2; (+) strand; PAM type: NRG; PAM sequence: TGG
acgcctgggctcactgggac

SEQ ID NO: 40230 - DNA, 20 bp, Artificial Sequence
  Description of Artificial Sequence: Synthetic oligonucleotide
  Target: ATXN2; (+) strand; PAM type: NRG; PAM sequence: TGG
gggactggatacatcatatt

SEQ ID NO: 40231 - DNA, 20 bp, Artificial Sequence
  Description of Artificial Sequence: Synthetic oligonucleotide
  Target: ATXN2; (+) strand; PAM type: NRG; PAM sequence: CAG
catatttggtgcaaaacaaa

SEQ ID NO: 40232 - DNA, 20 bp, Artificial Sequence
  Description of Artificial Sequence: Synthetic oligonucleotide
  Target: ATXN2; (+) strand; PAM type: NRG; PAM sequence: AGG
atatttggtgcaaaacaaac

SEQ ID NO: 40233 - DNA, 20 bp, Artificial Sequence
  Description of Artificial Sequence: Synthetic oligonucleotide
  Target: ATXN2; (+) strand; PAM type: NRG; PAM sequence: GAG
tggtgcaaaacaaacaggct

SEQ ID NO: 40234 - DNA, 20 bp, Artificial Sequence
  Description of Artificial Sequence: Synthetic oligonucleotide
  Target: ATXN2; (+) strand; PAM type: NRG; PAM sequence: TGG
caaacaggctgagtataaac

SEQ ID NO: 40235 - DNA, 20 bp, Artificial Sequence
  Description of Artificial Sequence: Synthetic oligonucleotide
  Target: ATXN2; (+) strand; PAM type: NRG; PAM sequence: GAG
aacaggctgagtataaactg

SEQ ID NO: 40236 - DNA, 20 bp, Artificial Sequence
  Description of Artificial Sequence: Synthetic oligonucleotide
  Target: ATXN2; (+) strand; PAM type: NRG; PAM sequence: TGG
ggctgagtataaactggagt

SEQ ID NO: 40237 - DNA, 20 bp, Artificial Sequence
  Description of Artificial Sequence: Synthetic oligonucleotide
  Target: ATXN2; (+) strand; PAM type: NRG; PAM sequence: TAG
tggctgttgatgacccacca

SEQ ID NO: 40238 - DNA, 20 bp, Artificial Sequence
  Description of Artificial Sequence: Synthetic oligonucleotide
  Target: ATXN2; (+) strand; PAM type: NRG; PAM sequence: TGG
tgttgatgacccaccataga

SEQ ID NO: 40239 - DNA, 20 bp, Artificial Sequence
  Description of Artificial Sequence: Synthetic oligonucleotide
  Target: ATXN2; (+) strand; PAM type: NRG; PAM sequence: GGG
gttgatgacccaccatagat

SEQ ID NO: 40240 - DNA, 20 bp, Artificial Sequence
  Description of Artificial Sequence: Synthetic oligonucleotide
  Target: ATXN2; (+) strand; PAM type: NRG; PAM sequence: TAG
atgacccaccatagatgggc

SEQ ID NO: 40241 - DNA, 20 bp, Artificial Sequence
  Description of Artificial Sequence: Synthetic oligonucleotide
  Target: ATXN2; (+) strand; PAM type: NRG; PAM sequence: AGG
tgacccaccatagatgggct

SEQ ID NO: 40242 - DNA, 20 bp, Artificial Sequence
  Description of Artificial Sequence: Synthetic oligonucleotide
  Target: ATXN2; (+) strand; PAM type: NRG; PAM sequence: GAG
agatgggctaggttgtgctt

SEQ ID NO: 40243 - DNA, 20 bp, Artificial Sequence
  Description of Artificial Sequence: Synthetic oligonucleotide
  Target: ATXN2; (+) strand; PAM type: NRG; PAM sequence: AGG
gatgggctaggttgtgcttg

SEQ ID NO: 40244 - DNA, 20 bp, Artificial Sequence
  Description of Artificial Sequence: Synthetic oligonucleotide
  Target: ATXN2; (+) strand; PAM type: NRG; PAM sequence: GAG
gctaggttgtgcttgaggcc

SEQ ID NO: 40245 - DNA, 20 bp, Artificial Sequence
  Description of Artificial Sequence: Synthetic oligonucleotide
  Target: ATXN2; (+) strand; PAM type: NRG; PAM sequence: AGG
ctaggttgtgcttgaggccg

SEQ ID NO: 40246 - DNA, 20 bp, Artificial Sequence
  Description of Artificial Sequence: Synthetic oligonucleotide
  Target: ATXN2; (+) strand; PAM type: NRG; PAM sequence: AAG
ttgtgcttgaggccgaggtg

SEQ ID NO: 40247 - DNA, 20 bp, Artificial Sequence
  Description of Artificial Sequence: Synthetic oligonucleotide
  Target: ATXN2; (+) strand; PAM type: NRG; PAM sequence: TGG
gcttgaggccgaggtgaagt

SEQ ID NO: 40248 - DNA, 20 bp, Artificial Sequence
  Description of Artificial Sequence: Synthetic oligonucleotide
  Target: ATXN2; (+) strand; PAM type: NRG; PAM sequence: GGG
cttgaggccgaggtgaagtt

SEQ ID NO: 40249 - DNA, 20 bp, Artificial Sequence
  Description of Artificial Sequence: Synthetic oligonucleotide
  Target: ATXN2; (+) strand; PAM type: NRG; PAM sequence: GGG
ttgaggccgaggtgaagttg

SEQ ID NO: 40250 - DNA, 20 bp, Artificial Sequence
  Description of Artificial Sequence: Synthetic oligonucleotide
  Target: ATXN2; (+) strand; PAM type: NRG; PAM sequence: TAG
aggccgaggtgaagttgggg

SEQ ID NO: 40251 - DNA, 20 bp, Artificial Sequence
  Description of Artificial Sequence: Synthetic oligonucleotide
  Target: ATXN2; (+) strand; PAM type: NRG; PAM sequence: TAG
ccgaggtgaagttggggtag

SEQ ID NO: 40252 - DNA, 20 bp, Artificial Sequence
  Description of Artificial Sequence: Synthetic oligonucleotide
  Target: ATXN2; (+) strand; PAM type: NRG; PAM sequence: AAG
aggtgaagttggggtagtag

SEQ ID NO: 40253 - DNA, 20 bp, Artificial Sequence
  Description of Artificial Sequence: Synthetic oligonucleotide
  Target: ATXN2; (+) strand; PAM type: NRG; PAM sequence: AGG
ggtgaagttggggtagtaga

SEQ ID NO: 40254 - DNA, 20 bp, Artificial Sequence
  Description of Artificial Sequence: Synthetic oligonucleotide
  Target: ATXN2; (+) strand; PAM type: NRG; PAM sequence: TGG
gttggggtagtagaaggctt

SEQ ID NO: 40255 - DNA, 20 bp, Artificial Sequence
  Description of Artificial Sequence: Synthetic oligonucleotide
  Target: ATXN2; (+) strand; PAM type: NRG; PAM sequence: AAG
acaataaattcaattatctc

SEQ ID NO: 40256 - DNA, 20 bp, Artificial Sequence
  Description of Artificial Sequence: Synthetic oligonucleotide
  Target: ATXN2; (+) strand; PAM type: NRG; PAM sequence: AGG
caataaattcaattatctca

SEQ ID NO: 40257 - DNA, 20 bp, Artificial Sequence
  Description of Artificial Sequence: Synthetic oligonucleotide
  Target: ATXN2; (+) strand; PAM type: NRG; PAM sequence: CAG
attcaattatctcaaggtaa

SEQ ID NO: 40258 - DNA, 20 bp, Artificial Sequence
  Description of Artificial Sequence: Synthetic oligonucleotide
  Target: ATXN2; (+) strand; PAM type: NRG; PAM sequence: AAG
tgaactattattgcaattta

SEQ ID NO: 40259 - DNA, 20 bp, Artificial Sequence
  Description of Artificial Sequence: Synthetic oligonucleotide
  Target: ATXN2; (+) strand; PAM type: NRG; PAM sequence: CGG
ctattattgcaatttaaaga

SEQ ID NO: 40260 - DNA, 20 bp, Artificial Sequence
  Description of Artificial Sequence: Synthetic oligonucleotide
  Target: ATXN2; (+) strand; PAM type: NRG; PAM sequence: CAG
aatttaaagacggattttcc

SEQ ID NO: 40261 - DNA, 20 bp, Artificial Sequence
  Description of Artificial Sequence: Synthetic oligonucleotide
  Target: ATXN2; (+) strand; PAM type: NRG; PAM sequence: CAG
ttttattgaaaacaaaaaca

SEQ ID NO: 40262 - DNA, 20 bp, Artificial Sequence
  Description of Artificial Sequence: Synthetic oligonucleotide
  Target: ATXN2; (+) strand; PAM type: NRG; PAM sequence: AAG
aaattttcacatttcaataa

SEQ ID NO: 40263 - DNA, 20 bp, Artificial Sequence
  Description of Artificial Sequence: Synthetic oligonucleotide
  Target: ATXN2; (+) strand; PAM type: NRG; PAM sequence: CAG
caataaaagaaaaaatgttt

SEQ ID NO: 40264 - DNA, 20 bp, Artificial Sequence
  Description of Artificial Sequence: Synthetic oligonucleotide
  Target: ATXN2; (+) strand; PAM type: NRG; PAM sequence: TAG
taaaagaaaaaatgtttcag

SEQ ID NO: 40265 - DNA, 20 bp, Artificial Sequence
  Description of Artificial Sequence: Synthetic oligonucleotide
  Target: ATXN2; (+) strand; PAM type: NRG; PAM sequence: AGG
aaaagaaaaaatgtttcagt

SEQ ID NO: 40266 - DNA, 20 bp, Artificial Sequence
  Description of Artificial Sequence: Synthetic oligonucleotide
  Target: ATXN2; (+) strand; PAM type: NRG; PAM sequence: CAG
caattaaaaaatattaaaaa

SEQ ID NO: 40267 - DNA, 20 bp, Artificial Sequence
  Description of Artificial Sequence: Synthetic oligonucleotide
  Target: ATXN2; (+) strand; PAM type: NRG; PAM sequence: TGG
ttaaaaaatattaaaaacag

SEQ ID NO: 40268 - DNA, 20 bp, Artificial Sequence
  Description of Artificial Sequence: Synthetic oligonucleotide
  Target: ATXN2; (+) strand; PAM type: NRG; PAM sequence: CAG
aaaaatattaaaaacagtgg

SEQ ID NO: 40269 - DNA, 20 bp, Artificial Sequence
  Description of Artificial Sequence: Synthetic oligonucleotide
  Target: ATXN2; (+) strand; PAM type: NRG; PAM sequence: AAG
aaacagtggcagctattttt

SEQ ID NO: 40270 - DNA, 20 bp, Artificial Sequence
  Description of Artificial Sequence: Synthetic oligonucleotide
  Target: ATXN2; (+) strand; PAM type: NRG; PAM sequence: TGG
agctatttttaagaaactga

SEQ ID NO: 40271 - DNA, 20 bp, Artificial Sequence
  Description of Artificial Sequence: Synthetic oligonucleotide
  Target: ATXN2; (+) strand; PAM type: NRG; PAM sequence: AAG
tatttttaagaaactgatgg

SEQ ID NO: 40272 - DNA, 20 bp, Artificial Sequence
  Description of Artificial Sequence: Synthetic oligonucleotide
  Target: ATXN2; (+) strand; PAM type: NRG; PAM sequence: CAG
aatatatcttcttatgatct

SEQ ID NO: 40273 - DNA, 20 bp, Artificial Sequence
  Description of Artificial Sequence: Synthetic oligonucleotide
  Target: ATXN2; (+) strand; PAM type: NRG; PAM sequence: TAG
tctcagtcgaataataacaa

SEQ ID NO: 40274 - DNA, 20 bp, Artificial Sequence
  Description of Artificial Sequence: Synthetic oligonucleotide
  Target: ATXN2; (+) strand; PAM type: NRG; PAM sequence: CAG
gtcgaataataacaatagta

SEQ ID NO: 40275 - DNA, 20 bp, Artificial Sequence
  Description of Artificial Sequence: Synthetic oligonucleotide
  Target: ATXN2; (+) strand; PAM type: NRG; PAM sequence: TAG
acaatagtacagtcatctct

SEQ ID NO: 40276 - DNA, 20 bp, Artificial Sequence
  Description of Artificial Sequence: Synthetic oligonucleotide
  Target: ATXN2; (+) strand; PAM type: NRG; PAM sequence: TGG
cagtcatctcttagtatctg

SEQ ID NO: 40277 - DNA, 20 bp, Artificial Sequence
  Description of Artificial Sequence: Synthetic oligonucleotide
  Target: ATXN2; (+) strand; PAM type: NRG; PAM sequence: GGG
agtcatctcttagtatctgt

SEQ ID NO: 40278 - DNA, 20 bp, Artificial Sequence
  Description of Artificial Sequence: Synthetic oligonucleotide
  Target: ATXN2; (+) strand; PAM type: NRG; PAM sequence: GGG
gtcatctcttagtatctgtg

SEQ ID NO: 40279 - DNA, 20 bp, Artificial Sequence
  Description of Artificial Sequence: Synthetic oligonucleotide
  Target: ATXN2; (+) strand; PAM type: NRG; PAM sequence: GGG
tcatctcttagtatctgtgg

SEQ ID NO: 40280 - DNA, 20 bp, Artificial Sequence
  Description of Artificial Sequence: Synthetic oligonucleotide
  Target: ATXN2; (+) strand; PAM type: NRG; PAM sequence: TGG
tcttagtatctgtgggggat

SEQ ID NO: 40281 - DNA, 20 bp, Artificial Sequence
  Description of Artificial Sequence: Synthetic oligonucleotide
  Target: ATXN2; (+) strand; PAM type: NRG; PAM sequence: CAG
tatctgtgggggattggtta

SEQ ID NO: 40282 - DNA, 20 bp, Artificial Sequence
  Description of Artificial Sequence: Synthetic oligonucleotide
  Target: ATXN2; (+) strand; PAM type: NRG; PAM sequence: AAG
attggttacagtaccctgtg

SEQ ID NO: 40283 - DNA, 20 bp, Artificial Sequence
  Description of Artificial Sequence: Synthetic oligonucleotide
  Target: ATXN2; (+) strand; PAM type: NRG; PAM sequence: AAG
agtaccctgtgaagatacca

SEQ ID NO: 40284 - DNA, 20 bp, Artificial Sequence
  Description of Artificial Sequence: Synthetic oligonucleotide
  Target: ATXN2; (+) strand; PAM type: NRG; PAM sequence: TGG
ctgtgaagataccaaagtct

SEQ ID NO: 40285 - DNA, 20 bp, Artificial Sequence
  Description of Artificial Sequence: Synthetic oligonucleotide
  Target: ATXN2; (+) strand; PAM type: NRG; PAM sequence: AAG
accaaagtcttggaatgctc

SEQ ID NO: 40286 - DNA, 20 bp, Artificial Sequence
  Description of Artificial Sequence: Synthetic oligonucleotide
  Target: ATXN2; (+) strand; PAM type: NRG; PAM sequence: TAG
gtcccttacataaaatcatg

SEQ ID NO: 40287 - DNA, 20 bp, Artificial Sequence
  Description of Artificial Sequence: Synthetic oligonucleotide
  Target: ATXN2; (+) strand; PAM type: NRG; PAM sequence: TAG
tatatactttacatcatctc

SEQ ID NO: 40288 - DNA, 20 bp, Artificial Sequence
  Description of Artificial Sequence: Synthetic oligonucleotide
  Target: ATXN2; (+) strand; PAM type: NRG; PAM sequence: AAG
ttatttataatacctaaaac

SEQ ID NO: 40289 - DNA, 20 bp, Artificial Sequence
  Description of Artificial Sequence: Synthetic oligonucleotide
  Target: ATXN2; (+) strand; PAM type: NRG; PAM sequence: AGG
tatttataatacctaaaaca

SEQ ID NO: 40290 - DNA, 20 bp, Artificial Sequence
  Description of Artificial Sequence: Synthetic oligonucleotide
  Target: ATXN2; (+) strand; PAM type: NRG; PAM sequence: TGG
aatgctttactgtattgttt

SEQ ID NO: 40291 - DNA, 20 bp, Artificial Sequence
  Description of Artificial Sequence: Synthetic oligonucleotide
  Target: ATXN2; (+) strand; PAM type: NRG; PAM sequence: AAG
tattgttttggaataatgac

SEQ ID NO: 40292 - DNA, 20 bp, Artificial Sequence
  Description of Artificial Sequence: Synthetic oligonucleotide
  Target: ATXN2; (+) strand; PAM type: NRG; PAM sequence: AGG
attgttttggaataatgaca

SEQ ID NO: 40293 - DNA, 20 bp, Artificial Sequence
  Description of Artificial Sequence: Synthetic oligonucleotide
  Target: ATXN2; (+) strand; PAM type: NRG; PAM sequence: CAG
aggaaacgtctgcatgtgtt

SEQ ID NO: 40294 - DNA, 20 bp, Artificial Sequence
  Description of Artificial Sequence: Synthetic oligonucleotide
  Target: ATXN2; (+) strand; PAM type: NRG; PAM sequence: TAG
acgtctgcatgtgttcagta

SEQ ID NO: 40295 - DNA, 20 bp, Artificial Sequence
  Description of Artificial Sequence: Synthetic oligonucleotide
  Target: ATXN2; (+) strand; PAM type: NRG; PAM sequence: TGG
ctaactatgtttttgatcca

SEQ ID NO: 40296 - DNA, 20 bp, Artificial Sequence
  Description of Artificial Sequence: Synthetic oligonucleotide
  Target: ATXN2; (+) strand; PAM type: NRG; PAM sequence: TGG
ctatgtttttgatccatggt

SEQ ID NO: 40297 - DNA, 20 bp, Artificial Sequence
  Description of Artificial Sequence: Synthetic oligonucleotide
  Target: ATXN2; (+) strand; PAM type: NRG; PAM sequence: CAG
gatccatggttggttgaatc

SEQ ID NO: 40298 - DNA, 20 bp, Artificial Sequence
  Description of Artificial Sequence: Synthetic oligonucleotide
  Target: ATXN2; (+) strand; PAM type: NRG; PAM sequence: CAG
atccagtgatgcaaaaccct

SEQ ID NO: 40299 - DNA, 20 bp, Artificial Sequence
  Description of Artificial Sequence: Synthetic oligonucleotide
  Target: ATXN2; (+) strand; PAM type: NRG; PAM sequence: AGG
tccagtgatgcaaaaccctc

SEQ ID NO: 40300 - DNA, 20 bp, Artificial Sequence
  Description of Artificial Sequence: Synthetic oligonucleotide
  Target: ATXN2; (+) strand; PAM type: NRG; PAM sequence: CAG
tgatgcaaaaccctcaggtg

SEQ ID NO: 40301 - DNA, 20 bp, Artificial Sequence
  Description of Artificial Sequence: Synthetic oligonucleotide
  Target: ATXN2; (+) strand; PAM type: NRG; PAM sequence: GAG
atgcaaaaccctcaggtgca

SEQ ID NO: 40302 - DNA, 20 bp, Artificial Sequence
  Description of Artificial Sequence: Synthetic oligonucleotide
  Target: ATXN2; (+) strand; PAM type: NRG; PAM sequence: AGG
tgcaaaaccctcaggtgcag

SEQ ID NO: 40303 - DNA, 20 bp, Artificial Sequence
  Description of Artificial Sequence: Synthetic oligonucleotide
  Target: ATXN2; (+) strand; PAM type: NRG; PAM sequence: CAG
ggacgtatctataaacctga

SEQ ID NO: 40304 - DNA, 20 bp, Artificial Sequence
  Description of Artificial Sequence: Synthetic oligonucleotide
  Target: ATXN2; (+) strand; PAM type: NRG; PAM sequence: TAG
tatctataaacctgacagcc

SEQ ID NO: 40305 - DNA, 20 bp, Artificial Sequence
  Description of Artificial Sequence: Synthetic oligonucleotide
  Target: ATXN2; (+) strand; PAM type: NRG; PAM sequence: TAG
tataaacctgacagcctagc

SEQ ID NO: 40306 - DNA, 20 bp, Artificial Sequence
  Description of Artificial Sequence: Synthetic oligonucleotide
  Target: ATXN2; (+) strand; PAM type: NRG; PAM sequence: TGG
agccaaccatcgtcaaattc

SEQ ID NO: 40307 - DNA, 20 bp, Artificial Sequence
  Description of Artificial Sequence: Synthetic oligonucleotide
  Target: ATXN2; (+) strand; PAM type: NRG; PAM sequence: GGG
gccaaccatcgtcaaattct

SEQ ID NO: 40308 - DNA, 20 bp, Artificial Sequence
  Description of Artificial Sequence: Synthetic oligonucleotide
  Target: ATXN2; (+) strand; PAM type: NRG; PAM sequence: CAG
accatcgtcaaattctgggt

SEQ ID NO: 40309 - DNA, 20 bp, Artificial Sequence
  Description of Artificial Sequence: Synthetic oligonucleotide
  Target: ATXN2; (+) strand; PAM type: NRG; PAM sequence: GAG
catcgtcaaattctgggtca

SEQ ID NO: 40310 - DNA, 20 bp, Artificial Sequence
  Description of Artificial Sequence: Synthetic oligonucleotide
  Target: ATXN2; (+) strand; PAM type: NRG; PAM sequence: AAG
ttctgggtcagagaaattca

SEQ ID NO: 40311 - DNA, 20 bp, Artificial Sequence
  Description of Artificial Sequence: Synthetic oligonucleotide
  Target: ATXN2; (+) strand; PAM type: NRG; PAM sequence: AAG
agaaattcaaagatttgccc

SEQ ID NO: 40312 - DNA, 20 bp, Artificial Sequence
  Description of Artificial Sequence: Synthetic oligonucleotide
  Target: ATXN2; (+) strand; PAM type: NRG; PAM sequence: AAG
atctaattgatgacaaaaca

SEQ ID NO: 40313 - DNA, 20 bp, Artificial Sequence
  Description of Artificial Sequence: Synthetic oligonucleotide
  Target: ATXN2; (+) strand; PAM type: NRG; PAM sequence: AAG
acctttttttaatgtttaaa

SEQ ID NO: 40314 - DNA, 20 bp, Artificial Sequence
  Description of Artificial Sequence: Synthetic oligonucleotide
  Target: ATXN2; (+) strand; PAM type: NRG; PAM sequence: TGG
gtttaaaaagtattcattaa

SEQ ID NO: 40315 - DNA, 20 bp, Artificial Sequence
  Description of Artificial Sequence: Synthetic oligonucleotide
  Target: ATXN2; (+) strand; PAM type: NRG; PAM sequence: AAG
attaatggccatgtaaaaaa

SEQ ID NO: 40316 - DNA, 20 bp, Artificial Sequence
  Description of Artificial Sequence: Synthetic oligonucleotide
  Target: ATXN2; (+) strand; PAM type: NRG; PAM sequence: AAG
atggccatgtaaaaaaaaga

SEQ ID NO: 40317 - DNA, 20 bp, Artificial Sequence
  Description of Artificial Sequence: Synthetic oligonucleotide
  Target: ATXN2; (+) strand; PAM type: NRG; PAM sequence: AAG
gccatgtaaaaaaaagaaag

SEQ ID NO: 40318 - DNA, 20 bp, Artificial Sequence
  Description of Artificial Sequence: Synthetic oligonucleotide
  Target: ATXN2; (+) strand; PAM type: NRG; PAM sequence: AGG
ccatgtaaaaaaaagaaaga

SEQ ID NO: 40319 - DNA, 20 bp, Artificial Sequence
  Description of Artificial Sequence: Synthetic oligonucleotide
  Target: ATXN2; (+) strand; PAM type: NRG; PAM sequence: TGG
gtaaaaaaaagaaagaaggt

SEQ ID NO: 40320 - DNA, 20 bp, Artificial Sequence
  Description of Artificial Sequence: Synthetic oligonucleotide
  Target: ATXN2; (+) strand; PAM type: NRG; PAM sequence: CAG
aaaaagaaagaaggttggtt

SEQ ID NO: 40321 - DNA, 20 bp, Artificial Sequence
  Description of Artificial Sequence: Synthetic oligonucleotide
  Target: ATXN2; (+) strand; PAM type: NRG; PAM sequence: CAG
cagcacactaaaacaaaatt

SEQ ID NO: 40322 - DNA, 20 bp, Artificial Sequence
  Description of Artificial Sequence: Synthetic oligonucleotide
  Target: ATXN2; (+) strand; PAM type: NRG; PAM sequence: TGG
acactaaaacaaaattcaga

SEQ ID NO: 40323 - DNA, 20 bp, Artificial Sequence
  Description of Artificial Sequence: Synthetic oligonucleotide
  Target: ATXN2; (+) strand; PAM type: NRG; PAM sequence: CAG
ctaaaacaaaattcagatgg

SEQ ID NO: 40324 - DNA, 20 bp, Artificial Sequence
  Description of Artificial Sequence: Synthetic oligonucleotide
  Target: ATXN2; (+) strand; PAM type: NRG; PAM sequence: AGG
taaaacaaaattcagatggc

SEQ ID NO: 40325 - DNA, 20 bp, Artificial Sequence
  Description of Artificial Sequence: Synthetic oligonucleotide
  Target: ATXN2; (+) strand; PAM type: NRG; PAM sequence: TGG
caaaattcagatggcaggta

SEQ ID NO: 40326 - DNA, 20 bp, Artificial Sequence
  Description of Artificial Sequence: Synthetic oligonucleotide
  Target: ATXN2; (+) strand; PAM type: NRG; PAM sequence: AAG
aattcagatggcaggtatgg

SEQ ID NO: 40327 - DNA, 20 bp, Artificial Sequence
  Description of Artificial Sequence: Synthetic oligonucleotide
  Target: ATXN2; (+) strand; PAM type: NRG; PAM sequence: AAG
tcagatggcaggtatggaag

SEQ ID NO: 40328 - DNA, 20 bp, Artificial Sequence
  Description of Artificial Sequence: Synthetic oligonucleotide
  Target: ATXN2; (+) strand; PAM type: NRG; PAM sequence: AGG
cagatggcaggtatggaaga

SEQ ID NO: 40329 - DNA, 20 bp, Artificial Sequence
  Description of Artificial Sequence: Synthetic oligonucleotide
  Target: ATXN2; (+) strand; PAM type: NRG; PAM sequence: TGG
actaataatttttctttttt

SEQ ID NO: 40330 - DNA, 20 bp, Artificial Sequence
  Description of Artificial Sequence: Synthetic oligonucleotide
  Target: ATXN2; (+) strand; PAM type: NRG; PAM sequence: GGG
ctaataatttttcttttttt

SEQ ID NO: 40331 - DNA, 20 bp, Artificial Sequence
  Description of Artificial Sequence: Synthetic oligonucleotide
  Target: ATXN2; (+) strand; PAM type: NRG; PAM sequence: TAG
aatttttctttttttgggac

SEQ ID NO: 40332 - DNA, 20 bp, Artificial Sequence
  Description of Artificial Sequence: Synthetic oligonucleotide
  Target: ATXN2; (+) strand; PAM type: NRG; PAM sequence: AAG
tttgggactagataacctca

SEQ ID NO: 40333 - DNA, 20 bp, Artificial Sequence
  Description of Artificial Sequence: Synthetic oligonucleotide
  Target: ATXN2; (+) strand; PAM type: NRG; PAM sequence: AAG
ggactagataacctcaaaga

SEQ ID NO: 40334 - DNA, 20 bp, Artificial Sequence
  Description of Artificial Sequence: Synthetic oligonucleotide
  Target: ATXN2; (+) strand; PAM type: NRG; PAM sequence: GAG
agaaagtaataaacctacct

SEQ ID NO: 40335 - DNA, 20 bp, Artificial Sequence
  Description of Artificial Sequence: Synthetic oligonucleotide
  Target: ATXN2; (+) strand; PAM type: NRG; PAM sequence: GAG
aaagtaataaacctacctga

SEQ ID NO: 40336 - DNA, 20 bp, Artificial Sequence
  Description of Artificial Sequence: Synthetic oligonucleotide
  Target: ATXN2; (+) strand; PAM type: NRG; PAM sequence: AAG
gtaataaacctacctgagag

SEQ ID NO: 40337 - DNA, 20 bp, Artificial Sequence
  Description of Artificial Sequence: Synthetic oligonucleotide
  Target: ATXN2; (+) strand; PAM type: NRG; PAM sequence: AGG
taataaacctacctgagaga

SEQ ID NO: 40338 - DNA, 20 bp, Artificial Sequence
  Description of Artificial Sequence: Synthetic oligonucleotide
  Target: ATXN2; (+) strand; PAM type: NRG; PAM sequence: TGG
cctacctgagagaaggaacg

SEQ ID NO: 40339 - DNA, 20 bp, Artificial Sequence
  Description of Artificial Sequence: Synthetic oligonucleotide
  Target: ATXN2; (+) strand; PAM type: NRG; PAM sequence: GGG
ctacctgagagaaggaacgt

SEQ ID NO: 40340 - DNA, 20 bp, Artificial Sequence
  Description of Artificial Sequence: Synthetic oligonucleotide
  Target: ATXN2; (+) strand; PAM type: NRG; PAM sequence: TGG
tgggttgaactcctttgcat

SEQ ID NO: 40341 - DNA, 20 bp, Artificial Sequence
  Description of Artificial Sequence: Synthetic oligonucleotide
  Target: ATXN2; (+) strand; PAM type: NRG; PAM sequence: GGG
gggttgaactcctttgcatt

SEQ ID NO: 40342 - DNA, 20 bp, Artificial Sequence
  Description of Artificial Sequence: Synthetic oligonucleotide
  Target: ATXN2; (+) strand; PAM type: NRG; PAM sequence: AAG
acttgcctaaaaaaaatata

SEQ ID NO: 40343 - DNA, 20 bp, Artificial Sequence
  Description of Artificial Sequence: Synthetic oligonucleotide
  Target: ATXN2; (+) strand; PAM type: NRG; PAM sequence: AGG
cttgcctaaaaaaaatataa

SEQ ID NO: 40344 - DNA, 20 bp, Artificial Sequence
  Description of Artificial Sequence: Synthetic oligonucleotide
  Target: ATXN2; (+) strand; PAM type: NRG; PAM sequence: CAG
cctaaaaaaaatataaaggc

SEQ ID NO: 40345 - DNA, 20 bp, Artificial Sequence
  Description of Artificial Sequence: Synthetic oligonucleotide
  Target: ATXN2; (+) strand; PAM type: NRG; PAM sequence: TGG
aaaggccagtgaaatctaca

SEQ ID NO: 40346 - DNA, 20 bp, Artificial Sequence
  Description of Artificial Sequence: Synthetic oligonucleotide
  Target: ATXN2; (+) strand; PAM type: NRG; PAM sequence: TAG
ttaaaaaaaattgctaaata

SEQ ID NO: 40347 - DNA, 20 bp, Artificial Sequence
  Description of Artificial Sequence: Synthetic oligonucleotide
  Target: ATXN2; (+) strand; PAM type: NRG; PAM sequence: TAG
tagatttaaactgttctcac

SEQ ID NO: 40348 - DNA, 20 bp, Artificial Sequence
  Description of Artificial Sequence: Synthetic oligonucleotide
  Target: ATXN2; (+) strand; PAM type: NRG; PAM sequence: AAG
atttaaactgttctcactag

SEQ ID NO: 40349 - DNA, 20 bp, Artificial Sequence
  Description of Artificial Sequence: Synthetic oligonucleotide
  Target: ATXN2; (+) strand; PAM type: NRG; PAM sequence: AAG
gcccattccttaatccctta

SEQ ID NO: 40350 - DNA, 20 bp, Artificial Sequence
  Description of Artificial Sequence: Synthetic oligonucleotide
  Target: ATXN2; (+) strand; PAM type: NRG; PAM sequence: CAG
ccttaatcccttaaagaata

SEQ ID NO: 40351 - DNA, 20 bp, Artificial Sequence
  Description of Artificial Sequence: Synthetic oligonucleotide
  Target: ATXN2; (+) strand; PAM type: NRG; PAM sequence: AAG
cttaaagaatacagccataa

SEQ ID NO: 40352 - DNA, 20 bp, Artificial Sequence
  Description of Artificial Sequence: Synthetic oligonucleotide
  Target: ATXN2; (+) strand; PAM type: NRG; PAM sequence: GAG
gaacaattttttaaaaatct

SEQ ID NO: 40353 - DNA, 20 bp, Artificial Sequence
  Description of Artificial Sequence: Synthetic oligonucleotide
  Target: ATXN2; (+) strand; PAM type: NRG; PAM sequence: AAG
atatacaaccgttcctctca

SEQ ID NO: 40354 - DNA, 20 bp, Artificial Sequence
  Description of Artificial Sequence: Synthetic oligonucleotide
  Target: ATXN2; (+) strand; PAM type: NRG; PAM sequence: AGG
tatacaaccgttcctctcaa

SEQ ID NO: 40355 - DNA, 20 bp, Artificial Sequence
  Description of Artificial Sequence: Synthetic oligonucleotide
  Target: ATXN2; (+) strand; PAM type: NRG; PAM sequence: CAG
tactttttttttttccttca

SEQ ID NO: 40356 - DNA, 20 bp, Artificial Sequence
  Description of Artificial Sequence: Synthetic oligonucleotide
  Target: ATXN2; (+) strand; PAM type: NRG; PAM sequence: GAG
ctttttttttttccttcaca

SEQ ID NO: 40357 - DNA, 20 bp, Artificial Sequence
  Description of Artificial Sequence: Synthetic oligonucleotide
  Target: ATXN2; (+) strand; PAM type: NRG; PAM sequence: CAG
cagagtcccactctgttgct

SEQ ID NO: 40358 - DNA, 20 bp, Artificial Sequence
  Description of Artificial Sequence: Synthetic oligonucleotide
  Target: ATXN2; (+) strand; PAM type: NRG; PAM sequence: AGG
agagtcccactctgttgctc

SEQ ID NO: 40359 - DNA, 20 bp, Artificial Sequence
  Description of Artificial Sequence: Synthetic oligonucleotide
  Target: ATXN2; (+) strand; PAM type: NRG; PAM sequence: TGG
tcccactctgttgctcaggt

SEQ ID NO: 40360 - DNA, 20 bp, Artificial Sequence
  Description of Artificial Sequence: Synthetic oligonucleotide
  Target: ATXN2; (+) strand; PAM type: NRG; PAM sequence: GAG
ccactctgttgctcaggttg

SEQ ID NO: 40361 - DNA, 20 bp, Artificial Sequence
  Description of Artificial Sequence: Synthetic oligonucleotide
  Target: ATXN2; (+) strand; PAM type: NRG; PAM sequence: CAG
ctgttgctcaggttggagtg

SEQ ID NO: 40362 - DNA, 20 bp, Artificial Sequence
  Description of Artificial Sequence: Synthetic oligonucleotide
  Target: ATXN2; (+) strand; PAM type: NRG; PAM sequence: CAG
ttgctcaggttggagtgcag

SEQ ID NO: 40363 - DNA, 20 bp, Artificial Sequence
  Description of Artificial Sequence: Synthetic oligonucleotide
  Target: ATXN2; (+) strand; PAM type: NRG; PAM sequence: TGG
ggagtgcagcagtgcaatct

SEQ ID NO: 40364 - DNA, 20 bp, Artificial Sequence
  Description of Artificial Sequence: Synthetic oligonucleotide
  Target: ATXN2; (+) strand; PAM type: NRG; PAM sequence: GAG
cactgcaacctctgcctccc

SEQ ID NO: 40365 - DNA, 20 bp, Artificial Sequence
  Description of Artificial Sequence: Synthetic oligonucleotide
  Target: ATXN2; (+) strand; PAM type: NRG; PAM sequence: AAG
aacctctgcctcccgagttt

SEQ ID NO: 40366 - DNA, 20 bp, Artificial Sequence
  Description of Artificial Sequence: Synthetic oligonucleotide
  Target: ATXN2; (+) strand; PAM type: NRG; PAM sequence: TAG
tttaagccattctcttgcct

SEQ ID NO: 40367 - DNA, 20 bp, Artificial Sequence
  Description of Artificial Sequence: Synthetic oligonucleotide
  Target: ATXN2; (+) strand; PAM type: NRG; PAM sequence: TAG
tcttgccttagcctcctgat

SEQ ID NO: 40368 - DNA, 20 bp, Artificial Sequence
  Description of Artificial Sequence: Synthetic oligonucleotide
  Target: ATXN2; (+) strand; PAM type: NRG; PAM sequence: TGG
gccttagcctcctgattagc

SEQ ID NO: 40369 - DNA, 20 bp, Artificial Sequence
  Description of Artificial Sequence: Synthetic oligonucleotide
  Target: ATXN2; (+) strand; PAM type: NRG; PAM sequence: GGG
ccttagcctcctgattagct

SEQ ID NO: 40370 - DNA, 20 bp, Artificial Sequence
  Description of Artificial Sequence: Synthetic oligonucleotide
  Target: ATXN2; (+) strand; PAM type: NRG; PAM sequence: CAG
ctcctgattagctgggatta

SEQ ID NO: 40371 - DNA, 20 bp, Artificial Sequence
  Description of Artificial Sequence: Synthetic oligonucleotide
  Target: ATXN2; (+) strand; PAM type: NRG; PAM sequence: AGG
tcctgattagctgggattac

SEQ ID NO: 40372 - DNA, 20 bp, Artificial Sequence
  Description of Artificial Sequence: Synthetic oligonucleotide
  Target: ATXN2; (+) strand; PAM type: NRG; PAM sequence: GAG
ctgattagctgggattacag

SEQ ID NO: 40373 - DNA, 20 bp, Artificial Sequence
  Description of Artificial Sequence: Synthetic oligonucleotide
  Target: ATXN2; (+) strand; PAM type: NRG; PAM sequence: CAG
caggagactgccaccacgcc

SEQ ID NO: 40374 - DNA, 20 bp, Artificial Sequence
  Description of Artificial Sequence: Synthetic oligonucleotide
  Target: ATXN2; (+) strand; PAM type: NRG; PAM sequence: TAG
ttttttttaatatttatttt

SEQ ID NO: 40375 - DNA, 20 bp, Artificial Sequence
  Description of Artificial Sequence: Synthetic oligonucleotide
  Target: ATXN2; (+) strand; PAM type: NRG; PAM sequence: AAG
tttaatatttatttttagta

SEQ ID NO: 40376 - DNA, 20 bp, Artificial Sequence
  Description of Artificial Sequence: Synthetic oligonucleotide
  Target: ATXN2; (+) strand; PAM type: NRG; PAM sequence: TGG
atatttatttttagtaaaga

SEQ ID NO: 40377 - DNA, 20 bp, Artificial Sequence
  Description of Artificial Sequence: Synthetic oligonucleotide
  Target: ATXN2; (+) strand; PAM type: NRG; PAM sequence: GGG
tatttatttttagtaaagat

SEQ ID NO: 40378 - DNA, 20 bp, Artificial Sequence
  Description of Artificial Sequence: Synthetic oligonucleotide
  Target: ATXN2; (+) strand; PAM type: NRG; PAM sequence: GGG
atttatttttagtaaagatg

SEQ ID NO: 40379 - DNA, 20 bp, Artificial Sequence
  Description of Artificial Sequence: Synthetic oligonucleotide
  Target: ATXN2; (+) strand; PAM type: NRG; PAM sequence: TGG
aagatggggtttcaccattt

SEQ ID NO: 40380 - DNA, 20 bp, Artificial Sequence
  Description of Artificial Sequence: Synthetic oligonucleotide
  Target: ATXN2; (+) strand; PAM type: NRG; PAM sequence: AAG
attttggccacgctgacctt

SEQ ID NO: 40381 - DNA, 20 bp, Artificial Sequence
  Description of Artificial Sequence: Synthetic oligonucleotide
  Target: ATXN2; (+) strand; PAM type: NRG; PAM sequence: CAG
cttaagtgatctgcctgact

SEQ ID NO: 40382 - DNA, 20 bp, Artificial Sequence
  Description of Artificial Sequence: Synthetic oligonucleotide
  Target: ATXN2; (+) strand; PAM type: NRG; PAM sequence: AAG
ctgcctgactcagcctccca

SEQ ID NO: 40383 - DNA, 20 bp, Artificial Sequence
  Description of Artificial Sequence: Synthetic oligonucleotide
  Target: ATXN2; (+) strand; PAM type: NRG; PAM sequence: TGG
gactcagcctcccaaagtgc

SEQ ID NO: 40384 - DNA, 20 bp, Artificial Sequence
  Description of Artificial Sequence: Synthetic oligonucleotide
  Target: ATXN2; (+) strand; PAM type: NRG; PAM sequence: GGG
actcagcctcccaaagtgct

SEQ ID NO: 40385 - DNA, 20 bp, Artificial Sequence
  Description of Artificial Sequence: Synthetic oligonucleotide
  Target: ATXN2; (+) strand; PAM type: NRG; PAM sequence: CAG
ctcccaaagtgctgggatta

SEQ ID NO: 40386 - DNA, 20 bp, Artificial Sequence
  Description of Artificial Sequence: Synthetic oligonucleotide
  Target: ATXN2; (+) strand; PAM type: NRG; PAM sequence: AGG
tcccaaagtgctgggattac

SEQ ID NO: 40387 - DNA, 20 bp, Artificial Sequence
  Description of Artificial Sequence: Synthetic oligonucleotide
  Target: ATXN2; (+) strand; PAM type: NRG; PAM sequence: GAG
agtgctgggattacaggtat

SEQ ID NO: 40388 - DNA, 20 bp, Artificial Sequence
  Description of Artificial Sequence: Synthetic oligonucleotide
  Target: ATXN2; (+) strand; PAM type: NRG; PAM sequence: TGG
caggtatgagctaccacgcc

SEQ ID NO: 40389 - DNA, 20 bp, Artificial Sequence
  Description of Artificial Sequence: Synthetic oligonucleotide
  Target: ATXN2; (+) strand; PAM type: NRG; PAM sequence: GAG
tggccaatcaacaaacactt

SEQ ID NO: 40390 - DNA, 20 bp, Artificial Sequence
  Description of Artificial Sequence: Synthetic oligonucleotide
  Target: ATXN2; (+) strand; PAM type: NRG; PAM sequence: AAG
caacaaacacttgagctgaa

SEQ ID NO: 40391 - DNA, 20 bp, Artificial Sequence
  Description of Artificial Sequence: Synthetic oligonucleotide
  Target: ATXN2; (+) strand; PAM type: NRG; PAM sequence: CAG
aaacacttgagctgaaaaga

SEQ ID NO: 40392 - DNA, 20 bp, Artificial Sequence
  Description of Artificial Sequence: Synthetic oligonucleotide
  Target: ATXN2; (+) strand; PAM type: NRG; PAM sequence: TAG
cacttgagctgaaaagacag

SEQ ID NO: 40393 - DNA, 20 bp, Artificial Sequence
  Description of Artificial Sequence: Synthetic oligonucleotide
  Target: ATXN2; (+) strand; PAM type: NRG; PAM sequence: AAG
tacttatgaaatatccttaa

SEQ ID NO: 40394 - DNA, 20 bp, Artificial Sequence
  Description of Artificial Sequence: Synthetic oligonucleotide
  Target: ATXN2; (+) strand; PAM type: NRG; PAM sequence: CAG
aaaagcaattcttaacataa

SEQ ID NO: 40395 - DNA, 20 bp, Artificial Sequence
  Description of Artificial Sequence: Synthetic oligonucleotide
  Target: ATXN2; (+) strand; PAM type: NRG; PAM sequence: GAG
ttatttatttatttattttt

SEQ ID NO: 40396 - DNA, 20 bp, Artificial Sequence
  Description of Artificial Sequence: Synthetic oligonucleotide
  Target: ATXN2; (+) strand; PAM type: NRG; PAM sequence: CAG
ttatttatttatttttgaga

SEQ ID NO: 40397 - DNA, 20 bp, Artificial Sequence
  Description of Artificial Sequence: Synthetic oligonucleotide
  Target: ATXN2; (+) strand; PAM type: NRG; PAM sequence: GAG
atttatttatttttgagaca

SEQ ID NO: 40398 - DNA, 20 bp, Artificial Sequence
  Description of Artificial Sequence: Synthetic oligonucleotide
  Target: ATXN2; (+) strand; PAM type: NRG; PAM sequence: CAG
cagagtctcgctctgtcacc

SEQ ID NO: 40399 - DNA, 20 bp, Artificial Sequence
  Description of Artificial Sequence: Synthetic oligonucleotide
  Target: ATXN2; (+) strand; PAM type: NRG; PAM sequence: AGG
agagtctcgctctgtcaccc

SEQ ID NO: 40400 - DNA, 20 bp, Artificial Sequence
  Description of Artificial Sequence: Synthetic oligonucleotide
  Target: ATXN2; (+) strand; PAM type: NRG; PAM sequence: TGG
tctcgctctgtcacccaggc

SEQ ID NO: 40401 - DNA, 20 bp, Artificial Sequence
  Description of Artificial Sequence: Synthetic oligonucleotide
  Target: ATXN2; (+) strand; PAM type: NRG; PAM sequence: GAG
tcgctctgtcacccaggctg

SEQ ID NO: 40402 - DNA, 20 bp, Artificial Sequence
  Description of Artificial Sequence: Synthetic oligonucleotide
  Target: ATXN2; (+) strand; PAM type: NRG; PAM sequence: CAG
ctgtcacccaggctggagtg

SEQ ID NO: 40403 - DNA, 20 bp, Artificial Sequence
  Description of Artificial Sequence: Synthetic oligonucleotide
  Target: ATXN2; (+) strand; PAM type: NRG; PAM sequence: TGG
tcacccaggctggagtgcag

SEQ ID NO: 40404 - DNA, 20 bp, Artificial Sequence
  Description of Artificial Sequence: Synthetic oligonucleotide
  Target: ATXN2; (+) strand; PAM type: NRG; PAM sequence: CGG
ggagtgcagtggcatgatct

SEQ ID NO: 40405 - DNA, 20 bp, Artificial Sequence
  Description of Artificial Sequence: Synthetic oligonucleotide
  Target: ATXN2; (+) strand; PAM type: NRG; PAM sequence: CAG
ggcatgatctcggctcactg

SEQ ID NO: 40406 - DNA, 20 bp, Artificial Sequence
  Description of Artificial Sequence: Synthetic oligonucleotide
  Target: ATXN2; (+) strand; PAM type: NRG; PAM sequence: TGG
tcactgcagcctccaccttc

SEQ ID NO: 40407 - DNA, 20 bp, Artificial Sequence
  Description of Artificial Sequence: Synthetic oligonucleotide
  Target: ATXN2; (+) strand; PAM type: NRG; PAM sequence: GGG
cactgcagcctccaccttct

SEQ ID NO: 40408 - DNA, 20 bp, Artificial Sequence
  Description of Artificial Sequence: Synthetic oligonucleotide
  Target: ATXN2; (+) strand; PAM type: NRG; PAM sequence: AAG
agcctccaccttctgggttc

SEQ ID NO: 40409 - DNA, 20 bp, Artificial Sequence
  Description of Artificial Sequence: Synthetic oligonucleotide
  Target: ATXN2; (+) strand; PAM type: NRG; PAM sequence: CAG
ttcaagcaattctcctgcct

SEQ ID NO: 40410 - DNA, 20 bp, Artificial Sequence
  Description of Artificial Sequence: Synthetic oligonucleotide
  Target: ATXN2; (+) strand; PAM type: NRG; PAM sequence: GAG
ttctcctgcctcagcctccc

SEQ ID NO: 40411 - DNA, 20 bp, Artificial Sequence
  Description of Artificial Sequence: Synthetic oligonucleotide
  Target: ATXN2; (+) strand; PAM type: NRG; PAM sequence: TAG
tcctgcctcagcctcccgag
